(19) United States
(12) Patent Application Publication
(10) Pub. No.: US 2009/0070897 A1
(43) Pub. Date: Mar. 12, 2009

(54) Genes and uses for plant improvement

(76) Inventors: Barry S. Goldman, St. Louis, MO (US); Bettina Darveaux, Hillsborough, NC (US); Jaclyn Cleveland, Morrisville, NC (US); Mark Scott Abad, Webster Groves, MO (US); Mahmood Sayed, Durham, NC (US)

Correspondence Address: MONSANTO COMPANY, 800 N. LINDBERGH BLVD., ATTENTION: GAIL P. WUELLNER, IP PARALEGAL, (E2NA), ST. LOUIS, MO, 63167, US

(21) Appl. No.: 11/330,903

(22) Filed: Jan. 12, 2006

(51) Int. Cl. C12N 15/29; A01H 5/00; C12N 15/31; A01G 1/00

(52) U.S. Cl. 800/281; 800/298; 800/300; 800/320.1; 800/314; 800/312; 800/320; 800/320.2; 800/320.3; 800/301; 800/289; 800/278; 47/58.1 R; 47/58.1 FV

(57) ABSTRACT

This invention provides transgenic plant cells with recombinant DNA for expression of proteins that are useful for imparting enhanced agronomic trait(s) to transgenic crop plants. This invention also provides transgenic plants and progeny seed comprising the transgenic plant cells where the plants are selected for having an enhanced trait selected from the group of traits consisting of enhanced water use efficiency, enhanced cold tolerance, increased yield, enhanced nitrogen use efficiency, enhanced seed protein and enhanced seed oil. Also disclosed are methods for manufacturing transgenic seed and plants with enhanced traits.

### CROSS REFERENCE TO RELATED APPLICATIONS

[0001] This application claims benefit under 35USC § 119(e) of U.S. provisional application Ser. No. 60/642,717, filed Jan. 12, 2005, herein incorporated by reference.

### INCORPORATION OF SEQUENCE LISTING

[0002] Two copies of the sequence listing (Copy 1 and Copy 2) and a computer readable form (CRF) of the sequence listing, all on CD-ROMs, each containing the file named 38-21(53629)B_seqListing.txt, which is 59,207,680 bytes (measured in MS-WINDOWS) and was created on Jan. 11, 2006, are herein incorporated by reference.

### INCORPORATION OF COMPUTER PROGRAM LISTING

[0003] Computer Program Listing folders hmmer-2.3.2 and 158pfamDir are contained on a compact disc and is hereby incorporated herein by reference in their entirety. Folder hmmer-2.3.2 contains the source code and other associated file for implementing the HMMer software for Pfam analysis. Folder 158pfamDir contains 158 Pfam Hidden Markov Models. Both folders were created on the disk on Jan. 11, 2006, having a total size of 16,027,648 bytes (measured in MS-WINDOWS).

### FIELD OF THE INVENTION

[0004] Disclosed herein are inventions in the field of plant genetics and developmental biology. More specifically, the present inventions provide transgenic seeds for crops, wherein the genome of said seed comprises recombinant DNA, the expression of which results in the production of transgenic plants that have improved trait(s).

### BACKGROUND OF THE INVENTION

[0005] Transgenic plants with improved traits such as improved yield, environmental stress tolerance, pest resistance, herbicide tolerance, modified seed compositions, and the like are desired by both farmers and consumers. Although considerable efforts in plant breeding have provided significant gains in desired traits, the ability to introduce specific DNA into plant genomes provides further opportunities for generation of plants with improved and/or unique traits. The ability to develop transgenic plants with improved traits depends in part on the identification of genes that are useful in recombinant DNA constructs for production of transformed plants with improved properties.

### SUMMARY OF THE INVENTION (NEW)

[0006] This invention provides recombinant DNA for expression of proteins that impart enhanced agronomic traits in transgenic plants. Recombinant DNA in this invention is provided in a construct comprising a promoter that is functional in plant cells and that is operably linked to DNA that encodes a protein having at least one amino acid domain in a sequence that exceeds the Pfam gathering cutoff for amino acid sequence alignment with a protein domain family identified by a Pfam name in the group of Pfam domain names identified in Table 17. In more specific embodiments of the invention plant cells are provided which express a protein having amino acid sequence with at least 90% identity to a consensus amino acid sequence in the group of consensus amino acid sequences consisting of the consensus amino acid sequence constructed for SEQ ID NO: 205 and homologs thereof listed in Table 2 through the consensus amino acid sequence constructed for SEQ ID NO:408 and homologs thereof listed in Table 2. Amino acid sequences of homologs are SEQ ID NO:409 through 19247. In even more specific embodiments of the invention the protein expressed in plant cells is a protein selected from the group of proteins identified in Table 1 by annotation to a related protein in Genbank and alternatively identified in Table 16 by identification of protein domain family. An exemplary plant cell of this invention has recombinant DNA that encodes a protein identified by the Pdam name “RNA_pol_L”.

[0007] Other aspects of the invention are specifically directed to transgenic plant cells comprising the recombinant DNA of the invention, transgenic plants comprising a plurality of such plant cells, progeny transgenic seed, embryo and transgenic pollen from such plants. Such plant cells are selected from a population of transgenic plants regenerated from plant cells transformed with recombinant DNA and that express the protein by screening transgenic plants in the population for an enhanced trait as compared to control plants that do not have said recombinant DNA, where the enhanced trait is enhanced water use efficiency, enhanced cold tolerance, enhanced heat tolerance, enhanced shade tolerance, enhanced tolerance to salt exposure, increased yield, enhanced nitrogen use efficiency, enhanced seed protein and enhanced seed oil. Thus, this invention provides transgenic plants and seeds with cells having recombinant DNA that impart at least one of those enhanced traits to the plants or seeds.

[0008] In yet another aspect of the invention the plant cells, plants, seeds, embryo and pollen further comprise DNA expressing a protein that provides tolerance from exposure to an herbicide applied at levels that are lethal to a wild type of said plant cell. Such tolerance is especially useful not only as an advantageous trait in such plants but is also useful in a selection step in the methods of the invention. In aspects of the invention the agent of such herbicide is a glyphosate, dicamba, or glufosinate compound.

[0009] Yet other aspects of the invention provide transgenic plants which are homozygous for the recombinant DNA and transgenic seed of the invention from corn, soybean, cotton, canola, alfalfa, wheat or rice plants. In other important embodiments for practice of various aspects of the invention in Argentina the recombinant DNA is provided in plant cells derived from corn lines that that are and maintain resistance to the Mal de Rio Cuarto virus or the Puccina sorghi fungus or both.

[0010] This invention also provides methods for manufacturing non-natural, transgenic seed that can be used to produce a crop of transgenic plants with an enhanced trait resulting from expression of stably-integrated, recombinant DNA for expressing a protein having at least one domain of amino acids in a sequence that exceeds the Pfam gathering cutoff for amino acid sequence alignment with a protein domain family identified by a Pfam name in the group of Pfam names identified in Table 17. More specifically the method comprises (a) screening a population of plants for an enhanced trait and recombinant DNA, where individual plants in the population can exhibit the trait at a level less than, essentially the same as or greater than the level that the trait is exhibited in control plants which do not express the recombinant DNA, (b) selecting from the population one or more plants that exhibit the trait at a level greater than the level that said trait is exhibited in control plants, (c) verifying that the recombinant DNA is stably integrated in said selected plants, (d) analyzing tissue of a selected plant to determine the production of a protein having the function of a protein encoded by nucleotides in a sequence of one of SEQ ID NO:1-204; and (e) collecting seed from a selected plant. In one aspect of the invention the plants in the population further comprise DNA expressing a protein that provides tolerance to exposure to an herbicide applied at levels that are lethal to wild type plant cells and the selecting is effected by treating the population with the herbicide, e.g. a glyphosate, dicamba, or glufosinate compound. In another aspect of the invention the plants are selected by identifying plants with the enhanced trait. The methods are especially useful for manufacturing corn, soybean, cotton, alfalfa, wheat or rice seed selected as having one of the enhanced traits described above.

[0011] Another aspect of the invention provides a method of producing hybrid corn seed comprising acquiring hybrid corn seed from a herbicide tolerant corn plant which also has stably-integrated, recombinant DNA comprising a promoter that is (a) functional in plant cells and (b) is operably linked to DNA that encodes a protein having at least one domain of amino acids in a sequence that exceeds the Pfam gathering cutoff for amino acid sequence alignment with a protein domain family identified by a Pfam name in the group of Pfam names identified in Table 17. The methods further comprise producing corn plants from said hybrid corn seed, where a fraction of the plants produced from said hybrid corn seed is homozygous for said recombinant DNA, a fraction of the plants produced from said hybrid corn seed is hemizygous for said recombinant DNA, and a fraction of the plants produced from said hybrid corn seed has none of said recombinant DNA; selecting corn plants which are homozygous and hemizygous for said recombinant DNA by treating with an herbicide; collecting seed from herbicide-treated-surviving corn plants and planting said seed to produce further progeny corn plants; repeating the selecting and collecting steps at least once to produce an inbred corn line; and crossing the inbred corn line with a second corn line to produce hybrid seed.

[0012] Another aspect of the invention provides a method of selecting a plant comprising plant cells of the invention by using an immunoreactive antibody to detect the presence of protein expressed by recombinant DNA in seed or plant tissue. Yet another aspect of the invention provides anti-counterfeit milled seed having, as an indication of origin, a plant cells of this invention with unique recombinant DNA.

[0013] Another aspect of the invention provides plant cells having recombinant DNA for suppressing the expression of DNA identified in Table 1 and Table 16. More specific aspects of the invention provide plant cells having recombinant DNA for suppressing the expression of a protein having the function in a plant of the protein with amino acid sequence of SEQ ID NO: 213, 215, 218, 222, 258, 269, 275, 334, 361, 368, and 407 or the corresponding Pfam identified in Table 16, i.e. Catalase, Bromdomain, FTCD_N, MatE, DPBB_{—}1, tRNA-synt_{—}2b, Sugar_tr and MFS_{—}1, DUF6 and DUF250, LEA_{—}4, MIP and DUF231, respectively. Such suppression can be effected by any of a number of ways known in the art, e.g. anti-sense suppression, sense co-suppression, RNAi or knockout.

[0014] Still other specific aspects of this invention relate to growing transgenic plants with enhanced water use efficiency or enhanced nitrogen use efficiency. For instance, this invention provides methods of growing a corn, cotton or soybean crop without irrigation water comprising planting seed having plant cells of the invention which are selected for enhanced water use efficiency. Alternatively methods comprise applying reduced irrigation water, e.g. providing up to 300 millimeters of ground water during the production of a corn crop. This invention also provides methods of growing a corn, cotton or soybean crop without added nitrogen fertilizer comprising planting seed having plant cells of the invention which are selected for enhanced nitrogen use efficiency.

[0015] The various aspects of this invention are especially useful for transgenic plant cells in seeds and transgenic plants having any of the above-described enhanced traits in crop plants such as corn (maize), soybean, cotton, canola (rape), wheat, sunflower, sorghum, alfalfa, barley, millet, rice, tobacco, fruit and vegetable crops, and turfgrass.

[0016] The invention also comprises recombinant DNA constructs of the DNA useful for imparting enhanced traits in plants having three cells of this invention.

### BRIEF DESCRIPTION OF THE DRAWINGS

[0017] FIG. 1 is an alignment of amino acid sequences.

[0018] FIGS. 2 and 3 are plasmid maps.

### DETAILED DESCRIPTION OF THE INVENTION

[0019] In the attached sequence listing:

[0020] SEQ ID NO: 1-204 are DNA sequence of “genes” used in the recombinant DNA imparting an enhanced trait in plant cells;

[0021] SEQ ID NO:205-408 are amino acid sequence of the cognate protein of those “genes”;

[0022] SEQ ID NO:409-19247 are amino acid sequence of homologous proteins;

[0023] SEQ ID NO: 19248 is a consensus amino acid sequence.

[0024] SEQ ID NO: 19249 is a DNA sequence of a plasmid vector useful for corn transformation; and

[0025] SEQ ID NO: 19250 is a DNA sequence of a plasmid vector useful for soybean transformation.

[0026] As used herein, “gene” means DNA including chromosomal DNA, plasmid DNA, cDNA, synthetic DNA, or other DNA that is transcribed to RNA, e.g. mRNA that encodes a protein or a protein fragment or anti-sense RNA or dsRNA for suppression of expression of a target gene and its cognate protein.

[0027] “Transgenic plant cell” means a plant cell produced as an original transformation event, cells in plants regenerated from the original transformation, cells in progeny plants and seeds, and cells in plants and seed from later generations or crosses of progeny plants and seeds, where such plant cells have recombinant DNA in their genome resulting from the original transformation.

[0028] “Recombinant DNA” means genetically engineered polynucleotide produced from endogenous and/or exogenous elements generally arranged as a transcription unit. Recombinant DNA may comprise DNA segments obtained from different sources, or DNA segments obtained from the same source, but which have been manipulated to join DNA segments which do not naturally exist in the joined form. A recombinant polynucleotide may exist outside of the cell, for example as a PCR fragment, or integrated into a genome, such as a plant genome.

[0029] “Trait” means to a physiological, morphological, biochemical, or physical characteristic of a plant or particular plant material or cell. In some instances, this characteristic is visible to the human eye, such as seed or plant size, or can be measured by biochemical techniques, such as detecting the protein, starch, or oil content of seed or leaves, or by observation of a metabolic or physiological process, e.g. by measuring uptake of carbon dioxide, or by the observation of the expression level of a gene or genes, e.g., by employing Northern analysis, RT-PCR, microarray gene expression assays, or reporter gene expression systems, or by agricultural observations such as stress tolerance, yield, or pathogen tolerance. An “enhanced trait” as used in describing the aspects of this invention includes enhanced water use efficiency, enhanced cold tolerance, enhanced heat tolerance, enhanced shade tolerance, enhanced tolerance to salt exposure, increased yield, enhanced nitrogen use efficiency, enhanced seed protein and enhanced seed oil.

[0030] As used herein, “control plant” is a plant without trait-improving recombinant DNA. A control plant is used to measure and compare trait improvement in a transgenic plant with such trait-improving recombinant DNA. A suitable control plant may be a non-transgenic plant of the parental line used to generate a transgenic plant herein. Alternatively, a control plant may be a transgenic plant that comprises an empty vector or marker gene, but does not contain the recombinant DNA that produces the trait improvement. A control plant may also be a negative segregant progeny of hemizygous transgenic plant. In certain demonstrations of trait improvement, the use of a limited number of control plants can cause a wide variation in the control dataset. In analyzing trait data during screening to discover DNA useful in the plant cells of this invention it is useful to minimize the effect of the variation within the control dataset, i.e. a “reference” which is a trimmed mean of all data from both transgenic and control plants grown under the same conditions and at the same developmental stage. The trimmed mean is calculated by eliminating a specific percentage, i.e. 20%, of the smallest and largest observation from the data set and then calculating the average of the remaining observation. Many transgenic plants comprising transgenic plant cells containing the recombinant DNA identified herein as imparting an enhanced trait will not exhibit an enhanced agronomic trait. The transgenic plants and seeds comprising the transgenic plant cells and having enhanced agronomic traits of this invention are identified by screening a population of transgenic plants and/or seeds for the members of the population having the enhanced trait. Screens for transgenic plant cells in crop plants are described more particularly in the examples below. In some cases, the trait enhancement can be measured quantitatively. For example, the trait enhancement can be at least a 2% desirable difference in an observed trait, at least a 5% desirable difference, at least about a 10% desirable difference, at least about a 20% desirable difference, at least about a 30% desirable difference, at least about a 50% desirable difference, at least about a 70% desirable difference, or at least about a 100% difference, or an even greater desirable difference. In other cases, the trait enhancement is measured qualitatively.

[0031] Many agronomic traits can affect “yield”, including without limitation, plant height, pod number, pod position on the plant, number of internodes, incidence of pod shatter, grain size, efficiency of nodulation and nitrogen fixation, efficiency of nutrient assimilation, resistance to biotic and abiotic stress, carbon assimilation, plant architecture, resistance to lodging, percent seed germination, seedling vigor, and juvenile traits. Other traits that can affect yield include, efficiency of germination (including germination in stressed conditions), growth rate (including growth rate in stressed conditions), ear number, seed number per ear, seed size, composition of seed (starch, oil, protein) and characteristics of seed fill. Also of interest is the generation of transgenic plants that demonstrate desirable phenotypic properties that may or may not confer an increase in overall plant yield. Such properties include enhanced plant morphology, plant physiology or improved components of the mature seed harvested from the transgenic plant.

[0032] “Stress condition” refers to the condition unfavorable for a plant, which adversely affect plant metabolism, growth and/or development. A plant under the stress condition typically shows reduced germination rate, retarded growth and development, reduced photosynthesis rate, and eventually leading to reduction in yield. Specifically, “water deficit stress” used herein preferably refers to the sub-optimal conditions for water and humidity needed for normal growth of natural plants. Relative water content (RWC) can be used as a physiological measure of plant water deficit. It measures the effect of osmotic adjustment in plant water status, when a plant is under stressed conditions. Conditions which may result in water deficit stress include heat, drought, high salinity and PEG induced osmotic stress. “Cold stress” used herein preferably refers to the exposure of a plant to a temperatures below (two or more degrees Celsius below) those normal for a particular species or particular strain of plant. “Low nitrogen availability stress” used herein preferably refers to a plant growth condition with 50% of the conventional nitrogen inputs. “Shade stress” used herein preferably refers to limited light availability that triggers the shade avoidance response in plant. Plants are subject to shade stress when localized at lower part of the canopy, or in close proximity of neighboring vegetation. Shade stress may become exacerbated when the planting density exceeds the average prevailing density for a particular plant species. The average prevailing densities per acre of a few examples of crop plants in the USA in the year 2000 were: wheat 1,000,000-1,500,000; rice 650,000-900,000; soybean 150,000-200,000, canola 260,000-350,000, sunflower 17,000-23,000 and cotton 28,000-55,000 plants per acre (Cheikh, et al., (2003) U.S. Patent Application No. 20030101479).

[0033] “Increased yield” of a transgenic plant of the present invention may be evidenced and measured in a number of ways, including test weight, seed number per plant, seed weight, seed number per unit area (i.e. seeds, or weight of seeds, per acre), bushels per acre, tons per acre, tons per acre, kilo per hectare. For example, maize yield may be measured as production of shelled corn kernels per unit of production area, e.g. in bushels per acre or metric tons per hectare, often reported on a moisture adjusted basis, e.g. at 15.5% moisture. Increased yield may result from improved utilization of key biochemical compounds, such as nitrogen, phosphorous and carbohydrate, or from improved tolerance to environmental stresses, such as cold, heat, drought, salt, and attack by pests or pathogens. Trait-enhancing recombinant DNA may also be used to provide transgenic plants having improved growth and development, and ultimately increased yield, as the result of modified expression of plant growth regulators or modification of cell cycle or photosynthesis pathways.

[0034] “Expression” means transcription of DNA to produce RNA. The resulting RNA may be without limitation mRNA encoding a protein, antisense RNA that is complementary to an mRNA encoding a protein, or an RNA transcript comprising a combination of sense and antisense gene regions, such as for use in RNAi technology. Expression as used herein may also refer to production of encoded protein from mRNA.

[0035] “Promoter” means a region of DNA that is upstream from the start of transcription and is involved in recognition and binding of RNA polymerase and other proteins to initiate transcription. A “plant promoter” is a promoter capable of initiating transcription in plant cells whether or not its origin is a plant cell. Exemplary plant promoters include, but are not limited to, those that are obtained from plants, plant viruses, and bacteria which comprise genes expressed in plant cells such Agrobacterium or Rhizobium. Examples of promoters under developmental control include promoters that preferentially initiate transcription in certain tissues, such as leaves, roots, or seeds. Such promoters are referred to as “tissue preferred”. Promoters which initiate transcription only in certain tissues are referred to as “tissue specific”. A “cell type” specific promoter primarily drives expression in certain cell types in one or more organs, for example, vascular cells in roots or leaves. An “inducible” or “repressible” promoter is a promoter which is under environmental control. Examples of environmental conditions that may effect transcription by inducible promoters include anaerobic conditions, or certain chemicals, or the presence of light. Tissue specific, tissue preferred, cell type specific, and inducible promoters constitute the class of “non-constitutive” promoters. A “constitutive” promoter is a promoter which is active under most conditions. As used herein, “antisense orientation” includes reference to a polynucleotide sequence that is operably linked to a promoter in an orientation where the antisense strand is transcribed. The antisense strand is sufficiently complementary to an endogenous transcription product such that translation of the endogenous transcription product is often inhibited. “Operably linked” refers to the association of two or more nucleic acid fragments on a single nucleic acid fragment so that the function of one is affected by the other. For example, a promoter is operably linked with a coding sequence when it is capable of affecting the expression of that coding sequence (i.e., that the coding sequence is under the transcriptional control of the promoter). Coding sequences can be operably linked to regulatory sequences in sense or antisense orientation.

[0036] “Consensus amino acid sequence” means an artificial, amino acid sequence of conserved parts of the proteins encoded by homologous genes, e.g. as determined by a CLUSTALW alignment of amino acid sequence of homolog proteins or a group of proteins having identified by the gathering cutoff for a Pfam protein domain family.

[0037] Homologous genes are genes which encode homologous proteins with the same or similar biological function or having the same Pfam protein domain family. Homologous genes may be generated by the event of speciation (see ortholog) or by the event of genetic duplication (see paralog). “Orthologs” refer to a set of homologous genes in different species that evolved from a common ancestral gene by specification. Normally, orthologs retain the same function in the course of evolution; and “paralogs” refer to a set of homologous genes in the same species that have diverged from each other as a consequence of genetic duplication. Thus, homologous genes can be from the same or a different organism. As used herein, “homolog” means a protein that performs the same biological function as a second protein including those identified by sequence identity search.

[0038] “Percent identity” refers to the extent to which two optimally aligned DNA or protein segments are invariant throughout a window of alignment of components, e.g. nucleotide sequence or amino acid sequence. An “identity fraction” for aligned segments of a test sequence and a reference sequence is the number of identical components which are shared by sequences of the two aligned segments divided by the total number of sequence components in the reference segment over a window of alignment which is the smaller of the full test sequence or the full reference sequence. “Percent identity” (“% identity”) is the identity fraction times 100. “% identity to a consensus amino acid sequence” is 100 times the identity fraction in a window of alignment of an amino acid sequence of a test protein optimally aligned to consensus amino acid sequence of this invention.

[0039] “Arabidopsis” means plants of Arabidopsis thaliana.

[0040] As used herein “Pfam” refers to a large collection of multiple sequence alignments and hidden Markov models covering many common protein families, e.g. Pfam version 18.0 (August 2005) contains alignments and models for 7973 protein families and is based on the Swissprot 47.0 and SP-TrEMBL 30.0 protein sequence databases. See S. R. Eddy, “Profile Hidden Markov Models”, Bioinformatics 14:755-763, 1998. Pfam is currently maintained and updated by a Pfam Consortium. The alignments represent some evolutionary conserved structure that has implications for the protein's function. Profile hidden Markov models (profile HMMs) built from the Pfam alignments are useful for automatically recognizing that a new protein belongs to an existing protein family even if the homology by alignment appears to be low. Once one DNA is identified as encoding a protein which imparts an enhanced trait when expressed in transgenic plants, other DNA encoding proteins in the same protein family are identified by querying the amino acid sequence of protein encoded by candidate DNA against the Hidden Markov Model which characterizes the Pfam domain using HMMER software, a current version of which is provided in the appended computer listing. Candidate proteins meeting the gathering cutoff for the alignment of a particular Pfam are in the protein family and have cognate DNA that is useful in constructing recombinant DNA for the use in the plant cells of this invention. Hidden Markov Model databases for use with HMMER software in identifying DNA expressing protein in a common Pfam for recombinant DNA in the plant cells of this invention are also included in the appended computer listing. The HMMER software and Pfam databases are version 18.0 and were used to identify known domains in the proteins corresponding to amino acid sequence of SEQ ID NO:205 through SEQ ID NO:408. All DNA encoding proteins that have scores higher than the gathering cutoff disclosed in Table 27 by Pfam analysis disclosed herein can be used in recombinant DNA of the plant cells of this invention, e.g. for selecting transgenic plants having enhanced agronomic traits. The relevant Pfams for use in this invention, as more specifically disclosed below, are 2-oxoacid_dh, ADH_N, ADH_zinc_N, AP2, AUX_IAA, Aa_trans, Abhydrolase_{—}1, Acyl_transf_{—}1, Aldedh, Aldo_ket_red, Alpha-amylase, Aminotran_{—}1_{—}2, Aminotran_{—}3, Ammonium_transp, Arm, Asn_synthase, BAG, BSD, Beta_elim_lyase, Biotin_lipoyl, Brix, Bromodomain, C1_{—}4, CTP_transf_{—}2, Catalase, CcmH, Chal_sti_synt_C, Cyclin_C, Cyclin_N, Cys_Met_Meta_PP, DAO, DIM1, DPBB_{—}1, DRMBL, DUF167, DUF231, DUF250, DUF6, DUF783, DUF962, E2F_TDP, E3_binding, EBP, Enolase_C, Enolase_N, F420_oxidored, FAD_binding_{—}2, FA_desaturase, FKBP_C, FTCD_N, Fe_bilin_red, Fer4, GAF, GATase_{—}2, GIDA, GSHPx, Gpi16, HGTP_anticodon, HI0933_like, HLH, HMG_CoA_synt, HWE_HK, Hamlp_like, HhH-GPD, Homeobox, Hpt, Iso_dh, K-box, LEA_{—}4, LRRNT_{—}2, LRR_{—}1, Ldh_{—}1_C, Ldh_{—}1_N, Lectin_legA, Lectin_legB, Lipase_GDSL, MFS_{—}1, MIP, MatE, Metalloenzyme, Methyltransf_{—}11, Methyltransf_{—}12, Molybdop_Fe4S4, Molybdopterin, Molydop_binding, Mov34, MtN3_slv, Myb_DNA-binding, NAD_Gly3P_dh_N, NAD_binding_{—}2, NIR_SIR, NIR_SIR_ferr, NPH3, NTP_transferase, Nuc_sug_transp, PA, PAR1, PFK, PGI, PGK, PGM_PMM_{—}1, PGM_PMM_II, PGM_PMM_III, PGM_PMM_IV, PP2C, PTR2, Peptidase_C26, Phi_{—}1, Phytochrome, Pkinase, Pkinase_Tyr, Pollen_allerg_{—}1, Pribosyltran, Proteasome, Pyr_redox, Pyr_redox_{—}2, Pyr_redox_dim, RNA_pol_L, RNA_pol_Rpb6, RRM_{—}1, RRN3, Radical_SAM, Ras, Response_reg, Rhodanese, Ribosomal_S8e, Rieske, SAC3_GANP, SBDS, SET, SRF-TF, SURF5, Skp1, Skp1_POZ, Ssl1, Sterol_desat, Sugar_tr, TCP, ThiF, Transaldolase, UQ_con, Ubie_methyltran, WD40, WRKY, adh_short, bZIP_{—}1, bZIP_{—}2, cNMP_binding, iPGM_N, p450, tRNA-synt_{—}2b, ubiquitin, zf-A20, zf-AN1, zf-B_box, zf-C₂H₂, zf-C3HC4, zf-CCCH, the databases for which are included in the appended computer program listing.

### Recombinant DNA Constructs

[0041] This invention provides recombinant DNA constructs comprising one or more of the genes disclosed herein for imparting one or more enhanced traits to transgenic plants and seeds. Such constructs also typically comprise a promoter operatively linked to said polynucleotide to provide for expression in a target plant. Other construct components may include additional regulatory elements, such as 5′ or 3′ untranslated regions (such as polyadenylation sites), intron regions, and transit or signal peptides. Such recombinant DNA constructs can be assembled using methods known to those of ordinary skill in the art.

[0042] Recombinant constructs prepared in accordance with this invention generally includes a 3′ untranslated DNA region (UTR) that typically contains a polyadenylation sequence following the polynucleotide coding region. Examples of useful 3′ UTRs include those from the nopaline synthase gene of Agrobacterium tumefaciens (nos), a gene encoding the small subunit of a ribulose-1,5-bisphosphate carboxylase-oxygenase (rbcS), and the T7 transcript of Agrobacterium tumefaciens and those 3′ UTR elements disclosed in the following examples. Constructs and vectors may also include a transit peptide for targeting of a gene target to a plant organelle, particularly to a chloroplast, leucoplast or other plastid organelle. For descriptions of the use of chloroplast transit peptides, see U.S. Pat. No. 5,188,642 and U.S. Pat. No. 5,728,925, incorporated herein by reference.

[0043] Table 1 provides a list of genes that can be used in recombinant DNA for imparting an enhanced trait in the transgenic plant cells, plants and seeds of this invention. In screens of recombinant DNA expressed in a model plant the recombinant DNA was shown to be associated with enhanced traits. The cognate protein was used to identify homologs for constructing a consensus amino acid sequence for each cognate protein and for identifying the characterizing Pfams. With reference to Table 1:

[0044] “NUC SEQ ID” refers to a SEQ ID NO. for particular DNA sequence in the Sequence Listing;

[0045] “PEP SEQ ID” refers to a SEQ ID NO. in the Sequence Listing for the amino acid sequence of a protein cognate to a particular DNA;

[0046] “construct_id” refers to an arbitrary number used to identify a particular recombinant DNA construct comprising the particular DNA;

[0047] “gene” refers to an arbitrary name used to identify the particular DNA;

[0048] “orientation” refers to the orientation of the particular DNA in a recombinant DNA construct relative to the promoter; and

[0049] “species name” refers to the organism from which the particular DNA was derived.

TABLE 1

| NUC | PEP | | | | |
|---|---|---|---|---|---|
| SEQ | SEQ | | | | |
| ID | ID | construct_id | Gene | orientation | Species Name |
| 1 | 205 | 12360 | CGPG1018 | SENSE | Arabidopsis thaliana |
| 2 | 206 | 12030 | CGPG1063 | SENSE | Arabidopsis thaliana |
| 3 | 207 | 15210 | CGPG1124 | SENSE | Arabidopsis thaliana |
| 4 | 208 | 17465 | CGPG1178 | SENSE | Arabidopsis thaliana |
| 5 | 209 | 13222 | CGPG1259 | SENSE | Arabidopsis thaliana |
| 6 | 210 | 12919 | CGPG1290 | SENSE | Arabidopsis thaliana |
| 7 | 211 | 12927 | CGPG1300 | SENSE | Arabidopsis thaliana |
| 8 | 212 | 14841 | CGPG1572 | SENSE | Arabidopsis thaliana |
| 9 | 213 | 13478 | CGPG1616 | ANTI-SENSE | Arabidopsis thaliana |
| 10 | 214 | 17309 | CGPG1840 | SENSE | Arabidopsis thaliana |
| 11 | 215 | 19116 | CGPG1861 | ANTI-SENSE | Arabidopsis thaliana |
| 12 | 216 | 14837 | CGPG1882 | SENSE | Arabidopsis thaliana |
| 13 | 217 | 71253 | CGPG195 | SENSE | Arabidopsis thaliana |
| 14 | 218 | 16004 | CGPG2061 | ANTI-SENSE | Arabidopsis thaliana |
| 15 | 219 | 72712 | CGPG2256 | SENSE | Arabidopsis thaliana |
| 16 | 220 | 71546 | CGPG2305 | SENSE | Arabidopsis thaliana |
| 17 | 221 | 70109 | CGPG2368 | SENSE | Saccharomyces cerevisiae |
| 18 | 222 | 10335 | CGPG246 | ANTI-SENSE | Arabidopsis thaliana |
| 19 | 223 | 17919 | CGPG2780 | SENSE | Arabidopsis thaliana |
| 20 | 224 | 71148 | CGPG3225 | SENSE | Arabidopsis thaliana |
| 21 | 225 | 19647 | CGPG3229 | SENSE | Arabidopsis thaliana |
| 22 | 226 | 18844 | CGPG3371 | SENSE | Arabidopsis thaliana |
| 23 | 227 | 19525 | CGPG3548 | SENSE | Arabidopsis thaliana |
| 24 | 228 | 19617 | CGPG3573 | SENSE | Arabidopsis thaliana |
| 25 | 229 | 19750 | CGPG3913 | SENSE | Saccharomyces cerevisiae |
| 26 | 230 | 19964 | CGPG3922 | SENSE | Glycine max |
| 27 | 231 | 19814 | CGPG3934 | SENSE | Glycine max |
| 28 | 232 | 19720 | CGPG3954 | SENSE | Glycine max |
| 29 | 233 | 19845 | CGPG3956 | SENSE | Glycine max |
| 30 | 234 | 71072 | CGPG3963 | SENSE | Glycine max |
| 31 | 235 | 19949 | CGPG4010 | SENSE | Glycine max |
| 32 | 236 | 19902 | CGPG4016 | SENSE | Glycine max |
| 33 | 237 | 19981 | CGPG4019 | SENSE | Glycine max |
| 34 | 238 | 19757 | CGPG4037 | SENSE | Glycine max |
| 35 | 239 | 19850 | CGPG4056 | SENSE | Glycine max |
| 36 | 240 | 19942 | CGPG4115 | SENSE | Glycine max |
| 37 | 241 | 19787 | CGPG4124 | SENSE | Glycine max |
| 38 | 242 | 19801 | CGPG4137 | SENSE | Glycine max |
| 39 | 243 | 19705 | CGPG4156 | SENSE | Glycine max |
| 40 | 244 | 19737 | CGPG4175 | SENSE | Glycine max |
| 41 | 245 | 19812 | CGPG4184 | SENSE | Glycine max |
| 42 | 246 | 71556 | CGPG4298 | SENSE | Arabidopsis thaliana |
| 43 | 247 | 71330 | CGPG4457 | SENSE | Arabidopsis thaliana |
| 44 | 248 | 71332 | CGPG4460 | SENSE | Arabidopsis thaliana |
| 45 | 249 | 71571 | CGPG4493 | SENSE | Arabidopsis thaliana |
| 46 | 250 | 70677 | CGPG4558 | SENSE | Arabidopsis thaliana |
| 47 | 251 | 71689 | CGPG4661 | SENSE | Glycine max |
| 48 | 252 | 73685 | CGPG4807 | SENSE | Arabidopsis thaliana |
| 49 | 253 | 72636 | CGPG4858 | SENSE | Arabidopsis thaliana |
| 50 | 254 | 73651 | CGPG4869 | SENSE | Arabidopsis thaliana |
| 51 | 255 | 73342 | CGPG4876 | SENSE | Arabidopsis thaliana |
| 52 | 256 | 73271 | CGPG5011 | SENSE | Arabidopsis thaliana |
| 53 | 257 | 73282 | CGPG5071 | SENSE | Arabidopsis thaliana |
| 54 | 258 | 10903 | CGPG514 | ANTI-SENSE | Arabidopsis thaliana |
| 55 | 259 | 73913 | CGPG5337 | SENSE | Glycine max |
| 56 | 260 | 74305 | CGPG5400 | SENSE | Arabidopsis thaliana |
| 57 | 261 | 74306 | CGPG5402 | SENSE | Arabidopsis thaliana |
| 58 | 262 | 73769 | CGPG5430 | SENSE | Arabidopsis thaliana |
| 59 | 263 | 74237 | CGPG5448 | SENSE | Arabidopsis thaliana |
| 60 | 264 | 74244 | CGPG5466 | SENSE | Arabidopsis thaliana |
| 61 | 265 | 74256 | CGPG5491 | SENSE | Arabidopsis thaliana |
| 62 | 266 | 72714 | CGPG5513 | SENSE | Saccharomyces cerevisiae |
| 63 | 267 | 16014 | CGPG552 | SENSE | Arabidopsis thaliana |
| 64 | 268 | 72751 | CGPG5524 | SENSE | Saccharomyces cerevisiae |
| 65 | 269 | 10814 | CGPG554 | ANTI-SENSE | Arabidopsis thaliana |
| 66 | 270 | 72743 | CGPG5555 | SENSE | Saccharomyces cerevisiae |
| 67 | 271 | 72721 | CGPG5569 | SENSE | Saccharomyces cerevisiae |
| 68 | 272 | 72959 | CGPG5608 | SENSE | Glycine max |
| 69 | 273 | 72984 | CGPG5620 | SENSE | Arabidopsis thaliana |
| 70 | 274 | 73061 | CGPG5675 | SENSE | Rhodopseudomonas palustris |
| 71 | 275 | 10180 | CGPG57 | ANTI-SENSE | Arabidopsis thaliana |
| 72 | 276 | 73029 | CGPG5737 | SENSE | Saccharomyces cerevisiae |
| 73 | 277 | 11145 | CGPG574 | SENSE | Arabidopsis thaliana |
| 74 | 278 | 72920 | CGPG5763 | SENSE | Saccharomyces cerevisiae |
| 75 | 279 | 72957 | CGPG5788 | SENSE | Saccharomyces cerevisiae |
| 76 | 280 | 73044 | CGPG5808 | SENSE | Glycine max |
| 77 | 281 | 74323 | CGPG5873 | SENSE | Arabidopsis thaliana |
| 78 | 282 | 74327 | CGPG5901 | SENSE | Arabidopsis thaliana |
| 79 | 283 | 74329 | CGPG5903 | SENSE | Arabidopsis thaliana |
| 80 | 284 | 74340 | CGPG5907 | SENSE | Arabidopsis thaliana |
| 81 | 285 | 74341 | CGPG5911 | SENSE | Arabidopsis thaliana |
| 82 | 286 | 74345 | CGPG5932 | SENSE | Arabidopsis thaliana |
| 83 | 287 | 74616 | CGPG6017 | SENSE | Arabidopsis thaliana |
| 84 | 288 | 74604 | CGPG6019 | SENSE | Arabidopsis thaliana |
| 85 | 289 | 74608 | CGPG6043 | SENSE | Arabidopsis thaliana |
| 86 | 290 | 74609 | CGPG6044 | SENSE | Arabidopsis thaliana |
| 87 | 291 | 74366 | CGPG6073 | SENSE | Arabidopsis thaliana |
| 88 | 292 | 74383 | CGPG6098 | SENSE | Arabidopsis thaliana |
| 89 | 293 | 74374 | CGPG6100 | SENSE | Arabidopsis thaliana |
| 90 | 294 | 74618 | CGPG6117 | SENSE | Arabidopsis thaliana |
| 91 | 295 | 74619 | CGPG6118 | SENSE | Arabidopsis thaliana |
| 92 | 296 | 74622 | CGPG6124 | SENSE | Arabidopsis thaliana |
| 93 | 297 | 74628 | CGPG6131 | SENSE | Arabidopsis thaliana |
| 94 | 298 | 74631 | CGPG6139 | SENSE | Arabidopsis thaliana |
| 95 | 299 | 74669 | CGPG6140 | SENSE | Arabidopsis thaliana |
| 96 | 300 | 74670 | CGPG6145 | SENSE | Arabidopsis thaliana |
| 97 | 301 | 74647 | CGPG6163 | SENSE | Arabidopsis thaliana |
| 98 | 302 | 74385 | CGPG6310 | SENSE | Arabidopsis thaliana |
| 99 | 303 | 74386 | CGPG6330 | SENSE | Arabidopsis thaliana |
| 100 | 304 | 74387 | CGPG6331 | SENSE | Arabidopsis thaliana |
| 101 | 305 | 74685 | CGPG6362 | SENSE | Arabidopsis thaliana |
| 102 | 306 | 73487 | CGPG6386 | SENSE | Sinorhizobium meliloti |
| 103 | 307 | 73476 | CGPG6393 | SENSE | Bacillus subtilis subsp. subtilis |
| | | | | | str. 168 |
| 104 | 308 | 73465 | CGPG6400 | SENSE | Escherichia coli K12 |
| 105 | 309 | 73418 | CGPG6404 | SENSE | Nostoc punctiforme PCC |
| | | | | | 73102 |
| 106 | 310 | 73480 | CGPG6425 | SENSE | Sinorhizobium meliloti |
| 107 | 311 | 73482 | CGPG6438 | SENSE | Agrobacterium tumefaciens |
| | | | | | str. C58 |
| 108 | 312 | 73513 | CGPG6457 | SENSE | Bacillus subtilis subsp. subtilis |
| | | | | | str. 168 |
| 109 | 313 | 73550 | CGPG6468 | SENSE | Bacillus halodurans |
| 110 | 314 | 73527 | CGPG6474 | SENSE | Desulfitobacterium hafniense |
| 111 | 315 | 73516 | CGPG6481 | SENSE | Xenorhabdus nematophila |
| 112 | 316 | 73530 | CGPG6498 | SENSE | Escherichia coli K12 |
| 113 | 317 | 73534 | CGPG6527 | SENSE | Bacillus subtilis subsp. subtilis |
| | | | | | str. 168 |
| 114 | 318 | 74125 | CGPG6544 | SENSE | Pseudomonas fluorescens PfO-1 |
| 115 | 319 | 74161 | CGPG6547 | SENSE | Escherichia coli K12 |
| 116 | 320 | 74126 | CGPG6552 | SENSE | Escherichia coli K12 |
| 117 | 321 | 74115 | CGPG6559 | SENSE | Escherichia coli K12 |
| 118 | 322 | 74127 | CGPG6560 | SENSE | Escherichia coli K12 |
| 119 | 323 | 74128 | CGPG6568 | SENSE | Escherichia coli K12 |
| 120 | 324 | 74165 | CGPG6579 | SENSE | Escherichia coli K12 |
| 121 | 325 | 74106 | CGPG6582 | SENSE | Pseudomonas fluorescens PfO-1 |
| 122 | 326 | 74130 | CGPG6584 | SENSE | Pseudomonas syringae pv. |
| | | | | | tomato str. DC3000 |
| 123 | 327 | 74132 | CGPG6600 | SENSE | Xenorhabdus nematophila |
| 124 | 328 | 74144 | CGPG6601 | SENSE | Xenorhabdus nematophila |
| 125 | 329 | 74402 | CGPG6663 | SENSE | Synechocystis sp. |
| 126 | 330 | 74476 | CGPG6685 | SENSE | Bacillus halodurans |
| 127 | 331 | 74417 | CGPG6688 | SENSE | Bacillus halodurans |
| 128 | 332 | 74453 | CGPG6691 | SENSE | Bacillus subtilis subsp. subtilis |
| | | | | | str. 168 |
| 129 | 333 | 74418 | CGPG6696 | SENSE | Escherichia coli K12 |
| 130 | 334 | 10150 | CGPG67 | ANTI-SENSE | Arabidopsis thaliana |
| 131 | 335 | 74503 | CGPG6767 | SENSE | Escherichia coli K12 |
| 132 | 336 | 74504 | CGPG6775 | SENSE | Agrobacterium tumefaciens |
| 133 | 337 | 74528 | CGPG6777 | SENSE | Bacillus halodurans |
| 134 | 338 | 74588 | CGPG6782 | SENSE | Escherichia coli K12 |
| 135 | 339 | 74541 | CGPG6786 | SENSE | Escherichia coli K12 |
| 136 | 340 | 74553 | CGPG6787 | SENSE | Nostoc punctiforme PCC |
| | | | | | 73102 |
| 137 | 341 | 74554 | CGPG6795 | SENSE | Pseudomonas syringae pv. |
| | | | | | tomato str. DC3000 |
| 138 | 342 | 74578 | CGPG6797 | SENSE | Synechocystis sp. PCC 6803 |
| 139 | 343 | 74590 | CGPG6798 | SENSE | Xenorhabdus nematophila |
| 140 | 344 | 75834 | CGPG6820 | SENSE | Arabidopsis thaliana |
| 141 | 345 | 75835 | CGPG6822 | SENSE | Arabidopsis thaliana |
| 142 | 346 | 18020 | CGPG684 | SENSE | Arabidopsis thaliana |
| 143 | 347 | 75850 | CGPG6893 | SENSE | Arabidopsis thaliana |
| 144 | 348 | 75861 | CGPG6937 | SENSE | Arabidopsis thaliana |
| 145 | 349 | 75875 | CGPG6992 | SENSE | Arabidopsis thaliana |
| 146 | 350 | 74548 | CGPG712 | SENSE | Arabidopsis thaliana |
| 147 | 351 | 74880 | CGPG7357 | SENSE | Glycine max |
| 148 | 352 | 74903 | CGPG7407 | SENSE | Zea mays |
| 149 | 353 | 74915 | CGPG7408 | SENSE | Zea mays |
| 150 | 354 | 74927 | CGPG7409 | SENSE | Zea mays |
| 151 | 355 | 74951 | CGPG7411 | SENSE | Glycine max |
| 152 | 356 | 74940 | CGPG7418 | SENSE | Zea mays |
| 153 | 357 | 74977 | CGPG7429 | SENSE | Synechocystis sp. |
| 154 | 358 | 74954 | CGPG7435 | SENSE | Xanthomonas campestris |
| 155 | 359 | 74907 | CGPG7439 | SENSE | Synechocystis sp. |
| 156 | 360 | 74919 | CGPG7440 | SENSE | Synechocystis sp. |
| 157 | 361 | 11735 | CGPG745 | ANTI-SENSE | Arabidopsis thaliana |
| 158 | 362 | 74980 | CGPG7453 | SENSE | Synechocystis sp. |
| 159 | 363 | 74993 | CGPG7462 | SENSE | Bacillus halodurans |
| 160 | 364 | 75337 | CGPG7469 | SENSE | Saccharomyces cerevisiae |
| 161 | 365 | 75339 | CGPG7485 | SENSE | Zea mays |
| 162 | 366 | 75316 | CGPG7491 | SENSE | Glycine max |
| 163 | 367 | 75352 | CGPG7494 | SENSE | Zea mays |
| 164 | 368 | 12189 | CGPG752 | ANTI-SENSE | Arabidopsis thaliana |
| 165 | 369 | 75321 | CGPG7531 | SENSE | Zea mays |
| 166 | 370 | 75358 | CGPG7542 | SENSE | Zea mays |
| 167 | 371 | 75312 | CGPG7554 | SENSE | Zea mays |
| 168 | 372 | 75463 | CGPG7583 | SENSE | Zea mays |
| 169 | 373 | 75475 | CGPG7584 | SENSE | Zea mays |
| 170 | 374 | 75440 | CGPG7589 | SENSE | Glycine max |
| 171 | 375 | 75488 | CGPG7593 | SENSE | Glycine max |
| 172 | 376 | 75418 | CGPG7603 | SENSE | Glycine max |
| 173 | 377 | 75419 | CGPG7611 | SENSE | Zea mays |
| 174 | 378 | 75431 | CGPG7612 | SENSE | Glycine max |
| 175 | 379 | 75455 | CGPG7614 | SENSE | Glycine max |
| 176 | 380 | 75491 | CGPG7617 | SENSE | Zea mays |
| 177 | 381 | 75456 | CGPG7622 | SENSE | Glycine max |
| 178 | 382 | 75480 | CGPG7624 | SENSE | Glycine max |
| 179 | 383 | 75492 | CGPG7625 | SENSE | Zea mays |
| 180 | 384 | 75409 | CGPG7626 | SENSE | Zea mays |
| 181 | 385 | 75424 | CGPG7651 | SENSE | Zea mays |
| 182 | 386 | 75550 | CGPG7676 | SENSE | Glycine max |
| 183 | 387 | 75575 | CGPG7686 | SENSE | Glycine max |
| 184 | 388 | 75528 | CGPG7690 | SENSE | Glycine max |
| 185 | 389 | 75564 | CGPG7693 | SENSE | Glycine max |
| 186 | 390 | 75553 | CGPG7700 | SENSE | Glycine max |
| 187 | 391 | 75506 | CGPG7704 | SENSE | Glycine max |
| 188 | 392 | 75554 | CGPG7708 | SENSE | Glycine max |
| 189 | 393 | 75590 | CGPG7711 | SENSE | Glycine max |
| 190 | 394 | 75543 | CGPG7715 | SENSE | Glycine max |
| 191 | 395 | 75567 | CGPG7717 | SENSE | Glycine max |
| 192 | 396 | 75544 | CGPG7723 | SENSE | Glycine max |
| 193 | 397 | 75556 | CGPG7724 | SENSE | Glycine max |
| 194 | 398 | 75546 | CGPG7739 | SENSE | Glycine max |
| 195 | 399 | 75558 | CGPG7740 | SENSE | Glycine max |
| 196 | 400 | 75571 | CGPG7749 | SENSE | Glycine max |
| 197 | 401 | 75583 | CGPG7750 | SENSE | Glycine max |
| 198 | 402 | 75536 | CGPG7754 | SENSE | Zea mays |
| 199 | 403 | 75991 | CGPG8266 | SENSE | Chloroflexus aurantiacus |
| 200 | 404 | 75909 | CGPG8275 | SENSE | Chloroflexus aurantiacus |
| 201 | 405 | 12824 | CGPG885 | SENSE | Arabidopsis thaliana |
| 202 | 406 | 18026 | CGPG894 | SENSE | Arabidopsis thaliana |
| 203 | 407 | 11810 | CGPG899 | ANTI-SENSE | Arabidopsis thaliana |
| 204 | 408 | 72418 | CGPG968 | SENSE | Arabidopsis thaliana |

### Recombinant DNA

[0050] Exemplary DNA for use in the present invention to improve traits in plants are provided herein as SEQ ID NO:1 through SEQ ID NO:204, as well as the homologs of such DNA molecules. A subset of the exemplary DNA includes fragments of the disclosed full polynucleotides consisting of oligonucleotides of at least 15, preferably at least 16 or 17, more preferably at least 18 or 19, and even more preferably at least 20 or more, consecutive nucleotides. Such oligonucleotides are fragments of the larger molecules having a sequence selected from the group consisting of SEQ ID NO:1 through SEQ ID NO:204, and find use, for example as probes and primers for detection of the polynucleotides of the present invention.

[0051] Also of interest in the present invention are variants of the DNA provided herein. Such variants may be naturally occurring, including DNA from homologous genes from the same or a different species, or may be non-natural variants, for example DNA synthesized using chemical synthesis methods, or generated using recombinant DNA techniques. Degeneracy of the genetic code provides the possibility to substitute at least one base of the protein encoding sequence of a gene with a different base without causing the amino acid sequence of the polypeptide produced from the gene to be changed. Hence, a DNA useful in the present invention may have any base sequence that has been changed from the sequences provided herein by substitution in accordance with degeneracy of the genetic code.

[0052] Homologs of the genes providing DNA of demonstrated as useful in improving traits in model plants disclosed herein will generally demonstrate significant identity with the DNA provided herein. DNA is substantially identical to a reference DNA if, when the sequences of the polynucleotides are optimally aligned there is about 60% nucleotide equivalence; more preferably 70%; more preferably 80% equivalence; more preferably 85% equivalence; more preferably 90%; more preferably 95%; and/or more preferably 98% or 99% equivalence over a comparison window. A comparison window is preferably at least 50-100 nucleotides, and more preferably is the entire length of the polynucleotide provided herein. Optimal alignment of sequences for aligning a comparison window may be conducted by algorithms; preferably by computerized implementations of these algorithms (for example, the Wisconsin Genetics Software Package Release 7.0-10.0, Genetics Computer Group, 575 Science Dr., Madison, Wis.). The reference polynucleotide may be a full-length molecule or a portion of a longer molecule. Preferentially, the window of comparison for determining polynucleotide identity of protein encoding sequences is the entire coding region.

[0053] Proteins useful for imparting improved traits are entire proteins or at least a sufficient portion of the entire protein to impart the relevant biological activity of the protein. The term “protein” also includes molecules consisting of one or more polypeptide chains. Thus, a protein useful in the present invention may constitute an entire protein having the desired biological activity, or may constitute a portion of an oligomeric protein having multiple polypeptide chains. Proteins useful for generation of transgenic plants having improved traits include the proteins with an amino acid sequence provided herein as SEQ ID NO: 205 through SEQ ID NO: 408, as well as homologs of such proteins.

[0054] Homologs of the proteins useful in the present invention may be identified by comparison of the amino acid sequence of the protein to amino acid sequences of proteins from the same or different plant sources, e.g. manually or by using known homology-based search algorithms such as those commonly known and referred to as BLAST, FASTA, and Smith-Waterman. As used herein, a homolog is a protein from the same or a different organism that performs the same biological function as the polypeptide to which it is compared. An orthologous relation between two organisms is not necessarily manifest as a one-to-one correspondence between two genes, because a gene can be duplicated or deleted after organism phylogenetic separation, such as speciation. For a given protein, there may be no ortholog or more than one ortholog. Other complicating factors include alternatively spliced transcripts from the same gene, limited gene identification, redundant copies of the same gene with different sequence lengths or corrected sequence. A local sequence alignment program, e.g. BLAST, can be used to search a database of sequences to find similar sequences, and the summary Expectation value (E-value) used to measure the sequence base similarity. As a protein hit with the best E-value for a particular organism may not necessarily be an ortholog or the only ortholog, a reciprocal BLAST search is used in the present invention to filter hit sequences with significant E-values for ortholog identification. The reciprocal BLAST entails search of the significant hits against a database of amino acid sequences from the base organism that are similar to the sequence of the query protein. A hit is a likely ortholog, when the reciprocal BLAST's best hit is the query protein itself or a protein encoded by a duplicated gene after speciation. Thus, homolog is used herein to described proteins that are assumed to have functional similarity by inference from sequence base similarity. The relationship of homologs with amino acid sequences of SEQ ID NO:409 to 19247 to the proteins with amino acid sequences of SEQ ID NO:206 to 408 is found in the listing of Table 2.

[0055] A further aspect of the invention comprises functional homolog proteins which differ in one or more amino acids from those of a trait-improving protein disclosed herein as the result of one or more of the well-known conservative amino acid substitutions, e.g. valine is a conservative substitute for alanine and threonine is a conservative substitute for serine. Conservative substitutions for an amino acid within the native sequence can be selected from other members of a class to which the naturally occurring amino acid belongs. Representative amino acids within these various classes include, but are not limited to: (1) acidic (negatively charged) amino acids such as aspartic acid and glutamic acid; (2) basic (positively charged) amino acids such as arginine, histidine, and lysine; (3) neutral polar amino acids such as glycine, serine, threonine, cysteine, tyrosine, asparagine, and glutamine; and (4) neutral nonpolar (hydrophobic) amino acids such as alanine, leucine, isoleucine, valine, proline, phenylalanine, tryptophan, and methionine. Conserved substitutes for an amino acid within a native amino acid sequence can be selected from other members of the group to which the naturally occurring amino acid belongs. For example, a group of amino acids having aliphatic side chains is glycine, alanine, valine, leucine, and isoleucine; a group of amino acids having aliphatic-hydroxyl side chains is serine and threonine; a group of amino acids having amide-containing side chains is asparagine and glutamine; a group of amino acids having aromatic side chains is phenylalanine, tyrosine, and tryptophan; a group of amino acids having basic side chains is lysine, arginine, and histidine; and a group of amino acids having sulfur-containing side chains is cysteine and methionine. Naturally conservative amino acids substitution groups are: valine-leucine, valine-isoleucine, phenylalanine-tyrosine, lysine-arginine, alanine-valine, aspartic acid-glutamic acid, and asparagine-glutamine. A further aspect of the invention comprises proteins that differ in one or more amino acids from those of a described protein sequence as the result of deletion or insertion of one or more amino acids in a native sequence.

[0056] Homologs of the trait-improving proteins disclosed provided herein will generally demonstrate significant sequence identity. Of particular interest are proteins having at least 50% sequence identity, more preferably at least about 70% sequence identity or higher, e.g. at least about 80% sequence identity with an amino acid sequence of SEQ ID NO: 205 through SEQ ID NO: 408. Of course useful proteins also include those with higher identity, e.g. 90% to 99% identity. Identity of protein homologs is determined by optimally aligning the amino acid sequence of a putative protein homolog with a defined amino acid sequence and by calculating the percentage of identical and conservatively substituted amino acids over the window of comparison. The window of comparison for determining identity can be the entire amino acid sequence disclosed herein, e.g. the full sequence of any of SEQ ID NO:205 through SEQ ID NO:408.

[0057] Genes that are homologous to each other can be grouped into families and included in multiple sequence alignments. Then a consensus sequence for each group can be derived. This analysis enables the derivation of conserved and class-(family) specific residues or motifs that are functionally important. These conserved residues and motifs can be further validated with 3D protein structure if available. The consensus sequence can be used to define the full scope of the invention, e.g. to identify proteins with a homolog relationship. Thus, the present invention contemplates that protein homologs include proteins with an amino acid sequence that has at least 90% identity to such a consensus amino acid sequence sequences.

[0058] In particular embodiments, the inventors contemplate the use of antibodies, either monoclonal or polyclonal which bind to the proteins disclosed herein. Means for preparing and characterizing antibodies are well known in the art (See, e.g., Antibodies: A Laboratory Manual, Cold Spring Harbor Laboratory, 1988; incorporated herein by reference). The methods for generating monoclonal antibodies (mAbs) generally begin along the same lines as those for preparing polyclonal antibodies. Briefly, a polyclonal antibody is prepared by immunizing an animal with an immunogenic composition in accordance with the present invention and collecting antisera from that immunized animal. A wide range of animal species can be used for the production of antisera. Typically the animal used for production of anti-antisera is a rabbit, a mouse, a rat, a hamster, a guinea pig or a goat. Because of the relatively large blood volume of rabbits, a rabbit is a preferred choice for production of polyclonal antibodies.

[0059] mAbs may be readily prepared through use of well-known techniques, such as those exemplified in U.S. Pat. No. 4,196,265, incorporated herein by reference. Typically, this technique involves immunizing a suitable animal with a selected immunogen composition, e.g., a purified or partially purified antifungal protein, polypeptide or peptide. The immunizing composition is administered in a manner effective to stimulate antibody producing cells. Rodents such as mice and rats are preferred animals, however, the use of rabbit, sheep, or frog cells is also possible. The use of rats may provide certain advantages (Goding, 1986, pp. 60-61), but mice are preferred, with the BALB/c mouse being most preferred as this is most routinely used and generally gives a higher percentage of stable fusions.

[0060] Following immunization, somatic cells with the potential for producing antibodies, specifically B lymphocytes (B cells), are selected for use in the mAb generating protocol. The antibody-producing B lymphocytes from the immunized animal are then fused with cells of an immortal myeloma cell, generally one of the same species as the animal that was immunized to establish a population of hybridomas from which specific hybridomas are selected. The selected hybridomas would then be serially diluted and cloned into individual antibody-producing cell lines, which clones can then be propagated indefinitely to provide mAbs.

### Promoters

[0061] Numerous promoters that are active in plant cells have been described in the literature. These include promoters present in plant genomes as well as promoters from other sources, including nopaline synthase (NOS) promoter and octopine synthase (OCS) promoters carried on tumor-inducing plasmids of Agrobacterium tumefaciens, caulimovirus promoters such as the cauliflower mosaic virus or figwort mosaic virus promoters. For instance, see U.S. Pat. Nos. 5,858,742 and 5,322,938 which disclose versions of the constitutive promoter derived from cauliflower mosaic virus (CaMV35S), U.S. Pat. No. 5,378,619 which discloses a Figwort Mosaic Virus (FMV) 35S promoter, U.S. Pat. No. 6,437,217 which discloses a maize RS81 promoter, U.S. Pat. No. 5,641,876 which discloses a rice actin promoter, U.S. Pat. No. 6,426,446 which discloses a maize RS324 promoter, U.S. Pat. No. 6,429,362 which discloses a maize PR-1 promoter, U.S. Pat. No. 6,232,526 which discloses a maize A3 promoter, U.S. Pat. No. 6,177,611 which discloses constitutive maize promoters, U.S. Pat. No. 6,433,252 which discloses a maize L3 oleosin promoter, U.S. Pat. No. 6,429,357 which discloses a rice actin 2 promoter and intron, U.S. Pat. No. 5,837,848 which discloses a root specific promoter, U.S. Pat. No. 6,084,089 which discloses cold inducible promoters, U.S. Pat. No. 6,294,714 which discloses light inducible promoters, U.S. Pat. No. 6,140,078 which discloses salt inducible promoters, U.S. Pat. No. 6,252,138 which discloses pathogen inducible promoters, U.S. Pat. No. 6,175,060 which discloses phosphorus deficiency inducible promoters, U.S. Patent Application Publication 2002/0192813A1 which discloses 5′, 3′ and intron elements useful in the design of effective plant expression vectors, U.S. patent application Ser. No. 09/078,972 which discloses a coixin promoter, U.S. patent application Ser. No. 09/757,089 which discloses a maize chloroplast aldolase promoter, and U.S. patent application Ser. No. 10/739,565 which discloses water-deficit inducible promoters, all of which are incorporated herein by reference. These and numerous other promoters that function in plant cells are known to those skilled in the art and available for use in recombinant polynucleotides of the present invention to provide for expression of desired genes in transgenic plant cells.

[0062] Furthermore, the promoters may be altered to contain multiple “enhancer sequences” to assist in elevating gene expression. Such enhancers are known in the art. By including an enhancer sequence with such constructs, the expression of the selected protein may be enhanced. These enhancers often are found 5′ to the start of transcription in a promoter that functions in eukaryotic cells, but can often be inserted in the forward or reverse orientation 5′ or 3′ to the coding sequence. In some instances, these 5′ enhancing elements are introns. Deemed to be particularly useful as enhancers are the 5′ introns of the rice actin 1 and rice actin 2 genes. Examples of other enhancers that can be used in accordance with the invention include elements from the CaMV 35S promoter, octopine synthase genes, the maize alcohol dehydrogenase gene, the maize shrunken 1 gene and promoters from non-plant eukaryotes.

[0063] In some aspects of the invention it is preferred that the promoter element in the DNA construct be capable of causing sufficient expression to result in the production of an effective amount of a polypeptide in water deficit conditions. Such promoters can be identified and isolated from the regulatory region of plant genes that are over expressed in water deficit conditions. Specific water-deficit-inducible promoters for use in this invention are derived from the 5′ regulatory region of genes identified as a heat shock protein 17.5 gene (HSP17.5), an HVA22 gene (HVA22), a Rab17 gene and a cinnamic acid 4-hydroxylase (CA4H) gene (CA4H) of Zea maize. Such water-deficit-inducible promoters are disclosed in U.S. application Ser. No. 10/739,565, incorporated herein by reference.

[0064] In other aspects of the invention, sufficient expression in plant seed tissues is desired to effect improvements in seed composition. Exemplary promoters for use for seed composition modification include promoters from seed genes such as napin (U.S. Pat. No. 5,420,034), maize L3 oleosin (U.S. Pat. No. 6,433,252), zein Z27 (Russell et al. (1997) Transgenic Res. 6(2):157-166), globulin 1 (Belanger et al (1991) Genetics 129:863-872), glutelin 1 (Russell (1997) supra), and peroxiredoxin antioxidant (Perl) (Stacy et al. (1996) Plant Mol Biol. 31(6): 1205-1216).

[0065] In still other aspects of the invention, preferential expression in plant green tissues is desired. Promoters of interest for such uses include those from genes such as SSU (Fischhoff et al. (1992) Plant Mol Biol. 20:81-93), aldolase and pyruvate orthophosphate dikinase (PPDK) (Taniguchi et al. (2000) Plant Cell Physiol. 41(1):42-48).

### Gene Overexpression

[0066] “Gene overexpression” used herein in reference to a polynucleotide or polypeptide indicates that the expression level of a target protein, in a transgenic plant or in a host cell of the transgenic plant, exceeds levels of expression in a non-transgenic plant. In a preferred embodiment of the present invention, a recombinant DNA construct comprises the polynucleotide of interest in the sense orientation relative to the promoter to achieve gene overexpression, which is identified as such in Table 1.

### Gene Suppression

[0067] Gene suppression includes any of the well-known methods for suppressing transcription of a gene or the accumulation of the mRNA corresponding to that gene thereby preventing translation of the transcript into protein. Posttranscriptional gene suppression is mediated by transcription of integrated recombinant DNA to form double-stranded RNA (dsRNA) having homology to a gene targeted for suppression. This formation of dsRNA most commonly results from transcription of an integrated inverted repeat of the target gene, and is a common feature of gene suppression methods known as anti-sense suppression, co-suppression, RNA interference (RNAi) and knockout, e.g. by mutagenesis. Transcriptional suppression can be mediated by a transcribed dsRNA having homology to a promoter DNA sequence to effect what is called promoter trans suppression.

[0068] More particularly, posttranscriptional gene suppression by inserting a recombinant DNA construct with anti-sense oriented DNA to regulate gene expression in plant cells is disclosed in U.S. Pat. No. 5,107,065 (Shewmaker et al.) and U.S. Pat. No. 5,759,829 (Shewmaker et al.). Transgenic plants transformed using such anti-sense oriented DNA constructs for gene suppression can comprise integrated DNA arranged as an inverted repeats that result from insertion of the DNA construct into plants by Agrobacterium-mediated transformation, as disclosed by Redenbaugh et al. in “Safety Assessment of Genetically Engineered Flavr Savr™ Tomato, CRC Press, Inc. (1992). Inverted repeat insertions can comprises a part or all of the T-DNA construct, e.g. an inverted repeat of a complete transcription unit or an inverted repeat of transcription terminator sequence. Screening for inserted DNA comprising inverted repeat elements can improve the efficiency of identifying transformation events effective for gene silencing whether the transformation construct is a simple anti-sense DNA construct which must be inserted in multiple copies or a complex inverted repeat DNA construct (e.g. an RNAi construct) which can be inserted as a single copy.

[0069] Posttranscriptional gene suppression by inserting a recombinant DNA construct with sense-oriented DNA to regulate gene expression in plants is disclosed in U.S. Pat. No. 5,283,184 (Jorgensen et al.) and U.S. Pat. No. 5,231,020 (Jorgensen et al.). Inserted T-DNA providing gene suppression in plants transformed with such sense constructs by Agrobacterium is organized predominately in inverted repeat structures, as disclosed by Jorgensen et al., Mol. Gen. Genet., 207:471-477 (1987). See also Stam et al., The Plant Journal, 12(1), 63-82 (1997) who used segregation studies to support Jorgensen's finding that gene silencing is mediated by multimeric transgene T-DNA loci in which the T-DNAs are arranged in inverted repeats. Screening for inserted DNA comprising inverted repeat elements can improve the gene silencing efficiency when transforming with simple sense-orientated DNA constructs. Gene silencing efficiency can also be improved by screening for single insertion events when transforming with an RNAi construct containing inverted repeat elements

[0070] As disclosed by Redenbaugh et al. gene suppression can be achieved by inserting into a plant genome recombinant DNA that transcribes dsRNA. Such a DNA insert can be transcribed to an RNA element having the 3′ region as a double stranded RNA. RNAi constructs are also disclosed in EP 0426195 A1 (Goldbach et al. —1991) where recombinant DNA constructs for transcription into hairpin dsRNA for providing transgenic plants with resistance to tobacco spotted wilt virus. Double-stranded RNAs were also disclosed in WO 94/01550 (Agrawal et al.) where anti-sense RNA was stabilized with a self-complementary 3′ segment. Agrawal et al. referred to U.S. Pat. No. 5,107,065 for using such self-stablized anti-sense RNAs for regulating gene expression in plant cells; see International Publication No. 94/01550. Other double-stranded hairpin-forming elements in transcribed RNA are disclosed in International Publication No. 98/05770 (Werner et al.) where the anti-sense RNA is stabilized by hairpin forming repeats of poly(CG) nucleotides. See also U.S. Patent Application Publication No. 2003/0175965 A1 (Lowe et al.) which discloses gene suppression using and RNAi construct comprising a gene coding sequence preceded by inverted repeats of 5′UTR. See also U.S. Patent Application Publication No. 2002/0048814 A1 (Oeller) where RNAi constructs are transcribed to sense or anti-sense RNA which is stabilized by a poly(T)-poly(A) tail. See also U.S. Patent Application Publication No. 2003/0018993 A1 (Gutterson et al.) where sense or anti-sense RNA is stabilized by an inverted repeat of a of the 3′ untranslated region of the NOS gene. See also U.S. Patent Application Publication No. 2003/0036197 A1 (Glassman et al.) where RNA having homology to a target is stabilized by two complementary RNA regions.

[0071] Gene silencing can also be effected by transcribing RNA from both a sense and an anti-sense oriented DNA, e.g. as disclosed by Shewmaker et al. in U.S. Pat. No. 5,107,065 where in Example 1a binary vector was prepared with both sense and anti-sense aroA genes. See also U.S. Pat. No. 6,326,193 where gene targeted DNA is operably linked to opposing promoters.

[0072] Gene silencing can also be affected by transcribing from contiguous sense and anti-sense DNA. In this regard see Sijen et al., The Plant Cell, Vol. 8, 2277-2294 (1996) discloses the use of constructs carrying inverted repeats of a cowpea mosaic virus gene in transgenic plants to mediate virus resistance. Such constructs for posttranscriptional gene suppression in plants by double-stranded RNA are also disclosed in International Publication No. WO 99/53050(Waterhouse et al.), International Publication No. WO 99/49029 (Graham et al.), U.S. patent application Ser. No. 10/465,800 (Fillatti), U.S. Pat. No. 6,506,559 (Fire et al.). See also U.S. application Ser. No. 10/393,347 (Shewmaker et al.) that discloses constructs and methods for simultaneously expressing one or more recombinant genes while simultaneously suppressing one or more native genes in a transgenic plant. See also U.S. Pat. No. 6,448,473 (Mitsky et al.) that discloses multi-gene suppression vectors for use in plants. All of the above-described patents, applications and international publications disclosing materials and methods for posttranscriptional gene suppression in plants are incorporated herein by reference. Transcriptional suppression such as promoter trans suppression can be affected by a expressing a DNA construct comprising a promoter operably linked to inverted repeats of promoter DNA for a target gene. Constructs useful for such gene suppression mediated by promoter trans suppression are disclosed by Mette et al., The EMBO Journal, Vol. 18, No. 1, pp. 241-148, 1999 and by Mette et al., The EMBO Journal, Vol. 19, No. 19, pp. 5194-5201-148, 2000, both of which are incorporated herein by reference.

[0073] Suppression can also be achieved by insertion mutations created by transposable elements may also prevent gene function. For example, in many dicot plants, transformation with the T-DNA of Agrobacterium may be readily achieved and large numbers of transformants can be rapidly obtained. Also, some species have lines with active transposable elements that can efficiently be used for the generation of large numbers of insertion mutations, while some other species lack such options. Mutant plants produced by Agrobacterium or transposon mutagenesis and having altered expression of a polypeptide of interest can be identified using the polynucleotides of the present invention. For example, a large population of mutated plants may be screened with polynucleotides encoding the polypeptide of interest to detect mutated plants having an insertion in the gene encoding the polypeptide of interest.

### Gene Stacking

[0074] The present invention also contemplates that the trait-improving recombinant DNA provided herein can be used in combination with other recombinant DNA to create plants with a multiple desired traits. The combinations generated can include multiple copies of any one or more of the recombinant DNA constructs. These stacked combinations can be created by any method, including but not limited to cross breeding of transgenic plants, or multiple genetic transformation.

### Plant Cell Transformation Methods

[0075] Numerous methods for transforming plant cells with recombinant DNA are known in the art and may be used in the present invention. Two commonly used methods for plant transformation are Agrobacterium-mediated transformation and microprojectile bombardment. Microprojectile bombardment methods are illustrated in U.S. Pat. Nos. 5,015,580 (soybean); 5,550,318 (corn); 5,538,880 (corn); 5,914,451 (soybean); 6,160,208 (corn); 6,399,861 (corn) and 6,153,812 (wheat) and Agrobacterium-mediated transformation is described in U.S. Pat. Nos. 5,159,135 (cotton); 5,824,877 (soybean); 5,591,616 (corn); and 6,384,301 (soybean), all of which are incorporated herein by reference. For Agrobacterium tumefaciens based plant transformation system, additional elements present on transformation constructs will include T-DNA left and right border sequences to facilitate incorporation of the recombinant polynucleotide into the plant genome.

[0076] In general it is useful to introduce recombinant DNA randomly, i.e. at a non-specific location, in the genome of a target plant line. In special cases it may be useful to target recombinant DNA insertion in order to achieve site-specific integration, for example to replace an existing gene in the genome, to use an existing promoter in the plant genome, or to insert a recombinant polynucleotide at a predetermined site known to be active for gene expression. Several site specific recombination systems exist which are known to function implants include cre-lox as disclosed in U.S. Pat. No. 4,959,317 and FLP-FRT as disclosed in U.S. Pat. No. 5,527,695, both incorporated herein by reference.

[0077] Transformation methods of this invention are preferably practiced in tissue culture on media and in a controlled environment. “Media” refers to the numerous nutrient mixtures that are used to grow cells in vitro, that is, outside of the intact living organism. Recipient cell targets include, but are not limited to, meristem cells, callus, immature embryos and gametic cells such as microspores, pollen, sperm and egg cells. It is contemplated that any cell from which a fertile plant may be regenerated is useful as a recipient cell. Callus may be initiated from tissue sources including, but not limited to, immature embryos, seedling apical meristems, microspores and the like. Cells capable of proliferating as callus are also recipient cells for genetic transformation. Practical transformation methods and materials for making transgenic plants of this invention, for example various media and recipient target cells, transformation of immature embryo cells and subsequent regeneration of fertile transgenic plants are disclosed in U.S. Pat. Nos. 6,194,636 and 6,232,526, which are incorporated herein by reference.

[0078] The seeds of transgenic plants can be harvested from fertile transgenic plants and be used to grow progeny generations of transformed plants of this invention including hybrid plants line for selection of plants having an enhanced trait. In addition to direct transformation of a plant with a recombinant DNA, transgenic plants can be prepared by crossing a first plant having a recombinant DNA with a second plant lacking the DNA. For example, recombinant DNA can be introduced into first plant line that is amenable to transformation to produce a transgenic plant which can be crossed with a second plant line to introgress the recombinant DNA into the second plant line. A transgenic plant with recombinant DNA providing an enhanced trait, e.g. enhanced yield, can be crossed with transgenic plant line having other recombinant DNA that confers another trait, for example herbicide resistance or pest resistance, to produce progeny plants having recombinant DNA that confers both traits. Typically, in such breeding for combining traits the transgenic plant donating the additional trait is a male line and the transgenic plant carrying the base traits is the female line. The progeny of this cross will segregate such that some of the plants will carry the DNA for both parental traits and some will carry DNA for one parental trait; such plants can be identified by markers associated with parental recombinant DNA, e.g. marker identification by analysis for recombinant DNA or, in the case where a selectable marker is linked to the recombinant, by application of the selecting agent such as a herbicide for use with a herbicide tolerance marker, or by selection for the enhanced trait. Progeny plants carrying DNA for both parental traits can be crossed back into the female parent line multiple times, for example usually 6 to 8 generations, to produce a progeny plant with substantially the same genotype as one original transgenic parental line but for the recombinant DNA of the other transgenic parental line

[0079] In the practice of transformation DNA is typically introduced into only a small percentage of target plant cells in any one transformation experiment. Marker genes are used to provide an efficient system for identification of those cells that are stably transformed by receiving and integrating a transgenic DNA construct into their genomes. Preferred marker genes provide selective markers which confer resistance to a selective agent, such as an antibiotic or herbicide. Any of the herbicides to which plants of this invention may be resistant are useful agents for selective markers. Potentially transformed cells are exposed to the selective agent. In the population of surviving cells will be those cells where, generally, the resistance-conferring gene is integrated and expressed at sufficient levels to permit cell survival. Cells may be tested further to confirm stable integration of the exogenous DNA. Commonly used selective marker genes include those conferring resistance to antibiotics such as kanamycin and paromomycin (nptII), hygromycin B (aph IV) and gentamycin (aac3 and aacC4) or resistance to herbicides such as glufosinate (bar or pat) and glyphosate (aroA or EPSPS). Examples of such selectable are illustrated in U.S. Pat. Nos. 5,550,318; 5,633,435; 5,780,708 and 6,118,047, all of which are incorporated herein by reference. Selectable markers which provide an ability to visually identify transformants can also be employed, for example, a gene expressing a colored or fluorescent protein such as a luciferase or green fluorescent protein (GFP) or a gene expressing a beta-glucuronidase or uidA gene (GUS) for which various chromogenic substrates are known.

[0080] Plant cells that survive exposure to the selective agent, or plant cells that have been scored positive in a screening assay, may be cultured in regeneration media and allowed to mature into plants. Developing plantlets regenerated from transformed plant cells can be transferred to plant growth mix, and hardened off, for example, in an environmentally controlled chamber at about 85% relative humidity, 600 ppm CO₂, and 25-250 microeinsteins m⁻² s⁻¹ of light, prior to transfer to a greenhouse or growth chamber for maturation. Plants are regenerated from about 6 weeks to 10 months after a transformant is identified, depending on the initial tissue. Plants may be pollinated using conventional plant breeding methods known to those of skill in the art and seed produced, for example self-pollination is commonly used with transgenic corn. The regenerated transformed plant or its progeny seed or plants can be tested for expression of the recombinant DNA and selected for the presence of enhanced agronomic trait.

### Transgenic Plants and Seeds

[0081] Transgenic plants derived from the plant cells of this invention are grown to generate transgenic plants having an enhanced trait as compared to a control plant and produce transgenic seed and haploid pollen of this invention. Such plants with enhanced traits are identified by selection of transformed plants or progeny seed for the enhanced trait. For efficiency a selection method is designed to evaluate multiple transgenic plants (events) comprising the recombinant DNA, for example multiple plants from 2 to 20 or more transgenic events. Transgenic plants grown from transgenic seed provided herein demonstrate improved agronomic traits that contribute to increased yield or other trait that provides increased plant value, including, for example, improved seed quality. Of particular interest are plants having enhanced water use efficiency, enhanced cold tolerance, increased yield, enhanced nitrogen use efficiency, enhanced seed protein and enhanced seed oil.

### Discovery of Trait-Improving Recombinant DNA

[0082] To identify recombinant DNA that imparts an enhanced trait to plants, Arabidopsis cells were transformed with a candidate recombinant DNA construct and screened for an improved trait. A two-step screening process was employed which comprised two passes of trait characterization to ensure that the trait modification was dependent on expression of the recombinant DNA, but not due to the chromosomal location of the integration of the transgene. Twelve independent transgenic lines for each recombinant DNA construct were established and assayed for the transgene expression levels. Five transgenic lines with high transgene expression levels were used in the first pass screen to evaluate the transgene's function in T2 transgenic plants. Subsequently, three transgenic events, which had been shown to have one or more improved traits, were further evaluated in the second pass screen to confirm the transgene's ability to impart an improved trait. The following Table 3 summarizes the improved traits that have been confirmed as provided by a recombinant DNA construct.

[0083] In particular, Table 3 reports

“PEP SEQ ID” which is the amino acid sequence of the protein cognate to the DNA in the recombinant DNA construct corresponding to a protein sequence of a SEQ ID NO. in the Sequence Listing.
“annotation” refers to a description of the top hit protein obtained from an amino acid sequence query of each PEP SEQ ID NO to GenBank database of the National Center for Biotechnology Information (ncbi). More particularly, “gi” is the GenBank ID number for the top BLAST hit. The components of “annotation” are “e-value” which provides the expectation value for the BLAST hit; “% id” which refers to the percentage of identically matched amino acid residues along the length of the portion of the sequences which is aligned by BLAST between the sequence of interest provided herein and the hit sequence in GenBank; “GenBank ID” which provides a reference number for the top BLAST hit in GenBank; and “description” which refers to the description of that top BLAST hit.
“traits” identify by two letter codes the confirmed improvement in a transgenic plant provided by the recombinant DNA. The codes for improved traits are:
“CK” which indicates cold tolerance improvement identified under a cold shock tolerance screen;
“CS” which indicates cold tolerance improvement identified by a cold germination tolerance screen;
“DS” which indicates drought tolerance improvement identified by a soil drought stress tolerance screen;
“PEG” which indicates osmotic stress tolerance improvement identified by a PEG induced osmotic stress tolerance screen;
“HS” which indicates heat stress tolerance improvement identified by a heat stress tolerance screen;
“SS” which indicates high salinity stress tolerance improvement identified by a salt stress tolerance screen;
“LN” which indicates nitrogen use efficiency improvement identified by a limited nitrogen tolerance screen;
“LL” which indicates attenuated shade avoidance response identified by a shade tolerance screen under a low light condition;
“PP” which indicates improved growth and development at early stages identified by an early plant growth and development screen;
“SP” which indicates improved growth and development at late stages identified by a late plant growth and development screen provided herein.

TABLE 3

| PEP | annotation | | | | | | | | | |
|---|---|---|---|---|---|---|---|---|---|---|
| SEQ | e- | % | | | | | | | | |
| ID | value | id | GenBank ID | description | Traits | | | | | |
| 205 | 5.00E−34 | 85 | gi\|21281159\| | gb\|AAD48981.1\|contains | HS | | | | | |
| | | | | similarity to Solanum | | | | | | |
| | | | | lycopersicum (tomato) wound | | | | | | |
| | | | | induced protein | | | | | | |
| 206 | 1.00E−66 | 76 | gi\|21553397\| | gb\|AAM62490.1\|putative zinc | LN | | | | | |
| | | | | finger protein | | | | | | |
| 207 | 1.00E−118 | 93 | gi\|7573441\| | ref\|NP_191871.1\|cyclin | HS | | | | | |
| | | | | family protein | | | | | | |
| 208 | 0 | 93 | gi\|22136838\| | ref\|NP_566299.1\|GPI | CK | CS | | | | |
| | | | | transamidase component | | | | | | |
| | | | | Gpi16 subunit family protein | | | | | | |
| 209 | 1.00E−171 | 97 | gi\|15028251\| | ref\|NP_566244.1\| | CK | | | | | |
| | | | | transmembrane protein, | | | | | | |
| | | | | putative | | | | | | |
| 210 | 2.00E−57 | 98 | gi\|37202020\| | emb\|CAB81279.1\|putative | HS | PP | PEG | | | |
| | | | | protein | | | | | | |
| 211 | 8.00E−37 | 100 | gi\|26451972\| | dbj\|BAC43077.1\|unknown | PP | SS | HS | | | |
| | | | | protein | | | | | | |
| 212 | 0 | 86 | gi\|42562765\| | ref\|NP_175971.3\|transcription | CK | | | | | |
| | | | | factor-related | | | | | | |
| 213 | 0 | 100 | gi\|21280989\| | gb\|AAM44902.1\|putative | PP | SP | | | | |
| | | | | catalase | | | | | | |
| 214 | 0 | 89 | gi\|22087278\| | gb\|AAC97995.1\|Similar to | LN | PP | HS | | | |
| | | | | gb\|Z30094 basic transcripion | | | | | | |
| | | | | factor 2, 44 kD subunit from | | | | | | |
| | | | | Homo sapiens. | | | | | | |
| 215 | 0 | 77 | gi\|12324313\| | gb\|AAD55662.1\|Highly similar | DS | | | | | |
| | | | | to non intermediate filament | | | | | | |
| | | | | IFA binding protein | | | | | | |
| 216 | 0 | 100 | gi\|21537362\| | gb\|AAM61703.1\|protein | CK | | | | | |
| | | | | kinase-like protein | | | | | | |
| 217 | 0 | 87 | gi\|4678332\| | emb\|CAB41143.1\|putative | CK | | | | | |
| | | | | peptide transporter | | | | | | |
| 218 | 1.00E−144 | 86 | gi\|14532890\| | gb\|AAK64127.1\|unknown | PEG | | | | | |
| | | | | protein | | | | | | |
| 219 | 1.00E−145 | 95 | gi\|3242721\| | gb\|AAC23773.1\|putative | DS | | | | | |
| | | | | acetone-cyanohydrin lyase | | | | | | |
| 220 | 0 | 84 | gi\|15293165\| | gb\|AAK93693.1\|putative 3- | CK | PEG | CS | HS | | PP |
| | | | | methyladenine DNA | | | | | | |
| | | | | glycosylase | | | | | | |
| 221 | 1.00E−178 | 79 | gi\|6321581\| | ref\|NP_011658.1\|Btn2p | PP | | | | | |
| | | | | [Saccharomyces cerevisiae] | | | | | | |
| 222 | 0 | 98 | gi\|30387605\| | ref\|NP_178499.2\|MATE | LN | | | | | |
| | | | | efflux family protein | | | | | | |
| 223 | 1.00E−147 | 90 | gi\|9758099\| | ref\|NP_198887.1\|zinc finger | CS | | | | | |
| | | | | (C2H2 type) family protein | | | | | | |
| 224 | 1.00E−139 | 95 | gi\|23505833\| | gb\|AAN28776.1\|At3g51780/ORF3 | CK | | | | | |
| 225 | 0 | 100 | gi\|6729028\| | gb\|AAF27024.1\|putative | CS | | | | | |
| | | | | nodulin [Arabidopsis thaliana] | | | | | | |
| | | | | ref\|NP_187169.1\|GDSL-motif | | | | | | |
| | | | | lipase/hydrolase family protein | | | | | | |
| 226 | 0 | 100 | gi\|21436143\| | gb\|AAM51318.1\|unknown | CS | | | | | |
| | | | | protein | | | | | | |
| 227 | 0 | 97 | gi\|31711910\| | gb\|AAM64944.1\|betaine | PP | | | | | |
| | | | | aldehyde dehydrogenase, | | | | | | |
| | | | | putative | | | | | | |
| 228 | 1.00E−128 | 80 | gi\|21554268\| | ref\|NP_171616.1\|33 kDa | PEG | SS | | | | |
| | | | | ribonucleoprotein, chloroplast, | | | | | | |
| | | | | putative/RNA-binding protein | | | | | | |
| | | | | cp33, putative | | | | | | |
| 229 | 0 | 95 | gi\|6321563\| | emb\|CAA58159.1\|glutamic- | CK | CS | SS | | | |
| | | | | dependent asparagine | | | | | | |
| | | | | synthase | | | | | | |
| 230 | 1.00E−132 | 57 | gi\|25403213\| | pir\|\|A86468probable zinc | PP | PEG | | | | |
| | | | | finger protein | | | | | | |
| 231 | 2.00E−54 | 52 | gi\|20127115\| | gb\|AAM10965.1\|putative | CK | | | | | |
| | | | | bHLH transcription factor | | | | | | |
| | | | | [Arabidopsis thaliana] | | | | | | |
| 232 | 1.00E−160 | 72 | gi\|18401370\| | ref\|NP_566566.1\|protein | CK | HS | PEG | CS | | |
| | | | | phosphatase 2C family protein | | | | | | |
| 233 | 1.00E−33 | 45 | gi\|21593875\| | gb\|AAM65842.1\|putative | PP | HS | | | | |
| | | | | RING-H2 zinc finger protein | | | | | | |
| 234 | 2.00E−34 | 51 | gi\|55419648\| | gb\|AAV51937.1\|AP2/EREBP | CK | | | | | |
| | | | | transcription factor ERF-2 | | | | | | |
| 235 | 2.00E−73 | 59 | gi\|3955021\| | emb\|CAA09367.1\|HB2 | CK | CS | | | | |
| | | | | homeodomain protein | | | | | | |
| 236 | 1.00E−51 | 58 | gi\|4689366\| | gb\|AAD27870.1\|BRH1 RING | HS | PP | PEG | | | |
| | | | | finger protein | | | | | | |
| 237 | 1.00E−149 | 76 | gi\|52354283\| | gb\|AAM14913.1\|putative | HS | | | | | |
| | | | | malonyl-CoA:Acyl carrier | | | | | | |
| | | | | protein transacylase | | | | | | |
| 238 | 1.00E−154 | 85 | gi\|20260680\| | gb\|AAM13238.1\|putative | PP | PEG | | | | |
| | | | | NADPH-dependent mannose | | | | | | |
| | | | | 6-phosphate reductase | | | | | | |
| 239 | 2.00E−89 | 64 | gi\|21593394\| | ref\|NP_567300.1\|short-chain | HS | | | | | |
| | | | | dehydrogenase/reductase | | | | | | |
| | | | | (SDR) family protein | | | | | | |
| 240 | 0 | 82 | gi\|42795470\| | gb\|AAS46245.1\|HMG-CoA | CK | HS | SS | | | |
| | | | | synthase 2 | | | | | | |
| 241 | 1.00E−113 | 83 | gi\|20385588\| | gb\|AAM21344.1\|MADS-box | SP | | | | | |
| | | | | protein 4 | | | | | | |
| 242 | 1.00E−135 | 89 | gi\|21280889\| | ref\|NP_196254.1\|ribosomal | SS | HS | | | | |
| | | | | protein S8e family protein | | | | | | |
| 243 | 5.00E−28 | 43 | gi\|4567308\| | gb\|AAD23719.1\|putative | PEG | | | | | |
| | | | | RING zinc finger protein | | | | | | |
| 244 | 3.00E−35 | 33 | gi\|25352200\| | pir\|\|T52379zinc finger protein | PEG | | | | | |
| | | | | ZPT3-3 | | | | | | |
| 245 | 0 | 83 | gi\|10800918\| | emb\|CAC12995.1\|putative | CK | PEG | CS | | | |
| | | | | AUX1-like permease | | | | | | |
| 246 | 3.00E−61 | 87 | gi\|21554008\| | gb\|AAM63089.1\|cold- | CS | HS | PP | | | |
| | | | | regulated protein cor15b | | | | | | |
| | | | | precursor | | | | | | |
| 247 | 0 | 100 | gi\|25406415\| | pir\|\|D96781cytochrome P450, | PEG | | | | | |
| | | | | probable, 64213-66051 | | | | | | |
| 248 | 0 | 92 | gi\|3885330\| | gb\|AAC77858.1\|putative | PP | | | | | |
| | | | | cytochrome P450 | | | | | | |
| 249 | 1.00E−159 | 100 | gi\|21593400\| | gb\|AAM65367.1\|phi-1-like | LN | LL | | | | |
| | | | | protein | | | | | | |
| 250 | 1.00E−89 | 76 | gi\|45825151\| | ref\|NP_200258.2\|zinc finger | DS | | | | | |
| | | | | (B-box type) family protein | | | | | | |
| 251 | 1.00E−144 | 72 | gi\|3643085\| | gb\|AAC36698.1\|protein | PP | CK | | | | |
| | | | | phosphatase-2C; PP2C | | | | | | |
| 252 | 2.00E−90 | 91 | gi\|21537084\| | gb\|AAM61425.1\|unknown | CK | PEG | | | | |
| 253 | 2.00E−51 | 100 | gi\|28393947\| | ref\|NP_174092.1\|glycine-rich | HS | PP | | | | |
| | | | | protein | | | | | | |
| 254 | 0 | 91 | gi\|23197704\| | ref\|NP_565909.1\|radical SAM | PEG | | | | | |
| | | | | domain-containing protein | | | | | | |
| 255 | 0 | 93 | gi\|4902476\| | emb\|CAB43520.1\|MAP kinase | CK | CS | | | | |
| 256 | 1.00E−100 | 72 | gi\|34146806\| | gb\|AAC34217.1\|putative | CS | | | | | |
| | | | | alcohol dehydrogenase | | | | | | |
| 257 | 2.00E−87 | 82 | gi\|3548814\| | gb\|AAC34486.1\|E3 ubiquitin | CK | LL | CS | | | |
| | | | | ligase SCF complex subunit | | | | | | |
| | | | | SKP1/ASK1 (At19), | | | | | | |
| 258 | 1.00E−113 | 81 | gi\|7939553\| | dbj\|BAA95756.1\|expansin-like | PP | HS | | | | |
| | | | | protein | | | | | | |
| 259 | 1.00E−163 | 52 | gi\|13506810\| | gb\|AAK28345.1\|receptor-like | CK | PP | | | | |
| | | | | protein kinase 3 | | | | | | |
| 260 | 1.00E−163 | 68 | gi\|12597803\| | gb\|AAG60115.1\|hypothetical | PP | | | | | |
| | | | | protein | | | | | | |
| 261 | 1.00E−161 | 100 | gi\|20258881\| | gb\|AAM14112.1\|putative | LL | | | | | |
| | | | | ubiquinone/menaquinone | | | | | | |
| | | | | biosynthesis | | | | | | |
| | | | | methyltransferase | | | | | | |
| 262 | 1.00E−133 | 92 | gi\|12597757\| | ref\|NP_176849.1\|nodulin | SS | PEG | | | | |
| | | | | MtN3 family protein | | | | | | |
| 263 | 0 | 95 | gi\|6911875\| | sp\|P53780\|METC_ARATH | PP | SS | | | | |
| | | | | Cystathionine beta-lyase, | | | | | | |
| | | | | chloroplast precursor (CBL) | | | | | | |
| | | | | (Beta-cystathionase) | | | | | | |
| | | | | (Cysteine lyase) | | | | | | |
| 264 | 1.00E−100 | 100 | gi\|21389647\| | gb\|AAM48022.1\|photoassimilate- | SP | DS | | | | |
| | | | | responsive protein PAR-1b- | | | | | | |
| | | | | like protein | | | | | | |
| 265 | 0 | 100 | gi\|25402889\| | ref\|NP_173376.1\|very-long- | PEG | PP | | | | |
| | | | | chain fatty acid condensing | | | | | | |
| | | | | enzyme, putative | | | | | | |
| 266 | 0 | 88 | gi\|6324999\| | sp\|P20438\|CG12_YEAST | DS | | | | | |
| | | | | G1/S-specific cyclin CLN2 | | | | | | |
| | | | | gb\|AAA65725.1\|cyclin 2 | | | | | | |
| 267 | 0 | 100 | gi\|3218550\| | dbj\|BAA28775.1\|Cdk- | LL | | | | | |
| | | | | activating kinase 1At | | | | | | |
| 268 | 1.00E−169 | 100 | gi\|6321880\| | ref\|NP_011956.1\|Nucleolar | SP | | | | | |
| | | | | protein involved in the | | | | | | |
| | | | | assembly of the large | | | | | | |
| | | | | ribosomal subunit; contains a | | | | | | |
| | | | | sigma(70)-like motif, which is | | | | | | |
| | | | | thought to bind RNA | | | | | | |
| 269 | 0 | 89 | gi\|21436315\| | gb\|AAM51327.1\|putative | CK | HS | CS | | | |
| | | | | histidyl-tRNA synthetase | | | | | | |
| 270 | 1.00E−150 | 100 | gi\|14318575\| | ref\|NP_116708.1\|20S | PP | PEG | SS | | | |
| | | | | proteasome beta-type subunit | | | | | | |
| 271 | 0 | 99 | gi\|6325396\| | pir\|\|S69027 ammonium | LL | DS | | | | |
| | | | | transport protein MEP3 | | | | | | |
| 272 | 5.00E−76 | 72 | gi\|7442240\| | sp\|O24543\|AX2E_PHAAU | DS | | | | | |
| | | | | Auxin-induced protein 22E | | | | | | |
| | | | | (Indole-3-acetic acid induced | | | | | | |
| | | | | protein ARG14) | | | | | | |
| 273 | 0 | 94 | gi\|9759247\| | dbj\|BAB09771.1\|serine/threonine | LL | | | | | |
| | | | | protein kinase-like protein | | | | | | |
| 274 | 0 | 97 | gi\|39647867\| | emb\|CAE26387.1\|phosphogly | CK | DS | CS | | | |
| | | | | cerate kinase | | | | | | |
| 275 | 0 | 89 | gi\|9758468\| | dbj\|BAB08997.1\|monosaccharide | PP | PEG | | | | |
| | | | | transporter | | | | | | |
| 276 | 1.00E−66 | 80 | gi\|6319966\| | ref\|NP_010046.1\|Phosphorelay | HS | | | | | |
| | | | | intermediate protein, | | | | | | |
| | | | | phosphorylated by the plasma | | | | | | |
| | | | | membrane sensor Sln1p in | | | | | | |
| | | | | response to osmotic stress | | | | | | |
| | | | | and then in turn | | | | | | |
| | | | | phosphorylates the response | | | | | | |
| | | | | regulators Ssk1p in the | | | | | | |
| | | | | cytosol and Skn7p in the | | | | | | |
| | | | | nucleus | | | | | | |
| 277 | 2.00E−88 | 83 | gi\|21536637\| | ref\|NP_565524.1\|stress | DS | LN | | | | |
| | | | | enhanced protein 2 (SEP2) | | | | | | |
| 278 | 0 | 90 | gi\|6322724\| | ref\|NP_012797.1\|Required for | SS | | | | | |
| | | | | transcription of rDNA by RNA | | | | | | |
| | | | | Polymerase I; DNA- | | | | | | |
| | | | | independent RNA Polymerase | | | | | | |
| | | | | I transcription factor | | | | | | |
| 279 | 0 | 94 | gi\|6320705\| | pir\|\|S69555 myo-inositol | HS | SS | PP | | | |
| | | | | transport protein ITR1 - yeast) | | | | | | |
| 280 | 5.00E−24 | 49 | gi\|25453551\| | pir\|\|T52011ethylene | LL | | | | | |
| | | | | responsive element binding | | | | | | |
| | | | | factor 3 | | | | | | |
| 281 | 1.00E−150 | 100 | gi\|4580468\| | gb\|AAD24392.1\|putative | PP | | | | | |
| | | | | cAMP-dependent protein | | | | | | |
| | | | | kinase | | | | | | |
| 282 | 1.00E−169 | 91 | gi\|21436057\| | ref\|NP_193037.1\| | LL | SS | | | | |
| | | | | oxidoreductase, zinc-binding | | | | | | |
| | | | | dehydrogenase family protein | | | | | | |
| 283 | 1.00E−165 | 83 | gi\|21280925\| | gb\|AAM44967.1\|putative | HS | | | | | |
| | | | | cinnamyl alcohol | | | | | | |
| | | | | dehydrogenase | | | | | | |
| 284 | 0 | 100 | gi\|20334800\| | ref\|NP_568453.1\|alcohol | PEG | | | | | |
| | | | | dehydrogenase, putative | | | | | | |
| | | | | [Arabidopsis thaliana] | | | | | | |
| 285 | 0 | 100 | gi\|22136298\| | gb\|AAM91227.1\|alcohol | PP | | | | | |
| | | | | dehydrogenase | | | | | | |
| 286 | 1.00E−144 | 89 | gi\|20259173\| | sp\|O04202\|IF35_ARATH | CS | SS | CK | | | |
| | | | | Eukaryotic translation initiation | | | | | | |
| | | | | factor 3 subunit 5 (eIF-3 | | | | | | |
| | | | | epsilon) (eIF3 p32 subunit) | | | | | | |
| | | | | (eIF3f) | | | | | | |
| 287 | 6.00E−74 | 96 | gi\|21593170\| | ref\|NP_196239.1\|RNA- | PP | | | | | |
| | | | | binding protein, putative | | | | | | |
| 288 | 1.00E−112 | 80 | gi\|9759521\| | dbj\|BAB10987.1\|nuclear cap- | PP | | | | | |
| | | | | binding protein; CBP20 | | | | | | |
| 289 | 1.00E−177 | 95 | gi\|12083276\| | gb\|AAG48797.1\|putative delta | CS | PEG | | | | |
| | | | | 9 desaturase | | | | | | |
| 290 | 1.00E−111 | 94 | gi\|12083264\| | gb\|AAG48791.1\|putative GTP- | LN | SS | PP | | | |
| | | | | binding protein RAB11D | | | | | | |
| 291 | 1.00E−134 | 91 | gi\|23505935\| | gb\|AAP86673.1\|26S | HS | SS | | | | |
| | | | | proteasome subunit RPN12 | | | | | | |
| 292 | 3.00E−53 | 86 | gi\|26452894\| | dbj\|BAC43525.1\|putative | CK | HS | PP | SS | PEG | CS |
| | | | | DNA-directed RNA | | | | | | |
| | | | | polymerase 14 kDa subunit | | | | | | |
| | | | | AtRPAC14 | | | | | | |
| 293 | 5.00E−94 | 100 | gi\|21554412\| | gb\|AAM63517.1\|probable | CK | CS | PEG | | PP | |
| | | | | glutathione peroxidase | | | | | | |
| | | | | At2g31570 | | | | | | |
| 294 | 1.00E−116 | 92 | gi\|6143884\| | ref\|NP_187617.1\| | SP | CK | | | | |
| | | | | immunophilin, putative/ | | | | | | |
| | | | | FKBP-type peptidyl-prolyl cis- | | | | | | |
| | | | | trans isomerase, putative | | | | | | |
| 295 | 1.00E−114 | 100 | gi\|6671929\| | gb\|AAF23189.1\|putative GTP- | PP | | | | | |
| | | | | binding protein (ATFP8) | | | | | | |
| | | | | [Arabidopsis thaliana] | | | | | | |
| 296 | 1.00E−161 | 92 | gi\|7670024\| | ref\|NP_566563.1\|ubiquitin- | HS | PP | SS | | | |
| | | | | conjugating enzyme, putative | | | | | | |
| 297 | 1.00E−132 | 95 | gi\|21554045\| | gb\|AAM63126.1\|20S | SS | | | | | |
| | | | | proteasome subunit PAC1 | | | | | | |
| 298 | 1.00E−111 | 94 | gi\|21593047\| | gb\|AAM64996.1\|GTP-binding | PP | | | | | |
| | | | | protein Rab11 | | | | | | |
| 299 | 0 | 93 | gi\|23308437\| | ref\|NP_190336.1\|malate | SS | HS | | | | |
| | | | | dehydrogenase [NAD], | | | | | | |
| | | | | chloroplast (MDH) | | | | | | |
| 300 | 3.00E−94 | 80 | gi\|6562282\| | emb\|CAB62652.1\|rac-like | PEG | | | | | |
| | | | | GTP binding protein Arac11 | | | | | | |
| 301 | 0 | 100 | gi\|21554607\| | gb\|AAM63631.1\|ubiquitin | SS | | | | | |
| | | | | activating enzyme-like protein | | | | | | |
| 302 | 5.00E−26 | 81 | gi\|15217910\| | ref\|NP_173453.1\|homeobox- | PP | | | | | |
| | | | | leucine zipper protein-related | | | | | | |
| 303 | 1.00E−129 | 86 | gi\|23505995\| | ref\|NP_177122.2\|acid | SP | PP | | | | |
| | | | | phosphatase, putative | | | | | | |
| | | | | [Arabidopsis thaliana] | | | | | | |
| 304 | 1.00E−157 | 100 | gi\|28827628\| | gb\|AAO50658.1\|putative C-4 | PP | | | | | |
| | | | | sterol methyloxidase | | | | | | |
| 305 | 9.00E−19 | 100 | gi\|21592539\| | ref\|NP_565794.1\| | CS | SS | CK | | | |
| | | | | hydroxyproline-rich | | | | | | |
| | | | | glycoprotein family protein | | | | | | |
| | | | | [Arabidopsis thaliana] | | | | | | |
| 306 | 0 | 97 | gi\|15965196\| | ref\|NP_385549.1\|PROBABLE | SP | LL | | | | |
| | | | | ENOLASE PROTEIN | | | | | | |
| 307 | 1.00E−153 | 100 | gi\|16080137\| | pir\|\|A69990 UTP-glucose-1- | LL | | | | | |
| | | | | phosphate uridylyltransferase | | | | | | |
| | | | | homolog ytdA | | | | | | |
| 308 | 1.00E−147 | 98 | gi\|26246388\| | ref\|NP_752427.1\|Pyrroline-5- | LN | | | | | |
| | | | | carboxylate reductase | | | | | | |
| 309 | 1.00E−135 | 94 | gi\|23126946\| | ref\|ZP_00108826.1\|COG0345: | PP | | | | | |
| | | | | Pyrroline-5-carboxylate | | | | | | |
| | | | | reductase | | | | | | |
| 310 | 0 | 100 | gi\|16263079\| | ref\|NP_435872.1\|probable | PEG | | | | | |
| | | | | alcohol | | | | | | |
| 311 | 0 | 99 | gi\|15888903\| | pir\|\|H97551 probable | LL | | | | | |
| | | | | aminotransferase aatc | | | | | | |
| 312 | 0 | 90 | gi\|16080158\| | ref\|NP_390984.1\|glycine | CS | CK | | | | |
| | | | | betaine aldehyde | | | | | | |
| | | | | dehydrogenase | | | | | | |
| 313 | 1.00E−141 | 94 | gi\|15614866\| | ref\|NP_243169.1\|UTP- | PP | | | | | |
| | | | | glucose-1-phosphate | | | | | | |
| | | | | uridylyltransferas | | | | | | |
| 314 | 0 | 99 | gi\|23111329\| | ref\|ZP_00097007.1\|COG0205: | CS | PP | CK | | | |
| | | | | 6-phosphofructokinase | | | | | | |
| 315 | 1.00E−150 | 87 | gi\|37526393\| | ref\|NP_929737.1\|UTP-- | PEG | SS | | | | |
| | | | | glucose-1-phosphate | | | | | | |
| | | | | uridylyltransferase (UDP- | | | | | | |
| | | | | glucose pyrophosphorylase) | | | | | | |
| | | | | (UDPGP) | | | | | | |
| 316 | 0 | 99 | gi\|16128895\| | ref\|NP_415448.1\|aspartate | PP | | | | | |
| | | | | aminotransferase | | | | | | |
| 317 | 0 | 97 | gi\|16080149\| | ref\|NP_390975.1\|glucose-1- | DS | | | | | |
| | | | | phosphate | | | | | | |
| | | | | adenylyltransferase | | | | | | |
| 318 | 0 | 96 | gi\|48732455\| | ref\|ZP_00266198.1\|COG1012: | HS | PP | | | | |
| | | | | NAD-dependent aldehyde | | | | | | |
| | | | | dehydrogenases | | | | | | |
| 319 | 0 | 97 | gi\|16129263\| | ref\|NP_415818.1\|4- | SS | PP | | | | |
| | | | | aminobutyrate | | | | | | |
| | | | | aminotransferase | | | | | | |
| 320 | 0 | 99 | gi\|16128583\| | ref\|NP_415133.1\|putative | PP | | | | | |
| | | | | PLP-dependent | | | | | | |
| | | | | aminotransferase | | | | | | |
| 321 | 0 | 99 | gi\|30063716\| | ref\|NP_837887.1\|putative | CS | CK | | | | |
| | | | | aminotransferase | | | | | | |
| 322 | 0 | 99 | gi\|16130084\| | ref\|NP_416651.1\|bifunctional: | SS | PP | | | | |
| | | | | putative glutamate synthase | | | | | | |
| | | | | (N-terminal); putative | | | | | | |
| | | | | oxidoreductase (C-terminal) | | | | | | |
| 323 | 0 | 94 | gi\|16128664\| | ref\|NP_415214.1\|phosphoglucomutase | SP | PP | | | | |
| 324 | 0 | 96 | gi\|49176307\| | ref\|NP_417544.3\|probable | CS | CK | | | | |
| | | | | ornithine aminotransferase | | | | | | |
| | | | | [Escherichia coli K12] (EC | | | | | | |
| | | | | 2.6.1.13) | | | | | | |
| 325 | 1.00E−175 | 80 | gi\|48729503\| | ref\|ZP_00263253.1\|COG0508: | CK | PP | | | | |
| | | | | Pyruvate/2-oxoglutarate | | | | | | |
| | | | | dehydrogenase complex, | | | | | | |
| | | | | dihydrolipoamide | | | | | | |
| | | | | acyltransferase (E2) | | | | | | |
| | | | | component, and related | | | | | | |
| | | | | enzymes | | | | | | |
| 326 | 1.00E−173 | 80 | gi\|28869402\| | ref\|NP_792021.1\|2- | CK | PP | | | | |
| | | | | oxoglutarate dehydrogenase, | | | | | | |
| | | | | E2 component, | | | | | | |
| | | | | dihydrolipoamide | | | | | | |
| | | | | succinyltransferase | | | | | | |
| 327 | 1.00E−161 | 90 | gi\|37524574\| | ref\|NP_927918.1\|Transaldolase B | PP | | | | | |
| 328 | 0 | 82 | gi\|37525385\| | ref\|NP_928729.1\|Dihydrolipoamide | LN | PP | | | | |
| | | | | succinyltransferase | | | | | | |
| | | | | component of 2-oxoglutarate | | | | | | |
| | | | | dehydrogenase complex (E2) | | | | | | |
| 329 | 3.00E−55 | 86 | gi\|16332334\| | ref\|NP_443062.1\|hypothetical | CS | PP | HS | | | |
| | | | | protein slr0607 | | | | | | |
| 330 | 0 | 100 | gi\|15614388\| | ref\|NP_242691.1\|acetoin | LL | | | | | |
| | | | | dehydrogenase E3 | | | | | | |
| | | | | component | | | | | | |
| 331 | 0 | 99 | gi\|15615327\| | ref\|NP_243630.1\|dihydrolipoamide | LN | | | | | |
| | | | | dehydrogenase | | | | | | |
| 332 | 0 | 97 | gi\|16078525\| | ref\|NP_389344.1\|dihydrolipoamide | HS | DS | | | | |
| | | | | dehydrogenase E3 | | | | | | |
| | | | | subunit of both pyruvate | | | | | | |
| | | | | dehydrogenase and 2- | | | | | | |
| | | | | oxoglutarate dehydrogenase | | | | | | |
| | | | | complexes | | | | | | |
| 333 | 0 | 94 | gi\|15800431\| | ref\|NP_286443.1\|2- | CS | CK | | | | |
| | | | | oxoglutarate dehydrogenase | | | | | | |
| 334 | 0 | 89 | gi\|22136798\| | gb\|AAM91743.1\|putative | LN | | | | | |
| | | | | phosphate/phosphoenolpyruvate | | | | | | |
| | | | | translocator precursor | | | | | | |
| | | | | protein | | | | | | |
| 335 | 0 | 100 | gi\|49176098\| | ref\|NP_415825.3\|putative | HS | SS | | | | |
| | | | | polysaccharide hydrolase | | | | | | |
| 336 | 0 | 96 | gi\|15889444\| | ref\|NP_355125.1\|AGR_C_3927p | CK | HS | PP | PEG | CS | SS |
| | | | | [Agrobacterium | | | | | | |
| | | | | tumefaciens str. C58] | | | | | | |
| | | | | ref\|NP_532838.1\| | | | | | | |
| | | | | bacteriophytochrome protein | | | | | | |
| 337 | 0 | 95 | gi\|15613173\| | ref\|NP_241476.1\|sulfite | PP | CK | CS | PEG | | |
| | | | | reductase (NADPH) | | | | | | |
| 338 | 0 | 100 | gi\|30062749\| | ref\|NP_836920.1\|nitrate | LN | | | | | |
| | | | | reductase 1, beta subunit | | | | | | |
| 339 | 0 | 100 | gi\|15804618\| | ref\|NP_290659.1\|glucosephosphate | PP | CS | | | | |
| | | | | isomerase | | | | | | |
| 340 | 0 | 100 | gi\|23125493\| | ref\|ZP_00107424.1\|COG0243: | PP | PEG | HS | | | |
| | | | | Anaerobic dehydrogenases, | | | | | | |
| | | | | typically selenocysteine- | | | | | | |
| | | | | containing | | | | | | |
| 341 | 0 | 98 | gi\|28868179\| | ref\|NP_790798.1\|glucose-6- | CK | PP | SP | PEG | CS | |
| | | | | phosphate isomerase | | | | | | |
| 342 | 0 | 96 | gi\|16329427\| | ref\|NP_440155.1\|isocitrate | CK | CS | | | | |
| | | | | dehydrogenase (NADP+) | | | | | | |
| 343 | 0 | 85 | gi\|37524705\| | ref\|NP_928049.1\|sulfite | DS | PP | PEG | | | |
| | | | | reductase [NADPH] | | | | | | |
| | | | | hemoprotein beta-component | | | | | | |
| | | | | (SIR-HP) | | | | | | |
| 344 | 1.00E−121 | 95 | gi\|6728966\| | gb\|AAF26964.1\|unknown | LN | | | | | |
| | | | | protein | | | | | | |
| 345 | 0 | 96 | gi\|6714417\| | gb\|AAF26105.1\|unknown | LN | | | | | |
| | | | | protein | | | | | | |
| 346 | 0 | 78 | gi\|22136866\| | ref\|NP_177343.2\|protease- | CS | | | | | |
| | | | | associated zinc finger | | | | | | |
| | | | | (C3HC4-type RING finger) | | | | | | |
| | | | | family protein | | | | | | |
| 347 | 0 | 92 | gi\|51971567\| | ref\|NP_850943.1\|glutamine | CK | HS | CS | | | |
| | | | | amidotransferase-related | | | | | | |
| 348 | 2.00E−65 | 88 | gi\|26450572\| | dbj\|BAC42398.1\|unknown | CK | CS | | | | |
| | | | | protein [Arabidopsis thaliana] | | | | | | |
| 349 | 1.00E−115 | 100 | gi\|6730712\| | gb\|AAF27107.1\|Unknown | CK | CS | | | | |
| | | | | protein | | | | | | |
| 350 | 0 | 100 | gi\|20465757\| | gb\|AAM20367.1\|putative | PP | | | | | |
| | | | | cyclin protein | | | | | | |
| 351 | 8.00E−90 | 56 | gi\|23297314\| | ref\|NP_849559.1\|WRKY | CK | CS | | | | |
| | | | | family transcription factor | | | | | | |
| | | | | [Arabidopsis thaliana] | | | | | | |
| 352 | 1.00E−171 | 83 | gi\|50940357\| | ref\|XP_479706.1\|putative | PP | HS | SS | | | |
| | | | | Shwachman-Bodian-Diamond | | | | | | |
| | | | | syndrome protein | | | | | | |
| 353 | 2.00E−46 | 92 | gi\|50929801\| | ref\|XP_474428.1\|OSJNBa007 | CK | PP | | | | |
| | | | | 0M12.6 | | | | | | |
| 354 | 7.00E−54 | 92 | gi\|5042333\| | emb\|CAB44664.1\|BETL4 | PP | | | | | |
| | | | | protein | | | | | | |
| 355 | 1.00E−56 | 34 | gi\|42563228\| | ref\|NP_565108.2\|zinc finger | HS | SS | PEG | | | |
| | | | | (CCCH-type) family protein | | | | | | |
| 356 | 4.00E−61 | 72 | gi\|51970440\| | dbj\|BAD43912.1\|hypothetical | CK | PP | | | | |
| | | | | protein | | | | | | |
| 357 | 7.00E−91 | 99 | gi\|16331395\| | ref\|NP_442123.1\|hypothetical | SS | | | | | |
| | | | | protein slr0013 | | | | | | |
| 358 | 0 | 99 | gi\|21229841\| | ref\|NP_635758.1\|vanillate O- | CS | CK | | | | |
| | | | | demethylase oxygenase | | | | | | |
| | | | | subunit | | | | | | |
| 359 | 1.00E−142 | 100 | gi\|16331855\| | sp\|Q55891\|PCYA_SYNY3 | CK | PP | CS | | | |
| | | | | Phycocyanobilin: ferredoxin | | | | | | |
| | | | | oxidoreductase | | | | | | |
| 360 | 0 | 100 | gi\|16331872\| | ref\|NP_442600.1\|hypothetical | SP | CK | | | | |
| | | | | protein slr0304 | | | | | | |
| 361 | 3.00E−86 | 87 | gi\|21593344\| | gb\|AAM65293.1\|putative cold- | LN | | | | | |
| | | | | regulated protein | | | | | | |
| | | | | ref\|NP_178469.1\|late | | | | | | |
| | | | | embryogenesis abundant | | | | | | |
| | | | | domain-containing protein/ | | | | | | |
| | | | | LEA domain-containing | | | | | | |
| | | | | protein | | | | | | |
| 362 | 8.00E−91 | 100 | gi\|16330328\| | sp\|P73690\|Y51L_SYNY3 | HS | | | | | |
| | | | | Ycf51-like protein | | | | | | |
| | | | | dbj\|BAA17736.1\| | | | | | | |
| | | | | ORF_ID: sll1702~hypothetical | | | | | | |
| | | | | protein | | | | | | |
| 363 | 5.00E−87 | 100 | gi\|15612647\| | ref\|NP_240950.1\|hypoxanthine- | PEG | | SS | | | |
| | | | | guanine | | | | | | |
| | | | | phosphoribosyltransferase | | | | | | |
| 364 | 0 | 83 | gi\|6323679\| | sp\|P23748\|MPIP_YEAST M- | CS | LL | PP | CK | HS | SS |
| | | | | phase inducer phosphatase | | | | | | |
| | | | | (Mitosis initiation protein | | | | | | |
| | | | | MIH1) (Mitotic inducer | | | | | | |
| | | | | homolog) | | | | | | |
| 365 | 2.00E−33 | 90 | gi\|34898476\| | ref\|NP_910584.1\|EST | PP | | | | | |
| | | | | AU082567(S21715) | | | | | | |
| | | | | corresponds to a region of the | | | | | | |
| | | | | predicted gene.~Similar to | | | | | | |
| | | | | S. tuberosum ubiquinol | | | | | | |
| | | | | cytochrome c reductase. | | | | | | |
| | | | | (X79275) | | | | | | |
| 366 | 6.00E−54 | 81 | gi\|21592528\| | gb\|AAM64477.1\|ring-box | HS | SS | | | | |
| | | | | protein-like | | | | | | |
| 367 | 0 | 76 | gi\|34910110\| | dbj\|BAB92553.1\|DNA cross- | CK | HS | | | | |
| | | | | link repair 1B-like protein | | | | | | |
| 368 | 1.00E−156 | 100 | gi\|21436267\| | gb\|AAM51272.1\|putative | LN | | | | | |
| | | | | nodulin-26 protein | | | | | | |
| 369 | 1.00E−100 | 81 | gi\|50900588\| | ref\|XP_462727.1\|putative | LN | | | | | |
| | | | | phenylalkylamine binding | | | | | | |
| | | | | protein | | | | | | |
| | | | | sp\|Q9FTZ2\|EBP_ORYSA | | | | | | |
| | | | | Probable 3-beta- | | | | | | |
| | | | | hydroxysteroid- | | | | | | |
| | | | | delta(8),delta(7)-isomerase | | | | | | |
| | | | | (Cholestenol delta-isomerase) | | | | | | |
| | | | | (Delta8-delta7 sterol | | | | | | |
| | | | | isomerase) (D8-D7 sterol | | | | | | |
| | | | | isomerase) dbj\|BAB92148.1\| | | | | | | |
| | | | | putative C-8,7 sterol | | | | | | |
| | | | | isomerase | | | | | | |
| 370 | 4.00E−39 | 46 | gi\|25361093\| | pir\|\|T00967hypothetical | HS | | | | | |
| | | | | protein At2g26340 | | | | | | |
| 371 | 2.00E−78 | 89 | gi\|50906887\| | ref\|XP_464932.1\|cytochrome | LL | PP | | | | |
| | | | | c biogenesis protein-like | | | | | | |
| 372 | 1.00E−22 | 98 | gi\|50899510\| | ref\|XP_450543.1\|unknown | CK | LL | CS | PP | SS | |
| | | | | protein | | | | | | |
| 373 | 5.00E−79 | 85 | gi\|50934647\| | ref\|XP_476851.1\|bifunctional | CK | CS | | | | |
| | | | | phosphopantetheine adenylyl | | | | | | |
| | | | | transferase dephospho CoA | | | | | | |
| | | | | kinase-like protein | | | | | | |
| 374 | 8.00E−56 | 50 | gi\|38257027\| | dbj\|BAD01556.1\|ERF-like | PP | | | | | |
| | | | | protein | | | | | | |
| 375 | 1.00E−64 | 55 | gi\|18423944\| | ref\|NP_568850.1\|basic helix- | PP | | | | | |
| | | | | loop-helix (bHLH) family | | | | | | |
| | | | | protein | | | | | | |
| 376 | 1.00E−39 | 42 | gi\|42567912\| | ref\|NP_568344.2\|myb family | SP | PEG | | | | |
| | | | | transcription factor | | | | | | |
| 377 | 6.00E−89 | 84 | gi\|37535020\| | ref\|NP_921812.1\|putative | LN | | | | | |
| | | | | HAM-1-like protein | | | | | | |
| 378 | 2.00E−49 | 59 | gi\|27804371\| | gb\|AAO22987.1\|MADS-box | LL | SS | | | | |
| | | | | transcription factor CDM104 | | | | | | |
| 379 | 2.00E−68 | 60 | gi\|22137112\| | emb\|CAB72174.1\|responce | CK | SS | | | | |
| | | | | reactor 4 [Arabidopsis | | | | | | |
| | | | | thaliana] | | | | | | |
| 380 | 0 | 89 | gi\|50910245\| | ref\|XP_466611.1\|putative | CS | CK | | | | |
| | | | | PLRR-4 polymorphic leucine- | | | | | | |
| | | | | rich repeat protein | | | | | | |
| 381 | 2.00E−30 | 44 | gi\|17933450\| | gb\|AAK70215.1\|MADS-box | CS | CK | PEG | | | |
| | | | | protein | | | | | | |
| 382 | 1.00E−93 | 54 | gi\|20502508\| | dbj\|BAB91414.1\|E2F-like | CK | PEG | CS | | | |
| | | | | repressor E2L3 | | | | | | |
| 383 | 2.00E−38 | 58 | gi\|50909627\| | ref\|XP_466302.1\|unknown | PEG | | | | | |
| | | | | protein | | | | | | |
| 384 | 3.00E−41 | 63 | gi\|50399946\| | gb\|AAT76334.1\|putative DNA- | HS | | | | | |
| | | | | directed RNA polymerase II | | | | | | |
| | | | | subunit | | | | | | |
| 385 | 4.00E−59 | 68 | gi\|37535924\| | ref\|NP_922264.1\|unknown | LN | | | | | |
| | | | | protein | | | | | | |
| 386 | 8.00E−57 | 58 | gi\|50944571\| | ref\|XP_481813.1\|transfactor- | HS | | | | | |
| | | | | like | | | | | | |
| 387 | 3.00E−73 | 42 | gi\|53792319\| | dbj\|BAD53026.1\|putative ring | LN | | | | | |
| | | | | finger protein 1 | | | | | | |
| 388 | 9.00E−93 | 47 | gi\|25054862\| | ref\|NP_850517.1\| | LN | | | | | |
| | | | | transcription factor, putative/ | | | | | | |
| | | | | zinc finger (C3HC4 type RING | | | | | | |
| | | | | finger) family protein | | | | | | |
| 389 | 7.00E−91 | 66 | gi\|20269059\| | emb\|CAC84710.1\|aux/IAA | PEG | | | | | |
| | | | | protein | | | | | | |
| 390 | 2.00E−72 | 45 | gi\|26450026\| | ref\|NP_172358.1\|myb family | LL | LN | | | | |
| | | | | transcription factor (MYB60) | | | | | | |
| 391 | 1.00E−80 | 46 | gi\|50946213\| | ref\|XP_482634.1\|AP2/EREBP | LN | | | | | |
| | | | | transcription factor-like protein | | | | | | |
| 392 | 8.00E−54 | 43 | gi\|29824137\| | ref\|NP_189337.1\|TCP family | CK | CS | | | | |
| | | | | transcription factor, putative | | | | | | |
| | | | | [Arabidopsis thaliana] | | | | | | |
| 393 | 0 | 99 | gi\|558543\| | emb\|CAA85320.1\|C-terminal | HS | PP | PEG | | | |
| | | | | zinc-finger | | | | | | |
| 394 | 1.00E−124 | 62 | gi\|20259301\| | ref\|NP_566010.1\|SET | PP | SS | | | | |
| | | | | domain-containing protein | | | | | | |
| | | | | (ASHH3) | | | | | | |
| 395 | 4.00E−54 | 65 | gi\|21553740\| | gb\|AAM62833.1\|putative zinc | PP | PEG | CS | | | |
| | | | | finger protein | | | | | | |
| 396 | 2.00E−54 | 40 | gi\|20465561\| | ref\|NP_974448.1\|zinc finger | LL | LN | | | | |
| | | | | (C3HC4-type RING finger) | | | | | | |
| | | | | family protein | | | | | | |
| 397 | 1.00E−112 | 65 | gi\|51557078\| | gb\|AAU06309.1\|MYB | PP | LN | | | | |
| | | | | transcription factor | | | | | | |
| 398 | 0 | 82 | gi\|15148926\| | gb\|AAK84890.1\|TGA-type | LN | | | | | |
| | | | | basic leucine zipper protein | | | | | | |
| | | | | TGA2.2 | | | | | | |
| 399 | 6.00E−78 | 47 | gi\|28558782\| | gb\|AAO45753.1\|RING/C3HC4/ | LN | | | | | |
| | | | | PHD zinc finger-like protein | | | | | | |
| 400 | 0 | 67 | gi\|42565068\| | ref\|NP_188743.3\|transducin | HS | | | | | |
| | | | | family protein/WD-40 repeat | | | | | | |
| | | | | family protein | | | | | | |
| 401 | 7.00E−29 | 46 | gi\|38638682\| | ref\|NP_177307.1\|AP2 | CS | LL | LN | | | |
| | | | | domain-containing | | | | | | |
| | | | | transcription factor, putative | | | | | | |
| 402 | 0 | 84 | gi\|50904461\| | ref\|XP_463719.1\|P0466H10.27 | PEG | | | | | |
| 403 | 0 | 88 | gi\|53796982\| | ref\|ZP_00357872.1\|COG0160: | SP | CS | | | | |
| | | | | 4-aminobutyrate | | | | | | |
| | | | | aminotransferase and related | | | | | | |
| | | | | aminotransferases | | | | | | |
| 404 | 0 | 94 | gi\|53796007\| | ref\|ZP_00357032.1\|COG0696: | PP | SS | PEG | HS | | |
| | | | | Phosphoglyceromutase | | | | | | |
| 405 | 0 | 93 | gi\|30697938\| | ref\|NP_201207.2\|expressed | DS | HS | | | | |
| | | | | protein | | | | | | |
| 406 | 0 | 100 | gi\|13878095\| | gb\|AAK44125.1\|unknown | DS | CS | | | | |
| | | | | protein | | | | | | |
| 407 | 0 | 97 | gi\|12324320\| | gb\|AAG52129.1\|hypothetical | LL | | | | | |
| | | | | protein; 63994-65574 | | | | | | |
| 408 | 0 | 84 | gi\|22136086\| | gb\|AAM91121.1\|photoreceptor- | CS | PP | | | | |
| | | | | interacting protein-like | | | | | | |

### Trait Improvement Screens

[0084] DS-Improvement of drought tolerance identified by a soil drought stress tolerance screen: Drought or water deficit conditions impose mainly osmotic stress on plants. Plants are particularly vulnerable to drought during the flowering stage. The drought condition in the screening process disclosed in Example 1B started from the flowering time and was sustained to the end of harvesting. The present invention provides recombinant DNA that can improve the plant survival rate under such sustained drought condition. Exemplary recombinant DNA for conferring such drought tolerance are identified as such in Table 3. Such recombinant DNA may find particular use in generating transgenic plants that are tolerant to the drought condition imposed during flowering time and in other stages of the plant life cycle. As demonstrated from the model plant screen, in some embodiments of transgenic plants with trait-improving recombinant DNA grown under such sustained drought condition can also have increased total seed weight per plant in addition to the increased survival rate within a transgenic population, providing a higher yield potential as compared to control plants.

[0085] PEG-Improvement of drought tolerance identified by PEG induced osmotic stress tolerance screen: Various drought levels can be artificially induced by using various concentrations of polyethylene glycol (PEG) to produce different osmotic potentials (Pilon-Smits et al. (1995) Plant Physiol. 107:125-130). Several physiological characteristics have been reported as being reliable indications for selection of plants possessing drought tolerance. These characteristics include the rate of seed germination and seedling growth. The traits can be assayed relatively easily by measuring the growth rate of seedling in PEG solution. Thus, a PEG-induced osmotic stress tolerance screen is a useful surrogate for drought tolerance screen. As demonstrated from the model plant screen, embodiments of transgenic plants with trait-improving recombinant DNA identified in the PEG-induced osmotic stress tolerance screen can survive better drought conditions providing a higher yield potential as compared to control plants.

[0086] SS-Improvement of drought tolerance identified by high salinity stress tolerance screen: Three different factors are responsible for salt damages: (1) osmotic effects, (2) disturbances in the mineralization process, (3) toxic effects caused by the salt ions, e.g. inactivation of enzymes. While the first factor of salt stress results in the wilting of the plants that is similar to drought effect, the ionic aspect of salt stress is clearly distinct from drought. The present invention provides genes that help plants to maintain biomass, root growth, and/or plant development in high salinity conditions, which are identified as such in Table 3. Since osmotic effect is one of the major components of salt stress, which is common to the drought stress, trait-improving recombinant DNA identified in a high salinity stress tolerance screen can also provide transgenic crops with improved drought tolerance. As demonstrated from the model plant screen, embodiments of transgenic plants with trait-improving recombinant DNA identified in a high salinity stress tolerance screen can survive better drought conditions and/or high salinity conditions providing a higher yield potential as compared to control plants.

[0087] HS-Improvement of drought tolerance identified by heat stress tolerance screen: Heat and drought stress often occur simultaneously, limiting plant growth. Heat stress can cause the reduction in photosynthesis rate, inhibition of leaf growth and osmotic potential in plants. Thus, genes identified by the present invention as heat stress tolerance conferring genes may also impart improved drought tolerance to plants. As demonstrated from the model plant screen, embodiments of transgenic plants with trait-improving recombinant DNA identified in a heat stress tolerance screen can survive better heat stress conditions and/or drought conditions providing a higher yield potential as compared to control plants.

[0088] CK and CS-Improvement of tolerance to cold stress: Low temperature may immediately result in mechanical constraints, changes in activities of macromolecules, and reduced osmotic potential. In the present invention, two screening conditions, i.e. cold shock tolerance screen (CK) and cold germination tolerance screen (CS), were set up to look for transgenic plants that display visual growth advantage at lower temperature. In cold germination tolerance screen, the transgenic Arabidopsis plants were exposed to a constant temperature of 8° C. from planting until day 28 post plating. The trait-improving recombinant DNA identified by such screen are particular useful for the production of transgenic plant that can germinate more robustly in a cold temperature as compared to the wild type plants. In cold shock tolerance screen, the transgenic plants were first grown under the normal growth temperature of 22° C. until day 8 post plating, and subsequently were placed under 8° C. until day 28 post plating. As demonstrated from the model plant screen, embodiments of transgenic plants with trait-improving recombinant DNA identified in a cold shock stress tolerance screen and/or a cold germination stress tolerance screen can survive better cold conditions providing a higher yield potential as compared to control plants.

[0089] Improvement of tolerance to multiple stresses: Different kinds of stresses often lead to identical or similar reaction in the plants. Genes that are activated or inactivated as a reaction to stress can either act directly in a way the genetic product reduces a specific stress, or they can act indirectly by activating other specific stress genes. By manipulating the activity of such regulatory genes, i.e. multiple stress tolerance genes, the plant can be enabled to react to different kinds of stresses. For examples, PEP SEQ ID NO: 229 and PEP SEQ ID NO: 372 can be used to improve both salt stress tolerance and cold stress tolerance in plants. Of particular interest, plants transformed with PEP SEQ ID NO: 364 can resist heat stress, salt stress and cold stress. In addition to these multiple stress tolerance genes, the stress tolerance conferring genes provided by the present invention may be used in combinations to generate transgenic plants that can resist multiple stress conditions.

[0090] PP-Improvement of early plant growth and development: It has been known in the art that to minimize the impact of disease on crop profitability, it is important to start the season with healthy vigorous plants. This means avoiding seed and seedling diseases, leading to increased nutrient uptake and increased yield potential. Traditionally early planting and applying fertilizer are the methods used for promoting early seedling vigor. In early development stage, plant embryos establish only the basic root-shoot axis, a cotyledon storage organ(s), and stem cell populations, called the root and shoot apical meristems, that continuously generate new organs throughout post-embryonic development. “Early growth and development” used herein encompasses the stages of seed imbibition through the early vegetative phase. The present invention provides genes that are useful to produce transgenic plants that have advantages in one or more processes including, but not limited to, germination, seedling vigor, root growth and root morphology under non-stressed conditions. The transgenic plants starting from a more robust seedling are less susceptible to the fungal and bacterial pathogens that attach germinating seeds and seedling. Furthermore, seedlings with advantage in root growth are more resistant to drought stress due to extensive and deeper root architecture. Therefore, it can be recognized by those skilled in the art that genes conferring the growth advantage in early stages to plants may also be used to generate transgenic plants that are more resistant to various stress conditions due to improved early plant development. The present invention provides such exemplary recombinant DNA that confer both the stress tolerance and growth advantages to plants, identified as such in Table 3, e.g. PEP SEQ ID NO: 372 which can improve the plant early growth and development, and impart salt and cold tolerance to plants. As demonstrated from the model plant screen, embodiments of transgenic plants with trait-improving recombinant DNA identified in the early plant development screen can grow better under non-stress conditions and/or stress conditions providing a higher yield potential as compared to control plants.

[0091] SP-Improvement of late plant growth and development: “Late growth and development” used herein encompasses the stages of leaf development, flower production, and seed maturity. In certain embodiments, transgenic plants produced using genes that confer growth advantages to plants provided by the present invention, identified as such in Table 3, exhibit at least one phenotypic characteristics including, but not limited to, increased rosette radius, increased rosette dry weight, seed dry weight, silique dry weight, and silique length. On one hand, the rosette radius and rosette dry weight are used as the indexes of photosynthesis capacity, and thereby plant source strength and yield potential of a plant. On the other hand, the seed dry weight, silique dry weight and silique length are used as the indexes for plant sink strength, which are considered as the direct determinants of yield. As demonstrated from the model plant screen, embodiments of transgenic plants with trait-improving recombinant DNA identified in the late development screen can grow better and/or have improved development during leaf development and seed maturation providing a higher yield potential as compared to control plants.

[0092] LL-Improvement of tolerance to shade stress identified in a low light screen: The effects of light on plant development are especially prominent at the seedling stage. Under normal light conditions with unobstructed direct light, a plant seeding develops according to a characteristic photomorphogenic pattern, in which plants have open and expanded cotyledons and short hypocotyls. Then the plant's energy is devoted to cotyledon and leaf development while longitudinal extension growth is minimized. Under low light condition where light quality and intensity are reduced by shading, obstruction or high population density, a seedling displays a shade-avoidance pattern, in which the seedling displays a reduced cotyledon expansion, and hypocotyls extension is greatly increased. As the result, a plant under low light condition increases significantly its stem length at the expanse of leaf, seed or fruit and storage organ development, thereby adversely affecting of yield. The present invention provides recombinant DNA that enable plants to have an attenuated shade avoidance response so that the source of plant can be contributed to reproductive growth efficiently, resulting higher yield as compared to the wild type plants. As demonstrated from the model plant screen, embodiments of transgenic plants with trait-improving recombinant DNA identified in a shade stress tolerance screen can have attenuated shade response under shade conditions providing a higher yield potential as compared to control plants. The transgenic plants generated by the present invention may be suitable for a higher density planting, thereby resulting increased yield per unit area.

[0093] LN-Improvement of Tolerance to Low Nitrogen Availability Stress

[0094] Nitrogen is a key factor in plant growth and crop yield. The metabolism, growth and development of plants are profoundly affected by their nitrogen supply. Restricted nitrogen supply alters shoot to root ratio, root development, activity of enzymes of primary metabolism and the rate of senescence (death) of older leaves. All field crops have a fundamental dependence on inorganic nitrogenous fertilizer. Since fertilizer is rapidly depleted from most soil types, it must be supplied to growing crops two or three times during the growing season. Enhanced nitrogen use efficiency by plants should enable crops cultivated under low nitrogen availability stress condition resulted from low fertilizer input or poor soil quality.

[0095] According to the present invention, transgenic plants generated using the recombinant nucleotides, which confer enhanced nitrogen use efficiency, identified as such in Table 3, exhibit one or more desirable traits including, but not limited to, increased seedling weight, increased number of green leaves, increased number of rosette leaves, increased root length and advanced flower bud formation. One skilled in the art may recognize that the transgenic plants provided by the present invention with enhanced nitrogen use efficiency may also have altered amino acid or protein compositions, increased yield and/or better seed quality. The transgenic plants of the present invention may be productively cultivated under nitrogen nutrient deficient conditions, i.e. nitrogen-poor soils and low nitrogen fertilizer inputs, that would cause the growth of wild type plants to cease or to be so diminished as to make the wild type plants practically useless. The transgenic plants also may be advantageously used to achieve earlier maturing, faster growing, and/or higher yielding crops and/or produce more nutritious foods and animal feedstocks when cultivated using nitrogen non-limiting growth conditions.

[0096] Stacked Traits: The present invention also encompasses transgenic plants with stacked engineered traits, e.g. a crop having an improved phenotype resulting from expression of a trait-improving recombinant DNA, in combination with herbicide and/or pest resistance traits. For example, genes of the current invention can be stacked with other traits of agronomic interest, such as a trait providing herbicide resistance, for example a RoundUp Ready trait, or insect resistance, such as using a gene from Bacillus thuringensis to provide resistance against lepidopteran, coliopteran, homopteran, hemiopteran, and other insects. Herbicides for which resistance is useful in a plant include glyphosate herbicides, phosphinothricin herbicides, oxynil herbicides, imidazolinone herbicides, dinitroaniline herbicides, pyridine herbicides, sulfonylurea herbicides, bialaphos herbicides, sulfonamide herbicides and gluphosinate herbicides. To illustrate that the production of transgenic plants with herbicide resistance is a capability of those of ordinary skill in the art, reference is made to U.S. patent application publications 2003/0106096A1 and 2002/0112260A1 and U.S. Pat. Nos. 5,034,322; 5,776,760, 6,107,549 and 6,376,754, all of which are incorporated herein by reference. To illustrate that the production of transgenic plants with pest resistance is a capability of those of ordinary skill in the art reference is made to U.S. Pat. Nos. 5,250,515 and 5,880,275 which disclose plants expressing an endotoxin of Bacillus thuringiensis bacteria, to U.S. Pat. No. 6,506,599 which discloses control of invertebrates which feed on transgenic plants which express dsRNA for suppressing a target gene in the invertebrate, to U.S. Pat. No. 5,986,175 which discloses the control of viral pests by transgenic plants which express viral replicase, and to U.S. Patent Application Publication 2003/0150017 A1 which discloses control of pests by a transgenic plant which express a dsRNA targeted to suppressing a gene in the pest, all of which are incorporated herein by reference.

[0097] Once one recombinant DNA has been identified as conferring an improved trait of interest in transgenic Arabidopsis plants, several methods are available for using the sequence of that recombinant DNA and knowledge about the protein it encodes to identify homologs of that sequence from the same plant or different plant species or other organisms, e.g. bacteria and yeast. Thus, in one aspect, the invention provides methods for identifying a homologous gene with a DNA sequence homologous to any of SEQ ID NO: 1 through SEQ ID NO: 204, or a homologous protein with an amino acid sequence homologous to any of SEQ ID NO: 205 to through SEQ ID NO: 408. In another aspect, the present invention provides the protein sequences of identified homologs for a sequence listed as SEQ ID NO: 205 through SEQ ID NO: 408. In yet another aspect, the present invention also includes linking or associating one or more desired traits, or gene function with a homolog sequence provided herein.

[0098] The trait-improving recombinant DNA and methods of using such trait-improving recombinant DNA for generating transgenic plants with improved traits provided by the present invention are not limited to any particular plant species. Indeed, the plants according to the present invention may be of any plant species, i.e., may be monocotyledonous or dicotyledonous. Preferably, they will be agricultural useful plants, i.e., plants cultivated by man for purposes of food production or technical, particularly industrial applications. Of particular interest in the present invention are corn and soybean plants. The recombinant DNA constructs optimized for soybean transformation and recombinant DNA constructs optimized for corn transformation are provided by the present invention. Other plants of interest in the present invention for production of transgenic plants having improved traits include, without limitation, cotton, canola, wheat, sunflower, sorghum, alfalfa, barley, millet, rice, tobacco, fruit and vegetable crops, and turfgrass.

[0099] In certain embodiments, the present invention contemplates to use an orthologous gene in generating the transgenic plants with similarly improved traits as the transgenic Arabidopsis counterpart. Improved physiological properties in transgenic plants of the present invention may be confirmed in responses to stress conditions, for example in assays using imposed stress conditions to detect improved responses to drought stress, nitrogen deficiency, cold growing conditions, or alternatively, under naturally present stress conditions, for example under field conditions. Biomass measures may be made on greenhouse or field grown plants and may include such measurements as plant height, stem diameter, root and shoot dry weights, and, for corn plants, ear length and diameter.

[0100] Trait data on morphological changes may be collected by visual observation during the process of plant regeneration as well as in regenerated plants transferred to soil. Such trait data includes characteristics such as normal plants, bushy plants, taller plants, thicker stalks, narrow leaves, striped leaves, knotted phenotype, chlorosis, albino, anthocyanin production, or altered tassels, ears or roots. Other enhanced traits may be identified by measurements taken under field conditions, such as days to pollen shed, days to silking, leaf extension rate, chlorophyll content, leaf temperature, stand, seedling vigor, internode length, plant height, leaf number, leaf area, tillering, brace roots, stay green, stalk lodging, root lodging, plant health, barreness/prolificacy, green snap, and pest resistance. In addition, trait characteristics of harvested grain may be confirmed, including number of kernels per row on the ear, number of rows of kernels on the ear, kernel abortion, kernel weight, kernel size, kernel density and physical grain quality.

[0101] To confirm hybrid yield in transgenic corn plants expressing genes of the present invention, it may be desirable to test hybrids over multiple years at multiple locations in a geographical location where maize is conventionally grown, e.g. in Iowa, Ill. or other locations in the midwestern United States, under “normal” field conditions as well as under stress conditions, e.g. under drought or population density stress.

[0102] Transgenic plants can be used to provide plant parts according to the invention for regeneration or tissue culture of cells or tissues containing the constructs described herein. Plant parts for these purposes can include leaves, stems, roots, flowers, tissues, epicotyl, meristems, hypocotyls, cotyledons, pollen, ovaries, cells and protoplasts, or any other portion of the plant which can be used to regenerate additional transgenic plants, cells, protoplasts or tissue culture. Seeds of transgenic plants are provided by this invention can be used to propagate more plants containing the trait-improving recombinant DNA constructs of this invention. These descendants are intended to be included in the scope of this invention if they contain a trait-improving recombinant DNA construct of this invention, whether or not these plants are selfed or crossed with different varieties of plants.

[0103] The various aspects of the invention are illustrated by means of the following examples which are in no way intended to limit the full breath and scope of claims.

### EXAMPLE 1

[0104] This example illustrates the identification of recombinant DNA that confers improved trait(s) to plants

[0105] A large set of genes of interest were cloned from a genomic or cDNA library using primers specific to sequences upstream and downstream of the coding region. Transformation vectors were prepared to constitutively transcribe DNA in either sense orientation (for enhanced protein expression) or anti-sense orientation (for endogenous gene suppression) under the control of an enhanced Cauliflower Mosaic Virus 35S promoter. The transformation vectors also contain a bar gene as a selectable marker for resistance to glufosinate herbicide. The transformation of Arabidopsis plants was carried out using the vacuum infiltration method known in the art (Bethtold et al. Methods Mol. Biol. 82:259-66, 1998). Seeds harvested from the plants, named as T1 seeds, were subsequently grown in a glufosinate-containing selective medium to select for plants which were actually transformed and which produced T2 transgenic seed. The plants and seeds were screened for an enhanced trait or a surrogate for an enhanced trait.

### Soil Drought Tolerance Screen

[0106] This screen identified genes for recombinant DNA that imparts enhanced water use efficiency as shown in Arabidopsis plants transformed with recombinant DNA that wilt less rapidly and/or produce higher seed yield when grown in soil under drought conditions

[0107] T2 seeds were sown in flats filled with Metro/Mix® 200 (The Scotts® Company. USA). Humidity domes were added to each flat and flats were assigned locations and placed in climate-controlled growth chambers. Plants were grown under a temperature regime of 22° C. at day and 20° C. at night, with a photoperiod of 16 hours and average light intensity of 170 μmol/m²/s. After the first true leaves appeared, humidity domes were removed. The plants were sprayed with glufosinate herbicide and put back in the growth chamber for 3 additional days. Flats were watered for 1 hour the week following the herbicide treatment. Watering was continued every seven days until the flower bud primordia became apparent, at which time plants were watered for the last time.

[0108] To identify drought tolerant plants, plants were evaluated for wilting response and seed yield. Beginning ten days after the last watering, plants were examined daily until 4 plants/line had wilted. In the next six days, plants were monitored for wilting response. Five drought scores were assigned according to the visual inspection of the phenotypes: 1 for healthy, 2 for dark green, 3 for wilting, 4 severe wilting, and 5 for dead. A score of 3 or higher was considered as wilted.

[0109] At the end of this assay, seed yield measured as seed weight per plant under the drought condition was characterized for the transgenic plants and their controls and analyzed as a quantitative response according to example 1M.

[0110] Two approaches were used for statistical analysis on the wilting response. First, the risk score was analyzed for wilting phenotype and treated as a qualitative response according to the example 1L. Alternatively, the survival analysis was carried out in which the proportions of wilted and non-wilted transgenic and control plants were compared over each of the six days under scoring and an overall log rank test was performed to compare the two survival curves using S-PLUS statistical software (S-PLUS 6, Guide to statistics, Insightful, Seattle, Wash., USA). Table 4 provides a list of recombinant DNA constructs that improve drought tolerance in transgenic plants.

TABLE 4

| | | Wilt Response | | | Seed | | | | Survival Anaysis of | | |
|---|---|---|---|---|---|---|---|---|---|---|---|
| | | Risk score | | | Weight/plant | | | | wilt response | | |
| Pep | | | RS | p- | | | p- | | diff time | p- | |
| SEQ ID | Construct_id | Orientation | mean | value | c | delta | value | c | to wilting | value | c |
| 215 | 19116 | ANTI-SENSE | 0 | 0.795 | S | −0.341 | 0.795 | / | 0.52 | 0.077 | T |
| 250 | 70677 | SENSE | 0.045 | 0.982 | S | −5.73 | 0.982 | / | 0.14 | 0.07 | T |
| 219 | 72712 | SENSE | 0.002 | 0.986 | S | −2.822 | 0.986 | / | 0.64 | 0.242 | / |
| 266 | 72714 | SENSE | 0.01 | 0 | S | 1.253 | 0 | S | 0.14 | 0.059 | T |
| 271 | 72721 | SENSE | 0.05 | 0.834 | T | −0.129 | 0.834 | / | 0 | 1 | / |
| 272 | 72959 | SENSE | 0.001 | 0.172 | S | 0.341 | 0.172 | / | 0.42 | 0.32 | / |
| 317 | 73534 | SENSE | 0.006 | 0.732 | S | −0.195 | 0.732 | / | −0.14 | 0.724 | / |
| 264 | 74244 | SENSE | 0.012 | 0.984 | S | −0.512 | 0.984 | / | 0.13 | 0.54 | / |
| 332 | 74453 | SENSE | 0.655 | 0.001 | / | 0.886 | 0.001 | S | −0.15 | 0.468 | / |

S: represents that the transgenic plants showed statistically significant trait improvement as compared to the reference (p < 0.05, p value, of the delta of a quantitative response or of the risk score of a qualitative response, is the probability that the observed difference between the transgenic plants and the reference occur by chance)
T: represents that the transgenic plants showed a trend of trait improvement as compared to the reference with p < 0.2
/: represents the transgenic plants didn't show any alteration or had unfavorable change in traits examined compared to the reference in the current dataset.

### Heat Stress Tolerance Screen

[0111] Under high temperatures, Arabidopsis seedlings become chlorotic and root growth is inhibited. This screen identified genes for recombinant DNA that imparts enhanced heat tolerance as shown in Arabidopsis plants transformed with the gene of interest that are more resistant to heat stress based on primarily their seedling weight and root growth under high temperature.

[0112] T2 seeds were plated on ½×MS salts, 1/% phytagel, with 10 μg/ml BASTA (7 per plate with 2 control seeds; 9 seeds total per plate). Plates were placed at 4° C. for 3 days to stratify seeds. Plates were then incubated at room temperature for 3 hours and then held vertically for 11 additional days at temperature of 34° C. at day and 20° C. at night. Photoperiod was 16 h. Average light intensity was ˜140 μmol/m²/s. After 14 days of growth, plants were scored for glufosinate resistance, root length, final growth stage, visual color, and seedling fresh weight. A photograph of the whole plate was taken on day 14.

[0113] The seedling weight and root length were analyzed as quantitative responses according to example 1M. The final grow stage at day 14 was scored as success if 50% of the plants had reached 3 rosette leaves and size of leaves are greater than 1 mm (Boyes et al. (2001) The Plant Cell 13, 1499-1510). The growth stage data was analyzed as a qualitative response according to example 1L. Table 5 provides a list of recombinant DNA constructs that improve heat tolerance in transgenic plants.

TABLE 5

| | | | seedling weight | | | Root Length | | | growth stage | | |
|---|---|---|---|---|---|---|---|---|---|---|---|
| Pep | | | | p- | | | p- | | RS | p- | |
| SEQ ID | Construct_id | Orientation | delta | value | c | delta | value | c | mean | value | c |
| 258 | 10903 | ANTI-SENSE | 1.26 | 0 | S | 0.131 | 0.053 | T | 0.86 | 0.051 | T |
| 205 | 12360 | SENSE | 1.305 | 0 | S | 0.142 | 0.052 | T | 0.307 | 0.043 | S |
| 405 | 12824 | SENSE | 1.309 | 0 | S | 0.25 | 0.002 | S | 0.63 | 0.063 | T |
| 211 | 12927 | SENSE | 1.527 | 0 | S | 0.268 | 0.013 | S | 0.803 | 0.018 | S |
| 207 | 15210 | SENSE | 1.189 | 0 | S | 0.121 | 0.029 | S | 0.636 | 0.079 | T |
| 214 | 17309 | SENSE | 1.29 | 0 | S | 0.176 | 0.01 | S | 0.581 | 0.044 | S |
| 242 | 19801 | SENSE | 1.156 | 0 | S | 0.148 | 0.041 | S | 0.413 | 0.141 | T |
| 233 | 19845 | SENSE | 1.242 | 0 | S | 0.148 | 0.051 | T | 0.479 | 0.016 | S |
| 239 | 19850 | SENSE | 1.234 | 0 | S | 0.217 | 0.015 | S | 1.883 | 0.001 | S |
| 237 | 19981 | SENSE | 1.406 | 0 | S | 0.36 | 0 | S | 2.199 | 0 | S |
| 220 | 71546 | SENSE | 1.496 | 0 | S | 0.24 | 0.016 | S | 0.313 | 0.052 | T |
| 246 | 71556 | SENSE | 1.394 | 0 | S | 0.26 | 0.015 | S | 0.194 | 0.076 | T |
| 276 | 73029 | SENSE | 0.88 | 0.002 | S | 0.115 | 0.061 | T | 0.092 | 0.105 | T |
| 318 | 74125 | SENSE | 0.988 | 0 | S | 0.171 | 0.058 | T | 0.206 | 0.053 | T |
| 283 | 74329 | SENSE | 1.19 | 0 | S | 0.124 | 0.08 | T | 0.043 | 0.239 | / |
| 329 | 74402 | SENSE | 1.407 | 0 | S | 0.291 | 0.019 | S | 0.181 | 0.087 | T |
| 335 | 74503 | SENSE | 1.159 | 0 | S | 0.171 | 0.019 | S | 0.206 | 0.02 | S |
| 340 | 74553 | SENSE | 1.141 | 0 | S | 0.184 | 0.02 | S | 0.704 | 0.03 | S |
| 299 | 74669 | SENSE | 1.105 | 0 | S | 0.133 | 0.049 | S | 0.051 | 0.362 | / |
| 352 | 74903 | SENSE | 1.167 | 0 | S | 0.168 | 0.096 | T | 0.836 | 0.041 | S |
| 362 | 74980 | SENSE | 1.084 | 0 | S | 0.165 | 0.027 | S | 1.07 | 0.033 | S |
| 364 | 75337 | SENSE | 1.695 | 0 | S | 0.216 | 0.009 | S | 0.369 | 0.072 | T |
| 367 | 75352 | SENSE | 1.342 | 0 | S | 0.198 | 0.003 | S | 0.311 | 0.053 | T |
| 370 | 75358 | SENSE | 1.314 | 0 | S | 0.131 | 0.034 | S | 0.012 | 0.365 | / |
| 384 | 75409 | SENSE | 1.264 | 0 | S | 0.172 | 0.041 | S | 0.716 | 0.039 | S |
| 386 | 75550 | SENSE | 1.117 | 0 | S | 0.18 | 0.032 | S | 0.384 | 0.074 | T |
| 400 | 75571 | SENSE | 1.182 | 0 | S | 0.185 | 0.042 | S | 0.496 | 0.088 | T |
| 404 | 75909 | SENSE | 1.264 | 0 | S | 0.237 | 0.021 | S | −0.01 | 1 | / |

S: represents the transgenic plants showed statistically significant trait improvement as compared to the reference (p < 0.05)
T: represents the transgenic plants showed a trend of trait improvement as compared to the reference with p < 0.2
/: represents the transgenic plants didn't show any alteration or had unfavorable change in traits examined compared to the reference in the current dataset

### Salt Stress Tolerance Screen

[0114] This screen identified genes for recombinant DNA that imparts enhanced salt tolerance, a surrogate for enhanced water use efficiency, as shown in Arabidopsis plants transformed with the gene of interest that are tolerant to high levels of salt based on their rate of development, root growth and chlorophyll accumulation under high salt conditions.

[0115] T2 seeds were plated on glufosinate selection plates containing 90 mM NaCl and grown under standard light and temperature conditions. All seedlings used in the experiment were grown at a temperature of 22° C. at day and 20° C. at night, a 16-hour photoperiod, an average light intensity of approximately 120 umol/m². On day 11, plants were measured for primary root length. After 3 more days of growth (day 14), plants were scored for transgenic status, primary root length, growth stage, visual color, and the seedlings were pooled for fresh weight measurement. A photograph of the whole plate was also taken on day 14.

[0116] The seedling weight and root length were analyzed as quantitative responses according to example 1M. The final growth stage at day 14 was scored as success if 50% of the plants reached 3 rosette leaves and size of leaves are greater than 1 mm (Boyes, D. C. et. al. (2001), The Plant Cell 13, 1499/1510). The growth stage data was analyzed as a qualitative response according to example 1L. Table 6 provides a list of recombinant DNA constructs that improve high salinity tolerance in transgenic plants

TABLE 6

| | | | Seedling | | | Root | | | Root | | | | | |
|---|---|---|---|---|---|---|---|---|---|---|---|---|---|---|
| | | | Weight | | | Length at | | | Length at | | | Growth | | |
| | | | at day14 | | | day 11 | | | day 14 | | | Stage | | |
| Pep | Construct | | | p- | | | p- | | | p- | | RS | p- | |
| SEQ ID | id | Orientation | delta | value | c | delta | value | c | delta | value | c | mean | vallue | c |
| 228 | 19617 | SENSE | 0.662 | 0.023 | S | 0.211 | 0.138 | T | 0.019 | 0.845 | / | 0.467 | 0.06 | T |
| 229 | 19750 | SENSE | 0.794 | 0.001 | S | 0.324 | 0.035 | S | 0.192 | 0.001 | S | 3.409 | 0.001 | S |
| 240 | 19942 | SENSE | 0.496 | 0.022 | S | 0.123 | 0.294 | / | 0.103 | 0.208 | / | 1.302 | 0.103 | T |
| 270 | 72743 | SENSE | 0.522 | 0.043 | S | 0.018 | 0.856 | / | 0.194 | 0.004 | S | 0.651 | 0.055 | T |
| 278 | 72920 | SENSE | 0.377 | 0.033 | S | 0.251 | 0.001 | S | 0.133 | 0.004 | S | 0.191 | 0.233 | / |
| 315 | 73516 | SENSE | 0.41 | 0.005 | S | 0.079 | 0.292 | / | 0.034 | 0.372 | / | 1.252 | 0.053 | T |
| 263 | 74237 | SENSE | 0.711 | 0.002 | S | 0.18 | 0.135 | T | 0.187 | 0.066 | T | 2.74 | 0.01 | S |
| 282 | 74327 | SENSE | 0.554 | 0.006 | S | 0.169 | 0.056 | T | 0.162 | 0.005 | S | 1.469 | 0.005 | S |
| 291 | 74366 | SENSE | 0.623 | 0.008 | S | 0.125 | 0.228 | / | 0.108 | 0.248 | / | 0.695 | 0.062 | T |
| 335 | 74503 | SENSE | 0.666 | 0.002 | S | 0.258 | 0.027 | S | 0.103 | 0.221 | / | 2.431 | 0.01 | S |
| 336 | 74504 | SENSE | 0.976 | 0.001 | S | 0.356 | 0.013 | S | 0.261 | 0 | S | 3.178 | 0.001 | S |
| 296 | 74622 | SENSE | 1.092 | 0.003 | S | 0.261 | 0.005 | S | 0.217 | 0.013 | S | 1.457 | 0.065 | T |
| 297 | 74628 | SENSE | 0.423 | 0.057 | T | −0.062 | 0.725 | / | 0.226 | 0.02 | S | 0.087 | 0.31 | / |
| 301 | 74647 | SENSE | 0.161 | 0.442 | / | −0.083 | 0.569 | / | 0.208 | 0.001 | S | 0.573 | 0.043 | S |
| 352 | 74903 | SENSE | 0.446 | 0.009 | S | 0.001 | 0.99 | / | 0.116 | 0.034 | S | 1.234 | 0.05 | T |
| 357 | 74977 | SENSE | 0.496 | 0.019 | S | 0.2 | 0.012 | S | 0.198 | 0 | S | 0.764 | 0.043 | S |
| 363 | 74993 | SENSE | 0.379 | 0.017 | S | 0.242 | 0.075 | T | 0.108 | 0.07 | T | 0.163 | 0.319 | / |
| 366 | 75316 | SENSE | 0.475 | 0.078 | T | 0.287 | 0.002 | S | 0.178 | 0.011 | S | 4 | 0 | S |
| 364 | 75337 | SENSE | 0.934 | 0.004 | S | 0.217 | 0.124 | T | 0.314 | 0.002 | S | 1.831 | 0.013 | S |
| 378 | 75431 | SENSE | 0.429 | 0.083 | T | 0.076 | 0.397 | / | 0.096 | 0.271 | / | 0.522 | 0.121 | T |
| 379 | 75455 | SENSE | 0.286 | 0.281 | / | 0.314 | 0.001 | S | 0.221 | 0.006 | S | 0.396 | 0.095 | T |
| 372 | 75463 | SENSE | 0.601 | 0.011 | S | 0.141 | 0.221 | / | 0.163 | 0.049 | S | 1.252 | 0.058 | T |
| 394 | 75543 | SENSE | 0.396 | 0.042 | S | 0.136 | 0.054 | T | 0.088 | 0.192 | T | 1.426 | 0.078 | T |

S: represents the transgenic plants showed statistically significant trait improvement as compared to the reference (p < 0.05)
T: represents the transgenic plants showed a trend of trait improvement as compared to the reference with p < 0.2
/: represents the transgenic plants didn't show any alteration or had unfavorable change in traits examined compared to the reference in the current dataset

examined compared to the reference in the current dataset

### Polyethylene Glycol (PEG) Induced Osmotic Stress Tolerance Screen

[0117] There are numerous factors, which can influence seed germination and subsequent seedling growth, one being the availability of water. Genes, which can directly affect the success rate of germination and early seedling growth, are potentially useful agronomic traits for improving the germination and growth of crop plants under drought stress. This screen identified genes for recombinant DNA that imparts enhance osmotic stress tolerance, a surrogate for enhanced water use efficiency, as shown in Arabidopsis seed when PEG was used to induce osmotic stress on germinating transgenic lines of seeds.

[0118] T2 seeds were plated on BASTA selection plates containing 3% PEG and grown under standard light and temperature conditions. Seeds were plated on each plate containing 3% PEG, ½×MS salts, 1% phytagel, and 10 μg/ml glufosinate. Plates were placed at 4° C. for 3 days to stratify seeds. On day 11, plants were measured for primary root length. After 3 more days of growth, i.e. at day 14, plants were scored for transgenic status, primary root length, growth stage, visual color, and the seedlings were pooled for fresh weight measurement. A photograph of the whole plate was taken on day 14.

[0119] Seedling weight and root length were analyzed as quantitative responses according to example 1M. The final growth stage at day 14 was scored as success or failure based on whether the plants reached 3 rosette leaves and size of leaves are greater than 1 mm. The growth stage data was analyzed as a qualitative response according to example 1L. Table 7 provides a list of recombinant DNA constructs that improve osmotic stress tolerance in transgenic plants.

TABLE 7

| | | | Seedling | | | Root | | | Root | | | | | |
|---|---|---|---|---|---|---|---|---|---|---|---|---|---|---|
| | | | Weight | | | Length at | | | Length at | | | Growth | | |
| | | | at day14 | | | day 11 | | | day14 | | | Stage | | |
| Pep | | | | p- | | | p- | | | p- | | RS | p- | |
| SEQ ID | Gene | Orientation | delta | value | c | delta | value | c | delta | value | c | mean | value | c |
| 275 | 10180 | ANTI-SENSE | 0.322 | 0.024 | S | 0.154 | 0.112 | T | 0.077 | 0.233 | / | 2.679 | 0.014 | S |
| 210 | 12919 | SENSE | 0.523 | 0.001 | S | 0.15 | 0.104 | T | 0.134 | 0.211 | / | 1.067 | 0.084 | T |
| 218 | 16004 | ANTI-SENSE | 0.58 | 0.005 | S | 0.109 | 0.465 | / | 0.137 | 0.048 | S | 0.96 | 0.183 | T |
| 243 | 19705 | SENSE | 0.415 | 0.098 | T | 0.225 | 0.014 | S | 0.185 | 0.104 | T | 2.87 | 0.009 | S |
| 244 | 19737 | SENSE | 0.71 | 0.065 | T | 0.163 | 0.454 | / | 0.127 | 0.477 | / | 2.147 | 0.036 | S |
| 238 | 19757 | SENSE | 0.876 | 0.006 | S | 0.095 | 0.477 | / | 0.173 | 0.016 | S | 2.298 | 0.019 | S |
| 236 | 19902 | SENSE | 0.635 | 0.012 | S | 0.233 | 0.044 | S | 0.1 | 0.104 | T | 2.314 | 0.016 | S |
| 230 | 19964 | SENSE | 0.421 | 0.002 | S | 0.313 | 0.027 | S | 0.388 | 0.004 | S | 2.051 | 0.038 | S |
| 247 | 71330 | SENSE | 0.35 | 0.003 | S | −0.09 | 0.453 | / | 0.137 | 0.189 | T | 3.292 | 0.003 | S |
| 220 | 71546 | SENSE | 0.892 | 0.003 | S | 0.32 | 0.005 | S | 0.266 | 0.028 | S | 3.207 | 0.005 | S |
| 310 | 73480 | SENSE | 0.257 | 0.053 | T | 0.12 | 0.058 | T | 0.069 | 0.487 | / | 3.231 | 0.004 | S |
| 254 | 73651 | SENSE | 0.581 | 0.04 | S | 0.053 | 0.73 | / | 0.034 | 0.609 | / | 2.992 | 0.004 | S |
| 252 | 73685 | SENSE | 0.467 | 0.024 | S | 0.137 | 0.171 | T | 0.006 | 0.933 | / | 1.556 | 0.026 | S |
| 262 | 73769 | SENSE | 0.532 | 0.005 | S | 0.243 | 0.073 | T | 0.043 | 0.7 | / | 2.939 | 0.02 | S |
| 284 | 74340 | SENSE | 0.56 | 0.003 | S | 0.258 | 0.049 | S | 0.237 | 0.036 | S | 3.541 | 0 | S |
| 293 | 74374 | SENSE | 0.587 | 0.081 | T | 0.361 | 0.011 | S | 0.251 | 0.009 | S | 3.001 | 0.003 | S |
| 336 | 74504 | SENSE | 0.801 | 0.003 | S | 0.185 | 0.021 | S | 0.111 | 0.021 | S | 4 | 0 | S |
| 337 | 74528 | SENSE | 0.552 | 0.026 | S | 0.107 | 0.338 | / | −0.112 | 0.418 | / | 4 | 0 | S |
| 341 | 74554 | SENSE | 0.726 | 0.001 | S | 0.337 | 0.012 | S | 0.224 | 0.065 | T | 3.462 | 0.001 | S |
| 343 | 74590 | SENSE | 0.511 | 0.034 | S | 0.067 | 0.671 | / | 0.052 | 0.753 | / | 2.479 | 0.029 | S |
| 289 | 74608 | SENSE | 0.448 | 0.043 | S | 0.175 | 0.298 | / | 0.241 | 0.109 | T | 2.617 | 0.016 | S |
| 300 | 74670 | SENSE | 0.855 | 0 | S | 0.154 | 0.059 | T | −0.063 | 0.447 | / | 2.331 | 0.013 | S |
| 355 | 74951 | SENSE | 0.558 | 0.009 | S | 0.488 | 0.003 | S | 0.517 | 0.001 | S | 3.302 | 0.003 | S |
| 363 | 74993 | SENSE | 0.677 | 0 | S | 0.147 | 0 | S | 0.028 | 0.499 | / | 3.211 | 0.005 | S |
| 376 | 75418 | SENSE | 0.339 | 0.06 | T | 0.023 | 0.763 | / | 0.263 | 0.016 | S | 0.811 | 0.246 | / |
| 381 | 75456 | SENSE | 0.43 | 0.044 | S | 0.23 | 0.03 | S | 0.198 | 0.003 | S | 2.674 | 0.004 | S |
| 383 | 75492 | SENSE | 0.434 | 0.018 | S | 0.073 | 0.024 | S | 0.09 | 0.093 | T | 0.955 | 0.186 | T |
| 402 | 75536 | SENSE | 0.214 | 0.066 | T | 0.146 | 0.015 | S | 0.221 | 0.025 | S | −1.33 | 0.996 | / |
| 389 | 75564 | SENSE | 0.407 | 0.043 | S | 0.053 | 0.623 | / | 0.074 | 0.569 | / | 1.839 | 0.058 | T |
| 395 | 75567 | SENSE | 0.44 | 0.02 | S | −0.077 | 0.522 | / | −0.107 | 0.291 | / | 2.4 | 0.034 | S |
| 393 | 75590 | SENSE | 0.431 | 0.006 | S | 0.21 | 0.022 | S | 0.195 | 0.014 | S | 2.848 | 0.006 | S |

S: represents the transgenic plants showed statistically significant trait improvement as compared to the reference (p < 0.05)
T: represents the transgenic plants showed a trend of trait improvement compared to the reference with p < 0.2
/: represents the transgenic plants didn't show any alteration or had unfavorable change in traits examined compared to the reference in the current dataset

### Cold Shock Tolerance Screen

[0120] This screen identified genes for recombinant DNA that imparts enhanced sold tolerance as shown in Arabidopsis plants transformed with the genes of interest that are more tolerant to cold stress subjected during day 8 to day 28 after seed planting. During these crucial early stages, seedling growth and leaf area increase were measured to assess tolerance when Arabidopsis seedlings were exposed to low temperatures. Using this screen, genetic alterations can be found that enable plants to germinate and grow better than wild type plants under sudden exposure to low temperatures.

[0121] Eleven seedlings from T2 seeds of each transgenic line plus one control line were plated together on a plate containing ½× Gamborg Salts with 0.8 Phytagel™, 1% Phytagel, and 0.3% Sucrose. Plates were then oriented horizontally and stratified for three days at 4° C. At day three, plates were removed from stratification and exposed to standard conditions (16 hr photoperiod, 22° C. at day and 20° C. at night) until day 8. At day eight, plates were removed from standard conditions and exposed to cold shock conditions (24 hr photoperiod, 8° C. at both day and night) until the final day of the assay, i.e. day 28. Rosette areas were measured at day 8 and day 28, which were analyzed as quantitative responses according to example 1M. Table 8 provides a list of recombinant nucleotides that improve cold shock stress tolerance in plants.

TABLE 8

| | | | | | | | | | difference | | |
|---|---|---|---|---|---|---|---|---|---|---|---|
| | | | | | | rosette | | | in rosette | | |
| | | | rosette | | | area at | | | area between day | | |
| Pep | | | area at day 8 | | | day 28 | | | 28 and day 8 | | |
| SEQ ID | Construct_id | Orientation | Delta | p-value | c | delta | p-value | c | delta | p-value | c |
| 209 | 13222 | SENSE | −0.562 | 0.978 | / | 0.396 | 0.074 | T | 0.581 | 0.058 | T |
| 216 | 14837 | SENSE | −0.08 | 0.661 | / | 1.007 | 0.002 | S | 1.154 | 0.002 | S |
| 212 | 14841 | SENSE | 0.662 | 0.023 | S | 1.026 | 0.001 | S | 1.088 | 0.004 | S |
| 231 | 19814 | SENSE | 0.38 | 0.008 | S | 0.328 | 0.027 | S | 0.55 | 0.01 | S |
| 234 | 71072 | SENSE | −0.054 | 0.58 | / | 0.736 | 0.005 | S | 0.662 | 0.027 | S |
| 224 | 71148 | SENSE | −0.43 | 0.899 | / | 0.189 | 0.14 | T | 0.643 | 0.02 | S |
| 217 | 71253 | SENSE | 0.318 | 0.004 | S | 0.442 | 0.019 | S | 0.54 | 0.009 | S |
| 251 | 71689 | SENSE | −0.566 | 0.907 | / | 0.62 | 0.01 | S | 0.879 | 0.043 | S |
| 312 | 73513 | SENSE | 0.48 | 0.009 | S | 0.61 | 0.022 | S | 0.439 | 0.074 | T |
| 314 | 73527 | SENSE | 0.499 | 0.034 | S | 0.9 | 0.001 | S | 1.087 | 0.001 | S |
| 321 | 74115 | SENSE | 0.254 | 0.17 | T | 0.896 | 0.002 | S | 1.029 | 0.002 | S |
| 324 | 74165 | SENSE | 0.142 | 0.28 | / | 0.293 | 0.115 | T | 0.61 | 0.018 | S |
| 286 | 74345 | SENSE | −0.109 | 0.746 | / | 0.819 | 0.004 | S | 1.148 | 0.009 | S |
| 333 | 74418 | SENSE | 0.421 | 0.002 | S | 1.012 | 0.003 | S | 0.565 | 0.038 | S |
| 337 | 74528 | SENSE | 0.395 | 0.004 | S | 0.544 | 0.018 | S | 0.725 | 0.009 | S |
| 294 | 74618 | SENSE | 0.274 | 0.003 | S | 0.781 | 0.011 | S | 0.941 | 0.033 | S |
| 305 | 74685 | SENSE | −0.238 | 0.923 | / | 0.758 | 0.001 | S | 1.076 | 0 | S |
| 360 | 74919 | SENSE | 0.221 | 0.214 | / | 0.358 | 0.053 | T | 0.388 | 0.108 | T |
| 356 | 74940 | SENSE | 0.28 | 0.143 | T | 0.903 | 0.001 | S | 0.952 | 0.002 | S |
| 358 | 74954 | SENSE | 0.197 | 0.176 | T | 0.602 | 0.013 | S | 0.712 | 0.024 | S |
| 364 | 75337 | SENSE | 0.669 | 0.002 | S | 0.695 | 0.002 | S | 0.603 | 0.014 | S |
| 381 | 75456 | SENSE | 0.413 | 0.034 | S | 0.895 | 0.002 | S | 0.998 | 0 | S |
| 380 | 75491 | SENSE | 0.324 | 0.047 | S | 0.914 | 0.001 | S | 1.11 | 0.001 | S |

S: represents the transgenic plants showed statistically significant trait improvement as compared to the reference (p < 0.05)
T: represents the transgenic plants showed a trend of trait improvement compared to the reference with p < 0.2
/: represents the transgenic plants didn't show any alteration or had unfavorable change in traits examined compared to the reference in the current dataset.

### Cold Germination Tolerance Screen

[0122] This screen identified genes for recombinant DNA that imparts enhanced cold tolerance as shown in Arabidopsis plants transformed with the genes of interests are resistant to cold stress based on their rate of development, root growth and chlorophyll accumulation under low temperature conditions.

[0123] T2 seeds were plated and all seedlings used in the experiment were grown at 8° C. Seeds were first surface disinfested using chlorine gas and then seeded on assay plates containing an aqueous solution of ½× Gamborg's B/5 Basal Salt Mixture (Sigma/Aldrich Corp., St. Louis, Mo., USA G/5788), 1% Phytagel™ (Sigma-Aldrich, P-8169), and 10 ug/ml glufosinate with the final pH adjusted to 5.8 using KOH. Test plates were held vertically for 28 days at a constant temperature of 8° C., a photoperiod of 16 hr, and average light intensity of approximately 100 umol/m²/s. At 28 days post plating, root length was measured, growth stage was observed, the visual color was assessed, and a whole plate photograph was taken.

[0124] The root length at day 28 was analyzed as a quantitative response according to example 1M. The growth stage at day 7 was analyzed as a qualitative response according to example 1L. Table 9 provides a list of recombinant DNA constructs that improve cold stress tolerance in transgenic plants.

TABLE 9

| | | | Root Length | | | Growth Stage | | |
|---|---|---|---|---|---|---|---|---|
| Pep | | | at day 28 | | | at day 28 | | |
| SEQ ID | Construct_id | Orientation | delta | p-value | c | RS mean | p-value | c |
| 269 | 10814 | ANTI-SENSE | 0.218 | 0.009 | S | 3.148 | 0.007 | S |
| 208 | 17465 | SENSE | 0.269 | 0.027 | S | 3.246 | 0.004 | S |
| 223 | 17919 | SENSE | 0.366 | 0.002 | S | 4 | 0 | S |
| 346 | 18020 | SENSE | 0.112 | 0.105 | T | 3.016 | 0.014 | S |
| 406 | 18026 | SENSE | 0.407 | 0.002 | S | 2.111 | 0.039 | S |
| 226 | 18844 | SENSE | 0.464 | 0.012 | S | 2.927 | 0.005 | S |
| 225 | 19647 | SENSE | 0.479 | 0.002 | S | 3.129 | 0.008 | S |
| 232 | 19720 | SENSE | 0.295 | 0.003 | S | 4 | 0 | S |
| 229 | 19750 | SENSE | 0.224 | 0.006 | S | 3.161 | 0.006 | S |
| 245 | 19812 | SENSE | 0.261 | 0.002 | S | 3.022 | 0.014 | S |
| 235 | 19949 | SENSE | 0.226 | 0 | S | 3.093 | 0.01 | S |
| 220 | 71546 | SENSE | 0.3 | 0.001 | S | 3.181 | 0.006 | S |
| 274 | 73061 | SENSE | 0.306 | 0.002 | S | 3.447 | 0.001 | S |
| 256 | 73271 | SENSE | 0.062 | 0.209 | / | 4 | 0 | S |
| 257 | 73282 | SENSE | 0.216 | 0.023 | S | 4 | 0 | S |
| 255 | 73342 | SENSE | 0.366 | 0 | S | 4 | 0 | S |
| 292 | 74383 | SENSE | 0.182 | 0.019 | S | 4 | 0 | S |
| 336 | 74504 | SENSE | 0.368 | 0.001 | S | 4 | 0 | S |
| 337 | 74528 | SENSE | 0.202 | 0 | S | 4 | 0 | S |
| 339 | 74541 | SENSE | 0.338 | 0.002 | S | 4 | 0 | S |
| 341 | 74554 | SENSE | 0.239 | 0.001 | S | 4 | 0 | S |
| 342 | 74578 | SENSE | 0.53 | 0 | S | 4 | 0 | S |
| 289 | 74608 | SENSE | 0.261 | 0.003 | S | 4 | 0 | S |
| 351 | 74880 | SENSE | 0.21 | 0.04 | S | 2.977 | 0.017 | S |
| 359 | 74907 | SENSE | 0.253 | 0.004 | S | 1.951 | 0.096 | T |
| 372 | 75463 | SENSE | 0.467 | 0.002 | S | 4 | 0 | S |
| 373 | 75475 | SENSE | 0.307 | 0.009 | S | 3.496 | 0 | S |
| 382 | 75480 | SENSE | 0.268 | 0.012 | S | 2.955 | 0.018 | S |
| 392 | 75554 | SENSE | 0.149 | 0.039 | S | 4 | 0 | S |
| 395 | 75567 | SENSE | 0.236 | 0.003 | S | 4 | 0 | S |
| 347 | 75850 | SENSE | 0.616 | 0 | S | 3.053 | 0.002 | S |
| 348 | 75861 | SENSE | 0.272 | 0.001 | S | 4 | 0 | S |
| 349 | 75875 | SENSE | 0.138 | 0.066 | T | 4 | 0 | S |
| 403 | 75991 | SENSE | 0.038 | 0.296 | / | 2.667 | 0.051 | T |

S: represents the transgenic plants showed statistically significant trait improvement as compared to the reference (p < 0.05)
T: represents the transgenic plants showed a trend of trait improvement as compared to the reference with p < 0.2
/: represents the transgenic plants didn't show any alteration or had unfavorable change in traits examined compared to the reference in the current dataset

### Shade Tolerance Screen

[0125] Plants undergo a characteristic morphological response in shade that includes the elongation of the petiole, a change in the leaf angle, and a reduction in chlorophyll content. While these changes may confer a competitive advantage to individuals, in a monoculture the shade avoidance response is thought to reduce the overall biomass of the population. Thus, genetic alterations that prevent the shade avoidance response may be associated with higher yields. Genes that favor growth under low light conditions may also promote yield, as inadequate light levels frequently limit yield. This screen identified genes for recombinant DNA that imparts enhanced shade tolerance in Arabidopsis plants that show an attenuated shade avoidance response and/or grow better than control plants under low light intensity. Of particular interest, we were looking for plants that didn't extend their petiole length, had an increase in seedling weight relative to the reference and had leaves that were more close to parallel with the plate surface.

[0126] T2 seeds were plated on glufosinate selection plates with ½ MS medium. Seeds were sown on ½ X MS salts, 1% Phytagel, 10 ug/ml BASTA. Plants were grown on vertical plates at a temperature of 22° C. at day, 20° C. at night and under low light (approximately 30 uE/m²/s, far/red ratio (655/665/725/735) ˜0.35 using PLAQ lights with GAM color filter #680). Twenty-three days after seedlings were sown, measurements were recorded including seedling status, number of rosette leaves, status of flower bud, petiole leaf angle, petiole length, and pooled fresh weights. A digital image of the whole plate was taken on the measurement day. Seedling weight and petiole length were analyzed as quantitative responses according to example 1M. The number of rosette leaves, flowering bud formation and leaf angel were analyzed as qualitative responses according to example 1L.

[0127] Table 10 provides a list of recombinant DNA constructs that improve shade tolerance in plants

TABLE 10

| | | | | | | | | | | | | Number of | | |
|---|---|---|---|---|---|---|---|---|---|---|---|---|---|---|
| | | | Petiole length at | | | seedling weight | | | Leaf angle at | | | rosette leaves at | | |
| | | | day 23 | | | day 23 | | | day 23 | | | day 23 | | |
| Pep | | | | p- | | | p- | | RS | p- | | RS | p- | |
| SEQ ID | Construct_id | Orientation | delta | value | c | delta | value | c | mean | value | c | mean | value | c |
| 407 | 11810 | ANTI- | −0.138 | 0.03 | S | 0.158 | 0.245 | / | 0.246 | 0.296 | / | −0.1 | 0.822 | / |
| | | SENSE | | | | | | | | | | | | |
| 267 | 16014 | SENSE | −0.267 | 0.012 | S | −1.129 | 0.015 | / | 0.042 | 0.425 | / | 0.773 | 0.209 | / |
| 249 | 71571 | SENSE | −0.548 | 0.005 | S | −0.212 | 0.177 | / | 0.325 | 0.224 | / | 0.611 | 0.22 | / |
| 273 | 72984 | SENSE | −0.219 | 0.064 | T | −0.126 | 0.178 | / | 0.12 | 0.315 | / | 0.476 | 0.28 | / |
| 280 | 73044 | SENSE | −0.722 | 0.083 | T | −0.572 | 0.173 | / | −0.032 | 1 | / | −1.35 | 0.992 | / |
| 307 | 73476 | SENSE | −0.01 | 0.905 | / | 0.103 | 0.354 | / | 0.739 | 0.177 | T | 1.896 | 0.053 | T |
| 311 | 73482 | SENSE | −0.394 | 0.107 | T | −0.095 | 0.611 | / | 0.045 | 0.375 | / | 0.252 | 0.376 | / |
| 306 | 73487 | SENSE | 0.064 | 0.457 | / | −0.131 | 0.583 | / | 1.656 | 0.051 | T | 1.131 | 0.15 | T |
| 261 | 74306 | SENSE | −1.107 | 0.13 | T | −1.924 | 0.116 | / | 0.291 | 0.261 | / | −0.103 | 0.591 | / |
| 282 | 74327 | SENSE | 0.029 | 0.777 | / | 0.105 | 0.762 | / | 0.666 | 0.12 | T | 1.252 | 0.116 | T |
| 330 | 74476 | SENSE | −0.092 | 0.072 | T | −0.613 | 0.107 | / | 0.271 | 0.246 | / | −0.026 | 0.511 | / |

S: represents the transgenic plants showed statistically significant trait improvement as compared to the reference (p < 0.05)
T: represents the transgenic plants showed a trend of trait improvement as compared to the reference with p < 0.2
/: represents the transgenic plants didn't show any alteration or had unfavorable change in traits examined compared to the reference in the current dataset.

### Early Plant Growth and Development Screen

[0128] This screen identified genes for recombinant DNA that imparts enhanced early plant growth and development, a surrogate for increased yield, as shown in Arabidopsis plants examined in a plate based phenotypic analysis platform for the rapid detection of phenotypes that are evident during the first two weeks of growth. In this screen, we were looking for genes that confer advantages in the processes of germination, seedling vigor, root growth and root morphology under non-stressed growth conditions to plants. The transgenic plants with advantages in seedling growth and development were determined by the seedling weight and root length at day 14 after seed planting.

[0129] T2 seeds were plated on glufosinate selection plates and grown under standard conditions (˜100 uE/m²/s, 16 h photoperiod, 22° C. at day, 20° C. at night). Seeds were stratified for 3 days at 4° C. Seedlings were grown vertically (at a temperature of 22° C. at day 20° C. at night). Observations were taken on day 10 and day 14. Both seedling weight and root length at day 14 were analyzed as quantitative responses according to example 1M.

[0130] Table 11 provides a list recombinant DNA constructs that improve early plant growth and development.

TABLE 11

| | | | Root Length at | | | Root Length at | | | | | |
|---|---|---|---|---|---|---|---|---|---|---|---|
| | | | day 10 | | | day 14 | | | Seedling Weight | | |
| Pep | | | | p- | | | p- | | | p- | |
| SEQ ID | Construct_id | Orientation | delta | value | c | delta | value | c | delta | value | c |
| 213 | 13478 | ANTI- | 0.242 | 0.062 | T | 0.159 | 0.075 | T | 0.603 | 0.013 | S |
| | | SENSE | | | | | | | | | |
| 227 | 19525 | SENSE | 0.249 | 0.183 | T | 0.245 | 0.001 | S | 0.385 | 0.062 | T |
| 221 | 70109 | SENSE | 0.282 | 0.001 | S | 0.23 | 0.001 | S | 0.564 | 0 | S |
| 248 | 71332 | SENSE | 0.071 | 0.548 | / | 0.093 | 0.17 | T | 0.419 | 0.009 | S |
| 220 | 71546 | SENSE | 0.307 | 0.057 | T | 0.231 | 0.013 | S | 0.561 | 0.006 | S |
| 246 | 71556 | SENSE | 0.408 | 0.008 | S | 0.291 | 0.011 | S | 0.328 | 0.263 | / |
| 408 | 72418 | SENSE | 0.144 | 0.063 | T | 0.17 | 0 | S | 0.46 | 0.006 | S |
| 253 | 72636 | SENSE | 0.486 | 0.026 | S | 0.339 | 0 | S | 0.705 | 0.006 | S |
| 279 | 72957 | SENSE | 0.228 | 0.053 | T | 0.158 | 0.089 | T | 0.371 | 0.08 | T |
| 309 | 73418 | SENSE | 0.242 | 0.082 | T | 0.148 | 0.089 | T | 0.212 | 0.085 | T |
| 316 | 73530 | SENSE | 0.239 | 0.023 | S | 0.17 | 0.003 | S | 0.442 | 0.001 | S |
| 313 | 73550 | SENSE | 0.181 | 0.046 | S | 0.113 | 0.016 | S | 0.304 | 0.045 | S |
| 259 | 73913 | SENSE | 0.243 | 0.069 | T | 0.091 | 0.26 | / | 0.452 | 0.015 | S |
| 325 | 74106 | SENSE | 0.257 | 0.003 | S | 0.192 | 0.015 | S | 0.34 | 0.052 | T |
| 318 | 74125 | SENSE | 0.104 | 0.549 | / | 0.139 | 0.048 | S | 0.524 | 0.002 | S |
| 320 | 74126 | SENSE | 0.149 | 0.082 | T | 0.065 | 0.284 | / | 0.354 | 0.127 | T |
| 322 | 74127 | SENSE | 0.381 | 0 | S | 0.212 | 0.006 | S | 0.63 | 0.002 | S |
| 323 | 74128 | SENSE | 0.213 | 0.091 | T | 0.12 | 0.161 | T | 0.541 | 0.002 | S |
| 326 | 74130 | SENSE | 0.14 | 0.002 | S | 0.144 | 0.001 | S | 0.003 | 0.955 | / |
| 327 | 74132 | SENSE | 0.134 | 0.275 | / | 0.144 | 0.049 | S | 0.336 | 0.025 | S |
| 328 | 74144 | SENSE | 0.137 | 0.217 | / | 0.134 | 0.065 | T | 0.492 | 0.012 | S |
| 319 | 74161 | SENSE | 0.205 | 0.02 | S | 0.131 | 0.018 | S | 0.459 | 0.035 | S |
| 263 | 74237 | SENSE | 0.253 | 0 | S | 0.189 | 0.002 | S | 0.408 | 0.013 | S |
| 265 | 74256 | SENSE | 0.28 | 0.04 | S | 0.202 | 0.012 | S | 0.461 | 0.034 | S |
| 260 | 74305 | SENSE | 0.184 | 0.063 | T | 0.131 | 0.026 | S | 0.257 | 0.121 | T |
| 281 | 74323 | SENSE | 0.13 | 0.08 | T | 0.067 | 0.054 | T | 0.426 | 0.005 | S |
| 285 | 74341 | SENSE | 0.185 | 0.044 | S | 0.07 | 0.106 | T | 0.144 | 0.191 | T |
| 293 | 74374 | SENSE | 0.103 | 0.187 | T | 0.171 | 0.008 | S | 0.518 | 0.023 | S |
| 302 | 74385 | SENSE | 0.051 | 0.461 | / | −0.043 | 0.693 | / | 0.214 | 0.098 | T |
| 303 | 74386 | SENSE | 0.211 | 0.12 | T | 0.136 | 0.092 | T | 0.081 | 0.616 | / |
| 304 | 74387 | SENSE | 0.11 | 0.528 | / | 0.17 | 0.052 | T | 0.378 | 0.027 | S |
| 350 | 74548 | SENSE | 0.169 | 0.041 | S | 0.09 | 0.046 | S | 0.336 | 0.08 | T |
| 288 | 74604 | SENSE | 0.157 | 0.231 | / | 0.181 | 0.014 | S | 0.586 | 0.001 | S |
| 290 | 74609 | SENSE | 0.24 | 0.029 | S | 0.102 | 0.227 | / | 0.457 | 0.014 | S |
| 287 | 74616 | SENSE | 0.192 | 0.047 | S | 0.137 | 0.125 | T | 0.286 | 0.204 | / |
| 295 | 74619 | SENSE | 0.181 | 0.415 | / | 0.153 | 0.149 | T | 0.448 | 0.056 | T |
| 296 | 74622 | SENSE | 0.083 | 0.481 | / | 0.071 | 0.331 | / | 0.311 | 0.076 | T |
| 298 | 74631 | SENSE | 0.203 | 0.02 | S | 0.115 | 0.019 | S | −0.049 | 0.633 | / |
| 353 | 74915 | SENSE | 0.202 | 0.004 | S | 0.136 | 0.027 | S | 0.409 | 0.012 | S |
| 354 | 74927 | SENSE | 0.103 | 0.148 | T | 0.117 | 0.021 | S | 0.319 | 0.056 | T |
| 356 | 74940 | SENSE | 0.127 | 0.001 | S | 0.117 | 0.049 | S | 0.344 | 0.028 | S |
| 371 | 75312 | SENSE | 0.191 | 0.055 | T | 0.155 | 0.006 | S | 0.526 | 0.001 | S |
| 365 | 75339 | SENSE | 0.168 | 0.029 | S | 0.031 | 0.704 | / | 0.21 | 0.208 | / |
| 374 | 75440 | SENSE | 0.15 | 0.037 | S | 0.059 | 0.566 | / | −0.039 | 0.923 | / |
| 372 | 75463 | SENSE | 0.392 | 0.006 | S | 0.284 | 0.011 | S | 0.432 | 0.15 | T |
| 375 | 75488 | SENSE | 0.101 | 0.289 | / | 0.083 | 0.113 | T | 0.444 | 0.003 | S |

S: represents the transgenic plants showed statistically significant trait improvement as compared to the reference (p < 0.05)
T: represents the transgenic plants showed a trend of trait improvement as compared to the reference with p < 0.2
/: represents the transgenic plants didn't show any alteration or had unfavorable change in traits examined compared to the reference in the current dataset

[0131] Late Plant Growth and Development Screen

[0132] This screen identified genes for recombinant DNA that imparts enhanced late plant growth and development, a surrogate for increased yield, as shown in Arabidopsis plants examined in a soil based phenotypic platform to identify genes that confer advantages in the processes of leaf development, flowering production and seed maturity to plants.

[0133] Arabidopsis plants were grown on a commercial potting mixture (Metro Mix 360, Scotts Co., Marysville, Ohio) consisting of 30-40% medium grade horticultural vermiculite, 35-55% sphagnum peat moss, 10-20% processed bark ash, 1-15% pine bark and a starter nutrient charge. Soil was supplemented with Osmocote time-release fertilizer at a rate of 30 mg/ft³. T2 seeds were imbibed in 1% agarose solution for 3 days at 4° C. and then sown at a density of ˜5 per 2½″ pot. Thirty-two pots were ordered in a 4 by 8 grid in standard greenhouse flat. Plants were grown in environmentally controlled rooms under a 16 h day length with an average light intensity of ˜200 μmoles/m²/s. Day and night temperature set points were 22° C. and 20° C., respectively. Humidity was maintained at 65%. Plants were watered by sub-irrigation every two days on average until mid-flowering, at which point the plants were watered daily until flowering was complete.

[0134] Application of the herbicide glufosinate was performed to select T2 individuals containing the target transgene. A single application of glufosinate was applied when the first true leaves were visible. Each pot was thinned to leave a single glufosinate-resistant seedling ˜3 days after the selection was applied.

[0135] The rosette radius was measured at day 25. The silique length was measured at day 40. The plant parts were harvested at day 49 for dry weight measurements if flowering production was stopped. Otherwise, the dry weights of rosette and silique were carried out at day 53. The seeds were harvested at day 58. All measurements were analyzed as quantitative responses according to example 1M.

[0136] Table 12 provides a list of recombinant DNA constructs that improve late plant growth and development.

TABLE 12

| | | Rosette Dry | | | | | | | | | Silique Dry | | | | | |
|---|---|---|---|---|---|---|---|---|---|---|---|---|---|---|---|---|
| | | Weight | | | Rosette Radius | | | Seed Dry Weight | | | Weight | | | Silique Length | | |
| Pep | Construct | | p- | | | p- | | | p- | | | p- | | | p- | |
| SEQ ID | id | delta | value | c | delta | value | c | Delta | value | c | delta | value | c | delta | value | c |
| 213 | 13478 | 0.054 | 0.365 | / | 0.217 | 0.013 | S | 0.052 | 0.347 | / | 0.293 | 0.084 | T | 0.079 | 0.021 | S |
| 241 | 19787 | 0.233 | 0.052 | T | 0.067 | 0.022 | S | 0.66 | 0.019 | S | −0.02 | 0.75 | / | 0.06 | 0.006 | S |
| 268 | 72751 | 0.287 | 0.012 | S | −0.141 | 0.714 | / | −0.991 | 0.973 | / | 0.094 | 0.099 | T | −0.024 | 0.675 | / |

S: represents the transgenic plants showed statistically significant trait improvement as compared to the reference (p < 0.5)
T: represents the transgenic plants showed a trend of trait improvement compared to the reference with p < 0.2
/: represents the transgenic plants didn't show any alteration or had unfavorable change in traits examined compared to the reference in the current dataset

[0137] Limited Nitrogen Tolerance Screen

[0138] Under low nitrogen conditions, Arabidopsis seedlings become chlorotic and have less biomass. This screen identified genes for recombinant DNA that imparts enhanced nitrogen use efficiency as shown in Arabidopsis plants transformed with the gene of interest that are altered in their ability to accumulate biomass and/or retain chlorophyll under low nitrogen condition.

[0139] T2 seeds were plated on glufosinate selection plates containing 0.5×N-Free Hoagland's T 0.1 mM NH₄NO₃ T 0.1% sucrose T 1% phytagel media and grown under standard light and temperature conditions. At 12 days of growth, plants were scored for seedling status (i.e. viable or non-viable) and root length. After 21 days of growth, plants were scored for BASTA resistance, visual color, seedling weight, number of green leaves, number of rosette leaves, root length and formation of flowering buds. A photograph of each plant was also taken at this time point.

[0140] The seedling weight and root length were analyzed as quantitative responses according to example 1M. The number green leaves, the number of rosette leaves and the flowerbud formation were analyzed as qualitative responses according to example 1L. The leaf color raw data were collected on each plant as the percentages of five color elements (Green, DarkGreen, LightGreen, RedPurple, YellowChlorotic) using a computer imaging system. A statistical logistic regression model was developed to predict an overall value based on five colors for each plant.

[0141] Table 13 provides a list of recombinant DNA constructs that improve low nitrogen availability tolerance in plants.

TABLE 13

| | | Number of green | | | | | | | | | | | |
|---|---|---|---|---|---|---|---|---|---|---|---|---|---|
| | | leaves | | | leaf color | | | Root Length | | | Rosette Weight | | |
| Pep | Construct | RS | p- | | | p- | | RS | p- | | | p- | |
| SEQ ID | id | mean | value | c | delta | value | c | mean | value | c | delta | value | c |
| 334 | 10150 | 1.496 | 0.007 | S | 0.974 | 0.007 | S | −0.285 | 0.022 | / | −0.024 | 0.572 | / |
| 222 | 10335 | 0.993 | 0.014 | S | 0.953 | 0.01 | S | −0.359 | 0 | / | −0.057 | 0.122 | / |
| 277 | 11145 | 0.368 | 0.41 | / | 1.059 | 0.004 | S | −0.141 | 0.211 | / | −0.086 | 0.143 | / |
| 361 | 11735 | 0.522 | 0.554 | / | 1.132 | 0.003 | S | −0.134 | 0.147 | / | 0.082 | 0.001 | S |
| 206 | 12030 | 0.57 | 0.321 | / | 0.944 | 0.027 | S | −0.28 | 0.005 | / | −0.031 | 0.545 | / |
| 368 | 12189 | 0.134 | 0.791 | / | 0.76 | 0.034 | S | −0.147 | 0.024 | / | −0.082 | 0.099 | / |
| 308 | 73465 | 0.591 | 0.195 | T | 0.586 | 0.061 | T | −0.03 | 0.631 | / | −0.04 | 0.249 | / |
| 328 | 74144 | 0.845 | 0.069 | T | 1.021 | 0.003 | S | 0.181 | 0.04 | S | 0.028 | 0.481 | / |
| 331 | 74417 | 1.051 | 0.021 | S | 1.4 | 0.001 | S | −0.155 | 0.019 | / | −0.071 | 0.16 | / |
| 338 | 74588 | 0.484 | 0.31 | / | 1.059 | 0.01 | S | −0.101 | 0.167 | / | −0.051 | 0.608 | / |
| 369 | 75321 | 0.607 | 0.041 | S | 0.317 | 0.423 | / | −0.095 | 0.238 | / | 0.056 | 0.021 | S |
| 377 | 75419 | −0.779 | 0.198 | / | 0.635 | 0.019 | S | −0.116 | 0.024 | / | 0.009 | 0.795 | / |
| 385 | 75424 | −0.354 | 0.537 | / | 1.489 | 0 | S | −0.245 | 0.003 | / | −0.062 | 0.165 | / |
| 391 | 75506 | 0.969 | 0 | S | 0.588 | 0.049 | S | 0.081 | 0.108 | T | −0.026 | 0.545 | / |
| 388 | 75528 | −0.026 | 0.932 | / | 0.229 | 0.594 | / | −0.042 | 0.534 | / | 0.111 | 0.058 | T |
| 396 | 75544 | 0.197 | 0.369 | / | 1.033 | 0.006 | S | −0.283 | 0.034 | / | −0.134 | 0.021 | / |
| 398 | 75546 | 0.577 | 0.001 | S | 1.108 | 0.002 | S | −0.321 | 0.006 | / | 0.01 | 0.765 | / |
| 390 | 75553 | −0.182 | 0.643 | / | 0.425 | 0.058 | T | −0.104 | 0.12 | / | −0.096 | 0.104 | / |
| 397 | 75556 | 0.766 | 0.01 | S | −0.544 | 0.179 | / | 0 | 1 | / | 0.271 | 0 | S |
| 399 | 75558 | 0.343 | 0.406 | / | 0.861 | 0.008 | S | −0.102 | 0.035 | / | −0.106 | 0.003 | / |
| 387 | 75575 | 0.087 | 0.83 | / | 1.147 | 0.001 | S | −0.117 | 0.093 | / | −0.03 | 0.325 | / |
| 401 | 75583 | −0.621 | 0.399 | / | −0.166 | 0.595 | / | −0.01 | 0.906 | / | 0.162 | 0.002 | S |
| 344 | 75834 | 0.425 | 0.038 | S | 0.589 | 0.03 | S | −0.067 | 0.343 | / | 0.028 | 0.429 | / |
| 345 | 75835 | 0.486 | 0.266 | / | 0.228 | 0.499 | / | −0.16 | 0.026 | / | 0.159 | 0 | S |

S: represents the transgenic plants showed statistically significant trait improvement as compared to the reference (p < 0.05)
T: represents the transgenic plants showed a trend of trait improvement compared than the reference with p < 0.2
/: represents the transgenic plants didn't show any alteration or had unfavorable change in traits examined compared to the reference in the current dataset

[0142] Statistic Analysis for Qualitative Responses

[0143] Table 14 provides a list of responses that were analyzed as qualitative responses

TABLE 14

| response | screen | categories (success vs. failure) |
|---|---|---|
| wilting response Risk | Soil drought tolerance screen | non-wilted vs. wilted |
| Score | | |
| growth stage at day 14 | heat stress tolerance screen | 50% of plants reach stage1.03 vs. not |
| growth stage at day 14 | salt stress tolerance screen | 50% of plants reach stage1.03 vs. not |
| growth stage at day 14 | PEG induced osmotic stress tolerance | 50% of plants reach stage1.03 vs. not |
| | screen | |
| growth stage at day 7 | cold germination tolerance screen | 50% of plants reach stage 0.5 vs. not |
| number of rosette leaves | Shade tolerance screen | 5 leaves appeared vs. not |
| at day 23 | | |
| flower bud formation at | Shade tolerance screen | flower buds appear vs. not |
| day 23 | | |
| leaf angle at day 23 | Shade tolerance screen | >60 degree vs. <60 degree |
| number of green leaves at | limited nitrogen tolerance screen | 6 or 7 leaves appeared vs. not |
| day 21 | | |
| number of rosette leaves | limited nitrogen tolerance screen | 6 or 7 leaves appeared vs. not |
| at day 21 | | |
| Flower bud formation at | limited nitrogen tolerance screen | flower buds appear vs. not |
| day 21 | | |

[0144] Plants were grouped into transgenic and reference groups and were scored as success or failure according to Table 16. First, the risk (R) was calculated, which is the proportion of plants that were scored as of failure plants within the group. Then the relative risk (RR) was calculated as the ratio of R (transgenic) to R (reference). Risk score (RS) was calculated as −log₂^{RR}. Subsequently the risk scores from multiple events for each transgene of interest were evaluated for statistical significance by t-test using S-PLUS statistical software (S-PLUS 6, Guide to statistics, Insightful, Seattle, Wash., USA). RS with a value greater than 0 indicates that the transgenic plants perform better than the reference. RS with a value less than 0 indicates that the transgenic plants perform worse than the reference. The RS with a value equal to 0 indicates that the performance of the transgenic plants and the reference don't show any difference.

### Statistic Analysis for Quantitative Responses

[0145] Table 15 provides a list of responses that were analyzed as quantitative responses.

TABLE 15

| response | screen |
|---|---|
| seed yield | Soil drought stress tolerance screen |
| seedling weight at day 14 | heat stress tolerance screen |
| root length at day 14 | heat stress tolerance screen |
| seedling weight at day 14 | salt stress tolerance screen |
| root length at day 14 | salt stress tolerance screen |
| root length at day 11 | salt stress tolerance screen |
| seedling weight at day 14 | PEG induced osmotic stress tolerance screen |
| root length at day 11 | PEG induced osmotic stress tolerance screen |
| root length at day 14 | PEG induced osmotic stress tolerance screen |
| rosette area at day 8 | cold shock tolerance screen |
| rosette area at day28 | cold shock tolerance screen |
| difference in rosette area | cold shock tolerance screen |
| from day 8 to day 28 | |
| root length at day 28 | cold germination tolerance screen |
| seedling weight at day 23 | Shade tolerance screen |
| petiole length at day 23 | Shade tolerance screen |
| root length at day 14 | Early plant growth and development screen |
| Seedling weight at day14 | Early plant growth and development screen |
| Rosette dry weight at day | Late plant growth and development screen |
| 53 | |
| rosette radius at day 25 | Late plant growth and development screen |
| seed dry weight at day 58 | Late plant growth and development screen |
| silique dry weight at day 53 | Late plant growth and development screen |
| silique length at day 40 | Late plant growth and development screen |
| Seedling weight at day 21 | Limited nitrogen tolerance screen |
| Root length at day 21 | Limited nitrogen tolerance screen |

[0146] The measurements (M) of each plant were transformed by log₂ calculation. The Delta was calculated as log₂M(transgenic)−log₂M(reference). Subsequently the mean delta from multiple events of the transgene of interest was evaluated for statistical significance by t-test using S-PLUS statistical software (S-PLUS 6, Guide to statistics, Insightful, Seattle, Wash., USA). The Delta with a value greater than 0 indicates that the transgenic plants perform better than the reference. The Delta with a value less than 0 indicates that the transgenic plants perform worse than the reference. The Delta with a value equal to 0 indicates that the performance of the transgenic plants and the reference don't show any difference.

### EXAMPLE 2

[0147] This example illustrates the identification of homologs of the cognate proteins of the genes identified as imparting an enhanced trait.

[0148] A BLAST searchable “All Protein Database” was constructed of known protein sequences using a proprietary sequence database and the National Center for Biotechnology Information (NCBI) non-redundant amino acid database (nr.aa). For each organism from which a DNA sequence provided herein was obtained, an “Organism Protein Database” was constructed of known protein sequences of the organism; the Organism Protein Database is a subset of the All Protein Database based on the NCBI taxonomy ID for the organism.

[0149] The All Protein Database was queried using amino acid sequence of cognate protein for gene DNA used in trait-improving recombinant DNA, i.e. sequences of SEQ ID NO: 205 through SEQ ID NO: 408 using “blastp” with E-value cutoff of 1e-8. Up to 1000 top hits were kept, and separated by organism names. For each organism other than that of the query sequence, a list was kept for hits from the query organism itself with a more significant E-value than the best hit of the organism. The list contains likely duplicated genes, and is referred to as the Core List. Another list was kept for all the hits from each organism, sorted by E-value, and referred to as the Hit List.

[0150] The Organism Protein Database was queried using amino acid sequences of SEQ ID NO: 205 through SEQ ID NO: 408 using “blastp” with E-value cutoff of 1e-4. Up to 1000 top hits were kept. A BLAST searchable database was constructed based on these hits, and is referred to as “SubDB”. SubDB was queried with each sequence in the Hit List using “blastp” with E-value cutoff of 1e-8. The hit with the best E-value was compared with the Core List from the corresponding organism. The hit is deemed a likely ortholog if it belongs to the Core List, otherwise it is deemed not a likely ortholog and there is no further search of sequences in the Hit List for the same organism. Likely orthologs from a large number of distinct organisms were identified and are reported by amino acid sequences of SEQ ID NO: 409 to SEQ ID NO: 19247. These orthologs are reported in Tables 2 as homologs to the proteins cognate to genes used in trait-improving recombinant DNA.

TABLE 2

| SEQ | | | | | | | | | | | | |
|---|---|---|---|---|---|---|---|---|---|---|---|---|
| ID NO: | homolog SEQ ID NOs | | | | | | | | | | | |
| 206: | 9461 | 19072 | 14856 | 5315 | 7726 | 11678 | 8466 | 4567 | 9541 | 4039 | 2736 | 826 |
| | 4434 | 18755 | 7163 | 19021 | 16621 | 18594 | | | | | | |
| 207: | 11732 | 5088 | 14017 | 14658 | 8659 | 17828 | 14150 | 11838 | 7420 | 577 | 13978 | 3089 |
| | 9378 | 8177 | 5473 | 4151 | 15455 | 3299 | 3397 | 17568 | 12473 | 2946 | 17428 | 3126 |
| | 15408 | 3997 | 18806 | 10067 | 3246 | 19105 | | | | | | |
| 208: | 11715 | 12490 | 18003 | 15562 | 5946 | 18565 | 5550 | 13362 | 1866 | 4207 | 6966 | 6785 |
| | 16958 | 17740 | 12495 | 9774 | 3632 | 7059 | 937 | 10643 | 12198 | 6865 | 13806 | 1023 |
| | 12708 | 14552 | 16746 | 18201 | 16712 | 7735 | | | | | | |
| 209: | 3105 | 15418 | 1368 | 15360 | 5654 | 7902 | 3038 | 16108 | 14416 | 16444 | 10078 | 17851 |
| | 12848 | 15183 | 12997 | 18090 | 18617 | 1312 | 16630 | 4080 | 4082 | 7689 | 19205 | 17262 |
| | 13305 | 5780 | 10544 | 14798 | 16363 | 16166 | 17737 | | | | | |
| 210: | 17539 | 13894 | 15187 | 11374 | 17968 | 9384 | 7645 | 13991 | 5852 | | | |
| 211: | 16101 | 13052 | 9940 | 10298 | 9899 | 15964 | 10104 | 18651 | 6853 | 12619 | 1551 | 4764 |
| | 684 | 13219 | 15864 | 9975 | 3261 | 4237 | 2710 | 18739 | 15477 | 7248 | 582 | 15025 |
| 212: | 11577 | 10930 | 12130 | 13904 | 13619 | 10462 | 9686 | 10796 | 9854 | 12277 | 14708 | 4822 |
| | 437 | 6953 | 7206 | 9936 | 2948 | 7987 | 13119 | 2409 | | | | |
| 213: | 11281 | 4744 | 9418 | 8607 | 3777 | 4299 | 2607 | 2319 | 7251 | 7279 | 9577 | 14778 |
| | 18625 | 6286 | 4491 | 14417 | 1831 | 7825 | 8703 | 3214 | 17914 | 10229 | 11951 | 17625 |
| | 970 | 966 | 7114 | 17802 | 17749 | 17813 | 17788 | 17783 | 17787 | 17765 | 17808 | 17806 |
| | 17764 | 17726 | 17746 | 17810 | 17834 | 17732 | 17745 | 17767 | 17728 | 17730 | 17744 | 17747 |
| | 17781 | 2457 | 15330 | 15328 | 7187 | 1588 | 17923 | 1156 | 5341 | 16738 | 11147 | 11237 |
| | 10534 | 13932 | 6444 | 2913 | 14896 | 13736 | 10170 | 11594 | 17581 | 1429 | 12223 | 7798 |
| | 16703 | 10946 | 10966 | 10944 | 10961 | 10934 | 11706 | 11679 | 11677 | 11704 | 3305 | 1863 |
| | 17474 | 15572 | 4795 | 6459 | 794 | 8522 | 15354 | 13706 | 8632 | 5186 | 8156 | 7182 |
| | 1057 | 12383 | 18370 | 18371 | 12218 | 14763 | 6085 | 9619 | 6084 | 3613 | 11617 | 15462 |
| | 4013 | 14623 | 13880 | 3030 | 1260 | 16762 | 11244 | 3082 | 9189 | 11858 | 14221 | 19035 |
| | 2439 | 4014 | 1840 | 8134 | 16791 | 14100 | 8244 | 8347 | 15753 | 6777 | 10859 | 2830 |
| | 16405 | 8205 | 13954 | 11632 | 18494 | 11891 | 2663 | 1366 | 18247 | 15522 | 10282 | 14126 |
| | 10940 | 8802 | 12556 | 997 | 3391 | 4295 | 7548 | 5823 | 17340 | 5932 | 2459 | 10562 |
| | 14935 | 17104 | 15135 | 2045 | 2256 | 14248 | 15748 | 638 | 11436 | 10293 | 14019 | 12831 |
| | 7142 | 6143 | 5949 | 14114 | 17359 | 10556 | 13121 | 2699 | 12459 | 3820 | 10865 | 15441 |
| | 5257 | 8413 | 14080 | 10255 | 12573 | 772 | 6606 | 3642 | 8804 | 3457 | 1348 | 16022 |
| | 7874 | 5815 | 15304 | 598 | 3258 | 3259 | 1401 | 4197 | 4837 | 5770 | 9990 | 11860 |
| | 5998 | 13653 | 19240 | 18528 | 798 | 5714 | 7362 | 5197 | 13400 | 6454 | 4954 | 587 |
| | 15889 | 1391 | 1208 | 2577 | 2564 | 4704 | 4774 | 5289 | 11843 | 15452 | 3750 | 18789 |
| | 950 | 13589 | 16248 | 18822 | 15416 | 9549 | 8091 | 2839 | 2840 | 16123 | 8406 | 8410 |
| | 15495 | 1886 | 15489 | 18634 | 15405 | 8526 | 8546 | 8530 | 11309 | 10415 | 12157 | 12164 |
| | 12160 | 12156 | 18974 | 9416 | 10400 | 9468 | 6180 | 6183 | 17850 | 11085 | 6361 | 1846 |
| | 9141 | 7414 | 12282 | 2648 | 18663 | 16836 | 2696 | 12925 | 19084 | 7529 | 7271 | 9600 |
| | 16269 | 8179 | 15909 | 8971 | 14368 | 11123 | 15003 | 7928 | 18412 | 13507 | 8354 | 2167 |
| | 8528 | 8545 | 13622 | 11823 | 5877 | 9383 | 18047 | 12323 | 7126 | 13778 | 15775 | 6818 |
| | 14349 | 1843 | 1841 | 5467 | 18619 | 2511 | 13117 | 12441 | 18799 | 4847 | 4844 | 4846 |
| | 1482 | 1029 | 13661 | 9950 | 7913 | 18555 | 13411 | 12291 | 15118 | 13667 | 11824 | 17679 |
| | 15097 | 13368 | 4611 | 15383 | 5294 | 5297 | 5295 | 10809 | 6024 | 13660 | 13664 | 18078 |
| | 18063 | 18075 | 18080 | 18064 | 18061 | 2901 | 2896 | 11461 | 9567 | 2623 | 15619 | 13681 |
| | 16483 | 19066 | 18430 | 14575 | 17264 | 14824 | 16907 | 3361 | 3539 | 9690 | 9562 | 13782 |
| | 14476 | 16298 | 672 | 4789 | 18071 | 16409 | 11810 | 9328 | 15142 | 16658 | 19113 | 15890 |
| | 11168 | 14282 | 7337 | 2737 | 18782 | 2977 | 6021 | 6936 | 15780 | 15779 | 14381 | 3119 |
| | 8277 | 5647 | 3188 | 5391 | 2197 | 8529 | 16229 | 4706 | 11648 | 18333 | 12351 | 10590 |
| | 4964 | 12869 | 12571 | 17461 | 15151 | 2108 | 12256 | 13689 | 6178 | 11145 | 10127 | 14620 |
| | 521 | 12494 | 9664 | 13352 | 18819 | 17275 | 16855 | 6094 | 16051 | 1861 | 1543 | 17278 |
| | 3184 | 3785 | 7977 | 10869 | 14020 | 1073 | 8390 | 13292 | 3685 | 12532 | 3942 | 3338 |
| | 7643 | 5224 | 7941 | 17062 | 4374 | 17281 | 15560 | 18682 | 6397 | 9485 | 11017 | 18260 |
| | 11733 | 7788 | 6676 | 7371 | 15931 | 2677 | 1855 | 7550 | 12942 | 16195 | 2434 | 13586 |
| | 14216 | 2671 | 18036 | 5925 | 11102 | 2387 | 3968 | 15553 | 12886 | 12211 | 6446 | 13317 |
| | 15962 | 2965 | 6866 | 2247 | 2576 | 18624 | 13803 | 8821 | 12537 | 18487 | 2386 | 15498 |
| | 10683 | 8191 | 15227 | 10351 | 14762 | 14780 | 14761 | 1568 | 1570 | 1823 | 11984 | 13721 |
| | 7268 | 10834 | 14940 | 2764 | 6670 | 1577 | 8050 | 4950 | 17318 | 17533 | 743 | 1273 |
| | 13143 | 2621 | 6532 | 6553 | 10775 | 11080 | 10240 | 6827 | 13829 | 14551 | 14376 | 8122 |
| | 11203 | 11186 | 9158 | 4943 | 11793 | 4606 | 4451 | 4941 | 4925 | 4421 | 4923 | 4447 |
| | 4439 | 13094 | 16831 | 5632 | 16842 | 7972 | 8319 | 4463 | 18291 | 1153 | 5593 | 14256 |
| | 15648 | 10411 | 15778 | 3836 | 8646 | 11057 | 10802 | 2547 | 10675 | 10705 | 12481 | 17144 |
| | 11933 | 9742 | 760 | 816 | 2393 | 15797 | 15801 | 4227 | 10125 | 15598 | 14171 | 4499 |
| | 16812 | 14907 | 3633 | 2579 | 6096 | 11005 | | | | | | |
| 214: | 17205 | 12417 | 5182 | 11592 | 1218 | 18584 | 9104 | 3562 | 17644 | 15108 | 2456 | 12621 |
| | 2781 | 16359 | 2519 | 11488 | 17691 | 5523 | 3592 | 4365 | 17685 | 18564 | 9255 | 3981 |
| | 17471 | 14932 | 6896 | 17261 | 14309 | 4464 | | | | | | |
| 215: | 11565 | 17980 | 9870 | 6731 | 7560 | 8022 | 11032 | 6899 | 11020 | 17043 | 17521 | 13209 |
| | 6078 | 3756 | 6314 | 4852 | 7764 | 17958 | 8539 | 3600 | 2654 | 15211 | 8089 | 10817 |
| | 882 | 2355 | 12320 | 10576 | 857 | | | | | | | |
| 216: | 4548 | 1814 | 1811 | 18872 | 5005 | 8334 | 4062 | 18447 | 18595 | | | |
| 217: | 10206 | 9379 | 12609 | 7556 | 16810 | 18633 | 7572 | 6772 | 9785 | 18400 | 4394 | 8373 |
| | 3586 | 13142 | 13290 | 11170 | 2118 | 4015 | 4419 | 3154 | 4988 | 15178 | 2746 | 16499 |
| | 7153 | 17079 | 12443 | 9989 | 7666 | 3147 | 16089 | 8157 | 15468 | 13125 | 13112 | 1739 |
| | 16612 | 16627 | 16628 | 7970 | | | | | | | | |
| 218: | 14011 | 6366 | 12194 | 19166 | 14872 | 8536 | 9025 | 15878 | 5246 | 1466 | 10734 | 18375 |
| | 19051 | 3284 | 11851 | 1926 | 16644 | 15376 | 15389 | 19007 | 13011 | 16761 | 14930 | 17632 |
| | 17097 | 11908 | 10938 | 10056 | 5151 | 1836 | 696 | 16029 | 14064 | 3132 | 16092 | 16678 |
| | 14296 | 5107 | 9978 | 12711 | 18145 | 4922 | | | | | | |
| 219: | 1266 | 12114 | 9582 | 1006 | 14040 | 2995 | 2574 | 14277 | 1487 | 12000 | 15871 | 545 |
| | 17801 | 6330 | 11820 | 4719 | 4718 | 7544 | 2089 | 6943 | 5642 | 3726 | 15195 | 15394 |
| | 15397 | 4250 | 16556 | 6724 | 9453 | 12301 | 8101 | 15949 | 7115 | 16130 | 3091 | 15504 |
| | 5479 | 9235 | 18681 | 12554 | 6544 | 9548 | 12244 | 14153 | 18006 | 13786 | 4349 | 944 |
| | 15755 | 5484 | 11621 | 9159 | 4302 | 731 | 19190 | 13815 | 4148 | 1580 | 2614 | |
| 220: | 17643 | 10449 | 11152 | 786 | 6249 | 12066 | 11428 | 11925 | 8370 | 4891 | 10927 | 3165 |
| | 2073 | 1089 | 2824 | 12422 | 12197 | 9475 | 18563 | 14844 | 5667 | 5051 | 7973 | 17063 |
| | 16714 | 12884 | 8011 | 16641 | 16666 | 6510 | 19040 | 4239 | 14002 | 16784 | 2028 | 10196 |
| | 16806 | 16609 | 10112 | 4683 | 7040 | 10524 | 11614 | 15345 | 5811 | 2298 | 3507 | 15078 |
| | 14109 | 12786 | 4216 | 13136 | 18305 | 3837 | 5287 | 12384 | 17153 | 5425 | 7719 | 17446 |
| | 5024 | 14077 | 1542 | 14745 | 3608 | 6018 | 7127 | 18148 | 18190 | 1256 | 9632 | 13003 |
| | 8636 | 4022 | 12857 | 10814 | 3807 | 15717 | 2030 | 10386 | 15202 | | | |
| 221: | 9897 | | | | | | | | | | | |
| 222: | 16503 | 6946 | 12512 | 8166 | 7603 | 13367 | 17779 | 17108 | 5677 | 12483 | 4102 | 3789 |
| | 8969 | 6176 | 4890 | 8723 | 5819 | 17099 | 6806 | 13035 | 12703 | 18886 | 4929 | 7208 |
| | 12867 | 82331 | 11471 | 2758 | 17866 | 8378 | 10583 | 7058 | 5503 | 7152 | 12439 | 15584 |
| | 8164 | 7820 | 9948 | 5042 | 10327 | 12796 | 9868 | 16562 | 10986 | 16295 | 19149 | 3946 |
| | 8716 | 15320 | 18991 | 18402 | 1483 | 13460 | 17671 | 10764 | 2962 | 17886 | 17864 | 10600 |
| | 10129 | 2817 | 2842 | 1695 | 16096 | 16759 | 15370 | 16173 | 13739 | 9388 | 8737 | 9863 |
| | 10045 | 2379 | 17056 | 18355 | 1404 | 10235 | 18253 | 14229 | 15388 | 10130 | 2085 | 12476 |
| | 9115 | 4120 | 3415 | 7852 | 14972 | 14948 | 10772 | 14572 | 8634 | 6691 | 8768 | 12084 |
| | 1558 | 16813 | 13074 | 5000 | 14208 | 12827 | 3545 | 7743 | 17653 | 16255 | 8780 | 6849 |
| | 13159 | 2512 | 17454 | 5691 | 2761 | 6441 | 8258 | 13861 | 2288 | 18638 | 679 | 927 |
| | 17856 | 10134 | 15581 | 6881 | 10442 | 11642 | | | | | | |
| 223: | 5413 | 6647 | 13564 | 11787 | 2900 | 17371 | 5719 | 18538 | 15525 | 16814 | | |
| 224: | 5509 | 13877 | 15894 | 17059 | 12524 | 14960 | 15820 | 11498 | 4900 | 3665 | 14166 | 6804 |
| | 1956 | 10375 | 3288 | 15483 | 14981 | 7447 | 12253 | 3522 | 5292 | 8172 | | |
| 225: | 19221 | 12606 | 17232 | 9256 | 19165 | 15129 | 4321 | 4677 | 9193 | 9192 | 9191 | 9195 |
| | 17128 | 4398 | 15386 | 16721 | 7270 | 15262 | 9606 | 9608 | 6404 | 3730 | 4073 | 8257 |
| | 5783 | 7717 | 17495 | 17574 | 18125 | 10532 | 2806 | 8453 | | | | |
| 226: | 5355 | 10381 | 12506 | 9031 | | | | | | | | |
| 227: | 19210 | 13824 | 18756 | 2469 | 12148 | 19017 | 8260 | 8261 | 12127 | 18655 | 8112 | 7521 |
| | 7032 | 14012 | 3050 | 11148 | 4438 | 1566 | 16589 | 8148 | 15936 | 11007 | 7676 | 16727 |
| | 17306 | 14797 | 11542 | 14204 | 3088 | 11432 | 2312 | 18876 | 16653 | 8788 | 7477 | 1897 |
| | 11235 | 7590 | 5594 | 17421 | 1171 | 2099 | 18271 | 4351 | 19063 | 15226 | 14546 | 18240 |
| | 16886 | 18163 | 18160 | 14050 | 17165 | 8432 | 8098 | 7178 | 12519 | 15335 | 15336 | 15559 |
| | 18118 | 13139 | 11776 | 1732 | 18200 | 2705 | 15454 | 14111 | 7831 | 1225 | 17488 | 14609 |
| | 13273 | 12285 | 12720 | 771 | 1304 | 17239 | 18465 | 10463 | 6196 | 5321 | 10439 | 1315 |
| | 12739 | 2300 | 13232 | 3894 | 3310 | 11754 | 17956 | 16710 | 1595 | 9767 | 12365 | 12980 |
| | 312 | 878 | 19048 | 14611 | 1373 | 10205 | 3247 | 15298 | 7562 | 10090 | 3516 | 17816 |
| | 14670 | 5400 | 7355 | 9322 | 5109 | 12003 | 11372 | 9135 | 17202 | 8964 | 12126 | 11501 |
| | 15692 | 16891 | 14540 | 2285 | 1520 | 8928 | 3021 | 13685 | 15478 | 12561 | 13562 | 11325 |
| | 3904 | 3248 | 7591 | 8153 | 8174 | 11539 | 18693 | 12236 | 10326 | 16285 | 14984 | 7073 |
| | 7485 | 12635 | 18797 | 15967 | 18439 | 13075 | 4234 | 4864 | 18936 | 3640 | 11030 | 2385 |
| | 6954 | 1768 | 2406 | 1951 | 16202 | 10053 | 11969 | 6069 | 10741 | 4310 | 4346 | 7301 |
| | 15020 | 7030 | 13902 | 3676 | 15245 | 7967 | 2114 | 9755 | 9758 | 11041 | 1399 | 607 |
| | 3844 | 5187 | 1248 | 15419 | 5059 | 16475 | 12458 | 11038 | 14975 | 2305 | 10096 | 10098 |
| | 12979 | 16663 | 2458 | 3448 | 14447 | 9214 | 9217 | 3996 | 7238 | 12789 | 2038 | 6685 |
| | 19174 | 5335 | 4231 | 17456 | 11781 | 4994 | 14877 | 14271 | 742 | 13905 | 16267 | 11286 |
| | 4963 | 13433 | 13634 | 11742 | 10897 | 15826 | 1081 | 15615 | 12163 | 7022 | 11209 | 8104 |
| | 13217 | 1514 | 1513 | 11401 | 13849 | 9872 | 3392 | 7714 | 17437 | 13797 | 3209 | 5004 |
| | 16821 | 12740 | 13800 | 12560 | 5279 | 8730 | 9292 | 9265 | 9298 | 6765 | 9810 | 2380 |
| | 18328 | 16833 | 1946 | 9995 | 6746 | 13050 | 9269 | 12948 | 6484 | 17397 | 14869 | 14870 |
| | 6414 | 17620 | 14459 | 2373 | 434 | 3656 | 423 | 5401 | 16694 | 18030 | 5537 | 6578 |
| | 12369 | 12850 | 900 | 10894 | 10868 | 8960 | 16150 | 14909 | 2286 | 14529 | 12399 | 15856 |
| | 8705 | 16311 | 9271 | 8715 | 9294 | 2423 | 2855 | 8463 | 9779 | 12614 | 17865 | 12958 |
| 228: | 3536 | 1432 | 1435 | 9457 | 3524 | 2486 | 15369 | 15566 | 8392 | 15107 | 8262 | 4848 |
| | 11182 | 1390 | 12883 | 12866 | 16691 | 12187 | 8176 | | | | | |
| 229: | 11285 | 6998 | 4222 | 1194 | 3135 | 690 | 7978 | 12021 | 17770 | 4522 | 10591 | 3470 |
| | 5744 | 10394 | 9316 | 16338 | 10498 | 6985 | 6465 | 10932 | 16071 | 6165 | 14004 | 8007 |
| | 1454 | 18502 | 4382 | 3345 | 8449 | 13229 | 482 | 13158 | 471 | 13890 | 11377 | 13258 |
| | 11770 | 18675 | 2967 | 3041 | 9750 | 10249 | 9108 | 17334 | 18037 | 18728 | 7830 | 1674 |
| | 1812 | 3749 | 10193 | 14618 | 2134 | 13432 | 4763 | 4579 | 7829 | 2269 | 2651 | 7694 |
| | 12856 | 14831 | 16875 | 5171 | 3878 | 13759 | 8459 | 14779 | 18185 | 9776 | 11388 | 12319 |
| | 8800 | 15396 | 11006 | 11865 | 781 | 2655 | 9557 | 1652 | 18641 | 13834 | 883 | 1441 |
| | 17087 | 19062 | 1555 | 10780 | 5359 | 15260 | 15387 | 1477 | 18785 | 18732 | 8532 | 4811 |
| | 6656 | 14777 | 10943 | 17228 | 6869 | 6289 | 693 | 18549 | 12475 | 17800 | 10372 | 14986 |
| | 2345 | 15774 | 18087 | 18112 | 10403 | 10425 | 10356 | 10444 | 5049 | 17881 | 7747 | 7751 |
| | 2408 | 15831 | 15137 | 2702 | 11149 | 10004 | 6144 | 4336 | 14513 | 13952 | 14531 | 6916 |
| | 15501 | 12581 | 5620 | 6080 | 19010 | 12938 | 9860 | 18618 | 16724 | 4517 | 4518 | 8087 |
| | 15741 | 4127 | 1790 | 13173 | 7904 | 13171 | 1511 | 15876 | 11013 | 18888 | 11027 | 19169 |
| | 7975 | 3702 | 2402 | 7358 | 18232 | 9847 | 1293 | 3935 | 18026 | 5050 | 12496 | 11265 |
| | 445 | 8793 | 17777 | 18956 | 3689 | 15600 | 4183 | 12296 | 9947 | 6217 | 2318 | 9905 |
| | 10822 | 18897 | 10020 | 8608 | 4703 | 12426 | 2450 | 11693 | 13869 | 4378 | 5451 | 12152 |
| | 13395 | 3602 | 11015 | 6386 | 14969 | 14971 | 12677 | 12679 | 10108 | 11200 | 2362 | 13275 |
| | 13272 | 10488 | 1952 | 9959 | 13141 | 1597 | 9919 | 13656 | 18699 | 16615 | 9593 | 528 |
| | 11155 | 2311 | 12062 | 6200 | 7555 | 16257 | 13871 | 11381 | 8072 | 17475 | 17975 | 9464 |
| | 15555 | 14752 | 11676 | 9806 | 9636 | 18597 | 16145 | 10274 | 6007 | 803 | 11807 | 2508 |
| | 4932 | 18774 | 12096 | 4136 | 1786 | 13203 | 10939 | 670 | 18646 | 16184 | 18599 | 2581 |
| | 16610 | 716 | 14042 | 8562 | 14736 | 14186 | 13709 | 2192 | 8832 | 11194 | 4318 | 7133 |
| | 13421 | 7722 | 12759 | 8612 | 1003 | 16212 | 6268 | 7759 | 12304 | 18917 | 10512 | 14485 |
| | 1335 | 426 | 10569 | 15216 | 904 | 8558 | 5540 | 5521 | 18933 | 8714 | 16607 | 1525 |
| | 4021 | 8226 | 16343 | 17502 | 9713 | 14937 | 6678 | 15165 | 4655 | 5966 | 1262 | 18385 |
| | 15085 | 5600 | 19146 | 15327 | 3657 | 567 | 16109 | 7392 | 5220 | 6531 | 6901 | |
| 230: | 2130 | 5614 | 18926 | 11907 | 12420 | 4735 | 2310 | 5895 | 15061 | 9587 | 2282 | 11177 |
| | 7927 | 8439 | 14508 | 9449 | 4903 | 6372 | 13595 | 3196 | 15544 | 444 | 2920 | 6319 |
| | 5298 | | | | | | | | | | | |
| 231: | 1909 | 14373 | 14375 | 12706 | 8598 | 11874 | 6536 | 7394 | 9724 | 13690 | 867 | 9458 |
| | 4523 | 1703 | 13763 | 6958 | 14051 | 15346 | 19124 | 5833 | 13480 | 17342 | 13749 | 660 |
| | 13092 | 1043 | 3787 | 3666 | 4743 | 1789 | 7649 | 5971 | 2220 | 13980 | 15157 | 9574 |
| | 5328 | 11666 | 10119 | 5694 | 17374 | 18016 | 12563 | 2301 | 5762 | 11980 | 19089 | 1594 |
| | 16383 | 17962 | 574 | 10694 | 10755 | 11071 | 8789 | | | | | |
| 232: | 8297 | 5825 | 6027 | 9280 | 10798 | 11842 | 13809 | 8602 | 3051 | 16110 | 15280 | 5826 |
| | 4654 | 4160 | 13647 | 16427 | 8769 | 17058 | 13265 | 16636 | 17796 | 5282 | 11608 | 18218 |
| | 5544 | 4639 | 3751 | 1980 | 1599 | 1367 | 5678 | 16090 | 8359 | 982 | 980 | 15158 |
| 233: | 1343 | 17705 | 4748 | 2942 | | | | | | | | |
| 234: | 6174 | 6173 | 5382 | 5585 | 13230 | 416 | 11225 | 654 | 17280 | 15733 | 10352 | 2087 |
| | 2106 | 7696 | 7472 | 13351 | 5940 | 16730 | 15960 | 14680 | 7112 | 17267 | 15783 | 12008 |
| | 15950 | 18731 | 18038 | 6273 | 19246 | 440 | 16299 | 18152 | 4005 | 5505 | 5331 | 15201 |
| | 15155 | 17171 | | | | | | | | | | |
| 235: | 13748 | 17177 | 17005 | 17507 | 2003 | 2731 | 14085 | 19141 | 3528 | 7773 | 12053 | |
| 236: | 18719 | 6450 | 2954 | 2513 | 11280 | 3537 | 12705 | 8142 | 1722 | 15652 | 6054 | 2368 |
| | 8633 | 16862 | 2353 | 8396 | 6821 | 901 | 1338 | 8023 | 2885 | 5209 | 1400 | 10805 |
| | 14006 | 19175 | 920 | 11551 | 5722 | 15177 | | | | | | |
| 237: | 9531 | 15827 | 11924 | 13062 | 15631 | 18390 | 15024 | 17683 | 9770 | 8469 | 447 | 16320 |
| | 10886 | 4868 | 5684 | 12984 | 10616 | 11070 | 6145 | 17628 | 9655 | 18501 | 12917 | 16620 |
| | 597 | 18585 | 13613 | 12010 | 9368 | 16625 | 7805 | 18988 | 17040 | 2689 | 18413 | 15186 |
| | 4542 | 7399 | 3101 | 7259 | 8108 | 17966 | 5070 | 4026 | 3314 | 8938 | 18997 | 16673 |
| | 3681 | 10328 | 5476 | 7286 | 2797 | 2795 | 6805 | 4951 | 10810 | 6689 | 3620 | 2650 |
| | 14993 | 439 | 5143 | 11726 | 8225 | 12969 | 13519 | 18776 | 3574 | 3419 | 10778 | 17155 |
| | 15100 | 9912 | 592 | 462 | 13348 | 3653 | 17555 | 18894 | 19069 | 3737 | 5311 | 15989 |
| | 6483 | 2095 | 11816 | 5552 | 11157 | 18998 | 5013 | 1198 | 11659 | 14169 | 1837 | 6978 |
| | 16566 | 19112 | 754 | 5846 | 9635 | 3808 | 13332 | 9836 | 10998 | 10558 | 14850 | 3711 |
| | 11087 | 7095 | 6789 | 14582 | 2405 | 17733 | 2395 | 2191 | 14821 | 17898 | 18539 | 11894 |
| | 19049 | 13683 | 4869 | 7423 | 810 | 16624 | 14264 | 11173 | 7205 | 2304 | 12791 | 18911 |
| | 540 | 7390 | 15746 | 4661 | 14474 | 12750 | 12431 | 1930 | 14703 | 16154 | 5100 | 14265 |
| | 7779 | 4485 | 11790 | 10166 | 19098 | 17981 | 18351 | 18316 | 13483 | 3429 | 5764 | 18602 |
| | 17718 | 5081 | 16590 | 2682 | 9244 | 15241 | 1591 | 6844 | 19002 | 1306 | 17939 | 12928 |
| | 13095 | 5145 | 11495 | 5383 | 9618 | 7331 | 6645 | 7908 | 8026 | 15413 | 16201 | 16348 |
| | 6937 | 18476 | 14667 | 4293 | 4973 | 13840 | 9324 | 17032 | 12167 | 10184 | 4904 | 3931 |
| | 4933 | 3240 | 1440 | 13853 | 10065 | 14734 | 11467 | 11799 | 16412 | 15244 | 3709 | 3663 |
| | 6202 | 3325 | 18397 | 919 | 1255 | 17985 | 17487 | 8231 | 9424 | 16669 | 6940 | 15923 |
| | 18306 | 7486 | 1129 | 7915 | 17212 | 18228 | 4913 | 9838 | 18846 | 17927 | 15550 | 4884 |
| | 5386 | 7487 | 11184 | 7359 | 6942 | 737 | 1844 | 16997 | 1729 | 13810 | 3821 | 12333 |
| | 11543 | 16481 | 7489 | 14980 | 10354 | | | | | | | |
| 238: | 5969 | 19041 | 17447 | 17839 | 13044 | 6002 | 5996 | 6451 | 6051 | 5841 | 5420 | 5975 |
| | 3313 | 5976 | 6030 | 4007 | 6044 | 6032 | 6035 | 7314 | 5390 | 5402 | 5406 | 5404 |
| | 5442 | 5483 | 5460 | 5447 | 5462 | 5466 | 5448 | 5403 | 5409 | 8111 | 6279 | 5010 |
| | 5457 | 13908 | 18485 | 10958 | 15764 | 15541 | 7610 | 6194 | 1287 | 2415 | 722 | 9613 |
| | 18552 | 15880 | 6449 | 6448 | 18427 | 1941 | 18981 | 813 | 17756 | 16493 | 16643 | 8243 |
| | 16018 | 8285 | 5367 | 681 | 17196 | 1880 | 13382 | 13353 | 6922 | 7721 | 6921 | 13781 |
| | 602 | 16375 | 16374 | 1074 | 17578 | 12505 | 15049 | 16420 | 10531 | 6595 | 14804 | 3356 |
| | 436 | 5388 | 6589 | 13334 | 1533 | 1682 | 11580 | 12397 | 16098 | 13659 | 6440 | 2483 |
| | 14084 | 12530 | 3910 | 19087 | 19100 | 14923 | 18518 | 12688 | 13533 | 14541 | 14664 | 14880 |
| | 6006 | 6025 | 6048 | 6947 | 6462 | 6467 | 6950 | 6471 | 6466 | 6470 | 5429 | 5982 |
| | 13335 | 5873 | 10054 | 2377 | 2376 | 2960 | 9973 | 5950 | 5427 | 5999 | 6005 | 17954 |
| | 5077 | 2687 | 812 | 698 | 11828 | 7347 | 3916 | 16904 | 8032 | 5443 | 5444 | 6845 |
| | 6861 | 774 | 6097 | 7864 | 6681 | 14657 | 14656 | 14322 | 2315 | 12334 | 11946 | 9215 |
| | 16352 | 16388 | 6184 | 19241 | 4820 | 10263 | 5192 | 4384 | 18473 | 18304 | 2125 | 12402 |
| | 3477 | 17630 | 8856 | 12634 | 8795 | 6223 | 7518 | 9472 | 2061 | 7998 | 14430 | 17592 |
| | 13210 | 4691 | 11026 | 13772 | 2757 | 14910 | 10539 | 1080 | 12022 | 17482 | 17713 | 12113 |
| | 7912 | 18577 | 13796 | 13788 | 6701 | 5397 | 7440 | 13096 | 15002 | 13893 | 6826 | 5886 |
| | 2947 | 5423 | 5973 | 5468 | | | | | | | | |
| 239: | 7931 | 13758 | 8114 | 3373 | 11499 | 11529 | 1416 | 3738 | 13929 | 15590 | 1947 | 10552 |
| | 663 | 16209 | 16266 | 6195 | 18471 | 8560 | 14830 | 12408 | 10330 | 3753 | 5574 | 10312 |
| | 5387 | 10060 | 2091 | 2632 | 16023 | 6345 | 13028 | 16568 | 16816 | 1275 | 13202 | 4405 |
| | 1977 | 5058 | 9376 | 14258 | 9597 | 18150 | 15433 | 1990 | 3791 | 7832 | 12466 | 10094 |
| | 2631 | 13168 | 12715 | 4562 | 16993 | 2448 | 10742 | 17882 | 16751 | 11056 | 3456 | 1427 |
| | 1894 | 13370 | 1955 | 1637 | 15678 | | | | | | | |
| 240: | 18268 | 843 | 14440 | 12547 | 863 | 849 | 1380 | 877 | 899 | 5838 | 17044 | 18986 |
| | 6087 | 1561 | 7134 | 12815 | 18752 | 9764 | 17742 | 13930 | 17791 | 4063 | 5217 | 1087 |
| | 2750 | 13402 | 6192 | 18436 | 8296 | 13072 | 16555 | 3399 | 18332 | 15403 | 1358 | 13201 |
| | 4618 | 12737 | 12313 | 2681 | 6906 | 12257 | 5347 | 9811 | 2778 | 18084 | 13271 | 3849 |
| | 15380 | 9079 | 5286 | 17837 | 12566 | 12567 | 12570 | 15930 | 18679 | 3212 | 16901 | 3880 |
| | 4979 | 7632 | 12905 | 11429 | 14344 | 636 | 16963 | 15406 | 12534 | 14968 | 17309 | 8138 |
| | 18401 | 18515 | 17014 | 17565 | 3768 | 9667 | 1496 | 15404 | 4486 | 16528 | 18777 | 14536 |
| 241: | 7389 | 4712 | 18984 | 2834 | 7240 | 7425 | 7411 | 3882 | 2159 | 7263 | 7262 | 4838 |
| | 15917 | 7350 | 7269 | 7288 | 7239 | 1037 | 8013 | 6310 | 7326 | 7209 | 7237 | 7235 |
| | 7221 | 7299 | 7296 | 3899 | 15830 | 16083 | 4115 | 2148 | 8292 | 18656 | 7538 | 5827 |
| | 14078 | 13597 | 7517 | 7511 | 7494 | 7198 | 11579 | 7426 | 7444 | 3270 | 15500 | 8339 |
| | 627 | 1316 | 19032 | 11289 | 6299 | 1170 | 3567 | 3150 | 3151 | 8702 | 7648 | 7468 |
| | 13733 | 10019 | 10017 | 11534 | 10089 | 4520 | 16146 | 11919 | 11926 | 11887 | 15101 | 11886 |
| | 15102 | 3432 | 18952 | 18380 | 15422 | 8333 | 8284 | 8313 | 2075 | 6604 | 10245 | 3095 |
| | 7407 | 10445 | 2441 | 10489 | 10658 | 7473 | 15243 | 4952 | 7044 | 3124 | 16107 | 2221 |
| | 2241 | 7332 | 7339 | 7336 | 1359 | 1360 | 8314 | 17763 | 8310 | 12788 | 8318 | 7964 |
| | 8340 | 8343 | 8346 | 1962 | 8847 | 2058 | 2413 | 2416 | 16080 | 14542 | 7363 | 3127 |
| | 8003 | 7373 | 7372 | 15767 | 12500 | 16065 | 6387 | 14998 | 11845 | 11762 | 11109 | 15506 |
| | 7190 | 5075 | 5076 | 7367 | 7365 | 13195 | 7449 | 7467 | 6802 | 7491 | 7448 | 7535 |
| | 7520 | 7513 | 7533 | 7515 | 7290 | 7294 | 1975 | 13363 | 688 | 12002 | 692 | 12927 |
| | 12921 | 8317 | | | | | | | | | | |
| 242: | 8884 | 11880 | 8404 | 14936 | 10220 | 13873 | 14731 | 19162 | 9931 | 728 | 7746 | 2765 |
| | 9313 | 11758 | 15528 | 15679 | 3801 | 6959 | | | | | | |
| 243: | 6493 | 7546 | 16565 | 6399 | 3230 | 15571 | 10046 | 16614 | | | | |
| 244: | 6067 | 18383 | 14924 | 7767 | 500 | 11341 | 8391 | 18054 | 9488 | 14419 | 15709 | 2123 |
| | 6463 | 8207 | 11093 | 16740 | 4794 | | | | | | | |
| 245: | 6356 | 10815 | 5961 | 3168 | 13304 | 7307 | 3538 | 9862 | 18320 | 10893 | 17933 | 9310 |
| | 2801 | 14818 | 6864 | | | | | | | | | |
| 246: | 1702 | 18677 | 18678 | 16723 | 3824 | | | | | | | |
| 247: | 9993 | 6350 | 2350 | 3660 | 13279 | 6773 | 833 | 13639 | 14922 | 1925 | 15263 | 13746 |
| | 10150 | 11999 | 10994 | 4619 | 12040 | 8110 | 12045 | 18224 | 3989 | 14287 | 443 | 18853 |
| | 16144 | 14510 | 8332 | 17924 | 4224 | 4989 | 9778 | 14496 | 18885 | | | |
| 248: | 17218 | 8464 | 14878 | 5889 | 5871 | 5869 | 5920 | 5919 | 5144 | 16260 | 4470 | 11700 |
| | 2569 | 4480 | 4481 | 1067 | 19234 | 17408 | 9777 | 15352 | 13852 | 15549 | 13123 | 10984 |
| | 7295 | 13833 | 5464 | 7742 | 7738 | 7740 | 16169 | 11981 | 1726 | 5866 | 5864 | 5914 |
| | 5835 | 5839 | 5834 | 6468 | 11794 | 5893 | 10285 | 5917 | 5915 | 5861 | 4458 | 3378 |
| | 8006 | 12101 | 12540 | 6524 | 14197 | 1213 | 10988 | 7939 | 13889 | 17151 | 16020 | 16044 |
| | 13018 | 6266 | 9286 | 14709 | 12147 | 15902 | 18955 | 7996 | 3302 | 1807 | 3643 | 15994 |
| | 668 | 15993 | 11303 | 11315 | 5891 | 5890 | 11226 | 14904 | 10319 | 10318 | 10320 | 10301 |
| | 10300 | 10297 | 10322 | 18548 | 10284 | 9861 | 11008 | 4328 | 3779 | | | |
| 249: | 6780 | 5494 | 6854 | 15194 | 6088 | 2074 | 16016 | 10722 | 17010 | 9739 | 9706 | 9707 |
| | 5452 | 9678 | 17017 | 9722 | 493 | 3339 | 6621 | 496 | 10507 | 18235 | 8249 | 10055 |
| | 13499 | 2237 | 18808 | 6046 | 1677 | 10950 | 14628 | 6208 | 13735 | 16093 | | |
| 250: | 8596 | 10295 | 6751 | 17589 | 14070 | 7098 | 7038 | 8951 | 4311 | 10311 | 10232 | |
| 251: | 8165 | 16137 | 11727 | 14848 | 10797 | 6870 | 15697 | 10219 | 2543 | 16471 | 18468 | 994 |
| | 4654 | 17908 | 17268 | 3959 | 9832 | 2808 | 15373 | 1237 | 3647 | 10686 | 15612 | 11675 |
| | 9784 | 16308 | 10978 | 15081 | 16090 | 982 | 980 | 15158 | | | | |
| 252: | 5700 | 10459 | 14135 | 16707 | 10635 | 10022 | 652 | 10461 | 9410 | 10216 | 9602 | 16193 |
| | 6261 | 16715 | | | | | | | | | | |
| 253: | 15564 | 16365 | 3189 | 7229 | 6136 | 12380 | 9773 | 7880 | 7495 | 3648 | 11586 | 10617 |
| | 15395 | 5490 | 7523 | 7999 | 7532 | 16605 | 6957 | 8187 | 15574 | 18540 | 10138 | 10140 |
| | 1018 | 6766 | 2447 | 2433 | 3052 | 1186 | 5859 | 4179 | 1019 | 5303 | 1189 | 10139 |
| | 10143 | 4305 | 2399 | 3428 | 4306 | 6822 | 9455 | 3149 | 7484 | 2398 | 5380 | 4304 |
| | 9413 | 1187 | 6127 | 1241 | 18838 | 450 | 4874 | 11239 | 4893 | 6917 | 7500 | 9358 |
| | 9435 | 1085 | 4896 | 8624 | 6837 | 8081 | 4145 | 1822 | 10767 | 3535 | 15569 | 10732 |
| | 14952 | 18828 | 10079 | 18778 | 4121 | 16057 | 11153 | 17223 | 4347 | 17531 | 10638 | 13982 |
| | 16515 | 17774 | 10902 | 2175 | 17000 | 6764 | 6335 | 4406 | 6128 | 7811 | 1665 | 15653 |
| | 504 | 18289 | 11587 | 9507 | 6050 | 13490 | 13492 | 5006 | 15225 | 1047 | 4835 | 17918 |
| | 11808 | 17365 | 17363 | 6878 | 19092 | 18823 | 2719 | 9344 | 10875 | 5018 | 14749 | 5736 |
| | 13845 | 579 | 12944 | 2821 | 3032 | 5475 | 5456 | 16834 | 16986 | 14473 | 1845 | 18340 |
| | 15071 | 457 | 2837 | 15068 | 3413 | 14266 | 17618 | 3416 | 2841 | 16807 | 18622 | 18623 |
| | 17736 | 5553 | 5511 | 16913 | 1154 | 13787 | 551 | 16936 | 15134 | 16914 | 599 | 1103 |
| | 15032 | 14996 | 14489 | 14495 | 424 | 562 | 596 | 19235 | 16200 | 18098 | 18767 | 13087 |
| | 13081 | 13089 | 9698 | 4339 | 11800 | 11802 | 11652 | 5068 | 5052 | 5230 | 6547 | 7219 |
| | 12394 | 6405 | 7222 | 11028 | 7663 | 13663 | 13083 | 3825 | 6548 | 7001 | 13106 | 9236 |
| | 8416 | 10317 | 5712 | 5727 | 12386 | 9896 | 5016 | 7107 | 3856 | 2669 | 7129 | 3712 |
| | 2686 | 12346 | 9873 | 3816 | 5017 | 7608 | 6570 | 10983 | 7140 | 9789 | 7660 | 10935 |
| | 6850 | 4358 | 7421 | | | | | | | | | |
| 254: | 5008 | 12646 | 17688 | 8974 | 7014 | 13777 | 16381 | 18947 | 6884 | 5695 | 8070 | 6494 |
| | 18567 | 5248 | 10972 | 8883 | 2749 | 17493 | 5368 | 4695 | 2619 | 17562 | 565 | 866 |
| | 7934 | 18910 | 2163 | 8893 | 7103 | 8331 | 2771 | 17230 | 10464 | 12038 | 6156 | 11251 |
| | 6447 | 7626 | 12981 | 17857 | 18307 | 13138 | 7233 | 10185 | 14032 | 2442 | 10198 | 7579 |
| | 10288 | 5236 | 17638 | 5130 | 14500 | 5679 | 6723 | 17712 | 14696 | 18814 | 7293 | 3229 |
| | 10783 | 5784 | 1563 | 12227 | 12937 | 3202 | 13523 | 18544 | 2290 | 2092 | 18131 | 18458 |
| | 6187 | 2328 | 9027 | 9029 | 7272 | 4260 | 16038 | 14698 | | | | |
| 255: | 13844 | 13458 | 16344 | 13531 | 8991 | 10799 | 11067 | 14090 | 4077 | 19037 | 2887 | 8049 |
| | 11386 | 11116 | 14226 | 7690 | 12362 | 8745 | 8824 | 8279 | 7431 | 2378 | 6457 | 691 |
| | 689 | 15215 | 10186 | 18272 | 19197 | 7202 | 2174 | 1280 | 10910 | 15451 | 2634 | 5194 |
| | 3064 | 16764 | 9386 | 16140 | 9008 | 5381 | 11014 | 2599 | 19137 | 3083 | 6341 | 2620 |
| | 7439 | | | | | | | | | | | |
| 256: | 18791 | 7383 | 5747 | 11955 | 5810 | 13684 | 7469 | 8124 | 3372 | 8114 | 3373 | 8123 |
| | 4217 | 17629 | 4204 | 591 | 6282 | 4519 | 14590 | 14131 | 9918 | 18109 | 18122 | 18107 |
| | 18123 | 10592 | 7481 | 7463 | 2612 | 6371 | 6375 | 10073 | 14990 | 11339 | 14608 | 11060 |
| | 7879 | 630 | 4828 | 3591 | 6406 | 15590 | 11021 | 17060 | 790 | 5787 | 2670 | 6720 |
| | 15939 | 2455 | 8857 | 13434 | 11738 | 3008 | 9102 | 17680 | 1196 | 10417 | 13536 | 14243 |
| | 17599 | 2902 | 9828 | 18056 | 5234 | 17355 | 18761 | 9371 | 11729 | 4637 | 10566 | 16772 |
| | 12408 | 14108 | 9500 | 10312 | 12735 | 5387 | 17976 | 5569 | 1191 | 15171 | 10790 | 17721 |
| | 17700 | 17675 | 17672 | 17720 | 17696 | 17677 | 17654 | 17719 | 17668 | 17704 | 17642 | 17702 |
| | 17698 | 17652 | 6324 | 6380 | 17768 | 15277 | 15321 | 15302 | 15275 | 15326 | 15324 | 15305 |
| | 15301 | 15283 | 15308 | 15236 | 15306 | 15329 | 15255 | 15271 | 7606 | 1292 | 14494 | 1603 |
| | 4524 | 11636 | 15988 | 18060 | 15311 | 2602 | 8083 | 5114 | 4690 | 3719 | 4672 | 17429 |
| | 17430 | 4233 | 8801 | 6584 | 7117 | 12873 | 15833 | 907 | 1575 | 8208 | 7089 | 6782 |
| | 2275 | 10256 | 15480 | 12342 | 11054 | 17184 | 9375 | 9393 | 6297 | 8043 | 18829 | 3281 |
| | 11962 | 9376 | 16594 | 6181 | 6879 | 6185 | 10213 | 7891 | 5849 | 12308 | 15458 | 2082 |
| | 13755 | 11977 | 5283 | 15433 | 15434 | 7662 | 18141 | 18135 | 18166 | 18146 | 18143 | 18313 |
| | 5892 | 1829 | 2536 | 10168 | 15018 | 3116 | 3117 | 4803 | 11056 | 11602 | 18167 | 18179 |
| | 18178 | 18198 | 18180 | 18177 | 18199 | 2128 | 4574 | 6875 | 10412 | 6321 | 3049 | 560 |
| 257: | 10236 | 1778 | 2762 | 8305 | 15457 | 1517 | 18065 | 3918 | 4604 | 14043 | 1834 | 15769 |
| | 10542 | 13088 | 16947 | 9842 | 2117 | 1780 | 1783 | 6887 | 10786 | 3092 | 3074 | 2425 |
| | 518 | 6885 | 18899 | 4918 | 8216 | 4901 | 16336 | 4899 | 16103 | 7720 | 3649 | 4873 |
| | 4866 | 4875 | 628 | 1283 | 15291 | 13148 | 3611 | 1217 | 9366 | 15616 | | |
| 258: | 17425 | 15853 | 8859 | 9683 | 7091 | 5216 | 2201 | 2205 | 11262 | 3346 | 13482 | 13109 |
| | 13107 | 13108 | 9794 | 8281 | 14641 | 13444 | 2715 | 1066 | 6137 | 12970 | 6142 | 6140 |
| | 17183 | 6163 | 6141 | 17181 | 17192 | 9831 | 5159 | 13051 | 14297 | 10948 | 7031 | 811 |
| | 16445 | 7171 | 15854 | 13126 | 710 | 17296 | 17319 | 17285 | 17286 | 873 | 9312 | 16119 |
| | 16120 | 10141 | 6168 | 17224 | 4466 | 14934 | 13246 | 14008 | 11772 | 10397 | 13068 | 13455 |
| | 17650 | 10953 | 14295 | 1735 | 10585 | 13288 | 8496 | 6041 | 7961 | 19038 | 6612 | 1629 |
| | 6017 | 6013 | 14627 | 11526 | 15297 | 4441 | 6040 | 6148 | 9420 | 7099 | 8711 | 19132 |
| | 11098 | 3943 | 10624 | 6800 | | | | | | | | |
| 259: | 12322 | 4714 | 7090 | 7343 | 3817 | 9397 | 4548 | 3010 | 2769 | 9109 | 3414 | 14347 |
| | 13708 | 13372 | 5943 | 11868 | 11465 | 10063 | 4752 | 17817 | 13361 | 13360 | 13357 | 5105 |
| | 5573 | 9024 | 6424 | 13872 | 13868 | 7092 | 4717 | 4716 | 7087 | 6575 | 17611 | 18568 |
| | 4570 | 15716 | 10227 | 8510 | 7634 | 10157 | | | | | | |
| 260: | 6150 | 16463 | 4354 | 8132 | 5126 | 13216 | 2066 | 7809 | 7718 | 2988 | 12642 | 13615 |
| | 10029 | 17953 | 14902 | 16838 | 18868 | 8290 | 5596 | | | | | |
| 261: | 2464 | 6735 | 15726 | 18074 | 4533 | 7642 | 7488 | 10955 | 10687 | 7802 | 3503 | 13093 |
| | 8940 | 2616 | 12104 | 8987 | 18900 | 3879 | 8561 | 4110 | 16434 | 2625 | 16297 | 10309 |
| | 4244 | 1026 | 8472 | 8897 | 17846 | 740 | 3692 | 12517 | 16930 | 18079 | 655 | 5583 |
| | 14539 | 3696 | 8399 | 11724 | 9362 | 5698 | 10595 | 14766 | 5215 | 4170 | 9716 | 19244 |
| | 7813 | 5862 | 585 | 4135 | 648 | 19138 | 11445 | 2739 | 10042 | 18353 | 8100 | 2019 |
| | 2690 | 19052 | 12373 | 13945 | 16595 | 1140 | 12664 | 1560 | 16857 | 13624 | 12453 | 13808 |
| | 5173 | 13766 | 6628 | 9260 | 12260 | 8687 | 18121 | 17463 | 1120 | 7797 | 13969 | 17724 |
| | 5314 | 16826 | 2063 | 1088 | 14372 | 9553 | 17994 | 2673 | 16245 | 6149 | 8458 | 19093 |
| | 7324 | 10811 | 7710 | 17194 | 17284 | 12321 | 12033 | 10898 | 10152 | 9002 | 13471 | 5605 |
| | 8885 | 4972 | 13637 | 9833 | 12092 | 1700 | 19012 | 2081 | 13874 | 11373 | 2852 | 11365 |
| | 18154 | 11821 | 9406 | 17339 | 4707 | 1102 | 1166 | 1787 | 11844 | 5166 | 10551 | 12580 |
| | 19135 | 3752 | 15624 | 1063 | 14987 | 1535 | 17889 | 8739 | 13192 | 2052 | 610 | 1714 |
| | 10124 | 18536 | 8139 | 16889 | 5258 | 2981 | 8679 | 4369 | 16639 | 16037 | 7893 | |
| 262: | 2033 | 2767 | 3670 | 4459 | 4432 | 16170 | 10905 | 16867 | 8606 | 18942 | 7697 | 3565 |
| | 14407 | 8288 | | | | | | | | | | |
| 263: | 1035 | 9303 | 17522 | 3596 | 16423 | 10242 | 10744 | 14550 | 18944 | 13113 | 10874 | 8143 |
| | 8831 | 7585 | 8109 | 1310 | 5138 | 850 | 11127 | 7958 | 8986 | 2453 | 2560 | 4205 |
| | 4004 | 4675 | 4673 | 10345 | 17998 | 1374 | 821 | 8649 | 8481 | 9682 | 7380 | 6431 |
| | 3360 | 3374 | 5754 | 11483 | 13329 | 1203 | 1340 | 1339 | 4399 | 3283 | 6668 | 6381 |
| | 6241 | 7284 | 7512 | 6230 | 11328 | 15128 | 12214 | 10951 | 11193 | 6497 | 2195 | 16892 |
| | 16809 | 4053 | 15715 | 15901 | 16798 | 11263 | 1719 | 3634 | 2158 | 5478 | 15076 | 1257 |
| | 13172 | 15036 | 14456 | 14458 | 3438 | 18769 | 2703 | 12701 | 18877 | 14893 | 6253 | 18425 |
| | 3403 | 3914 | 5746 | 4245 | 5745 | 17084 | 15381 | 17772 | 15379 | 9309 | 10296 | 12410 |
| | 5703 | 15992 | 3780 | 18405 | 2278 | 4687 | 7254 | 4645 | 15181 | 9150 | 10286 | 18596 |
| | 6188 | 9199 | 10890 | 10879 | 15662 | 18680 | 17535 | 16335 | 16334 | 564 | 15325 | 9790 |
| | 15285 | 2090 | 15282 | 6549 | 4833 | 1118 | 7329 | 18041 | 15620 | 16076 | 8589 | 10725 |
| | 17516 | 14852 | 6421 | 5690 | 5688 | 5119 | 12105 | 18454 | 13900 | 6564 | 14418 | 14619 |
| | 4297 | 10339 | 10360 | 10639 | 12762 | 12763 | 12741 | 14511 | 13719 | 10909 | 10773 | 16790 |
| | 9869 | 1727 | 6880 | 10960 | 11304 | 7110 | 5769 | 13197 | 7056 | 9945 | 5261 | 17830 |
| | 14774 | 14773 | 12199 | 3137 | 5595 | 14014 | 2941 | 2957 | 17451 | 9205 | 2466 | 12448 |
| | 15051 | 3366 | 18339 | 9670 | 13214 | 1239 | 3486 | 18561 | 7055 | 9712 | 10923 | 13525 |
| | 8438 | 13359 | 2418 | 9400 | 11234 | 2070 | 18866 | 15848 | 7243 | 7241 | 2726 | 10370 |
| | 7457 | 14298 | 1838 | 10174 | 11329 | 12913 | 10405 | 11972 | 3408 | 12813 | 15659 | 8843 |
| | 2880 | 13850 | 4880 | 4385 | 17717 | 17265 | 10460 | 11220 | 15829 | 9685 | 15344 | 2178 |
| | 11324 | 12998 | 18296 | 15580 | 12407 | 18636 | 16217 | 1071 | 4776 | 2384 | 16294 | 517 |
| | 1409 | 13377 | 442 | 855 | 3498 | 5899 | 7009 | 3369 | 9524 | 7955 | 17042 | 2463 |
| | 6860 | 797 | 13680 | 1818 | 8229 | 6189 | 1892 | 2482 | 5086 | 11387 | 12139 | 19047 |
| | 19046 | 2561 | 11674 | 16039 | 19016 | 6993 | 4118 | 16629 | 14564 | 16309 | 2735 | 832 |
| | 4286 | 11133 | 1920 | 16941 | 7793 | 7847 | 3846 | 12352 | 3027 | 2187 | 7317 | 11751 |
| | 16395 | 14634 | | | | | | | | | | |
| 264: | 7571 | 12286 | 11656 | 6312 | 7806 | 13041 | 4308 | | | | | |
| 265: | 13716 | 16282 | 3622 | 16128 | 2432 | 5091 | 7256 | 5094 | 7466 | 7464 | 5092 | 1341 |
| | 1344 | 16034 | 16318 | 1345 | 5493 | 10131 | 13605 | 14704 | 4059 | 10144 | 19195 | 9113 |
| 266: | 16179 | 6376 | | | | | | | | | | |
| 267: | 10695 | 10080 | 15222 | 3336 | 16070 | 17906 | 15461 | 16778 | 11541 | 8321 | 14840 | 16441 |
| | 14461 | 3078 | 16553 | 14929 | 14615 | 18225 | 1799 | 3781 | 9074 | 1362 | 8894 | 9856 |
| | 13182 | 12587 | 11210 | 16207 | 19053 | 9477 | 3450 | 8475 | 11378 | 10077 | 18659 | 5908 |
| | 11662 | 10239 | 3546 | 9196 | 11788 | 16729 | 12687 | 17436 | 12472 | 14335 | 14313 | 3350 |
| | 5657 | 13623 | 11806 | 15691 | 18889 | 5828 | 12962 | 7549 | 17152 | 14791 | 7328 | 7327 |
| | 15844 | 10068 | 11042 | 19158 | 16711 | 15570 | 16355 | 8068 | 10996 | | | |
| 268: | 2886 | 9957 | 17982 | 10633 | 7244 | 6714 | 1461 | 2113 | 6871 | 836 | 13502 | 6798 |
| | 15168 | 18396 | 3234 | 2200 | 9380 | 5880 | 9621 | 8447 | 9787 | 12043 | 15448 | 9694 |
| | 13218 | 4705 | 13753 | 14029 | 2998 | | | | | | | |
| 269: | 10688 | 4111 | 17553 | 10437 | 15096 | 5485 | 9680 | 10385 | 10653 | 11747 | 16874 | 14594 |
| | 16211 | 14686 | 17690 | 8241 | 4055 | 7427 | 7803 | 1987 | 4186 | 4214 | 15651 | 1363 |
| | 8864 | 11780 | 13023 | 7633 | 12224 | 6490 | 13751 | 8037 | 3589 | 11702 | 5195 | 5909 |
| | 2222 | 9907 | 14842 | 17686 | 6624 | 7566 | 3583 | 12297 | 12724 | 14468 | 10207 | 18644 |
| | 10608 | 1622 | 4841 | 16104 | 1605 | 16551 | 18689 | 12343 | 9207 | 2436 | 3822 | 16818 |
| | 10642 | 18674 | 2352 | 4626 | 1675 | 17661 | 3134 | 617 | 2708 | 961 | 3106 | 10629 |
| | 14827 | 11171 | 6053 | 12518 | 7784 | 5323 | 2580 | 9759 | 1709 | 2179 | 18964 | 14835 |
| | 6852 | 13452 | 11718 | 10486 | 13090 | 18057 | 3263 | 8170 | 8744 | 16373 | 1654 | 15378 |
| | 14170 | 9209 | 2584 | 3407 | 889 | 1439 | 10830 | 1585 | 4816 | 16025 | 12545 | 13281 |
| | 13346 | 2590 | 1758 | 9650 | 17819 | 18091 | 16148 | 3389 | 17615 | 14976 | 10238 | 13875 |
| | 2611 | 14065 | 5696 | 12279 | 6074 | 6729 | 2745 | 19185 | 5681 | 16920 | 13388 | 14163 |
| | 8813 | 3618 | 14834 | 15087 | 3721 | 1485 | 9949 | 10283 | 7215 | 3309 | 13415 | 5439 |
| | 4469 | 5933 | 17289 | 11789 | 6384 | 5731 | 10264 | 7605 | 8842 | 1099 | 14475 | 3909 |
| | 13435 | 15200 | 7527 | 11012 | 18453 | 15198 | 4161 | 4104 | 18753 | 12971 | 17172 | 9631 |
| | 12235 | 8497 | 13245 | 18019 | 16873 | 3661 | 4577 | 6121 | 6122 | 17843 | 14241 | 6559 |
| | 15677 | 16369 | 18284 | 6292 | 1387 | 19123 | 4430 | 18460 | 6119 | 14240 | 4809 | 5037 |
| | 3176 | 14246 | 822 | 19212 | 3604 | 8652 | 11848 | 9111 | 17377 | 14244 | 10482 | 5532 |
| | 14726 | | | | | | | | | | | |
| 270: | 8430 | 11246 | 888 | 19061 | 13527 | 4203 | 9211 | 18507 | 12612 | 6037 | 9813 | 12222 |
| | 4042 | 17351 | 7357 | 2554 | 15576 | 2530 | 17209 | 1254 | 553 | 6291 | 4213 | 8660 |
| | 8211 | 13160 | 12189 | 4353 | 2593 | 12910 | 18282 | 14806 | 17244 | 10015 | 2741 | 7736 |
| | 6107 | 16064 | 536 | 683 | | | | | | | | |
| 271: | 4877 | 12594 | 12592 | 12593 | 1168 | 17709 | 14622 | 9708 | 3469 | 12557 | 7679 | 13757 |
| | 6458 | 11104 | 10895 | 7774 | 6856 | 6232 | 12922 | 3157 | 8983 | 11307 | 15719 | 12415 |
| | 10416 | 6486 | 7002 | 1957 | 16783 | 5624 | 16422 | 11181 | 7291 | 1626 | 1648 | 5699 |
| | 2204 | 719 | 6203 | 5597 | 6211 | 12836 | 12810 | 17491 | 17492 | 18863 | 8852 | 18169 |
| | 17979 | 9998 | 10497 | 12247 | 18972 | 16293 | 11825 | 9133 | 5644 | 7508 | 4196 | 18115 |
| | 16165 | 15640 | 12480 | 1900 | 2109 | 1803 | 1697 | 5219 | 12900 | 13417 | 18843 | 17971 |
| | 2072 | 9088 | 12825 | 17178 | 18422 | 11750 | 10836 | 11653 | 13491 | 11689 | 11447 | 7592 |
| | 19119 | 3201 | 3872 | 19058 | 6475 | 860 | 5497 | 10226 | 9099 | 13710 | 10051 | 6443 |
| | 8235 | 3185 | 11456 | 806 | 429 | 8818 | 10483 | 17327 | 13496 | 11075 | 4592 | 412 |
| | 11434 | 10429 | 11433 | 7422 | 7409 | 7408 | 15322 | 7907 | 13817 | 17105 | 7191 | 17711 |
| | 10243 | 15851 | 13418 | 13147 | 2556 | 3866 | 2791 | 8273 | 3086 | 3070 | 3072 | 5538 |
| | 11777 | 6320 | 16611 | 6100 | 14771 | 16623 | 3786 | 8242 | 18082 | 19027 | 13724 | 15983 |
| | 1891 | 2867 | 7775 | 11619 | 13324 | 6616 | 6618 | 1125 | 18094 | 17722 | 15364 | 6683 |
| | 2157 | 12555 | 13024 | 3783 | 14194 | 14316 | 5306 | 6778 | 15785 | 1282 | 18433 | 3128 |
| | 14481 | 1991 | 8973 | 5580 | 5591 | 11725 | 2566 | 10376 | 13740 | 6263 | 1971 | 808 |
| | 3748 | 17701 | 17699 | 6514 | 18566 | 6515 | 2929 | 3160 | 3162 | 8065 | 13297 | 13642 |
| | 14227 | 10467 | 9564 | 4460 | 17984 | 13310 | 14903 | 13295 | 458 | 5622 | 3047 | 4732 |
| | 12237 | 4733 | 18448 | 14026 | 12245 | 17550 | 13325 | 16872 | 6622 | 9208 | 11356 | 10084 |
| | 4865 | 11454 | 4461 | 5057 | 1856 | 7815 | 6736 | 15122 | 17560 | 15649 | 4241 | 14979 |
| | 8033 | 2588 | 2812 | 2571 | 4071 | 964 | 2367 | 963 | 12429 | 10641 | 3853 | 6277 |
| | 489 | 5174 | 11089 | 13091 | 10627 | 15133 | 18593 | 3984 | 9394 | 10678 | 10661 | 9365 |
| | 14707 | 10023 | 10677 | 9319 | 15093 | 6963 | 13933 | 15000 | 2932 | 18188 | 14891 | 18189 |
| | 15816 | 13816 | 5516 | 671 | 5424 | 15377 | 10753 | 661 | 15431 | 12258 | 3839 | 10438 |
| | 5562 | 6313 | 12903 | 3897 | 7885 | 12208 | 9401 | 9143 | 6513 | 14927 | 16596 | 13242 |
| | 5450 | 11198 | 18338 | 18696 | 17858 | 17860 | 18786 | 5393 | 7594 | 12681 | 3631 | 2024 |
| | 2005 | 4693 | 1526 | 2397 | 8766 | 11511 | 1179 | 1723 | 15556 | 5205 | 10095 | 4713 |
| 272: | 2476 | 4605 | 3590 | 17269 | 12552 | 12550 | 7501 | 14751 | 15392 | 5592 | 11796 | 16372 |
| | 4149 | 18640 | 6540 | 15725 | 18637 | 18044 | 9775 | 14074 | 17762 | 9431 | 16817 | 2976 |
| | 2041 | 10920 | 10918 | 10919 | 6246 | 6245 | 3529 | 4129 | 11740 | 9275 | 11166 | 2997 |
| | 7120 | 1674 | 114429 | 4680 | 14300 | 930 | 18404 | 10446 | 13276 | 14192 | 17400 | |
| 273: | 7563 | 7558 | 12847 | 18712 | 16770 | 17497 | 544 | 10669 | 10670 | 17546 | 5362 | 18031 |
| | 10396 | 6596 | 11136 | 3476 | 3497 | 622 | | | | | | |
| 274: | 13296 | 2414 | 7482 | 715 | 5029 | 17139 | 8523 | 12280 | 5587 | 9163 | 13837 | 7094 |
| | 3044 | 4280 | 2153 | 1112 | 4738 | 4010 | 5324 | 10529 | 10800 | 18319 | 7203 | 6138 |
| | 5128 | 10413 | 17368 | 9596 | 3799 | 5190 | 8551 | 2711 | 8694 | 12467 | 5167 | 4009 |
| | 3862 | 9114 | 6874 | 16580 | 10234 | 6060 | 13741 | 8220 | 7478 | 11407 | 13856 | 11295 |
| | 15070 | 13298 | 4415 | 1606 | 18172 | 6499 | 13961 | 14716 | 3655 | 10066 | 2800 | 7266 |
| | 18464 | 16192 | 12428 | 17016 | 1810 | 7183 | 9659 | 15622 | 4254 | 18781 | 824 | 3874 |
| | 5645 | 16717 | 15897 | 2604 | 11084 | 9641 | 9704 | 10541 | 3208 | 13670 | 1672 | 7074 |
| | 5735 | 2600 | 5765 | 6912 | 5346 | 13728 | 13703 | 12240 | 12238 | 9145 | 15565 | 11169 |
| | 1405 | 9756 | 15771 | 5179 | 5706 | 15772 | 12901 | 6709 | 14021 | 4168 | 18206 | 11626 |
| | 14139 | 2779 | 886 | 11568 | 1437 | 9403 | 16000 | 16756 | 12529 | 13059 | 15915 | 12623 |
| | 3252 | 1720 | 12209 | 16495 | 19227 | 9883 | 18208 | 5924 | 11326 | 13150 | 3307 | 8365 |
| | 6995 | 12798 | 4949 | 14471 | 13560 | 8423 | 12166 | 9082 | 5041 | 6058 | 19128 | 7756 |
| | 17440 | 14799 | 2510 | 13503 | 10992 | 12818 | 6613 | 11175 | 12853 | 793 | 2299 | 8291 |
| | 12461 | 7179 | 18106 | 14045 | 2984 | 11966 | 741 | 2565 | 2532 | 11685 | 3928 | 10924 |
| | 8919 | 1372 | 7471 | 6106 | 13429 | 13236 | 18258 | 6786 | 6823 | 2446 | 3040 | 3042 |
| | 14676 | 10735 | 724 | 727 | 9601 | 15533 | 1649 | 10137 | 4857 | 4842 | 5365 | 644 |
| | 6812 | 10912 | 3603 | 12030 | 14912 | 8616 | 9170 | 2322 | 3245 | 3250 | 3260 | 12840 |
| | 5264 | 16328 | 8655 | 6283 | 13350 | 10698 | 8590 | 10697 | 11885 | 11195 | 9476 | 14668 |
| | 15473 | 11567 | 12864 | 9709 | 14945 | 12215 | 4742 | 14584 | 16884 | 16447 | 1996 | 10199 |
| | 2734 | 6807 | 13557 | 8666 | 15469 | 17395 | 14955 | 14176 | 5518 | 18711 | 2827 | 13154 |
| | 2898 | 5322 | 5319 | 4739 | 8890 | 17300 | 4495 | 5063 | 10549 | 13137 | 4195 | 1854 |
| | 2527 | 19139 | 9946 | 15252 | 12776 | 5280 | 10043 | 935 | 17588 | 4373 | 9663 | 17287 |
| | 8521 | 6169 | 11290 | 10749 | 17136 | 17121 | 7881 | 14438 | 4888 | 5759 | 16329 | 2927 |
| | 15532 | 1013 | 18288 | 17804 | 13542 | 8044 | 16866 | 1327 | 12341 | 4863 | 16757 | 9526 |
| | 15323 | 6503 | 10634 | 17375 | 10795 | 1116 | 14645 | 6760 | 893 | 10543 | 5316 | 17304 |
| | 5733 | 17142 | 14098 | 8524 | 12290 | 10516 | 7883 | 909 | 7984 | 778 | 14722 | 16684 |
| | 12239 | 3006 | 15438 | 17394 | 17665 | 11558 | 8342 | 18264 | 14928 | 14478 | 17344 | 13381 |
| | 7085 | 13720 | 18912 | 17156 | 2264 | 12779 | 1586 | 5275 | 10989 | 5818 | 11896 | 11897 |
| | 5619 | 10840 | 5543 | 1650 | 10582 | 11709 | 16690 | 14269 | 14810 | 4431 | 4788 | 4790 |
| | 7944 | 16870 | 7387 | 6769 | 7960 | 12491 | 18360 | 5026 | 6658 | 16937 | 12538 | 4612 |
| | 10580 | 18193 | 3979 | 8422 | 3818 | 8505 | 8507 | 8504 | 17778 | 1759 | 8816 | 14646 |
| | 11797 | 4240 | 6897 | 15192 | 6066 | 11963 | 13198 | 18204 | 18963 | 2573 | 14426 | 7752 |
| | 15906 | 16059 | 1220 | 10047 | | | | | | | | |
| 275: | 6567 | 7596 | 11364 | 11453 | 12046 | 5398 | 13331 | 16182 | 8916 | 1973 | 5797 | 2518 |
| | 891 | 18583 | 13323 | 733 | 12250 | 8328 | 5812 | 9967 | 3368 | 10248 | 3335 | 3895 |
| | 11052 | 890 | 13631 | 12434 | 2940 | 12421 | 5281 | 9331 | 17926 | 19188 | 6236 | 17460 |
| | 16804 | 5671 | 5831 | 16672 | 15497 | 17552 | 11625 | 14132 | 11383 | 9972 | 12803 | 11064 |
| | 4584 | 6770 | 13599 | 15368 | 17312 | 1216 | 10021 | 16522 | 2292 | 1932 | 4386 | 8493 |
| | 8247 | 6504 | 15981 | 15979 | 5650 | 5649 | 5636 | 17849 | 6811 | 18134 | 763 | 6640 |
| | 16829 | 15593 | 7070 | 4330 | 3192 | 14604 | 8972 | 14445 | 17869 | 2903 | 6742 | 8271 |
| | 8817 | 6090 | 5296 | 15391 | 13676 | 16526 | 2983 | 6105 | 3619 | 16242 | 6828 | 2683 |
| | 19079 | 14386 | 8407 | 13407 | 14384 | 14377 | 14357 | 3028 | 15348 | 4817 | 14803 | 10025 |
| | 13175 | 13161 | 14681 | 6147 | 13177 | 17575 | 17576 | 14449 | 17873 | 4915 | 3262 | 16036 |
| | 17573 | 10706 | 4912 | 13077 | 18586 | 9900 | 18940 | 711 | 3290 | 16031 | 6781 | 18658 |
| | 18668 | 18670 | 18671 | 18666 | 9878 | 3171 | 3207 | 880 | 3843 | 7249 | 3754 | 4372 |
| | 5498 | 10341 | 13017 | 6682 | 8822 | 8212 | 6976 | 1984 | 7674 | 1906 | 14209 | 10975 |
| | 9849 | 16316 | 6726 | 3249 | 11988 | 11991 | 5817 | 4766 | 10578 | 10662 | 430 | 14671 |
| | 17412 | 15883 | 5437 | 11773 | | | | | | | | |
| 276: | 6415 | 11627 | 16734 | 2790 | 12959 | 6986 | 10082 | 18111 | 1354 | 12820 | 3964 | |
| 277: | 18650 | 5609 | 10555 | 10768 | 10537 | 17527 | 6952 | 15558 | 10041 | 18763 | 7499 | |
| 278: | 15266 | 15482 | 12044 | 12553 | 4614 | 11192 | 2672 | 11183 | 9823 | 14522 | 16221 | 3544 |
| | 6281 | 5112 | 1760 | 18159 | 8238 | 8228 | 5482 | 8190 | 1965 | | | |
| 279: | 6567 | 11364 | 749 | 11453 | 12046 | 10052 | 17706 | 18365 | 8385 | 5398 | 1544 | 16182 |
| | 12144 | 16111 | 3341 | 9565 | 9725 | 15117 | 15657 | 533 | 1137 | 2518 | 1887 | 1885 |
| | 10842 | 13590 | 3994 | 2630 | 16766 | 15463 | 13036 | 9551 | 936 | 11557 | 18445 | 17217 |
| | 9331 | 4033 | 4622 | 9786 | 11206 | 10471 | 4352 | 4386 | 1932 | 8493 | 8247 | 6504 |
| | 15979 | 15981 | 9941 | 8839 | 15593 | 2313 | 916 | 918 | 2006 | 7070 | 4330 | 18529 |
| | 10148 | 12565 | 10731 | 4682 | 10251 | 16953 | 15509 | 1699 | 7405 | 16425 | 9783 | 10979 |
| | 5799 | 15687 | 18301 | 1950 | 7096 | 910 | 1135 | 16009 | 3792 | 3289 | 14462 | 14467 |
| | 14464 | 17453 | 13343 | 13384 | 6719 | 13341 | 13729 | 2729 | 3534 | 2831 | 16392 | 12337 |
| | 12350 | 6742 | 7072 | 7075 | 8817 | 6944 | 7570 | 3680 | 13593 | 12535 | 18281 | 19020 |
| | 11696 | 4598 | 8914 | 14214 | 4159 | 4105 | 15044 | 16776 | 5558 | 16175 | 4191 | 15013 |
| | 12168 | 16055 | 10803 | 2983 | 16242 | 6105 | 8407 | 9666 | 12514 | 4363 | 6781 | 8770 |
| | 9878 | 3171 | 5652 | 17141 | 6726 | 3249 | 11991 | 11988 | 5817 | 4766 | 10662 | 17219 |
| | 430 | 14671 | 4886 | 16660 | 5437 | 11773 | 5761 | 5410 | 18705 | 13903 | | |
| 280: | 6173 | 6174 | 2365 | 17259 | 4411 | 4410 | 5588 | 11225 | 15721 | 14985 | 7696 | 11506 |
| | 13351 | 5940 | 10368 | 6787 | 1959 | 12498 | 2454 | 16341 | 15783 | 18676 | 11293 | 4855 |
| | 14524 | 17078 | 10180 | 5505 | 15201 | 15155 | 17171 | | | | | |
| 281: | 17893 | 7011 | 6207 | 11190 | 17567 | 12492 | 19233 | 19215 | 4300 | 7003 | 18070 | 16733 |
| | 1554 | 9581 | 726 | 13534 | 2346 | 14727 | 18724 | 10857 | 13387 | 9212 | 9168 | 8573 |
| | 7609 | 18442 | 6632 | | | | | | | | | |
| 282: | 18444 | 2704 | 17326 | 11744 | 5133 | 10947 | 2939 | 7795 | 9151 | 17727 | 19011 | 18210 |
| | 7640 | 17186 | 13914 | 16210 | 7796 | 9182 | 16289 | 11073 | 10329 | 18021 | 486 | 3056 |
| | 19189 | 2823 | 2718 | 19238 | 18251 | 17572 | 9916 | 7688 | 13457 | 19033 | 5682 | 5161 |
| | 4926 | 8080 | 7018 | 6841 | 11443 | 11095 | 9499 | 17065 | 7800 | 7601 | 19208 | 15218 |
| | 5336 | 11076 | 4603 | 5978 | 5434 | 4035 | 12125 | 16835 | 3501 | 5152 | 1055 | 16745 |
| | 4798 | 4689 | 6204 | 11348 | 14326 | 16719 | 1911 | 13223 | 11698 | 14123 | 2728 | 17489 |
| | 15170 | 7007 | 6500 | 18519 | 18845 | 2992 | 11872 | 15371 | 12170 | 5290 | 1076 | 11637 |
| | 15888 | 1378 | 18303 | 6977 | 8150 | 12792 | 5180 | 4001 | 10701 | 11105 | 11240 | 6832 |
| | 13140 | 8860 | 9478 | 1883 | 13213 | 8435 | 17266 | 17026 | 13464 | 9672 | 18431 | 3659 |
| | 8631 | 16129 | 14941 | 14947 | 14446 | 11292 | 1493 | 13419 | 17608 | 7564 | 6391 | 18516 |
| | 10217 | 13189 | 2412 | 15180 | 5510 | 18242 | 18310 | 13799 | 18244 | 2324 | 14518 | 605 |
| | 8344 | 5123 | 8185 | 1105 | 10401 | 467 | 762 | 13128 | 6945 | 8993 | 9326 | 16082 |
| | 11795 | 5213 | 5623 | 10420 | 2991 | 2993 | 2096 | 960 | 12805 | 15251 | 15269 | 12807 |
| | 12808 | 15270 | 7006 | 12219 | 3037 | 4391 | 12138 | 16426 | 16377 | 9381 | 17166 | |
| 283: | 1002 | 570 | 11876 | 2649 | 17648 | 4380 | 18089 | 12995 | 10728 | 17836 | 473 | 498 |
| | 497 | 494 | 479 | 478 | 546 | 532 | 531 | 456 | 1015 | 5353 | 5378 | 15904 |
| | 12957 | 2173 | 17947 | 10011 | 2928 | 8192 | 4334 | 8436 | 10105 | 16670 | 8736 | 5369 |
| | 14463 | 773 | 19068 | 10713 | 10613 | 14516 | 10631 | 12652 | 10059 | 18613 | 15333 | 6327 |
| | 1206 | 4265 | 5431 | 4488 | 13563 | 11252 | 14434 | 2444 | 4287 | 11202 | 4967 | 15204 |
| | 6609 | 6389 | 17214 | 9049 | 11603 | 12082 | 4333 | 5394 | 4878 | 14480 | 15253 | 13831 |
| | 15728 | 16916 | 16176 | 5417 | 13947 | 492 | 14257 | 12736 | 5030 | 809 | 15363 | 18256 |
| | 6671 | 14781 | 15290 | 4190 | 9653 | 3334 | 3142 | 11578 | 7479 | 14674 | 7636 | 7429 |
| | 9011 | 6705 | 16995 | 13053 | 8444 | 18496 | 3690 | 3684 | 12996 | 8128 | 16753 | 11423 |
| | 14784 | 17995 | 8105 | 2055 | 1197 | 18721 | 13278 | 14156 | 17631 | 16351 | 11812 | 921 |
| | 6316 | 6511 | 9688 | 8236 | 2236 | 1666 | 8183 | 14222 | 10270 | 10871 | 13354 | 10281 |
| | 14643 | 9877 | 8303 | 10404 | 3508 | 14918 | 11058 | 10754 | 12023 | 19160 | 14926 | 12436 |
| | 7311 | 1532 | 16945 | 16640 | 2936 | 12181 | 940 | 15494 | 1817 | 14016 | 6809 | 14081 |
| | 5214 | 2516 | 10962 | 12360 | 14278 | 18013 | 9804 | 13658 | 9805 | 16113 | 1205 | 8511 |
| | 3525 | 3575 | 7878 | 7199 | 7600 | 1982 | 16131 | 16501 | 2291 | 11620 | 3695 | 16984 |
| | 14292 | 18773 | 7186 | 6323 | 10513 | 8845 | 5757 | 18101 | 8446 | 16588 | 5206 | 18358 |
| | 17179 | 16606 | 15686 | 12142 | 10606 | 12316 | 7617 | 1093 | 8519 | 8670 | 17382 | 3800 |
| | 2626 | 13178 | 17695 | 1423 | 1940 | 18278 | 6601 | 6598 | 6593 | 6300 | 9545 | 9495 |
| | 9511 | 16384 | 2953 | 18423 | 13134 | 1744 | 13300 | 7493 | 10787 | 7818 | 18632 | 14702 |
| | 4730 | 543 | 542 | 15813 | 15825 | 15773 | 15794 | 7790 | 7792 | 449 | 474 | 476 |
| | 1020 | 12896 | 1634 | 10792 | 12939 | 15517 | 17601 | 14591 | 2504 | 2344 | 5239 | 13365 |
| | 10738 | 5272 | 3907 | 12787 | 1422 | 1424 | 1426 | 1425 | 19071 | 14066 | 16496 | 11686 |
| | 5098 | 8250 | 5868 | 9903 | 15732 | 4474 | 5641 | 13540 | 13553 | 4126 | 13784 | 2325 |
| | 7406 | 2261 | 8915 | 18702 | 3635 | 9611 | 8644 | 7577 | 12242 | 12269 | 12246 | 12271 |
| | 11172 | 5545 | 15259 | 17564 | 4679 | 8798 | 17419 | 4927 | 18557 | 12287 | 12288 | 5930 |
| | 5928 | 5923 | 5935 | 4130 | 13063 | 2794 | 1707 | 4094 | 1716 | 3417 | 2027 | 11025 |
| | 7823 | 7826 | 17538 | 6576 | 6577 | 6574 | 5948 | 7932 | 7947 | 2012 | 12569 | 6675 |
| | 828 | 12106 | 11826 | 3708 | 2515 | 5501 | 5922 | 5901 | 5897 | 9808 | 3022 | 11269 |
| | 11272 | 11268 | 13793 | 17409 | 14651 | 1584 | 7567 | 17116 | 9026 | 7438 | 5942 | 11535 |
| | 435 | 507 | 506 | 508 | 510 | 554 | 8989 | 8959 | 8956 | 3505 | 18140 | 9977 |
| | 8791 | 16310 | 17659 | 5330 | 7514 | 6280 | 14200 | 16736 | 11690 | 454 | 452 | 549 |
| | 513 | 525 | 529 | 526 | 1017 | 1016 | 14261 | 17867 | 18881 | | | |
| 284: | 9361 | 16893 | 9841 | 9508 | 9489 | 9510 | 8548 | 2151 | 9737 | 8904 | 9699 | 9733 |
| | 8878 | 9765 | 8911 | 9771 | 8935 | 4737 | 11143 | 11141 | 9599 | 17965 | 17946 | 17964 |
| | 17930 | 17871 | 17945 | 17942 | 17925 | 2429 | 2430 | 17944 | 17921 | 2431 | 17872 | 11759 |
| | 11211 | 11749 | 11746 | 11767 | 11233 | 11249 | 11099 | 12527 | 7839 | 13474 | 6634 | 12615 |
| | 19181 | 11446 | 8245 | 13314 | 7012 | 9594 | 13153 | 10676 | 2100 | 18285 | 18354 | 1169 |
| | 18730 | 7863 | 8452 | 9676 | 8923 | 14136 | 13408 | 4155 | 15234 | 6994 | 16883 | 12775 |
| | 11442 | 11441 | 11444 | 11418 | 11402 | 11403 | 11421 | 11420 | 11424 | 11425 | 18440 | 14044 |
| | 10044 | 1907 | 16100 | 2578 | 17862 | 18275 | 14037 | 7727 | 902 | 14299 | 11996 | 11521 |
| | 11993 | 11519 | 11525 | 11522 | 11500 | 11520 | 11502 | 11990 | 11487 | 11503 | 11497 | 11496 |
| | 11462 | 11466 | 11459 | 11468 | 11463 | 1731 | 6352 | 9028 | 10971 | 14876 | 17905 | 1007 |
| | 3912 | 18214 | 2424 | 5743 | 14161 | 3251 | 9701 | 4116 | 13262 | 16196 | 16194 | 14886 |
| | 15430 | 3744 | 15496 | 538 | 12595 | 12454 | 572 | 14919 | 10603 | 6393 | 2474 | 18937 |
| | 1350 | 12992 | 4791 | 14059 | 10593 | 6231 | 8906 | 1357 | 17622 | 13397 | 12455 | 6425 |
| | 13336 | 4445 | 601 | 2279 | 9629 | 4564 | 4514 | 4515 | 4530 | 9668 | 9673 | 3298 |
| | 18324 | 14202 | 14217 | 7836 | 7995 | 14054 | 14052 | 10447 | 13260 | 9743 | 9740 | 3296 |
| | 6847 | 7835 | 18362 | 18346 | 18368 | 18348 | 18361 | 18344 | 10389 | 5830 | 9745 | 9744 |
| | 9734 | 9738 | 5898 | 5896 | 5900 | 5959 | 5956 | 5951 | 5954 | 5902 | 5904 | 5931 |
| | 5934 | 5906 | 5905 | 14576 | 11634 | 3067 | 17147 | 17162 | 12627 | 18342 | 18367 | 10707 |
| | 6343 | 6340 | 11120 | 7435 | 7434 | 3295 | 2856 | 18352 | 14219 | 14223 | 18326 | 14205 |
| | 14206 | 16199 | 16161 | 16312 | 16181 | 16174 | 16205 | 16159 | 15704 | 15701 | 16135 | 6905 |
| | 6403 | 6367 | 6979 | 6939 | 6931 | 6908 | 7028 | 7027 | 7051 | 6935 | 6930 | 6982 |
| | 7088 | 7050 | 6996 | 6910 | 7084 | 7081 | 3301 | 18321 | 14207 | 10407 | 14201 | 16085 |
| | 11852 | 11841 | 11830 | 18849 | 4290 | 8356 | 15621 | 13592 | 9691 | 10911 | 8256 | 17163 |
| | 17159 | 17160 | 14938 | 4909 | 19243 | 12355 | 11757 | 1229 | 1231 | 9627 | 8814 | 17187 |
| | 9822 | 9486 | 19151 | 12596 | 19152 | 13551 | 13607 | 19142 | 19154 | 12590 | 19153 | 12628 |
| | 13627 | 13610 | 13570 | 13567 | 13569 | 13632 | 13644 | 13645 | 13629 | 13651 | 13649 | 12617 |
| | 19196 | 11827 | 11786 | 11801 | 11798 | 11782 | 11769 | 13633 | 11124 | 4276 | 15799 | 15730 |
| | 15776 | 15759 | 9072 | 8275 | 14415 | 3276 | 15817 | 9692 | 8865 | 8908 | 9741 | 4544 |
| | 9671 | 8863 | 4594 | 4597 | 4541 | 9647 | 4560 | 8820 | 9077 | 9633 | 13601 | 18798 |
| | 18794 | 10819 | 11333 | 11311 | 11342 | 11337 | 11336 | 11334 | 13814 | 15375 | 6867 | 6502 |
| | 12768 | 13425 | 8239 | 1903 | 13934 | 13960 | 13956 | 13936 | 17174 | 15112 | 3232 | 3233 |
| | 2359 | 5824 | 10492 | 5266 | 14180 | 3722 | 5850 | 10430 | 10432 | 10427 | 10408 | 10410 |
| | 10414 | 5844 | 10426 | 10468 | 10452 | 10453 | 14379 | 10525 | 10547 | 10553 | 10570 | 10577 |
| | 6810 | 6794 | 6790 | 6796 | 6813 | 6833 | 6815 | 6831 | 17566 | 6190 | 10237 | 10088 |
| | 17358 | 9958 | 18903 | 18833 | 18520 | 4587 | 4590 | 4536 | 13045 | 15942 | 2775 | 15428 |
| | 7650 | 17148 | 17157 | 9287 | 4268 | 4253 | 18883 | 13477 | 12390 | 12613 | 19171 | 14402 |
| | 19173 | 19177 | 12629 | 12631 | 19156 | 1669 | 9637 | 4258 | 12862 | 9649 | 8837 | 13571 |
| | 9843 | 9513 | 13603 | 13584 | 13583 | 13588 | 13587 | 9818 | 9516 | 9480 | 9481 | 9795 |
| | 9793 | 9484 | 4065 | 4038 | 3526 | 3520 | 3492 | 3518 | 3504 | 3472 | 3523 | 3459 |
| | 4043 | 4036 | 4066 | 3558 | 3557 | 4020 | 3556 | 4019 | 3540 | 3542 | 2968 | 4034 |
| | 4060 | 4032 | 4947 | 18852 | 18851 | 11998 | 12013 | 12035 | 11997 | 12057 | 12055 | 12014 |
| | 12039 | 12019 | 12034 | 12017 | 12011 | 12061 | 12037 | 12060 | 12041 | 18856 | 4270 | 10450 |
| | 6432 | 6429 | 6422 | 16725 | 16742 | 16701 | 16705 | 16743 | 16722 | 16706 | 12395 | 12378 |
| | 12376 | 12326 | 12381 | 12345 | 12382 | 12361 | 16700 | 16681 | 16685 | 16682 | 16680 | 16136 |
| | 16698 | 16133 | 16561 | 16598 | 16586 | 16564 | 16584 | 16578 | 16540 | 16538 | 12357 | 9768 |
| | 8934 | 9702 | 9730 | 8881 | 4272 | 4257 | 18859 | 18873 | 18871 | 4259 | 4273 | 18858 |
| | 11353 | 11352 | 11350 | 18834 | 18836 | 18875 | 18902 | 18901 | 9735 | 8903 | 8876 | 8902 |
| | 8877 | 3588 | 1869 | 7078 | 16399 | 11481 | 11480 | 11485 | 11484 | 13012 | | |
| 285: | 11893 | 9361 | 16893 | 9508 | 9510 | 9841 | 9489 | 8548 | 2151 | 9737 | 8904 | 9699 |
| | 9733 | 8878 | 9765 | 8911 | 9771 | 8935 | 17925 | 17965 | 17964 | 2430 | 17945 | 17942 |
| | 17871 | 17930 | 2431 | 17946 | 2429 | 17872 | 17944 | 17921 | 11759 | 11211 | 11767 | 11749 |
| | 11746 | 11233 | 11249 | 11099 | 12527 | 7839 | 13474 | 6634 | 19181 | 12615 | 11446 | 16547 |
| | 8245 | 13314 | 7012 | 9594 | 13153 | 10676 | 1169 | 18285 | 18354 | 18730 | 7863 | 8452 |
| | 9676 | 8923 | 14136 | 13408 | 13475 | 4155 | 15234 | 6994 | 16883 | 12775 | 11442 | 11441 |
| | 11444 | 11421 | 11420 | 11402 | 11418 | 11403 | 11424 | 11425 | 1305 | 18440 | 14044 | 10044 |
| | 1907 | 16100 | 2578 | 17862 | 18275 | 14037 | 7727 | 902 | 14299 | 11525 | 11522 | 11496 |
| | 11993 | 11500 | 11503 | 11521 | 11519 | 11502 | 11996 | 11487 | 11520 | 11990 | 11497 | 11462 |
| | 11468 | 11459 | 11466 | 11463 | 1731 | 6352 | 9028 | 10971 | 14876 | 17905 | 1007 | 3912 |
| | 18214 | 2424 | 5743 | 1204 | 3251 | 14161 | 9701 | 4116 | 13262 | 4502 | 16194 | 16196 |
| | 14886 | 15430 | 3744 | 15496 | 538 | 12595 | 12454 | 572 | 14919 | 10603 | 6393 | 15683 |
| | 2474 | 14250 | 18937 | 1350 | 12992 | 4791 | 14059 | 10593 | 6231 | 8906 | 1357 | 17622 |
| | 13397 | 12455 | 6425 | 13336 | 4445 | 601 | 2279 | 9629 | 4564 | 4514 | 4515 | 4530 |
| | 9673 | 9668 | 18324 | 3298 | 14202 | 7836 | 14217 | 7995 | 14054 | 14052 | 10447 | 13260 |
| | 9743 | 9740 | 3296 | 6847 | 7835 | 18362 | 18346 | 18348 | 18368 | 18361 | 18344 | 10389 |
| | 5830 | 9745 | 9744 | 9734 | 9738 | 5898 | 5896 | 5900 | 5956 | 5959 | 5951 | 5954 |
| | 5902 | 5904 | 5934 | 5931 | 5906 | 5905 | 14576 | 3067 | 17147 | 12627 | 18342 | 18367 |
| | 10707 | 6343 | 6340 | 18321 | 3301 | 14207 | 10407 | 14201 | 16085 | 11852 | 11830 | 11841 |
| | 8356 | 13592 | 9691 | 18195 | 10069 | 9922 | 11349 | 11618 | 15487 | 10182 | 3804 | 4909 |
| | 19243 | 12355 | 11757 | 10954 | 9627 | 8814 | 17187 | 9822 | 9486 | 19151 | 19152 | 12596 |
| | 13607 | 13551 | 19142 | 19154 | 19153 | 12628 | 12590 | 13627 | 13610 | 13632 | 13570 | 13567 |
| | 13629 | 13569 | 13644 | 13645 | 13651 | 12617 | 19196 | 4986 | 11389 | 4987 | 11398 | 11827 |
| | 11786 | 11782 | 11801 | 11798 | 11769 | 13633 | 11124 | 4276 | 15799 | 15759 | 15776 | 15730 |
| | 9072 | 8275 | 14673 | 15817 | 9692 | 8865 | 9741 | 8908 | 9671 | 4597 | 4544 | 4594 |
| | 8863 | 4541 | 9647 | 4560 | 8820 | 9077 | 9633 | 13601 | 18798 | 18794 | 13814 | 18690 |
| | 6439 | 14133 | 12768 | 13425 | 9224 | 4509 | 2132 | 10382 | 1903 | 13934 | 13956 | 13960 |
| | 13936 | 17174 | 15112 | 4944 | 1133 | 2359 | 5824 | 10492 | 5266 | 14180 | 3722 | 5850 |
| | 10430 | 10432 | 10427 | 10408 | 10414 | 10410 | 5844 | 10426 | 10468 | 10453 | 10452 | 14379 |
| | 10525 | 10547 | 10570 | 10553 | 10577 | 6810 | 6794 | 6790 | 6796 | 6813 | 6833 | 6815 |
| | 6831 | 6748 | 6749 | 17566 | 6190 | 10237 | 10088 | 17358 | 9958 | 18520 | 4590 | 4587 |
| | 4536 | 13045 | 15942 | 2775 | 15428 | 7650 | 17148 | 17157 | 9287 | 4268 | 4253 | 18883 |
| | 13477 | 12390 | 19171 | 12613 | 19177 | 19173 | 14402 | 12629 | 12631 | 19156 | 1669 | 9637 |
| | 4258 | 12862 | 9649 | 8837 | 13587 | 9513 | 13603 | 13584 | 9843 | 13588 | 13571 | 13583 |
| | 9516 | 9818 | 9480 | 9793 | 9481 | 9795 | 9484 | 4065 | 4038 | 3526 | 3520 | 3492 |
| | 3472 | 3518 | 3504 | 3523 | 3459 | 4043 | 4036 | 4066 | 4019 | 4020 | 3557 | 3556 |
| | 3540 | 3542 | 3558 | 4034 | 4060 | 4032 | 4947 | 12061 | 11997 | 12035 | 12013 | 11998 |
| | 12055 | 12057 | 12019 | 12039 | 12034 | 12017 | 12014 | 12060 | 12011 | 12041 | 12037 | 18856 |
| | 4270 | 10450 | 6432 | 6429 | 6422 | 16725 | 12326 | 12395 | 12376 | 12378 | 16743 | 16742 |
| | 16722 | 16706 | 16705 | 16701 | 12381 | 12345 | 12382 | 12361 | 16681 | 16685 | 16682 | 16700 |
| | 16136 | 16698 | 16680 | 16133 | 16598 | 16586 | 16564 | 16561 | 16578 | 16584 | 16540 | 16538 |
| | 12357 | 9768 | 8934 | 9702 | 9730 | 8881 | 4272 | 4257 | 4273 | 11353 | 11352 | 11350 |
| | 18875 | 9735 | 8903 | 8876 | 8902 | 8877 | 1869 | 3588 | 16399 | 11480 | 11481 | 11485 |
| | 11484 | 13012 | | | | | | | | | | |
| 286: | 2777 | 5039 | 16750 | 1471 | 3285 | 2150 | 10618 | 8803 | 11961 | 2889 | 6846 | 3739 |
| | 1995 | 3694 | 17476 | 12331 | 12602 | 7992 | 10443 | 10584 | 2551 | 12607 | 18523 | 16013 |
| | 7530 | 4332 | 17943 | 9036 | 8140 | 14652 | 9799 | 6082 | 2538 | 5800 | 6597 | 12897 |
| | 15296 | | | | | | | | | | | |
| 287: | 9566 | 5643 | 6213 | 14305 | 9062 | 12764 | 1510 | 7131 | 14437 | 14832 | 5009 | 2243 |
| | 12243 | 6637 | 4770 | 3936 | 13672 | 11255 | 11221 | 5921 | 7391 | 1432 | 1435 | 9457 |
| | 15566 | 8392 | 5977 | 14724 | 12745 | 2394 | 16446 | 15400 | 12866 | 12883 | 3287 | 7541 |
| | 6534 | 7866 | 15513 | 14892 | | | | | | | | |
| 288: | 15365 | 18498 | 13541 | 7184 | 7109 | 1034 | 7848 | 1309 | 1974 | 5407 | 4483 | 3120 |
| | 15279 | 6672 | 19131 | 14159 | 8869 | 2364 | 10622 | 4552 | 13626 | 10133 | 10574 | 461 |
| | 17086 | 6452 | 4595 | 3599 | 3294 | 11158 | 18667 | | | | | |
| 289: | 16368 | 12503 | 3630 | 9835 | 13104 | 15863 | 12124 | 11301 | 13962 | 8408 | 17039 | 12299 |
| | 8002 | 7757 | 7854 | 2421 | 17941 | 9614 | 9944 | 947 | 7876 | 3401 | 2851 | 18366 |
| | 5872 | 12894 | 5554 | 6523 | 3967 | 10214 | 17229 | 11034 | 6907 | 17354 | 15997 | 17279 |
| | 15293 | 11343 | 12782 | 3434 | 8664 | 10980 | 11284 | 7151 | 5262 | 5760 | 15952 | 13577 |
| | 8200 | 5778 | 14238 | 2958 | 3987 | 6408 | 4512 | 4532 | 4535 | 4513 | 13926 | 8393 |
| | 2633 | 2640 | 913 | 15415 | 11965 | 16677 | 6715 | 13715 | 4773 | 19199 | 8085 | 1519 |
| | 13439 | 15432 | 14319 | 13712 | 8738 | 11125 | 16975 | 6895 | 8732 | 12851 | 477 | 14392 |
| | 15611 | 4147 | 9651 | 6491 | 6488 | 3806 | 13714 | 17754 | 17750 | 460 | 12140 | 3732 |
| | 1981 | 2760 | 18374 | 632 | 8844 | 2235 | 13441 | 8846 | 6661 | 6659 | 865 | 14395 |
| | 14433 | 14958 | 8575 | 7966 | | | | | | | | |
| 290: | 11915 | 12531 | 10674 | 5108 | 10673 | 10671 | 5110 | 10656 | 15342 | 7321 | 11367 | 11854 |
| | 5888 | 14613 | 5002 | 7871 | 18610 | 18248 | 5952 | 11256 | 11273 | 1008 | 9456 | 9482 |
| | 1098 | 17829 | 10769 | 8759 | 15842 | 9296 | 11737 | 16394 | 15796 | 11222 | 12888 | 17948 |
| | 15606 | 15608 | 13316 | 8168 | 13652 | 16659 | 15073 | 13630 | 10782 | 17520 | 17523 | 7375 |
| | 12579 | 4555 | 16775 | 18273 | 8782 | 8833 | 8828 | 5913 | | | | |
| 291: | 9661 | 14871 | 18815 | 14431 | 12470 | 9259 | 5881 | 17640 | 2549 | 5199 | 3645 | 16654 |
| | 14864 | 17074 | 1797 | 10867 | 4767 | 18221 | 9718 | 751 | 13915 | 18164 | 9703 | 6358 |
| | 739 | 12122 | 15132 | 14974 | 8785 | 2372 | 6430 | 14127 | 1550 | 18042 | 7607 | 1574 |
| | 8968 | 14165 | 14000 | 12131 | 19081 | 16106 | 2645 | 17386 | 6251 | 15629 | 11509 | 17303 |
| | 11118 | 16393 | 9726 | 11174 | 4106 | 10619 | 5469 | 2895 | 7622 | 19078 | 15694 | 5576 |
| | 11721 | 12733 | 17199 | 15873 | | | | | | | | |
| 292: | 15315 | 12929 | 13897 | 13194 | 6285 | 13409 | 13879 | 5211 | 428 | 4840 | 623 | 9603 |
| | 9165 | 2034 | 13804 | | | | | | | | | |
| 293: | 1857 | 13794 | 6221 | 18932 | 10387 | 11856 | 4252 | 4256 | 4255 | 3425 | 12892 | 11901 |
| | 8638 | 8630 | 978 | 5301 | 5141 | 15472 | 1119 | 11213 | 13891 | 2603 | 8637 | 12207 |
| | 16699 | 14669 | 12027 | 15111 | 13878 | 2754 | 11266 | 9938 | 10663 | 7917 | 17855 | 2691 |
| | 8215 | 717 | 483 | 2996 | 8158 | 13042 | 3905 | 19024 | 3005 | 9180 | 3573 | 10211 |
| | 16275 | 10831 | 13060 | 6460 | 704 | 1245 | 17402 | 1160 | 1753 | 4132 | 11888 | 18985 |
| | 16323 | 17693 | 7097 | 11035 | 15312 | 1997 | 18441 | 5708 | 7627 | 16437 | 8154 | 1791 |
| | 19031 | 8274 | 3741 | 8747 | 6445 | 12846 | 11110 | 18117 | 7167 | 10833 | 15412 | 17468 |
| | 10824 | 16088 | 12354 | 15985 | 6684 | 17751 | 4202 | 14270 | 885 | 19125 | 8213 | 14055 |
| | 1676 | 14412 | 4092 | 4079 | 2784 | 4093 | 2239 | 12447 | 18014 | 14252 | 18350 | 2529 |
| | 3662 | 1065 | 15060 | 10364 | 16853 | 15185 | 2643 | 18058 | 3747 | 1498 | 1443 | 1881 |
| | 8360 | 12988 | 11224 | 12576 | 631 | 3784 | 7653 | 10644 | 8103 | 2707 | 7143 | 952 |
| | 11597 | 6171 | 18896 | 19187 | 2242 | 9521 | 9760 | 15027 | 6679 | 15641 | 11298 | 6919 |
| | 1036 | 2296 | 18614 | 2154 | 11537 | 13573 | 3099 | 10710 | 5656 | 11644 | 15999 | 973 |
| | 13920 | 19091 | 18890 | 2891 | 18318 | 3629 | 1252 | 879 | 5997 | 1961 | 7982 | 7936 |
| 294: | 7105 | 3084 | 1994 | 18783 | 2497 | 7816 | 18184 | 3440 | 14124 | 18751 | 1967 | 15867 |
| | 14672 | 7886 | 17222 | 1877 | 17983 | 17378 | 9387 | 3723 | 9501 | 16163 | 14128 | 6267 |
| | 8384 | 5802 | 8872 | 3745 | 18948 | 14939 | 2793 | 16550 | 7047 | 2103 | 612 | 1522 |
| | 15922 | 13547 | 13079 | 15943 | 5970 | 5968 | 4359 | 17714 | 10659 | 16490 | | |
| 295: | 11915 | 12531 | 17198 | 7368 | 2744 | 18649 | 3181 | 14613 | 8489 | 5002 | 7871 | 13313 |
| | 18248 | 12632 | 11291 | 6927 | 1098 | 17829 | 10769 | 11161 | 488 | 14181 | 16980 | 14805 |
| | 3254 | 2964 | 9225 | 9296 | 14276 | 11739 | 15796 | 7315 | 11804 | 15606 | 15608 | 13316 |
| | 5763 | 12456 | 13652 | 16659 | 10739 | 12059 | 10782 | 17523 | 7375 | 10346 | 8720 | 16775 |
| | 2653 | 18273 | 8782 | 8833 | 5913 | | | | | | | |
| 296: | 862 | 5137 | 16001 | 12941 | 770 | 15554 | 18605 | 8082 | 3087 | 8425 | 2773 | 6680 |
| | 6816 | 5218 | 18416 | 5855 | 1839 | 14492 | 16795 | 3595 | 1910 | 13985 | 10118 | 12109 |
| | 7502 | 14989 | 5062 | 3113 | 10472 | 7870 | 1136 | 3790 | 8761 | 8515 | 14301 | 13855 |
| | 5798 | 7675 | 15995 | 13529 | 1460 | 10887 | 18807 | 12633 | 7553 | | | |
| 297: | 438 | 13973 | 13308 | 11956 | 16007 | 7173 | 7175 | 12391 | 2026 | 8512 | 16573 | 16216 |
| | 11162 | 7158 | 2209 | 9879 | 16890 | 10061 | 9391 | 8377 | 11208 | 13866 | 15446 | 10737 |
| | 16951 | 18861 | 3386 | 14949 | 16049 | 2268 | 422 | 2498 | 12158 | 11196 | 999 | 11422 |
| | 6909 | 971 | 17103 | 12945 | 16236 | 14279 | 1815 | 5256 | 15390 | 801 | 4660 | 4185 |
| | 5533 | 3055 | 15173 | 13105 | 8055 | 2461 | 5801 | 2810 | 15573 | 17102 | 17242 | 11720 |
| | 15557 | 6135 | 14995 | 2480 | 13243 | 5433 | | | | | | |
| 298: | 11915 | 12531 | 15342 | 7321 | 11367 | 5888 | 14613 | 8489 | 5002 | 7871 | 18610 | 18248 |
| | 5952 | 11253 | 1008 | 15996 | 1098 | 17829 | 10769 | 17874 | 4262 | 6648 | 9296 | 16112 |
| | 2214 | 16394 | 17950 | 5329 | 18025 | 16063 | 17293 | 15606 | 15608 | 6546 | 4664 | 4292 |
| | 10730 | 18652 | 12515 | 11405 | 18158 | 3549 | 13330 | 3902 | 6434 | 11902 | 9414 | 17888 |
| | 2240 | 17635 | 14946 | 12828 | 8168 | 13652 | 16659 | 15073 | 13630 | 10782 | 17520 | 17523 |
| | 7375 | 12579 | 4555 | 16775 | 8782 | 8833 | 8828 | 5913 | | | | |
| 299: | 414 | 1917 | 1934 | 1936 | 1364 | 14900 | 8480 | 12103 | 17664 | 4215 | 5090 | 10064 |
| | 10748 | 4581 | 3710 | 7147 | 15265 | 14787 | 5241 | 3993 | 17960 | 12064 | 10702 | 17494 |
| | 13847 | 14233 | 7728 | 11629 | 9459 | 11576 | 12484 | 6071 | 3597 | 18443 | 1876 | 10502 |
| | 6159 | 6154 | 6160 | 17140 | 7783 | 10647 | 17310 | 17311 | 17393 | 17332 | 17314 | 17372 |
| | 17366 | 17388 | 17349 | 17364 | 17345 | 17317 | 17369 | 16206 | 17390 | 16927 | 16906 | 16839 |
| | 16226 | 17418 | 16925 | 16825 | 16190 | 16228 | 16948 | 13935 | 13163 | 2803 | 17357 | 18002 |
| | 410 | 14420 | 10711 | 853 | 839 | 6111 | 2440 | 15718 | 4166 | 12588 | 1480 | 8764 |
| | 11330 | 3359 | 17935 | 6269 | 13179 | 14129 | 3075 | 2639 | 2657 | 15001 | 6623 | 6619 |
| | 6649 | 6642 | 5607 | 7804 | 6646 | 9579 | 15233 | 12379 | 18050 | 17729 | 14558 | 12543 |
| | 12546 | 14954 | 409 | 5200 | 10554 | 7507 | 3337 | 7801 | 2712 | 11045 | 6157 | 11716 |
| | 12255 | 12259 | 11719 | 1915 | 13946 | 1212 | 1210 | 1236 | 1240 | 1242 | 1771 | 1769 |
| | 1800 | 1777 | 1796 | 1794 | 1802 | 1269 | 1805 | 1244 | 1773 | 1272 | 1247 | 1775 |
| | 1267 | 1264 | 1261 | 1214 | 7754 | 12783 | 1502 | 14776 | 17545 | 17503 | 17499 | 6363 |
| | 14199 | 17682 | 16929 | 17526 | 14196 | 17540 | 17684 | 12050 | 2170 | 2176 | 2149 | 2147 |
| | 17258 | 2145 | 12029 | 17252 | 12048 | 1642 | 17294 | 17292 | 17282 | 2873 | 17336 | 12024 |
| | 13998 | 11552 | 3881 | 3451 | 17233 | 14483 | 14506 | 3978 | 14486 | 14482 | 13999 | 3939 |
| | 3887 | 14507 | 14487 | 3940 | 11528 | 14013 | 13996 | 13997 | 18688 | 18722 | 6334 | 5664 |
| | 8553 | 2931 | 4402 | 4401 | 15288 | 6179 | 17089 | 7845 | 17088 | 17055 | 17067 | 6182 |
| | 7247 | 17064 | 17465 | 17481 | 17469 | 17467 | 13921 | 13899 | 12068 | 12069 | 12063 | 12065 |
| | 9522 | 13942 | 13924 | 14829 | 5375 | 12544 | 19216 | 5610 | 7450 | 4163 | 9575 | 7246 |
| | 9628 | 9059 | 4165 | 6857 | 6838 | 8944 | 7667 | 9634 | 7668 | 9652 | 7101 | 12424 |
| | 15341 | 5621 | 5608 | 11722 | 12248 | 11687 | 11714 | 12217 | 11695 | 11691 | 11697 | 12220 |
| | 11694 | 12249 | 12212 | 9731 | 12216 | 11723 | 12210 | 5724 | 15847 | | | |
| 300: | 17992 | 14813 | 6116 | 9580 | 2888 | 7234 | 8357 | 9926 | 14330 | 15460 | 6476 | 11921 |
| | 8487 | 19217 | 12340 | 14973 | 18168 | 6988 | 14092 | 13614 | 9589 | 1042 | 12559 | 12558 |
| | 10145 | 13807 | 3131 | 12159 | 7765 | 17049 | 491 | 5373 | 16006 | 13937 | 16869 | 16844 |
| | 13943 | 13939 | 13917 | 18662 | 1028 | 18302 | 8760 | 8210 | 7918 | 968 | 6155 | 18132 |
| | 4210 | 4212 | 4208 | 465 | 12388 | 1139 | 2520 | 7618 | 19214 | 6643 | 11734 | 11547 |
| | 11050 | 7539 | 10093 | 8107 | 10903 | 12707 | 10224 | 4971 | 14365 | 16659 | 18553 | 9554 |
| | 5668 | 1601 | 16122 | 1462 | 10321 | 11228 | 9914 | 18521 | 17523 | 16603 | 16599 | 16600 |
| | 14253 | 10841 | 12283 | 13811 | 12709 | 5758 | 3941 | 3385 | 9514 | 9509 | 8569 | 18996 |
| | 9826 | 15445 | 15986 | 7285 | 18975 | 3467 | 9261 | 16796 | 16794 | 15896 | 15895 | |
| 301: | 10900 | 8457 | 13754 | 4644 | 5428 | 3481 | 1939 | 10756 | 4267 | 18389 | 14849 | 6797 |
| | 2161 | 10604 | 16911 | 13860 | 9866 | 9857 | 14350 | 3615 | 1201 | 1403 | 1653 | 19242 |
| | 15740 | 4248 | 18572 | 5142 | 13938 | 7102 | 11968 | 3015 | 10490 | 2894 | 18449 | 14314 |
| | 18543 | 17977 | 17076 | 425 | 10771 | 5506 | | | | | | |
| 302: | 6516 | 3244 | | | | | | | | | | |
| 303: | 9157 | 6322 | 11978 | 11130 | 7319 | 6594 | 12072 | 12604 | 1630 | 15835 | 15625 | 2667 |
| | 11873 | 10353 | 7250 | 12387 | 18220 | 5040 | 16397 | 744 | 682 | 13620 | 15592 | 3376 |
| | 7637 | 5327 | 15172 | 9136 | 3454 | 8680 | 3406 | 2563 | 8386 | 15628 | 583 | 17951 |
| | 16220 | 16241 | 15828 | 2354 | 1711 | 18844 | 14933 | 14606 | 8084 | 2951 | 2023 | 12230 |
| | 1131 | 1022 | 7453 | 6888 | 3757 | 3490 | 3410 | 965 | 14448 | 10758 | 3736 | 13099 |
| | 5418 | 3869 | 16033 | 5419 | 9116 | 5463 | 9118 | 14280 | | | | |
| 304: | 13016 | 4501 | 12800 | 15199 | 17376 | 16048 | 7771 | 6495 | 2349 | 13559 | 15944 | 16686 |
| | 11650 | 4749 | 7034 | 12604 | 1630 | 12213 | 1041 | 8874 | 12774 | 13164 | 15543 | 16462 |
| | 2893 | 9060 | 8653 | 3035 | 6124 | 2097 | 11863 | 3682 | 3447 | 14809 | 7584 | 15021 |
| | 3973 | 13598 | 10693 | 4630 | | | | | | | | |
| 305: | 3217 | 3571 | | | | | | | | | | |
| 306: | 9517 | 16283 | 17490 | 7415 | 537 | 6886 | 2849 | 12335 | 14505 | 13819 | 6814 | 6115 |
| | 17752 | 9736 | 18191 | 8424 | 2155 | 19176 | 17694 | 8682 | 15351 | 5379 | 11881 | 11938 |
| | 16662 | 17579 | 11271 | 16360 | 7659 | 16032 | 9586 | 7670 | 675 | 6708 | 13311 | 11396 |
| | 4758 | 17299 | 5191 | 7346 | 8937 | 16585 | 5606 | 502 | 8374 | 3761 | 16767 | 3107 |
| | 12145 | 13731 | 8754 | 11287 | 1587 | 17321 | 939 | 11556 | 13038 | 2216 | 5067 | 17391 |
| | 5842 | 5661 | 9584 | 18461 | 17532 | 15765 | 12358 | 17023 | 16827 | 854 | 15019 | 3746 |
| | 18406 | 3158 | 4638 | 16647 | 9956 | 5285 | 10517 | 6010 | 8267 | 3102 | 8875 | 17859 |
| | 3533 | 5163 | 14049 | 12819 | 8830 | 10422 | 1545 | 11903 | 18692 | 1408 | 5782 | 10419 |
| | 8743 | 2507 | 14022 | 15821 | 4156 | 18202 | 14875 | 3437 | 2493 | 5683 | 14057 | 2774 |
| | 2307 | 11546 | 2862 | 18609 | 15789 | 16720 | 12528 | 4710 | 7020 | 14477 | 8362 | 15861 |
| | 12266 | 3664 | 5927 | 10107 | 911 | 10257 | 9367 | 12658 | 15086 | 2329 | 12591 | 10770 |
| | 17651 | 14336 | 501 | 3598 | 8283 | 9930 | 7604 | 10652 | 19129 | 5069 | 14901 | 15868 |
| | 14717 | 1446 | 11406 | 12649 | 3069 | 5305 | 17167 | 2725 | 1528 | 841 | 7652 | 12267 |
| | 19206 | 6331 | 417 | 12854 | 18813 | 2969 | 4834 | 15665 | 14583 | 9988 | 3933 | 12960 |
| | 8189 | 8063 | 18363 | 9630 | 3955 | 8707 | 13020 | 13437 | 2029 | 7702 | 16563 | 9892 |
| | 9894 | 9909 | 5345 | 4993 | 17674 | 14807 | 17748 | 923 | 13039 | 12302 | 12305 | 4593 |
| | 6333 | 4582 | 4585 | 4504 | 4505 | 4507 | 4525 | 4528 | 4580 | 8892 | 16476 | 3071 |
| | 15617 | 13247 | 16828 | 13307 | 12568 | 16763 | 13025 | 4662 | 9544 | 9547 | 2848 | 8455 |
| | 1875 | 17554 | 14725 | 6339 | 12637 | 3861 | 16635 | 9893 | 16631 | 9377 | 4729 | 18714 |
| | 5265 | 7136 | 17773 | 19222 | 15795 | 6317 | 17731 | 13215 | 15661 | 6496 | 15845 | 3683 |
| | 18173 | 8985 | 3238 | 16239 | 8182 | 847 | 8939 | 13251 | 17330 | 15347 | 1090 | 6654 |
| | 16830 | 14533 | 1434 | 10162 | 1307 | 1608 | 12047 | 9254 | 4623 | 6733 | 9845 | 3976 |
| | 11791 | 6023 | 10860 | 8387 | 8388 | 3436 | 1289 | 4200 | 11245 | 14746 | 18697 | 10596 |
| | 9834 | 4867 | 18801 | 4048 | 4500 | 4051 | 4125 | 4041 | 6284 | 16362 | 6481 | 2203 |
| | 3253 | 17931 | 15047 | 13987 | 1184 | 17227 | 13858 | 6911 | 1625 | 7441 | 15207 | 4112 |
| | 1349 | 17655 | 3809 | 17405 | 15646 | 11605 | 16230 | 15136 | 12284 | 11241 | 11022 | 9598 |
| | 16189 | 16789 | 8351 | 11101 | 3405 | 17442 | 6972 | 13910 | 898 | 13694 | 11524 | 12489 |
| | 6077 | 12564 | 18758 | 16224 | 10614 | 12449 | 9505 | 4294 | 14642 | 15832 | 1908 | 11003 |
| | 9272 | 12730 | 18514 | 6417 | 17206 | 1004 | 475 | 12462 | 19223 | 18691 | 3383 | 6603 |
| | 6725 | 3889 | 2521 | 17328 | 842 | 17029 | 3484 | 17880 | 2854 | 17158 | 11122 | 15188 |
| | 19211 | 2820 | 7370 | 5183 | 5883 | 12698 | 4454 | 7017 | 10197 | 5646 | 9715 | 1157 |
| | 12651 | 7968 | 7684 | 1763 | 7207 | 2196 | 13537 | 12099 | 2202 | 2253 | 3365 | 8144 |
| | 13004 | 16497 | 15811 | 6265 | 2124 | 8582 | 7976 | 7231 | 18294 | 6438 | 17932 | 6485 |
| | 13284 | 18660 | 16797 | 5384 | 6617 | 15439 | 18738 | 18562 | 13641 | 3118 | 11948 | 3760 |
| | 5015 | 11023 | 3770 | 18364 | 1660 | 19130 | 1072 | 4534 | 12826 | 18768 | 2417 | 17234 |
| | 2882 | 8417 | 9871 | 5837 | 9911 | 9132 | 11165 | 3873 | 13863 | 17480 | 9515 | 4131 |
| | 6588 | 18170 | 16222 | 4230 | 5085 | 9852 | 8230 | 8227 | 18403 | 9997 | 2267 | 16180 |
| | 18524 | 17253 | 7957 | 4709 | 14254 | 6788 | 4558 | 15464 | 10901 | 12863 | 16622 | 6999 |
| | 4559 | 19065 | 4408 | 16389 | 18716 | 942 | 17799 | 2335 | 4291 | 14534 | 15459 | 7048 |
| | 9917 | 8849 | 9747 | 6004 | 9915 | 4583 | 16306 | 3700 | 14454 | 3960 | 12902 | 9166 |
| | 9769 | 2495 | 9891 | 9890 | 3163 | 4044 | 9913 | 8502 | | | | |
| 307: | 16966 | 1919 | 12583 | 14001 | 11131 | 6894 | 6752 | 19213 | 6877 | 6738 | 5028 | 11478 |
| | 12673 | 16234 | 15971 | 15875 | 12694 | 12533 | 13333 | 11870 | 12183 | 12169 | 12146 | 12093 |
| | 6307 | 12143 | 12171 | 12089 | 12074 | 12123 | 12073 | 12137 | 12118 | 12117 | 12051 | 12665 |
| | 3465 | 18929 | 8042 | 12488 | 12878 | 13761 | 17647 | 6876 | 6840 | 6272 | 6835 | 11243 |
| | 10315 | 19201 | 9766 | 4261 | 15639 | 16402 | 19042 | 7713 | 7791 | 16291 | 6973 | 721 |
| | 1355 | 7033 | 11065 | 9853 | 14782 | 18575 | 14554 | 3292 | 6118 | 8034 | 13958 | 13312 |
| | 1115 | 12766 | 8654 | 12755 | 10949 | 16650 | 16061 | 13056 | 2685 | 18534 | 4047 | 11361 |
| | 8443 | 17255 | 5349 | 1847 | 9017 | 446 | 3511 | 12923 | 4315 | 3637 | 10479 | 18867 |
| | 2225 | 9308 | 11987 | 12463 | 3000 | 5517 | 17776 | 14688 | 13231 | 15599 | 7869 | 11941 |
| | 17438 | 16655 | 15176 | 6229 | 11914 | 18483 | 8880 | 14025 | 14630 | 18182 | 17877 | 15768 |
| | 4778 | 13925 | 8338 | 5136 | 14825 | 4905 | 9898 | 7630 | 1639 | 11601 | 17037 | 2945 |
| | 10431 | 17797 | 9885 | 7574 | 13621 | 10863 | 9055 | 11151 | 11755 | 7946 | 9333 | 6329 |
| | 4591 | 4091 | 13981 | 5065 | 16803 | 14822 | 6964 | 3463 | 10454 | 2177 | 9360 | 11197 |
| | 13234 | 15420 | 10808 | 13424 | 10292 | 8329 | 2865 | 13338 | 13339 | 16185 | 10202 | 8955 |
| | 15242 | 8322 | 8223 | 16632 | 15869 | 4551 | 10418 | 2231 | 3358 | 17915 | 9080 | 15089 |
| | 6338 | 2733 | 11560 | 12364 | 18802 | 12721 | 4025 | 10092 | 15814 | 3303 | 6611 | 7498 |
| | 13931 | 1868 | 8572 | 9825 | 14345 | 10581 | 10007 | 18356 | 8308 | 6981 | 10752 | 8173 |
| | 2904 | 2938 | 12670 | 15524 | 5073 | 14565 | 14327 | 4609 | 17256 | 18506 | 11581 | 9098 |
| | 6914 | 3347 | 13049 | 18254 | 8152 | 8151 | 1224 | 10181 | 2869 | 14649 | 12087 | 9901 |
| | 7952 | 1465 | 11039 | 2613 | 4283 | 3706 | 5396 | 10832 | 3362 | 5953 | 8848 | 17193 |
| | 7462 | 8895 | 14087 | 12914 | 18645 | 2396 | 9188 | 10926 | 11609 | 6271 | 7379 | 3493 |
| | 14614 | 3502 | 19167 | 13184 | 11475 | 419 | 18267 | 8970 | 9234 | 6938 | 16418 | 13285 |
| | 18292 | 18269 | 18212 | 10727 | 18238 | 12508 | 12510 | 709 | 315 | 17725 | 8434 | 13254 |
| | 861 | 17182 | 12639 | 13959 | 6309 | 2860 | 8674 | 12332 | 8623 | 8648 | 8678 | 12309 |
| | 8647 | 8629 | 8697 | 18930 | 18017 | 15456 | 9239 | 3499 | 1491 | 3279 | 7455 | 13389 |
| | 18685 | 13086 | 1576 | 8896 | 4057 | 3140 | 1215 | 8021 | 8040 | 11229 | 16223 | 4381 |
| | 3805 | 7364 | 313 | 11613 | 14318 | 7069 | 18729 | 4708 | 12085 | | | |
| 308: | 17723 | 13349 | 5426 | 10342 | 646 | 8286 | 11681 | 15655 | 7162 | 2974 | 11778 | 13876 |
| | 18386 | 10114 | 3206 | 2802 | 8806 | 8486 | 14598 | 6551 | 3387 | 18415 | 4506 | 19086 |
| | 720 | 13013 | 8851 | 6410 | 18004 | 1501 | 6469 | 11711 | 8962 | 16976 | 6226 | 1146 |
| | 8776 | 5079 | 13857 | 14566 | 18277 | 2698 | 3433 | 15273 | 9154 | 8961 | 1782 | 12468 |
| | 2069 | 5555 | 4356 | 15859 | 12450 | 17580 | 17519 | 12015 | 4117 | 12311 | 12833 | 903 |
| | 17841 | 3317 | 8289 | 13436 | 3400 | 4303 | 5816 | 15343 | 14218 | 3390 | 2829 | 15319 |
| | 5048 | 4640 | 11046 | 9300 | 18120 | 5536 | 5686 | 10941 | 8685 | 12753 | 15582 | 12001 |
| | 15643 | 5455 | 16989 | 2119 | 14187 | 11932 | 18938 | 1334 | 15886 | 938 | 4813 | 3811 |
| | 10654 | 15534 | 18497 | 14811 | 1552 | 2661 | 5080 | 15338 | 6315 | 5225 | 13561 | 15213 |
| | 1490 | 14525 | 15884 | 12359 | 6669 | 955 | 18171 | 5358 | 14624 | 2813 | 2542 | 12020 |
| | 1749 | 1631 | 12016 | 6303 | 6949 | 7842 | 16125 | 18957 | 16094 | 7410 | 2120 | 16642 |
| | 12078 | 11363 | 10559 | 12794 | 19168 | 13662 | 15228 | 13544 | 2606 | 18630 | 18727 | 5929 |
| | 1497 | 976 | 11871 | 3924 | 5803 | 1809 | 7834 | 2156 | 15294 | 9809 | 5613 | 12582 |
| | 819 | 10715 | 15196 | 13261 | 16533 | 11473 | 12028 | 18392 | 2674 | 4882 | 18532 | 3509 |
| | 14873 | 10440 | 4142 | 8651 | 6824 | 745 | 9875 | 16149 | 17563 | 17373 | 18734 | 18230 |
| | 8224 | 13813 | 8272 | 3398 | 4907 | 13315 | 4016 | 1330 | 18116 | 6568 | 17201 | 11312 |
| | 15066 | 14302 | 4800 | 18992 | 4086 | 4549 | 309 | 6162 | 5244 | 5565 | 1899 | 11667 |
| | 14224 | 16251 | 7386 | 6416 | 14759 | 14889 | 3100 | 10072 | 9146 | | | |
| 309: | 17723 | 13349 | 5426 | 646 | 8286 | 11681 | 15655 | 7162 | 2974 | 11778 | 13876 | 18386 |
| | 10114 | 1104 | 3206 | 2802 | 8806 | 8486 | 14598 | 6551 | 3387 | 18415 | 4506 | 19086 |
| | 720 | 13013 | 8851 | 6410 | 18004 | 1501 | 6469 | 11711 | 8962 | 16976 | 6226 | 1146 |
| | 9010 | 8776 | 5079 | 13857 | 14566 | 18277 | 2698 | 3433 | 15273 | 9154 | 8961 | 1782 |
| | 12468 | 2069 | 5555 | 4356 | 15859 | 12450 | 17580 | 17519 | 12015 | 4117 | 12311 | 12833 |
| | 903 | 17841 | 3317 | 8289 | 13436 | 3400 | 4303 | 5816 | 15343 | 14218 | 3390 | 2829 |
| | 15319 | 5048 | 4640 | 11046 | 9300 | 18120 | 5536 | 5686 | 10941 | 12753 | 15582 | 12001 |
| | 15643 | 5455 | 2119 | 14187 | 11932 | 18938 | 15886 | 1334 | 938 | 4813 | 3811 | 15534 |
| | 10654 | 18497 | 14811 | 1552 | 2661 | 5080 | 15338 | 5225 | 13561 | 1490 | 15213 | 14525 |
| | 15884 | 12359 | 6669 | 955 | 18171 | 5358 | 14624 | 2813 | 2542 | 12020 | 1749 | 1631 |
| | 12016 | 6303 | 7842 | 18957 | 16125 | 16094 | 7410 | 2120 | 16642 | 12078 | 11363 | 10559 |
| | 12794 | 19168 | 13662 | 15228 | 13544 | 2606 | 18630 | 18727 | 5929 | 1497 | 976 | 11871 |
| | 3924 | 5803 | 1809 | 7834 | 2156 | 15294 | 9809 | 5613 | 12582 | 819 | 10715 | 15196 |
| | 13261 | 16533 | 12028 | 18392 | 2674 | 4882 | 18532 | 3509 | 14873 | 4142 | 10440 | 8651 |
| | 6824 | 9875 | 16149 | 17563 | 17373 | 18734 | 8224 | 18230 | 13813 | 8272 | 3398 | 4907 |
| | 4016 | 1330 | 13315 | 18116 | 6568 | 15447 | 11312 | 15066 | 14302 | 4800 | 18992 | 4086 |
| | 5244 | 5565 | 1899 | 11667 | 14224 | 16251 | 308 | 7386 | 6416 | 14759 | 14889 | 3100 |
| | 10072 | 9146 | | | | | | | | | | |
| 310: | 10103 | 18209 | 3920 | 6083 | 11927 | 11920 | 17472 | 4786 | 17648 | 10273 | 6306 | 9064 |
| | 11347 | 7551 | 6834 | 6260 | 7334 | 11100 | 5786 | 17161 | 16591 | 12957 | 15792 | 17989 |
| | 13513 | 14343 | 10276 | 5369 | 3379 | 1500 | 8808 | 10294 | 1398 | 10594 | 823 | 5710 |
| | 18613 | 7856 | 14705 | 13453 | 6480 | 18733 | 15333 | 3235 | 4488 | 6348 | 1223 | 5579 |
| | 469 | 6158 | 2323 | 15204 | 12704 | 7135 | 2864 | 5709 | 13549 | 16473 | 12094 | 11847 |
| | 15189 | 7404 | 18021 | 16376 | 15728 | 17758 | 17759 | 10289 | 5408 | 2799 | 11658 | 9568 |
| | 17803 | 1830 | 1347 | 15363 | 15824 | 3963 | 16520 | 17045 | 2659 | 4190 | 7035 | 7889 |
| | 1332 | 11043 | 18965 | 13554 | 4100 | 4076 | 1488 | 17195 | 7119 | 7429 | 14837 | 14242 |
| | 8145 | 8222 | 8282 | 6690 | 6705 | 10469 | 14943 | 3690 | 3684 | 6191 | 16970 | 14567 |
| | 1302 | 14760 | 10891 | 10888 | 14125 | 13193 | 13805 | 9451 | 12868 | 17957 | 11774 | 2050 |
| | 15443 | 2709 | 1596 | 17631 | 11812 | 4600 | 3958 | 17798 | 2617 | 17937 | 6512 | 3483 |
| | 753 | 10957 | 6419 | 16465 | 9968 | 9604 | 17150 | 19182 | 9662 | 7557 | 3962 | 5101 |
| | 13495 | 9576 | 17734 | 4975 | 3891 | 6104 | 8565 | 17439 | 12438 | 852 | 18005 | 14679 |
| | 2768 | 3555 | 7354 | 6809 | 2693 | 1475 | 19143 | 2516 | 5214 | 12911 | 11562 | 3868 |
| | 5630 | 3865 | 3819 | 5007 | 6948 | 14549 | 2971 | 7275 | 459 | 19164 | 5974 | 12430 |
| | 5655 | 967 | 14881 | 17890 | 17331 | 14820 | 7963 | 10759 | 18574 | 16972 | 18773 | 837 |
| | 2068 | 2133 | 8845 | 19013 | 19054 | 12054 | 659 | 17185 | 640 | 3444 | 14093 | 6479 |
| | 14245 | 10973 | 7988 | 6296 | 3530 | 8812 | 464 | 16581 | 3767 | 15891 | 15332 | 1402 |
| | 13224 | 796 | 5729 | 2002 | 14571 | 6300 | 9442 | 18423 | 12656 | 9032 | 10645 | 15161 |
| | 11805 | 15637 | 12696 | 5239 | 8059 | 7922 | 17929 | 6756 | 13692 | 3094 | 1298 | 11589 |
| | 8861 | 3514 | 3093 | 18298 | 1301 | 4779 | 11321 | 3090 | 13713 | 11607 | 19071 | 1621 |
| | 18085 | 5907 | 15732 | 13127 | 11970 | 1178 | 14188 | 9969 | 12336 | 10649 | 10172 | 6305 |
| | 4760 | 2694 | 3243 | 15374 | 8000 | 18588 | 13076 | 17379 | 6898 | 10609 | 9061 | 3321 |
| | 5901 | 9808 | 3022 | 19029 | 2112 | 2759 | 9640 | 16516 | 2738 | 15881 | 6161 | 3225 |
| | 17681 | 11663 | 14225 | 11836 | 18207 | 6210 | 17844 | 11690 | 11113 | 7824 | 10588 | |
| 311: | 16284 | 3606 | 17484 | 3724 | 12088 | 11103 | 5785 | 8336 | 4133 | 5435 | 12206 | 18097 |
| | 7672 | 3473 | 10039 | 15998 | 16601 | 11983 | 18950 | 16664 | 16546 | 6636 | 7838 | 10509 |
| | 16277 | 12119 | 13264 | 14523 | 7959 | 1624 | 6101 | 6558 | 6991 | 17341 | 3713 | 18780 |
| | 6732 | 14843 | 10839 | 11368 | 11376 | 7124 | 2198 | 11419 | 10982 | 5660 | 10500 | 4144 |
| | 13648 | 18842 | 16054 | 4831 | 5477 | 19155 | 1618 | 5333 | 2295 | 10956 | 16508 | 1271 |
| | 635 | 5739 | 7739 | 16017 | 14157 | 6758 | 9889 | 14914 | 12966 | 7210 | 3982 | 17122 |
| | 10837 | 12989 | 6556 | 2697 | 15231 | 12324 | 7578 | 11435 | 3445 | 18211 | 15350 | 15035 |
| | 2143 | 11631 | 16505 | 5245 | 1415 | 1572 | 6829 | 15515 | 15116 | 827 | 1386 | 4407 |
| | 7692 | 12842 | 18133 | 4853 | 9605 | 5531 | 3036 | 4948 | 16400 | 12572 | 17847 | 3054 |
| | 13870 | 12907 | 7292 | 10290 | 17401 | 2526 | 15417 | 16488 | 10985 | 3934 | 18892 | 19082 |
| | 7937 | 16671 | 8368 | 18511 | 818 | 13398 | 14650 | 10501 | 6270 | 14970 | 12668 | 13951 |
| | 7076 | 9820 | 11096 | 14699 | 17676 | 16290 | 17907 | 15362 | 5385 | 15054 | 3855 | 5338 |
| | 10212 | 17090 | 9087 | 2224 | 12811 | 12933 | 4815 | 8067 | 9429 | 13643 | 15267 | 687 |
| | 6819 | 12318 | 2260 | 485 | 6093 | 9503 | 3108 | 7687 | 10087 | 17708 | 3704 | 11310 |
| | 17316 | 18100 | 2782 | 3166 | 4676 | 7310 | 10111 | 10921 | 2460 | 16998 | 13700 | 1896 |
| | 3890 | 3893 | 11460 | 1365 | 4697 | 5147 | 8506 | 17646 | 12460 | 10187 | 13390 | 2371 |
| | 13266 | 12499 | 15209 | 1819 | 8062 | 1842 | 16386 | 16407 | 12516 | 17315 | 4818 | 7619 |
| | 12585 | 6346 | 16345 | 9939 | 15062 | 17660 | 18237 | 18639 | 16965 | 18174 | 11756 | 7709 |
| | 12790 | 15507 | 5527 | 5421 | 5857 | 13673 | 19101 | 922 | 13675 | 2047 | 15119 | 17607 |
| | 15523 | 5604 | 2583 | 2462 | 11728 | 3180 | 3264 | 15426 | 15516 | 9555 | 10457 | 2383 |
| | 10519 | 14033 | | | | | | | | | | |
| 312: | 19210 | 19017 | 2469 | 12148 | 8868 | 9122 | 8261 | 8260 | 12127 | 18655 | 10968 | 4278 |
| | 7032 | 14012 | 3050 | 4438 | 1566 | 16589 | 8148 | 15936 | 18723 | 14802 | 11007 | 7676 |
| | 11542 | 14797 | 3088 | 18432 | 15023 | 5711 | 4424 | 12601 | 17203 | 15601 | 15229 | 15790 |
| | 10278 | 11432 | 7413 | 18876 | 16653 | 11235 | 6737 | 1684 | 6956 | 9399 | 1897 | 9520 |
| | 8790 | 7451 | 8788 | 7477 | 17421 | 4351 | 19063 | 15226 | 16886 | 18163 | 18160 | 7887 |
| | 17356 | 9131 | 9840 | 10435 | 14050 | 17165 | 8098 | 15335 | 15336 | 18118 | 19218 | 2079 |
| | 1732 | 2705 | 7831 | 14111 | 14609 | 17488 | 13273 | 1225 | 14741 | 12285 | 12720 | 17703 |
| | 3155 | 1304 | 17239 | 771 | 11531 | 6196 | 6407 | 6374 | 3679 | 4189 | 11047 | 18086 |
| | 4317 | 16026 | 1757 | 18381 | 13635 | 10439 | 11504 | 15742 | 17243 | 17247 | 5416 | 8996 |
| | 6566 | 6509 | 14737 | 1315 | 5853 | 7602 | 1598 | 13609 | 13378 | 6003 | 6112 | 13287 |
| | 12739 | 3813 | 12645 | 6983 | 15316 | 2300 | 3894 | 3310 | 6507 | 18804 | 5203 | 18754 |
| | 11533 | 4836 | 17956 | 11754 | 9830 | 16710 | 12891 | 13671 | 9767 | 12365 | 14611 | 19048 |
| | 1373 | 17645 | 10205 | 7562 | 3247 | 15298 | 10090 | 3516 | 14670 | 14578 | 5400 | 7355 |
| | 7287 | 6657 | 12597 | 3186 | 12801 | 9322 | 2963 | 12003 | 11372 | 9135 | 8891 | 18576 |
| | 8964 | 12126 | 15692 | 16891 | 1520 | 15478 | 3021 | 13685 | 12561 | 11325 | 13562 | 3904 |
| | 3248 | 7591 | 8174 | 11539 | 16285 | 14984 | 17248 | 15849 | 1431 | 17593 | 14701 | 7485 |
| | 6569 | 18797 | 13075 | 11030 | 4234 | 1951 | 2406 | 6694 | 8640 | 11969 | 4529 | 17591 |
| | 1573 | 2001 | 14631 | 16366 | 15065 | 3460 | 15627 | 3676 | 7030 | 15020 | 1278 | 7967 |
| | 2114 | 9755 | 9758 | 11041 | 1399 | 607 | 3844 | 5187 | 1248 | 15419 | 16475 | 5059 |
| | 12458 | 11038 | 14975 | 10096 | 12979 | 16663 | 2458 | 3448 | 14447 | 17143 | 8069 | 8074 |
| | 9214 | 9217 | 3996 | 12789 | 7238 | 19174 | 227 | 12457 | 16704 | 5335 | 6029 | 17456 |
| | 4994 | 11781 | 14877 | 4963 | 13433 | 13634 | 11742 | 1081 | 15826 | 15615 | 12163 | 7022 |
| | 11209 | 13217 | 8104 | 13738 | 13750 | 13742 | 1514 | 7714 | 3392 | 9872 | 11401 | 13849 |
| | 13797 | 16821 | 3209 | 5004 | 9810 | 2380 | 18328 | 10246 | 13309 | 16833 | 16143 | 1946 |
| | 6746 | 13050 | 17027 | 12948 | 6484 | 17397 | 14869 | 14870 | 13608 | 7545 | 14441 | 6414 |
| | 11135 | 15223 | 15074 | 15007 | 17620 | 14459 | 434 | 423 | 5401 | 2373 | 18030 | 16694 |
| | 5537 | 6578 | 12369 | 12850 | 900 | 8960 | 10894 | 10868 | 14909 | 2286 | 14529 | 16150 |
| | 12399 | 15856 | 18280 | 17002 | 516 | 15539 | 8705 | 4792 | 16311 | 11664 | 8715 | 2423 |
| | 2855 | 8463 | 17865 | 9779 | 12958 | | | | | | | |
| 313: | 16966 | 643 | 4364 | 1919 | 12583 | 14001 | 11131 | 11866 | 6894 | 6752 | 19213 | 6877 |
| | 6738 | 5028 | 11478 | 5031 | 12673 | 6883 | 16234 | 15875 | 15971 | 12694 | 13333 | 11870 |
| | 12533 | 12089 | 12074 | 12093 | 12073 | 12051 | 12146 | 12143 | 12183 | 12123 | 12665 | 12117 |
| | 6307 | 12137 | 12118 | 12171 | 12169 | 15777 | 2586 | 9343 | 7157 | 16204 | 4467 | 5936 |
| | 5848 | 2944 | 3465 | 18929 | 8042 | 12488 | 10936 | 12878 | 5308 | 13761 | 10847 | 17647 |
| | 6876 | 6835 | 6272 | 6840 | 11243 | 19201 | 10315 | 9766 | 15639 | 16402 | 1251 | 19042 |
| | 8345 | 7713 | 17138 | 7791 | 14235 | 9974 | 16291 | 6973 | 721 | 14514 | 1355 | 7033 |
| | 11065 | 8783 | 18451 | 18470 | 9853 | 14782 | 8294 | 14554 | 3292 | 6118 | 8034 | 8326 |
| | 7882 | 13312 | 1115 | 12766 | 8654 | 11936 | 15710 | 14341 | 12674 | 12755 | 14585 | 15809 |
| | 10949 | 16787 | 10621 | 16244 | 15680 | 15675 | 16650 | 13056 | 16061 | 2685 | 925 | 18534 |
| | 4047 | 16841 | 11361 | 15666 | 8443 | 17255 | 9128 | 5349 | 1847 | 3511 | 12923 | 4315 |
| | 10473 | 13515 | 9149 | 9152 | 10479 | 18867 | 2225 | 9308 | 5129 | 11987 | 3000 | 5517 |
| | 17117 | 17091 | 17739 | 13231 | 15599 | 15256 | 7869 | 7260 | 1005 | 16655 | 15176 | 11941 |
| | 17438 | 16917 | 6229 | 11914 | 18483 | 8880 | 14025 | 14630 | 1176 | 14629 | 18182 | 5047 |
| | 17877 | 19064 | 2724 | 15768 | 3835 | 4778 | 13925 | 15822 | 8338 | 5136 | 14825 | 4905 |
| | 9898 | 7630 | 1639 | 11601 | 17037 | 11036 | 15239 | 2945 | 10431 | 7289 | 17797 | 9885 |
| | 7574 | 4849 | 13621 | 10863 | 9055 | 11628 | 11151 | 12401 | 11755 | 16894 | 8403 | 7946 |
| | 9333 | 6329 | 4591 | 4589 | 4091 | 13981 | 15919 | 11572 | 11657 | 18700 | 4138 | 5065 |
| | 470 | 17414 | 16358 | 16803 | 11665 | 6964 | 14822 | 10703 | 307 | 844 | 19122 | 3975 |
| | 5260 | 3463 | 18429 | 10454 | 2177 | 9360 | 11197 | 14283 | 13234 | 15420 | 8184 | 9953 |
| | 17197 | 10808 | 13188 | 13424 | 7005 | 10292 | 8329 | 2865 | 2866 | 2403 | 13339 | 13338 |
| | 1290 | 16185 | 11883 | 10202 | 15242 | 8955 | 8322 | 11191 | 11212 | 18103 | 17940 | 17254 |
| | 8223 | 6379 | 16632 | 17934 | 15869 | 2503 | 3636 | 4551 | 10418 | 2231 | 2872 | 3358 |
| | 17915 | 15089 | 6338 | 2733 | 11560 | 12364 | 5805 | 18802 | 9140 | 8445 | 2502 | 3312 |
| | 7828 | 12721 | 4696 | 8008 | 872 | 4025 | 10092 | 15882 | 15814 | 12371 | 3303 | 6611 |
| | 13977 | 7498 | 13931 | 1868 | 8572 | 14345 | 9825 | 10581 | 10007 | 12149 | 18356 | 8308 |
| | 7036 | 6981 | 10752 | 14493 | 8173 | 8136 | 2938 | 12670 | 2904 | 6932 | 5073 | 14565 |
| | 2037 | 14327 | 4609 | 17256 | 2721 | 18506 | 16138 | 6028 | 16225 | 16203 | 16156 | 16198 |
| | 9121 | 18322 | 16246 | 16178 | 16172 | 9129 | 16219 | 9117 | 16243 | 16158 | 11581 | 3347 |
| | 6914 | 13049 | 18254 | 8151 | 8152 | 1224 | 10181 | 2869 | 9901 | 1465 | 11039 | 6971 |
| | 3706 | 2613 | 4283 | 5396 | 10832 | 3362 | 5953 | 8848 | 17193 | 7462 | 18645 | 2396 |
| | 9188 | 10926 | 6271 | 7379 | 19167 | 14614 | 3493 | 3502 | 13184 | 11475 | 419 | 2246 |
| | 1541 | 420 | 10820 | 1865 | 1864 | 19193 | 5121 | 11566 | 3364 | 15356 | 16339 | 18267 |
| | 8970 | 9234 | 2382 | 6938 | 16418 | 13285 | 18212 | 18292 | 18269 | 10727 | 18238 | 18293 |
| | 6362 | 18215 | 18239 | 12508 | 12510 | 709 | 1152 | 315 | 17725 | 17697 | 8434 | 13254 |
| | 861 | 13959 | 17182 | 12639 | 16406 | 12542 | 12541 | 6309 | 2860 | 3570 | 8648 | 12309 |
| | 8647 | 12332 | 8623 | 8674 | 8629 | 8678 | 18930 | 18017 | 15456 | 3499 | 1491 | 3279 |
| | 7455 | 13389 | 13086 | 18685 | 1576 | 8896 | 4057 | 3140 | 1215 | 8021 | 11229 | 16223 |
| | 4381 | 3805 | 7364 | 3228 | 15465 | 11613 | 9609 | 14318 | 7069 | 18729 | 4708 | 12085 |
| 314: | 17506 | 3672 | 14034 | 18715 | 14894 | 10880 | 1849 | 16469 | 512 | 10254 | 10470 | 5726 |
| | 14472 | 10171 | 14406 | 3718 | 16079 | 9837 | 9339 | 5104 | 17771 | 5508 | 5020 | 834 |
| | 17380 | 15334 | 5096 | 4999 | 9288 | 8295 | 5472 | 13752 | 1964 | 16799 | 2401 | 13069 |
| | 13691 | 13422 | 7593 | 2540 | 2717 | 5882 | 11638 | 13697 | 17811 | 5581 | 4456 | 1381 |
| | 15933 | 2472 | 7620 | 16823 | 4482 | 2452 | 7400 | 16262 | 17807 | 18192 | 13790 | 18757 |
| | 18673 | 10586 | 4772 | 12650 | 18934 | 3174 | 5720 | 2083 | 2874 | 4669 | 9314 | 9839 |
| | 9762 | 10310 | 13888 | 5627 | 9147 | 8405 | 3728 | 11400 | 6409 | 15786 | 2828 | 15900 |
| | 3340 | 3474 | 1459 | 892 | 13842 | 16047 | 11176 | 15514 | 13638 | 969 | 12485 | 7833 |
| | 7242 | 10503 | 11553 | 4417 | 11411 | 1986 | 1221 | 1227 | 3527 | 18941 | 12683 | 12977 |
| | 12129 | 15069 | 5885 | 1534 | 16021 | 15292 | 17543 | 4538 | 2792 | 5539 | 5519 | 17904 |
| | 876 | 3164 | 18558 | 1300 | 10402 | 13522 | 14027 | 15033 | 18919 | 18259 | 4068 | 2850 |
| | 17343 | 19026 | 4479 | 10493 | 5549 | 1874 | 18434 | 645 | 9644 | 14808 | 5548 | 6344 |
| | 15331 | 13114 | 3446 | 2644 | 17210 | 13825 | 5662 | 15153 | 16313 | 7693 | 12780 | 16574 |
| | 4686 | 11440 | 14816 | 4338 | 16346 | 1636 | 19236 | 17410 | 10101 | 7456 | 991 | 12872 |
| | 3699 | 4028 | 6992 | 9962 | 4496 | 3842 | 16910 | 12042 | 2255 | 7046 | 17485 | 15064 |
| | 817 | 8460 | 4635 | 12802 | 15113 | 4751 | 14557 | 1668 | 6768 | 8195 | 14547 | 2541 |
| | 6164 | 13760 | 1788 | 12403 | 15927 | 17057 | 1507 | 4337 | 7148 | 3237 | 19060 | 16254 |
| | 13277 | 9223 | 15237 | 9177 | 15837 | 2341 | 10611 | 11649 | 2838 | 18156 | 12666 | 16249 |
| | 3138 | 6863 | 17584 | 2129 | 6563 | 15963 | 14009 | 3652 | 9433 | 2262 | 2534 | 13801 |
| | 3231 | 14588 | 7872 | 11469 | 13974 | 17240 | 11323 | 14501 | 16931 | 12006 | 441 | 18417 |
| | 2918 | 12097 | 12837 | 10016 | 18066 | 15815 | 3716 | 13070 | 14839 | 10827 | 10253 | 14272 |
| | 13944 | 1870 | 15148 | 9697 | 10347 | 12080 | 19157 | 9054 | 18345 | 4503 | 12292 | 4395 |
| | 16938 | 463 | 7974 | 14120 | 16183 | 3471 | 4782 | 14865 | 15284 | 15286 | 6396 | 8031 |
| | 8017 | 18816 | 9981 | 9980 | 11274 | 17812 | 14966 | 10272 | 3420 | 3624 | 16040 | 3020 |
| | 1155 | 1159 | 13046 | 8442 | | | | | | | | |
| 315: | 16966 | 643 | 4364 | 1375 | 1919 | 11131 | 11866 | 11486 | 6894 | 3621 | 6752 | 5028 |
| | 11478 | 12673 | 6883 | 16234 | 15971 | 15875 | 12694 | 13333 | 12533 | 11870 | 12169 | 12183 |
| | 12171 | 6307 | 12665 | 12143 | 12137 | 12123 | 12118 | 12117 | 12146 | 12074 | 12089 | 12051 |
| | 12093 | 12073 | 15777 | 2586 | 9343 | 18929 | 8042 | 12488 | 10936 | 12878 | 5308 | 13761 |
| | 17647 | 6876 | 6835 | 6272 | 6840 | 11243 | 19201 | 10315 | 15639 | 16402 | 19042 | 7713 |
| | 7791 | 9974 | 16291 | 6973 | 15084 | 3115 | 721 | 14514 | 7033 | 1355 | 11065 | 1512 |
| | 18451 | 18470 | 9853 | 14782 | 8294 | 18575 | 3292 | 8034 | 6118 | 8654 | 11936 | 15710 |
| | 14341 | 12755 | 14585 | 10949 | 16787 | 15680 | 15675 | 16244 | 10621 | 16340 | 16061 | 925 |
| | 18534 | 4047 | 11361 | 17255 | 12923 | 4315 | 10473 | 9152 | 13515 | 9149 | 9357 | 10479 |
| | 18867 | 9308 | 2225 | 11987 | 12463 | 5517 | 17117 | 17091 | 17739 | 15599 | 13231 | 7869 |
| | 7260 | 1005 | 11941 | 17438 | 16655 | 15176 | 16917 | 19150 | 8880 | 14025 | 14630 | 14629 |
| | 18182 | 17877 | 2724 | 15768 | 3835 | 4778 | 13925 | 8338 | 10373 | 14825 | 9898 | 7630 |
| | 1639 | 11601 | 17037 | 10431 | 7574 | 10863 | 9055 | 11151 | 11755 | 8403 | 9333 | 6329 |
| | 4591 | 13981 | 15919 | 11657 | 11572 | 17414 | 470 | 16803 | 6964 | 14822 | 10703 | 3975 |
| | 19122 | 307 | 844 | 5260 | 3463 | 2177 | 9360 | 11197 | 14283 | 13234 | 9953 | 8184 |
| | 10808 | 13424 | 10292 | 8329 | 2865 | 2866 | 13338 | 13339 | 16185 | 10202 | 15242 | 8955 |
| | 6473 | 11191 | 11212 | 18103 | 2638 | 8223 | 6379 | 16632 | 15869 | 10418 | 2231 | 9080 |
| | 6295 | 15089 | 6338 | 2733 | 11560 | 12364 | 5805 | 18802 | 8445 | 2502 | 3312 | 7828 |
| | 1747 | 12721 | 4696 | 8008 | 872 | 4025 | 10092 | 15814 | 3303 | 6611 | 13977 | 1096 |
| | 13931 | 1868 | 14345 | 8572 | 9825 | 5794 | 10581 | 10007 | 18356 | 8308 | 7036 | 6981 |
| | 10752 | 14493 | 8173 | 8136 | 2938 | 12670 | 2904 | 6932 | 5073 | 14565 | 14327 | 4609 |
| | 17256 | 18506 | 16219 | 16178 | 6028 | 16243 | 16138 | 18322 | 16158 | 16225 | 16172 | 16203 |
| | 16156 | 9121 | 16198 | 16246 | 9129 | 11581 | 6914 | 13049 | 8151 | 8152 | 1224 | 10181 |
| | 2869 | 9901 | 1465 | 11039 | 4283 | 2613 | 3706 | 5396 | 10832 | 3362 | 7462 | 18645 |
| | 9188 | 10926 | 6271 | 7379 | 19167 | 14614 | 3493 | 13184 | 3502 | 11475 | 419 | 17288 |
| | 16086 | 4069 | 10820 | 1865 | 1864 | 420 | 3364 | 19193 | 18267 | 8970 | 9234 | 16418 |
| | 18292 | 18212 | 10727 | 18269 | 18238 | 18293 | 18239 | 6362 | 18215 | 12508 | 709 | 915 |
| | 1152 | 17725 | 13254 | 861 | 13959 | 12639 | 17182 | 12541 | 12542 | 2860 | 6309 | 8648 |
| | 8697 | 8623 | 12332 | 12309 | 15456 | 3499 | 1491 | 3279 | 7455 | 8896 | 4057 | 16223 |
| | 4381 | 3805 | 3228 | 15465 | 313 | 11613 | 14318 | 7069 | 18729 | 4708 | 12085 | |
| 316: | 18488 | 18007 | 3371 | 18022 | 6240 | 5577 | 1141 | 4858 | 15264 | 13008 | 8036 | 7857 |
| | 16648 | 14599 | 16141 | 17352 | 11264 | 2922 | 7855 | 12100 | 16569 | 4670 | 11835 | 7156 |
| | 2615 | 16602 | 15671 | 16213 | 1068 | 10487 | 18989 | 7745 | 13625 | 8276 | 11591 | 15968 |
| | 18537 | 13558 | 1106 | 2391 | 17916 | 11931 | 7844 | 18020 | 10668 | 5894 | 2814 | 16160 |
| | 4671 | 4553 | 13144 | 7837 | 8429 | 9643 | 9229 | 9330 | 12172 | 9648 | 15361 | 12367 |
| | 18376 | 8325 | 3269 | 16474 | 6652 | 2059 | 10267 | 2067 | 10188 | 3795 | 3794 | 974 |
| | 5364 | 7376 | 8980 | 15893 | 16484 | 2807 | 2826 | 15414 | 9081 | 10784 | 3221 | 11000 |
| | 16877 | 358 | 18878 | 11643 | 14101 | 17431 | 14104 | 11922 | 14106 | 14118 | 14103 | 11917 |
| | 14117 | 11877 | 9156 | 2076 | 7599 | 18286 | 4992 | 7700 | 9492 | 17313 | 12079 | 14348 |
| | 4084 | 9494 | 7706 | 1297 | 17046 | 3961 | 5911 | 12363 | 8462 | 8465 | 1521 | 13528 |
| | 11661 | 18323 | 10495 | 18481 | 1858 | 9034 | 9035 | 18850 | 7483 | 6754 | 17200 | 7821 |
| | 11939 | 13965 | 4088 | 11316 | 6817 | 17715 | 11701 | 788 | 7905 | 18810 | 5360 | 14586 |
| | 1033 | 14950 | 16858 | 8889 | 15056 | 15910 | 11640 | 9983 | 15575 | 11391 | 17626 | 17605 |
| | 17606 | 17623 | 16231 | 16151 | 16155 | 16095 | 13014 | 16069 | 12870 | 3257 | 6401 | 17505 |
| | 17504 | 17525 | 17524 | 1679 | 2836 | 11399 | 7377 | 432 | 16819 | 10332 | 2411 | 10331 |
| | 2410 | 12098 | 12865 | 3223 | 1027 | 13770 | 13767 | 16781 | 16777 | 16779 | 16801 | 17741 |
| | 16774 | 4860 | 15510 | 12777 | 12778 | 14071 | 14067 | 14053 | 14069 | 14091 | 14072 | 14075 |
| | 8376 | 11001 | 9987 | 7853 | 5184 | 7393 | 7395 | 3219 | 3220 | 17517 | 3203 | 17996 |
| | 3205 | 17513 | 10899 | 3204 | 18474 | 18023 | 9302 | 1882 | 17692 | 3594 | 3098 | 1993 |
| | 6587 | 16786 | 17678 | 7822 | 18795 | 14425 | 2040 | 14424 | 14895 | 13347 | 18509 | 13344 |
| | 18011 | 3992 | 4426 | 15577 | 11803 | 18607 | 12719 | 3019 | 2751 | 1413 | 1611 | 15567 |
| | 5584 | 4242 | 18484 | 18027 | 18467 | 18028 | 17973 | 17972 | 17970 | 17969 | 7432 | 4113 |
| | 4887 | 4360 | 12444 | 1657 | 8005 | 17457 | 10146 | 563 | 18067 | 7398 | 4018 | 13922 |
| | 5489 | 530 | 1353 | 5529 | 6153 | 8586 | 6257 | 7997 | 19219 | 8567 | 12135 | 5520 |
| | 18325 | 18513 | 18472 | 11430 | 15382 | 18181 | 7353 | 7349 | 7351 | 7348 | 7218 | 7214 |
| | 7201 | 7224 | 7220 | 7200 | 17333 | 2490 | 10136 | 15058 | 19237 | 15045 | 15907 | 16396 |
| | 16398 | 15912 | 15057 | 15636 | 2471 | 16403 | 15079 | 15075 | 18489 | 363 | 8942 | |
| 317: | 10700 | 2789 | 1693 | 18488 | 18007 | 10307 | 6070 | 15804 | 12667 | 12669 | 9807 | 11134 |
| | 16489 | 16485 | 15579 | 4935 | 7730 | 2883 | 18491 | 357 | 12474 | 11486 | 15568 | 10324 |
| | 1141 | 4114 | 4023 | 1324 | 1516 | 8779 | 8066 | 8071 | 8383 | 8036 | 7857 | 16769 |
| | 18034 | 5299 | 8547 | 7169 | 7318 | 7344 | 8910 | 8912 | 8092 | 19202 | 8015 | 8690 |
| | 14341 | 12620 | 15737 | 16340 | 15484 | 15467 | 14520 | 14452 | 14455 | 16969 | 14400 | 1724 |
| | 12630 | 9906 | 2004 | 524 | 14484 | 4721 | 3025 | 7855 | 12963 | 18219 | 16511 | 16512 |
| | 3275 | 16587 | 4756 | 17235 | 1571 | 2857 | 15727 | 10976 | 10974 | 12274 | 12273 | 13779 |
| | 13783 | 10612 | 18384 | 9855 | 5254 | 10252 | 13600 | 18187 | 16897 | 7678 | 11829 | 2404 |
| | 9908 | 5704 | 14398 | 15012 | 5140 | 2309 | 6667 | 10169 | 6704 | 16922 | 15850 | 6152 |
| | 11114 | 5014 | 8102 | 9465 | 6114 | 2638 | 18541 | 4403 | 15642 | 11464 | 2905 | 11622 |
| | 8995 | 1743 | 1762 | 1746 | 19009 | 1346 | 7223 | 2208 | 2193 | 17096 | 7104 | 12577 |
| | 5887 | 6803 | 11121 | 18419 | 14992 | 7575 | 10188 | 3795 | 3794 | 974 | 7376 | 8980 |
| | 2807 | 2826 | 7369 | 3221 | 16877 | 11643 | 14101 | 17431 | 14104 | 11922 | 14106 | 14118 |
| | 14103 | 11917 | 14117 | 16324 | 16321 | 8905 | 10383 | 15152 | 2076 | 7599 | 12174 | 12185 |
| | 12182 | 18286 | 13955 | 17910 | 14653 | 7417 | 12493 | 18627 | 16619 | 10333 | 1521 | 17614 |
| | 17616 | 17619 | 11661 | 18323 | 10495 | 18481 | 1001 | 18455 | 7303 | 7306 | 7304 | 16744 |
| | 3625 | 7860 | 4775 | 17411 | 18535 | 1033 | 15056 | 15910 | 7850 | 11458 | 17423 | 17422 |
| | 10530 | 10527 | 10535 | 15563 | 3257 | 1704 | 1706 | 14317 | 6401 | 17505 | 17504 | 17525 |
| | 17524 | 15208 | 11409 | 11410 | 2505 | 6022 | 14351 | 16028 | 7381 | 7377 | 432 | 17322 |
| | 15540 | 6527 | 5564 | 5567 | 15538 | 12098 | 12865 | 3223 | 4128 | 11048 | 1117 | 6455 |
| | 13770 | 13767 | 16099 | 845 | 18437 | 15972 | 15973 | 16097 | 3580 | 14537 | 10850 | 10852 |
| | 13827 | 15803 | 12523 | 8855 | 16421 | 10106 | 11083 | 11745 | 4860 | 12777 | 12778 | 14071 |
| | 14067 | 14053 | 14069 | 14091 | 14072 | 14075 | 8376 | 11001 | 9987 | 7853 | 5184 | 7393 |
| | 7395 | 3219 | 3220 | 17517 | 3203 | 17996 | 3205 | 17513 | 10899 | 3204 | 18474 | 18023 |
| | 8058 | 16661 | 9537 | 7732 | 11831 | 15167 | 7258 | 5125 | 10598 | 17302 | 18438 | 7525 |
| | 16517 | 11964 | 13291 | 11188 | 16233 | 7480 | 12520 | 6579 | 13347 | 18509 | 13344 | 18011 |
| | 7526 | 11573 | 6489 | 13802 | 11785 | 11585 | 3344 | 9693 | 17863 | 1377 | 9412 | 1040 |
| | 18484 | 18027 | 18467 | 18028 | 17973 | 17972 | 17970 | 17969 | 6464 | 3216 | 10159 | 11232 |
| | 10456 | 998 | 11571 | 4985 | 4969 | 4968 | 4962 | 4942 | 14048 | 4370 | 3286 | 503 |
| | 12392 | 17021 | 5556 | 3215 | 6951 | 10681 | 7213 | 3129 | 5208 | 6043 | 9884 | 620 |
| | 6698 | 7398 | 13922 | 6759 | 6761 | 6763 | 4298 | 7130 | 7141 | 1286 | 18325 | 1553 |
| | 1564 | 8604 | 15411 | 10151 | 17595 | 15945 | 327 | 17353 | 1384 | 7353 | 7349 | 7351 |
| | 7348 | 7218 | 7214 | 7201 | 7224 | 7220 | 7200 | 2490 | 12445 | 12412 | 12411 | 8097 |
| | 7923 | 4277 | 11898 | 11906 | 11911 | 11909 | 11934 | 6086 | 17673 | 4895 | 15058 | 19237 |
| | 15045 | 15907 | 16396 | 16398 | 15912 | 15057 | 15636 | 3112 | 16403 | 15079 | 15075 | 10699 |
| | 13848 | 18489 | 6779 | 418 | 17149 | | | | | | | |
| 318: | 12599 | 499 | 18756 | 7177 | 8260 | 11959 | 18655 | 10968 | 8112 | 4278 | 7032 | 3823 |
| | 14255 | 3548 | 1566 | 16589 | 16232 | 8773 | 8775 | 2276 | 2312 | 7316 | 8907 | 11235 |
| | 12972 | 10692 | 17421 | 14546 | 18163 | 18160 | 7004 | 8135 | 7178 | 15335 | 15336 | 15470 |
| | 4765 | 14111 | 1225 | 5814 | 4193 | 13232 | 8948 | 1200 | 11059 | 17361 | 12365 | 13450 |
| | 2535 | 17627 | 10090 | 3516 | 6657 | 7287 | 11489 | 9322 | 5109 | 3778 | 9014 | 12003 |
| | 3354 | 15913 | 17202 | 14866 | 9711 | 2285 | 8928 | 14738 | 10494 | 14577 | 11588 | 18862 |
| | 19117 | 954 | 8153 | 13468 | 9213 | 1431 | 7485 | 4537 | 4429 | 11904 | 12478 | 12758 |
| | 12095 | 14845 | 1768 | 12437 | 16579 | 15770 | 2675 | 13701 | 7914 | 9070 | 10222 | 14563 |
| | 2114 | 9758 | 9755 | 11041 | 5187 | 1248 | 2305 | 10098 | 10096 | 11267 | 19200 | 14447 |
| | 9214 | 9217 | 3996 | 12789 | 7238 | 2038 | 6685 | 19174 | 5335 | 4231 | 18968 | 10872 |
| | 8252 | 15615 | 12163 | 11209 | 5713 | 2380 | 6538 | 13050 | 3892 | 6414 | 11753 | 17620 |
| | 5399 | 16694 | 18030 | 5537 | 16265 | 17092 | 6578 | 12369 | 12850 | 900 | 10894 | 8960 |
| | 10868 | 11664 | 8715 | 2423 | 8463 | 9779 | 12614 | | | | | |
| 319: | 15891 | 31741 | 76041 | 2728 | 8019 | 1121 | 5422 | 814 | 2032 | 3576 | 403 | 12973 |
| | 5779 | 586 | 7625 | 13532 | 14465 | 8035 | 5342 | 14260 | 12366 | 13545 | 11833 | 15130 |
| | 16303 | 3048 | 15435 | 2835 | 12465 | 8722 | 4550 | 15303 | 15548 | 15934 | 3788 | 10866 |
| | 10597 | 2843 | 6036 | 13084 | 15810 | 8431 | 10743 | 5277 | 5274 | 9812 | 9270 | 2756 |
| | 1410 | 18832 | 3278 | 11379 | 13579 | 11278 | 4074 | 7651 | 8619 | 13040 | 8311 | 3715 |
| | 16215 | 15077 | 14079 | 15855 | 12165 | 4158 | 14545 | 5156 | 12317 | 14284 | 1515 | 7176 |
| | 4843 | 14556 | 12712 | 12300 | 9895 | 9617 | 18976 | 7164 | 12344 | 3521 | 1713 | 9817 |
| | 8246 | 14610 | 4404 | 18916 | 18913 | 3122 | 11641 | 5193 | 5344 | 15313 | 4566 | 4856 |
| | 5071 | 5093 | 4448 | 8287 | 13657 | 6526 | 4058 | 4427 | 6492 | 3925 | 10279 | 13235 |
| | 2054 | 8492 | 5680 | 7588 | 11513 | 15092 | 977 | 6674 | 12978 | 14138 | 14142 | 19136 |
| | 8941 | 12026 | 6528 | 11069 | 13846 | 18499 | 15946 | 14691 | 5796 | 15067 | 10116 | 4991 |
| | 9572 | 9076 | 3395 | 18068 | 9445 | 17137 | 8421 | 13493 | 10070 | 12598 | 12451 | 5291 |
| | 12469 | 9327 | 12751 | 12747 | 1725 | 12393 | 11867 | 6201 | 2489 | 7875 | 15355 | 19025 |
| | 10704 | 2049 | 10788 | 15175 | 2284 | 16846 | 8929 | 5947 | 13843 | 15877 | 12575 | 2501 |
| | 3898 | 8155 | 13467 | 7071 | 7873 | 13993 | 15899 | 13380 | 6767 | 18512 | 11884 | 11979 |
| | 3330 | 15689 | 16649 | 4862 | 8196 | 6687 | 2400 | 11639 | 2206 | 6934 | 11974 | 3561 |
| | 17225 | 17146 | 16272 | 5307 | 8299 | 6795 | 5491 | 4199 | 12086 | 13575 | 6650 | 3908 |
| | 12452 | 9496 | 12843 | 7943 | 4725 | 12680 | 12281 | 8051 | 358 | 12760 | 4561 | 2302 |
| | 8823 | 6716 | 7236 | 10428 | 18993 | 18407 | 1484 | 18587 | 1395 | 9297 | 4090 | 12363 |
| | 8462 | 8465 | 1521 | 11345 | 10914 | 8048 | 3177 | 2098 | 1828 | 5023 | 13427 | 5602 |
| | 5276 | 15578 | 11178 | 2819 | 615 | 9528 | 14414 | 9527 | 11254 | 3937 | 5441 | 1651 |
| | 8198 | 12353 | 10853 | 8300 | 10913 | 10928 | 6110 | 5189 | 4050 | 12823 | 14443 | 11949 |
| | 16408 | 11950 | 13618 | 13617 | 8525 | 8047 | 14589 | 17449 | 9626 | 10655 | 7897 | 16072 |
| | 10344 | 1825 | 16933 | 5370 | 1337 | 16438 | 5326 | 2492 | 15690 | 4379 | 2818 | 13301 |
| | 17586 | 9487 | 949 | 3316 | 11112 | 8259 | 10981 | 15481 | 11590 | 1960 | 10987 | 10959 |
| | 327 | 6605 | 17324 | 1442 | 14285 | 16347 | 3109 | 8163 | 9798 | 2999 | 6258 | 19224 |
| | 11771 | 10012 | 5150 | 13606 | 363 | 331 | 14915 | 19232 | 2868 | 18598 | 8400 | 8016 |
| | 9887 | 12616 | | | | | | | | | | |
| 320: | 15632 | 2952 | 18051 | 1872 | 3610 | 1143 | 8771 | 9483 | 12004 | 11992 | 10480 | 8336 |
| | 4133 | 12206 | 1141 | 7895 | 10039 | 16601 | 11983 | 10259 | 6521 | 16664 | 6287 | 8036 |
| | 14786 | 12091 | 12228 | 18962 | 14523 | 7959 | 1698 | 6558 | 1392 | 17879 | 6216 | 6732 |
| | 4889 | 17426 | 4101 | 11419 | 8871 | 10630 | 5660 | 18687 | 5945 | 6925 | 5477 | 13616 |
| | 15059 | 18276 | 14625 | 7855 | 10956 | 9543 | 14068 | 14195 | 3384 | 17085 | 14647 | 10436 |
| | 19111 | 2582 | 9763 | 1531 | 5352 | 11010 | 3327 | 14602 | 18949 | 5178 | 14833 | 3564 |
| | 10837 | 7935 | 6556 | 2697 | 15231 | 10250 | 1721 | 19094 | 16923 | 14173 | 4694 | 16114 |
| | 14956 | 11138 | 10083 | 15037 | 18032 | 1014 | 9937 | 3923 | 19096 | 7692 | 5154 | 12842 |
| | 14677 | 3036 | 12572 | 17847 | 5502 | 13294 | 7292 | 10290 | 10985 | 1326 | 5578 | 5496 |
| | 16671 | 15401 | 16633 | 14650 | 13687 | 7867 | 4516 | 3489 | 2481 | 9181 | 1640 | 17370 |
| | 1859 | 9696 | 16524 | 9721 | 11096 | 15425 | 14800 | 15362 | 15449 | 2265 | 2374 | 2181 |
| | 12009 | 14700 | 10716 | 9087 | 2723 | 12811 | 3421 | 18898 | 8500 | 11713 | 17270 | 18029 |
| | 11943 | 9460 | 17570 | 15160 | 6926 | 4444 | 10794 | 6710 | 6707 | 4243 | 14028 | 6791 |
| | 4228 | 19004 | 3795 | 10188 | 3794 | 974 | 7376 | 8980 | 12318 | 2807 | 2826 | 15644 |
| | 2680 | 6093 | 358 | 11643 | 4153 | 838 | 14101 | 17431 | 11922 | 14104 | 14106 | 14118 |
| | 14103 | 11917 | 14117 | 11877 | 9156 | 17708 | 2076 | 7599 | 18286 | 16788 | 18725 | 702 |
| | 6728 | 1024 | 3627 | 12363 | 8462 | 8465 | 1521 | 11661 | 18323 | 10495 | 3704 | 15618 |
| | 1858 | 17316 | 18100 | 2782 | 4676 | 3166 | 7310 | 10111 | 1033 | 7850 | 13576 | 15542 |
| | 16151 | 16155 | 16095 | 3257 | 6401 | 17505 | 17504 | 17525 | 17524 | 1896 | 1207 | 7377 |
| | 432 | 16819 | 10332 | 2411 | 10331 | 2410 | 12865 | 3223 | 4128 | 11048 | 1117 | 13770 |
| | 13767 | 16781 | 16777 | 16779 | 16801 | 17741 | 16774 | 17646 | 4860 | 12777 | 12778 | 14071 |
| | 14067 | 14053 | 14069 | 14091 | 14072 | 14075 | 8376 | 11001 | 9987 | 7853 | 5184 | 7393 |
| | 7395 | 3219 | 3220 | 17517 | 3203 | 17996 | 3205 | 17513 | 10899 | 3204 | 12460 | 1407 |
| | 10187 | 13347 | 6722 | 10917 | 13636 | 16218 | 5693 | 11859 | 5188 | 8765 | 11074 | 7398 |
| | 13922 | 12516 | 17315 | 6346 | 16345 | 9939 | 15062 | 18325 | 18698 | 17660 | 16965 | 327 |
| | 7298 | 5459 | 18530 | 17826 | 12176 | 15633 | 7353 | 7349 | 7351 | 7348 | 7218 | 7214 |
| | 7201 | 7224 | 7220 | 7200 | 2490 | 1737 | 3491 | 13673 | 13675 | 15119 | 13602 | 15058 |
| | 19237 | 3264 | 15516 | 363 | 10316 | 16637 | 2383 | 10379 | 10952 | 10563 | | |
| 321: | 4787 | 1070 | 1143 | 14654 | 12004 | 9483 | 11994 | 11992 | 10480 | 8077 | 7492 | 18097 |
| | 1141 | 7895 | 10039 | 16601 | 11983 | 18391 | 9162 | 16546 | 6287 | 8036 | 16050 | 12091 |
| | 15109 | 5055 | 14523 | 7959 | 1698 | 6558 | 4665 | 9086 | 14143 | 3713 | 1389 | 17879 |
| | 6216 | 6732 | 4288 | 10839 | 16448 | 11376 | 17426 | 7384 | 15099 | 11717 | 18687 | 3375 |
| | 6925 | 2064 | 13616 | 18615 | 18276 | 1079 | 7855 | 10956 | 16326 | 14023 | 14195 | 18092 |
| | 2595 | 1419 | 5878 | 14647 | 8095 | 9681 | 9889 | 1418 | 7628 | 1691 | 11010 | 3327 |
| | 1291 | 14602 | 5178 | 18949 | 8748 | 10837 | 9976 | 15008 | 12989 | 6556 | 6602 | 4099 |
| | 15231 | 12324 | 11078 | 12716 | 18545 | 15123 | 19094 | 1721 | 11505 | 16923 | 16087 | 11631 |
| | 4694 | 4728 | 14956 | 14961 | 17360 | 12636 | 15037 | 18032 | 1014 | 19096 | 9937 | 3923 |
| | 5154 | 12842 | 10269 | 14580 | 17215 | 4853 | 9605 | 4948 | 15110 | 12572 | 17847 | 5502 |
| | 13294 | 16560 | 7292 | 14293 | 10985 | 1326 | 5496 | 5578 | 13565 | 16671 | 15401 | 9097 |
| | 16633 | 17335 | 818 | 13398 | 13687 | 4516 | 7867 | 9181 | 17370 | 1640 | 2481 | 16524 |
| | 9820 | 11096 | 18560 | 16290 | 4367 | 2374 | 2265 | 2181 | 3855 | 5338 | 16697 | 9087 |
| | 3421 | 4284 | 13612 | 9460 | 15160 | 17570 | 6926 | 4444 | 13949 | 6326 | 10794 | 10325 |
| | 4243 | 6710 | 6707 | 14028 | 6791 | 4228 | 19004 | 10188 | 3795 | 3794 | 974 | 7376 |
| | 8980 | 2807 | 7729 | 15644 | 2680 | 1890 | 6093 | 358 | 11643 | 10156 | 14101 | 17431 |
| | 14104 | 11922 | 14106 | 14118 | 14103 | 11917 | 14117 | 11877 | 9156 | 17708 | 2076 | 7599 |
| | 18286 | 17450 | 10636 | 10883 | 19245 | 2706 | 6728 | 16273 | 1024 | 3627 | 4931 | 10230 |
| | 13967 | 10244 | 5157 | 3863 | 17448 | 17445 | 13484 | 12298 | 523 | 16683 | 14982 | 14290 |
| | 11257 | 16905 | 18550 | 17602 | 17600 | 16815 | 656 | 17707 | 2933 | 4668 | 7938 | 12926 |
| | 11953 | 18469 | 12363 | 8462 | 8465 | 8395 | 1521 | 11661 | 18323 | 3704 | 15618 | 1858 |
| | 17316 | 17901 | 1025 | 4676 | 7310 | 13111 | 3166 | 9748 | 15261 | 7953 | 14931 | 10111 |
| | 17383 | 6243 | 14337 | 11009 | 802 | 1489 | 9751 | 5535 | 19225 | 4741 | 8379 | 9986 |
| | 5615 | 9570 | 7631 | 18249 | 1579 | 18874 | 13594 | 14957 | 2833 | 13097 | 11855 | 17444 |
| | 15990 | 800 | 2048 | 5863 | 1033 | 7850 | 13576 | 15542 | 16151 | 16155 | 16095 | 3257 |
| | 6401 | 17505 | 17504 | 17525 | 17524 | 17093 | 15754 | 18311 | 6989 | 11460 | 14526 | 7397 |
| | 11457 | 1896 | 12536 | 12551 | 1207 | 1365 | 18241 | 7377 | 432 | 16819 | 10332 | 2411 |
| | 10331 | 2410 | 12865 | 3223 | 4128 | 11048 | 1117 | 13770 | 13767 | 16781 | 16777 | 16779 |
| | 16801 | 17741 | 16774 | 17646 | 4860 | 12777 | 12778 | 14071 | 14067 | 14053 | 14069 | 14091 |
| | 14072 | 14075 | 8376 | 11001 | 9987 | 7853 | 5184 | 7393 | 7395 | 3219 | 3220 | 17517 |
| | 3203 | 17996 | 3205 | 17513 | 10899 | 3204 | 4087 | 5453 | 600 | 10187 | 12890 | 1263 |
| | 2658 | 12511 | 2978 | 16319 | 11645 | 9321 | 14259 | 12460 | 12499 | 5106 | 3023 | 13950 |
| | 1407 | 1842 | 3668 | 11242 | 10666 | 8675 | 8209 | 5693 | 9304 | 5717 | 1495 | 8302 |
| | 13979 | 6722 | 12398 | 8064 | 10221 | 16218 | 9573 | 7398 | 13922 | 3342 | 12516 | 11763 |
| | 2356 | 17878 | 17315 | 16011 | 9939 | 15062 | 18325 | 18698 | 17660 | 14814 | 16965 | 2892 |
| | 17826 | 12176 | 18530 | 15633 | 7353 | 7349 | 7351 | 7348 | 7218 | 7214 | 7201 | 7224 |
| | 7220 | 7200 | 2490 | 5527 | 1737 | 3491 | 13673 | 13675 | 15523 | 3264 | 15516 | 16637 |
| | 10316 | 8850 | 2383 | 9979 | 10952 | | | | | | | |
| 322: | 13867 | 13356 | 18488 | 18007 | 3183 | 12200 | 18931 | 2950 | 6222 | 3371 | 18022 | 360 |
| | 5198 | 14399 | 1141 | 15264 | 17705 | 8488 | 14597 | 11044 | 8036 | 7857 | 4692 | 3130 |
| | 12522 | 17069 | 10657 | 3462 | 13989 | 1149 | 6120 | 11450 | 8772 | 10736 | 17216 | 9050 |
| | 6700 | 9882 | 18213 | 18369 | 14503 | 9964 | 15053 | 16115 | 7855 | 18183 | 9714 | 15235 |
| | 18772 | 14715 | 3139 | 7921 | 9020 | 14812 | 701 | 2770 | 3381 | 7111 | 7814 | 9167 |
| | 13764 | 3884 | 17541 | 3901 | 1277 | 12193 | 12982 | 4219 | 6713 | 2609 | 3190 | 11470 |
| | 8428 | 19080 | 2937 | 2587 | 15925 | 15924 | 2921 | 2742 | 590 | 8886 | 9243 | 17583 |
| | 11582 | 6545 | 15518 | 6109 | 10855 | 5127 | 14268 | 9185 | 2748 | 10188 | 3795 | 3794 |
| | 974 | 7376 | 8980 | 10081 | 14401 | 16645 | 2807 | 2826 | 15414 | 3221 | 11000 | 16877 |
| | 358 | 11643 | 13747 | 14101 | 17431 | 14104 | 11922 | 14106 | 14118 | 14103 | 11917 | 14117 |
| | 11877 | 9156 | 2076 | 7599 | 18286 | 17450 | 10636 | 10883 | 19245 | 2706 | 17448 | 17445 |
| | 13484 | 12363 | 8462 | 8465 | 1521 | 11661 | 18323 | 10495 | 18481 | 5492 | 1858 | 3922 |
| | 17901 | 1025 | 15261 | 1033 | 15056 | 15910 | 16151 | 16155 | 16095 | 13014 | 16069 | 3257 |
| | 6401 | 17505 | 17504 | 17525 | 17524 | 1530 | 2022 | 7377 | 432 | 16819 | 10332 | 2411 |
| | 10331 | 2410 | 12098 | 12865 | 3223 | 4128 | 11048 | 1117 | 13770 | 13767 | 16781 | 16777 |
| | 16779 | 16801 | 17741 | 16774 | 4860 | 15510 | 12777 | 12778 | 14071 | 14067 | 14053 | 14069 |
| | 14091 | 14072 | 14075 | 8376 | 11001 | 9987 | 7853 | 5184 | 7393 | 7395 | 3219 | 3220 |
| | 17517 | 3203 | 17996 | 3205 | 17513 | 10899 | 3204 | 18474 | 18023 | 600 | 13347 | 18509 |
| | 13344 | 18011 | 8209 | 8302 | 18008 | 10221 | 15948 | 17612 | 8147 | 11081 | 18398 | 16052 |
| | 2853 | 15154 | 15669 | 4108 | 413 | 16888 | 8441 | 3479 | 1048 | 17549 | 9749 | 17291 |
| | 14470 | 2008 | 13574 | 5988 | 3547 | 13320 | 12107 | 4540 | 6031 | 16301 | 6076 | 18372 |
| | 10579 | 4109 | 11366 | 19231 | 11108 | 8482 | 5412 | 12150 | 14436 | 18176 | 1610 | 674 |
| | 6891 | 13730 | 8642 | 6095 | 3638 | 993 | 17479 | 11156 | 6014 | 4301 | 1954 | 10818 |
| | 7039 | 15055 | 12418 | 10003 | 1924 | 13798 | 11179 | 15926 | 13552 | 9569 | 18113 | 9432 |
| | 15846 | 14535 | 3145 | 12007 | 16132 | 12934 | 1538 | 16847 | 15583 | 6741 | 5534 | 14502 |
| | 4641 | 7188 | 15672 | 4220 | 11219 | 12375 | 7172 | 3983 | 2230 | 6072 | 5854 | 17508 |
| | 17766 | 18490 | 15885 | 4617 | 4368 | 16850 | 13940 | 3991 | 1557 | 11615 | 2624 | 18508 |
| | 18457 | 10864 | 18750 | 6697 | 1128 | 12487 | 18977 | 5445 | 11199 | 10746 | 16932 | 5601 |
| | 16270 | 559 | 5072 | 16012 | 1609 | 13543 | 18010 | 5876 | 18551 | 11710 | 16973 | 8611 |
| | 17125 | 17786 | 896 | 15150 | 6585 | 6520 | 13129 | 4965 | 3423 | 18175 | 2832 | 10945 |
| | 18855 | 16525 | 7611 | 1748 | 5964 | 14612 | 11300 | 17123 | 1873 | 14105 | 1285 | 15156 |
| | 11382 | 8729 | 12956 | 17420 | 6607 | 6377 | 5035 | 9405 | 13286 | 9963 | 8621 | 9241 |
| | 13064 | 2473 | 14203 | 19067 | 17080 | 10484 | 16852 | 9591 | 6583 | 5237 | 3885 | 18484 |
| | 18027 | 18467 | 18028 | 17973 | 17972 | 17970 | 17969 | 5302 | 16042 | 6762 | 8202 | 17109 |
| | 9781 | 3057 | 12195 | 18035 | 14637 | 2924 | 5223 | 595 | 5651 | 5083 | 15409 | 17949 |
| | 13812 | 7398 | 13922 | 18325 | 17657 | 18513 | 18472 | 17113 | 17362 | 7353 | 7349 | 7351 |
| | 7348 | 7218 | 7214 | 7201 | 7224 | 7220 | 7200 | 2490 | 6747 | 4859 | 15058 | 19237 |
| | 15045 | 15907 | 16396 | 16398 | 15912 | 15057 | 15636 | 16403 | 15079 | 15075 | 18489 | 13426 |
| | 5879 | 12748 | | | | | | | | | | |
| 323: | 8509 | 1134 | 18488 | 18007 | 1916 | 3371 | 18022 | 8888 | 12349 | 10147 | 14312 | 15530 |
| | 13340 | 18024 | 1141 | 12261 | 15264 | 9171 | 10433 | 11548 | 8036 | 7857 | 15149 | 17899 |
| | 2020 | 9112 | 4452 | 4484 | 2223 | 11002 | 7352 | 6808 | 7161 | 17556 | 6400 | 7983 |
| | 2949 | 1905 | 8251 | 4178 | 4037 | 2160 | 7855 | 3729 | 10163 | 14692 | 2870 | 4621 |
| | 15928 | 5084 | 11180 | 7057 | 11633 | 9253 | 16002 | 13530 | 3418 | 11611 | 17115 | 17307 |
| | 17434 | 13885 | 9657 | 11119 | 15654 | 12427 | 3412 | 4802 | 5132 | 6456 | 1469 | 3913 |
| | 3614 | 13992 | 17416 | 16667 | 11029 | 13494 | 5616 | 2334 | 2102 | 11128 | 18331 | 15535 |
| | 16171 | 9966 | 6234 | 18709 | 6008 | 11068 | 15752 | 16073 | 16342 | 8681 | 8695 | 6474 |
| | 6357 | 9359 | 3239 | 11051 | 16468 | 10672 | 11216 | 17792 | 3226 | 13446 | 4327 | 14062 |
| | 7614 | 2101 | 12204 | 18837 | 1898 | 5001 | 15038 | 7000 | 4563 | 3830 | 12987 | 10357 |
| | 8622 | 16416 | 18809 | 13442 | 10188 | 3795 | 3794 | 974 | 7376 | 8980 | 2807 | 2826 |
| | 15414 | 11189 | 3221 | 11000 | 16877 | 358 | 11643 | 14101 | 17431 | 14104 | 11922 | 14106 |
| | 14118 | 14103 | 11917 | 14117 | 9717 | 11877 | 9156 | 2076 | 7599 | 18286 | 2975 | 17450 |
| | 10636 | 10883 | 19245 | 2706 | 17448 | 17445 | 13484 | 13267 | 12765 | 11397 | 7419 | 12363 |
| | 8462 | 8465 | 1521 | 11661 | 18323 | 10495 | 18481 | 1858 | 17901 | 1025 | 15261 | 14337 |
| | 11009 | 802 | 1489 | 9751 | 5535 | 19225 | 4741 | 8379 | 9986 | 5615 | 9570 | 18249 |
| | 1579 | 18874 | 14957 | 2833 | 13097 | 11855 | 17444 | 2048 | 5863 | 16811 | 12374 | 13302 |
| | 5440 | 14857 | 13516 | 10812 | 9419 | 6771 | 11768 | 12141 | 18295 | 11218 | 3543 | 6242 |
| | 11404 | 18052 | 2875 | 1963 | 2636 | 7150 | 5500 | 15645 | 3024 | 19039 | 8051 | 11538 |
| | 17169 | 2943 | 12915 | 4471 | 17129 | 2420 | 9530 | 8029 | 15921 | 16041 | 11094 | 10747 |
| | 13795 | 2144 | 17511 | 12731 | 6924 | 15147 | 18864 | 7598 | 2259 | 7950 | 18104 | 7123 |
| | 13183 | 9498 | 651 | 5099 | 8353 | 13883 | 4389 | 2662 | 11940 | 19159 | 16364 | 4653 |
| | 14754 | 12986 | 3439 | 9888 | 4998 | 8161 | 19192 | 17068 | 10691 | 934 | 606 | 769 |
| | 8468 | 18297 | 1397 | 3167 | 10721 | 18909 | 18127 | 820 | 8767 | 11231 | 10209 | 18039 |
| | 4769 | 4271 | 914 | 5454 | 17761 | 1436 | 16749 | 12983 | 7990 | 3461 | 11482 | 2488 |
| | 19116 | 2605 | 15929 | 1132 | 11154 | 5499 | 16543 | 12081 | 4575 | 10781 | 15011 | 17427 |
| | 14182 | 608 | 1033 | 15056 | 15910 | 7850 | 13576 | 15542 | 16151 | 16155 | 15597 | 16095 |
| | 13014 | 16069 | 3257 | 14796 | 6401 | 17505 | 17504 | 17525 | 17524 | 1010 | 2022 | 7377 |
| | 432 | 16819 | 10332 | 2411 | 10331 | 2410 | 12098 | 12865 | 3223 | 4128 | 11048 | 1117 |
| | 13770 | 13767 | 16781 | 16777 | 16779 | 16801 | 17741 | 16774 | 5158 | 4860 | 15510 | 12777 |
| | 12778 | 14071 | 14067 | 14053 | 14069 | 14091 | 14072 | 14075 | 8376 | 11001 | 9987 | 7853 |
| | 5184 | 7393 | 7395 | 3219 | 3220 | 17517 | 3203 | 17996 | 3205 | 17513 | 10899 | 3204 |
| | 18474 | 18023 | 600 | 7911 | 16191 | 13238 | 15975 | 4924 | 9729 | 14251 | 6091 | 4326 |
| | 6820 | 13828 | 4812 | 9933 | 17784 | 16424 | 4768 | 15749 | 7309 | 10904 | 2071 | 4194 |
| | 15043 | 2025 | 10355 | 13347 | 18509 | 13344 | 18011 | 8209 | 8302 | 10221 | 17990 | 6825 |
| | 13135 | 15948 | 8147 | 11081 | 18398 | 17612 | 16052 | 2853 | 15154 | 15669 | 4108 | 413 |
| | 16888 | 8441 | 3479 | 1048 | 17549 | 9749 | 17291 | 14470 | 2008 | 13574 | 5988 | 3547 |
| | 13320 | 12107 | 4540 | 6031 | 16301 | 6076 | 18372 | 10579 | 4109 | 11366 | 19231 | 11108 |
| | 8482 | 5412 | 12150 | 14436 | 18176 | 1610 | 674 | 6891 | 13730 | 8642 | 6095 | 3638 |
| | 993 | 17479 | 11156 | 6014 | 4301 | 1954 | 10818 | 7039 | 15055 | 12418 | 10003 | 1924 |
| | 13798 | 11179 | 15926 | 13552 | 9569 | 18113 | 9432 | 15846 | 14535 | 3145 | 12007 | 16132 |
| | 12934 | 1538 | 16847 | 15583 | 6741 | 5534 | 14502 | 4641 | 7188 | 15672 | 4220 | 11219 |
| | 12375 | 7172 | 3983 | 2230 | 6072 | 5854 | 17508 | 17766 | 18490 | 15885 | 4617 | 4368 |
| | 16850 | 13940 | 3991 | 1557 | 11615 | 2624 | 18508 | 18457 | 10864 | 18750 | 6697 | 1128 |
| | 12487 | 18977 | 5445 | 11199 | 10746 | 16932 | 5601 | 16270 | 559 | 5072 | 16012 | 1609 |
| | 13543 | 18010 | 5876 | 18551 | 11710 | 16973 | 8611 | 17786 | 896 | 15150 | 6585 | 6520 |
| | 13129 | 4965 | 18175 | 2832 | 17125 | 10945 | 3423 | 18855 | 16525 | 1748 | 5964 | 7611 |
| | 14612 | 11300 | 17123 | 14105 | 1285 | 15156 | 11382 | 12956 | 17420 | 6607 | 6377 | 1873 |
| | 5035 | 9405 | 13286 | 8729 | 9963 | 8621 | 9241 | 13064 | 2473 | 14203 | 19067 | 4331 |
| | 17080 | 10484 | 16852 | 4017 | 9591 | 3885 | 6583 | 5237 | 18484 | 18027 | 18467 | 18028 |
| | 17973 | 17972 | 17970 | 17969 | 5302 | 16042 | 6762 | 8202 | 17109 | 9781 | 3057 | 12195 |
| | 18035 | 14637 | 2924 | 5223 | 595 | 5651 | 5083 | 15409 | 17949 | 19109 | 11395 | 17509 |
| | 10365 | 16956 | 9754 | 9720 | 13131 | 5389 | 6525 | 18579 | 18245 | 18559 | 15802 | 6580 |
| | 13199 | 10789 | 12935 | 13695 | 14236 | 14994 | 5044 | 6962 | 15953 | 11413 | 2116 | 18736 |
| | 3803 | 13906 | 7398 | 13922 | 15230 | 9222 | 2858 | 19186 | 18325 | 18513 | 18472 | 17119 |
| | 327 | 12058 | 14220 | 15762 | 7353 | 7349 | 7351 | 7348 | 7218 | 7214 | 7201 | 7224 |
| | 7220 | 7200 | 18951 | 550 | 569 | 548 | 555 | 18970 | 552 | 571 | 576 | 18973 |
| | 566 | 556 | 568 | 18967 | 18971 | 18927 | 18954 | 18953 | 17025 | 17030 | 16532 | 17028 |
| | 17031 | 17024 | 6349 | 2490 | 13768 | 8873 | 3506 | 4724 | 6862 | 3554 | 4984 | 10907 |
| | 15058 | 19237 | 15045 | 15907 | 16396 | 16398 | 15912 | 15057 | 15636 | 16403 | 15079 | 15075 |
| | 13211 | 18489 | 363 | 12855 | 14320 | 9450 | 6933 | | | | | |
| 324: | 9727 | 17604 | 8019 | 17534 | 5342 | 14260 | 12366 | 11833 | 15130 | 15303 | 15548 | 578 |
| | 2843 | 10597 | 6036 | 3271 | 10743 | 13040 | 8311 | 16215 | 12165 | 5156 | 14545 | 12317 |
| | 1515 | 9617 | 18976 | 12344 | 13678 | 9850 | 9817 | 10925 | 16912 | 3080 | 15313 | 4566 |
| | 6526 | 5635 | 10279 | 9228 | 815 | 2054 | 8508 | 11583 | 3845 | 5204 | 7588 | 15092 |
| | 12713 | 3464 | 977 | 15385 | 9792 | 12978 | 14138 | 12026 | 3293 | 1369 | 12116 | 9076 |
| | 18068 | 12469 | 9327 | 12751 | 6201 | 19025 | 7875 | 12432 | 2049 | 10788 | 16846 | 18665 |
| | 7873 | 11979 | 3330 | 15689 | 17238 | 4586 | 8514 | 2400 | 17974 | 2546 | 17225 | 15437 |
| | 8299 | 4199 | 6795 | 5491 | 12086 | 12452 | 12843 | 7943 | 12052 | 6716 | 7236 | 10428 |
| | 12363 | 8462 | 11345 | 8048 | 2098 | 5602 | 13427 | 1651 | 7682 | 8300 | 10853 | 12353 |
| | 8198 | 10913 | 10928 | 5189 | 11954 | 11949 | 11950 | 16408 | 4232 | 4289 | 14167 | 2492 |
| | 15690 | 10153 | 15481 | 11590 | 3698 | 13133 | 10987 | 10959 | 328 | 327 | 14285 | 8163 |
| | 9798 | 6258 | 594 | 11771 | 17226 | 331 | 6717 | 19232 | 2907 | 18598 | 2868 | 8016 |
| | 15159 | | | | | | | | | | | |
| 325: | 14605 | 6517 | 16865 | 17621 | 6498 | 10877 | 4478 | 535 | 7655 | 7490 | 11610 | 12325 |
| | 10826 | 12155 | 329 | 359 | 362 | 360 | 357 | 9904 | 12647 | 12682 | 11322 | 13239 |
| | 8952 | 4187 | 1141 | 4906 | 6775 | 3519 | 6177 | 17529 | 16576 | 10915 | 19075 | 8253 |
| | 9925 | 8036 | 7079 | 14890 | 10540 | 2772 | 1228 | 9307 | 5251 | 8710 | 2343 | 9153 |
| | 7253 | 6428 | 3776 | 8966 | 16276 | 8950 | 5611 | 8203 | 14908 | 4343 | 6064 | 5226 |
| | 6370 | 1046 | 3282 | 3553 | 10371 | 7861 | 13057 | 10076 | 5103 | 18747 | 15674 | 3566 |
| | 16824 | 4745 | 7855 | 4568 | 10122 | 3173 | 14748 | 7024 | 1998 | 18270 | 18414 | 2000 |
| | 9723 | 16513 | 7623 | 3841 | 11201 | 10882 | 14758 | 7077 | 3123 | 15800 | 2884 | 8411 |
| | 9932 | 14183 | 7748 | 11559 | 13821 | 13207 | 5113 | 4397 | 5376 | 8746 | 17170 | 18657 |
| | 9642 | 15684 | 14665 | 326 | 15221 | 11049 | 941 | 18982 | 8593 | 6099 | 15254 | 1202 |
| | 16046 | 12502 | 17716 | 9851 | 15240 | 14039 | 1414 | 18848 | 2451 | 4881 | 9525 | 5374 |
| | 14767 | 14281 | 6641 | 17952 | 12133 | 15614 | 7506 | 15039 | 17536 | 2009 | 13100 | 8427 |
| | 6859 | 9928 | 19163 | 4498 | 2340 | 1509 | 433 | 13478 | 14041 | 14568 | 4457 | 18018 |
| | 17111 | 1472 | 9268 | 9056 | 10303 | 5984 | 19184 | 18805 | 15184 | 6590 | 747 | 858 |
| | 1988 | 17838 | 16755 | 13510 | 14046 | 9788 | 7458 | 8799 | 8811 | 4319 | 14371 | 3222 |
| | 14453 | 13005 | 1232 | 13882 | 5228 | 9624 | 2044 | 6117 | 10188 | 3795 | 3794 | 974 |
| | 15693 | 18573 | 7376 | 8980 | 2807 | 2826 | 11958 | 18157 | 10192 | 3850 | 358 | 8304 |
| | 11643 | 16949 | 2912 | 14101 | 17431 | 14104 | 11922 | 14106 | 14118 | 14103 | 11917 | 14117 |
| | 11877 | 9156 | 1742 | 2076 | 7599 | 18286 | 2961 | 2816 | 8027 | 11540 | 897 | 17297 |
| | 14617 | 12032 | 14635 | 2786 | 12115 | 1581 | 19172 | 8841 | 2722 | 3304 | 3031 | 18527 |
| | 3971 | 3488 | 14435 | 3300 | 653 | 17450 | 10636 | 10883 | 19245 | 12363 | 8462 | 8465 |
| | 1521 | 11661 | 18323 | 10495 | 1858 | 5752 | 18642 | 14905 | 11072 | 16126 | 15626 | 1970 |
| | 11741 | 1549 | 2732 | 16716 | 11426 | 1770 | 6081 | 9927 | 11814 | 614 | 9502 | 8796 |
| | 1798 | 7054 | 1033 | 7850 | 13576 | 15542 | 16151 | 16155 | 16095 | 3257 | 6401 | 17505 |
| | 17504 | 17525 | 17524 | 18409 | 15499 | 8232 | 16518 | 7377 | 432 | 13504 | 13500 | 16819 |
| | 10332 | 2411 | 10331 | 2410 | 12865 | 5789 | 3223 | 4128 | 11048 | 1117 | 13770 | 13767 |
| | 16781 | 16777 | 16779 | 16801 | 17741 | 16774 | 4860 | 12777 | 12778 | 14071 | 14067 | 14053 |
| | 14069 | 14091 | 14072 | 14075 | 8376 | 11001 | 9987 | 7853 | 5184 | 7393 | 7395 | 3219 |
| | 3220 | 17517 | 3203 | 17996 | 3205 | 17513 | 10899 | 3204 | 11670 | 14581 | 14168 | 11682 |
| | 12108 | 4806 | 15638 | 6252 | 19127 | 1701 | 5131 | 8012 | 3793 | 15088 | 12482 | 12339 |
| | 600 | 6047 | 14198 | 11699 | 7787 | 19095 | 10717 | 12562 | 3733 | 3009 | 12416 | 9506 |
| | 8209 | 6561 | 3146 | 8302 | 859 | 8778 | 10221 | 3688 | 17462 | 14789 | 17884 | 15014 |
| | 6858 | 7396 | 16527 | 17887 | 4569 | 4361 | 9985 | 2465 | 3152 | 9337 | 18012 | 12479 |
| | 1428 | 3121 | 12526 | 7010 | 6034 | 6248 | 5302 | 11518 | 3532 | 7398 | 13922 | 16467 |
| | 9227 | 13725 | 3045 | 14411 | 11840 | 6227 | 2107 | 5626 | 3017 | 649 | 5687 | 19170 |
| | 18325 | 17413 | 13970 | 18612 | 8010 | 7401 | 19015 | 328 | 7461 | 14921 | 4492 | 15663 |
| | 7353 | 7349 | 7351 | 7348 | 7218 | 7214 | 7201 | 7224 | 7220 | 7200 | 2490 | 10210 |
| | 1914 | 11630 | 12067 | 10526 | 7360 | 17483 | 990 | 2676 | 9138 | 1772 | 10340 | 333 |
| | 4344 | 2478 | 7841 | 363 | 1767 | 4651 | 11660 | 15488 | 7901 | 7724 | | |
| 326: | 14605 | 6517 | 16865 | 16885 | 17621 | 6498 | 10877 | 4478 | 535 | 7655 | 7490 | 11610 |
| | 12325 | 10826 | 12155 | 362 | 359 | 357 | 360 | 329 | 9904 | 12647 | 12682 | 11322 |
| | 13239 | 8952 | 4187 | 2763 | 1274 | 1141 | 4906 | 6775 | 3519 | 6177 | 2747 | 18261 |
| | 11684 | 17529 | 16576 | 10915 | 19075 | 8253 | 9925 | 8036 | 7079 | 4625 | 7770 | 14890 |
| | 10540 | 2772 | 18979 | 1228 | 9307 | 5251 | 8710 | 2343 | 9153 | 7253 | 6428 | 3776 |
| | 8966 | 16276 | 18393 | 17006 | 14683 | 8950 | 5611 | 8203 | 14908 | 4343 | 6064 | 5226 |
| | 6370 | 1046 | 3282 | 3553 | 10371 | 7861 | 13057 | 10076 | 5103 | 18747 | 15674 | 3566 |
| | 16824 | 18741 | 17597 | 2126 | 4745 | 7855 | 4568 | 10122 | 3173 | 14748 | 7024 | 1998 |
| | 18270 | 15272 | 18414 | 2000 | 9723 | 16513 | 7623 | 3841 | 11201 | 10882 | 14758 | 7077 |
| | 3123 | 325 | 15800 | 2884 | 8411 | 9932 | 14183 | 7748 | 11559 | 13821 | 13207 | 5113 |
| | 4397 | 5376 | 8746 | 17170 | 18657 | 1764 | 875 | 11550 | 9642 | 15684 | 14665 | 11049 |
| | 941 | 17189 | 18982 | 16732 | 8593 | 6099 | 15254 | 1202 | 16046 | 12502 | 17716 | 3827 |
| | 5116 | 4146 | 9851 | 15240 | 14039 | 1414 | 17928 | 17894 | 18848 | 2451 | 522 | 4881 |
| | 9525 | 5374 | 14767 | 14281 | 6641 | 17952 | 12133 | 15614 | 7506 | 15039 | 17536 | 2009 |
| | 13100 | 8427 | 6859 | 9928 | 19163 | 4498 | 2340 | 1509 | 2780 | 1486 | 433 | 13478 |
| | 14041 | 14568 | 4457 | 18018 | 17111 | 1472 | 9268 | 9056 | 10303 | 5984 | 19184 | 18805 |
| | 15184 | 17669 | 6590 | 5317 | 5461 | 747 | 858 | 1988 | 17838 | 16755 | 13510 | 14046 |
| | 9788 | 7458 | 8799 | 8811 | 4319 | 14371 | 3222 | 14453 | 13005 | 1232 | 13882 | 5228 |
| | 9624 | 6117 | 2044 | 10188 | 3795 | 3794 | 974 | 15693 | 18573 | 7376 | 8980 | 2807 |
| | 2826 | 11958 | 11654 | 15238 | 3291 | 12252 | 18157 | 10192 | 3850 | 9625 | 8304 | 8603 |
| | 11643 | 16949 | 2912 | 14101 | 17431 | 14104 | 11922 | 14106 | 14118 | 14103 | 11917 | 14117 |
| | 11877 | 9156 | 1742 | 2076 | 7599 | 18286 | 2961 | 8027 | 2816 | 12032 | 11540 | 897 |
| | 17297 | 14617 | 14635 | 2786 | 12115 | 1581 | 19172 | 8841 | 2722 | 3304 | 18527 | 3031 |
| | 17821 | 17385 | 10997 | 14435 | 3300 | 653 | 17450 | 10636 | 10883 | 19245 | 3971 | 3488 |
| | 2706 | 17448 | 17445 | 13484 | 10247 | 12363 | 8462 | 8465 | 1521 | 11661 | 18323 | 1858 |
| | 5752 | 18642 | 14905 | 11072 | 16126 | 15626 | 1970 | 11741 | 16716 | 1770 | 11426 | 1549 |
| | 9927 | 11814 | 9502 | 614 | 6081 | 2732 | 1798 | 8796 | 7054 | 13263 | 9753 | 13032 |
| | 17901 | 1025 | 15261 | 14337 | 11009 | 802 | 1489 | 9751 | 5535 | 19225 | 4741 | 8379 |
| | 9986 | 5615 | 9570 | 18249 | 1579 | 18874 | 14957 | 2833 | 13097 | 11855 | 17444 | 2048 |
| | 5863 | 16811 | 12374 | 1033 | 7850 | 13576 | 15542 | 16151 | 16155 | 16095 | 3257 | 6401 |
| | 17505 | 17504 | 17525 | 17524 | 18409 | 15499 | 8232 | 16518 | 5559 | 9033 | 6961 | 3195 |
| | 15502 | 7377 | 432 | 13504 | 13500 | 16819 | 10332 | 2411 | 10331 | 2410 | 12865 | 5789 |
| | 3223 | 4128 | 11048 | 1117 | 13770 | 13767 | 16781 | 16777 | 16779 | 16801 | 17741 | 16774 |
| | 4860 | 12777 | 12778 | 14071 | 14067 | 14053 | 14069 | 14091 | 14072 | 14075 | 8376 | 11001 |
| | 9987 | 7853 | 5184 | 7393 | 7395 | 3219 | 3220 | 17517 | 3203 | 17996 | 3205 | 17513 |
| | 10899 | 3204 | 11670 | 14581 | 14168 | 12108 | 11682 | 4806 | 6252 | 15638 | 19127 | 5131 |
| | 1701 | 3793 | 8012 | 15088 | 12482 | 12339 | 600 | 1430 | 18717 | 10571 | 13132 | 2647 |
| | 8686 | 9426 | 6047 | 11699 | 14198 | 7787 | 10717 | 19095 | 12562 | 3733 | 3009 | 12416 |
| | 9506 | 6561 | 8209 | 3146 | 8302 | 859 | 8778 | 10221 | 3688 | 17462 | 14789 | 17884 |
| | 15014 | 6858 | 4361 | 7396 | 16527 | 4569 | 17887 | 2465 | 9985 | 18012 | 9337 | 12479 |
| | 3121 | 1428 | 12526 | 7010 | 7398 | 13922 | 16467 | 9227 | 13725 | 3045 | 14411 | 11840 |
| | 6227 | 2107 | 5626 | 3017 | 649 | 5687 | 19170 | 18325 | 17413 | 13970 | 18612 | 8010 |
| | 7401 | 19015 | 328 | 7461 | 14921 | 4492 | 15663 | 7353 | 7349 | 7351 | 7348 | 7218 |
| | 7214 | 7201 | 7224 | 7220 | 7200 | 2490 | 10210 | 1914 | 11630 | 10526 | 12067 | 7360 |
| | 17483 | 990 | 2676 | 9138 | 1772 | 18635 | 10340 | 333 | 4344 | 2478 | 1751 | 7841 |
| | 1767 | 4651 | 11660 | 15488 | 7901 | | | | | | | |
| 327: | 15072 | 18488 | 18007 | 9610 | 3775 | 9607 | 3371 | 18022 | 9772 | 3587 | 3646 | 3626 |
| | 3623 | 3605 | 360 | 5669 | 1833 | 18114 | 14999 | 9687 | 1141 | 4861 | 8045 | 15264 |
| | 11935 | 19083 | 8036 | 7857 | 16570 | 5268 | 5235 | 7145 | 5870 | 6620 | 10640 | 18589 |
| | 10476 | 17211 | 3947 | 5034 | 18317 | 4157 | 18510 | 7855 | 3915 | 11082 | 10349 | 17126 |
| | 1913 | 14073 | 10520 | 6696 | 14675 | 12497 | 10231 | 5640 | 3617 | 8159 | 1342 | 12396 |
| | 14967 | 15398 | 3877 | 18205 | 1444 | 8485 | 12841 | 4970 | 1296 | 14659 | 6073 | 317 |
| | 332 | 12025 | 887 | 15872 | 14897 | 13021 | 3998 | 17919 | 17868 | 16067 | 1616 | 1878 |
| | 6009 | 11314 | 547 | 2796 | 13566 | 13927 | 5860 | 2980 | 15914 | 9417 | 4366 | 17477 |
| | 5293 | 4666 | 6056 | 767 | 5618 | 16102 | 12310 | 15083 | 2136 | 11779 | 13414 | 3319 |
| | 9174 | 9169 | 7113 | 18279 | 9434 | 869 | 12657 | 14439 | 12954 | 14521 | 780 | 8186 |
| | 9746 | 7582 | 7597 | 16451 | 10188 | 3795 | 3794 | 974 | 7376 | 8980 | 13650 | 2807 |
| | 2826 | 15414 | 12722 | 3221 | 11000 | 16877 | 11643 | 5414 | 15634 | 14101 | 17431 | 14104 |
| | 11922 | 14106 | 14118 | 14103 | 11917 | 14117 | 11877 | 9156 | 2076 | 15756 | 7599 | 18286 |
| | 4123 | 10977 | 5267 | 4264 | 4246 | 4226 | 4247 | 4221 | 4211 | 4209 | 3742 | 17450 |
| | 10636 | 10883 | 19245 | 2706 | 17448 | 17445 | 13484 | 12363 | 8462 | 8465 | 1521 | 11661 |
| | 18323 | 10495 | 18481 | 1858 | 19106 | 17961 | 3487 | 5697 | 16728 | 1033 | 15056 | 15910 |
| | 7850 | 13576 | 15542 | 16151 | 16155 | 16095 | 13014 | 16069 | 3257 | 6401 | 17505 | 17504 |
| | 17525 | 17524 | 1966 | 2022 | 7377 | 432 | 8618 | 16819 | 10332 | 2411 | 10331 | 2410 |
| | 12098 | 12865 | 3223 | 4128 | 11048 | 1117 | 13770 | 13767 | 16781 | 16777 | 16779 | 16801 |
| | 17741 | 16774 | 4860 | 15510 | 12777 | 12778 | 14071 | 14067 | 14053 | 14069 | 14091 | 14072 |
| | 14075 | 8376 | 11001 | 9987 | 7853 | 5184 | 7393 | 7395 | 3219 | 3220 | 17517 | 3203 |
| | 17996 | 3205 | 17513 | 10899 | 3204 | 18474 | 18023 | 5912 | 12513 | 600 | 7430 | 7911 |
| | 16191 | 13238 | 15975 | 4924 | 9729 | 6091 | 4326 | 6820 | 13828 | 4812 | 9933 | 17784 |
| | 16424 | 4768 | 15749 | 7309 | 10904 | 2071 | 4194 | 15043 | 2025 | 10355 | 5253 | 13347 |
| | 18509 | 13344 | 18011 | 3930 | 15274 | 2484 | 6139 | 18484 | 18027 | 18467 | 18028 | 17973 |
| | 17972 | 17970 | 17969 | 13244 | 9306 | 12654 | 7398 | 9689 | 13922 | 6420 | 15605 | 14007 |
| | 13995 | 2438 | 2437 | 19194 | 13145 | 3988 | 15004 | 11945 | 4150 | 10313 | 10359 | 18325 |
| | 18513 | 16544 | 14378 | 18243 | 18234 | 18231 | 18233 | 18229 | 18472 | 4879 | 15706 | 2293 |
| | 15916 | 7353 | 7349 | 7351 | 7348 | 7218 | 7214 | 7201 | 7224 | 7220 | 7200 | 2490 |
| | 6757 | 4810 | 15090 | 319 | 316 | 322 | 320 | 323 | 15058 | 19237 | 15045 | 15907 |
| | 16396 | 16398 | 15912 | 15057 | 15636 | 2327 | 16403 | 15079 | 15075 | 10665 | 18489 | 363 |
| | 331 | 2956 | 15490 | 14175 | | | | | | | | |
| 328: | 14605 | 6517 | 16865 | 16885 | 9665 | 3001 | 17621 | 6498 | 10877 | 1351 | 708 | 4478 |
| | 535 | 7655 | 7490 | 11610 | 12325 | 12155 | 359 | 329 | 9904 | 12647 | 12682 | 11322 |
| | 13239 | 8952 | 7452 | 4187 | 6693 | 2763 | 1274 | 1141 | 629 | 17824 | 7900 | 4906 |
| | 6775 | 6177 | 3519 | 2747 | 18261 | 11684 | 17529 | 16576 | 10915 | 2317 | 19075 | 2548 |
| | 8253 | 4198 | 9925 | 8036 | 7079 | 4625 | 7770 | 14890 | 14154 | 10540 | 2772 | 18979 |
| | 8825 | 1228 | 9307 | 8673 | 5251 | 8710 | 2343 | 9153 | 6428 | 1481 | 17991 | 3776 |
| | 8966 | 12834 | 16276 | 18393 | 17006 | 14683 | 8950 | 11563 | 4180 | 5611 | 519 | 8203 |
| | 14908 | 4343 | 6872 | 6064 | 5226 | 6370 | 1046 | 3282 | 3553 | 16693 | 848 | 10371 |
| | 15841 | 7612 | 7861 | 13057 | 5103 | 18747 | 17001 | 15674 | 3566 | 16824 | 18741 | 17597 |
| | 2126 | 2014 | 4745 | 7855 | 4568 | 10122 | 10969 | 3173 | 2544 | 14748 | 7024 | 1998 |
| | 18270 | 15272 | 14644 | 18414 | 2000 | 9723 | 5269 | 16513 | 7623 | 3841 | 11201 | 10505 |
| | 10882 | 14758 | 2552 | 5991 | 7077 | 8626 | 3123 | 5046 | 325 | 8727 | 777 | 13918 |
| | 15800 | 2884 | 3466 | 8448 | 17617 | 8411 | 8918 | 4089 | 12752 | 9932 | 14183 | 7748 |
| | 11559 | 13821 | 13207 | 7858 | 15656 | 13994 | 5113 | 6395 | 825 | 4397 | 12175 | 5376 |
| | 8746 | 17170 | 18657 | 875 | 1764 | 11550 | 9642 | 15684 | 14665 | 326 | 15221 | 2042 |
| | 11049 | 13548 | 6784 | 941 | 18982 | 16732 | 17189 | 332 | 8593 | 6099 | 1740 | 15546 |
| | 18142 | 15254 | 1202 | 1281 | 15791 | 16046 | 15474 | 13180 | 11077 | 12502 | 17716 | 3827 |
| | 5116 | 4146 | 9851 | 15240 | 987 | 14039 | 12727 | 1414 | 17894 | 17928 | 12662 | 18848 |
| | 522 | 2451 | 4881 | 13061 | 9525 | 10424 | 5374 | 427 | 14767 | 10179 | 14281 | 6641 |
| | 17952 | 12133 | 15614 | 17071 | 7506 | 3584 | 15039 | 17536 | 2009 | 13100 | 8427 | 16760 |
| | 6859 | 9928 | 19163 | 7166 | 4498 | 14733 | 2340 | 3068 | 1816 | 1509 | 2780 | 1486 |
| | 433 | 16785 | 13478 | 18959 | 17854 | 14041 | 16004 | 14568 | 15205 | 4457 | 2876 | 18018 |
| | 14884 | 1600 | 17111 | 10757 | 1472 | 766 | 9268 | 9056 | 10303 | 5984 | 19184 | 18805 |
| | 18151 | 15184 | 17669 | 18943 | 6590 | 5461 | 5317 | 6134 | 747 | 858 | 1988 | 17838 |
| | 10028 | 16755 | 13423 | 5944 | 13510 | 9955 | 14046 | 9788 | 7458 | 8799 | 8811 | 4319 |
| | 14371 | 6600 | 1850 | 17710 | 3222 | 4455 | 5432 | 14453 | 13005 | 1232 | 18987 | 5228 |
| | 13882 | 9624 | 2044 | 6117 | 10338 | 10188 | 3795 | 3794 | 974 | 15693 | 18573 | 7376 |
| | 8980 | 2807 | 2826 | 11958 | 11654 | 15238 | 3291 | 12252 | 18157 | 10192 | 3850 | 9625 |
| | 358 | 8304 | 8603 | 11643 | 16949 | 2912 | 1565 | 15603 | 13762 | 2805 | 2809 | 8467 |
| | 2804 | 10050 | 17132 | 14101 | 17431 | 14104 | 11922 | 14106 | 14118 | 14103 | 11917 | 14117 |
| | 11877 | 9156 | 1742 | 2076 | 7599 | 18286 | 2961 | 2360 | 8027 | 2816 | 11540 | 897 |
| | 17297 | 14617 | 12032 | 3304 | 3031 | 18527 | 14635 | 2786 | 12115 | 1581 | 19172 | 8841 |
| | 2722 | 17450 | 10636 | 10883 | 19245 | 2706 | 3971 | 3488 | 17821 | 17385 | 17448 | 17445 |
| | 3300 | 13484 | 10997 | 14435 | 653 | 10247 | 12363 | 8462 | 8465 | 1521 | 11661 | 18323 |
| | 10495 | 1858 | 18642 | 5752 | 14905 | 11072 | 16126 | 15626 | 1970 | 614 | 9927 | 9502 |
| | 6081 | 8796 | 1798 | 1549 | 11741 | 11426 | 16716 | 1770 | 11814 | 2732 | 13032 | 7054 |
| | 17901 | 1025 | 13263 | 9753 | 15261 | 14337 | 11009 | 802 | 1489 | 9751 | 5535 | 19225 |
| | 4741 | 8379 | 9986 | 5615 | 9570 | 18249 | 1579 | 18874 | 14957 | 2833 | 13097 | 11855 |
| | 17444 | 13520 | 2048 | 5863 | 16811 | 12374 | 13302 | 5440 | 14857 | 13516 | 10812 | 9419 |
| | 6771 | 11768 | 12141 | 3543 | 6242 | 11404 | 10175 | 18052 | 1963 | 2636 | 17662 | 7150 |
| | 2875 | 5500 | 15645 | 3024 | 19039 | 805 | 11538 | 2943 | 12915 | 17169 | 4471 | 17129 |
| | 2420 | 9530 | 8029 | 15921 | 16041 | 11094 | 18222 | 10747 | 13795 | 2144 | 17511 | 12731 |
| | 6924 | 15147 | 18864 | 7123 | 7598 | 2259 | 7950 | 18104 | 13183 | 9498 | 651 | 5099 |
| | 8353 | 13883 | 1033 | 7850 | 13576 | 15542 | 16151 | 16155 | 16095 | 3257 | 6401 | 17505 |
| | 17504 | 17525 | 17524 | 18409 | 15499 | 8232 | 6961 | 16518 | 15502 | 5559 | 9033 | 3195 |
| | 7377 | 432 | 13504 | 13500 | 2411 | 16819 | 10332 | 10331 | 2410 | 12865 | 5789 | 3223 |
| | 4128 | 11048 | 1117 | 13770 | 13767 | 16781 | 16777 | 16779 | 16801 | 17741 | 16774 | 4860 |
| | 12777 | 12778 | 14071 | 14067 | 14053 | 14069 | 14091 | 14072 | 14075 | 8376 | 11001 | 9987 |
| | 7853 | 5184 | 7393 | 7395 | 3219 | 3220 | 17517 | 3203 | 17996 | 3205 | 17513 | 10899 |
| | 3204 | 11670 | 14581 | 14168 | 11682 | 12108 | 6252 | 15638 | 15088 | 1701 | 4806 | 19127 |
| | 3793 | 5131 | 1430 | 8012 | 600 | 10571 | 2647 | 12339 | 12482 | 13132 | 18717 | 5066 |
| | 9426 | 8686 | 7911 | 13347 | 6047 | 14198 | 11699 | 7787 | 19095 | 3733 | 10717 | 3009 |
| | 9506 | 12562 | 12416 | 8209 | 6561 | 8778 | 8302 | 3146 | 10221 | 859 | 3688 | 15948 |
| | 8147 | 14789 | 17462 | 17884 | 15014 | 6858 | 18012 | 4361 | 4569 | 16527 | 7396 | 17887 |
| | 2465 | 9985 | 3152 | 13120 | 5302 | 3121 | 7010 | 1428 | 6034 | 6248 | 16042 | 6762 |
| | 11518 | 8202 | 17109 | 9781 | 3532 | 3057 | 12195 | 18035 | 14637 | 2924 | 12479 | 5223 |
| | 2218 | 9337 | 595 | 12526 | 17290 | 5651 | 2890 | 5083 | 15409 | 581 | 2226 | 17949 |
| | 6501 | 15384 | 19109 | 7049 | 11159 | 11395 | 7613 | 14638 | 12405 | 1009 | 15823 | 12586 |
| | 5832 | 468 | 13131 | 5389 | 6525 | 7398 | 13922 | 16467 | 13725 | 3045 | 14411 | 11840 |
| | 6227 | 2107 | 5626 | 3017 | 5027 | 649 | 5687 | 5560 | 19170 | 18325 | 17413 | 13970 |
| | 18612 | 8010 | 7401 | 19015 | 7461 | 6703 | 453 | 14921 | 4492 | 15663 | 7353 | 7349 |
| | 7351 | 7348 | 7218 | 7214 | 7201 | 7224 | 7220 | 7200 | 2490 | 10210 | 7497 | 5053 |
| | 1914 | 11630 | 10526 | 7360 | 12067 | 17483 | 990 | 2676 | 9138 | 1772 | 18635 | 17757 |
| | 10340 | 5732 | 333 | 15080 | 321 | 324 | 15058 | 19237 | 4344 | 2478 | 1751 | 7841 |
| | 1767 | 4651 | 11660 | 15488 | 7901 | 7724 | | | | | | |
| 329: | 17587 | 18488 | 18007 | 3371 | 18022 | 12974 | 8171 | 13047 | 1141 | 15264 | 8036 | 7857 |
| | 17407 | 5542 | 7855 | 325 | 326 | 332 | 3829 | 10188 | 3795 | 3794 | 974 | 7376 |
| | 8980 | 2807 | 2826 | 15414 | 3221 | 11000 | 16877 | 11643 | 14101 | 17431 | 14104 | 11922 |
| | 14106 | 14118 | 14103 | 11917 | 14117 | 11877 | 9156 | 15521 | 15519 | 15512 | 2076 | 7599 |
| | 18286 | 17450 | 10636 | 10883 | 19245 | 2706 | 17448 | 17445 | 13484 | 12363 | 8462 | 8465 |
| | 1521 | 11661 | 18323 | 10495 | 18481 | 1858 | 17901 | 1025 | 15261 | 14337 | 11009 | 802 |
| | 1489 | 9751 | 5535 | 19225 | 4741 | 8379 | 9986 | 5615 | 9570 | 18249 | 1579 | 18874 |
| | 14957 | 2833 | 13097 | 11855 | 17444 | 2048 | 5863 | 16811 | 12374 | 13302 | 5440 | 14857 |
| | 13516 | 10812 | 9419 | 6771 | 11768 | 12141 | 3543 | 6242 | 11404 | 18052 | 1963 | 2636 |
| | 7150 | 2875 | 5500 | 15645 | 3024 | 19039 | 805 | 11538 | 2943 | 12915 | 17169 | 4471 |
| | 17129 | 2420 | 9530 | 8029 | 15921 | 16041 | 11094 | 10747 | 12731 | 13795 | 2144 | 17511 |
| | 6924 | 15147 | 18864 | 7598 | 2259 | 7950 | 18104 | 7123 | 13183 | 9498 | 651 | 5099 |
| | 8353 | 13883 | 4389 | 2662 | 11940 | 19159 | 16364 | 4653 | 14754 | 12986 | 3439 | 9888 |
| | 4998 | 8161 | 19192 | 17068 | 10691 | 934 | 606 | 769 | 8468 | 18297 | 1397 | 3167 |
| | 10721 | 18909 | 18127 | 820 | 8767 | 11231 | 10209 | 18039 | 4769 | 4271 | 914 | 5454 |
| | 17761 | 1436 | 16749 | 12983 | 7990 | 3461 | 11482 | 2488 | 2605 | 15929 | 19116 | 1132 |
| | 11154 | 5499 | 16543 | 12081 | 4575 | 10781 | 15011 | 17427 | 14182 | 11494 | 4324 | 686 |
| | 8119 | 16545 | 10123 | 1033 | 15056 | 15910 | 7850 | 13576 | 15542 | 6776 | 16151 | 16155 |
| | 16095 | 13014 | 16069 | 3257 | 6401 | 17505 | 17504 | 17525 | 17524 | 2022 | 7377 | 432 |
| | 16819 | 10332 | 2411 | 10331 | 2410 | 12098 | 12865 | 3223 | 4128 | 11048 | 1117 | 13770 |
| | 13767 | 16781 | 16777 | 16779 | 16801 | 17741 | 16774 | 4860 | 15510 | 15508 | 12777 | 12778 |
| | 14071 | 14067 | 14053 | 14069 | 14091 | 14072 | 14075 | 8376 | 11001 | 9987 | 7853 | 5184 |
| | 7393 | 7395 | 3219 | 3220 | 17517 | 3203 | 17996 | 3205 | 17513 | 10899 | 3204 | 18474 |
| | 18023 | 600 | 7911 | 16191 | 13238 | 15975 | 4924 | 9729 | 6091 | 4326 | 6820 | 13828 |
| | 4812 | 9933 | 17784 | 16424 | 4768 | 15749 | 7309 | 10904 | 2071 | 4194 | 15043 | 2025 |
| | 10355 | 5253 | 18478 | 2062 | 13347 | 18509 | 13344 | 18011 | 8209 | 8302 | 10221 | 15948 |
| | 8147 | 11081 | 18398 | 17612 | 16052 | 2853 | 15154 | 15669 | 4108 | 413 | 16888 | 8441 |
| | 3479 | 1048 | 17549 | 9749 | 17291 | 14470 | 2008 | 13574 | 5988 | 3547 | 13320 | 12107 |
| | 4540 | 6031 | 16301 | 6076 | 18372 | 10579 | 4109 | 11366 | 19231 | 11108 | 8482 | 5412 |
| | 12150 | 14436 | 18176 | 1610 | 674 | 6891 | 13730 | 8642 | 6095 | 3638 | 993 | 17479 |
| | 11156 | 6014 | 4301 | 1954 | 10818 | 7039 | 15055 | 12418 | 10003 | 1924 | 13798 | 11179 |
| | 15926 | 13552 | 9569 | 18113 | 9432 | 15846 | 14535 | 3145 | 12007 | 1128 | 16132 | 12934 |
| | 1538 | 16847 | 15583 | 6741 | 5534 | 14502 | 4641 | 7188 | 15672 | 4220 | 11219 | 12375 |
| | 7172 | 3983 | 2230 | 6072 | 5854 | 17508 | 17766 | 18490 | 16932 | 15885 | 4617 | 4368 |
| | 16850 | 13940 | 3991 | 1557 | 11615 | 2624 | 18508 | 18457 | 10864 | 18750 | 6697 | 12487 |
| | 18977 | 5445 | 11199 | 10746 | 5601 | 16270 | 559 | 5072 | 16012 | 1609 | 13543 | 18010 |
| | 5876 | 18551 | 11710 | 16973 | 8611 | 17786 | 896 | 15150 | 6585 | 6520 | 13129 | 4965 |
| | 18175 | 2832 | 10945 | 3423 | 17125 | 18855 | 16525 | 1748 | 5964 | 11300 | 7611 | 14612 |
| | 17123 | 14105 | 1285 | 15156 | 11382 | 12956 | 17420 | 6607 | 6377 | 1873 | 5035 | 9405 |
| | 13286 | 8729 | 9963 | 8621 | 9241 | 13064 | 2473 | 14203 | 19067 | 17080 | 10484 | 16852 |
| | 9591 | 6583 | 5237 | 3885 | 11942 | 14024 | 5941 | 2321 | 17997 | 12578 | 4450 | 13443 |
| | 18484 | 18027 | 18467 | 18028 | 17973 | 17972 | 17970 | 17969 | 5302 | 16042 | 6762 | 8202 |
| | 17109 | 9781 | 3057 | 12195 | 18035 | 14637 | 2924 | 5223 | 595 | 5651 | 5083 | 15409 |
| | 17949 | 19109 | 11395 | 13131 | 5389 | 6525 | 18579 | 18245 | 18559 | 15802 | 6580 | 13199 |
| | 10789 | 12935 | 13695 | 14236 | 5044 | 6962 | 15953 | 11413 | 2116 | 18736 | 3803 | 13906 |
| | 7398 | 13922 | 18325 | 18513 | 18472 | 6413 | 7353 | 7349 | 7351 | 7348 | 7218 | 7214 |
| | 7201 | 7224 | 7220 | 7200 | 2490 | 15058 | 19237 | 15045 | 15907 | 16396 | 16398 | 15912 |
| | 15057 | 15636 | 16403 | 15079 | 15075 | 10664 | 18489 | 363 | | | | |
| 330: | 14603 | 515 | 18387 | 18343 | 2331 | 4920 | 18684 | 3585 | 1086 | 2105 | 10280 | 4477 |
| | 534 | 16554 | 580 | 5939 | 12908 | 11544 | 9876 | 8805 | 3452 | 7516 | 362 | 357 |
| | 360 | 5160 | 7225 | 7197 | 13693 | 11971 | 8978 | 7475 | 8946 | 4188 | 6695 | 4175 |
| | 17891 | 18486 | 5737 | 5750 | 15281 | 8580 | 1376 | 1379 | 17822 | 7898 | 10455 | 14342 |
| | 7382 | 7888 | 7445 | 738 | 5438 | 17922 | 9221 | 17902 | 7986 | 4172 | 12385 | 14898 |
| | 15214 | 12314 | 3725 | 15232 | 8116 | 18161 | 2487 | 2559 | 19074 | 4201 | 8255 | 9921 |
| | 14137 | 7777 | 5356 | 14888 | 14152 | 6278 | 2470 | 2755 | 18980 | 718 | 16531 | 1230 |
| | 3927 | 8672 | 9283 | 3995 | 6079 | 2339 | 851 | 11164 | 7252 | 9267 | 3883 | 1479 |
| | 17993 | 1590 | 2294 | 3774 | 5271 | 6390 | 8965 | 11604 | 10999 | 10176 | 17396 | 18394 |
| | 17008 | 14682 | 13895 | 15309 | 484 | 17399 | 8933 | 5612 | 9198 | 6892 | 6990 | 9137 |
| | 8204 | 8167 | 19059 | 18580 | 17301 | 6873 | 4340 | 11451 | 6065 | 9085 | 11944 | 11248 |
| | 18110 | 10733 | 7794 | 5227 | 7083 | 8278 | 15410 | 16695 | 3552 | 7053 | 2668 | 15839 |
| | 10369 | 14061 | 7862 | 13065 | 12871 | 3847 | 16010 | 12618 | 5102 | 5723 | 5348 | 9583 |
| | 9532 | 15763 | 13830 | 17548 | 15673 | 5777 | 18062 | 18742 | 15685 | 17435 | 421 | 835 |
| | 1904 | 3265 | 9700 | 2180 | 2753 | 4596 | 12734 | 10970 | 18093 | 18831 | 2545 | 10816 |
| | 7026 | 12691 | 6318 | 2499 | 1999 | 2567 | 19001 | 1394 | 6365 | 9719 | 12315 | 8324 |
| | 11811 | 5666 | 16514 | 18475 | 15956 | 10933 | 3273 | 5918 | 3838 | 706 | 10504 | 2553 |
| | 10861 | 5990 | 9018 | 8809 | 8627 | 8584 | 13596 | 2608 | 10275 | 12278 | 8725 | 779 |
| | 17013 | 4078 | 3280 | 18893 | 18315 | 14793 | 18945 | 4573 | 3468 | 2115 | 18906 | 8412 |
| | 2897 | 8921 | 7583 | 9677 | 14390 | 13256 | 14184 | 7750 | 11561 | 7723 | 7768 | 13823 |
| | 8577 | 13165 | 7859 | 18546 | 7116 | 5043 | 4449 | 2137 | 6398 | 7799 | 7196 | 12151 |
| | 10862 | 18748 | 5377 | 3616 | 17168 | 11492 | 15246 | 18824 | 12600 | 895 | 1785 | 14661 |
| | 15224 | 16802 | 985 | 326 | 14632 | 13546 | 16571 | 9996 | 16735 | 332 | 17191 | 18450 |
| | 18771 | 1741 | 18129 | 6098 | 15547 | 15586 | 15257 | 15805 | 1279 | 16479 | 15476 | 11079 |
| | 13181 | 16731 | 12486 | 18648 | 16167 | 4143 | 15009 | 15010 | 17134 | 12729 | 1417 | 10964 |
| | 14712 | 5504 | 5721 | 3199 | 2622 | 13058 | 2979 | 10423 | 8307 | 3641 | 4854 | 3541 |
| | 10183 | 735 | 16996 | 732 | 17406 | 9929 | 4647 | 12132 | 17070 | 14450 | 8676 | 17537 |
| | 14527 | 14925 | 11247 | 5570 | 16918 | 18300 | 6997 | 13078 | 7933 | 12177 | 10965 | 7654 |
| | 19120 | 14122 | 8609 | 10040 | 1506 | 2233 | 3802 | 17276 | 16782 | 19107 | 18939 | 3104 |
| | 10995 | 1912 | 16003 | 8348 | 8420 | 13916 | 14569 | 15206 | 15711 | 8756 | 7204 | 18526 |
| | 6423 | 11090 | 14885 | 1583 | 14210 | 10760 | 17110 | 10117 | 768 | 1474 | 2743 | 3191 |
| | 3911 | 8963 | 9058 | 10304 | 19183 | 5960 | 15372 | 18803 | 8355 | 18130 | 750 | 16208 |
| | 2485 | 1433 | 1895 | 2007 | 18492 | 17590 | 5481 | 5304 | 6130 | 3953 | 5967 | 748 |
| | 856 | 9398 | 1989 | 18983 | 10032 | 1308 | 16754 | 13420 | 17236 | 1270 | 10884 | 13511 |
| | 9952 | 4531 | 14047 | 9791 | 584 | 6920 | 6129 | 6133 | 14369 | 17710 | 6599 | 16186 |
| | 14499 | 14532 | 18914 | 3224 | 5430 | 4453 | 6290 | 4141 | 4547 | 14451 | 13001 | 5357 |
| | 5676 | 10109 | 18990 | 1226 | 13884 | 6373 | 11384 | 16391 | 15289 | 9623 | 10336 | 2046 |
| | 10225 | 5637 | 18760 | 2679 | 15287 | 15299 | 15005 | 10538 | 2274 | 15858 | 2366 | 4715 |
| | 18226 | 7226 | 10000 | 14899 | 12251 | 11655 | 2326 | 12860 | 12845 | 12858 | 15650 | 4472 |
| | 18162 | 7699 | 13374 | 1938 | 6890 | 2517 | 358 | 13718 | 9245 | 3740 | 8301 | 10036 |
| | 10037 | 11598 | 13156 | 6062 | 11813 | 4731 | 9348 | 6264 | 18880 | 2358 | 3478 | 2537 |
| | 16692 | 8028 | 12689 | 15658 | 12574 | 1734 | 17135 | 12440 | 3578 | 17624 | 18905 | 3691 |
| | 11371 | 14828 | 6677 | 14887 | 14573 | 6627 | 16604 | 3255 | 4171 | 10829 | 5926 | 18882 |
| | 5653 | 2514 | 7948 | 13401 | 11986 | 7884 | 18359 | 3148 | 17208 | 7280 | 18155 | 13200 |
| | 5115 | 19203 | 15440 | 13521 | 13501 | 12684 | 5790 | 561 | 14678 | 4152 | 7008 | 7589 |
| | 17500 | 5692 | 3103 | 16843 | 8691 | 14121 | 4961 | 15699 | 18887 | 9148 | 13225 | 11743 |
| | 4031 | 10545 | 13773 | 9282 | 6505 | 2815 | 11385 | 4383 | 5212 | 11549 | 3097 | 9160 |
| | 603 | 3512 | 11976 | 13010 | 1548 | 10287 | 8901 | 2266 | 12643 | 8381 | 14274 | 11452 |
| | 16500 | 16464 | 16442 | 16552 | 16470 | 13726 | 7065 | 7063 | 14056 | 10680 | 7067 | 7043 |
| | 17663 | 14404 | 11839 | 11995 | 2011 | 3141 | 12589 | 18452 | 3852 | 6660 | 2217 | 4465 |
| | 4565 | 3018 | 1851 | 13717 | 14662 | 18960 | 14978 | 15034 | 15793 | 17415 | 10448 | 11989 |
| | 6298 | 11606 | 12404 | 7683 | 2094 | 10265 | 13451 | 9523 | 9057 | 6506 | 14626 | 14596 |
| | 17585 | 4757 | 2467 | 2131 | 1958 | 16227 | 12425 | 8409 | 455 | 7459 | 3609 | 8867 |
| | 4350 | 2093 | 19030 | 2060 | 13896 | 8024 | 15664 | 1766 | 15442 | 6244 | 7496 | 4892 |
| | 10377 | 11975 | 3002 | 3671 | 4437 | 9335 | 19108 | 17895 | 16401 | 10085 | 16164 | 1056 |
| | 4981 | 1848 | 11707 | 15836 | 5124 | 1138 | 18857 | 3644 | 10102 | 10006 | 9263 | 10291 |
| | 12852 | 3475 | 6442 | 16263 | 9780 | 5177 | 11318 | 1765 | 19178 | 18695 | 18669 | 9242 |
| | 4650 | 8073 | 7725 | 10485 | 17246 | | | | | | | |
| 331: | 14603 | 515 | 18387 | 18343 | 10567 | 2331 | 4920 | 18684 | 3585 | 2105 | 10280 | 534 |
| | 4477 | 16554 | 580 | 5939 | 12908 | 11544 | 9876 | 8805 | 3452 | 7516 | 360 | 357 |
| | 362 | 359 | 329 | 5160 | 7225 | 7197 | 13693 | 11971 | 8978 | 7475 | 8946 | 4188 |
| | 6695 | 4175 | 17891 | 18486 | 15281 | 8580 | 1376 | 1379 | 17822 | 7898 | 14342 | 10455 |
| | 7888 | 7382 | 7445 | 738 | 5438 | 17922 | 9221 | 17902 | 7986 | 4172 | 12385 | 14898 |
| | 11160 | 15214 | 12314 | 3725 | 15232 | 8116 | 18161 | 2487 | 19074 | 2559 | 8255 | 4201 |
| | 9552 | 9921 | 14137 | 7777 | 5356 | 14888 | 14152 | 6278 | 2470 | 2755 | 18980 | 718 |
| | 16531 | 1230 | 3927 | 9283 | 8672 | 3995 | 6079 | 2339 | 851 | 11164 | 7252 | 9267 |
| | 3883 | 1479 | 17993 | 2294 | 3774 | 5271 | 6390 | 8965 | 10999 | 11604 | 10176 | 17008 |
| | 14682 | 17396 | 18394 | 13895 | 15309 | 17399 | 484 | 5612 | 8933 | 9198 | 6892 | 6990 |
| | 9137 | 8204 | 8167 | 19059 | 18580 | 17301 | 4340 | 6873 | 11451 | 6065 | 9085 | 11944 |
| | 11248 | 18110 | 10733 | 5227 | 7794 | 7083 | 8278 | 15410 | 3552 | 16695 | 7053 | 2668 |
| | 15839 | 10369 | 14061 | 13065 | 7862 | 12871 | 3847 | 16010 | 12618 | 5102 | 5723 | 5348 |
| | 9583 | 9532 | 15763 | 17548 | 13830 | 15673 | 5777 | 18062 | 18742 | 15685 | 17435 | 835 |
| | 421 | 9700 | 1904 | 3265 | 2180 | 2753 | 4596 | 12734 | 10970 | 18093 | 18831 | 2545 |
| | 7026 | 10816 | 2499 | 12691 | 6318 | 1999 | 2567 | 1394 | 6365 | 19001 | 9719 | 8324 |
| | 11811 | 12315 | 5666 | 16514 | 18475 | 10933 | 15956 | 3273 | 3838 | 706 | 10504 | 5990 |
| | 10861 | 2553 | 9018 | 8809 | 8627 | 8584 | 13596 | 2608 | 10275 | 12278 | 8725 | 779 |
| | 17013 | 4078 | 3280 | 8926 | 18315 | 18893 | 14793 | 18945 | 4573 | 3468 | 2115 | 18906 |
| | 2897 | 8412 | 8921 | 7583 | 9677 | 14390 | 13256 | 14184 | 11561 | 7750 | 7723 | 13823 |
| | 8577 | 13165 | 7859 | 18546 | 7116 | 5043 | 4449 | 2137 | 6398 | 7799 | 7196 | 12151 |
| | 18748 | 10862 | 5377 | 3616 | 7581 | 17168 | 11492 | 895 | 15695 | 15224 | 16802 | 985 |
| | 14632 | 326 | 13546 | 9996 | 16571 | 18999 | 18450 | 18771 | 18129 | 6098 | 1741 | 15547 |
| | 15586 | 15805 | 15257 | 16479 | 1279 | 15476 | 11079 | 13181 | 16731 | 12486 | 18648 | 16167 |
| | 5118 | 15009 | 15010 | 17134 | 12729 | 10964 | 1417 | 14712 | 5721 | 5504 | 3199 | 2622 |
| | 13058 | 2979 | 10423 | 8307 | 4854 | 3641 | 3541 | 10183 | 16996 | 735 | 732 | 17406 |
| | 9929 | 4647 | 12132 | 17070 | 14450 | 8676 | 17537 | 14527 | 14925 | 11247 | 5570 | 16918 |
| | 18300 | 6997 | 13078 | 7933 | 12177 | 10965 | 7654 | 19120 | 14122 | 8609 | 10040 | 1506 |
| | 2233 | 3802 | 17276 | 16782 | 19107 | 18939 | 3104 | 10995 | 1912 | 16003 | 8420 | 8348 |
| | 13916 | 14569 | 15206 | 16935 | 15711 | 8756 | 7204 | 18526 | 6423 | 11090 | 1583 | 14885 |
| | 14210 | 17110 | 10760 | 10117 | 1474 | 2743 | 768 | 3191 | 3911 | 8963 | 9058 | 10304 |
| | 19183 | 5960 | 15372 | 18803 | 8355 | 750 | 18130 | 16208 | 2485 | 1433 | 2007 | 18492 |
| | 1895 | 17590 | 5481 | 5304 | 6130 | 3953 | 748 | 856 | 9398 | 1989 | 18983 | 10032 |
| | 1308 | 16754 | 13420 | 17236 | 1270 | 10884 | 12757 | 13511 | 9952 | 4531 | 14047 | 9791 |
| | 584 | 6920 | 6129 | 6133 | 14369 | 17710 | 6599 | 16186 | 14532 | 14499 | 18914 | 2449 |
| | 3224 | 5430 | 4453 | 4547 | 4141 | 6290 | 13001 | 14451 | 5357 | 5676 | 10109 | 13884 |
| | 1226 | 18990 | 6373 | 15289 | 16391 | 11384 | 2046 | 9623 | 10336 | 10225 | 5637 | 2679 |
| | 18760 | 15287 | 15299 | 15005 | 10538 | 2274 | 2366 | 15858 | 4715 | 18226 | 7226 | 10000 |
| | 14899 | 12251 | 11655 | 2326 | 12860 | 15650 | 12845 | 4472 | 12858 | 18162 | 7699 | 13374 |
| | 1938 | 6890 | 2517 | 358 | 13718 | 9245 | 3740 | 8301 | 10036 | 10037 | 11598 | 13156 |
| | 6062 | 11813 | 4731 | 9348 | 6264 | 18880 | 2358 | 16692 | 8028 | 3478 | 2537 | 12689 |
| | 15658 | 12440 | 17135 | 12574 | 1734 | 3578 | 17624 | 18905 | 3691 | 11371 | 14828 | 6677 |
| | 14887 | 14573 | 6627 | 16604 | 3255 | 4171 | 5653 | 18882 | 5926 | 10829 | 13669 | 2514 |
| | 7948 | 13401 | 11986 | 7884 | 18359 | 3148 | 17208 | 7280 | 18155 | 13200 | 5115 | 19203 |
| | 15440 | 13521 | 13501 | 12684 | 5790 | 561 | 4152 | 7008 | 7589 | 17500 | 3103 | 5692 |
| | 16843 | 8691 | 4961 | 14121 | 9148 | 4031 | 15699 | 11743 | 13225 | 18887 | 10545 | 13773 |
| | 9282 | 6505 | 11549 | 11385 | 4383 | 5212 | 2815 | 730 | 3097 | 9160 | 603 | 11976 |
| | 13010 | 1548 | 3512 | 8381 | 4054 | 10287 | 8901 | 2266 | 11452 | 16442 | 16464 | 16470 |
| | 16500 | 16552 | 13726 | 7063 | 7067 | 7043 | 10680 | 7065 | 14056 | 17663 | 14404 | 11839 |
| | 11995 | 2011 | 3141 | 12589 | 18452 | 4465 | 3852 | 6660 | 2217 | 3018 | 1851 | 13717 |
| | 14662 | 18960 | 14978 | 15034 | 15793 | 17415 | 10448 | 12404 | 11606 | 7683 | 2094 | 13451 |
| | 9523 | 10265 | 9057 | 14626 | 6506 | 14596 | 17585 | 4757 | 2467 | 2131 | 1958 | 16227 |
| | 12425 | 8409 | 327 | 328 | 455 | 7459 | 3609 | 8867 | 19030 | 4350 | 2060 | 2093 |
| | 13896 | 8024 | 15664 | 1766 | 15442 | 6244 | 7496 | 4892 | 10377 | 11975 | 3002 | 3671 |
| | 4437 | 9335 | 19108 | 17895 | 16401 | 10085 | 16164 | 1056 | 4981 | 1848 | 11707 | 324 |
| | 322 | 316 | 319 | 15836 | 333 | 323 | 321 | 320 | 5124 | 8234 | 18857 | 1138 |
| | 3644 | 10102 | 10006 | 9263 | 619 | 12852 | 10291 | 3475 | 5177 | 6442 | 16263 | 9780 |
| | 11318 | 1765 | 19178 | 18669 | 9242 | 4650 | 8073 | 7725 | 17246 | 10485 | | |
| 332: | 14603 | 515 | 18343 | 18387 | 10567 | 2331 | 4920 | 18684 | 3585 | 2105 | 10280 | 4477 |
| | 580 | 18136 | 8805 | 3452 | 7516 | 359 | 360 | 5160 | 7225 | 7197 | 13693 | 11971 |
| | 7475 | 8978 | 8946 | 6695 | 4188 | 4175 | 17891 | 18486 | 5737 | 5750 | 15281 | 8580 |
| | 1376 | 1379 | 17822 | 7898 | 14342 | 7445 | 738 | 5438 | 17922 | 9221 | 17902 | 7986 |
| | 4172 | 12385 | 15214 | 12314 | 15232 | 8116 | 18161 | 2487 | 2559 | 19074 | 4201 | 8255 |
| | 9921 | 7777 | 5356 | 14152 | 14888 | 6278 | 18980 | 2755 | 2470 | 718 | 16531 | 1230 |
| | 3927 | 8672 | 9283 | 3995 | 6079 | 851 | 11164 | 7252 | 9267 | 3883 | 17993 | 3774 |
| | 5271 | 6390 | 8965 | 10999 | 11604 | 10176 | 18394 | 17396 | 13895 | 8933 | 9137 | 8204 |
| | 8167 | 18580 | 19059 | 17301 | 6873 | 4340 | 11451 | 6065 | 9085 | 11944 | 11248 | 18110 |
| | 10733 | 5227 | 8278 | 15410 | 16695 | 3552 | 15839 | 10369 | 14061 | 13065 | 3847 | 16010 |
| | 5102 | 5723 | 9532 | 15763 | 13830 | 15673 | 5777 | 18742 | 17435 | 421 | 835 | 9700 |
| | 1904 | 3265 | 2180 | 2753 | 4596 | 10970 | 18093 | 2545 | 10816 | 7026 | 12691 | 2499 |
| | 19001 | 6365 | 1394 | 9719 | 8324 | 11811 | 16514 | 18475 | 10933 | 15956 | 3273 | 3838 |
| | 706 | 10504 | 2553 | 10861 | 8809 | 8627 | 8584 | 13596 | 2608 | 779 | 8725 | 12278 |
| | 17013 | 4078 | 3280 | 18893 | 18315 | 14793 | 18945 | 3468 | 8921 | 8412 | 14390 | 13256 |
| | 14184 | 7750 | 11561 | 7723 | 13823 | 8577 | 13165 | 7859 | 18546 | 7116 | 5043 | 2137 |
| | 6398 | 7196 | 12151 | 18748 | 10862 | 5377 | 3616 | 17168 | 15246 | 18824 | 11492 | 12600 |
| | 1785 | 15224 | 985 | 16802 | 13546 | 9996 | 18450 | 18771 | 1741 | 15547 | 6098 | 15257 |
| | 15476 | 13181 | 18648 | 12486 | 16167 | 15009 | 15010 | 17134 | 12729 | 1417 | 10964 | 14712 |
| | 5721 | 3199 | 2622 | 13058 | 2979 | 10423 | 8307 | 3641 | 4854 | 3541 | 10183 | 16996 |
| | 17406 | 4647 | 12132 | 17070 | 14450 | 8676 | 17537 | 14527 | 14925 | 11247 | 5570 | 6997 |
| | 16918 | 18300 | 13078 | 7933 | 10965 | 12177 | 7654 | 14122 | 8609 | 10040 | 1506 | 16782 |
| | 19107 | 18939 | 10995 | 3104 | 1912 | 16003 | 8420 | 15206 | 14569 | 16935 | 15711 | 8756 |
| | 7204 | 18526 | 6423 | 11090 | 14885 | 1583 | 14210 | 10760 | 17110 | 10117 | 768 | 2743 |
| | 1474 | 3191 | 3911 | 8963 | 9058 | 10304 | 5960 | 18803 | 750 | 2485 | 1433 | 1895 |
| | 2007 | 18492 | 17590 | 5304 | 856 | 748 | 9398 | 1989 | 18983 | 10032 | 1308 | 13420 |
| | 16754 | 17236 | 1270 | 12757 | 9952 | 13511 | 14047 | 9791 | 584 | 6599 | 17710 | 14369 |
| | 16186 | 14532 | 14499 | 18914 | 2449 | 3224 | 4453 | 14451 | 5357 | 18990 | 1226 | 9623 |
| | 10336 | 15287 | 15299 | 15005 | 10538 | 2274 | 15858 | 4715 | 18226 | 7226 | 11655 | 2326 |
| | 14899 | 10000 | 12251 | 15650 | 12860 | 12858 | 12845 | 18162 | 13374 | 7699 | 1938 | 6890 |
| | 2517 | 13718 | 358 | 9245 | 8301 | 10036 | 10037 | 11598 | 13156 | 6062 | 11813 | 6264 |
| | 18880 | 2358 | 3478 | 2537 | 16692 | 8028 | 15658 | 12689 | 12574 | 1734 | 17135 | 12440 |
| | 17450 | 3578 | 17624 | 18905 | 3691 | 11371 | 14828 | 14573 | 14887 | 6677 | 6627 | 3255 |
| | 16604 | 4171 | 16840 | 5926 | 10829 | 18882 | 5653 | 13669 | 2514 | 7948 | 13401 | 11986 |
| | 7884 | 18359 | 3148 | 17208 | 7280 | 18155 | 13200 | 5115 | 19203 | 15440 | 13521 | 12684 |
| | 5790 | 561 | 14678 | 3956 | 4152 | 7589 | 7008 | 17500 | 5692 | 3103 | 16843 | 4961 |
| | 14121 | 8691 | 9148 | 4031 | 15699 | 13225 | 18887 | 11743 | 10545 | 13773 | 9282 | 6505 |
| | 11549 | 4383 | 2815 | 11385 | 5212 | 730 | 3097 | 9160 | 603 | 13010 | 1548 | 11976 |
| | 3512 | 10287 | 8901 | 2266 | 8381 | 4054 | 6522 | 4061 | 14274 | 11452 | 16464 | 16442 |
| | 16470 | 16500 | 16552 | 13726 | 7065 | 7063 | 10680 | 7043 | 7067 | 14056 | 17663 | 14404 |
| | 11839 | 11995 | 12589 | 18452 | 3852 | 6660 | 2217 | 4565 | 1851 | 3018 | 13717 | 14662 |
| | 18960 | 14978 | 15034 | 15793 | 10448 | 17415 | 11989 | 6298 | 11606 | 12404 | 7683 | 2094 |
| | 13451 | 9523 | 10265 | 6506 | 2467 | 2131 | 1958 | 16227 | 12425 | 8409 | 7459 | 8867 |
| | 4350 | 2093 | 2060 | 13896 | 19030 | 15664 | 1766 | 15442 | 7496 | 4892 | 10377 | 11975 |
| | 3002 | 3671 | 4437 | 9335 | 17895 | 16401 | 10085 | 16164 | 1056 | 4981 | 1848 | 11707 |
| | 7139 | 5124 | 15836 | 322 | 18857 | 1138 | 3644 | 10102 | 10006 | 9263 | 619 | 10291 |
| | 12852 | 3475 | 16263 | 6442 | 9780 | 5177 | 11318 | 1765 | 19178 | 18669 | 18695 | 4650 |
| | 7725 | 17246 | 10485 | | | | | | | | | |
| 333: | 17621 | 6498 | 10877 | 4478 | 535 | 7655 | 7490 | 11610 | 12155 | 359 | 329 | 357 |
| | 9904 | 12647 | 12682 | 11322 | 13239 | 8952 | 4187 | 2763 | 1274 | 1141 | 4906 | 6775 |
| | 6177 | 3519 | 17529 | 16576 | 10915 | 19075 | 8253 | 9925 | 8036 | 7079 | 4625 | 7770 |
| | 14890 | 10540 | 2772 | 9307 | 5251 | 8710 | 2343 | 9153 | 6428 | 1481 | 3776 | 8966 |
| | 16276 | 18393 | 17006 | 14683 | 8950 | 14908 | 4343 | 6064 | 5226 | 6370 | 3282 | 3553 |
| | 10371 | 7861 | 13057 | 18747 | 15674 | 3566 | 16824 | 18741 | 17597 | 4745 | 7855 | 4568 |
| | 10122 | 3173 | 14748 | 7024 | 1998 | 18270 | 15272 | 18414 | 2000 | 9723 | 7623 | 3841 |
| | 11201 | 10882 | 14758 | 7077 | 3123 | 325 | 8727 | 777 | 15800 | 2884 | 8411 | 14183 |
| | 7748 | 11559 | 13821 | 13207 | 5113 | 4397 | 5376 | 8746 | 18657 | 9642 | 15684 | 14665 |
| | 326 | 15221 | 11049 | 941 | 18982 | 8593 | 6099 | 15254 | 1202 | 16046 | 11077 | 12502 |
| | 17716 | 9851 | 15240 | 14039 | 18848 | 522 | 2451 | 4881 | 9525 | 5374 | 14767 | 14281 |
| | 6641 | 17952 | 12133 | 15614 | 7506 | 15039 | 17536 | 2009 | 13100 | 8427 | 6859 | 9928 |
| | 19163 | 4498 | 2340 | 1509 | 433 | 13478 | 14041 | 14568 | 4457 | 18018 | 17111 | 1472 |
| | 9268 | 9056 | 10303 | 5984 | 19184 | 18805 | 15184 | 6590 | 5461 | 747 | 858 | 1988 |
| | 17838 | 16755 | 13510 | 14046 | 7458 | 8799 | 8811 | 4319 | 14371 | 3222 | 14453 | 13005 |
| | 1232 | 5228 | 9624 | 2044 | 6117 | 10188 | 3795 | 3794 | 974 | 15693 | 18573 | 7376 |
| | 8980 | 2807 | 2826 | 11958 | 18157 | 10192 | 3850 | 9625 | 8603 | 11643 | 16949 | 2912 |
| | 14101 | 17431 | 14104 | 11922 | 14106 | 14118 | 14103 | 11917 | 14117 | 11877 | 9156 | 1742 |
| | 2076 | 7599 | 18286 | 2961 | 2816 | 8027 | 11540 | 897 | 17297 | 12032 | 14617 | 14635 |
| | 2786 | 12115 | 1581 | 19172 | 8841 | 3304 | 2722 | 18527 | 3031 | 17450 | 10636 | 10883 |
| | 19245 | 3971 | 3488 | 2706 | 12363 | 8462 | 8465 | 1521 | 11661 | 18323 | 10495 | 1858 |
| | 18642 | 5752 | 14905 | 11072 | 16126 | 15626 | 1970 | 11741 | 6081 | 16716 | 11426 | 614 |
| | 8796 | 9927 | 9502 | 1770 | 1798 | 11814 | 1549 | 2732 | 1033 | 7850 | 13576 | 15542 |
| | 16151 | 16155 | 16095 | 3257 | 6401 | 17505 | 17504 | 17525 | 17524 | 18409 | 8232 | 15499 |
| | 6961 | 7377 | 432 | 13504 | 13500 | 16819 | 10332 | 2411 | 10331 | 2410 | 12865 | 5789 |
| | 3223 | 4128 | 11048 | 1117 | 13770 | 13767 | 16781 | 16777 | 16779 | 16801 | 17741 | 16774 |
| | 4860 | 12777 | 12778 | 14071 | 14067 | 14053 | 14069 | 14091 | 14072 | 14075 | 8376 | 11001 |
| | 9987 | 7853 | 5184 | 7393 | 7395 | 3219 | 3220 | 17517 | 3203 | 17996 | 3205 | 17513 |
| | 10899 | 3204 | 11670 | 14581 | 14168 | 12108 | 11682 | 15638 | 6252 | 19127 | 4806 | 1701 |
| | 3793 | 5131 | 15088 | 13347 | 6047 | 11699 | 14198 | 7787 | 19095 | 3733 | 3009 | 10717 |
| | 12562 | 9506 | 8209 | 12416 | 6561 | 8778 | 8302 | 3146 | 10221 | 859 | 3688 | 15948 |
| | 8147 | 17462 | 14789 | 17884 | 15014 | 6858 | 17887 | 2465 | 7396 | 9985 | 4361 | 4569 |
| | 16527 | 18012 | 3152 | 5302 | 13120 | 6034 | 16042 | 6762 | 12479 | 3121 | 8202 | 17109 |
| | 9781 | 1428 | 6248 | 3057 | 12195 | 11518 | 7010 | 9337 | 18035 | 14637 | 2924 | 7398 |
| | 13922 | 16467 | 13725 | 3045 | 14411 | 11840 | 6227 | 2107 | 5626 | 3017 | 649 | 5687 |
| | 19170 | 18325 | 17413 | 13970 | 18612 | 8010 | 3601 | 7401 | 19015 | 328 | 7461 | 14921 |
| | 4492 | 15663 | 7353 | 7349 | 7351 | 7348 | 7218 | 7214 | 7201 | 7224 | 7220 | 7200 |
| | 2490 | 10210 | 1914 | 11630 | 7360 | 10526 | 12067 | 17483 | 990 | 2676 | 9138 | 1772 |
| | 18635 | 10340 | 15058 | 19237 | 4344 | 2478 | 1751 | 7841 | 1767 | 4651 | 11660 | 15488 |
| | 7901 | 7724 | | | | | | | | | | |
| 334: | 13396 | 17207 | 7300 | 12940 | 10409 | 6167 | 6302 | 16961 | 3782 | 14913 | 12949 | 6274 |
| | 1445 | 8025 | 4162 | 5021 | 10714 | 4634 | 11369 | 6304 | 16188 | 14951 | 7942 | 7940 |
| | 14879 | 4636 | 9184 | 9183 | 840 | 3277 | 17325 | 3714 | 15114 | 17528 | 17582 | 5185 |
| | 4423 | 19198 | 14370 | 11230 | 15609 | 10851 | 2333 | 11889 | 4722 | 8931 | 15588 | 1827 |
| | 680 | 11357 | 16987 | 3034 | 7121 | 14512 | 16943 | 2908 | 16250 | 18410 | 495 | 12608 |
| | 3954 | 2539 | 4400 | 14817 | 8967 | 8298 | | | | | | |
| 335: | 17955 | 13227 | 14444 | 9858 | 3875 | 7843 | 5082 | 5361 | 8900 | 16139 | 16124 | 4656 |
| | 16646 | 13371 | 6550 | 5840 | 6552 | 8352 | 13524 | 11651 | 9350 | 7366 | 15095 | 9106 |
| | 2189 | 17114 | 15179 | 13572 | 17818 | 12991 | 884 | 8197 | 17100 | 7580 | 17298 | 7561 |
| | 18531 | 14944 | 12090 | 12849 | 8713 | 2165 | 481 | 10266 | 5405 | 7903 | 10155 | 10154 |
| | 5547 | 6554 | 5176 | 11960 | 18654 | 8367 | 18775 | 3308 | 3306 | 15052 | 6482 | |
| 336: | 12812 | 6537 | 6555 | 17107 | 18839 | 15750 | 6539 | 8474 | 19239 | 12797 | 15782 | 4902 |
| | 15115 | 9000 | 9001 | 9065 | 9067 | 9105 | 9103 | 17825 | 6565 | 6562 | 6557 | 9004 |
| | 9003 | 9012 | 16968 | 2568 | 9474 | 9470 | 1122 | 1147 | 1755 | 8315 | 8306 | 8312 |
| | 14711 | 14713 | 14695 | 7673 | 7677 | 14772 | 14775 | 2435 | 11752 | 13152 | 6435 | 4085 |
| | 4083 | 6533 | 6535 | 8614 | 8615 | 8617 | 8620 | 8518 | 8537 | 8542 | 8543 | 8570 |
| | 12746 | 8576 | 8592 | 8594 | 8601 | 8610 | 1645 | 1673 | 8635 | 8639 | 8641 | 8643 |
| | 8661 | 8663 | 8665 | 9257 | 9258 | 9264 | 9266 | 9262 | 9299 | 9295 | 9317 | 9318 |
| | 9320 | 9323 | 9338 | 9342 | 9341 | 9345 | 9364 | 9346 | 9373 | 9374 | 9389 | 9392 |
| | 9390 | 9396 | 9404 | 9408 | 9407 | 9411 | 9409 | 9423 | 9427 | 9425 | 9441 | 9428 |
| | 9443 | 9444 | 9447 | 9467 | 9448 | 10005 | 10001 | 10008 | 10014 | 10024 | 10013 | 10027 |
| | 10031 | 10034 | 8599 | 8597 | 8477 | 8478 | 8490 | 8479 | 8513 | 1692 | 1754 | 1710 |
| | 1752 | 1045 | 17015 | 15357 | 15358 | 9042 | 9041 | 12442 | 15367 | 9100 | 9101 | 9120 |
| | 9119 | 9123 | 9124 | 16510 | 1050 | 984 | 2213 | 2212 | 1659 | 1656 | 8981 | 8979 |
| | 9005 | 9007 | 7760 | 7737 | 7734 | 9044 | 9043 | 9069 | 9071 | 12814 | 2254 | 2258 |
| | 2272 | 2273 | 8160 | 4433 | 6702 | 6721 | 3343 | 6193 | 16536 | 19006 | 12307 | 3854 |
| | 3851 | 12771 | 1662 | 1661 | 2139 | 2138 | 2171 | 8566 | 8568 | 8667 | 8669 | 10026 |
| | 2162 | 2146 | 2210 | 2190 | 2142 | 2141 | 4959 | 1144 | 1148 | 17053 | 13859 | 1049 |
| | 1053 | 1052 | 1124 | 17011 | 16959 | 1059 | 1058 | 1054 | 13862 | 1142 | 1127 | 1061 |
| | 1062 | 1075 | 1077 | 1064 | 16992 | 16915 | 16964 | 16878 | 16876 | 16859 | 17012 | 16899 |
| | 16921 | 16946 | 1182 | 1095 | 1094 | 16856 | 1097 | 16854 | 16851 | 1126 | 13864 | 16939 |
| | 16942 | 1100 | 16940 | 13841 | 16960 | 14325 | 16944 | 16994 | 17052 | 16879 | 1108 | 1145 |
| | 16991 | 16880 | 17018 | 16967 | 13839 | 17048 | 16926 | 17022 | 1177 | 1114 | 1113 | 16895 |
| | 1111 | 1175 | 17047 | 1110 | 4898 | 5589 | 5599 | 4983 | 16542 | 13892 | 16864 | 16988 |
| | 17051 | 14321 | 14323 | 19043 | 2338 | 1536 | 2164 | 9068 | 1664 | 16509 | 1044 | 983 |
| | 6146 | 4976 | 3764 | 4974 | 3763 | 15421 | 9190 | 11574 | 8757 | 10135 | 14728 | 11967 |
| | 3187 | 4958 | 8755 | 11575 | 1172 | 1276 | 17066 | 16924 | 16962 | 1083 | 1092 | 1078 |
| | 1082 | 1181 | 16990 | 16903 | 16896 | 4982 | 4894 | 1694 | 1728 | 1750 | 1784 | 1635 |
| | 12761 | 8471 | 5674 | 4720 | 4702 | 16162 | 16593 | 16429 | 16592 | 13465 | 16651 | 12975 |
| | 14562 | 14228 | 13445 | 7037 | 12725 | 9992 | 13383 | 9994 | 13865 | 14324 | 16882 | 1539 |
| | 1540 | 1165 | 1164 | 1537 | 1185 | 1193 | 1188 | 1209 | 1190 | 1211 | 1192 | 16687 |
| | 16688 | 16689 | 3125 | 9504 | 1328 | 18686 | 1945 | 14841 | 14262 | 13283 | 9073 | 9075 |
| | 13355 | 17912 | 17911 | 12471 | 4663 | 13744 | 6639 | 2970 | 5233 | 6727 | 8683 | 18083 |
| | 16805 | 16999 | 1109 | 16617 | 10334 | 1733 | 4064 | 16482 | 12338 | 2688 | 8323 | 7698 |
| | 11227 | 1776 | 1602 | 1619 | 1620 | 1690 | 1689 | 1736 | 1781 | 4784 | 1615 | 1667 |
| | 1774 | 1779 | 1756 | 1738 | 1623 | 1641 | 1671 | 1717 | 12773 | 13030 | 15977 | 15991 |
| | 12233 | 5806 | 912 | 18647 | 5201 | 1678 | 15537 | 15536 | 16043 | 11137 | 17959 | 4029 |
| | 10751 | 9422 | 7965 | 3773 | 17175 | 15696 | 9656 | 14239 | 1456 | 8237 | 3965 | 2720 |
| | 4396 | 15798 | 4098 | 13654 | 16332 | 1457 | 8240 | 5097 | 7868 | 8335 | 6224 | 17118 |
| | 7782 | 6255 | 6237 | 7776 | 6233 | 14548 | 15040 | 15041 | 8516 | 8517 | 12031 | 12049 |
| | 12781 | 12784 | 6582 | 6560 | 14328 | 4917 | 14355 | 14359 | 14367 | 14396 | 19230 | 10194 |
| | 10191 | 10451 | 9437 | 1647 | 9436 | 9439 | 9440 | 9846 | 7906 | 2642 | 9463 | 13611 |
| | 8571 | 10086 | 662 | 19008 | 6288 | 4736 | 14530 | 846 | 9216 | 12880 | 8162 | 14794 |
| | 14790 | 14788 | 15359 | 13027 | 14387 | 11668 | 8337 | 8341 | 12881 | 12882 | 13026 | 13391 |
| | 12955 | 12785 | 12804 | 12806 | 13191 | 13220 | 10610 | 10605 | 10607 | 10623 | 10626 | 10625 |
| | 10533 | 18925 | 14732 | 14714 | 14729 | 14730 | 17061 | 14750 | 12898 | 7639 | 7641 | 7624 |
| | 13186 | 13185 | 4801 | 13976 | 8330 | 7761 | 16558 | 9139 | 9089 | 9090 | 12899 | 9046 |
| | 9045 | 13385 | 12932 | 9040 | 9038 | 9013 | 9015 | 9096 | 8218 | 13006 | 13009 | 11928 |
| | 11916 | 11918 | 11923 | 11335 | 13190 | 13187 | 7691 | 13406 | 13394 | 13392 | 12879 | 12877 |
| | 3727 | 18357 | 13517 | 3085 | 12328 | 12329 | 6664 | 6665 | 6666 | 12660 | 4761 | 11671 |
| | 14600 | 8169 | 6360 | 3351 | 10190 | 5867 | 3349 | 16478 | 16472 | 16477 | 7680 | 16504 |
| | 13155 | 2297 | 14382 | 14391 | 4797 | 15682 | 2785 | 12327 | 13048 | 18495 | 14115 | 17082 |
| | 12990 | 917 | 15503 | 5572 | 9144 | 5334 | 4799 | 5675 | 14308 | 14394 | 14366 | 14338 |
| | 14859 | 14310 | 14385 | 14860 | 14858 | 14332 | 14356 | 1688 | 1687 | 9560 | 11126 | 8014 |
| | 2169 | 2166 | 1696 | 8495 | 8491 | 12793 | 2227 | 2215 | 9469 | 8538 | 8540 | 9289 |
| | 9290 | 9291 | 15908 | 10650 | 13029 | 13031 | 13033 | 16432 | 6354 | 6353 | 5957 | 9874 |
| | 17852 | 11476 | 2846 | 5526 | 5528 | 19207 | 16548 | 12951 | 2135 | 12953 | 5530 | 12952 |
| | 14720 | 3496 | 5582 | 2342 | 15247 | 15911 | 17347 | 15712 | 13002 | 1680 | 2185 | 2184 |
| | 7322 | 4953 | 4759 | 4762 | 1130 | 3826 | 3812 | 3815 | 12767 | 8645 | 8473 | 8461 |
| | 12795 | 9126 | 9127 | 9094 | 9009 | 1683 | 1685 | 12861 | 13043 | 9093 | 9091 | 9078 |
| | 12904 | 12906 | 1448 | 11362 | 1449 | 1450 | 9325 | 12931 | 14358 | 2915 | 8053 | 14498 |
| | 11392 | 4282 | 7781 | 16258 | 9550 | 9590 | 4521 | 4977 | 18683 | 15969 | 16454 | 1011 |
| | 1246 | 996 | 11260 | 946 | 943 | 932 | 18672 | 14854 | 4980 | 15980 | 15976 | 15978 |
| | 15974 | 15874 | 15982 | 16521 | 12799 | 8419 | 11340 | 10885 | 16256 | 10835 | 10856 | 10806 |
| | 13518 | 3443 | 14861 | 16748 | 16758 | 8949 | 15743 | 13836 | 7261 | 17637 | 2188 | 2186 |
| | 14388 | 14397 | 15744 | 6427 | 6412 | 6411 | 14333 | 12961 | 16261 | 13674 | 14819 | 9048 |
| | 9047 | 12816 | 14747 | 12835 | 12809 | 12832 | 12817 | 1806 | 18749 | 4362 | 1325 | 9864 |
| | 1801 | 10091 | 8794 | 8786 | 8117 | 8113 | 8115 | 8060 | 8057 | 8093 | 5874 | 8838 |
| | 8829 | 8836 | 8858 | 8826 | 8810 | 8827 | 8815 | 9471 | 8054 | 5768 | 8056 | 5843 |
| | 8075 | 5829 | 5788 | 8149 | 5808 | 5807 | 8076 | 8078 | 8120 | 8118 | 8125 | 8130 |
| | 8127 | 8977 | 8976 | 9529 | 9538 | 9536 | 9559 | 9539 | 9540 | 18257 | 16900 | 7763 |
| | 11331 | 11313 | 7658 | 7661 | 14795 | 11338 | 14815 | 14307 | 13912 | 1804 | 15957 | 3848 |
| | 3831 | 3834 | 12744 | 4181 | 4740 | 14753 | 14230 | 4182 | 4711 | 8668 | 8758 | 8693 |
| | 8692 | 8726 | 8724 | 8728 | 8701 | 8706 | 8704 | 8689 | 8721 | 8709 | 8708 | 8774 |
| | 8781 | 8777 | 8784 | 8752 | 8731 | 14363 | 10892 | 4387 | 12605 | 17432 | 6543 | 10268 |
| | 8178 | 7656 | 7644 | 14769 | 14755 | 14693 | 14689 | 1638 | 1670 | 1712 | 1715 | 1730 |
| | 2238 | 2234 | 9063 | 14862 | 1681 | 1663 | 2251 | 2250 | 14311 | 14331 | 4911 | 4914 |
| | 4930 | 4934 | 14334 | 4936 | 14353 | 14354 | 4939 | 14361 | 14389 | 4978 | 1646 | 1617 |
| | 1604 | 1708 | 3870 | 3871 | 12743 | 8574 | 16919 | 9369 | 9370 | 2211 | 2252 | 8498 |
| | 8499 | 4897 | 4908 | 4919 | 4937 | 4955 | 4957 | 4960 | 16507 | 16486 | 16480 | 16491 |
| | 1032 | 1030 | 981 | 979 | 962 | 959 | 956 | 2232 | 2229 | 14329 | 14155 | 14306 |
| | 14340 | 14339 | 14393 | 14851 | 14853 | 14855 | 4821 | 7851 | 11477 | | | |
| 337: | 4095 | 15046 | 10521 | 11731 | 1628 | 9595 | 7433 | 633 | 7621 | 18399 | 1383 | 7646 |
| | 5781 | 12525 | 14082 | 6175 | 5446 | 17124 | 2637 | 14579 | 18542 | 8588 | 804 | 8650 |
| | 5284 | 18904 | 5658 | 8106 | 6336 | 4263 | 11332 | 12874 | 6478 | 13913 | 9066 | 13379 |
| | 17596 | 18592 | 13115 | 2010 | 2419 | 4845 | 14997 | 18740 | 618 | 3431 | 3970 | 10518 |
| | 14706 | 16668 | 9305 | 10374 | 18493 | 5038 | 10849 | 14836 | 2271 | 992 | 9179 | 16837 |
| | 8717 | 10496 | 18477 | 7920 | 10916 | 3559 | 10271 | 17999 | 4030 | 18694 | 6969 | 4377 |
| | 9285 | 2666 | 10774 | 17320 | 13447 | 10398 | 3876 | 2057 | 18631 | 17938 | 558 | 17050 |
| | 15751 | 10685 | 10348 | 7899 | 13923 | 8201 | 604 | 6712 | 2475 | 19003 | 2910 | 16091 |
| | 2140 | 10720 | 3323 | 9194 | 11223 | 19145 | 10602 | 657 | 17840 | 11593 | 11595 | 18216 |
| | 16978 | 13665 | 12968 | 16708 | 15761 | 4008 | 9556 | 11066 | 3402 | 5250 | 17466 | 6487 |
| | 16702 | 11097 | 11261 | 15834 | 16616 | 4700 | 4701 | 9490 | 6730 | 3210 | 1853 | 14663 |
| | 14660 | 10844 | 13655 | 4649 | 6868 | 16252 | 4885 | 1523 | 15210 | 12821 | 1183 | 15471 |
| | 2051 | 5972 | 4643 | 3628 | 1352 | 5987 | 6581 | 18812 | 14639 | 16535 | 9679 | 11416 |
| | 14991 | 7257 | 4274 | 9585 | 6918 | 2388 | 17101 | 4046 | 16235 | 2330 | 12769 | 4218 |
| | 881 | 5507 | 11957 | 3735 | 14383 | 16187 | 2043 | 5111 | 10878 | 17577 | 19147 | 343 |
| | 17755 | 12154 | 7436 | 13269 | 13270 | 4312 | 7297 | 2111 | 3014 | 9674 | 4608 | 10651 |
| | 11599 | 13358 | | | | | | | | | | |
| 338: | 10161 | 1021 | 6688 | 9452 | 16287 | 16288 | 15688 | 15702 | 15143 | 16317 | 15707 | 15713 |
| | 15714 | 15729 | 6744 | 14587 | 10601 | 14607 | 3011 | 12699 | 13448 | 9210 | 7228 | 7062 |
| | 7064 | 7066 | 2700 | 8792 | 17658 | 19226 | 18581 | 7704 | 14010 | 16417 | 1222 | 7789 |
| | 611 | 11394 | 8456 | 13854 | 13461 | 4750 | 2550 | 14364 | 19133 | 16371 | 11853 | 908 |
| | 3758 | 1219 | 7812 | 7093 | 7068 | 14739 | 666 | 6001 | 17547 | 7416 | 14427 | 12134 |
| | 15094 | 16314 | 2594 | 15063 | 12622 | 1314 | 15738 | 15705 | 15731 | 15734 | 15736 | 14785 |
| | 634 | 15145 | 2811 | 4375 | 16005 | 15760 | 6740 | 16286 | 9982 | 1607 | 5288 | 3077 |
| | 3076 | 3079 | 3060 | 17569 | 5586 | 1163 | 1294 | 1299 | 7042 | 7060 | 1318 | 1320 |
| | 1323 | 7531 | 10165 | | | | | | | | | |
| 339: | 13280 | 7465 | 13170 | 13488 | 8094 | 7023 | 15591 | 15585 | 15589 | 13440 | 10740 | 14846 |
| | 15781 | 14380 | 7542 | 4997 | 6793 | 6530 | 15127 | 14107 | 14099 | 12692 | 12638 | 6743 |
| | 4176 | 8397 | 8398 | 12234 | 12202 | 12231 | 12184 | 8401 | 12178 | 12201 | 12188 | 12226 |
| | 8402 | 1852 | 18620 | 17417 | 1931 | 18095 | 18096 | 18081 | 18076 | 17392 | 17346 | 1795 |
| | 1793 | 17515 | 17496 | 18138 | 17518 | 18108 | 8418 | 3043 | 18459 | 8099 | 9311 | 16771 |
| | 2036 | 14555 | 8712 | 1468 | 4416 | 4414 | 4413 | 4436 | 4435 | 4371 | 4357 | 4355 |
| | 4376 | 3798 | 3797 | 3315 | 11764 | 5938 | 3236 | 15423 | 18556 | 1084 | 9329 | 9332 |
| | 9334 | 9352 | 9349 | 9353 | 9355 | 9354 | 1556 | 12179 | 7144 | 4314 | 7509 | 15131 |
| | 13118 | 16078 | 945 | 13430 | 18194 | 4956 | 6929 | 1412 | 4783 | 12306 | 9385 | 12690 |
| | 12672 | 4342 | 13055 | 13054 | 7021 | 4081 | 7703 | 3033 | 17154 | 9984 | 15399 | 7217 |
| | 9277 | 13222 | 13034 | 341 | 11004 | 15248 | 1463 | 2015 | 17433 | 12644 | 15941 | 10807 |
| | 3266 | 8742 | 1972 | 3510 | 9558 | 4266 | 626 | 7388 | 14560 | 7227 | 13555 | 17967 |
| | 4546 | 8700 | 17272 | 10335 | 18466 | 1060 | 3720 | 12985 | 9961 | 12732 | 18869 | 8954 |
| | 2752 | 13820 | 10361 | 15865 | 2500 | 10465 | 18069 | 18784 | 16053 | 775 | 2727 | 16534 |
| | 13326 | 15757 | 12838 | 11061 | 3693 | 13785 | 10142 | 11449 | 11354 | 9684 | 5074 | 9660 |
| | 12700 | 15166 | 15169 | 13456 | 13485 | 13469 | 13473 | 13487 | 13505 | 13506 | 12663 | 12661 |
| | 5471 | 17875 | 16908 | 13205 | 17054 | 9363 | 989 | 988 | 4140 | 6615 | 6572 | 6635 |
| | 6591 | 6608 | 6592 | 11985 | 6631 | 6662 | 6633 | 6573 | 6638 | 3200 | 10745 | 1012 |
| | 15212 | 14003 | 8819 | 17558 | 3396 | 13373 | 19044 | 7278 | 8887 | 11236 | 5875 | 11288 |
| | 16665 | 5242 | 4870 | 10506 | 725 | 15807 | 18290 | 11584 | 11815 | 10709 | 5665 | 8913 |
| | 4443 | 4446 | 4940 | 18124 | 18126 | 6102 | 10718 | 13110 | 5792 | 18314 | 9497 | 3370 |
| | 3367 | 11346 | 7951 | 13887 | 1123 | 7016 | 8221 | 13167 | 1644 | 9351 | 6673 | 16460 |
| | 18895 | 16626 | 1321 | 13321 | 3707 | 6276 | 7282 | 17173 | 5804 | 19036 | 12603 | 15028 |
| | 11016 | 18046 | 8269 | 8121 | 2935 | 14015 | 17073 | 16077 | 9816 | 3949 | 6418 | 11142 |
| | 17987 | 1761 | 15163 | 15613 | 15594 | 15124 | 15595 | 15162 | 15146 | 15144 | 15126 | 15138 |
| | 15121 | 15140 | 15164 | 15139 | 3828 | 3810 | 3832 | 3814 | 3796 | 16726 | 10777 | 13774 |
| | 13776 | 10726 | 11111 | 10708 | 10724 | 10729 | 11982 | 13771 | 11437 | 8696 | 18408 | 9083 |
| | 11185 | 5772 | 5773 | 5793 | 5795 | 7325 | 5718 | 5716 | 5775 | 7308 | 7313 | 11294 |
| | 13971 | 13968 | 13919 | 13986 | 13966 | 13898 | 13983 | 13941 | 13948 | 5742 | 5738 | 7755 |
| | 7753 | 5740 | 5809 | 5753 | 5776 | 5755 | 17404 | 5756 | 5771 | 5263 | 13375 | 13376 |
| | 8038 | 14491 | 18265 | 7335 | 17735 | 1470 | 6663 | 1478 | 1476 | 1455 | 1451 | 1935 |
| | 1473 | 8041 | 1937 | 1458 | 1933 | 1452 | 5249 | 1447 | 11296 | 11297 | 11282 | 11259 |
| | 11277 | 11299 | 11279 | 11417 | 11344 | 11415 | 11258 | 2990 | 14315 | 10158 | 2987 | 18033 |
| | 18144 | 18603 | 18600 | 18147 | 1821 | 1893 | 2985 | 2986 | 2989 | 6848 | 17794 | 8531 |
| | 8557 | 8554 | 8535 | 8527 | 8550 | 8751 | 9638 | 9616 | 9639 | 9615 | 9620 | 9052 |
| | 9612 | 8994 | 8992 | 8920 | 8924 | 3380 | 10785 | 6038 | 10491 | 4075 | 16618 | 7274 |
| | 6061 | 5955 | 7685 | 17176 | 11024 | 17188 | 5903 | 8096 | 8061 | 16575 | 16559 | 16506 |
| | 16597 | 10546 | 17145 | 7669 | 5958 | 8947 | 8927 | 8930 | 8925 | 9016 | 9019 | 8957 |
| | 8984 | 8988 | 8990 | 9023 | 6337 | 5820 | 5822 | 9051 | 7330 | 5064 | 9053 | 18015 |
| | 11669 | 5821 | 14528 | 14509 | 5813 | 15700 | 2445 | 11351 | 6436 | 14764 | 8797 | 13073 |
| | 17133 | | | | | | | | | | | |
| 340: | 13196 | 16439 | 6745 | 4610 | 11899 | 10523 | 19022 | 5232 | 11306 | 2056 | 2570 | 18196 |
| | 609 | 5025 | 5019 | 7865 | 15314 | 2678 | 12655 | 9546 | 9454 | 13253 | 18958 | 1923 |
| | 4335 | 9039 | 11412 | 8309 | 7587 | 15840 | 8854 | 5981 | 9219 | 16268 | 15747 | 4154 |
| | 6311 | 13498 | 4599 | 5366 | 3114 | 9197 | 17805 | 3156 | 14735 | 1918 | 13226 | 12950 |
| | 7323 | 7733 | 8437 | 9356 | 12112 | 17458 | 16494 | 13907 | 17075 | 9200 | 9250 | 9276 |
| | 9252 | 9278 | 9279 | 9281 | 6045 | 5162 | 7615 | 7595 | 8879 | 7374 | 9867 | 6042 |
| | 7749 | 8020 | 3743 | 8718 | 16238 | 16530 | 15604 | 18077 | 14517 | 14553 | 1871 | 1069 |
| | 2878 | 2845 | 12697 | 9970 | 12964 | 12965 | 3572 | 17241 | 4279 | 18703 | 616 | 17038 |
| | 17036 | 17007 | 17009 | 17034 | 17035 | 17003 | 17004 | 2716 | 1388 | 14685 | 12624 | 3453 |
| | 2426 | 4819 | 12501 | 3673 | 10048 | 1499 | 2916 | 4850 | 5117 | 7647 | 14030 | 9934 |
| | 15766 | 13237 | 539 | 11479 | 18921 | 7137 | 17775 | 5670 | 16492 | 18336 | 18337 | 1862 |
| | 6718 | 11040 | 13556 | 3974 | 6965 | 5054 | 3081 | 6968 | 7212 | 13037 | 16679 | 6364 |
| | 2629 | 2077 | 3766 | 6851 | 9951 | 7731 | 9942 | 5707 | 15735 | 10648 | 11283 | 2381 |
| | 2363 | 18601 | 10074 | 3268 | 2684 | 4642 | 9218 | 664 | 2494 | 2601 | 8219 | 17656 |
| | 10990 | 7785 | 3331 | 5146 | 4493 | 4620 | 2917 | 16768 | 15720 | 8671 | 15843 | 9645 |
| | 5541 | 6103 | 11053 | 14038 | 15349 | 2088 | 795 | 3297 | 1000 | 1559 | 12161 | 15353 |
| | 13769 | 2270 | 10599 | 11748 | 18825 | 18373 | 3182 | 10477 | 13228 | 5351 | 5273 | 17329 |
| | 10825 | 12254 | 8870 | 1199 | 4883 | 10343 | 12967 | 4238 | 1562 | 17883 | 11472 | 17019 |
| | 16370 | 10801 | 18263 | 14621 | 12659 | 15703 | 593 | 11508 | 12110 | 12723 | 12111 | 4392 |
| | 11861 | 4169 | 14911 | 16024 | 18137 | 17510 | 10528 | 18935 | 14916 | 17827 | 18611 | 15191 |
| | 12909 | 18197 | 1658 | 2086 | 16157 | 11091 | 12303 | 13953 | 12295 | 13403 | 14690 | 527 |
| | 3357 | 2859 | 11106 | 17963 | 1655 | 16934 | 15042 | 16307 | 2152 | 3172 | 3999 | 2695 |
| | 4223 | 1968 | 14466 | 15787 | 5255 | 12229 | 11570 | 11600 | 15937 | 7082 | 5673 | 6369 |
| | 8380 | 5325 | 3322 | 3328 | 5672 | 6368 | 13585 | 11692 | 17220 | 3531 | 3073 | 1889 |
| | 8613 | 17603 | 13282 | 6059 | 14374 | 6092 | 15505 | 3382 | 10113 | 9943 | 9960 | 13705 |
| | 10510 | 12419 | 8371 | 1356 | 697 | 2104 | 868 | 15905 | 6254 | 10906 | 12136 | 9705 |
| | 6214 | 589 | 2558 | 7015 | 7333 | 7345 | 7340 | 15278 | 15258 | 15276 | 7342 | 4805 |
| | 10215 | 18817 | 18643 | 12946 | 1331 | 1333 | 11882 | 13568 | 2641 | 9802 | 10173 | 17561 |
| | 11973 | 6328 | 16066 | 13399 | 15310 | 10568 | 6842 | 4296 | 9829 | 12919 | 13707 | 6529 |
| | 6625 | 1039 | 5395 | 4067 | 4526 | 9438 | 10350 | 15249 | 15857 | 13015 | 9800 | 17845 |
| | 3551 | 16820 | 7979 | 1633 | 9827 | 7991 | 9824 | 11672 | 9865 | 9204 | 9284 | 9220 |
| | 9249 | 8579 | 9175 | 9246 | 8549 | 9173 | 9248 | 8563 | 9232 | 9203 | 8578 | 8559 |
| | 9172 | 9178 | 8585 | 8581 | 8552 | 8556 | 9176 | 8587 | 13212 | 10149 | 13765 | 9201 |
| | 9226 | 14964 | 1718 | 7993 | 12641 | 18059 | 9231 | 3494 | 14770 | 9563 | 7665 | 10399 |
| | 4688 | 6342 | 7025 | 16979 | 16279 | 16302 | 16981 | 16413 | 16433 | 16414 | 16330 | 16333 |
| | 16331 | 16971 | 16296 | 16350 | 16954 | 16356 | 16974 | 16353 | 16300 | 16431 | 16304 | 16292 |
| | 16357 | 16955 | 16952 | 16325 | 16385 | 16435 | 16411 | 16410 | 16280 | 16430 | 16957 | 16354 |
| | 16387 | 16985 | 16415 | 16327 | 16455 | 16457 | 16390 | 16380 | 16950 | 16436 | 16382 | 16274 |
| | 16452 | 16456 | 16278 | 16453 | 5858 | 2370 | 14410 | 18969 | 3274 | 1393 | 8975 | 573 |
| | 7715 | 15030 | 1249 | 14601 | 17639 | 7403 | 1504 | 8265 | 10515 | 8316 | 15104 | 1901 |
| | 14063 | 11766 | 12976 | 11736 | 12162 | 1902 | 7470 | 15551 | 8361 | 10367 | 14060 | 8052 |
| | 9801 | 9803 | 7474 | 1051 | 2959 | 4990 | 7193 | 12916 | 17670 | 12887 | 10565 | 16240 |
| | 8866 | 11564 | 12294 | 12293 | 17789 | 14742 | 13578 | 3256 | | | | |
| 341: | 13280 | 7465 | 13170 | 13488 | 8094 | 7023 | 15591 | 15585 | 15589 | 13440 | 10740 | 14846 |
| | 15781 | 7542 | 4997 | 6793 | 6530 | 15127 | 14107 | 14099 | 12692 | 12638 | 6743 | 8397 |
| | 8398 | 12234 | 12202 | 12231 | 12184 | 8401 | 12178 | 1852 | 18620 | 17417 | 1931 | 18095 |
| | 18096 | 18081 | 18076 | 17392 | 17346 | 1795 | 1793 | 17515 | 17496 | 18138 | 17518 | 18108 |
| | 8418 | 3043 | 18459 | 8099 | 9311 | 16771 | 2036 | 14555 | 8712 | 1468 | 4413 | 4414 |
| | 4416 | 4436 | 4435 | 4357 | 4355 | 4371 | 4376 | 3798 | 3797 | 3315 | 11764 | 5938 |
| | 3236 | 15423 | 18556 | 1084 | 9329 | 9332 | 9334 | 9352 | 9349 | 9353 | 9355 | 9354 |
| | 1556 | 12179 | 7144 | 4314 | 7509 | 15131 | 13118 | 16078 | 945 | 13430 | 18194 | 4956 |
| | 6929 | 4783 | 12306 | 9385 | 12690 | 12672 | 4342 | 13055 | 13054 | 7021 | 4081 | 7703 |
| | 3033 | 17154 | 9984 | 15399 | 7217 | 9277 | 13222 | 13034 | 15248 | 1463 | 2015 | 17433 |
| | 12644 | 15941 | 10807 | 3266 | 8742 | 1972 | 3510 | 9558 | 4266 | 626 | 7388 | 14560 |
| | 7227 | 13555 | 17967 | 4546 | 11878 | 8700 | 17272 | 18466 | 1060 | 3720 | 12985 | 9961 |
| | 18869 | 12732 | 8954 | 2752 | 13820 | 10361 | 15865 | 2500 | 10465 | 18069 | 18784 | 16053 |
| | 775 | 2727 | 16534 | 13326 | 15757 | 12838 | 3693 | 13785 | 10142 | 11449 | 11354 | 9684 |
| | 5074 | 9660 | 12700 | 15166 | 15169 | 13456 | 13485 | 13469 | 13473 | 13487 | 13506 | 13505 |
| | 12661 | 12663 | 5471 | 17875 | 13205 | 16908 | 17054 | 9363 | 989 | 988 | 4140 | 6633 |
| | 6608 | 6592 | 6591 | 6631 | 6573 | 6635 | 11985 | 6615 | 6572 | 6662 | 6638 | 3200 |
| | 1012 | 10745 | 15212 | 14003 | 8819 | 3396 | 13373 | 17558 | 19044 | 7278 | 8887 | 16665 |
| | 5875 | 11288 | 11236 | 5242 | 4870 | 725 | 10506 | 11584 | 15807 | 18290 | 10709 | 5665 |
| | 8913 | 4443 | 4446 | 18124 | 18126 | 6102 | 10718 | 13110 | 5792 | 18314 | 9497 | 3370 |
| | 3367 | 15852 | 11346 | 7951 | 13887 | 1123 | 7016 | 8221 | 1644 | 13167 | 9351 | 16460 |
| | 6673 | 18895 | 5487 | 3178 | 16626 | 1321 | 3707 | 6276 | 7282 | 13321 | 5804 | 17173 |
| | 12603 | 18046 | 8269 | 2935 | 14015 | 8121 | 17073 | 16077 | 9816 | 3949 | 6418 | 11142 |
| | 6209 | 1761 | 15146 | 15163 | 15613 | 15594 | 15162 | 15595 | 15124 | 15121 | 15144 | 15140 |
| | 15164 | 15138 | 15126 | 15139 | 3828 | 3832 | 3814 | 3810 | 3796 | 16726 | 10777 | 13774 |
| | 13776 | 10726 | 11111 | 10708 | 10724 | 10729 | 11982 | 13771 | 11437 | 8696 | 18408 | 9083 |
| | 11185 | 5773 | 5772 | 5793 | 5795 | 7325 | 5718 | 5716 | 5775 | 7308 | 7313 | 11294 |
| | 13971 | 13968 | 13986 | 13898 | 13919 | 13966 | 13983 | 13948 | 13941 | 7755 | 7753 | 5738 |
| | 5742 | 5740 | 5809 | 5753 | 5776 | 5755 | 17404 | 5756 | 5771 | 5263 | 13376 | 13375 |
| | 8038 | 14491 | 18265 | 7335 | 17735 | 1451 | 1470 | 8041 | 1933 | 1478 | 1455 | 1935 |
| | 1473 | 1458 | 6663 | 1476 | 1937 | 1452 | 5249 | 1447 | 11296 | 11297 | 11299 | 11259 |
| | 11282 | 11277 | 11279 | 11417 | 11344 | 11415 | 11258 | 2990 | 14315 | 10158 | 2987 | 18033 |
| | 18603 | 18144 | 18147 | 18600 | 1821 | 1893 | 2985 | 2986 | 2989 | 6848 | 17794 | 8531 |
| | 8557 | 8554 | 8535 | 8527 | 8550 | 8751 | 9616 | 9638 | 9615 | 9620 | 9639 | 9052 |
| | 9612 | 8994 | 8992 | 8924 | 8920 | 3380 | 7669 | 10785 | 17145 | 5958 | 16618 | 16506 |
| | 11024 | 10491 | 4075 | 7685 | 16559 | 8096 | 6038 | 5955 | 17188 | 7274 | 6061 | 17176 |
| | 16597 | 8061 | 5903 | 16575 | 10546 | 8947 | 8927 | 8925 | 8930 | 9019 | 9016 | 8984 |
| | 8957 | 8988 | 8990 | 9023 | 6337 | 5820 | 5822 | 9051 | 7330 | 5064 | 9053 | 18015 |
| | 11669 | 5821 | 14509 | 14528 | 5813 | 15700 | 339 | 2445 | 11351 | 6436 | 14764 | 8797 |
| | 13073 | 17133 | | | | | | | | | | |
| 342: | 4275 | 14267 | 13342 | 6967 | 16887 | 3675 | 9675 | 6057 | 3840 | 17900 | 16902 | 18661 |
| | 10421 | 17260 | 3986 | 15808 | 7849 | 8997 | 16487 | 15022 | 4823 | 12754 | 10395 | 8534 |
| | 13581 | 2017 | 5522 | 7701 | 2701 | 9728 | 17790 | 12191 | 4072 | 6250 | 7712 | 7019 |
| | 12120 | 7086 | 4916 | 18255 | 8520 | 18744 | 13466 | 18395 | 2589 | 9658 | 17251 | 12180 |
| | 4996 | 5774 | 10305 | 4826 | 3919 | 11530 | 6902 | 2861 | 4554 | 7041 | 2825 | 18879 |
| | 7681 | 3326 | 2822 | 8206 | 1820 | 3218 | 15526 | 18435 | 14428 | 14561 | 13249 | 10813 |
| | 11879 | 4832 | 15268 | 2787 | 6653 | 12610 | 13972 | 3977 | 7443 | 4056 | 17876 | 12742 |
| | 17551 | 9095 | 830 | 12330 | 18456 | 5153 | 17559 | 14538 | 3441 | 4281 | 6388 | 929 |
| | 12203 | 12005 | 16713 | 14490 | 3329 | 17610 | 15818 | 10223 | 1832 | 17892 | 16739 | 19247 |
| | 19209 | 8382 | 6262 | 3193 | 5986 | 8544 | 10873 | 2844 | 11163 | 3318 | 5155 | 18764 |
| | 11864 | 6332 | 19115 | 19114 | 11647 | 8254 | 9757 | 17455 | 18569 | 13668 | 16305 | 19055 |
| | 18604 | 14213 | 19057 | 18621 | 18578 | 14211 | 18907 | 13293 | 13257 | 13319 | 13318 | 13255 |
| | 13233 | 13274 | 13240 | 1288 | 14112 | 705 | 1322 | 1313 | 14151 | 14149 | 14096 | 669 |
| | 1265 | 703 | 700 | 639 | 13682 | 14145 | 14134 | 647 | 1259 | 14146 | 1243 | 14113 |
| | 1268 | 14130 | 13704 | 1317 | 707 | 14178 | 14148 | 14116 | 736 | 757 | 756 | 677 |
| | 14119 | 13679 | 14172 | 13688 | 14097 | 667 | 782 | 14088 | 783 | 678 | 14174 | 734 |
| | 14089 | 729 | 642 | 791 | 758 | 759 | 1233 | 761 | 787 | 784 | 1238 | 13686 |
| | 5633 | 3144 | 14179 | 6378 | 18102 | 19076 | 19103 | 19099 | 19102 | 19090 | 19088 | 18743 |
| | 9920 | 13711 | 13723 | 1195 | 19220 | 1467 | 17833 | 10277 | 5278 | 7877 | 6039 | 5512 |
| | 6020 | 6019 | 6016 | 6015 | 5994 | 5995 | 6012 | 5993 | 5515 | 5032 | 11146 | 19134 |
| | 2994 | 17095 | 8583 | 3311 | 11705 | 15026 | 10508 | 1167 | 12675 | 10097 | 1101 | 1091 |
| | 5963 | 8953 | 10466 | | | | | | | | | |
| 343: | 4095 | 15046 | 10521 | 1628 | 9595 | 7433 | 7621 | 18399 | 1383 | 5781 | 12525 | 14082 |
| | 6175 | 5446 | 17124 | 2637 | 14579 | 8588 | 804 | 8650 | 5284 | 18904 | 8106 | 6336 |
| | 4263 | 11332 | 12874 | 6478 | 13913 | 9066 | 13379 | 17596 | 18592 | 13115 | 2010 | 2419 |
| | 4845 | 14997 | 18740 | 618 | 3431 | 3970 | 10518 | 14706 | 16668 | 9305 | 10374 | 18493 |
| | 5038 | 10849 | 14836 | 2271 | 992 | 9179 | 16837 | 8717 | 10496 | 18477 | 7920 | 10916 |
| | 3559 | 10271 | 17999 | 4030 | 18694 | 6969 | 4377 | 9285 | 2666 | 11862 | 10774 | 13447 |
| | 10398 | 3876 | 2057 | 18631 | 17938 | 17050 | 10348 | 604 | 6712 | 2475 | 19003 | 2910 |
| | 16091 | 2140 | 10720 | 3323 | 9194 | 14883 | 11223 | 19145 | 10602 | 657 | 17840 | 11593 |
| | 11595 | 18216 | 16978 | 13665 | 12968 | 15761 | 3402 | 4008 | 16708 | 17466 | 9556 | 11066 |
| | 6487 | 5250 | 16702 | 11261 | 15834 | 16616 | 4700 | 4701 | 9490 | 17897 | 6730 | 3210 |
| | 1853 | 14666 | 10844 | 14663 | 13655 | 14660 | 4649 | 6868 | 4648 | 6855 | 16252 | 4885 |
| | 1523 | 15210 | 12821 | 1183 | 15471 | 2051 | 5972 | 4643 | 3628 | 1352 | 5987 | 14639 |
| | 16535 | 9679 | 14991 | 11416 | 7257 | 2330 | 4274 | 9585 | 6918 | 2388 | 17101 | 4046 |
| | 16235 | 12769 | 4685 | 881 | 5507 | 11957 | 3735 | 14383 | 16187 | 2043 | 5111 | 10878 |
| | 17577 | 19147 | 17755 | 12154 | 7436 | 13269 | 13270 | 4312 | 7297 | 2111 | 3014 | 9674 |
| | 4608 | 10651 | 11599 | 337 | 2316 | 13358 | | | | | | |
| 344: | 5300 | 3500 | 4027 | 7686 | 9421 | 4052 | 8763 | 14058 | 5561 | 2575 | 18884 | 15708 |
| | 4543 | 1686 | 13252 | 13166 | 4602 | 14826 | 18707 | 5525 | 8193 | 7080 | 17793 | 986 |
| | 9233 | 14403 | | | | | | | | | | |
| 345: | 5980 | 9971 | 4070 | 2303 | 9479 | 8998 | 7155 | 11775 | 933 | | | |
| 346: | 18418 | 12504 | 14095 | 1860 | 5339 | 1942 | 18388 | 11380 | 752 | 11688 | 14723 | 7312 |
| | 18500 | 6219 | 12070 | 1382 | 15676 | 13413 | 19034 | 10573 | 16153 | 13734 | 18099 | 17389 |
| | 1808 | 8009 | 14640 | 13476 | 14408 | 8018 | 7100 | 3096 | 2598 | 13386 | 625 | 11250 |
| | 11018 | 3111 | 10260 | 18653 | 2016 | 637 | 10620 | 13082 | 2021 | 11275 | 8483 | 13851 |
| | 15961 | 10302 | 12726 | 18421 | 6212 | 3159 | 2443 | 3658 | | | | |
| 347: | 11270 | 17077 | 4946 | 4945 | 15527 | 18554 | 15862 | 15870 | 15860 | 13080 | 12083 | 14086 |
| | 18704 | 15951 | 14593 | 5514 | 8137 | 18330 | 17072 | 5748 | 4003 | 7232 | 9301 | 8840 |
| | 14744 | 3550 | 6166 | 17459 | 15531 | 4830 | 12695 | 14036 | 7418 | 7827 | 14592 | 3352 |
| | 16349 | 7118 | 15429 | 5566 | 10536 | 2972 | 15722 | 3016 | 1928 | 1508 | 3985 | 14595 |
| | 13481 | 9084 | 14959 | 13221 | 10228 | 16121 | 15492 | 12993 | 8591 | 15602 | 2592 | 11832 |
| | 1949 | 9134 | 9588 | 2207 | 16909 | 5169 | 5148 | 11680 | 17594 | 10679 | 5728 | 6123 |
| | 4235 | 11214 | 15511 | 12368 | 11088 | 18835 | 11905 | 10115 | 15436 | 15660 | 7540 | 3170 |
| | 11393 | 10848 | 15970 | 12714 | 2257 | 16752 | 3677 | 3857 | 6325 | 5243 | 14768 | 15918 |
| | 18582 | 14405 | 10218 | 11890 | 9037 | 16519 | 6235 | 12549 | 18827 | 2287 | 12400 | 15098 |
| | 7528 | | | | | | | | | | | |
| 348: | 13176 | 4345 | 6836 | 18766 | 3513 | 16800 | 19180 | 2524 | 12509 | 5751 | 7573 | 4388 |
| 349: | 11912 | 5568 | 6508 | 3945 | 11062 | 10942 | 8564 | 5617 | 16983 | 5480 | 19110 | 2468 |
| | 3581 | 10481 | 7817 | 10475 | 5989 | 7810 | 3957 | 4139 | 6900 | 9519 | 8199 | 1162 |
| | 17815 | 16982 | 13169 | 11144 | 14543 | 490 | 5095 | 4658 | 5436 | 2277 | 16315 | 7320 |
| | 8369 | 7909 | 7971 | 14917 | 4572 | 5603 | 5011 | | | | | |
| 351: | 1944 | 3388 | 11320 | 11302 | 11319 | 11317 | 11305 | 7165 | 1174 | 11523 | 18349 | 13775 |
| | 7657 | 7283 | 3563 | 13470 | 3951 | 18978 | 3197 | 3932 | 3046 | 3062 | 3065 | 3063 |
| | 5791 | 3938 | 11517 | 12121 | 11055 | 4011 | 16549 | 3495 | 2533 | 3650 | 15029 | 17486 |
| | 451 | 17381 | 4511 | 14953 | 9732 | 15182 | 2627 | 10876 | 18227 | 511 | 19073 | 8217 |
| | 12521 | 15724 | 4425 | 15491 | 7189 | 8088 | 17498 | 17501 | 18186 | | | |
| 352: | 13975 | 6206 | 17120 | 13306 | 11947 | 1705 | 16008 | 3435 | 19023 | 7536 | 6974 | 2031 |
| | 13640 | 1494 | 18480 | 11512 | 3888 | 7159 | 18706 | 6893 | 11448 | 714 | 4753 | 10937 |
| | 6126 | 6218 | 8698 | 13988 | 10384 | 16502 | 11673 | 19019 | 10167 | 7265 | 4613 | 9695 |
| | 14636 | 17295 | 14469 | 15141 | 2783 | | | | | | | |
| 353: | 8835 | 11783 | 9669 | 12756 | 2337 | 13479 | 9821 | 8090 | 13818 | | | |
| 354: | 18918 | 14457 | | | | | | | | | | |
| 355: | 17083 | 10967 | 5149 | 19161 | 12075 | 11238 | 18924 | 4468 | 11390 | 10560 | 17452 | 17271 |
| | 17530 | 2078 | | | | | | | | | | |
| 356: | 16848 | 17598 | 13404 | 2320 | 4652 | 6293 | 12539 | 3765 | 8280 | 13130 | 520 | 3952 |
| | 9848 | 15670 | | | | | | | | | | |
| 357: | 3703 | 18488 | 18007 | 3371 | 18022 | 12829 | 4322 | 10690 | 1141 | 15264 | 8036 | 7857 |
| | 924 | 975 | 7855 | 7926 | 325 | 326 | 4938 | 11635 | 10188 | 3795 | 3794 | 974 |
| | 7376 | 8980 | 2807 | 2826 | 15414 | 3221 | 11000 | 16877 | 358 | 11643 | 14101 | 17431 |
| | 14104 | 11922 | 14106 | 14118 | 14103 | 11917 | 14117 | 11877 | 9156 | 15521 | 15519 | 15512 |
| | 2076 | 7599 | 18286 | 17450 | 10636 | 10883 | 19245 | 2706 | 17448 | 17445 | 13484 | 12363 |
| | 8462 | 8465 | 1521 | 11661 | 18323 | 10495 | 18481 | 1858 | 17901 | 1025 | 15261 | 14337 |
| | 11009 | 802 | 1489 | 9751 | 5535 | 19225 | 4741 | 8379 | 9986 | 5615 | 9570 | 18249 |
| | 1579 | 18874 | 14957 | 2833 | 13097 | 11855 | 17444 | 2048 | 5863 | 16811 | 12374 | 13302 |
| | 5440 | 14857 | 13516 | 10812 | 9419 | 6771 | 11768 | 12141 | 3543 | 6242 | 11404 | 18052 |
| | 1963 | 2636 | 7150 | 2875 | 5500 | 15645 | 3024 | 19039 | 805 | 11538 | 2943 | 12915 |
| | 17169 | 4471 | 15921 | 17129 | 2420 | 9530 | 8029 | 16041 | 11094 | 10747 | 13795 | 2144 |
| | 17511 | 12731 | 6924 | 15147 | 18864 | 7598 | 2259 | 7950 | 18104 | 7123 | 13183 | 9498 |
| | 651 | 5099 | 8353 | 13883 | 4389 | 2662 | 11940 | 19159 | 16364 | 4653 | 14754 | 12986 |
| | 3439 | 9888 | 4998 | 8161 | 19192 | 17068 | 10691 | 934 | 606 | 769 | 8468 | 18297 |
| | 1397 | 3167 | 10721 | 18909 | 18127 | 820 | 8767 | 11231 | 10209 | 18039 | 4769 | 4271 |
| | 914 | 5454 | 17761 | 1436 | 16749 | 12983 | 7990 | 3461 | 11482 | 2488 | 2605 | 15929 |
| | 19116 | 1132 | 11154 | 5499 | 16543 | 12081 | 4575 | 10781 | 15011 | 17427 | 14182 | 11494 |
| | 4324 | 686 | 11427 | 8119 | 16545 | 1033 | 15056 | 15910 | 7850 | 13576 | 15542 | 16151 |
| | 16155 | 16095 | 13014 | 16069 | 3257 | 6401 | 17505 | 17504 | 17525 | 17524 | 2022 | 7377 |
| | 432 | 16819 | 10332 | 2411 | 10331 | 2410 | 12098 | 12865 | 3223 | 4128 | 11048 | 1117 |
| | 13770 | 13767 | 16781 | 16777 | 16779 | 16801 | 17741 | 16774 | 4860 | 15510 | 12777 | 12778 |
| | 14071 | 14067 | 14053 | 14069 | 14091 | 14072 | 14075 | 8376 | 11001 | 9987 | 7853 | 5184 |
| | 7393 | 7395 | 3219 | 3220 | 17517 | 3203 | 17996 | 3205 | 17513 | 10899 | 3204 | 18474 |
| | 18023 | 600 | 7911 | 16191 | 13238 | 15975 | 4924 | 9729 | 6091 | 4326 | 6820 | 13828 |
| | 4812 | 9933 | 17784 | 16424 | 4768 | 15749 | 7309 | 10904 | 2071 | 4194 | 15043 | 2025 |
| | 10355 | 5253 | 18478 | 13347 | 18509 | 13344 | 18011 | 8209 | 8302 | 10221 | 15948 | 8147 |
| | 11081 | 18398 | 17612 | 16052 | 2853 | 15154 | 15669 | 4108 | 413 | 16888 | 8441 | 3479 |
| | 1048 | 17549 | 9749 | 17291 | 14470 | 2008 | 13574 | 5988 | 3547 | 13320 | 12107 | 4540 |
| | 6031 | 16301 | 6076 | 18372 | 10579 | 4109 | 11366 | 19231 | 11108 | 8482 | 5412 | 12150 |
| | 14436 | 18176 | 1610 | 674 | 6891 | 13730 | 8642 | 6095 | 3638 | 993 | 17479 | 11156 |
| | 6014 | 4301 | 1954 | 10818 | 7039 | 15055 | 12418 | 10003 | 1924 | 13798 | 11179 | 15926 |
| | 13552 | 9569 | 18113 | 9432 | 15846 | 14535 | 3145 | 12007 | 16132 | 12934 | 1538 | 16847 |
| | 15583 | 6741 | 5534 | 14502 | 4641 | 7188 | 15672 | 4220 | 11219 | 12375 | 7172 | 3983 |
| | 2230 | 6072 | 5854 | 17508 | 17766 | 18490 | 15885 | 4617 | 4368 | 16850 | 13940 | 3991 |
| | 1557 | 11615 | 2624 | 18508 | 18457 | 10864 | 18750 | 6697 | 1128 | 12487 | 18977 | 5445 |
| | 11199 | 10746 | 16932 | 5601 | 16270 | 559 | 5072 | 16012 | 1609 | 13543 | 18010 | 5876 |
| | 18551 | 11710 | 16973 | 8611 | 17786 | 896 | 15150 | 6585 | 6520 | 13129 | 4965 | 18175 |
| | 2832 | 10945 | 3423 | 17125 | 18855 | 16525 | 1748 | 5964 | 7611 | 14612 | 11300 | 17123 |
| | 14105 | 1285 | 15156 | 11382 | 12956 | 17420 | 6607 | 6377 | 1873 | 5035 | 9405 | 13286 |
| | 8729 | 9963 | 8621 | 9241 | 13064 | 2473 | 14203 | 19067 | 17080 | 10484 | 16852 | 9591 |
| | 6583 | 5237 | 3885 | 11942 | 14024 | 5941 | 6783 | 2321 | 18484 | 18027 | 18467 | 18028 |
| | 17973 | 17972 | 17970 | 17969 | 5302 | 16042 | 6762 | 8202 | 17109 | 9781 | 3057 | 12195 |
| | 18035 | 14637 | 2924 | 5223 | 595 | 5651 | 5083 | 15409 | 17949 | 19109 | 11395 | 13131 |
| | 5389 | 6525 | 18579 | 18245 | 18559 | 15802 | 6580 | 13199 | 10789 | 12935 | 13695 | 14236 |
| | 5044 | 6962 | 15953 | 11413 | 2116 | 18736 | 3803 | 13906 | 7398 | 13922 | 18325 | 18513 |
| | 18472 | 328 | 16450 | 7353 | 7349 | 7351 | 7348 | 7218 | 7214 | 7201 | 7224 | 7220 |
| | 7200 | 2490 | 5078 | 333 | 15058 | 19237 | 15045 | 15907 | 16396 | 16398 | 15912 | 15057 |
| | 15636 | 16403 | 15079 | 15075 | 11327 | 18489 | | | | | | |
| 358: | 7510 | 2877 | 514 | 3654 | 3669 | 15610 | 18488 | 18007 | 3371 | 18022 | 8268 | 8266 |
| | 14102 | 360 | 359 | 329 | 362 | 357 | 11217 | 7969 | 9372 | 8541 | 7890 | 18428 |
| | 11507 | 18426 | 1141 | 15264 | 8036 | 7857 | 19000 | 613 | 8263 | 13146 | 19018 | 19126 |
| | 18606 | 6915 | 6347 | 13472 | 10628 | 8494 | 13268 | 2909 | 7855 | 11569 | 13550 | 6426 |
| | 2973 | 325 | 7807 | 14215 | 3026 | 12947 | 15493 | 326 | 15366 | 11129 | 6026 | 3133 |
| | 5061 | 2597 | 18920 | 2219 | 18525 | 4049 | 7576 | 18045 | 2110 | 5513 | 16459 | 19228 |
| | 14697 | 16792 | 16718 | 3560 | 18726 | 4631 | 9142 | 4307 | 4348 | 6586 | 4615 | 4629 |
| | 4995 | 4616 | 699 | 3687 | 5856 | 10188 | 3795 | 3794 | 974 | 7376 | 8980 | 9347 |
| | 9315 | 2807 | 2826 | 13328 | 18424 | 10646 | 5320 | 13791 | 17988 | 15414 | 3221 | 11000 |
| | 16877 | 11643 | 14101 | 17431 | 14104 | 11922 | 14106 | 14118 | 14103 | 11917 | 14117 | 11877 |
| | 9156 | 2076 | 7599 | 18286 | 17450 | 10636 | 10883 | 19245 | 2706 | 17448 | 17445 | 13484 |
| | 18745 | 15681 | 5992 | 2522 | 2523 | 15520 | 19014 | 6220 | 12363 | 8462 | 8465 | 1521 |
| | 11661 | 18323 | 10495 | 18481 | 1858 | 17901 | 1025 | 15261 | 14337 | 11009 | 802 | 1489 |
| | 9751 | 5535 | 19225 | 4741 | 8379 | 9986 | 5615 | 9570 | 18249 | 1579 | 18874 | 14957 |
| | 2833 | 13097 | 11855 | 17444 | 2048 | 5863 | 12374 | 16811 | 13302 | 5440 | 14857 | 13516 |
| | 10812 | 9419 | 6771 | 11768 | 5500 | 12141 | 3543 | 6242 | 11404 | 18052 | 1963 | 2636 |
| | 7150 | 2875 | 15645 | 3024 | 19039 | 12915 | 805 | 11538 | 2943 | 17169 | 4471 | 9797 |
| | 17129 | 2420 | 8029 | 9530 | 15921 | 2555 | 7989 | 1311 | 5122 | 16041 | 11094 | 10747 |
| | 13795 | 2144 | 17511 | 12731 | 6924 | 14303 | 15147 | 18864 | 7598 | 2259 | 7950 | 18104 |
| | 7123 | 13183 | 9498 | 651 | 5099 | 8353 | 13883 | 4389 | 2662 | 11940 | 19159 | 16364 |
| | 14754 | 18608 | 4653 | 12986 | 17068 | 3439 | 9888 | 4998 | 8161 | 19192 | 10691 | 934 |
| | 606 | 769 | 8468 | 18297 | 1397 | 3167 | 10721 | 18909 | 18127 | 820 | 11516 | 4271 |
| | 8767 | 11231 | 10209 | 18039 | 4769 | 914 | 2605 | 5454 | 17761 | 1436 | 12263 | 16749 |
| | 12435 | 12983 | 19116 | 7990 | 3461 | 11482 | 2488 | 14294 | 2357 | 15929 | 1132 | 11154 |
| | 5499 | 16543 | 12081 | 4575 | 10781 | 15011 | 17427 | 14182 | 11494 | 4324 | 686 | 1033 |
| | 15056 | 15910 | 7850 | 13576 | 15542 | 16151 | 16155 | 16095 | 11455 | 13014 | 16069 | 3257 |
| | 4390 | 6401 | 17505 | 17504 | 17525 | 17524 | 6799 | 3353 | 6792 | 2022 | 3424 | 3404 |
| | 3409 | 792 | 7377 | 432 | 16819 | 10332 | 2411 | 10331 | 2410 | 18533 | 12098 | 12865 |
| | 3223 | 4128 | 11048 | 1117 | 13770 | 13767 | 16781 | 16777 | 16779 | 16801 | 17741 | 16774 |
| | 4860 | 15510 | 12777 | 12778 | 14071 | 14067 | 14053 | 14069 | 14091 | 14072 | 14075 | 8376 |
| | 11001 | 9987 | 7853 | 5184 | 7393 | 7395 | 3219 | 3220 | 17517 | 3203 | 17996 | 3205 |
| | 17513 | 10899 | 3204 | 18474 | 18023 | 600 | 17986 | 18923 | 575 | 4812 | 7911 | 16191 |
| | 13238 | 15975 | 4924 | 9729 | 6091 | 4326 | 6820 | 13828 | 9933 | 17784 | 16424 | 4768 |
| | 14684 | 9518 | 15749 | 7309 | 13646 | 10904 | 2071 | 6198 | 4194 | 15043 | 2025 | 10355 |
| | 5253 | 13347 | 18509 | 13344 | 18011 | 8209 | 8302 | 10221 | 1303 | 14421 | 17237 | 10579 |
| | 15948 | 16301 | 1954 | 8147 | 11081 | 2008 | 13320 | 18398 | 17612 | 7188 | 16052 | 3547 |
| | 12007 | 3983 | 2853 | 15154 | 15669 | 4108 | 413 | 16888 | 8441 | 3479 | 1048 | 17549 |
| | 9749 | 17291 | 14470 | 13574 | 5988 | 12107 | 4540 | 6031 | 6076 | 18372 | 4109 | 11366 |
| | 19231 | 11108 | 8482 | 5412 | 12150 | 14436 | 18176 | 1610 | 674 | 6891 | 13730 | 8642 |
| | 6095 | 3638 | 993 | 17479 | 11156 | 6014 | 4301 | 10818 | 7039 | 15055 | 12418 | 10003 |
| | 1924 | 13798 | 11179 | 15926 | 13552 | 9569 | 18113 | 9432 | 15846 | 14535 | 3145 | 16132 |
| | 12934 | 1538 | 16847 | 15583 | 6741 | 5534 | 14502 | 15885 | 4641 | 15672 | 4220 | 11219 |
| | 12375 | 7172 | 2230 | 6072 | 5854 | 17508 | 17766 | 18490 | 4617 | 559 | 4368 | 16850 |
| | 13940 | 3991 | 1557 | 11615 | 2624 | 18508 | 18457 | 10864 | 18750 | 6697 | 1128 | 12487 |
| | 18977 | 5445 | 11199 | 10746 | 16932 | 5601 | 16270 | 5072 | 16012 | 1609 | 13543 | 18010 |
| | 6520 | 5876 | 18551 | 11710 | 16973 | 8611 | 17786 | 896 | 15150 | 6585 | 13129 | 4965 |
| | 18175 | 2832 | 10945 | 3423 | 17125 | 18855 | 16525 | 1748 | 5964 | 7611 | 6607 | 14612 |
| | 11300 | 17123 | 14105 | 1285 | 15156 | 11382 | 12956 | 17420 | 6377 | 1873 | 5035 | 9405 |
| | 13286 | 8729 | 9963 | 8621 | 9241 | 13064 | 2473 | 14203 | 19067 | 17080 | 10484 | 16852 |
| | 9591 | 6583 | 5237 | 3885 | 18484 | 18027 | 18467 | 18028 | 17973 | 17972 | 17970 | 17969 |
| | 5302 | 16042 | 6762 | 8202 | 17109 | 9781 | 3057 | 12195 | 18035 | 14637 | 2924 | 5223 |
| | 5651 | 595 | 5083 | 15409 | 17949 | 19109 | 11395 | 8126 | 3348 | 12648 | 1969 | 13131 |
| | 5389 | 6525 | 18579 | 18245 | 18559 | 15802 | 6580 | 13199 | 10789 | 12935 | 13695 | 14236 |
| | 5044 | 6962 | 15953 | 11413 | 2116 | 18736 | 11857 | 1258 | 1235 | 3803 | 1582 | 755 |
| | 13906 | 7398 | 13922 | 1826 | 18325 | 18513 | 18472 | 328 | 327 | 18793 | 6125 | 18821 |
| | 1158 | 6132 | 1546 | 12173 | 4539 | 12936 | 18946 | 18922 | 7353 | 7349 | 7351 | 7348 |
| | 7218 | 7214 | 7201 | 7224 | 7220 | 7200 | 2490 | 320 | 322 | 333 | 324 | 323 |
| | 321 | 319 | 316 | 15058 | 19237 | 15045 | 15907 | 16396 | 16398 | 15912 | 15057 | 15636 |
| | 16403 | 15079 | 15075 | 8656 | 18489 | 331 | 363 | 330 | 4045 | | | |
| 359: | 18246 | 18488 | 18007 | 3371 | 18022 | 16861 | 3411 | 13792 | 5847 | 5845 | 1141 | 15264 |
| | 8036 | 7857 | 5865 | 9815 | 5372 | 16808 | 5252 | 7273 | 7855 | 13022 | 13463 | 13462 |
| | 326 | 332 | 3697 | 4490 | 4040 | 4024 | 10188 | 3795 | 3794 | 974 | 7376 | 8980 |
| | 2807 | 2826 | 6239 | 15414 | 1879 | 3221 | 11000 | 16877 | 11643 | 14101 | 17431 | 14104 |
| | 11922 | 14106 | 14118 | 14103 | 11917 | 14117 | 11877 | 9156 | 15521 | 15519 | 15512 | 2076 |
| | 7599 | 18286 | 17450 | 10636 | 10883 | 19245 | 2706 | 17448 | 17445 | 13484 | 12363 | 8462 |
| | 8465 | 1521 | 11661 | 18323 | 10495 | 18481 | 1858 | 17901 | 1025 | 15261 | 14337 | 11009 |
| | 802 | 1489 | 9751 | 5535 | 19225 | 4741 | 8379 | 9986 | 5615 | 9570 | 18249 | 1579 |
| | 18874 | 14957 | 2833 | 13097 | 11855 | 17444 | 2048 | 5863 | 16811 | 12374 | 13302 | 5440 |
| | 14857 | 13516 | 10812 | 9419 | 6771 | 11768 | 12141 | 3543 | 6242 | 11404 | 18052 | 1963 |
| | 2636 | 7150 | 2875 | 5500 | 15645 | 3024 | 19039 | 805 | 11538 | 2943 | 12915 | 17169 |
| | 4471 | 17129 | 2420 | 9530 | 8029 | 15921 | 16041 | 11094 | 10747 | 13795 | 2144 | 17511 |
| | 12731 | 6924 | 15147 | 18864 | 7598 | 2259 | 7950 | 18104 | 7123 | 13183 | 9498 | 651 |
| | 5099 | 8353 | 13883 | 4389 | 2662 | 11940 | 19159 | 16364 | 4653 | 14754 | 12986 | 3439 |
| | 9888 | 4998 | 8161 | 19192 | 17068 | 10691 | 934 | 606 | 769 | 8468 | 18297 | 1397 |
| | 3167 | 10721 | 18909 | 18127 | 820 | 8767 | 11231 | 10209 | 18039 | 4769 | 4271 | 914 |
| | 5454 | 17761 | 1436 | 16749 | 12983 | 7990 | 3461 | 11482 | 2488 | 2605 | 15929 | 19116 |
| | 1132 | 11154 | 5499 | 16543 | 12081 | 4575 | 10781 | 15011 | 17427 | 14182 | 11494 | 4324 |
| | 686 | 8119 | 16545 | 1033 | 15056 | 15910 | 7850 | 13576 | 15542 | 16151 | 16155 | 16095 |
| | 13014 | 16069 | 3257 | 6401 | 17505 | 17504 | 17525 | 17524 | 2022 | 7377 | 432 | 16819 |
| | 10332 | 2411 | 10331 | 2410 | 12098 | 12865 | 3223 | 4128 | 11048 | 1117 | 13770 | 13767 |
| | 16781 | 16777 | 16779 | 16801 | 17741 | 16774 | 4860 | 15510 | 12777 | 12778 | 14071 | 14067 |
| | 14053 | 14069 | 14091 | 14072 | 14075 | 8376 | 11001 | 9987 | 7853 | 5184 | 7393 | 7395 |
| | 3219 | 3220 | 17517 | 3203 | 17996 | 3205 | 17513 | 10899 | 3204 | 18474 | 18023 | 600 |
| | 7911 | 16191 | 13238 | 15975 | 4924 | 9729 | 6091 | 4326 | 6820 | 13828 | 4812 | 9933 |
| | 17784 | 16424 | 4768 | 15749 | 7309 | 10904 | 2071 | 4194 | 15043 | 2025 | 10355 | 5253 |
| | 18478 | 13347 | 18509 | 13344 | 18011 | 8209 | 8302 | 10221 | 16888 | 15948 | 1610 | 8147 |
| | 11081 | 18398 | 17612 | 16052 | 2853 | 15154 | 15669 | 4108 | 413 | 8441 | 3479 | 1048 |
| | 17549 | 9749 | 17291 | 14470 | 2008 | 13574 | 5988 | 3547 | 13320 | 12107 | 4540 | 6031 |
| | 16301 | 6076 | 18372 | 10579 | 4109 | 11366 | 19231 | 11108 | 8482 | 5412 | 12150 | 14436 |
| | 18176 | 674 | 6891 | 13730 | 8642 | 6095 | 3638 | 993 | 17479 | 11156 | 6014 | 4301 |
| | 1954 | 10818 | 7039 | 15055 | 12418 | 10003 | 1924 | 13798 | 11179 | 15926 | 13552 | 9569 |
| | 18113 | 9432 | 15846 | 14535 | 3145 | 12007 | 16132 | 12934 | 1538 | 16847 | 15583 | 6741 |
| | 5534 | 14502 | 4641 | 7188 | 15672 | 4220 | 11219 | 12375 | 7172 | 3983 | 2230 | 6072 |
| | 5854 | 17508 | 17766 | 18490 | 15885 | 4617 | 4368 | 16850 | 13940 | 3991 | 1557 | 11615 |
| | 2624 | 18508 | 18457 | 10864 | 18750 | 6697 | 1128 | 12487 | 18977 | 5445 | 11199 | 10746 |
| | 16932 | 5601 | 16270 | 559 | 5072 | 16012 | 1609 | 13543 | 18010 | 5876 | 18551 | 11710 |
| | 16973 | 8611 | 17786 | 896 | 15150 | 6585 | 6520 | 13129 | 4965 | 18175 | 2832 | 10945 |
| | 3423 | 17125 | 18855 | 16525 | 1748 | 5964 | 7611 | 14612 | 11300 | 17123 | 14105 | 1285 |
| | 15156 | 11382 | 12956 | 17420 | 6607 | 6377 | 1873 | 5035 | 9405 | 13286 | 8729 | 9963 |
| | 8621 | 9241 | 13064 | 2473 | 14203 | 19067 | 17080 | 10484 | 16852 | 9591 | 6583 | 5237 |
| | 3885 | 11942 | 14024 | 5941 | 18484 | 18027 | 18467 | 18028 | 17973 | 17972 | 17970 | 17969 |
| | 5302 | 16042 | 6762 | 8202 | 17109 | 9781 | 3057 | 12195 | 18035 | 14637 | 2924 | 5223 |
| | 595 | 5651 | 5083 | 15409 | 17949 | 19109 | 11395 | 13131 | 5389 | 6525 | 18579 | 18245 |
| | 18559 | 15802 | 6580 | 13199 | 10789 | 12935 | 13695 | 14236 | 5044 | 6962 | 15953 | 11413 |
| | 2116 | 18736 | 3803 | 13906 | 7398 | 13922 | 18325 | 18513 | 18472 | 17557 | 328 | 15806 |
| | 15935 | 7353 | 7349 | 7351 | 7348 | 7218 | 7214 | 7201 | 7224 | 7220 | 7200 | 2490 |
| | 4329 | 7547 | 333 | 320 | 323 | 15058 | 19237 | 15045 | 15907 | 16396 | 16398 | 15912 |
| | 15057 | 15636 | 16403 | 15079 | 15075 | 10637 | 12507 | 18489 | 363 | | | |
| 360: | 18341 | 18488 | 18007 | 16264 | 3371 | 18022 | 7638 | 13822 | 1141 | 15264 | 9022 | 8036 |
| | 7857 | 2766 | 5222 | 7855 | 10380 | 9924 | 326 | 695 | 18994 | 17274 | 1593 | 18800 |
| | 10188 | 3795 | 3794 | 974 | 7376 | 8980 | 2807 | 2826 | 15414 | 3221 | 11000 | 16877 |
| | 358 | 11643 | 14101 | 17431 | 14104 | 11922 | 14106 | 14118 | 14103 | 11917 | 14117 | 11877 |
| | 9156 | 2076 | 7599 | 18286 | 17450 | 10636 | 10883 | 19245 | 2706 | 17448 | 17445 | 13484 |
| | 12363 | 8462 | 8465 | 1521 | 11661 | 18323 | 10495 | 18481 | 1858 | 17901 | 1025 | 15261 |
| | 14337 | 11009 | 802 | 1489 | 9751 | 5535 | 19225 | 4741 | 8379 | 9986 | 5615 | 9570 |
| | 18249 | 1579 | 18874 | 14957 | 2833 | 13097 | 11855 | 17444 | 2048 | 5863 | 16811 | 12374 |
| | 13302 | 5440 | 14857 | 13516 | 10812 | 9419 | 6771 | 11768 | 12141 | 3543 | 6242 | 11404 |
| | 18052 | 1963 | 2636 | 7150 | 2875 | 5500 | 15645 | 3024 | 19039 | 805 | 11538 | 2943 |
| | 12915 | 17169 | 4471 | 17129 | 2420 | 9530 | 8029 | 15921 | 16041 | 11094 | 10747 | 13795 |
| | 2144 | 17511 | 12731 | 6924 | 15147 | 18864 | 7598 | 2259 | 7950 | 18104 | 7123 | 13183 |
| | 9498 | 651 | 5099 | 8353 | 13883 | 4389 | 2662 | 11940 | 19159 | 16364 | 4653 | 14754 |
| | 12986 | 3439 | 9888 | 4998 | 8161 | 19192 | 17068 | 10691 | 934 | 606 | 769 | 8468 |
| | 18297 | 1397 | 3167 | 10721 | 18909 | 18127 | 820 | 8767 | 11231 | 10209 | 18039 | 4769 |
| | 4271 | 914 | 5454 | 17761 | 1436 | 16749 | 12983 | 7990 | 3461 | 11482 | 2488 | 19116 |
| | 2605 | 15929 | 1132 | 11154 | 5499 | 16543 | 12081 | 4575 | 10781 | 15011 | 17427 | 14182 |
| | 11494 | 4324 | 686 | 1033 | 15056 | 15910 | 7850 | 13576 | 15542 | 16151 | 16155 | 16095 |
| | 13014 | 16069 | 3257 | 6401 | 17505 | 17504 | 17525 | 17524 | 2022 | 7377 | 432 | 16819 |
| | 10332 | 2411 | 10331 | 2410 | 12098 | 12865 | 3223 | 4128 | 11048 | 1117 | 13770 | 13767 |
| | 16781 | 16777 | 16779 | 16801 | 17741 | 16774 | 4860 | 15510 | 12777 | 12778 | 14071 | 14067 |
| | 14053 | 14069 | 14091 | 14072 | 14075 | 8376 | 11001 | 9987 | 7853 | 5184 | 7393 | 7395 |
| | 3219 | 3220 | 17517 | 3203 | 17996 | 3205 | 17513 | 10899 | 3204 | 18474 | 18023 | 600 |
| | 7911 | 16191 | 13238 | 15975 | 4924 | 9729 | 6091 | 4812 | 4326 | 6820 | 13828 | 9933 |
| | 4768 | 17784 | 16424 | 15749 | 7309 | 10904 | 2071 | 4194 | 15043 | 2025 | 10355 | 5253 |
| | 13347 | 18509 | 13344 | 18011 | 8209 | 8302 | 10221 | 1048 | 15948 | 8147 | 11081 | 18398 |
| | 17612 | 11108 | 1538 | 16052 | 2853 | 15154 | 15669 | 4108 | 413 | 16888 | 8441 | 3479 |
| | 17549 | 9749 | 17291 | 14470 | 2008 | 13574 | 5988 | 3547 | 13320 | 12107 | 4540 | 6031 |
| | 16301 | 6076 | 18372 | 10579 | 4109 | 11366 | 19231 | 8482 | 5412 | 12150 | 14436 | 18176 |
| | 1610 | 674 | 6891 | 13730 | 8642 | 6095 | 3638 | 993 | 17479 | 11156 | 6014 | 4301 |
| | 1954 | 10818 | 7039 | 15055 | 12418 | 10003 | 1924 | 13798 | 11179 | 15926 | 13552 | 9569 |
| | 18113 | 9432 | 15846 | 14535 | 3145 | 12007 | 16132 | 12934 | 16847 | 15583 | 6741 | 5534 |
| | 14502 | 4641 | 7188 | 15672 | 4220 | 11219 | 12375 | 7172 | 3983 | 2230 | 6072 | 559 |
| | 5854 | 17508 | 17766 | 18490 | 15885 | 4617 | 4368 | 16850 | 13940 | 3991 | 1557 | 11615 |
| | 2624 | 18508 | 18457 | 10864 | 18750 | 6697 | 1128 | 12487 | 18977 | 5445 | 11199 | 10746 |
| | 16932 | 5601 | 16270 | 3423 | 5072 | 16012 | 1609 | 13543 | 18010 | 5876 | 18551 | 11710 |
| | 16973 | 8611 | 17786 | 896 | 15150 | 6585 | 6520 | 13129 | 4965 | 18175 | 2832 | 16525 |
| | 10945 | 17125 | 18855 | 1748 | 5964 | 7611 | 14612 | 11300 | 17123 | 14105 | 1285 | 15156 |
| | 11382 | 12956 | 10484 | 17420 | 6607 | 6377 | 1873 | 5035 | 9405 | 13286 | 8729 | 9963 |
| | 8621 | 9241 | 2473 | 13064 | 14203 | 19067 | 17080 | 16852 | 9591 | 6583 | 5237 | 3885 |
| | 18484 | 18027 | 18467 | 18028 | 17973 | 17972 | 17970 | 17969 | 5302 | 16042 | 6762 | 8202 |
| | 17109 | 9781 | 3057 | 12195 | 18035 | 14637 | 2924 | 5223 | 595 | 5651 | 5083 | 15409 |
| | 17949 | 19109 | 11395 | 13131 | 5389 | 6525 | 18579 | 18245 | 18559 | 15802 | 6580 | 13199 |
| | 10789 | 12935 | 13695 | 14236 | 5044 | 6962 | 15953 | 11413 | 2116 | 18736 | 3803 | 13906 |
| | 7398 | 13922 | 18325 | 18513 | 18472 | 16404 | 327 | 5056 | 7353 | 7349 | 7351 | 7348 |
| | 7218 | 7214 | 7201 | 7224 | 7200 | 7220 | 2490 | 2336 | 322 | 319 | 316 | 324 |
| | 15058 | 19237 | 15907 | 15045 | 16396 | 16398 | 15912 | 15057 | 15636 | 16403 | 15079 | 15075 |
| | 8658 | 18489 | 331 | | | | | | | | | |
| 361: | 1702 | 3903 | 18678 | 18677 | 16723 | 3824 | 7338 | 18840 | 5965 | 12718 | 13789 | |
| 362: | 16281 | 18488 | 18007 | 18022 | 3371 | 7061 | 7892 | 1141 | 15264 | 8036 | 7857 | 19191 |
| | 7170 | 3442 | 7855 | 11765 | 326 | 2525 | 12433 | 5350 | 10188 | 3795 | 3794 | 974 |
| | 7376 | 8980 | 2807 | 2826 | 15414 | 3221 | 11000 | 16877 | 358 | 11643 | 14101 | 17431 |
| | 14104 | 11922 | 14106 | 14118 | 14103 | 11917 | 14117 | 11877 | 9156 | 15521 | 15519 | 15512 |
| | 2076 | 7599 | 18286 | 17450 | 10636 | 10883 | 19245 | 2706 | 17448 | 17445 | 13484 | 12363 |
| | 8462 | 8465 | 1521 | 11661 | 18323 | 10495 | 18481 | 1858 | 17901 | 1025 | 15261 | 14337 |
| | 11009 | 802 | 1489 | 9751 | 5535 | 19225 | 4741 | 8379 | 9986 | 5615 | 9570 | 18249 |
| | 1579 | 18874 | 14957 | 2833 | 13097 | 11855 | 17444 | 2048 | 5863 | 16811 | 12374 | 13302 |
| | 5440 | 14857 | 13516 | 10812 | 9419 | 6771 | 11768 | 12141 | 3543 | 6242 | 11404 | 18052 |
| | 1963 | 2636 | 5500 | 7150 | 2875 | 15645 | 3024 | 19039 | 805 | 11538 | 2943 | 12915 |
| | 17169 | 4471 | 17129 | 2420 | 9530 | 8029 | 15921 | 16041 | 11094 | 10747 | 13795 | 2144 |
| | 17511 | 12731 | 6924 | 15147 | 18864 | 7598 | 2259 | 7950 | 18104 | 7123 | 13183 | 9498 |
| | 651 | 4653 | 5099 | 11940 | 8353 | 13883 | 4389 | 2662 | 8468 | 19159 | 16364 | 14754 |
| | 12986 | 3439 | 9888 | 4998 | 8161 | 19192 | 17068 | 10691 | 934 | 606 | 769 | 18297 |
| | 1397 | 3167 | 10721 | 18909 | 18127 | 820 | 8767 | 11231 | 10209 | 18039 | 4769 | 4271 |
| | 914 | 5454 | 17761 | 1436 | 16749 | 12983 | 7990 | 3461 | 11482 | 2488 | 2605 | 15929 |
| | 19116 | 1132 | 11154 | 5499 | 16543 | 12081 | 4575 | 10781 | 15011 | 17427 | 14182 | 11494 |
| | 4324 | 686 | 8119 | 16545 | 1033 | 15056 | 15910 | 7850 | 13576 | 15542 | 16151 | 16155 |
| | 16095 | 13014 | 16069 | 3257 | 6401 | 17505 | 17504 | 17525 | 17524 | 2022 | 7377 | 432 |
| | 16819 | 10332 | 2411 | 10331 | 2410 | 12098 | 12865 | 3223 | 4128 | 11048 | 1117 | 13770 |
| | 13767 | 16781 | 16777 | 16779 | 16801 | 17741 | 16774 | 4860 | 15510 | 12777 | 12778 | 14071 |
| | 14067 | 14053 | 14069 | 14091 | 14072 | 14075 | 8376 | 11001 | 9987 | 7853 | 5184 | 7393 |
| | 7395 | 3219 | 3220 | 17517 | 3203 | 17996 | 3205 | 17513 | 10899 | 3204 | 18474 | 18023 |
| | 600 | 7911 | 16191 | 15975 | 4924 | 13238 | 9729 | 6091 | 4326 | 6820 | 13828 | 4812 |
| | 9933 | 17784 | 16424 | 4768 | 15749 | 7309 | 10904 | 2071 | 4194 | 15043 | 2025 | 10355 |
| | 5253 | 18478 | 13347 | 18509 | 13344 | 18011 | 8209 | 8302 | 10221 | 17291 | 15948 | 17479 |
| | 2853 | 15154 | 15669 | 4108 | 17549 | 9749 | 14470 | 4540 | 18372 | 11366 | 19231 | 5412 |
| | 12150 | 14436 | 18176 | 13730 | 8642 | 3638 | 993 | 11156 | 6014 | 4301 | 1954 | 10818 |
| | 7039 | 10003 | 1924 | 16132 | 13798 | 15583 | 9569 | 13320 | 9432 | 15846 | 16301 | 14535 |
| | 8482 | 674 | 7188 | 12934 | 6741 | 1610 | 5534 | 7172 | 3983 | 2230 | 6072 | 15672 |
| | 5854 | 17508 | 18490 | 15055 | 4617 | 16847 | 413 | 3479 | 1048 | 13574 | 5988 | 6031 |
| | 10579 | 4109 | 6095 | 1557 | 11615 | 5445 | 18508 | 16052 | 16888 | 13552 | 11081 | 12107 |
| | 13940 | 12007 | 8147 | 12487 | 18977 | 17766 | 8441 | 2008 | 3547 | 6891 | 18398 | 5601 |
| | 17125 | 17612 | 11179 | 15926 | 18113 | 3145 | 16012 | 1609 | 18010 | 14502 | 4220 | 6076 |
| | 11108 | 12418 | 16973 | 8611 | 17786 | 18551 | 11710 | 1128 | 4641 | 1538 | 16850 | 15885 |
| | 4965 | 15150 | 6585 | 18750 | 6697 | 10746 | 11219 | 12375 | 13129 | 559 | 6520 | 4368 |
| | 2832 | 3991 | 13543 | 3423 | 2624 | 18457 | 10864 | 11199 | 16932 | 16270 | 5072 | 17123 |
| | 5876 | 14612 | 896 | 15156 | 16852 | 18175 | 10945 | 18855 | 16525 | 1748 | 5964 | 11300 |
| | 8621 | 7611 | 9963 | 9241 | 6607 | 5035 | 14105 | 1285 | 11382 | 13286 | 12956 | 17420 |
| | 6377 | 1873 | 17080 | 19067 | 9405 | 8729 | 13064 | 2473 | 14203 | 6583 | 10484 | 11942 |
| | 9591 | 5237 | 2321 | 3769 | 3885 | 7954 | 17997 | 14024 | 5941 | 9954 | 18484 | 18027 |
| | 18467 | 18028 | 17973 | 17972 | 17970 | 17969 | 15630 | 5302 | 6762 | 16042 | 17109 | 8202 |
| | 9781 | 3057 | 12195 | 14637 | 2924 | 18035 | 5223 | 15409 | 595 | 5651 | 5083 | 17949 |
| | 19109 | 11395 | 6580 | 10789 | 13695 | 15802 | 5389 | 18245 | 18559 | 7398 | 13922 | 18325 |
| | 18513 | 18472 | 328 | 327 | 7707 | 7353 | 7349 | 7351 | 7348 | 7218 | 7214 | 7201 |
| | 7224 | 7220 | 7200 | 2490 | 3607 | 15058 | 19237 | 15045 | 15907 | 16396 | 16398 | 15912 |
| | 15057 | 15636 | 16403 | 15079 | 15075 | 9155 | 18489 | 330 | | | | |
| 363: | 18274 | 18488 | 18007 | 11117 | 10258 | 9446 | 3371 | 18022 | 329 | 360 | 359 | 7341 |
| | 17634 | 11532 | 3678 | 17861 | 1141 | 11850 | 6626 | 1745 | 15264 | 16539 | 2664 | 8699 |
| | 5767 | 11011 | 8036 | 7857 | 1343 | 6839 | 8733 | 11515 | 14442 | 16737 | 6301 | 658 |
| | 5340 | 6383 | 3012 | 4309 | 4229 | 16075 | 2351 | 8932 | 12221 | 5354 | 6706 | 3213 |
| | 3896 | 17512 | 15668 | 15120 | 4825 | 18765 | 7855 | 4601 | 10991 | 2531 | 10828 | 17127 |
| | 1411 | 5701 | 15745 | 17917 | 4012 | 11414 | 8414 | 1948 | 325 | 8882 | 3926 | 7772 |
| | 18792 | 16498 | 13428 | 7045 | 7919 | 16773 | 3833 | 8372 | 5231 | 6402 | 8899 | 4814 |
| | 12738 | 16127 | 326 | 12276 | 13535 | 12190 | 17785 | 10684 | 3455 | 14687 | 9274 | 12077 |
| | 15788 | 10337 | 9859 | 10204 | 9466 | 15723 | 7916 | 18347 | 6113 | 15339 | 18049 | 14162 |
| | 14158 | 7554 | 2228 | 5734 | 2183 | 1503 | 9273 | 13486 | 4699 | 18053 | 874 | 7758 |
| | 7168 | 2911 | 16068 | 10075 | 5165 | 6610 | 8188 | 7505 | 5836 | 10110 | 3449 | 15698 |
| | 17609 | 5486 | 10188 | 3795 | 3794 | 974 | 7376 | 8980 | 2807 | 2826 | 15414 | 3221 |
| | 11000 | 16877 | 358 | 11643 | 16928 | 14101 | 17431 | 14104 | 11922 | 14106 | 14118 | 14103 |
| | 11917 | 14117 | 11877 | 9156 | 15521 | 15519 | 15512 | 2076 | 7599 | 18286 | 16747 | 17450 |
| | 10636 | 10883 | 19245 | 18626 | 2706 | 5629 | 17448 | 17445 | 13484 | 12611 | 12363 | 8462 |
| | 8465 | 1521 | 11661 | 18323 | 10495 | 18481 | 1858 | 7476 | 18811 | 19045 | 17901 | 1025 |
| | 15261 | 14337 | 11009 | 802 | 1489 | 9751 | 5535 | 19225 | 4741 | 8379 | 9986 | 5615 |
| | 9570 | 18249 | 1579 | 18874 | 14957 | 2833 | 13097 | 11855 | 17444 | 2048 | 5863 | 16811 |
| | 12374 | 13302 | 5440 | 14857 | 13516 | 10812 | 9419 | 6771 | 11768 | 12141 | 3543 | 6242 |
| | 11404 | 18052 | 1963 | 2636 | 7150 | 2875 | 5500 | 15645 | 3024 | 19039 | 805 | 11538 |
| | 2943 | 12915 | 17169 | 4471 | 17129 | 2420 | 9530 | 8029 | 15921 | 16041 | 11094 | 10747 |
| | 13795 | 2144 | 17511 | 12731 | 1983 | 6924 | 15147 | 18864 | 7598 | 2259 | 7950 | 18104 |
| | 7123 | 13183 | 9498 | 651 | 5099 | 8353 | 13883 | 4389 | 2662 | 11940 | 19159 | 16364 |
| | 4653 | 14754 | 12986 | 3439 | 9888 | 4998 | 8161 | 19192 | 17068 | 10691 | 934 | 606 |
| | 769 | 8468 | 18297 | 1397 | 3167 | 10721 | 18909 | 18127 | 10323 | 820 | 8767 | 11231 |
| | 10209 | 18039 | 4769 | 4271 | 914 | 5454 | 17761 | 1436 | 16749 | 12983 | 10781 | 7990 |
| | 3461 | 11482 | 2488 | 2605 | 15929 | 19116 | 1132 | 11154 | 5499 | 16543 | 12081 | 4575 |
| | 15011 | 17427 | 14182 | 11494 | 4324 | 686 | 8119 | 16545 | 1033 | 15056 | 15910 | 7850 |
| | 13576 | 15542 | 16151 | 16155 | 16095 | 13014 | 16069 | 3257 | 6401 | 17505 | 17504 | 17525 |
| | 17524 | 2022 | 7377 | 432 | 16819 | 10332 | 2411 | 10331 | 2410 | 12098 | 12865 | 3223 |
| | 4128 | 11048 | 1117 | 13770 | 13767 | 16781 | 16777 | 16779 | 16801 | 17741 | 16774 | 4860 |
| | 15510 | 12777 | 12778 | 14071 | 14067 | 14053 | 14069 | 14091 | 14072 | 14075 | 8376 | 11001 |
| | 9987 | 7853 | 5184 | 7393 | 7395 | 17909 | 3219 | 3220 | 17517 | 3203 | 17996 | 3205 |
| | 17513 | 10899 | 3204 | 18474 | 18023 | 18329 | 600 | 6542 | 7911 | 16191 | 13238 | 15975 |
| | 4924 | 9729 | 6091 | 4326 | 6820 | 13828 | 4812 | 9933 | 17784 | 16424 | 4768 | 15749 |
| | 7309 | 10904 | 2071 | 4194 | 15043 | 2025 | 10355 | 5253 | 18478 | 13347 | 18509 | 13344 |
| | 18011 | 4578 | 8209 | 8302 | 10221 | 15948 | 8147 | 11081 | 18398 | 17612 | 16052 | 2853 |
| | 15154 | 15669 | 4108 | 413 | 16888 | 8441 | 3479 | 1048 | 17549 | 9749 | 17291 | 14470 |
| | 2008 | 13574 | 5988 | 3547 | 13320 | 12107 | 4540 | 6031 | 16301 | 6076 | 18372 | 10579 |
| | 4109 | 11366 | 19231 | 11108 | 8482 | 5412 | 12150 | 14436 | 18176 | 1610 | 674 | 6891 |
| | 13730 | 8642 | 6095 | 3638 | 993 | 17479 | 11156 | 6014 | 4301 | 1954 | 10818 | 7039 |
| | 15055 | 12418 | 10003 | 1924 | 13798 | 11179 | 15926 | 13552 | 9569 | 18113 | 9432 | 15846 |
| | 14535 | 3145 | 12007 | 16132 | 12934 | 1538 | 16847 | 15583 | 6741 | 5534 | 14502 | 4641 |
| | 7188 | 15672 | 4220 | 11219 | 12375 | 7172 | 3983 | 2230 | 6072 | 5854 | 17508 | 17766 |
| | 18490 | 15885 | 4617 | 4368 | 16850 | 13940 | 3991 | 1557 | 11615 | 2624 | 18508 | 18457 |
| | 10864 | 18750 | 6697 | 1128 | 12487 | 18977 | 5445 | 11199 | 10746 | 16932 | 5601 | 16270 |
| | 559 | 5072 | 16012 | 1609 | 13543 | 18010 | 5876 | 18551 | 11710 | 16973 | 8611 | 17786 |
| | 896 | 15150 | 6585 | 6520 | 13129 | 4965 | 18175 | 2832 | 10945 | 3423 | 17125 | 18855 |
| | 16525 | 1748 | 5964 | 7611 | 14612 | 11300 | 17123 | 14105 | 1285 | 15156 | 11382 | 12956 |
| | 17420 | 6607 | 6377 | 1873 | 5035 | 9405 | 13286 | 8729 | 9963 | 8621 | 9241 | 13064 |
| | 2473 | 14203 | 19067 | 17080 | 10484 | 16852 | 9591 | 6583 | 5237 | 3885 | 11942 | 14024 |
| | 5941 | 2321 | 18484 | 18027 | 18467 | 18028 | 17973 | 17972 | 17970 | 17969 | 11616 | 5302 |
| | 16042 | 6762 | 8202 | 17109 | 9781 | 3057 | 12195 | 18035 | 14637 | 2924 | 5223 | 595 |
| | 5651 | 5083 | 15409 | 17949 | 19109 | 11395 | 13131 | 5389 | 6525 | 18579 | 18245 | 18559 |
| | 15802 | 6580 | 13199 | 10789 | 12935 | 13695 | 14236 | 5044 | 6962 | 15953 | 11413 | 2116 |
| | 18736 | 3803 | 13250 | 13906 | 7398 | 13922 | 11708 | 9202 | 18325 | 18513 | 6519 | 18472 |
| | 327 | 328 | 7929 | 7353 | 7349 | 7351 | 7348 | 7218 | 7214 | 7201 | 7224 | 7220 |
| | 7200 | 17337 | 7741 | 2490 | 6801 | 3458 | 13727 | 18735 | 316 | 321 | 333 | 322 |
| | 324 | 320 | 319 | 323 | 6750 | 15058 | 19237 | 15045 | 15907 | 16396 | 16398 | 15912 |
| | 15057 | 15636 | 16403 | 15079 | 15075 | 18489 | 13580 | 7766 | | | | |
| 364: | 8684 | 16027 | 13149 | 10126 | 8454 | 15932 | 11869 | 13702 | 13698 | 7664 | 8628 | 3039 |
| | 3267 | | | | | | | | | | | |
| 365: | 17649 | 8270 | 3136 | 10804 | 6247 | 8834 | 17636 | 15016 | 8936 | 2194 | 13157 | 4323 |
| | 8741 | 11308 | 472 | 19056 | | | | | | | | |
| 366: | 5012 | 2906 | 8001 | 12356 | 6089 | 18788 | 4785 | 6186 | 6359 | 6711 | 3320 | 11092 |
| 367: | 7896 | 15587 | 5766 | 14289 | 18000 | 13369 | 8046 | 16461 | 9247 | 13124 | 10208 | 15984 |
| | 7503 | 11474 | 5470 | 765 | 11822 | | | | | | | |
| 368: | 18223 | 5598 | 10881 | 8595 | 15561 | 10514 | 9251 | 17180 | 10854 | 6055 | 12225 | 2422 |
| | 8657 | 17250 | 3377 | 13990 | 4420 | 9030 | 19028 | 2248 | 7708 | 10035 | 12889 | 11370 |
| | 19121 | 11952 | 3762 | 3651 | 7635 | 9473 | 17896 | 19118 | 6913 | 15466 | 3944 | 6131 |
| | 3755 | 1161 | 13259 | 1151 | 5087 | 11439 | 18915 | 3175 | 5089 | 11438 | 16657 | 9710 |
| | 10306 | 19085 | 1527 | 15920 | 12676 | 13514 | 14962 | 10018 | 13289 | 7013 | 8470 | 7160 |
| | 10908 | 685 | 650 | 11493 | 4723 | 4184 | 18299 | 829 | 15453 | 12859 | 17424 | 9533 |
| | 2244 | 2847 | 14721 | 11910 | 12477 | 7174 | 15879 | 5488 | 12702 | 9161 | 14497 | 12241 |
| | 9336 | 7245 | 9646 | 15955 | 10132 | 17257 | 3161 | 18165 | 13393 | 18479 | 13438 | 1524 |
| | 14655 | 11554 | 4462 | 7586 | 7930 | 14718 | 5571 | 17190 | 9164 | 19070 | 13526 | 2863 |
| | 10779 | 7543 | 3731 | 10062 | 4442 | 2923 | 18088 | 2881 | 8943 | 3734 | 3058 | 4633 |
| | 3900 | 3667 | 5575 | 4124 | 5363 | 995 | 2692 | 5332 | 5916 | 7378 | 1953 | 15812 |
| | 2389 | 2390 | 2245 | 7361 | 10033 | 10128 | 18718 | 13416 | 17384 | 11063 | 18720 | 509 |
| | 3241 | 6075 | 2361 | 541 | 15106 | 15987 | 2306 | 2730 | 906 | 2263 | 12377 | 11712 |
| | 621 | 6011 | 6433 | 10564 | 10589 | 5120 | 18420 | 12406 | 14906 | 5170 | 16214 | 694 |
| | 13162 | 6259 | 18759 | 5659 | 7744 | 4422 | 17687 | 665 | 9006 | 8004 | 15938 | 15486 |
| | 12018 | 6903 | 5465 | 5202 | 3639 | 10189 | 4000 | 17403 | 4727 | 18570 | 18571 | 18591 |
| | 13103 | 7276 | 8327 | 8749 | 14147 | 13677 | 8146 | 10195 | 4684 | 11527 | 15892 | 11819 |
| | 15958 | 3517 | 15190 | 16361 | 11510 | | | | | | | |
| 369: | 2084 | 15197 | 8662 | 8366 | 2930 | 6655 | 12876 | 8740 | 17571 | 13116 | | |
| 370: | 1613 | 19204 | 11892 | 6151 | 11834 | 16271 | 7629 | | | | | |
| 371: | 3593 | 6170 | 6205 | 17780 | 18378 | 1421 | 3053 | 15450 | 9886 | 15739 | 18891 | 6294 |
| | 10793 | 15529 | 13666 | 11730 | 18928 | 3004 | 6197 | 13102 | 16177 | 13928 | 14868 | 12232 |
| | 6033 | 7442 | 14783 | 15125 | 5741 | 864 | 13206 | 5210 | 12920 | 18629 | 12671 | 16466 |
| | 2407 | 5884 | 6651 | 14574 | | | | | | | | |
| 372: | 15623 | 14801 | 953 | 10002 | 6238 | 10071 | 13756 | 11624 | 16541 | 14110 | 3858 | 4119 |
| | 4412 | 10719 | | | | | | | | | | |
| 373: | 4316 | 13909 | 16449 | 17769 | 15006 | 4781 | 10038 | 14140 | 13489 | 16035 | 4824 | 9107 |
| | 6225 | 16014 | 8175 | 17809 | 3179 | 14740 | 16152 | 8688 | 16780 | 13019 | 17782 | 17245 |
| 374: | 6174 | 6173 | 17263 | 5382 | 13230 | 416 | 13835 | 10352 | 12036 | 2106 | 2087 | 12205 |
| | 12076 | 13351 | 5940 | 7910 | 11809 | 16730 | 15960 | 14680 | 8484 | 3972 | 4409 | 4808 |
| | 18796 | 15783 | 12008 | 3864 | 440 | 18038 | 19246 | 18731 | 16299 | 4005 | 5505 | 5331 |
| | 12153 | 14304 | 12102 | 17171 | | | | | | | | |
| 375: | 15552 | 2308 | 10821 | 4674 | 10575 | 4747 | 17033 | 5313 | 505 | 8735 | 1438 | 5247 |
| | 4174 | 4173 | 10712 | 12685 | 676 | 14249 | 18327 | 4576 | 3363 | 13911 | 9752 | 7128 |
| | 6923 | 5003 | 557 | | | | | | | | | |
| 376: | 12640 | 10761 | 17514 | 13509 | 16058 | 1234 | 7711 | 5310 | | | | |
| 377: | 15091 | 4251 | 7569 | 13412 | 9186 | 14005 | 11205 | 6753 | 5318 | 13512 | 5181 | 3332 |
| | 4510 | 5730 | 19140 | 18482 | 2628 | 16322 | 6889 | 12710 | 13826 | 16117 | 1492 | 6630 |
| | 14504 | 6975 | 3194 | 11115 | 1922 | 18860 | 18335 | 3969 | 18746 | 3485 | 12262 | 4545 |
| | 3701 | 15340 | 14247 | 4624 | 9240 | 7559 | 17795 | 2280 | 18217 | 2121 | 14191 | 14648 |
| | 17689 | 18547 | 7154 | 2925 | 17348 | 10160 | 18995 | 18701 | 16015 | 2369 | 13208 | 13699 |
| | 5625 | 2618 | 8394 | 17231 | 2934 | 1031 | 4588 | 931 | 5715 | 10557 | 13832 | 6308 |
| | 799 | 3921 | 1420 | 3674 | 7819 | 11623 | 713 | 16019 | 7524 | 10823 | 6351 | 10511 |
| | 18737 | 6199 | 7305 | 958 | 10010 | 12423 | 8451 | 14867 | 14792 | 1835 | 18830 | 9571 |
| | 17441 | 12749 | 16458 | 2477 | 3430 | 14035 | 18847 | 18001 | 3771 | 1319 | 3705 | 18504 |
| | 5474 | 4726 | 5270 | 785 | 18382 | 4164 | 8734 | 957 | 4755 | | | |
| 378: | 7385 | 7389 | 4712 | 7216 | 7240 | 7425 | 7411 | 16142 | 3882 | 7263 | 7262 | 4838 |
| | 7264 | 7267 | 7288 | 7269 | 7239 | 8013 | 6310 | 7299 | 7296 | 15830 | 4115 | 14488 |
| | 4236 | 2148 | 12770 | 5634 | 8293 | 18656 | 9110 | 9130 | 5827 | 14078 | 13597 | 7511 |
| | 7494 | 7198 | 11579 | 7426 | 7786 | 7194 | 7444 | 3270 | 15500 | 8339 | 1316 | 19032 |
| | 6299 | 1170 | 8702 | 13733 | 10030 | 10478 | 10019 | 10089 | 4520 | 3432 | 18377 | 18380 |
| | 8333 | 8284 | 8313 | 2075 | 6604 | 16849 | 5563 | 10245 | 3095 | 10445 | 11875 | 6960 |
| | 10489 | 4952 | 7044 | 8314 | 17763 | 8310 | 12788 | 8318 | 7964 | 8340 | 8343 | 8346 |
| | 1962 | 8847 | 2058 | 16080 | 3127 | 15015 | 17613 | 17633 | 2348 | 8003 | 7373 | 7372 |
| | 15767 | 12500 | 16065 | 11929 | 8086 | 6387 | 14998 | 6461 | 11845 | 11762 | 11109 | 7190 |
| | 17213 | 5075 | 5076 | 7367 | 7365 | 13195 | 7449 | 7491 | 7448 | 7535 | 11930 | 7290 |
| | 7294 | 1927 | 1929 | 1975 | 1976 | 12927 | 8317 | | | | | |
| 379: | 789 | 2899 | 9238 | 3272 | 5648 | 3579 | 15295 | 6275 | 14031 | 16259 | 5495 | 10963 |
| | 5221 | 2572 | 18153 | 15647 | 4771 | 8787 | 11837 | 4871 | 6699 | 10308 | 17936 | 16583 |
| | 14963 | 7534 | 12772 | 9430 | 13248 | 6068 | 13071 | | | | | |
| 380: | 11132 | 17164 | 10120 | 13780 | 18790 | 3980 | 6453 | 16881 | 5663 | 9535 | 19104 | 1529 |
| | 18961 | 2182 | 9230 | 8958 | 10766 | 3066 | 14515 | 16060 | 4872 | 16197 | 5238 | 18266 |
| 381: | 8677 | 2479 | 7211 | 7425 | 4341 | 4838 | 7350 | 7264 | 8013 | 7326 | 7209 | 7235 |
| | 15830 | 5983 | 5979 | 5985 | 18656 | 7511 | 7198 | 15500 | 8339 | 627 | 6299 | 16863 |
| | 8702 | 15217 | 15219 | 15220 | 12265 | 2585 | 12272 | 12270 | 12268 | 8753 | 3061 | 11536 |
| | 11534 | 4520 | 3432 | 18952 | 18377 | 18380 | 8333 | 8284 | 8313 | 2075 | 4839 | 6604 |
| | 5557 | 3612 | 4952 | 7044 | 3124 | 13964 | 13963 | 7964 | 8343 | 8346 | 16080 | 7195 |
| | 8003 | 7373 | 16065 | 8853 | 11929 | 7949 | 7962 | 6461 | 3480 | 11762 | 11845 | 17213 |
| | 13195 | 7449 | 12348 | 7448 | 7446 | 11930 | 6644 | 17544 | 1979 | 1976 | 688 | 12002 |
| | 692 | 12927 | 12924 | 12921 | 8317 | | | | | | | |
| 382: | 6843 | 6987 | 13364 | 15545 | 14423 | 4921 | 4285 | 2528 | 2557 | 18040 | 8350 | 9340 |
| 383: | 15954 | 6049 | 18779 | 18043 | 2249 | 15965 | | | | | | |
| 384: | 7925 | 14352 | 11545 | 10615 | 16765 | 15479 | 8141 | 14076 | 15758 | 5411 | 12128 | 15947 |
| | 3153 | 8503 | 16045 | 11187 | 3686 | 9965 | 1284 | 5392 | 16793 | 15607 | 5705 | 3059 |
| | 7149 | | | | | | | | | | | |
| 385: | 12678 | 11761 | 19097 | 15082 | 10667 | 4225 | 11019 | 8039 | 8375 | 17367 | 9578 | 18072 |
| 386: | 10572 | 14694 | 5590 | 4876 | 3577 | 12056 | 17885 | 18628 | 17398 | 7894 | 7122 | 673 |
| | 4475 | | | | | | | | | | | |
| 387: | 13459 | 5045 | 12999 | 2199 | 13901 | 17853 | 19179 | 15940 | 9881 | 12409 | 5036 | 14275 |
| | 18503 | 8364 | 2168 | 8079 | 4928 | 2375 | 2053 | 17350 | 16572 | 10390 | 3007 | 7945 |
| | 7762 | 641 | | | | | | | | | | |
| 388: | 16871 | 9761 | 11846 | 15784 | 18262 | 18446 | 17041 | 2127 | 8909 | 17081 | 8129 | 10993 |
| | 5337 | 2955 | 10550 | 1632 | 4698 | 18308 | 13085 | 15485 | 13327 | 16105 | | |
| 389: | 2476 | 3590 | 2914 | 12550 | 12552 | 7501 | 14570 | 15819 | 11167 | 4325 | 19077 | 6830 |
| | 4556 | 10406 | 12930 | 5172 | 5060 | 12389 | 3569 | 16656 | 5168 | 9775 | 14074 | 17762 |
| | 9431 | 2976 | 16817 | 11358 | 11360 | 2041 | 11375 | 10922 | 11355 | 11359 | 14965 | 10920 |
| | 10918 | 3529 | 4796 | 11740 | 2289 | 15427 | 7180 | 9275 | 4129 | 7616 | 13151 | 18966 |
| | 10689 | 14083 | 6228 | 2080 | 13696 | 5628 | 10009 | 411 | 10499 | 15596 | 8605 | 17387 |
| 390: | 13101 | 8214 | 18411 | 6355 | 17130 | 17131 | 17112 | 17106 | 11037 | 5175 | 5207 | 16634 |
| | 16638 | 18236 | 18250 | 13007 | 12625 | 10843 | 10358 | 4002 | 905 | 7460 | 17283 | 10362 |
| | 10388 | 10845 | 13303 | 2314 | 12875 | 17641 | 7106 | 16084 | 4137 | 9491 | 4494 | 14185 |
| | 14189 | 14160 | 13722 | 10262 | 9561 | 10261 | 2652 | 16419 | 14234 | 3867 | 3394 | 4122 |
| | 16608 | 17323 | 18139 | 16832 | 11596 | 16537 | 14193 | 14190 | 14231 | 14212 | 17832 | 7504 |
| | 18708 | 7840 | 16675 | 16237 | 7108 | 13984 | 2646 | 18664 | 14232 | 8358 | 12918 | 4473 |
| | 4497 | 431 | 13345 | 11107 | 14988 | 10858 | 8415 | 10522 | 18463 | 2013 | 10896 | 13582 |
| | 1453 | 8762 | 16443 | 14346 | 11683 | 2065 | 10233 | 10846 | 10363 | 10391 | 10393 | 14422 |
| | 9935 | 17273 | 17249 | 8363 | 10121 | 14942 | | | | | | |
| 391: | 7780 | 7778 | 5749 | 16030 | 8501 | 14291 | 14288 | 6980 | 8600 | 7808 | 14360 | 14094 |
| | 2039 | 3393 | 16652 | 5033 | 5164 | 14882 | 16247 | 4249 | 12196 | 17478 | 5851 | 448 |
| | 19005 | | | | | | | | | | | |
| 392: | 9293 | 16557 | 723 | 6692 | 9622 | 2591 | 13628 | 6928 | 1592 | | | |
| 393: | 5309 | 16676 | 1992 | 5415 | 17277 | 4097 | 6941 | 16134 | 3966 | 10723 | 12275 | 12413 |
| | 9592 | | | | | | | | | | | |
| 394: | 10929 | 8533 | 15300 | 1943 | 2871 | 3355 | 8440 | 1643 | 4780 | 15402 | 10696 | 4627 |
| | 2660 | 3426 | 1295 | 1614 | 466 | 18055 | 18870 | 5343 | 6172 | 13204 | 2509 | 14838 |
| | 16696 | 14719 | 12186 | 9237 | 5229 | 14362 | 18820 | 11703 | 10441 | 9402 | 3427 | 6904 |
| | 6394 | 15444 | 13539 | 480 | 4107 | 3143 | 11612 | 16378 | 9125 | 5638 | 5458 | 4628 |
| | 12830 | 16118 | 11849 | 7565 | 14432 | | | | | | | |
| 395: | 17920 | 6614 | 14177 | 8433 | 18119 | 14743 | 1547 | 2798 | 4829 | 13098 | 1792 | 7185 |
| | 5546 | 12686 | 17738 | 14286 | 17308 | 15203 | 7356 | 15424 | 8898 | 10366 | | |
| 396: | 1612 | 16074 | 15966 | 6215 | 9512 | 6739 | 712 | 4754 | 9542 | 926 | 15250 | 17094 |
| | 3886 | 1518 | 14141 | 3582 | 17743 | 2596 | 16577 | 7981 | 8476 | 11139 | 9991 | 7519 |
| | 16523 | 4476 | 3159 | 2443 | | | | | | | | |
| 397: | 6955 | 17338 | 4807 | 13366 | 13886 | 3990 | 12822 | 4206 | 11204 | 4966 | 12012 | 18854 |
| | 18590 | 18505 | 5937 | 6734 | 2714 | 7052 | 1150 | 4851 | 7568 | 10870 | 5135 | 3950 |
| | 2713 | 870 | 17666 | 8862 | 972 | 4428 | 1180 | 15407 | | | | |
| 398: | 10762 | 10763 | 17831 | 18710 | 4571 | 2491 | 18826 | 7281 | 7980 | 12839 | 7132 | 3515 |
| | 11431 | 13508 | 15105 | 11150 | 12370 | 14765 | 7924 | 8625 | 10099 | 5689 | 10100 | 7454 |
| | 10434 | 8719 | 3324 | 3759 | 1396 | 7985 | 1985 | | | | | |
| 399: | 6493 | 10378 | 18309 | 8131 | 4746 | 2656 | 3568 | 15048 | 5685 | 9021 | 16845 | 8807 |
| | 18908 | 2035 | 18616 | 19229 | 9844 | 10776 | 11514 | 15103 | 1336 | 4804 | 17204 | 14756 |
| | 12584 | 18287 | 12312 | 5524 | 13410 | 6108 | 12653 | 16440 | 10889 | 4657 | 4508 | 11491 |
| | 4103 | | | | | | | | | | | |
| 400: | 14710 | 10682 | 11646 | 10632 | 9092 | 7695 | 1867 | 15667 | 2172 | 14920 | 10057 | 4313 |
| | 15838 | 6000 | 16168 | 13497 | 12464 | 7428 | 3227 | 15903 | 11817 | 6518 | 7230 | 15193 |
| | 14479 | 15307 | 9534 | 8999 | 10201 | | | | | | | |
| 401: | 4269 | 415 | 5196 | 1888 | 17473 | 5940 | 17913 | 2427 | 4192 | 894 | 2283 | 3972 |
| | 4409 | 4808 | 15898 | 14757 | 16253 | 13957 | | | | | | |
| 402: | 8349 | 2740 | 7671 | 12717 | 5139 | 12414 | 4134 | 7424 | 16056 | 14823 | | |
| 403: | 1589 | 17604 | 12728 | 8019 | 2032 | 1121 | 5422 | 4393 | 814 | 3576 | 1329 | 18252 |
| | 17534 | 7522 | 6755 | 8555 | 13532 | 14465 | 5342 | 14260 | 12366 | 13545 | 11833 | 15130 |
| | 16303 | 3048 | 15435 | 12548 | 12465 | 9395 | 4550 | 15303 | 15548 | 16379 | 15934 | 3788 |
| | 11207 | 10866 | 16567 | 9796 | 10597 | 2843 | 9814 | 6036 | 13084 | 15810 | 18073 | 12289 |
| | 2610 | 8431 | 8133 | 10743 | 5277 | 5274 | 9812 | 9270 | 16062 | 1410 | 18832 | 3278 |
| | 11379 | 7651 | 8619 | 4074 | 13579 | 11278 | 7552 | 3482 | 1921 | 3110 | 13040 | 3715 |
| | 588 | 16215 | 14079 | 15855 | 15077 | 12165 | 4158 | 14545 | 7138 | 12317 | 14284 | 16674 |
| | 7176 | 4557 | 4843 | 4827 | 14556 | 15959 | 12712 | 12693 | 12300 | 9895 | 9617 | 18976 |
| | 3521 | 15031 | 1253 | 9850 | 1713 | 948 | 17470 | 9817 | 8246 | 14610 | 14409 | 4404 |
| | 18149 | 18916 | 3122 | 6477 | 11641 | 5344 | 5193 | 15313 | 4566 | 4856 | 6382 | 6385 |
| | 8287 | 13657 | 6526 | 12895 | 13000 | 17835 | 5551 | 4058 | 4427 | 6492 | 3925 | 15887 |
| | 6882 | 13235 | 2054 | 11583 | 8492 | 7588 | 15092 | 977 | 3464 | 6674 | 11033 | 10561 |
| | 12912 | 12978 | 14142 | 19136 | 951 | 13846 | 6528 | 11069 | 16860 | 10474 | 14237 | 10178 |
| | 9206 | 9999 | 12994 | 1371 | 1369 | 18499 | 15946 | 14691 | 5796 | 15067 | 13591 | 14544 |
| | 10116 | 9572 | 9076 | 3395 | 18068 | 9445 | 17137 | 10070 | 12598 | 12451 | 5291 | 8421 |
| | 13493 | 12446 | 16898 | 3422 | 12469 | 9327 | 12751 | 1725 | 12393 | 11867 | 16709 | 6201 |
| | 2489 | 19025 | 15355 | 12432 | 10704 | 10788 | 15175 | 13881 | 15050 | 11031 | 2284 | 16846 |
| | 8929 | 13843 | 15877 | 12575 | 2501 | 3898 | 8155 | 8181 | 13467 | 7071 | 13380 | 18512 |
| | 6767 | 11884 | 3330 | 15689 | 16649 | 4862 | 2400 | 11639 | 2206 | 6774 | 7277 | 10750 |
| | 13838 | 5371 | 9923 | 6934 | 11974 | 17225 | 3561 | 17146 | 15437 | 5307 | 6795 | 8299 |
| | 5491 | 4199 | 12086 | 13575 | 6650 | 12452 | 12843 | 7943 | 4725 | 8051 | 12281 | 12760 |
| | 4561 | 2302 | 8823 | 7236 | 18407 | 18993 | 1395 | 18587 | 10428 | 1484 | 9297 | 4090 |
| | 6052 | 746 | 5639 | 5240 | 11345 | 8048 | 13454 | 3013 | 3772 | 3177 | 2098 | 1828 |
| | 5023 | 13427 | 15578 | 11178 | 5602 | 5276 | 14414 | 2819 | 615 | 9528 | 3937 | 5441 |
| | 9527 | 18009 | 11254 | 11735 | 1651 | 10853 | 8300 | 12353 | 10928 | 8198 | 10913 | 11954 |
| | 11949 | 16408 | 11950 | 8525 | 8047 | 17449 | 14589 | 10655 | 14519 | 9626 | 17814 | 7897 |
| | 3029 | 4632 | 16072 | 1825 | 10344 | 16933 | 7125 | 16977 | 487 | 5370 | 1337 | 10164 |
| | 7994 | 14863 | 4232 | 4289 | 11276 | 8180 | 14167 | 10838 | 18522 | 10765 | 13322 | 2506 |
| | 18787 | 776 | 16529 | 6541 | 4678 | 5631 | 12943 | 17667 | 6970 | 19144 | 3198 | 7846 |
| | 2492 | 15690 | 17586 | 13301 | 4379 | 2818 | 10177 | 3242 | 3316 | 949 | 9487 | 8259 |
| | 11112 | 6256 | 10981 | 15481 | 11590 | 14273 | 5962 | 3698 | 13133 | 1978 | 10200 | 2281 |
| | 15318 | 15337 | 15317 | 1960 | 10987 | 10959 | 10458 | 6605 | 1442 | 14285 | 16347 | 8163 |
| | 9798 | 2999 | 6258 | 594 | 19224 | 11771 | 3948 | 319 | 18283 | 17226 | 10012 | 7302 |
| | 16116 | 14915 | 6717 | 19232 | 2868 | 18598 | 8016 | 9887 | 12616 | | | |
| 404: | 4607 | 2496 | 4440 | 11086 | 9902 | 13066 | 10299 | 13067 | 10058 | 7029 | 11937 | 11215 |
| | 8917 | 18762 | 8922 | 6629 | 3169 | 4418 | 7255 | 17978 | 6392 | 4006 | 16582 | 4177 |
| | 13299 | 18105 | 19050 | 1884 | 8982 | 18462 | 13743 | 10049 | 17020 | 1107 | 14164 | 17443 |
| | 3211 | 807 | 9415 | 7769 | 2665 | 7716 | 9819 | 4793 | 8194 | 4487 | 9462 | 1406 |
| | 8450 | 11140 | 4167 | 18203 | 3917 | 15866 | 2776 | 1567 | 9782 | 15174 | 12626 | 4681 |
| | 12824 | 14018 | 4910 | 4659 | 2562 | 2122 | 2788 | 9880 | 2428 | 871 | 8389 | 7192 |
| | 16613 | 2982 | 3929 | 11900 | 8750 | 5259 | 18517 | 14460 | 1370 | 18379 | 7537 | 11555 |
| | 4777 | 12893 | 14616 | 15017 | 5702 | 12071 | 2926 | 2018 | 2392 | 18128 | 17823 | 17870 |
| | 13449 | 12192 | 1385 | 8320 | 11784 | 8264 | 14559 | 5910 | 11792 | 8248 | 1361 | 17542 |
| | 1038 | 17221 | 1250 | 12347 | 10203 | 15635 | 7181 | 7956 | 13405 | 1627 | 10660 | 3003 |
| | 6686 | 18312 | 14977 | 2919 | 13737 | 1505 | 4646 | 9493 | 11913 | 9654 | 14413 | 16822 |
| | 11895 | 12844 | 7146 | 17760 | 12372 | 14263 | 18841 | 10587 | 16428 | 18770 | 12264 | 16337 |
| | 14633 | 11408 | 17098 | 2635 | 7437 | 18818 | 16147 | 17848 | 15393 | 9910 | 6063 | 5725 |
| | 6571 | 5134 | 17464 | 10392 | 6472 | 17903 | | | | | | |
| 405: | 3906 | 4734 | 13745 | 7402 | 14874 | 764 | | | | | | |
| 406: | 5355 | 6984 | 4667 | 17305 | 11490 | 16367 | 8426 | 10381 | 1464 | 11818 | 624 | 7412 |
| | 3333 | 9382 | 15475 | 11760 | 13337 | | | | | | | |
| 407: | 12506 | 19148 | 10381 | 2347 | 9031 | 1569 | | | | | | |
| 408: | 1173 | 2332 | 4489 | | | | | | | | | |

### EXAMPLE 3

[0151] This example illustrates the construction of a consensus amino acid sequence of homologous proteins of homologous genes that impart an enhanced trait.

[0152] ClustalW program was selected for multiple sequence alignments of the amino acid sequence of SEQ ID NO: 406 and 17 homologs. Three major factors affecting the sequence alignments dramatically are (1) protein weight matrices; (2) gap open penalty; (3) gap extension penalty. Protein weight matrices available for ClustalW program include Blosum, Pam and Gonnet series. Those parameters with gap open penalty and gap extension penalty were extensively tested. On the basis of the test results, Blosum weight matrix, gap open penalty of 10 and gap extension penalty of 1 were chosen for multiple sequence alignment. Shown in FIG. 1 are the sequences of SEQ ID NO: 406, its homologs and the consensus sequence, as set forth in SEQ ID NO: 19248. The symbols for consensus sequence are (1) uppercase letters for 100% identity in all positions of multiple sequence alignment output; (2) lowercase letters for >=70% identity; symbol; (3) “X” indicated <70% identity; (4) dashes “-” meaning that gaps were in >=70% sequences.

[0153] The consensus amino acid sequence can be used to identify DNA corresponding to the full scope of this invention that is useful in providing transgenic plants, for example corn and soybean plants with enhanced agronomic traits, for example improved nitrogen use efficiency, improved yield, improved water use efficiency and/or improved growth under cold stress, due to the expression in the plants of DNA encoding a protein with amino acid sequence identical to the consensus amino acid sequence.

### EXAMPLE 4

[0154] This example illustrates the identification of amino acid domain by Pfam analysis.

[0155] The amino acid sequence of the expressed proteins that were shown to be associated with an enhanced trait were analyzed for Pfam protein family against the current Pfam collection of multiple sequence alignments and hidden Markov models using the HMMER software in the appended computer listing. The Pfam protein families for the proteins of SEQ ID NO: 205 through 408 are shown in Table 16. The Hidden Markov model databases for the identified patent families are also in the appended computer listing allowing identification of other homologous proteins and their cognate encoding DNA to enable the full breadth of the invention for a person of ordinary skill in the art. Certain proteins are identified by a single Pfam domain and others by multiple Pfam domains. For instance, the protein with amino acids of SEQ ID NO: 214 is characterized by two Pfam domains, i.e. “C1_{—}4” and “Ssl1”. See also the protein with amino acids of SEQ ID NO:222 which is characterized by two copies of the Pfam domain “MatE”. In Table 16 “score” is the gathering score for the Hidden Markov Model of the domain which exceeds the gathering cutoff reported in Table 17.

TABLE 16

| PEP | | | | | |
|---|---|---|---|---|---|
| SEQ | | | | | |
| ID | Pfam domain | | | | |
| NO | name | begin | stop | score | E-value |
| 206 | zf-A20 | 10 | 34 | 35 | 2.40E−07 |
| 206 | zf-AN1 | 104 | 144 | 64.5 | 3.10E−16 |
| 207 | Cyclin_N | 33 | 168 | 12.1 | 0.00023 |
| 208 | Gpi16 | 9 | 603 | 1272 | 0 |
| 212 | BSD | 100 | 167 | 44.7 | 2.80E−10 |
| 212 | BSD | 179 | 244 | 67.5 | 3.90E−17 |
| 213 | Catalase | 18 | 401 | 977.7 | 3.80E−291 |
| 214 | Ssl1 | 22 | 277 | 646.3 | 2.20E−191 |
| 214 | C1_4 | 361 | 409 | 101.1 | 2.90E−27 |
| 215 | Bromodomain | 119 | 208 | 105.8 | 1.10E−28 |
| 216 | Pkinase | 75 | 343 | −9.1 | 1.60E−07 |
| 217 | PTR2 | 133 | 544 | 197.2 | 3.50E−56 |
| 218 | FTCD_N | 5 | 195 | 377.6 | 1.70E−110 |
| 219 | Abhydrolase_1 | 50 | 272 | 30.4 | 3.00E−06 |
| 220 | HhH-GPD | 172 | 317 | 88.2 | 2.30E−23 |
| 222 | MatE | 40 | 200 | 121.9 | 1.60E−33 |
| 222 | MatE | 261 | 433 | 96 | 1.00E−25 |
| 224 | ubiquitin | 48 | 120 | 24.7 | 0.00029 |
| 224 | BAG | 138 | 219 | 94.2 | 3.50E−25 |
| 225 | Lipase_GDSL | 37 | 365 | 370.9 | 1.80E−108 |
| 226 | DUF231 | 280 | 449 | 234.8 | 1.60E−67 |
| 227 | Aldedh | 16 | 485 | 842 | 2.80E−250 |
| 228 | RRM_1 | 110 | 181 | 79.9 | 7.10E−21 |
| 228 | RRM_1 | 214 | 284 | 87.8 | 2.90E−23 |
| 229 | GATase_2 | 2 | 162 | 10.5 | 7.60E−12 |
| 229 | Asn_synthase | 211 | 478 | 335.9 | 6.10E−98 |
| 230 | zf-C2H2 | 273 | 295 | 30.6 | 5.00E−06 |
| 231 | HLH | 62 | 113 | 39 | 1.50E−08 |
| 232 | PP2C | 39 | 323 | 106.9 | 5.20E−29 |
| 233 | zf-C3HC4 | 96 | 137 | 33.4 | 7.10E−07 |
| 234 | AP2 | 83 | 146 | 144.5 | 2.60E−40 |
| 235 | Homeobox | 84 | 145 | 72.6 | 1.10E−18 |
| 236 | zf-C3HC4 | 87 | 129 | 31.8 | 2.10E−06 |
| 237 | Acyl_transf_1 | 52 | 354 | −13.2 | 6.40E−11 |
| 238 | Aldo_ket_red | 5 | 292 | 465.6 | 5.50E−137 |
| 239 | adh_short | 13 | 179 | 55.1 | 2.00E−13 |
| 240 | HMG_CoA_synt | 5 | 453 | 992.9 | 1.00E−295 |
| 241 | SRF-TF | 9 | 59 | 121.8 | 1.80E−33 |
| 241 | K-box | 75 | 175 | 148.8 | 1.20E−41 |
| 242 | Ribosomal_S8e | 1 | 237 | 327.1 | 2.70E−95 |
| 243 | zf-C3HC4 | 103 | 144 | 37.8 | 3.30E−08 |
| 244 | zf-C2H2 | 4 | 26 | 22.3 | 0.0015 |
| 244 | zf-C2H2 | 204 | 226 | 22.4 | 0.0014 |
| 244 | zf-C2H2 | 236 | 258 | 20.6 | 0.005 |
| 245 | Aa_trans | 45 | 439 | 358 | 1.30E−104 |
| 246 | LEA_4 | 71 | 141 | 15.6 | 0.05 |
| 247 | p450 | 66 | 499 | 209.4 | 7.60E−60 |
| 248 | p450 | 40 | 503 | 289.8 | 4.70E−84 |
| 249 | Phi_1 | 25 | 278 | 515 | 7.40E−152 |
| 250 | zf-B_box | 3 | 47 | 56.2 | 9.50E−14 |
| 251 | PP2C | 84 | 348 | 267.9 | 1.80E−77 |
| 254 | Radical_SAM | 171 | 337 | 77.3 | 4.40E−20 |
| 255 | Pkinase | 25 | 283 | 174.5 | 2.30E−49 |
| 256 | adh_short | 6 | 182 | 42.9 | 9.80E−10 |
| 257 | Skp1_POZ | 4 | 64 | 105.1 | 1.80E−28 |
| 257 | Skp1 | 112 | 190 | 173 | 6.70E−49 |
| 258 | DPBB_1 | 73 | 151 | 142.6 | 9.30E−40 |
| 258 | Pollen_allerg_1 | 162 | 239 | 163.9 | 3.70E−46 |
| 259 | LRRNT_2 | 18 | 58 | 40.7 | 4.40E−09 |
| 259 | LRR_1 | 86 | 108 | 12.3 | 1.6 |
| 259 | LRR_1 | 109 | 133 | 15.7 | 0.15 |
| 259 | LRR_1 | 134 | 157 | 17.4 | 0.047 |
| 259 | LRR_1 | 158 | 177 | 8.3 | 11 |
| 259 | LRR_1 | 179 | 202 | 12.5 | 1.3 |
| 259 | Pkinase | 334 | 601 | 3.8 | 2.90E−08 |
| 260 | Methyltransf_11 | 135 | 225 | 25.7 | 0.00015 |
| 261 | Ubie_methyltran | 34 | 287 | 368.5 | 9.10E−108 |
| 261 | Methyltransf_11 | 88 | 205 | 70.4 | 5.00E−18 |
| 261 | Methyltransf_12 | 88 | 203 | 38.6 | 1.90E−08 |
| 262 | MtN3_slv | 11 | 100 | 69.4 | 9.90E−18 |
| 262 | MtN3_slv | 135 | 221 | 122.5 | 1.10E−33 |
| 263 | Cys_Met_Meta_PP | 88 | 460 | 768.4 | 3.90E−228 |
| 263 | Beta_elim_lyase | 129 | 376 | −107.7 | 0.0016 |
| 264 | PAR1 | 1 | 181 | 469.5 | 3.60E−138 |
| 265 | Chal_sti_synt_C | 350 | 493 | 13.4 | 0.00012 |
| 266 | Cyclin_N | 43 | 195 | 113.1 | 7.30E−31 |
| 267 | Pkinase | 21 | 418 | 193.4 | 5.00E−55 |
| 268 | Brix | 96 | 271 | 216.4 | 5.60E−62 |
| 269 | tRNA-synt_2b | 81 | 250 | 166.9 | 4.70E−47 |
| 269 | HGTP_anticodon | 402 | 486 | 17.1 | 0.00088 |
| 270 | Proteasome | 38 | 233 | 81.4 | 2.50E−21 |
| 271 | Ammonium_transp | 19 | 423 | 597.5 | 1.10E−176 |
| 272 | AUX_IAA | 8 | 204 | 332.3 | 7.20E−97 |
| 273 | Lectin_legB | 25 | 215 | −14.8 | 1.60E−09 |
| 273 | Lectin_legA | 236 | 279 | 31 | 3.70E−06 |
| 273 | Pkinase | 355 | 624 | 179.3 | 8.50E−51 |
| 273 | Pkinase_Tyr | 355 | 624 | 116.1 | 9.20E−32 |
| 274 | PGK | 2 | 395 | 675.6 | 3.30E−200 |
| 275 | Sugar_tr | 27 | 491 | 416.7 | 2.90E−122 |
| 275 | MFS_1 | 31 | 467 | 75.7 | 1.30E−19 |
| 276 | Hpt | 30 | 112 | 54.9 | 2.30E−13 |
| 278 | RRN3 | 37 | 620 | 1128.7 | 0 |
| 279 | Sugar_tr | 89 | 546 | 595 | 6.00E−176 |
| 279 | MFS_1 | 93 | 505 | 100.6 | 4.10E−27 |
| 280 | AP2 | 25 | 88 | 133.6 | 4.70E−37 |
| 281 | Pkinase | 4 | 205 | 28 | 1.20E−09 |
| 282 | ADH_N | 33 | 119 | 53.8 | 5.30E−13 |
| 282 | ADH_zinc_N | 155 | 318 | 43.1 | 8.50E−10 |
| 283 | ADH_N | 34 | 149 | 129.2 | 1.00E−35 |
| 283 | ADH_zinc_N | 180 | 315 | 119.1 | 1.10E−32 |
| 284 | ADH_N | 40 | 165 | 112.8 | 8.90E−31 |
| 284 | ADH_zinc_N | 196 | 338 | 125.2 | 1.60E−34 |
| 285 | ADH_N | 43 | 173 | 105.4 | 1.50E−28 |
| 285 | ADH_zinc_N | 204 | 348 | 112.5 | 1.10E−30 |
| 286 | Mov34 | 23 | 133 | 136.1 | 8.40E−38 |
| 287 | RRM_1 | 36 | 107 | 101.5 | 2.20E−27 |
| 288 | RRM_1 | 36 | 107 | 73 | 8.20E−19 |
| 289 | FA_desaturase | 54 | 269 | 135 | 1.80E−37 |
| 290 | Ras | 15 | 176 | 336.7 | 3.50E−98 |
| 291 | SAC3_GANP | 24 | 209 | 128.9 | 1.20E−35 |
| 292 | RNA_pol_L | 6 | 83 | 75.5 | 1.50E−19 |
| 293 | GSHPx | 8 | 117 | 234.4 | 2.20E−67 |
| 294 | FKBP_C | 115 | 214 | 127.7 | 3.00E−35 |
| 295 | Ras | 10 | 171 | 339 | 7.10E−99 |
| 296 | UQ_con | 15 | 148 | 81.4 | 2.50E−21 |
| 297 | Proteasome | 28 | 215 | 246.5 | 4.90E−71 |
| 298 | Ras | 14 | 175 | 317.4 | 2.20E−92 |
| 299 | Ldh_1_N | 83 | 226 | 247.5 | 2.40E−71 |
| 299 | Ldh_1_C | 228 | 394 | 199.8 | 5.50E−57 |
| 300 | Ras | 8 | 209 | 221.5 | 1.60E−63 |
| 301 | ThiF | 30 | 167 | −12.5 | 3.50E−05 |
| 303 | Sterol_desat | 10 | 215 | 128.3 | 1.90E−35 |
| 304 | Sterol_desat | 12 | 227 | 195.1 | 1.50E−55 |
| 306 | Enolase_N | 3 | 133 | 227.6 | 2.40E−65 |
| 306 | Enolase_C | 138 | 424 | 567.5 | 1.10E−167 |
| 307 | NTP_transferase | 4 | 267 | 89.5 | 9.20E−24 |
| 308 | NAD_binding_2 | 16 | 185 | −39.1 | 1.10E−05 |
| 308 | NAD_Gly3P_dh_N | 17 | 154 | −24.6 | 0.00015 |
| 308 | F420_oxidored | 18 | 265 | 341.2 | 1.60E−99 |
| 309 | F420_oxidored | 4 | 255 | 278.2 | 1.40E−80 |
| 310 | ADH_N | 27 | 145 | 115.5 | 1.40E−31 |
| 310 | ADH_zinc_N | 175 | 318 | 138.1 | 2.10E−38 |
| 311 | Aminotran_1_2 | 44 | 399 | 178.8 | 1.20E−50 |
| 312 | Aldedh | 11 | 476 | 903.9 | 6.50E−269 |
| 313 | NTP_transferase | 5 | 269 | 52.4 | 1.40E−13 |
| 314 | PFK | 6 | 281 | 515.1 | 7.10E−152 |
| 315 | NTP_transferase | 10 | 288 | 20.8 | 2.90E−11 |
| 316 | Aminotran_1_2 | 114 | 480 | 492.5 | 4.40E−145 |
| 317 | NTP_transferase | 94 | 349 | 346.3 | 4.40E−101 |
| 318 | Aldedh | 13 | 475 | 734.7 | 5.60E−218 |
| 319 | Aminotran_3 | 113 | 448 | 471.8 | 7.60E−139 |
| 320 | Cys_Met_Meta_PP | 117 | 395 | −276.6 | 0.0042 |
| 320 | Aminotran_1_2 | 118 | 471 | 184.5 | 2.30E−52 |
| 321 | Aminotran_1_2 | 121 | 483 | 125.6 | 1.20E−34 |
| 322 | DAO | 214 | 489 | −32.3 | 0.0011 |
| 322 | Pyr_redox_2 | 214 | 474 | 69.5 | 9.70E−18 |
| 322 | Pyr_redox | 343 | 433 | 55.7 | 1.40E−13 |
| 323 | PGM_PMM_I | 127 | 272 | 140.6 | 3.80E−39 |
| 323 | PGM_PMM_II | 297 | 407 | 69.6 | 8.70E−18 |
| 323 | PGM_PMM_III | 408 | 528 | 105.7 | 1.20E−28 |
| 323 | PGM_PMM_IV | 543 | 632 | 55.6 | 1.50E−13 |
| 324 | Aminotran_3 | 192 | 522 | 634.1 | 1.00E−187 |
| 325 | Biotin_lipoyl | 91 | 164 | 82.6 | 1.10E−21 |
| 325 | E3_binding | 198 | 234 | 74.5 | 3.00E−19 |
| 325 | 2-oxoacid_dh | 262 | 493 | 486.5 | 2.70E−143 |
| 326 | Biotin_lipoyl | 91 | 164 | 79.5 | 9.50E−21 |
| 326 | E3_binding | 198 | 234 | 76.7 | 6.40E−20 |
| 326 | 2-oxoacid_dh | 261 | 492 | 483.1 | 2.90E−142 |
| 327 | Transaldolase | 101 | 401 | 580 | 2.00E−171 |
| 328 | Biotin_lipoyl | 92 | 165 | 88.9 | 1.40E−23 |
| 328 | E3_binding | 201 | 237 | 69 | 1.40E−17 |
| 328 | 2-oxoacid_dh | 261 | 491 | 478.4 | 7.90E−141 |
| 329 | cNMP_binding | 103 | 191 | 73.7 | 5.30E−19 |
| 330 | HI0933_like | 90 | 415 | −239.1 | 0.0006 |
| 330 | FAD_binding_2 | 91 | 401 | −113.1 | 0.0016 |
| 330 | GIDA | 91 | 420 | −208 | 0.00018 |
| 330 | DAO | 91 | 353 | −32.7 | 0.0012 |
| 330 | Pyr_redox_2 | 91 | 399 | 237.8 | 2.10E−68 |
| 330 | Pyr_redox | 261 | 354 | 100.9 | 3.30E−27 |
| 330 | Pyr_redox_dim | 428 | 537 | 164.9 | 1.90E−46 |
| 331 | GIDA | 94 | 435 | −211.8 | 0.00032 |
| 331 | Pyr_redox_2 | 94 | 413 | 217.1 | 3.40E−62 |
| 331 | Pyr_redox | 271 | 368 | 107.5 | 3.60E−29 |
| 331 | Pyr_redox_dim | 443 | 552 | 193.7 | 3.90E−55 |
| 332 | FAD_binding_2 | 99 | 410 | −122.5 | 0.0042 |
| 332 | Pyr_redox_2 | 99 | 409 | 275 | 1.30E−79 |
| 332 | Pyr_redox | 266 | 362 | 114.7 | 2.30E−31 |
| 332 | Pyr_redox_dim | 437 | 546 | 202.7 | 7.40E−58 |
| 333 | Biotin_lipoyl | 92 | 165 | 81.4 | 2.40E−21 |
| 333 | E3_binding | 202 | 238 | 68.7 | 1.60E−17 |
| 333 | 2-oxoacid_dh | 261 | 491 | 485.1 | 7.30E−143 |
| 334 | DUF6 | 117 | 242 | 57.9 | 3.00E−14 |
| 334 | DUF250 | 251 | 397 | 196.5 | 5.70E−56 |
| 335 | Alpha-amylase | 61 | 489 | −62.8 | 4.70E−06 |
| 336 | GAF | 141 | 304 | 86.6 | 6.80E−23 |
| 336 | Phytochrome | 315 | 501 | 33 | 8.10E−07 |
| 336 | HWE_HK | 520 | 600 | 115.8 | 1.10E−31 |
| 336 | Response_reg | 732 | 848 | 36.6 | 7.80E−08 |
| 337 | NIR_SIR_ferr | 69 | 137 | 83 | 8.50E−22 |
| 337 | NIR_SIR | 169 | 332 | 206.4 | 5.80E−59 |
| 337 | NIR_SIR_ferr | 348 | 419 | 75.4 | 1.50E−19 |
| 338 | Fer4 | 9 | 32 | 9.4 | 0.011 |
| 338 | Fer4 | 177 | 202 | 9.1 | 0.012 |
| 339 | PGI | 52 | 541 | 1099 | 0 |
| 340 | Molybdop_Fe4S4 | 2 | 68 | 80.6 | 4.30E−21 |
| 340 | Molybdopterin | 70 | 501 | 390.7 | 1.90E−114 |
| 340 | Molydop_binding | 627 | 738 | 174.9 | 1.80E−49 |
| 341 | PGI | 55 | 545 | 751.6 | 4.50E−223 |
| 342 | Iso_dh | 28 | 469 | 379.1 | 6.10E−111 |
| 343 | NIR_SIR_ferr | 78 | 147 | 71.9 | 1.80E−18 |
| 343 | NIR_SIR | 179 | 338 | 199.5 | 6.80E−57 |
| 343 | NIR_SIR_ferr | 354 | 425 | 67.3 | 4.50E−17 |
| 344 | DUF783 | 27 | 236 | 348.6 | 9.00E−102 |
| 346 | PA | 43 | 144 | 89.4 | 9.50E−24 |
| 346 | zf-C3HC4 | 232 | 273 | 34.7 | 3.00E−07 |
| 347 | Peptidase_C26 | 13 | 248 | 158.9 | 1.10E−44 |
| 348 | SURF5 | 17 | 143 | 252 | 1.10E−72 |
| 349 | DUF962 | 7 | 171 | 329.8 | 4.20E−96 |
| 350 | Cyclin_N | 191 | 318 | 198.5 | 1.40E−56 |
| 350 | Cyclin_C | 320 | 447 | 173.7 | 4.00E−49 |
| 351 | WRKY | 237 | 297 | 137.6 | 2.90E−38 |
| 352 | SBDS | 6 | 244 | 261.6 | 1.40E−75 |
| 353 | DUF167 | 38 | 112 | 82.3 | 1.40E−21 |
| 355 | zf-CCCH | 2 | 25 | 30.5 | 5.40E−06 |
| 356 | DIM1 | 5 | 139 | 78.9 | 1.40E−20 |
| 358 | Rieske | 100 | 198 | 68.5 | 1.90E−17 |
| 359 | Fe_bilin_red | 112 | 333 | 416.6 | 3.20E−122 |
| 360 | Radical_SAM | 123 | 282 | 47.3 | 4.70E−11 |
| 361 | LEA_4 | 107 | 180 | 55.3 | 1.80E−13 |
| 363 | Pribosyltran | 92 | 236 | 146.3 | 7.30E−41 |
| 364 | Rhodanese | 254 | 367 | 102 | 1.60E−27 |
| 367 | DRMBL | 248 | 368 | 129 | 1.20E−35 |
| 368 | MIP | 30 | 251 | 276.9 | 3.60E−80 |
| 369 | EBP | 23 | 219 | 362.2 | 7.50E−106 |
| 371 | CcmH | 1 | 139 | 16.6 | 6.30E−09 |
| 373 | CTP_transf_2 | 30 | 170 | 48.4 | 2.20E−11 |
| 374 | AP2 | 46 | 109 | 145.7 | 1.10E−40 |
| 375 | HLH | 48 | 97 | 52.3 | 1.40E−12 |
| 376 | Myb_DNA-binding | 59 | 104 | 58.1 | 2.50E−14 |
| 377 | Ham1p_like | 12 | 188 | 153.2 | 6.10E−43 |
| 378 | SRF-TF | 9 | 59 | 112.2 | 1.40E−30 |
| 378 | K-box | 74 | 174 | 76.9 | 5.80E−20 |
| 379 | Response_reg | 10 | 152 | 75.9 | 1.20E−19 |
| 380 | Nuc_sug_transp | 105 | 341 | 17.6 | 1.50E−14 |
| 381 | SRF-TF | 9 | 59 | 105.7 | 1.20E−28 |
| 381 | K-box | 70 | 167 | 6.3 | 0.00011 |
| 382 | E2F_TDP | 16 | 81 | 111.2 | 2.60E−30 |
| 382 | E2F_TDP | 151 | 231 | 128 | 2.30E−35 |
| 384 | RNA_pol_Rpb6 | 61 | 114 | 86.8 | 5.90E−23 |
| 386 | Myb_DNA-binding | 45 | 96 | 41.3 | 2.90E−09 |
| 387 | zf-C3HC4 | 83 | 122 | 41.3 | 2.90E−09 |
| 388 | zf-C3HC4 | 42 | 86 | 35.1 | 2.20E−07 |
| 389 | AUX_IAA | 11 | 234 | 381.5 | 1.10E−111 |
| 390 | Myb_DNA-binding | 14 | 61 | 49.1 | 1.30E−11 |
| 390 | Myb_DNA-binding | 67 | 112 | 38.4 | 2.10E−08 |
| 391 | AP2 | 49 | 121 | 137.7 | 2.80E−38 |
| 391 | AP2 | 151 | 215 | 101.8 | 1.80E−27 |
| 392 | TCP | 56 | 241 | 161.1 | 2.60E−45 |
| 393 | zf-C3HC4 | 383 | 424 | 43.1 | 8.30E−10 |
| 394 | SET | 109 | 238 | 182.9 | 7.10E−52 |
| 395 | zf-C2H2 | 36 | 59 | 18 | 0.031 |
| 396 | zf-C3HC4 | 206 | 246 | 34.5 | 3.40E−07 |
| 397 | Myb_DNA-binding | 26 | 75 | 34.3 | 3.70E−07 |
| 397 | Myb_DNA-binding | 134 | 181 | 53.7 | 5.30E−13 |
| 398 | bZIP_1 | 171 | 234 | 26.9 | 6.50E−05 |
| 398 | bZIP_2 | 171 | 221 | 25.3 | 0.00019 |
| 399 | zf-C3HC4 | 111 | 152 | 37.5 | 4.10E−08 |
| 400 | WD40 | 15 | 51 | 16.6 | 0.079 |
| 400 | WD40 | 59 | 95 | 23.3 | 0.00075 |
| 400 | WD40 | 210 | 246 | 16.4 | 0.093 |
| 400 | WD40 | 329 | 366 | 21.2 | 0.0033 |
| 401 | AP2 | 15 | 80 | 89.1 | 1.20E−23 |
| 402 | Arm | 35 | 75 | 34.2 | 4.00E−07 |
| 402 | Arm | 297 | 337 | 21.5 | 0.0027 |
| 403 | Aminotran_3 | 42 | 384 | 494.7 | 9.80E−146 |
| 404 | iPGM_N | 3 | 383 | 716.6 | 1.60E−212 |
| 404 | Metalloenzyme | 393 | 512 | 147.2 | 3.80E−41 |
| 405 | DUF231 | 239 | 408 | 227.7 | 2.30E−65 |
| 406 | DUF231 | 231 | 404 | 334.6 | 1.50E−97 |
| 407 | DUF231 | 237 | 405 | 336.4 | 4.40E−98 |
| 408 | NPH3 | 204 | 452 | 364.6 | 1.40E−106 |

TABLE 17

| Pfam domain | accession | gathering | |
|---|---|---|---|
| name | number | cutoff | domain description |
| 2-oxoacid_dh | PE00198.12 | −112 | 2-oxoacid dehydrogenases acyltransferase |
| | | | (catalytic domain) |
| ADH_N | PF08240.1 | −14.5 | Alcohol dehydrogenase GroES-like domain |
| ADH_zinc_N | PF00107.15 | 23.8 | Zinc-binding dehydrogenase |
| AP2 | PF00847.9 | 0 | AP2 domain |
| AUX_IAA | PF02309.6 | −83 | AUX/IAA family |
| Aa_trans | PF01490.7 | −128.4 | Transmembrane amino acid transporter protein |
| Abhydrolase_1 | PF00561.9 | 5.5 | alpha/beta hydrolase fold |
| Acyl_transf_1 | PF00698.10 | −120 | Acyl transferase domain |
| Aldedh | PF00171.11 | −295 | Aldehyde dehydrogenase family |
| Aldo_ket_red | PF00248.10 | −97 | Aldo/keto reductase family |
| Alpha-amylase | PF00128.11 | −93 | Alpha amylase, catalytic domain |
| Aminotran_1_2 | PF00155.9 | −57.5 | Aminotransferase class I and II |
| Aminotran_3 | PF00202.10 | −207.6 | Aminotransferase class-III |
| Ammonium_transp | PF00909.10 | −144 | Ammonium Transporter Family |
| Arm | PF00514.11 | 40.1 | Armadillo/beta-catenin-like repeat |
| Asn_synthase | PF00733.10 | −52.8 | Asparagine synthase |
| BAG | PF02179.5 | 25 | BAG domain |
| BSD | PF03909.6 | 25 | BSD domain |
| Beta_elim_lyase | PF01212.10 | −114.4 | Beta-eliminating lyase |
| Biotin_lipoyl | PF00364.11 | −2.3 | Biotin-requiring enzyme |
| Brix | PF04427.7 | 11.4 | Brix domain |
| Bromodomain | PF00439.13 | 8.9 | Bromodomain |
| C1_4 | PF07975.1 | 25 | TFIIH C1-like domain |
| CTP_transf_2 | PF01467.15 | −11.8 | Cytidylyltransferase |
| Catalase | PF00199.8 | −229 | Catalase |
| CcmH | PF03918.4 | −30.8 | Cytochrome C biogenesis protein |
| Chal_sti_synt_C | PF02797.5 | −6.1 | Chalcone and stilbene synthases, C-terminal |
| | | | domain |
| Cyclin_C | PF02984.7 | −13 | Cyclin, C-terminal domain |
| Cyclin_N | PF00134.12 | −14.7 | Cyclin, N-terminal domain |
| Cys_Met_Meta_PP | PF01053.9 | −278.4 | Cys/Met metabolism PLP-dependent enzyme |
| DAO | PF01266.11 | −36.5 | FAD dependent oxidoreductase |
| DIM1 | PF02966.6 | 25 | Mitosis protein DIM1 |
| DPBB_1 | PF03330.7 | 30 | Rare lipoprotein A (RlpA)-like double-psi beta- |
| | | | barrel |
| DRMBL | PF07522.3 | 25 | DNA repair metallo-beta-lactamase |
| DUE167 | PF02594.6 | 25 | Uncharacterized ACR, YggU family COG1872 |
| DUF231 | PF03005.5 | −58 | Arabidopsis proteins of unknown function |
| DUF250 | PF03151.6 | 125 | Domain of unknown function, DUF250 |
| DUF6 | PF00892.9 | 30 | Integral membrane protein DUF6 |
| DUF783 | PF05615.2 | 25 | Protein of unknown function (DUF783) |
| DUF962 | PF06127.1 | 25 | Protein of unknown function (DUF962) |
| E2F_TDP | PF02319.9 | 17 | E2F/DP family winged-helix DNA-binding |
| | | | domain |
| E3_binding | PF02817.6 | 10 | e3 binding domain |
| EBP | PF05241.1 | 25 | Emopamil binding protein |
| Enolase_C | PF00113.11 | −34 | Enolase, C-terminal TIM barrel domain |
| Enolase_N | PF03952.5 | −4 | Enolase, N-terminal domain |
| F420_oxidored | PF03807.5 | −34.5 | NADP oxidoreductase coenzyme F420- |
| | | | dependent |
| FAD_binding_2 | PF00890.13 | −124.8 | FAD binding domain |
| FA_desaturase | PF00487.13 | −46 | Fatty acid desaturase |
| FKBP_C | PF00254.16 | −7.6 | FKBP-type peptidyl-prolyl cis-trans isomerase |
| FTCD_N | PF07837.2 | −67.7 | Formiminotransferase domain, N-terminal |
| | | | subdomain |
| Fe_bilin_red | PF05996.2 | 25 | Ferredoxin-dependent bilin reductase |
| Fer4 | PF00037.14 | 8 | 4Fe-4S binding domain |
| GAF | PF01590.14 | 23 | GAF domain |
| GATase_2 | PF00310.10 | −106.2 | Glutamine amidotransferases class-II |
| GIDA | PF01134.11 | −226.7 | Glucose inhibited division protein A |
| GSHPx | PF00255.9 | −16 | Glutathione peroxidase |
| Gpi16 | PF04113.3 | −207.8 | Gpi16 subunit, GPI transamidase component |
| HGTP_anticodon | PF03129.9 | −2 | Anticodon binding domain |
| HI0933_like | PF03486.4 | −255.8 | HI0933-like protein |
| HLH | PF00010.15 | 8.2 | Helix-loop-helix DNA-binding domain |
| HMG_CoA_synt | PF01154.7 | −230 | Hydroxymethylglutaryl-coenzyme A synthase |
| HWE_HK | PF07536.4 | 25 | HWE histidine kinase |
| Ham1p_like | PF01725.6 | −46 | Ham1 family |
| HhH-GPD | PF00730.13 | 13.5 | HhH-GPD superfamily base excision DNA |
| | | | repair protein |
| Homeobox | PF00046.17 | −4.1 | Homeobox domain |
| Hpt | PF01627.11 | 25 | Hpt domain |
| Iso_dh | PF00180.9 | −97 | Isocitrate/isopropylmalate dehydrogenase |
| K-box | PF01486.7 | 0 | K-box region |
| LEA_4 | PF02987.6 | 25 | Late embryogenesis abundant protein |
| LRRNT_2 | PF08263.1 | 18.6 | Leucine rich repeat N-terminal domain |
| LRR_1 | PF00560.20 | 19 | Leucine Rich Repeat |
| Ldh_1_C | PF02866.6 | −13 | lactate/malate dehydrogenase, alpha/beta C- |
| | | | terminal domain |
| Ldh_1_N | PF00056.11 | −31.3 | lactate/malate dehydrogenase, NAD binding |
| | | | domain |
| Lectin_legA | PF00138.7 | 19 | Legume lectins alpha domain |
| Lectin_legB | PF00139.9 | −77 | Legume lectins beta domain |
| Lipase_GDSL | PF00657.11 | 10.9 | GDSL-like Lipase/Acylhydrolase |
| MFS_1 | PF07690.4 | 23.5 | Major Facilitator Superfamily |
| MIP | PF00230.8 | −62 | Major intrinsic protein |
| MatE | PF01554.8 | 59.6 | MatE |
| Metalloenzyme | PF01676.7 | −14.4 | Metalloenzyme superfamily |
| Methyltransf_11 | PF08241.1 | 17.1 | Methyltransferase domain |
| Methyltransf_12 | PF08242.1 | 21.4 | Methyltransferase domain |
| Molybdop_Fe4S4 | PF04879.5 | 13.6 | Molybdopterin oxidoreductase Fe4S4 domain |
| Molybdopterin | PF00384.11 | −50 | Molybdopterin oxidoreductase |
| Molydop_binding | PF01568.10 | 1.1 | Molydopterin dinucleotide binding domain |
| Mov34 | PF01398.10 | −4 | Mov34/MPN/PAD-1 family |
| MtN3_slv | PF03083.5 | −0.8 | MtN3/saliva family |
| Myb_DNA-binding | PF00249.18 | 19.1 | Myb-like DNA-binding domain |
| NAD_Gly3P_dh_N | PF01210.12 | −44 | NAD-dependent glycerol-3-phosphate |
| | | | dehydrogenase N-terminus |
| NAD_binding_2 | PF03446.4 | −63.5 | NAD binding domain of 6-phosphogluconate |
| | | | dehydrogenase |
| NIR_SIR | PF01077.10 | −25 | Nitrite and sulphite reductase 4Fe-4S domain |
| NIR_SIR_ferr | PF03460.5 | 20 | Nitrite/Sulfite reductase ferredoxin-like half |
| | | | domain |
| NPH3 | PF03000.4 | 25 | NPH3 family |
| NTP_transferase | PF00483.12 | −90.5 | Nucleotidyl transferase |
| Nuc_sug_transp | PF04142.5 | −92.4 | Nucleotide-sugar transporter |
| PA | PF02225.10 | 13 | PA domain |
| PAR1 | PF06521.1 | 25 | PAR1 protein |
| PFK | PF00365.9 | −132 | Phosphofructokinase |
| PGI | PF00342.8 | −168.9 | Phosphoglucose isomerase |
| PGK | PF00162.8 | −95.1 | Phosphoglycerate kinase |
| PGM_PMM_I | PF02878.5 | −37.5 | Phosphoglucomutase/phosphomannomutase, |
| | | | alpha/beta/alpha domain I |
| PGM_PMM_II | PF02879.5 | −20 | Phosphoglucomutase/phosphomannomutase, |
| | | | alpha/beta/alpha domain II |
| PGM_PMM_III | PF02880.5 | −11 | Phosphoglucomutase/phosphomannomutase, |
| | | | alpha/beta/alpha domain III |
| PGM_PMM_IV | PF00408.9 | −6 | Phosphoglucomutase/phosphomannomutase, |
| | | | C-terminal domain |
| PP2C | PF00481.10 | −44 | Protein phosphatase 2C |
| PTR2 | PF00854.11 | −50 | POT family |
| Peptidase_C26 | PF07722.2 | 25 | Peptidase C26 |
| Phi_1 | PF04674.2 | 25 | Phosphate-induced protein 1 conserved region |
| Phytochrome | PF00360.9 | 11 | Phytochrome region |
| Pkinase | PF00069.14 | −70.8 | Protein kinase domain |
| Pkinase_Tyr | PF07714.4 | 65 | Protein tyrosine kinase |
| Pollen_allerg_1 | PF01357.10 | 17.2 | Pollen allergen |
| Pribosyltran | PF00156.14 | 2 | Phosphoribosyl transferase domain |
| Proteasome | PF00227.14 | −36.7 | Proteasome A-type and B-type |
| Pyr_redox | PF00070.16 | 5 | Pyridine nucleotide-disulphide oxidoreductase |
| Pyr_redox_2 | PF07992.2 | −20 | Pyridine nucleotide-disulphide oxidoreductase |
| Pyr_redox_dim | PF02852.11 | −13 | Pyridine nucleotide-disulphide oxidoreductase, |
| | | | dimerisation domain |
| RNA_pol_L | PF01193.11 | 16.9 | RNA polymerase Rpb3/Rpb11 dimerisation |
| | | | domain |
| RNA_pol_Rpb6 | PF01192.12 | 25 | RNA polymerase Rpb6 |
| RRM_1 | PF00076.10 | 15.2 | RNA recognition motif. (a.k.a. RRM, RBD, or |
| | | | RNP domain) |
| RRN3 | PF05327.1 | 25 | RNA polymerase I specific transcription |
| | | | initiation factor RRN3 |
| Radical_SAM | PF04055.8 | 8.4 | Radical SAM superfamily |
| Ras | PF00071.11 | 18 | Ras family |
| Response_reg | PF00072.11 | −14.4 | Response regulator receiver domain |
| Rhodanese | PF00581.9 | 25 | Rhodanese-like domain |
| Ribosomal_S8e | PF01201.11 | 25 | Ribosomal protein S8e |
| Rieske | PF00355.15 | −7 | Rieske [2Fe-2S] domain |
| SAC3_GANP | PF03399.5 | −15.2 | SAC3/GANP/Nin1/mts3/elF-3 p25 family |
| SBDS | PF01172.7 | −78 | Shwachman-Bodian-Diamond syndrome |
| | | | (SBDS) proteins |
| SET | PF00856.16 | 15.8 | SET domain |
| SRF-TF | PF00319.8 | 11 | SRF-type transcription factor (DNA-binding and |
| | | | dimerisation domain) |
| SURF5 | PF06179.2 | 25 | Surfeit locus protein 5 |
| Skp1 | PF01466.8 | −2 | Skp1 family, dimerisation domain |
| Skp1_POZ | PF03931.4 | 14.9 | Skp1 family, tetramerisation domain |
| Ssl1 | PF04056.4 | −151.8 | Ssl1-like |
| Sterol_desat | PF01598.7 | −13 | Sterol desaturase |
| Sugar_tr | PF00083.12 | −85 | Sugar (and other) transporter |
| TCP | PF03634.3 | −38 | TCP family transcription factor |
| ThiF | PF00899.10 | −38.4 | ThiF family |
| Transaldolase | PF00923.8 | −49 | Transaldolase |
| UQ_con | PF00179.15 | −30 | Ubiquitin-conjugating enzyme |
| Ubie_methyltran | PF01209.8 | −117 | ubiE/COQ5 methyltransferase family |
| WD40 | PF00400.19 | 21.4 | WD domain, G-beta repeat |
| WRKY | PF03106.5 | 25 | WRKY DNA-binding domain |
| adh_short | PF00106.13 | −46.6 | short chain dehydrogenase |
| bZIP_1 | PF00170.10 | 16.5 | bZIP transcription factor |
| bZIP_2 | PF07716.4 | 15 | Basic region leucine zipper |
| cNMP_binding | PF00027.17 | 20.6 | Cyclic nucleotide-binding domain |
| iPGM_N | PF06415.3 | −263.4 | BPG-independent PGAM N-terminus (iPGM_N) |
| p450 | PF00067.11 | −105 | Cytochrome P450 |
| tRNA-synt_2b | PF00587.14 | −40.5 | tRNA synthetase class II core domain (G, H, P, |
| | | | S and T) |
| Ubiquitin | PF00240.12 | 19.4 | Ubiquitin family |
| zf-A20 | PF01754.6 | 25 | A20-like zinc finger |
| zf-AN1 | PF01428.6 | 15 | AN1-like Zinc finger |
| zf-B_box | PF00643.13 | 11.1 | B-box zinc finger |
| zf-C2H2 | PF00096.14 | 19 | Zinc finger, C2H2 type |
| zf-C3HC4 | PF00097.12 | 16.9 | Zinc finger, C3HC4 type (RING finger) |
| zf-CCCH | PF00642.14 | 10.7 | Zinc finger C-x8-C-x5-C-x3-H type (and similar) |

### EXAMPLE 5

[0156] This example illustrates the construction of plasmids for transferring recombinant DNA into plant cells which can be regenerated into transgenic crop plants of this invention. Primers for PCR amplification of protein coding nucleotides of recombinant DNA are designed at or near the start and stop codons of the coding sequence, in order to eliminate most of the 5′ and 3′ untranslated regions. DNA of interest, i.e. each DNA identified in Table 1 and the DNA for the identified homologous genes, are cloned and amplified by PCR prior to insertion into the insertion site the base vector.

[0157] Elements of an exemplary common expression vector, pMON82060 are illustrated in Table 18. The exemplary base vector which is especially useful for corn transformation is illustrated in FIG. 2 and assembled using technology known in the art. The DNA of interest are inserted in a expression vector at the insertion site between the intronI of rice act 1 gene and the termination sequence of PinII gene.

TABLE 18
pMON82060

| | | | Coordinates |
|---|---|---|---|
| | | | of SEQ ID |
| function | name | annotation | NO: 19249 |
| Agro | B-AGRtu.right border | Agro right border sequence, essential for | 5235-5591 |
| transformation | | transfer of T-DNA. | |
| Gene of | P-Os.Act1 | Promoter from the rice actin gene act1. | 5609-7009 |
| interest plant | L-Os.Act1 | Leader (first exon) from the rice actin 1 | |
| expression | | gene. | |
| cassette | I-Os.Act1 | First intron and flanking UTR exon | |
| | | sequences from the rice actin 1 gene | |
| | insertion site | | |
| | T-St.Pis4 | The 3′ non-translated region of the | 7084-8026 |
| | | potato proteinase inhibitor II gene which | |
| | | functions to direct polyadenylation of the | |
| | | mRNA | |
| Plant | P-CaMV.35S | CaMV 35S promoter | 8075-8398 |
| selectable | L-CaMV.35S | 5′ UTR from the 35S RNA of CaMV | |
| marker | CR-Ec.nptII-Tn5 | nptII selectable marker that confers | 8432-9226 |
| expression | | resistance to neomycin and kanamycin | |
| cassette | T-AGRtu.nos | A 3′ non-translated region of the | 9255-9507 |
| | | nopaline synthase gene of | |
| | | Agrobacterium tumefaciens Ti plasmid | |
| | | which functions to direct | |
| | | polyadenylation of the mRNA.. | |
| Agro | B-AGRtu.left border | Agro left border sequence, essential for | 39-480 |
| transformation | | transfer of T-DNA. | |
| Maintenance | OR-Ec.oriV-RK2 | The vegetative origin of replication from | 567-963 |
| in E. coli | | plasmid RK2. | |
| | CR-Ec.rop | Coding region for repressor of primer | 2472-2663 |
| | | from the ColE1 plasmid. Expression of | |
| | | this gene product interferes with primer | |
| | | binding at the origin of replication, | |
| | | keeping plasmid copy number low. | |
| | OR-Ec.ori-ColE1 | The minimal origin of replication from | 3091-3679 |
| | | the E. coli plasmid ColE1. | |
| | P-Ec.aadA-SPC/STR | promoter for Tn7 adenylyltransferase | 4210-4251 |
| | | (AAD(3″)) | |
| | CR-Ec.aadA- | Coding region for Tn7 | 4252-5040 |
| | SPC/STR | adenylyltransferase (AAD(3″)) | |
| | | conferring spectinomycin and | |
| | | streptomycin resistance. | |
| | T-Ec.aadA-SPC/STR | 3′ UTR from the Tn7 adenylyltransferase | 5041-5098 |
| | | (AAD(3″)) gene of E. coli. | |

[0158] Plasmids for use in transformation of soybean are also prepared. Elements of an exemplary common expression vector plasmid pMON82053 are shown in Table 19 below. This exemplary soybean transformation base vector illustrated in FIG. 3 was assembled using the technology known in the art. DNA of interest, i.e. each DNA identified in Table 1 and the DNA for the identified homologous genes, are cloned and amplified by PCR prior to insertion into the insertion site the base vector at the insertion site between the enhanced 35S CaMV promoter and the termination sequence of cotton E6 gene.

TABLE 19
pMON82053

| | | | Coordinates of SEQ ID |
|---|---|---|---|
| function | name | annotation | NO: 19250 |
| Agro | B-AGRtu.left border | Agro left border | 6144-6585 |
| transforamtion | | sequence, essential for | |
| | | transfer of T-DNA. | |
| Plant | P-At.Act7 | Promoter from the | 6624-7861 |
| selectable | | arabidopsis actin 7 gene | |
| marker | L-At.Act7 | 5′UTR of Arabidopsis | |
| expression | | Act7 gene | |
| cassette | I-At.Act7 | Intron from the | |
| | | Arabidopsis actin7 gene | |
| | TS-At.ShkG-CTP2 | Transit peptide region of | 7864-8091 |
| | | Arabidopsis EPSPS | |
| | CR-AGRtu.aroA- | Synthetic CP4 coding | 8092-9459 |
| | CP4.nno_At | region with dicot | |
| | | preferred codon usage. | |
| | T-AGRtu.nos | A 3′ non-translated region | 9466-9718 |
| | | of the nopaline synthase | |
| | | gene of Agrobacterium | |
| | | tumefaciens Ti plasmid | |
| | | which functions to direct | |
| | | polyadenylation of the | |
| | | mRNA. | |
| Gene of | P-CaMV.35S-enh | Promoter for 35S RNA | 1-613 |
| interest | | from CaMV containing a | |
| expression | | duplication of the −90 to −350 | |
| cassette | | region. | |
| | insertion site | | |
| | T-Gb.E6-3b | 3′ untranslated region | 688-1002 |
| | | from the fiber protein E6 | |
| | | gene of sea-island cotton; | |
| Agro | B-AGRtu.right border | Agro right border | 1033-1389 |
| transformation | | sequence, essential for | |
| | | transfer of T-DNA. | |
| Maintenance | OR-Ec.oriV-RK2 | The vegetative origin of | 5661-6057 |
| in E. coli | | replication from plasmid | |
| | | RK2. | |
| | CR-Ec.rop | Coding region for | 3961-4152 |
| | | repressor of primer from | |
| | | the ColE1 plasmid. | |
| | | Expression of this gene | |
| | | product interferes with | |
| | | primer binding at the | |
| | | origin of replication, | |
| | | keeping plasmid copy | |
| | | number low. | |
| | OR-Ec.ori-ColE1 | The minimal origin of | 2945-3533 |
| | | replication from the E. coli | |
| | | plasmid ColE1. | |
| | P-Ec.aadA-SPC/STR | romoter for Tn7 | 2373-2414 |
| | | adenylyltransferase | |
| | | (AAD(3″)) | |
| | CR-Ec.aadA- | Coding region for Tn7 | 1584-2372 |
| | SPC/STR | adenylyltransferase | |
| | | (AAD(3″)) conferring | |
| | | spectinomycin and | |
| | | streptomycin resistance. | |
| | T-Ec.aadA-SPC/STR | 3′ UTR from the Tn7 | 1526-1583 |
| | | adenylyltransferase | |
| | | (AAD(3″)) gene of E. coli. | |

### EXAMPLE 5

[0159] This example illustrates monocot plant transformation useful in producing the transgenic plant cells of this invention by transformation of corn. Corn plants of a readily transformable line are grown in the greenhouse and ears harvested when the embryos are 1.5 to 2.0 mm in length. Ears are surface sterilized by spraying or soaking the ears in 80% ethanol, followed by air drying. Immature embryos are isolated from individual kernels on surface sterilized ears. Prior to inoculation of maize cells, Agrobacterium cells are grown overnight at room temperature. Immature maize embryos are inoculated with Agrobacterium shortly after excision, and incubated at room temperature with Agrobacterium for 5-20 minutes. Immature embryos are then co-cultured with Agrobacterium for 1 to 3 days at 23° C. in the dark. Co-cultured embryos are transferred to selection media and cultured for approximately two weeks to allow embryogenic callus to develop. Embryogenic callus is transferred to culture medium containing 100 mg/L paromomycin and subcultured at about two week intervals. Transformants are recovered 6 to 8 weeks after initiation of selection.

[0160] Plasmid vectors are prepared essentially as described in Example 5 for transforming into corn each of the DNA of interest, i.e. each DNA identified in Table 1 and the DNA for the identified homologous genes, by Agrobacterium-mediated transformation.

[0161] For Agrobacterium-mediated transformation of maize callus, immature embryos are cultured for approximately 8-21 days after excision to allow callus to develop. Callus is then incubated for about 30 minutes at room temperature with the Agrobacterium suspension, followed by removal of the liquid by aspiration. The callus and Agrobacterium are co-cultured without selection for 3-6 days followed by selection on paromomycin for approximately 6 weeks, with biweekly transfers to fresh media, and paromomycin resistant callus identified as containing the recombinant DNA in an expression cassette.

[0162] To regenerate transgenic corn plants transgenic callus resulting from transformation is placed on media to initiate shoot development in plantlets which are transferred to potting soil for initial growth in a growth chamber at 26 degrees C. followed by a mist bench before transplanting to 5 inch pots where plants are grown to maturity. The plants are self fertilized and seed is harvested for screening as seed, seedlings or progeny R2 plants or hybrids, e.g. for yield trials in the screens indicated above. Populations of transgenic plants and seeds produced form transgenic plant cells from each transgenic event are screened as described in Example 7 below to identify the members of the population having the enhanced trait.

### EXAMPLE 6

[0163] This example illustrates dicot plant transformation useful in producing the transgenic plant cells of this invention by transformation of soybean plants. For Agrobacterium mediated transformation, soybean seeds are germinated overnight and the meristem explants excised. The meristems and the explants are placed in a wounding vessel. Soybean explants and induced Agrobacterium cells from a strain containing plasmid DNA with the gene of interest cassette and a plant selectable marker cassette are mixed no later than 14 hours from the time of initiation of seed germination and wounded using sonication. Following wounding, explants are placed in co-culture for 2-5 days at which point they are transferred to selection media for 6-8 weeks to allow selection and growth of transgenic shoots. Trait positive shoots are harvested approximately 6-8 weeks post bombardment and placed into selective rooting media for 2-3 weeks. Shoots producing roots are transferred to the greenhouse and potted in soil. Shoots that remain healthy on selection, but do not produce roots are transferred to non-selective rooting media for an additional two weeks. Roots from any shoots that produce roots off selection are tested for expression of the plant selectable marker before they are transferred to the greenhouse and potted in soil. Populations of transgenic plants and seeds produced form transgenic plant cells from each transgenic event are screened as described in Example 7 below to identify the members of the population having the enhanced trait.

### EXAMPLE 7

[0164] This example illustrates identification of plant cells of the invention by screening derived plants and seeds for enhanced trait. Many transgenic events which survive to fertile transgenic plants that produce seeds and progeny plants will not exhibit an enhanced agronomic trait. Populations of transgenic seed and plants prepared in Examples 5 and 6 are screened to identify those transgenic events providing transgenic plant cells with recombinant DNA imparting an enhanced trait. Each population is screened for nitrogen use efficiency, increased yield, enhanced water use efficiency, enhanced tolerance to cold and heat, enhanced level of oil and protein in seed using assays described below. Plant cells having recombinant DNA with each of the genes identified in Table 1 and the identified homologs are identified in plants and seeds with at least one of the enhanced traits.

### Selection for Enhanced Nitrogen Use Efficiency

[0165] The physiological efficacy of transgenic corn plants (tested as hybrids) can be tested for nitrogen use efficiency (NUE) traits in a high-throughput nitrogen (N) selection method. The collected data are compared to the measurements from wildtype controls using a statistical model to determine if the changes are due to the transgene. Raw data were analyzed by SAS software. Results shown herein are the comparison of transgenic plants relative to the wildtype controls.

### (1) Media Preparation for Planting a NUE Protocol

[0166] Planting materials used: Metro Mix 200 (vendor: Hummert) Cat. # 10-0325, Scotts Micro Max Nutrients (vendor: Hummert) Cat. # 07-6330, OS 4⅓″×3⅞″ pots (vendor: Hummert) Cat. # 16-1415, OS trays (vendor: Hummert) Cat. # 16-1515, Hoagland's macronutrients solution, Plastic 5″ stakes (vendor: Hummert) yellow Cat. # 49-1569, white Cat. # 49-1505, Labels with numbers indicating material contained in pots. Fill 500 pots to rim with Metro Mix 200 to a weight of ˜140 g/pot. Pots are filled uniformly by using a balancer. Add 0.4 g of Micro Max nutrients to each pot. Stir ingredients with spatula to a depth of 3 inches while preventing material loss.

### (2) Planting a NUE Selection in the Greenhouse

[0167] (a) Seed Germination—Each pot is lightly altered twice using reverse osmosis purified water. The first watering is scheduled to occur just before planting; and the second watering, after the seed has been planted in the pot. Ten Seeds of each entry (1 seed per pot) are planted to select eight healthy uniform seedlings. Additional wild type controls are planted for use as border rows. Alternatively, 15 seeds of each entry (1 seed per pot) are planted to select 12 healthy uniform seedlings (this larger number of plantings is used for the second, or confirmation, planting). Place pots on each of the 12 shelves in the Conviron growth chamber for seven days. This is done to allow more uniform germination and early seedling growth. The following growth chamber settings are 25° C./day and 22° C./night, 14 hours light and ten hours dark, humidity ˜80%, and light intensity ˜350 μmol/m²/s (at pot level). Watering is done via capillary matting similar to greenhouse benches with duration of ten minutes three times a day.

[0168] (b) Seedling transfer—After seven days, the best eight or 12 seedlings for the first or confirmation pass runs, respectively, are chosen and transferred to greenhouse benches. The pots are spaced eight inches apart (center to center) and are positioned on the benches using the spacing patterns printed on the capillary matting. The Vattex matting creates a 384-position grid, randomizing all range, row combinations. Additional pots of controls are placed along the outside of the experimental block to reduce border effects.

[0169] Plants are allowed to grow for 28 days under the low N run or for 23 days under the high N run. The macronutrients are dispensed in the form of a macronutrient solution (see composition below) containing precise amounts of N added (2 mM NH₄NO₃ for limiting N selection and 20 mM NH₄NO₃ for high N selection runs). Each pot is manually dispensed 100 ml of nutrient solution three times a week on alternate days starting at eight and ten days after planting for high N and low N runs, respectively. On the day of nutrient application, two 20 min waterings at 05:00 and 13:00 are skipped. The vattex matting should be changed every third run to avoid N accumulation and buildup of root matter. Table 7 shows the amount of nutrients in the nutrient solution for either the low or high nitrogen selection.

TABLE 22

| | 2 mM NH₄NO₃ | 20 mM NH₄NO₃ (high |
|---|---|---|
| | (Low Nitrogen Growth | Nitrogen Growth |
| | Condition, Low N) | Condition, High N) |
| Nutrient Stock | mL/L | mL/L |
| 1 M NH₄N0₃ | 2 | 20 |
| 1 M KH₂PO₄ | 0.5 | 0.5 |
| 1 M MgSO₄•7H₂O | 2 | 2 |
| 1 M CaCl₂ | 2.5 | 2.5 |
| 1 M K₂SO₄ | 1 | 1 |

Note:
Adjust pH to 5.6 with HCl or KOH

[0170] (c) Harvest Measurements and Data Collection—After 28 days of plant growth for low N runs and 23 days of plant growth for high N runs, the following measurements are taken (phenocodes in parentheses): total shoot fresh mass (g) (SFM) measured by Sartorius electronic balance, V6 leaf chlorophyll measured by Minolta SPAD meter (relative units) (LC), V6 leaf area (cm²) (LA) measured by a Li-Cor leaf area meter, V6 leaf fresh mass (g) (LFM) measured by Sartorius electronic balance, and V6 leaf dry mass (g) (LDM) measured by Sartorius electronic balance. Raw data were analyzed by SAS software. Results shown are the comparison of transgenic plants relative to the wildtype controls.

[0171] To take a leaf reading, samples were excised from the V6 leaf. Since chlorophyll meter readings of corn leaves are affected by the part of the leaf and the position of the leaf on the plant that is sampled, SPAD meter readings were done on leaf six of the plants. Three measurements per leaf were taken, of which the first reading was taken from a point one-half the distance between the leaf tip and the collar and halfway from the leaf margin to the midrib while two were taken toward the leaf tip. The measurements were restricted in the area from ½ to ¾ of the total length of the leaf (from the base) with approximately equal spacing between them. The average of the three measurements was taken from the SPAD machine.

[0172] Leaf fresh mass is recorded for an excised V6 leaf, the leaf is placed into a paper bag. The paper bags containing the leaves are then placed into a forced air oven at 80° C. for 3 days. After 3 days, the paper bags are removed from the oven and the leaf dry mass measurements are taken.

[0173] From the collected data, two derived measurements are made: (1) Leaf chlorophyll area (LCA), which is a product of V6 relative chlorophyll content and its leaf area (relative units). Leaf chlorophyll area=leaf chlorophyll X leaf area. This parameter gives an indication of the spread of chlorophyll over the entire leaf area; (2) specific leaf area (LSA) is calculated as the ratio of V6 leaf area to its dry mass (cm²/g dry mass), a parameter also recognized as a measure of NUE.

### Nitrogen Use Field Efficacy Assay

[0174] Level I. Transgenic plants provided by the present invention are planted in field without any nitrogen source being applied. Transgenic plants and control plants are grouped by genotype and construct with controls arranged randomly within genotype blocks. Each type of transgenic plants are tested by 3 replications and across 5 locations. Nitrogen levels in the fields are analyzed in early April pre-planting by collecting 30 sample soil cores from 0-24″ and 24 to 48″ soil layer. Soil samples are analyzed for nitrate-nitrogen, phosphorus(P), Potassium(K), organic matter and pH to provide baseline values. P, K and micronutrients are applied based upon soil test recommendations.

[0175] Level II. Transgenic plants provided by the present invention are planted in field with three levels of nitrogen (N) fertilizer being applied, i.e. low level (0 N), medium level (80 lb/ac) and high level (180 lb/ac). Liquid 28% or 32% UAN (Urea, Ammonium Nitrogen) are used as the N source and apply by broadcast boom and incorporate with a field cultivator with rear rolling basket in the same direction as intended crop rows. Although there is no N applied to the 0 N treatment the soil should still be disturbed in the same fashion as the treated area. Transgenic plants and control plants are grouped by genotype and construct with controls arranged randomly within genotype blocks. Each type of transgenic plants is tested by 3 replications and across 4 locations. Nitrogen levels in the fields are analyzed in early April pre-planting by collecting 30 sample soil cores from 0-24″ and 24 to 48″ soil layer. Soil samples are analyzed for nitrate-nitrogen, phosphorus(P), Potassium(K), organic matter and pH to provide baseline values. P, K and micronutrients are applied based upon soil test recommendations.

### Selection for Increased Yield

[0176] Many transgenic plants of this invention exhibit improved yield as compared to a control plant. Improved yield can result from enhanced seed sink potential, i.e. the number and size of endosperm cells or kernels and/or enhanced sink strength, i.e. the rate of starch biosynthesis. Sink potential can be established very early during kernel development, as endosperm cell number and size are determined within the first few days after pollination.

[0177] Much of the increase in corn yield of the past several decades has resulted from an increase in planting density. During that period, corn yield has been increasing at a rate of 2.1 bushels/acre/year, but the planting density has increased at a rate of 250 plants/acre/year. A characteristic of modern hybrid corn is the ability of these varieties to be planted at high density. Many studies have shown that a higher than current planting density should result in more biomass production, but current germplasm does not perform, well at these higher densities. One approach to increasing yield is to increase harvest index (HI), the proportion of biomass that is allocated to the kernel compared to total biomass, in high density plantings. Effective yield selection of enhanced yielding transgenic corn events uses hybrid progeny of the transgenic event over multiple locations with plants grown under optimal production management practices, and maximum pest control. A useful target for improved yield is a 5% to 10% increase in yield as compared to yield produced by plants grown from seed for a control plant. Selection methods may be applied in multiple and diverse geographic locations, for example up to 16 or more locations, over one or more planting seasons, for example at least two planting seasons to statistically distinguish yield improvement from natural environmental effects. It is to plant multiple transgenic plants, positive and negative control plants, and pollinator plants in standard plots, for example 2 row plots, 20 feet long by 5 feet wide with 30 inches distance between rows and a 3 foot alley between ranges. Transgenic events can be grouped by recombinant DNA constructs with groups randomly placed in the field. A pollinator plot of a high quality corn line is planted for every two plots to allow open pollination when using male sterile transgenic events. A useful planting density is about 30,000 plants/acre. High planting density is greater than 30,000 plants/acre, preferably about 40,000 plants/acre, more preferably about 42,000 plants/acre, most preferably about 45,000 plants/acre. Transgenic corn plants and soybean plants with each recombinant DNA construct prepared in Examples 5 and 6 are identified as exhibiting at least 5% yield increase as compared to control plants.

### Selection for Enhanced Water Use Efficiency (WUE)

[0178] Described in this example is a high-throughput method for greenhouse selection of transgenic corn plants to wild type corn plants (tested as inbreds or hybrids) for water use efficiency. This selection process imposes 3 drought/re-water cycles on plants over a total period of 15 days after an initial stress free growth period of 11 days. Each cycle consists of 5 days, with no water being applied for the first four days and a water quenching on the 5th day of the cycle. The primary phenotypes analyzed by the selection method are the changes in plant growth rate as determined by height and biomass during a vegetative drought treatment. The hydration status of the shoot tissues following the drought is also measured. The plant height are measured at three time points. The first is taken just prior to the onset drought when the plant is 11 days old, which is the shoot initial height (SIH). The plant height is also measured halfway throughout the drought/re-water regimen, on day 18 after planting, to give rise to the shoot mid-drought height (SMH). Upon the completion of the final drought cycle on day 26 after planting, the shoot portion of the plant is harvested and measured for a final height, which is the shoot wilt height (SWH) and also measured for shoot wilted biomass (SWM). The shoot is placed in water at 40 degree Celsius in the dark. Three days later, the shoot is weighted to give rise to the shoot turgid weight (STM). After drying in an oven for four days, the shoots are weighted for shoot dry biomass (SDM). The shoot average height (SAH) is the mean plant height across the 3 height measurements. The procedure described above may be adjusted for +/−˜one day for each step given the situation.

[0179] To correct for slight differences between plants, a size corrected growth value is derived from SIH and SWH. This is the Relative Growth Rate (RGR). Relative Growth Rate (RGR) is calculated for each shoot using the formula [RGR%=(SWH−SIH)/((SWH+SIH)/2)*100]. Relative water content (RWC) is a measurement of how much (%) of the plant was water at harvest. Water Content (RWC) is calculated for each shoot using the formula [RWC%=(SWM−SDM)/(STM−SDM)*100]. Fully watered corn plants of this age run around 98% RWC.

### Selection for Growth Under Cold Stress

[0180] (1) Cold germination assay—Three sets of seeds are used for the assay. The first set consists of positive transgenic events (F1 hybrid) where the genes of the present invention are expressed in the seed. The second seed set is nontransgenic, wild-type negative control made from the same genotype as the transgenic events. The third set consisted of two cold tolerant and one cold sensitive commercial check lines of corn. All seeds are treated with a fungicide “Captan” (MAESTRO® 80DF Fungicide, Arvesta Corporation, San Francisco, Calif., USA). 0.43 mL Captan is applied per 45 g of corn seeds by mixing it well and drying the fungicide prior to the experiment.

[0181] Corn kernels are placed embryo side down on blotter paper within an individual cell (8.9×8.9 cm) of a germination tray (54×36 cm). Ten seeds from an event are placed into one cell of the germination tray. Each tray can hold 21 transgenic events and 3 replicates of wildtype (LH244SDms+LH59), which is randomized in a complete block design. For every event there are five replications (five trays). The trays are placed at 9.7 C for 24 days (no light) in a Convrion growth chamber (Conviron Model PGV36, Controlled Environments, Winnipeg, Canada). Two hundred and fifty millilters of deionized water are added to each germination tray. Germination counts are taken 10th, 11th, 12th, 13th, 14th, 17th, 19th, 21st, and 24th day after start date of the experiment. Seeds are considered germinated if the emerged radicle size is 1 cm. From the germination counts germination index is calculated.

[0182] The germination index is calculated as per:

Germination index=(⊖([T+1−nᵢ]*[Pᵢ−Pᵢ₋₁]))/T

[0183] Where T is the total number of days for which the germination assay is performed. The number of days after planting is defined by n. “i” indicated the number of times the germination had been counted, including the current day. P is the percentage of seeds germinated during any given rating. Statistical differences are calculated between transgenic events and wild type control. After statistical analysis, the events that show a statistical significance at the p level of less than 0.1 relative to wild-type controls will advance to a secondary cold selection. The secondary cold screen is conducted in the same manner of the primary selection only increasing the number of repetitions to ten. Statistical analysis of the data from the secondary selection is conducted to identify the events that show a statistical significance at the p level of less than 0.05 relative to wild-type controls.

[0184] (2) Cold Shock assay—The experimental set-up for the cold shock assay is the same as described in the above cold germination assay except seeds were grown in potted media for the cold shock assay.

[0185] The desired numbers of 2.5″ square plastic pots are placed on flats (n=32, 4×8). Pots were filled with Metro Mix 200 soil-less media containing 19:6:12 fertilizer (6 lbs/cubic yard) (Metro Mix, Pots and Flat are obtained from Hummert International, Earth City, Mo.). After planting seeds, pots are placed in a growth chamber set at 23° C., relative humidity of 65% with 12 hour day and night photoperiod (300 uE/m2-min). Planted seeds are watered for 20 minute every other day by sub-irrigation and flats were rotated every third day in a growth chamber for growing corn seedlings.

[0186] On the 10^{th} day after planting the transgenic positive and wild-type negative (WT) plants are positioned in flats in an alternating pattern. Chlorophyll fluorescence of plants is measured on the 10^{th} day during the dark period of growth by using a PAM-2000 portable fluorometer as per the manufacturer's instructions (Walz, Germany). After chlorophyll measurements, leaf samples from each event are collected for confirming the expression of genes of the present invention. For expression analysis six V1 leaf tips from each selection are randomly harvested. The flats are moved to a growth chamber set at 5° C. All other conditions such as humidity, day/night cycle and light intensity are held constant in the growth chamber. The flats are sub-irrigated every day after transfer to the cold temperature. On the 4^{th} day chlorophyll fluorescence is measured. Plants are transferred to normal growth conditions after six days of cold shock treatment and allowed to recover for the next three days. During this recovery period the length of the V3 leaf is measured on the 1^{st} and 3^{rd} days. After two days of recovery V2 leaf damage is determined visually by estimating percent of green V2 leaf.

[0187] Statistical differences in V3 leaf growth, V2 leaf necrosis and fluorescence during pre-shock and cold shock can be used for estimation of cold shock damage on corn plants.

[0188] (3) Early seedling growth assay—Three sets of seeds are used for the experiment. The first set consists of positive transgenic events (F1 hybrid) where the genes of the present invention are expressed in the seed. The second seed set is nontransgenic, wild-type negative control made from the same genotype as the transgenic events. The third seed set consists of two cold tolerant and two cold sensitive commercial check lines of corn. All seeds are treated with a fungicide “Captan”, (3a,4,7,a-tetrahydro-2-[(trichloromethyl y)thio]-1H-isoindole-1,3(2H)-dione, Drex Chemical Co. Memphis, Tenn.). Captan (0.43 mL) was applied per 45 g of corn seeds by mixing it well and drying the fungicide prior to the experiment.

[0189] Seeds are grown in germination paper for the early seedling growth assay. Three 12″×18″ pieces of germination paper (Anchor Paper #SD7606) are used for each entry in the test (three repetitions per transgenic event). The papers are wetted in a solution of 0.5% KNO₃ and 0.1% Thyram.

[0190] For each paper fifteen seeds are placed on the line evenly spaced down the length of the paper. The fifteen seeds are positioned on the paper such that the radical would grow downward, for example longer distance to the paper's edge. The wet paper is rolled up starting from one of the short ends. The paper is rolled evenly and tight enough to hold the seeds in place. The roll is secured into place with two large paper clips, one at the top and one at the bottom. The rolls are incubated in a growth chamber at 23° C. for three days in a randomized complete block design within an appropriate container. The chamber is set for 65% humidity with no light cycle. For the cold stress treatment the rolls are then incubated in a growth chamber at 12° C. for twelve days. The chamber is set for 65% humidity with no light cycle.

[0191] After the cold treatment the germination papers are unrolled and the seeds that did not germinate are discarded. The lengths of the radicle and coleoptile for each seed are measured through an automated imaging program that automatically collects and processes the images. The imaging program automatically measures the shoot length, root length, and whole seedling length of every individual seedling and then calculates the average of each roll.

[0192] After statistical analysis, the events that show a statistical significance at the p level of less than 0.1 relative to wild-type controls will advance to a secondary cold selection. The secondary cold selection is conducted in the same manner of the primary selection only increasing the number of repetitions to five. Statistical analysis of the data from the secondary selection is conducted to identify the events that show a statistical significance at the p level of less than 0.05 relative to wild-type controls.

### 4. Cold Field Efficacy Trial

[0193] This example sets forth a cold field efficacy trial to identify gene constructs that confer enhanced cold vigor at germination and early seedling growth under early spring planting field conditions in conventional-till and simulated no-till environments. Seeds are planted into the ground around two weeks before local farmers are beginning to plant corn so that a significant cold stress is exerted onto the crop, named as cold treatment. Seeds also are planted under local optimal planting conditions such that the crop has little or no exposure to cold condition, named as normal treatment. The cold field efficacy trials are carried out in five locations, including Glyndon Minn., Mason Mich., Monmouth Ill., Dayton Iowa, Mystic Conn. At each location, seeds are planted under both cold and normal conditions with 3 repetitions per treatment, 20 kernels per row and single row per plot. Seeds are planted 1.5 to 2 inch deep into soil to avoid muddy conditions. Two temperature monitors are set up at each location to monitor both air and soil temperature daily.

[0194] Seed emergence is defined as the point when the growing shoot breaks the soil surface. The number of emerged seedling in each plot is counted everyday from the day the earliest plot begins to emerge until no significant changes in emergence occur. In addition, for each planting date, the latest date when emergence is 0 in all plots is also recorded. Seedling vigor is also rated at V3-V4 stage before the average of corn plant height reaches 10 inches, with 1=excellent early growth, 5=Average growth and 9=poor growth. Days to 50% emergence, maximum percent emergence and seedling vigor are calculated using SAS software for the data within each location or across all locations.

Screens for Transgenic Plant Seeds with Increased Protein and/or Oil Levels

[0195] This example sets forth a high-throughput selection for identifying plant seeds with improvement in seed composition using the Infratec 1200 series Grain Analyzer, which is a near-infrared transmittance spectrometer used to determine the composition of a bulk seed sample. Near infrared analysis is a non-destructive, high-throughput method that can analyze multiple traits in a single sample scan. An NIR calibration for the analytes of interest is used to predict the values of an unknown sample. The NIR spectrum is obtained for the sample and compared to the calibration using a complex chemometric software package that provides a predicted values as well as information on how well the sample fits in the calibration.

[0196] Infratec Model 1221, 1225, or 1227 with transport module by Foss North America is used with cuvette, item # 1000-4033, Foss North America or for small samples with small cell cuvette, Foss standard cuvette modified by Leon Girard Co. Corn and soy check samples of varying composition maintained in check cell cuvettes are supplied by Leon Girard Co. NIT collection software is provided by Maximum Consulting Inc. Software. Calculations are performed automatically by the software. Seed samples are received in packets or containers with barcode labels from the customer. The seed is poured into the cuvettes and analyzed as received.

TABLE 26

| | |
|---|---|
| Typical sample(s): | Whole grain corn and soybean seeds |
| Analytical time to run method: | Less than 0.75 min per sample |
| Total elapsed time per run: | 1.5 minute per sample |
| Typical and minimum sample | Corn typical: 50 cc; minimum 30 cc |
| size: | Soybean typical: 50 cc; minimum 5 cc |
| Typical analytical range: | Determined in part by the specific |
| | calibration. |
| | Corn - moisture 5-15%, oil 5-20%, |
| | protein 5-30%, starch 50-75%, and |
| | density 1.0-1.3%. |
| | Soybean - moisture 5-15%, oil |
| | 15-25%, and protein 35-50%. |

### EXAMPLE 8

[0197] This example describes recombinant DNA constructs of the invention, useful for suppressing the expression of a protein identified by Pfam, Catalase, Bromdomain, FFCD_N, MatE, DPBB_{—}1, tRNA-synt_{—}2b, Sugar_tr and MFS_{—}1, DUF6 and DUF250, LEA_{—}4, MIP or DUF231, in a corn or soybean plant, by expressing a sense and an anti-sense fragment of the native DNA encoding the protein, essentially as described in U.S. patent application Ser. No. 11/303,745, incorporated herein by reference. Specific gene suppression constructs are targeted to the native gene in corn and soybean plants that are homologs of the genes encoding the protein with an amino acid sequence of SEQ ID NO:213, 215, 218, 222, 258, 269, 275, 334, 361, 368, and 407.

[0198] The constructs include a promoter operably linked to DNA that transcribes to RNA that forms a double stranded RNA in transgenic plant cells for suppressing expression of the protein to provided the enhanced trait in the corn and soybean plants. Populations of transgenic plants and seeds derived from the plant cells are screened to identify those plants exhibiting the enhanced traits associated with suppression of those genes.

The application's sequence listing, which the Patent Office published only in electronic form, follows.

SEQUENCE LISTING (19250 sequences)

SEQ ID NO: 1 - DNA, 264 bp, Arabidopsis thaliana
atgaatagagtgattagtcagttttccggtaagttgatgaaggagaagagtgttaccggtgtaagcggcggagatacgactttaagatctgccgtcaaagaatcggtctcgtctccacagagtgcgtcgtcgtcgtcgtcggtgaggaggcttaaaggagatctggaatcgagtcgatttggtgcggcggcgagtgagaggctgaggcaagcggaggaatctttgaggacggtgatgtttctgagctgttggggatcttgttag

SEQ ID NO: 2 - DNA, 492 bp, Arabidopsis thaliana
atggcggaagaacacagacttcaagaaccacgattatgtgctaacaattgtggcttcttcggaagcacagctacacaaaatctctgttccaaatgttttcgagatcttcaacatcaagaacaaaactcttccaccgccaaacatgctcttacccaatccttagccgccgttggcgctgctgcgtcttcctccgtgtcgccaccgcctccgcctccagctgattcgaaagaaatcgttgaagcgaaatcagagaaacgagcggcggctgaaccggaggaggcggatggtccgccgcaagatccgaagcggtgtttgacttgtcggcggcgcgtgggaatcacggggtttcggtgtaggtgtggtttcgttttctgcgggacgcataggtacgcggagcaacatgaatgttcgtttgatttcaagcggatggggaaggataagatcgctaaagcgaatccgattgtgaaagctgataagcttgagaagatttga

SEQ ID NO: 3 - DNA, 666 bp, Arabidopsis thaliana
atggactctctcgcaaccgatccagctttcattgattcggatgtatacctcaggttaggacttattattgagggcaaacgattgaaaaagccaccgactgttctctcacgcctctcttcttctctggagagatctctgttactcaatcatgatgacaagattctgcttggatcgccagactctgttaccgtgtttgacgggagatctccccctgagatcagtattgcacactacttggatcgcattttcaagtactcttgctgcagtccctcctgcttcgtcattgcgcatatctacattgatcactttctccataagacccgagcccttctcaaaccccttaatgtccaccgccttatcattacaactgtcatgttagctgctaaagtcttcgatgataggtatttcaacaatgcatactacgcaagagtgggaggtgtgactacgagagagttaaacagattggagatggagttgttgtttacccttgacttcaagcttcaggtagatcctcagacgtttcacacacactgttgtcagttagaaaagcagaacagagacggcttccagatcgagtggcccataaaagaagcatgccgagccaacaaagagacttggcagaagaggacacccgactcactctgctctcaaaccacagcacgctga

SEQ ID NO: 4 - DNA, 1935 bp, Arabidopsis thaliana
atggctagtcttcttcgatccttaatccttttgctaatcgtgcaatcatttttggttgcgatcgctttcgggtcgaaagaagttgaagaattcagcgaggcattgctcttgaagcctttacctgatcgaaaagttttagctcacttccacttcgagaaccgagctcctccgtcaaactcccatggccgccatcaccatctcttcccgaaagctatttctcagttggttcagaagtttcgggtcaaggagatggagttatcttttactcagggtcgatggaaccatgaacattggggaggatttgaccctctatcaagtatgaatgcgaagcctgttggtgtggagctgtgggctgtgtttgatgttcctcagtctcaggttgatacttcttggaagaacttaactcatgcactgtcagggcttttctgtgcttccatcaattttctagaatcttccacttcatatgctgctcctacatggggatttggacccaattctgacaagctgaggtatggttcactgccacgtgaagctgtttgtactgagaacttgaccccatggctaaagttacttccttgtagagataaggatggtatttctgcgttaatgaataggccatctgtttacagagggttttatcattctcagagattgcatttatccacggttgaatctggtcaagagggattgggttctggtatagtgctggagcagacgcttactgttgttcttcagcctgagactacttctgttgaatcaaatatgcagccaagttggtccctcagctccctctttgggagacaagttgttgggagatgtgttcttgcaaagtcaagtaatgtgtatcttcaattggaaggtcttcttggttacgaatcaaaaaacgtggatacagaaatagaagcacaccaactatggaagaatgcagagtttgaattgtctcttaagccagagagggttattcgagaaagctgcagctttctttttatttttgatattgacaaatcaagtgacagcgagccatttgatcttggccttacttggaagcgtccctcaaagtggtcatgtcaacaagctccattacactcgagtcggtttttgatgggaagcgggaacgaaagaggtgcaatagccatcttgttaaaagcgacagaatctcaggagaagttatcaggcagagatctcactaatggccaatgtacaataaaagcaaatatcttccagattttcccatggtatattaaggtttattatcatactctacaaatctttgtggatcaacaacagaagacagacagtgaggtcttaaagaagatcaatgtctcaccatctacggataaggtgtcatctggcatgatggagatgatgttggaactaccatgtgaagtgaaatctgtagccatatcaattgaatatgataagggttttctgcatatagatgaatatcctcctgatgctaatcaaggattcgacattccatcggctttgataagcttccccgatcatcatgctagtttagatttccaagaagagctcagcaactcgcccttattatcaagtttaaaggaaaaatccttagtacgctcttacacagaagtattgctcgtacctttgacaacccctgattttagcatgccttacaacgtaatcacgatcacatgcaccatcttcgcattgtattttggatcattgctaaatgttctacgtagacgaattggtgaagaagaaaggtttctcaaaagccaagcaggaaagaaaacaggtgggcttaagcagttattatcgagaatcacagccaagattagagggagaccaattgaagcaccatcatcatcagaagctgaatcttcggtcttgtctagtaaacttatcttaaaaatcatattagttgcaggagctgctgcagcgtggcaatatttttccacggacgagtag

SEQ ID NO: 5 - DNA, 903 bp, Arabidopsis thaliana
atgcgagtgctcagcgagattgcggagtcaccgttcgtgatttctcggctaagccctgattcgacggccaccggagggtttatcggcggatgggtcgggaagtgtcatgggtttcttcataacacggttttggttttagcatctattctattcgtcgcttacttagcgtacgaggcgaagaagagcttgtccaagttgtctaatcggagatcttacattatgattgcctattatggttttctttggcttgttagcttgctcaatcttgcttggtgttgccttcaggcatgggaatgcactccggggaaagaagttatttggaatttgttaactttgttcacaacatctggaatgttgtttctggaagtaagcttggtagcctttctcttccaaggaaactatgcaagcggtgctgaagcattaacacgaactttcctcatctcggggcttgtcattggtctcgatttgcttctcaaggcaatttatctgtttggctttggagtaccattgtttatcgacaacaatgaacatatacataagttcaaatggggcttatgggtcatccacaagctcttactagctggcatttatgggatgatattcttcatgtacaactccaaatggagagagagattaccagcaagacctgcattctacaagtatataactgtcatgctcgccttaaatgggctctccctatttgcatgtgctcttacggcaaacggtgctcattttggattatggttgtatgggatcacaagtgtttgttaccacgccttctatcttcctcttttgtatgttacttttcttgcagactttttccaggaggaagatctgaatttggagaatgtctactattcagaaatgaaagatgctggattcttcgacgctgattgggaataa

SEQ ID NO: 6 - DNA, 418 bp, Arabidopsis thaliana
atgataccgcagcaatggacgccgccgtgtgggagcaaatgcacgaataagtactcagcatttacgcagcttccggagagtattctgcaaaaagggatgtgatgccgatagtgactcatgggaagattgtgtaggagactgcagtgaaatttgctacaaagatcctgtgctaaaagacagaccatggactgctgttatagatcgttctcctggagatgccaaatactctgaggaatgctttcacgcatgtgtagcaggctgtggttacaagtttgatgttgaagctgagatagtcaataaggtgaaaccaaagagacctccaccaccaccgccaaagccacaaccaccaccaccaccaccacgttctcaaaaaccaatgcagcctcctactgaggatgttcttgcaacttccgcttga

SEQ ID NO: 7 - DNA, 216 bp, Arabidopsis thaliana
atgggtggaggaatggaaacgaacaagaacaagttcatcgaggactggggatctgctagagagaatctcgagcacaatttccgctggactcgtcgtaacttcgctctcatcggaatcttcggcatcgctctcccgatcattgtctacaagggaatcgtcaaagatttccatatgcaagatgaagatgcaggcagaccacacagaaagttcctctga

SEQ ID NO: 8 - DNA, 1767 bp, Arabidopsis thaliana
atgctttagaaccttgggcatatatcaatggagaagcgagtcaaatacaagagctttgtgaaggatccaggaactcttggatccctcgaattaagtgaagtgatgctgctctttgtcccaaatgatcctaaatcagatttgaagcttaaagttcagactcacaacatcaaaagtcagaaatataccaaagaaggatcaaataaacctccttggctcaatctgaccagcaagcagggaaggagtcatatctttgagtttgaaaattatcctgacatgcatgcttgtcgtgatttcatcactaaggcccttgctaaatgtgaagaggagcctaataaactagttgtcttgacacctgctgaacaacttagtatggcagaatttgagctacgcttcaagcttcttcgagaaaatagtgagttgcagaaattgcataagcaatttgtggaaagtaaagtcctgacggaagacgaattctggtctacgaggaagaaattacttggtaaagattccattagaaagtcaaaacaacagatggggctcaaaagcatgatggtttcaggcatcaaaccgtctactgatggccggactaatagggtgacgtttaacttaacgtctgagataatttttcagatttttgctgagaagccggctgttcgccaggcattcataaattatgttccgaaaaagatgacagaaaaggacttttggacaaaatattttagagcagaatatctttacagcacaaaaaatacagcagtagctgcagcagaagctgctgaggatgaggaactcgctgtctttctgaagcctgacgagatattggctcaggaagctcgtcaaaagatgagacgggttgatccaactcttgacatggacgctgacgagggagatgactacacccatcttatggaccacgggatccagcgcgatggcaccaatgacattattgaaccacagaatgaccagcttaagaggtcacttttacaagatcttaatcgtcatgctgctgttgtattggaaggaagatgcatcaatgttcagtctgaagatacgagaattgttgcagaggctctcacacgggcgaaacaagtaagcaaagctgatggtgaaatcaccaaggacgctaatcaggagaggttggagagaatgtcccgtgcaacagaaatggaggatcttcaagcaccacaaaacttcccattagcaccactctctatcaaggaccctcgtgattactttgaatctcaacaaggaaacatcctcagtgaacccagaggagcaaaggcgtcaaaaagaaatgtccatgaagcttatggattactaaaagaatccattttggtgattagaatgacgggattaagtgatccgttgattaaacctgaagtttcctttgaggttttcagttcgttgacccgaactatctcaactgccaaaaatattctcgggaagaacccgcaagagagctttctggacagattaccaaagtccactaaggatgaagttatacatcactggacatcaatacaagaattagtgagacatttttggtcatcttacccaataacaacgacatatcttagtaccaaggttggtaaactgaaggatgcaatgtccaatacttattcactactcgatgcaatgaaacagtcggtgcagtctgatctccggcatcaagtttccttactagttcgtccaatgcaacaggctcttgatgctgcgttccaacactacgaatcggacttgcagagaagaaccgctaagattacatag

SEQ ID NO: 9 - DNA, 1479 bp, Arabidopsis thaliana
atggatccttacaagtatcgtccagctagttcttacaactctcccttcttcaccaccaactctggtgctcctgtatggaacaacaactcctccatgaccgttggacccagaggtcctatccttcttgaggattaccatctcgttgagaagcttgccaatttcgacagggaacggattccagagcgtgtggttcatgccagaggagccagtgctaaaggtttctttgaggtcactcatgatatctctaacctcacttgtgctgactttctccgagctcccggtgttcagactcctgtcattgtccggttctccaccgttatccatgagcgtggaagtcccgagaccttgagagaccctcgtggttttgcagtcaagttctacaccagagaggggaactttgatcttgttggaaacaactttcctgttttcttcatccgcgatgggatgaagttccctgacatggtccacgctcttaagccgaacccaaaatctcacatccaagagaactggagaatccttgacttcttctcccaccaccctgaaagtttgaacatgttcactttcctcttcgatgatatcggtatcccacaagattacaggcacatggatggttcaggtgtcaatacatacatgttgatcaacaaagctggcaaagctcactacgtgaagttccattggaaaccaacttgtggagtcaagtctcttttggaagaagatgcaattcgtgttggaggaaccaaccacagtcatgcgactcaagacttgtatgactctatagctgctggaaactaccctgaatggaagctctttatccaaatcattgatcctgctgatgaagacaagttcgactttgacccgctcgatgtgaccaagacctggcctgaggatatcttgcctcttcaacctgttggacgtatggtgttgaacaagaacattgacaacttctttgcagagaatgagcaacttgctttctgtcctgcaattattgtcccagggatacattactcagatgataagctgcttcaaacccgtgtcttctcctatgccgatactcagagacaccgtcttggaccaaactaccttcagctgccagtcaatgctccaaaatgtgctcaccacaacaaccaccatgagggattcatgaatttcatgcacagggacgaggaggttaactacttcccgtcgaggtatgaccaggttcgtcatgctgagaagtatccaactccgcctgctgtctgttctggaaaacgtgagaggtgcattattgagaaagagaacaacttcaaggagcctggagagagataccgtacctttacaccagagaggcaagaacgattcatccagagatggattgatgccctatccgacccacgcatcacgcatgaaatccgcagtatctggatctcttactggtctcaggctgataagtctttgggacagaagctggcaagccgtctgaacgtgagaccaagcatctaa

SEQ ID NO: 10 - DNA, 1266 bp, Arabidopsis thaliana
atgagtaatcaaagaaagagatcaaacgatgaaagagaagaagaggacgacgaagatgcggaaggtatcggcgagtgggagagagcttatgttgacgaccgatcctgggaggagttgcaagaggatgagtctggacttttacggccaattgataacagtgccatttaccatgctcagtatcgccgccgtcttcgtatgctctccgccgctgctgctggtactcgtatccaaaagggacttattcgatatctctacatcgtcattgacttctctcgggcagctgcggaaatggatttcagaccaagccggatggctataatggccaaacatgtcgaagctttcattagagagttctttgaccagaatcctctgagtcaaattgggttggtctctataaaaaatggagttgcgcatacattaacagatcttggtggtagtcctgagactcacatcaaagcgttgatggggaagttggaagctttgggtgactcctctttgcagaacgctctggaacttgtacatgagcatctcaaccaggttccatcttatggtcaccgcgaggttctgatattgtactcagctttatgcacatgtgatccaggcgatatcatggagaccattcaaaaatgcaagaaatccaaattaagatgttctgtaattgggctctctgcagaaatgttcatatgtaaacacctctgccaggaaactggcggattgtattcagttgcagtggacgaggtgcatctaaaggatcttctgcttgaacatgcgcctccacctccggcaatagcagaatttgcaattgcaaatttgatcaagatgggtttcccacaaagagctgctgagggttcaatggcgatttgttcgtgtcataaggaagttaagattggagctggttacatgtgcccaagatgcaaagctcgggtatgtgacctccctacggaatgcactatctgcggtctaacacttgtttcttcgccgcatttggcgagatcataccatcatctcttcccgattgctccatttgatgaggtgcctgcactttcaagtctgaatgataatcggagaaaattgggaaagagttgttttggttgccaacagagcctaattggtgcagggaataaacccgtcccatgcgtaacatgtcgtaaatgcaagcactatttctgtctggactgtgacatatacatccacgagagcttacacaactgtcctggctgtgagagcattcaccgtcccaaatcagtttctttgatggaagaatga

SEQ ID NO: 11 - DNA, 1386 bp, Arabidopsis thaliana
atggcgtctggtcctatagctggtggtggagtttcgaagacgaagcataaatggagtgatagtggcaacaaaagccaaaaacgatccaagcccacggtggcgaattcgaattcgcttgggttggaagataatcatcagatgatgaagataagtttaagctcaatttccaagcttgaagttaggaacttgaagcggaaactacaagctgagcttgaggaagttaggagcttgatcaaacggctcgaaccacaaggtaacaacttcgctcccgtgccgaacaagaagctgaaaacagcaaacggtggtaagaaaggtggagtacatggagctgctgctgataaaggtactgttcagattttgaagagctgcaacaatttgcttaccaagttaatgaagcataagtctggatggattttcaatactccagttgatgtagttacgcttggtttacatgattatcacaatattattaaggagcctatggatttaggaacagtgaagactaggttgagtaagagtttgtataagtcacctttggagtttgctgaggatgtcagacttacttttaacaatgcaatgctgtataatcctgtggggcatgatgtgtatcatatggctgagattttgttgaatctgtttgaagagaaatgggtgcctcttgaaacgcagtatgagttacttattaggaagcaacaaccagtccgtgatatcgatttccatgctcctgtttcgacaaacactcataatgtagaggcgttaccgttacccgctcctacaccttccctgtctcctcctcctcctcctaaagtagttgaaaataggactttggagagagctgaatctatgacaaacccagtgaaacctgcagttttacctgttgtccccgagaagcttgtagaagaggcgtctgcaaacagggacttgacgtttgatgagaagcggcaactaagtgaagacctccaggatttaccttatgacaagctagaggcagttgtgcagattataaagaagagaactccagaactctctcaacaagatgatgagattgagttagatattgatagtcttgatctggaaacactttgggagcttttcagattcgtgactgaatataaggagagcttaagcaagaaaaaggaggaacagggattagactcagaaagagatgctgaatcttttcacaatagtgtgcacgaatcgaacacgctagtaactggccttgaatcgtcaaaagttactgaattaggtcatgtggcatctactgttcgacaagaagtaaatgttggaggatcaagtagttctaacagttctagtagtggctcaggctcgggttctagtggctctgacagtgatagctcaggacatgaatctgataccggtaattaa

SEQ ID NO: 12 - DNA, 1056 bp, Arabidopsis thaliana
atgaagaagcagtatctgaaatctggatctgggacaaggaaggaaaaggacaaggcgaagaggtggttcttggataacggaagcatcttcttaagagaacttgtagctgattgtaacggtaaatccattcctattcgcagtttttctcctgagcagatattgaaagccaccaacaatttcgattctagctgttttgtctcgcaagatgtatactataaatggtatagaggtgaaattgaagatagatcttacatgatcaagagattctcagaggatgagattacaggaaaacgacatagagttaaagaggtttacaacgacattgtcttgtctgctcggatgagtaatcacagtaactttcttcaacttttaggatgttgtctcgagtttccttttccggttcttgtgtttgaatttgcagaacatggagctatgaatcagcgaggaggtgttatagttaatggtgaagaatctttattgccgtggagtgtacggttgaagattgggaaagagattgctaatgcggtgacttatcttcacacggcattccctaagatcatcatacatagagatgttaaaccgatgcatgttttcttggacaagaattggaccgcaaagttgtctgatttatccttctcaatatctctacctgagggaaaatcgagaatagaagctgaatgggttctaggaacatttgggtacatcgatccattatatcataagacgtgttttgtgactgaatatacagatgtctacagctttggaatctgtttgctggttattattactggtaaaccggctatcatgactatttctgatggagatctccaaggtattcttagcttagtgagagagttatgtgagaatgggaagcttgatgaagtgatagatccgaggttgatgaaagatatcacaagtggtcaaaggttgcaagtggaagcatgtgtggtgctggctttgagatgctgtaaggagagagatgaagacagaccaaagatgatccaagtagctaaagaactcaagcagattgaagcatcattgaaaaattctagctag

SEQ ID NO: 13 - DNA, 2237 bp, Arabidopsis thaliana
aaataatattaatttgagaatgaacaaaaggaccatatcattcattaactcttctccatccatttccatttcacagttcgatagcgaaaaccgaataaaaaacacagtaaattacaagcacaacaaatggtacaagaaaaacagttttcccaatgccataatactcaaactcagtaggattctggtgtgtgcgcaatgaaactgatgcattgaacttgacgaacgttgtcgaaaccgatgatacgaacgaaagctctgcagagctccaatttaaatcggagattgaagtagaataccaaaaatatataagtttccagatcagacagagttcttgtcttgtagctgctgttgcttggtttcttcttcattggtctcaatctcagtgatgtcttcatcattacctcctttgtatctataccatctagccatcaacaagaagtaagccatgttaacaaccatgagtcctgtgagcatgaagtagaagtaatccaatttcgctttgttcagatcctcagctaaccaattccctgaaggtgaatgcgcggttgttcgatgaacagttgatatcaagaagctagcgaggtagctcgaaacccctgcaccgacataaaagatagaacccgcgaagctcttcatgttttcaggaaactgcttgtagtaaaactccatttgtccaatggcagcaaaggcttctgctatgcctgcaagtgtaagctgcgggatcagccacaacgctgacattgatgagatttctcctgtccgaggcgccatcccgagtgtcggtttggtcaatgcaaagtttcttctcctttcctctataaacccggaaactaataaactcattatcgcaaatgtaaacccagctccgattctttgtaagagtgatataccggtttctaacccggtcactcttctgagcgacgggacaagtacacggtcgtagaatatgatgaaaactgtcatgccagtcatcaagaacactacataggtggccgcaggaatcctgaagccaccagaacctaatcgtcggtcgctctggagcgcttggaagaccggataagtcatttgtatagttattgcaaggtagtatatcgtggatgcaaaccagattggaatcactcttacaatgcatttcacttcttccacttgctgcaacgtgcatagtttccatggatcggaagccgttccatcggagttcaacttctcctcgggggtcataattgctgctttgtctagaaatctgaactggccggtgtattttagagtagtatttgcatagttagacgggatatggttgtaaagattgacccaaggctgcttaaccggcttcaaacctcgtttcttgatcgcggctgctataacacgagcaataccagccaatggactacccgaggctttcacttttacatacaatctatcgccagcagagaaaatcacacacgccaagaacataagagccaccggaatgatcaaaccgattgtccaactcacatttgactggatatacacaactgctgtgagcgagatgatctgcgcgaacgtgaaagtgaagaaataccagttgaagaaactgttgatccctttctttcctgattcggatttggggttgaactgatcagcaccaaacgctaaattacacggtctgataccaccagcgcctaccacaagaaagcctaaacccatgagcagaaacagtatctgtcccacacttggcccttcgcacgagattttgtttccgcaagcaacggggtgcaacgacggaattgcagcagtaagtagtatcacaaacgatcccagaaaacaagcgatgacagcgacactgagagtcttgtagcgaccaaagtaagtgtcgcaaagaaaggcagcaataaaagtcccgaaattgattgtaccactaaaggcattgatgatagttgcagctgtgtagctcttaaggttgaatacagaagttaggtacacaagaaggtttgataatgtccctatgatcccaagcttctcaaatgtctcattaccaatgataaaaggcatgactttccatcctctataaacgatttttctctgctcttcctcgaaagaatcgaccacatcggtgttagtcgtcgtagtagatggctcaacctcaagaggctttctctccatagtatcaacctgtgtgtaatgattggtgttgttgttgttatgattcttatctcttctgtctctatggttaagaataactctgctcttcatttaattaa

SEQ ID NO: 14 - DNA, 1021 bp, Arabidopsis thaliana
ttaattaagatgttgagagaaatgcttggttgttgcaaggtttacatatctgaagcgcggaataagacggccctcgaagccattgagagagctttaaagccttttccaccagctgcaattgtcaacaagtttgaagatgcggcttatggcagggttggttacactgttgtatcctcgcttgctaacgggtcgtcttcttccttgaagaatgcggtgtttgctatggttaagactgctctcgacactatcaatcttgagttgcactgtggatctcatccccgccttggagtggttgaccacatatgctttcaccccttatctcaaacctctatagaacaagtttcttccgtcgccaattcccttgcaatggatatcggctccattcttcgagttcctacatatctctatggagcagcagaaaaggagcagtgcaccctggattcgatcagaagaaagctggggtacttcaaggcaaacagggagggacatgaatgggcaggtgggtttgacctggagatggtgccactgaagccagacgcagggccacaagaggtgagcaaagccaaaggggttgtagcggttggggcgtgtgggtgggtaagtaactataacgtgcctgtcatgtcaaacgatctcaaggcagtgaggagaatagcgaggaagacgagcgagagaggagggggcttggcttcagtgcagacaatggcgctggtgcacggggaaggagtcatagaggttgcctgtaacttgttgaatccaagccaagtggggggagatgaagtacagggactgatcgagaggcttggcagagaggaaggtctgcttgtgggaaaagggtattatacggactatacacctgaccagatcgttgaaagatatatggacttgctcaacaattcataaatttcaaagtaaaaaaagtaaaaacagtatgatgttgtcattcttagaacgtattattaccgacatcgatcatttatcttcattttgtgtttaaaaaaaaaaaaaaaaaaggcgcgcc

SEQ ID NO: 15 - DNA, 959 bp, Arabidopsis thaliana
aactctttgtttcttgtttgttgattaacccttaattaaacttatgagtggatgtgtgaagagtagggaaaaagtacgaaaggaaaatatgagtgaggagaagaggaagcaacacttcgtgctagtacatggtgcgtgccacggcgcatggtgctggtacaaggttaagcctcttctcgaggctttgggccatcgtgtaaccgccttagacctagctgcttccggtatagacacaaccaggtcaatcactgacatttctacatgtgaacaatattctgagccattgatgcagctaatgacttcattgccgaatgatgagaaggttgtactcgttggtcatagctttggaggtttgagtttagccttagccatggataagtttcccgataaaatctctgtctctgtcttcgtgactgcattcatgcccgacaccaaacactcaccatcgttcgtcgaggaaaagtttgcaagcagcatgacaccagaaggatggatgggctctgagctcgagacatatggttcagataattccggcttgtctgtgttcttcagcaccgacttcatgaagcaccgtctctaccaactttctcctgtggaggatcttgagcttggattgcttctaaagaggcctagttcattgtttattaatgaattatcgaagatggagaacttttctgagaaagggtatggatctgttcctcgagcttacattgtgtgcaaagaggacaacattatctcggaagaccatcaacgatggatgatccataattatccggcgaatttagtgattgagatggaagagactgatcatatgccaatgttttgcaaacctcaactactaagtgaccatctattggcaatcgctgacaatttctgttaaataatattttgatgaaaatgtatttggagtggatacaatcaggcgcgccaaaaattggagctctgcagagctttcgttc

SEQ ID NO: 16 - DNA, 1230 bp, Arabidopsis thaliana
ttaattaaaaaccctaattctatcaattcgaaatcttcaatttcacatgggtgaacattcaccttctcaaccatcatctcatactcttcctccaaaccaaccggaatcacccaatcacgaaacccctaatccaattccaccggaaaccaacgatgacgactccgcctcatccgccggagtttctggctcaatcgtctcatcaaccaccattgaagcaccacaagtcactgaattaggcaatgtatcgtctccacctaccaagatccctctccgtcctcgaaaaatcagaaaactttcacccgacgacgacgcttccgacggattcaatccggagcataacctttctcagatgacgacgacgaaaccggcaacgaagagtaaattatcacagtcacgcactgtaaccgtgccgagaatccaagcaaggtctctcacttgtgaaggcgagcttgaagcagctcttcaccatctccgaagtgttgatcctctgctcgcgtctttaatcgacattcatccaccaccaacgttcgagacttttcagactccgttcttggcgttgattcgaagcattctttatcagcaattagcagctaaagcaggtaattcaatctacacacgcttcgttgccttatgcggcggtgaaaacggcgtcgtgccagagaatgtattgcctttaacacctcaacagcttcgtcaaattggtgtttccgggcgtaaagcgagttaccttcatgatcttgctaggaaatatcaaaatgggatcttgtcggattctggaatagtgaatatggatgagaaatctttgttcacgatgttaacaatggtgaatgggattgggtcatggtcggtccatatgtttatgataaactctcttcatagacctgatgtgttaccagttaatgatcttggtgtaaggaagggtgtgcagatgcttaatggtatggaggatttgcctcgtccatccaaaatggagcagctttgcgagaaatggcgtccgtatagatcagtagcgtcttggtacttgtggcggctcattgaatctaaaaatacaccacctaatgctgcggctgctacggccggagctgctctttcgtttccacagttggaagacattcagcaacaagaacaagaacagcaacatcaacaacatcagcaacaacagccgcagcttatggaccctcttaataatgtgttcagtatcggggcatggggccaaacgtagggcgcgcc

SEQ ID NO: 17 - DNA, 1332 bp, Saccharomyces cerevisiae
ttaattaaccaaaagaaaataactaatagaccccattacaatatagaaatgttttccatattcaattcaccatgtgtttttgaacagctgccatcttttagtcagcccctacattcgcgttattttgattgcagttctccagtgagctattatccagaatgtaaaaggaggaaagcaataaaagctaacctaagagctccaaaaaaaagcgatgcaaattgttcagagcctttgaggtatgcacttgctgaaacaccaaatggttatacattaagcttgtctaagcggattccatatgaacttttttcaaagtacgttaatgagaaattaggtgagctaaaggagaaccattacagaccaacttaccatgttgtccaagatttttttggaaaccagtattatgttgaagatgaagcggatgaagatgctctattgagatctgcattgaaagatctggattttagagccataggaaagaaaattgctaaggatcttttccaagactacgaaatagaattgaatcatagaggtgatgaattgagcatattgagtaagaaggataaaatctttaaggaattctctctagaccaagtgtttgaagatgtttttgttattggctgtggagttgaaaacatagatgatggctcgagagaaaaatatgcacttttaaagattggtttagttaagcatgaggaagaaatttccgaaggtggcatcaacgaaccaaagatgccaataattgaatccaaaatagacgagtctcacgatgatgttaacatgtctgaatctttgaaggaggaagaagcggagaaagcgaaagaaccactaaccaaagaagaccaaataaaaaaatggatagaggaagaaagattgatgcaggaggaaagcagaaaatcagaacaggaaaaagctgccaaggaagatgaagaaaggcaaaagaaagagaaggaagccagattgaaggcaaggaaagaatctttgataaataagcaaaaaaccaagaggtcccagcaaaaaaaattgcaaaattccaaatcattgcctatctctgagattgaggccagcaataaaaataataatagcaattctggttcagcagaaagtgataatgaaagtataaacagtgattctgatacgactttggatttctctgtgtctggtaatacactaaaaaaacacgcttcacccctattagaagacgttgaggatgaggaagttgacagatacaacgagtccctaagcagatctcccaagggaaactctattattgaggagatataatgggtgataatacatactccccatctttcatttttacggcattatttaaat

SEQ ID NO: 18 - DNA, 1443 bp, Arabidopsis thaliana
atggaagatccacttttattgggagacaatcagataatcaccggaagtcttaagccgacgccgacatggaggatgaatttcacggcggagctcaagaacctcagccgcatggcgctgcctatggccaccgtgactgttgctcaatatctattacccgttatctcagtcatggtcgccggccaccgcagcgaactccagctctcaggcgttgctcttgccacttcttttacaaacgtatccggcttcagtgtcatgtttggtttagcgggtgcacttgaaactctatgtggccaagcttatggagcaaaacaatacgcgaaaatcggaacttacactttctctgcaatagtctcaaacgtacctatagttgttctcatatcgattctctggttttacatggacaaactctttgtttcacttggacaagatcctgacatctccaaggtagctggttcttacgcggtttgtcttataccggcattgttagctcaagcggtgcaacaacctttgactcggtttctccagactcagggtttggttcttcctcttctctactgtgccataaccacccttttgttccatataccagtttgtttgattctggtttacgcgtttggtcttggaagcaatggagccgccttggctattggtttgtcttactggtttaacgtcttgattcttgctttatatgtgagattttcaagttcttgcgagaagactcgcggctttgtgtctgatgatttcgtgttgagtgtcaagcagttttttcagtatggaataccttcggcagcaatgacaaccatagagtggtcattgtttgagttccttatattatcttcaggactcctcccaaacccgaaactcgagacctctgttctttccatttgtcttacaacctcatctctccactatgtcattccaatgggtattggggcggctggaagattagtcatactatttacccttggcagtatacgggtttcaaacgaattgggagcgggtaatcccgaggttgcgaggctggcagtgtttgccggtatattcctttggttcctagaggctaccatttgtagcacacttctcttcatttgtagagatatcttcggctacgcctttagcaatagcaaagaagttgtggactatgtcacagagctatctcctttgctttgtatctcatttttggttgatggattttctgcagtgcttggtggggttgctaggggaagtggatggcaacatattggagcttgggcaaatgtggtggcttactatctcctaggagctccggttggacttttcttaggattttggtgtcacatgaatggtaaagggctatggatcggtgtggtggttgggtctacggcgcaaggaatcatactagctatagtcactgcttgcatgagttggaacgagcaggttaatatcaatctgaaatatttatga

SEQ ID NO: 19 - DNA, 819 bp, Arabidopsis thaliana
atgggaagatcgaattctcaatgcccatctcattggattctcctctgcttcttcatctcttctcagttttggggattctcacttcccacttcgataattcaacaaaatctcgagggttttaaagatcctgaagacggttttcatgagattcattgttcaagagaacgtagcagagttgcttggaaaatcattcaagagtatctcatgccgtatgtggaaaaggagcggtatcagttaccgagtacttgtagagttcatcgagacaatgacatttatagagaacaagaagagcacaaattgcgttcagatattaatgagtggcgttgtggattctgcaaaaaggctttttatgaagagaagtatctcgataagcatttcgattcgcgccattacaatttacttaatgcgagtcatggtaaatgtctgtcggatctttgtggagcgttgcattgtgatcttgttgtagacacagctcggcttaagtccaagtgtaatcctgcagctgctgcaaaaaaccggcacttatgtgagagtttggctaatagttgttttccggtaaataaaggttcatcagccaaccgtcttcacgatttcttcttgcgtcagttctgcgatgcacatacatgttcaggaggatcaaagcccttatctcaaaaaccaaagaagaggagtatagtgtacattattttctccatcatcgttttggtagtgcttcttctctattacagctttgtctatttgttccgaagaggattaaagagaagatctcaagatttgaagcgtattagacacaatggtctgaagaagaaacccttctaa

SEQ ID NO: 20 - DNA, 826 bp, Arabidopsis thaliana
ttaattaaatgatgcataattcaaccgaagaatcggaatgggaggtgagacctggtggtatgctcgtccaacgaagagacgacgccgcttcctccgaccacaaacctctccaggatcccgactctgcttccgccgcttttgctcaaaccatcagaatcactgtttctcatggctcatcgcaccacgatcttcatatttctgctcacgccactttcggggatgtgaagaaagctcttgttcagaaaactggattggaagctagtgaattgaagatcttgttcagaggagttgagagagatgatgctgaacaattgcaagctgctggtgttaaggatgcgtctaagcttgttgttgttgttgaggatacgaataagagagtggaacaacagcctcctgtggtaactaaagagatggaaaaagctattgctgctgttaacgcggttacaggagaggtcgataagctctcggatagagttgttgctttagaagttgctgtgaatggagggacgcaagttgcggtgcgggagtttgacatggctgcagagcttcttatgaggcagctgctcaaattggatggcattgaggctgaaggggacgctaaagtacagcgtaaggctgaggtacgtagaatccaaaacttgcaggaggctgtggataagttgaaggcaagatgttcaaatccgtttgtggatcagagcaaagctgcagctgtaagcactgagtgggaatcgttcggaaacggtgtcggaagcttgaaccctcctccgccagcttcgccttcggccaatgtaactcaagattgggagaaatttgactgaggcgcgcc

SEQ ID NO: 21 - DNA, 1140 bp, Arabidopsis thaliana
atggaaactcttttccacactcttcttagattattactattcgtagccatctctcatactctgtcccctctcgccggttctttccggatttctaatgactttccggcggttttcaacttcggagactctaactctgacaccggagaacttagctcgggtcttggattccttccacaaccttcctatgaaataaccttctttagatctccaacttccggaagattctgcaatggacgtcttatcgtcgattttctaatggaagcaattgatcgaccatatttgaggccttatttagattcgataagtcgacaaacttaccgaagaggctgcaattttgctgcggctgcgtcaacgattcagaaggcaaatgctgcatcctatagcccctttggttttggtgttcaagtctctcaattcatcacctttaagtccaaagtccttcaattgatacaacaagatgaagagctccaaagatacttaccgtccgaatatttttttagtaatggattgtatatgtttgatatcggacaaaatgatattgccggagcattttacaccaagacagtagatcaagttcttgctctggttcctataatcttagatatatttcaagatggaataaagagattatatgcagagggggcaagaaactattggatacacaacacaggaccacttgggtgtttagcacaagttgtgtcaatttttggggaagacaaatcaaagcttgatgagtttggttgtgtcagtgaccataaccaagctgctaagcttttcaatttgcagcttcatggtcttttcaaaaaactccctcaacaatatcccaattcccgtttcacatacgtagatatcttctctatcaaatccgacctcatcctgaatcattccaaatatggttttgatcattcgataatggtatgttgtggaaccggaggaccaccactgaactacgatgatcaggttggttgcggtaagacagcaagatcaaatggtacgatcataaccgccaaaccttgttatgatagttccaaatatgttaactgggacggcattcattacactgaagctgcaaatcggtttgttgcactacacattctcaccggtaaatactctgagacggcgtcatctttgaatctttag

SEQ ID NO: 22 - DNA, 1350 bp, Arabidopsis thaliana
atgtcgcagagatggagtagaaagaagagtagacttccattagcgggtctcctctttattctcgttgtcacctttatgattctcttcaacgagcgtagcattcagcagatccatcaccacgccgcgagtcacactcaaaatctccgagaaccttccacgttcgatttcgtcaagcctaatgttcctcggattaactacttgggagctcatgaggttttggatagattcagcaaatgcaactcgacgaaagagtacagtgggaagaaaatcggatgggttgacccgtttgaagaccacccgggtcaagtaacaaaggaggagcagaaatgtgatgtcttttctgggaaatgggtctttgataattcatcatcataccctttacacaaggaatctcagtgtccttacatgtccgaccagttggcttgtcagaagcatggtaggaaggatttggagtatcagcattggagatggcaacctcatgcctgcaacttgaagagatggaatgcgatagaaatgtgggagaagctgagaggaaagagattgatgtttgttggagactcgttaaacagaggccaatggatttcaatggtttgtctcttacagtctgtcattccacgtgacaagcagtctatgtctcctaacgctcacctcaccattttcagggctgaggactacaatgccacagtggagtttctctgggcaccgttgctcgtggagtcgaattctgatgaccctgttaatcacagattgagcgagcggattatccgacccgattctgttcttaaacatgcatcaaagtggcaacatgctgatattctaatcttcaacacctacttatggtggagacaagactctgtcaagctccgatggagcagtgaagaaaaagggtcatgcgaggaggtgaagagcgccgagggaatggagatggcaatggatagttggggtgattgggttgctaacaatgtcgatccaaacaaaaagcgagttttcttcgttacaatgtctcctacacatcaatggagccgagaatggaacccgggaagcgaaggaaactgctacggggagaagaaaccaatagaggaagagagttattggggaagtgggtcggacattccgacaatgaggatggtgaagagagttttggagagattgggaccaaaggtctcagttataaacatcactcagttgtctgagtatcgaaaagatggtcatccatcggtgtaccggaaattctgggaacctctaaatgaagaccggttgaaaaacccggcatcgtattctgactgtactcattggtgtgtacctggagttcctgatgtctggaatcaattgcttttccattttttgtga

SEQ ID NO: 23 - DNA, 1506 bp, Arabidopsis thaliana
atggcgattccgatgcctactcgccagctattcatcgacggcgaatggagagaacccatcttgaagaagcgaatcccgatcgttaatccagctactgaagaggtcattggtgatattcctgcagctacaacggaggacgtggatgttgctgtcaacgctgctcgaagagcattatcaaggaataaagggaaagattgggccaaagcacctggagctgttcgtgctaagtatttacgtgctattgctgctaaggtaaatgaaagaaagacggatctggcaaagctcgaggcgcttgattgtggtaaaccattggatgaagcagtatgggatatggatgatgttgctggatgttttgaattttatgctgaccttgctgaaggattagatgctaagcagaaagcaccagtctcgcttcccatggagagttttaagagttatgttctgaagcaacctctcggagttgtgggacttattacaccatggaattacccccttttgatggctgtttggaaggtggctccttcccttgctgcagggtgcactgcgattctcaagccatcagagctggcatcagttacttgtttggagcttgctgatatttgtcgagaagttggtcttcctcctggggtcctcaatgttttgactggtttcggttcggaagctggtgctcctttggcatcacatcctggcgtggacaagattgcatttactggaagtttcgccacaggaagtaaggtcatgacagccgctgctcagttggtgaagcctgtttctatggaacttggtgggaagagccctctcattgtgtttgatgacgttgatcttgataaagctgctgaatgggctcttttcggttgcttctggacaaatggtcaaatctgcagtgcaacttcccgccttcttgttcacgaaagcatcgcatctgagttcatagagaagcttgtaaaatggagcaagaacattaaaatttcagaccccatggaagaaggatgcaggcttggtcctgtagttagcaaaggacagtacgagaagatattgaagtttatctcaacggccaagagtgaaggagcaacgatcttgcatggtggttcccgacctgagcatctggaaaagggcttcttcattgaaccaaccatcataactgatgtaaccacttcaatgcaaatatggagagaagaagttttcgggcctgttctttgcgtgaaaacatttgccagtgaggacgaggcaattgagctagcaaatgactctcattacggactaggagctgcagtgatatctaatgacacagaaagatgtgaccgtataagcgaggcctttgaagctgggattgtctggattaactgctcgcagccttgctttacccaagccccatggggtggtgtcaaacgcagtgggtttggacgagaacttggagaatggggacttgataactacttgagtgtgaagcaagtgactctctacacttcaaacgatccctggggatggtacaaatctcccaactaa

SEQ ID NO: 24 - DNA, 882 bp, Arabidopsis thaliana
atggcggcctcctgcttcgcaattcccttatcttcttcttctcgatcgtctcacaatgcaattcccaaatacaaaaccctaatctcttcttcttcttactcttacttagaatctctgaaacttcaattctcttcttccaattcttttcatcactcttctctttctcgtccctttgtagctcaaccacttcaaatcaaggtctcttcttcagaattatcagttctcgatgaagaaaaagaagaagaagtagttaaaggagaagcagaacccaataaagatagtgtcgtctccaaagcagaaccagtaaagaaaccgagaccttgcgagctctacgtgtgtaatatccctagaagctacgacattgctcagcttcttgacatgtttcagccttttggaactgtaatctctgtagaggtatcgcgaaatcctcagacgggagagagccgtggaagcgggtacgtgacaatgggttctataaactctgccaaaatcgccattgcttctcttgatggaacagaagtaggtggtcgggaaatgcgggttaggtactctgttgacatgaatccaggaacaagaagaaaccctgaagtcttgaactcaactccaaagaagattctgatgtacgaaagccaacacaaggtctatgtcggaaatctcccttggttcacacagcctgatggtttgagaaaccactttagcaagtttggcacaatcgtaagcacgagagtgttacatgatcgtaagaccgggagaaacagagtctttgcctttctttcttttacaagcggtgaagaacgtgatgcggctttatcattcaatggaacacaatatgaaggtcgcagaatcatcgtcagagaaggtatcgagaagagtgagtcgtaa

SEQ ID NO: 25 - DNA, 1819 bp, Saccharomyces cerevisiae
ttaattaaaagctcaccaaaacacaaatactcactacaatacaatatgtgtggtatctttgcagccttcaagcatgaagatattcacaacttcaaaccaaaagctctacaactatctaaaaaaatcagacaccgtggcccagattggtcaggaaatgccgttatgaattccaccattttcgttcacgagaggttggctattgttggtttagactccggtgcccagccaatcacttcagctgatggcgaatatatgcttggcgttaatggtgagatctacaaccacatccaactaagggagatgtgctctgattacaagtttcaaactttcagtgactgtgaacccatcataccgttatatttggaacatgatatcgatgctccaaaatatctggacggtatgttcgcattttgtctgtatgattccaagaaagaccgtattgtcgctgcaagagaccctatcggtgttgtcactttatacatggggcgttcttctcagtctccagagaccgtttattttgcctccgaattaaaatgtctaactgacgtttgtgacagtatcatttcgttccctcctggtcatgtctacgattctgaaacggacaagattactcgttactttaccccagactggttggatgaaaagcgtatcccatccaccccagttgactaccatgctatcagacacagtttagaaaaggccgttagaaagaggctaatggctgaagttccatacggtgttcttctatccggtgggctggactcttctttgattgctgcgattgctgctcgtgaaacggaaaaagctaatgctgatgctaacgaagacaacaatgttgacgagaagcaacttgcaggtatcgatgaccaaggccatctacacacatccggttggtctcgtttgcattcgtttgcgattggtctaccaaatgcacctgatttacaagcggctagaaaagtcgccaaattcattggttctatccaccatgaacacacttttacattacaagaaggtttggatgctttggacgacgtgatctaccatttggaaacttacgacgttaccactatcagagcttctacaccaatgttcttactatctagaaagattaaggcccaaggtgtcaaaatggttctttctggtgaaggctcggacgaaatattcggtggctatctatatttcgcacaagcaccttctgctgcagaatttcacaccgaatctgtgcaacgtgtcaagaacttgcatttggcagattgtttgagagctaataagtccacgatggcttggggtctagaagctcgtgttcccttcttagacaaagactttttgcagctatgtatgaacattgatccaaatgaaaagatgatcaagccaaaggaaggacgtatcgaaaaatacattttaagaaaggcattcgacactacagatgaaccagatgttaagccatacctacctgaagaaatcttatggagacaaaaggaacaattttccgatggtgttggctactcatggattgacggcctaagagacactgctgaaagggccatttctgacgccatgtttgccaatccaaaggctgattggggcgacgatattccaaccaccaaagaagcttactggtacaggctgaagtttgatgcttggtttcctcaaaagactgcggcagacactgtcatgagatggattccaaaggccgattggggttgtgccgaagatccttcaggtagatacgccaaaatacacgaaaagcacgtcagtgcttaatacgagcgcaatcgtattcttataattgacgagtgaaccaagaaatgatttaaat

SEQ ID NO: 26 - DNA, 1643 bp, Glycine max
ttaattaattgatctagatatctagatacagaattggaaatggattcaaatgggagcctacgtgctaacacctgggcaaggtcgtcgtccttgacctctcctgcaagtggtttatcctcagatcctctttctttcccaggttttggtttgcagcataatcaacaaaaatgggatgttccctcaaattcagattttggaatcagggctgaagcacctttcaaagaattcaatcagccctctcaaacccagtctccgcttccttgcaactcaaacaatgagattgaaatccctggtcaagaaaactgtcatctgagtgaatcatcacaaaccaatacactccaagattgggaccccagtgtgatgttgaataacctatctttcttggaagaaaagattcatcagctccaggatctagtgcatttgattgctcgtcaaaaaggcattggacaacctaatgaacttgtaactcaggaacagcagctcgttacaactgatctcacatcaatcattattcaattgatctctaccgcaggtagtctcctcccttctgctaggcataaccttgtaaacactagttcattggttggacagattgaccagcttcgtgggacgaccattcctcctgggaccggtgcaagtaacggctgtattcaaccacagaataatggtggaaaaatattgtctgatcagtccatgcagactgatctacctaatagtggtgaaatggagcaaaagtacaatatggtagaacatgacttgaaagatgaagaagatgtagaggatggagaaaaccttgcccctggttcatatgagattctacaattagaaaaagaagaaatccttgctcctcatacccatttctgtacaatttgtgggaaggggttcaagagagatgcaaatcttcgaatgcacatgcgaggccatggtgacgagtacaaaaccccagcagcgcttgccaaaccgcacaaagaatctgcatcaccaaagcctatcaagaggtattcctgcccctatcctggctgcaagcgcaacaaggatcacaagaagttccagcctctgaagacgatcttatgtgtcaaaaaccattacaaaaggacgcattgtgacaagagttacacttgcagtaggtgcaacaccaagaagttctcagtcatggctgatctaaaaactcatgaaaaacactgtggtaaggataaatggctctgttcgtgtggcacaacattttctaggaaagacaagctttttgggcacattgctcttttccaagggcatgcaccagccattcctttggatgacactaaaggggcaggggtagctgaggcacccattcatgatagcaaagagaacaacagtaaggtgcagagcatgaacttcacttttggatcaaatccttcaaatgcaaatgaagttccaaatgccatggatgtaaaaggcgatagcgatgatcctatcaattatttctcatcattgaactttgaagccaactttggtgagtttaatgaattcaccagacctctatttgatgacccagaaggttcgttctcttttgtcatgcctggatctttcaaatctggaggagaatctagttctgacaatcttttataacaatggtactaccattggttctgtaataacatttaaat

SEQ ID NO: 27 - DNA, 749 bp, Glycine max
ttaattaacttttggccggagatgagtaatagtaattgggtgttggattatgattatctagacaacattcctctcaccacccttgaaccacccaatttctcttggtcttcctcctctcctcctcctacactcagtgtggagctagatgactcatttggaattttggatggtctcaaggaaaacaggtcaagaaaacgtttgaggccatctgattctaaagcatgtagagagaaaatgcgaagggatcgacttaatgacaggtttatggaactggggtctatcttggaccctagaaagcctctcaaaatggacaaggctgttatattaagtgatgcagttcgagttgtttctcagttacgagaggaagctcaaaagctgagggagtccactgagaatctacaagagaaaatcaatgcattgaaggatgagaaaaatgagcttcgcgatgagaagcagcgactaaaagtagagaaagaaaaccttgagcagaaggttaaagctttgagttcacaacctagctttctggctgcagcaggacaagttgttggcagcaagctggtgccattcatgggctacccaggagttgccatgtggcagtttttatcacctgctgctgttgatacctcacaggaccatgttctcaggcccccagtagcataacttgccaaaggctctgtgttttggtccaatggagaaagagaatttatctttttattttttgcttttgtgaaatgtgaaaaaatttaaat

SEQ ID NO: 28 - DNA, 1214 bp, Glycine max
ttaattaagtggtatgctccaggcattgatgaatctgttctcgctgtgttggaagccgtttggccgcgatgctgatcgaatcgattccatcggagttatcggaagagaaggcaaagacggcttgctctggttccgcgacttcggaaaatatggctccggtgatttctccatggctgtcgttcaggccaaccaggttctcgaagaccagagccagatcgagtctggtcctctcggcaccttcgtcggcatctacgacggtcacggaggacccgacgcatcaagatacgtttgcgatcacttgtttcgccattttcaagcaatatcagctgagtcacgcggggttgtgacaactgagacaatcgaaagagcatttcgccaaacagaagaggggtacatggccctcgtgtcaggctcgtggaatgctcgacctcatattgcaagtgctgggacctgttgtctagttggagtgatatttcagcagacactctttgtggcaaacgctggagattcccgtgttgtattgggtaagaaagttggcaacactggaggtatggctgcaattcagctgtctacagaacacaatgcaaatcttgaggctgttaggcaggaacttaaagaattacatcctcatgatccccaaattgttgtcctcaaacatggagtgtggagagtaaaaggcattattcaggtttctagatctataggtgatgtatatttgaagcatgcacagtttaaccgagaaccacttaatgcaaaattcagacttcctgaaccgatgaacatgcctatcttgagtgctaatcccactattctttctcatgctctccaaccaaatgattccttccttatatttgcatctgatggtttatgggagcatttgagtaacgagaaagctgtggatattgtaaacagcaatccacatgcgggtagtgccaagagacttatcaaggctgctctccatgaagcagcaagaaaacgagaaatgcgatattcagacctccgtaagattgacaagaaagttcgacgccattttcatgatgatatatccgttattgttttattcttaaatcacgaccttatttccagaggcacagtgctagacccgacactttcaattcgaagcgctctcgatcactgacttgtatcactgtaagcagtcttgtacgagtttttggcaactgtaccgatacctgaagcattggtaggatttaaat

SEQ ID NO: 29 - DNA, 665 bp, Glycine max
ttaattaaccgctagctcttcaattcttctctccctcactactctctattcgttagtgttcttcaattcttcatcgcagacttagaatcatgggtttgcaaaaccaattaaacgacgtgtcgtcgggttcgattccgctgctggtcttggcgcagatagcgacctgcgtcaactacctccgctccatgcttttcgcgcttttgcaaacccttggtctgtgccgatttcactccgaccagatcgtcgacgagcgcttcctcgccgccgtcggatccggcctcgccggactcatcatgctctccgatcagctaaccctcagcagccaattcttccaccaccaccacgccggcgccggcggccacgaccaccacccctgcgtcgtgtgccaggccaccttcgaggacggcgaccaggtccgcatgctcccctgccgccacgtcttccaccgccgctgcttcgacggctggctccaccactacaagtttaactgcccactctgccgctcaccgctcttctccgacgagcgcgtggccgtcacagagcgccgcctcggccagcaactcatctcttggttctctcttcactgatgcgaagccgtttcgttttctgaactcccacttttacggttttacccctttctcgcgaccactttttacaatttaaat

SEQ ID NO: 30 - DNA, 815 bp, Glycine max
ttaattaacacgagactcatacattgtgctgccaattatagtaactctctatttctctttccatctctcaagttctgaagaagaaacatgtgtggaggtgctatcatctcagacttcattggtgtgaagcgtggccgcaacctcgccgcgcaggaactatggtctgagcttgaccctttctctgacttccttggcttcgataccaccaattccaaaaaccaaccacccctgcagaaaattccagacaaaaaagtggtgtcatcatgtgagaagaagaagaaaagcgtggtgggtgcagaaaagaagaagagtgatagtgggcgagctcgtaaaaacgtgtacagaggaatcaggcaaaggccatggggcaagtgggccgcggagataagggacccacacaagggtgttcgtgtctggctcggcaccttccccaccgccgaagaagccgcccaagcctacgacgacgccgccatacgcatccgcggcgacaaggccaagctcaacttcccggccaccaccatttccgccgccgccgctccgccaccttccaaaaagcaacgctgcctcagccctgacatcatcactgaagaaagcagcagcagcagctcacattccaccactggatccaccggcgaaagcggcggaggaaacgacgaactcgacctgaaacaaattgaatggtttctaggtttggagaatgagctgcctgttagcaacaacattggtgctgagtgggacaacatggatgacctgtggatgctggacgacgtcgttgtgcccaaccgtcacttaatttactagaaggctatttaaat

SEQ ID NO: 31 - DNA, 971 bp, Glycine max
ttaattaagaatcgctgccaagtgctaacaaacgcctctgagtctctgacaccaacgcaactctctctgctcacatttttgaaggagatggtgaacgtgatggagtggcagaagcagcgttggcaaccgaatgggaacgcggaaatgatgtacgtgaaagtgatgaccgacgaacagctcgagactctgcgcaaacagattgcagtttacgcaaccatctgtgaacaactcatcgaaatgcacaaaaacatctcctcgcaccaagatcttgcagggattaggctggggaatatgtattgtgatccattgttggggtctggtgggcacaaaatagcttcaaggcagcggtggactccgtccgctatgcagcttcagattcttgagcgaatatttgatcaagggactggaacccccaccaaggaaaagatcaaggagatcactaatgagctcagccagcatggccagatttctgagaccaatgtgtataattggttccagaacaggcgtgctcgctccaaaagaaagcagcagaatgtggcacctagtgctaatgctgaatcggaagtggagactgaggttgattctaaggataagaagacaaagccggacgaatttcagtcccctcctagcgtttctgctgtgcctgctgatgataatttaggcttccagaaccatggcagtttgcagtacttgaatccagagtccaacaaaccagattctgtgttcccatctgatgcaagtttaagatctacaagaaatttcaatcatgtgcctgtttttgatgggctgctatcgaactcaacgagtgactatcttactggaaaaatggaagcacctgagaactacgacttataccagccagcaggcgacttcaacatggcaggttgacgtccaatgtaatttctgaagactgtgattagctgtaaagaattgctggtgtggttctgggcttgtgttgatgtgatttaaat

SEQ ID NO: 32 - DNA, 560 bp, Glycine max
ttaattaagagaaactctttctcacacgccaagagtaacatgggatttccagtggggtacacagagttgatgctgccgaaggtgtttctgcaggtgctatccgtattgggcttgataagaaaactcatcaccgtcctcttgtgctacatgggcttccacgatttcttcgaatccgacattgcgtggccggagagggcgccggaattccagtcggtgtgggcggtgctcataagggaaatcctaccggtggtgaagttctcggagatggagatggagatggcggaggcgccggagagctgcgcggtgtgtctgtacgagttcgagggagaggacgagatcagacggctgacgaactgccgccacatattccacagagggtgtctggaccgttggatgggatacgatcaaagaacgtgtcccctgtgtcggacacccttcataccccaccatatgcaagctgccttcaatgatagactttgggctgcttcagggattcctgatttctattacaatcatgaatgactctagggaaaaaaaatcctagatttggggatttaaat

SEQ ID NO: 33 - DNA, 1210 bp, Glycine max
ttaattaagctttgattaaccattttcattccctttttccttcgcactactccctcattctgtgccatgtcttcctctctcgttcttccttccactcccttcttcgcccatggaacaagaaccctccctctcactcgatctaggctttccatgaccgtctccgccggatctcagccttctctccgcgacgctctgttcgccgattacaaggcctccacttcattcctcttccccggccagggtgctcaagctgttggaatggggaaagaagctcagaatgtgcctactgctgcggttttgttcaacaaggcaaacgacgtattggggtttgatcttcttgatatatgcatcaatgggccaaaagaaaagctagattcaactgttatcagccagccagctatttatgtcacaagtcttgctgctgtagagctacttcgtgcgcgtgatggaggtcagcagattattgactcagttgatgttacatgtggtttaagcctgggagaatatactgctctggcatttgctggggcttttagctttgaagatggactcaagttggtcaaactgaggggtgaggccatgcaggatgccgctgatgctgctaaaagtgctatggttagtgtgataggactggactcagagaaggtccaacaattgtgtgatgcagccaatcaggaagttcctgaagctgagaaggttcagattgccaattacctgtgcccaggaaactatgctgtctccgggggattaaaaggagtagaagtgctggaatccaaggcaaagtctttcaaggctcgaatgacggtgcgcctagctgttgctggtgctttccacactagttttatgaaaccagctgtgtcaaggttggaagcagcattggcaacaacagaaatcagaaccccaagaataccagtcatctccaatgtgaatgcacagccacatacagatcctgactcaataaagaagatattggcatgccaggttacctcacctgttcaatgggaaacaacagtgcagactcttctaaccaagggtctgaagaaaagctatgaactcggacccggaaaggttattgctggaatcatcaaaagaacggacaaaggtgctgatattgaaaatattggggcttagtgtgtgggaccttgctccttcgtgttcgaatgaacaaaactaataacattttttccaagagagaatgtgcgatttaaat

SEQ ID NO: 34 - DNA, 1034 bp, Glycine max
ttaattaagaaaaaccatggcaataacactcaacaatggcttcaagatgcctatcattggattgggcgtgtggcgcatggaaggaaacgaaatcagggacctaattctcaattccatcaaaattggttatcgccattttgattgtgctgctgactacaaaaacgaagcagaagttggagatgcgcttaaggaggcttttgatagtggccttgtgaagagagaggatctcttcattaccaccaagctttggaattctgatcaaggccacgttcttgaggcgtgtaaagacagtctcaagaagcttcagttaacgtatctagatttatatcttgttcactttcctgttgccgtaaggcatactggggttggtaatacttctagtcctttgggtgatgatggggtcctggacatagataccaccatatccctggaaacgacctggcatgcaatggaagatcttgtttcatcgggcttggttcgcagcatagggatcagcaactatgatatctttctgaccagagattgtttagcatattccaagataaagcctgctgtaaatcagattgaaactcatccatacttccagcgtgattctctagtcaaattttgtcagaagcatgggatttgtgtcactgcacacactccactaggaggtgctgcagcaaatgctgaatggtttggaacagtttcatgtttggatgaccaagttctcaaaggtctggctgaaaaatacaaaaagactgccgcccagatcagccttcgctggggaattcaaaggaacactgtggtcattcctaaatcgtcaaaactggagaggttgaaagagaactttcaggttttcgattttgagttgtctaaagaggacatggagctcattggaagtatagatagaaaatatcgaaccaatcaaccagctgtgttttggggcatagatttgtatgcgtgagaatgcccttcctaagtctgtatcatggctgtttgaccttgtgttaagattcagatttggtataagctgatctttcaggcatttaaat

SEQ ID NO: 35 - DNA, 878 bp, Glycine max
ttaattaatgtttctgttttaatggagataaccaaacttggcaagagatttcaaggtaaggtagctattgtgacagcttccacccttggaattggctttagcatagcagagaggcttggcttggagggtgcatctgttgtcatctcttctcgcaaacagcaaaatgttgatgaggctgctggtaaactgagagctaaaggaatcgaagtattggcggttgtttgccacgtttcaaatgcccaacaaaggaaaaatttgatagacaaaactttacagaagtatggaaagatagatgttgttgtgtccaatgctgccgtacatccttctgtagatcccattttgcaaacacaagaatcgatccttgacaagttgtgggagataaatgtcaaatccactatacttcttctcaaggatgcagctcctcacttgaagaagggttcttctgttgttctcattgcctcacttgttgcttataatccaccacctactatggctatgtatggagtgaccaaaacagcagttcttggacttaccaaagctatggctagtgaaatgggccctaatactcgggtgaattgtgttgttcctgggattgtgccaactcattttgttgcactttatacctcaaatgatgctacaagagaggaacttgaaagaaaggcattgcttggaaggcttggtacaactgaagacatggctgctgcgacagcgtttttggcgtctgatgatgcttcttacataacaggagaaaatctagtggtttctgggggaatgccttctaggttgtagcttccagtttcttcttctggtggttgaatggtgggcctaccccccaaaacgttttgtttcctgactcatctgatgccattcatttaaat

SEQ ID NO: 36 - DNA, 1518 bp, Glycine max
ttaattaaccccattttctctaaatccaaacaggccccaaaagaaagagagggaaaattctcttccatggcctcttcacgccctgccaatgtgggaatccttgccatggacatctacttccctcccacctgcgtcacccaggatgctttggagggtcatgatggggtgagcaaagggaaatatactattgggcttggacaggattgcatggccttctgctctgaggttgaagatgttatctcaatgagcttgacggtagttacttcacttcttgaaaaatttaatgttgatccaaagcaaattggacatttggcggttgggagtgaaactgttattgacaaaagcaaatcaattaagaccttcctgatgcaagtttttgaggcaagtggtaatactgacattgaaggtgttgattcaactaatgcatgctatggaggaacggctgctttgttcaactgtgtgaattgggtggagagtagctcatgggatggacgttatggacttgttgtttgtacagacactgcggtatatgctgaaggacctgctcgtcccactggaggagctgctgcaattgccatgcttgtagggccagatgctcctattgcttttgaaagcaaactcagaggcagtcacatgtctcatgcatatgatttttacaagccaaaccttgctagcgaatatccaattgttgatggaaaactctcacagacctgttatctcatggcacttgattcctgttaccggctttactgtgagaaatttgaaaaattggaggggaggcctttttcaatgtcagattctgattattttgtgtttcattctccatataacaagcttgtgcagaaaagttttggccgactatacttcaatgacttcttgagaaatgccagttttgttgatgaagttgccagggaaacccttgcaccatatgcatccttatctggtgatgagagttatcaaagtcgtgatcttgaaaaggcaaaccagcaagctgcaaaacatctatatgatgcaaaggtgcagcccagcacactaatcccaaagcaagttggtaacatgtacactgcatctctttatgcagcatttgcatctcttcttcacaataagaacagttcgttggtaggtaaacgggtagttatgttttcatatggaagtggtttaacagctacaatgttctccttccagcttcaagagggtcaacatccgtttaacttgtcaaacattgtaacagtgatgaatgtttcggacaagttgaagcagagagttgagattcctcctgaaaagttcgttgaaacattgaagatcatggaacaccgttatgggggtaaggactttgtgacaagcaaggactgtagctacttaactccaggcaccttctatctcaccaatgttgattccatgtacaggagattttatgccaagaaggactaggttattggttagttgatgatcgctgatatattcaaatatggagttaaaatgtattttcttatggttcacctgtatttgaatttaaat

SEQ ID NO: 37 - DNA, 803 bp, Glycine max
ttaattaattagagtgtgtaagaaagagaagagagagaaatgggaaggggaagagtggagttgaagagaattgagaacaagatcaacaggcaagtgacctttgcaaaacgaaggaacgggcttttgaagaaagcttacgagctttccgttctttgtgatgccgaggttgctctcatcatcttctccaatagaggaaaactgtacgagttctgcagcagttcaagcatgctcaaaacgctagagaggtaccagaaatgtaactatggtgcgcctgaggctaatgtgtctacacgggaagccttggagttaagcagtcaacaggagtacttgaagctgaaggcacgttatgaggccctacaacggtcccagaggaaccttatgggagaagatcttggtcctttaagcagcaaagagctcgagtctcttgaaaggcagctagattcgtccttgaagcaaataagatcaaccaggacccagttcatgttggatcagctctctgatcttcaacgtaaggaacacttgctaagtgaggctaacaggtctctcagacaaaggttggaagggtatcaaataaatccactccaactgaatcccggagttgaagagatgggatatggcaggcatccagctcaaactcatggtgaagccctctttcaacaaatggagtgtgagccaacgttacaaattgggtatcagcctgatccagtatcagtggtgacagcaggcccaagcatgagcaattacatggcaggatggttaccatagtttgcgtttcctgcataagatccactgcacatttaaat

SEQ ID NO: 38 - DNA, 860 bp, Glycine max
ttaattaagttctgaaaccactaccgtttcgtcgtcaccatgccgcaaggggattacatagagcgtcacagaagagactatggctaccgtcttgatcacttcgagcggaagcgcaagaaagaggcgcgtcaagttcacaaacgttcttcaattgcccagaaggctctgggtattaagggcaaaatgattgccaagaaaaattatgctgaaaaggcacagatgaagaagactttggctatgcatgaagaatcaacgtctaggcgcaagactgatgataatgttcaggatggagctgttcctgcttatctccttgatcgtgataacacaaccagagcaaaggttcttagcaacacaattaagcaaaagaggaaggagaaggcgggaaaatgggatgttcctctacctaaggtacgtccagtggctgaagatgaaatgttcaaagtggtccgtactggtaaaagaaagaccaagcaatggaagaggatggttacaaaagctacatttgttgggcctggttttaccagaaagcctccaaagtatgagcgattcattcgtcctacaggattgcgattcactaaagctcatgtcactcacccagaacttaaatgcacattcaatctagaattaattggagtgaagaaaaaccccaatggccccatgtacacctctcttggtgtcattaccaggggaactataattgaggtgaatgtcagtgaacttggtcttgtcacacctgctgggaaagttgtgtggggtaaatacgctcaggtcacaaataacccagaaaatgatggttgtataaatgccgttttgcttgtttaaggtcatagcaagcatcagggttccagcttgatttaaat

SEQ ID NO: 39 - DNA, 797 bp, Glycine max
ttaattaacctctctctctctctcacacacaaagaggccatggattacctcgaccatgatcatgatcatgacccattccacgaccacgacgacttcaacagaaggatactcatcatggccatagtttccttatcagtggtcttggttcttgtctttgcacttcacctctacgcaagggttttcctccgccgccaaactcgccgcagagccgccatataccaactgagcctcaacgtggcacaagcacacgccgagccacacaacaacacagggctgaaccctgccctcatcaccacccttccctccttccccttcaaacaaaaccaacaccatgattctgctgagtgtgccgtgtgcttgagcgttctagaagacggagaacacgtgaggcttcttcccaattgcaaacacagcttccacgtcagctgcatcgacacgtggctttcttcgcactccacgtgtcccgtttgtcggaccaaggccggaccggtccagctcgaaccggtccgcctcgaacctcagccccgtgagggccccactggcttggttcttgctgatgttgttgcacccacggctcctctattgtttgaaaacgtggaaggaacctcggatggtgctaataataatgggtcacctaaggttagtggttcgaattcgaggttgagttcgttcagaaggattctcagtagggagagatcgatgaggaggattctaccttctagccatgatgatgttgaacatgacttagagaggcagtgagaactgagaaattaattattgaggtaccaaatttaaat

SEQ ID NO: 40 - DNA, 1072 bp, Glycine max
ttaattaataagttcccaaattccccaaagaagcctaaggccaaaccaaaccaaacgtatcagaataaacaaagaaagtcctctctctaatggagcggtacaaatgcaagctctgctccagaacattctccaatggcagagccctcggtggccacatgaaggctcacttagccaccctccctcttcccccccaaaaccaacaaccaccactttctccctctgctgctgcttccttctcttctaattcctcttcagaacaagaacaagccacacacgatgaaaagtccctgatttatgggttaagagagaatcccaagaaatgcttcaggctcgcagatcccgagtttgacacgggctctgtcgttcaagacagggagagcgagaccgagtcaaagaacccaactcgccgacgatccaagcgaacccgaaggcccgtgaatttggaacaaaaaaagcccaaactgagtttcatggagtcgcctgagcccgtgagttcggtctccgacacttcccccgaggaagatgtcgccatgtgtctcatgatgttgtcgagagaccgatggagtaagaacaacaacatcaacgttgttaatgttaatgatgaggatgttgtcgaagaggaagaagaagaagaagaagaggaggaggagggtgggagatcagtactagagataaagttgaggagagttcgcgggaagcaccagtgtcagagctgcgggaagacgtttcgatcttcacgcgcattgggcagtcacagaagcatttgcgaaggttcgggtaacgatagtaaaatcttccaatgccccttttgttccaaggtgtttgggtctggtcaagcacttggtggccacaagagatctcacctcatgccttcttcttccacaaccgctaataatgattctgttagattgaaagagagcttcatagatctcaacttgccagctccgcccgaagatgacgaccttagtgttgtttctgatgcctgataattacttgttcttctctgcagcaattgggtaaagtccttttctttttttatagtaggtaacgatatttcattgcggatttaaat

SEQ ID NO: 41 - DNA, 1539 bp, Glycine max
ttaattaagaacaatgttaccccagaagcaaggtgaagaaaccatgatgtcaaaccttaacgaaacaacgattgagcgtggtgaagagagagaggaagagaacgtgggtggtggttcacattccagtttgaaaagcattctttggcatggtgggtctgcttatgatgcatggttcagctgtgcctcaaatcaggttgcgcaggttctgctaacactgccatactctttctctcagctgggaatgctctctggcatcatattccaagtcttctatggaataatgggaagttggacagcttatctgattagcattctgtacatcgagtacaggaccagaaaagagaaagagagtgtcagcttcaaaaaccatgtcattcagtggtttgaagtgttggaaggtttactgggtccatactggaaagccattggcttggccttcaattgcactttcctcctctttgggtccgttatccagcttattgcttgtgcaagcaacatatacctcataaatgaccacttggataagaggacctggacttacatattcggagcttgctgtgccaccacagtgttcgtaccttcatttcacaactacagaatttggtctttccttggccttggcatgaccacttacacagcttggtacatgaccattgcagccattgctcatggccaggttgaaaatgtgactcacactggcccaaaaaaattggtattgtatttcacgggcgccaccaacattctctacactttcggcgggcacgccgtcacagtggaaatcatgcatgcaatgtggaaacctcaaaagttcaaatatatctatctttatgctactctttatgtgttcacactcaccctaccatctgctgttgccgtttattgggcctttggtgacaaactcctggaccactccaatgctttctctcttcttccccgctctggttggcgcgatgccggtgtcatcttaatgctgattcatcagttcatcacttttggatttgcttgcacaccattgtattttgtgtgggagaaggtgataggaatgcatgacacaaagagcatatgtttgagggcacttgctaggttgcctgtggtgataccaatctggtttttggctattatcttccctttctttggtcctattaactctgctgtgggggctcttctggttagcttcaccgtgtatgtcatccctgcttgtgctcatatgctcacttacaagtctgcttctgcacgacagaatgctgctgagaaattgcccttcttcatcccaaactggacggcaatgtatgtggtgaatgcatttgtggtggtgtgggttctagtggttggatttggatttggagggtgggctagcatgacaaactttatcaaacaggttgacacatttggactctttgccaagtgctaccaatgcccgccaaaagtccctgcttccaacaacacaatgctgcatcattgaaaattatatatgttcttctgctttaaacatatagggacacatcagcatctccacccttgtgtatttcccatttaaat

SEQ ID NO: 42 - DNA, 442 bp, Arabidopsis thaliana
ttaattaaatggcgatgtctttatcaggagctgttctcagtggcatgggttcttctttccacaacgtaggagcaaagcagagtggtgttggtaccgtcagagttggccggaagagtgagctcgtcgtcgttgctcagcgcaagaagtcgttgatatacgccgttaaaagtgacggcaacatcctcgatgacctcaacgaagccacaaagaaagcttctgatttcgtgacggataagacgaaggaggccttggcggatggcgagaaaacaaaagactacattgttgagaaaaccattgaagccaatgaaactgcgactgaggaagctaagaaagctttggattatgtgactgagaaaggaaaagaagccggaaacaaggcggctgagttcgtagagggtaaagcagaagaggctaagaatgccacaaagtcctgaggcgcgcc

SEQ ID NO: 43 - DNA, 1896 bp, Arabidopsis thaliana
ttaattaaatggcagtgttcttcatcttggtcttggtctttttcttccttgtcttcagattcatctacagtaatatatgggttccgtggagaatccaatctcacttcaagaagcagagcgtgacgggtcctagttaccggatattcagtggaaactccggcgaggttagccggctaacggcggaggcgaagtcaaagccgattccttccgggagaaatcctcatgagttcgtccaccgtgtggcgcctcactaccacgaatggtcacgtgtctacgggaagacgttcctctactggttcgggtcgaaacctgtggtggctacgtcggatccaagactaatccgggaagctttgacgacgggtgggtcgtttgaccgaattgggcataaccctttgtctaagctgctttatgctcaaggtcttcctggtcttagaggtgatcaatgggctttccatagaagaatcgccaaacaagcttttacaatggagaaactcaaggtaacactaacacacatcaatgtagaagctaagatctgtaattcagacaacattgtgctatttggaatctcagtctagtttagtttaaaaattaccaaatccggagtgctttataggattgtggctaaagctaagatctttttttcttttatagaggtgggtgccacaaatggtaacaagtactatgatgttgatggagaagtgggaagatatgagaaacggaggagaagagattgagttagaggtacacaaagagatgcacaatttgtctgcagaaatgttatcaagaacagcttttgggaacagcgtggaagaagggaaaggaatctttgaattgcaggagcgtatgatgcgtcttttttatctggttcgatggagcgtttatatcccaggattcaggtaagtcttatgggaaattttcctagttttgagaacaagtttggaactagaaccttattgctcactttttgagttttgaatggtggttttagattctttccttcgaagacgaatagagagatatggagaattgagaagcaaatccgtgtttctatcttgaaactgatcgaaaacaataaaacagctgttgagaaatcaggaactctgcttcaggcttttatgtctccttacacaaatcagaatggtcaagaagagaagcttgggatagaagaagttacagatgaatgcaaaacgttctactttgcagctaaggaaacaactgctaaccttatgacgtttgttttagtcctcttagctatgaaccaagaatggcaaaacattgctcgggaagaagtcatatgcgttctcggacaaaccgggcttcctactctagacatcttacaagacctcaagactgtaagtcctcaagccccactcaaaaatggtttcaggaaacactgtttcttagcaatttcttgtttttgttaacagctaagtatgataatcaatgagactctccggctctaccctccagcaatgacattaaaccgtgacactcttaaaagagctaagctaggagaccttgacatccctgcaggaactcaactctatttatcagtagtcgcgatgcaccacgataaagaaacatggggagacgacgcagaggagtttaatccgcgtaggtttgaagatcctaagaaacaatcagctctgcttgtaccgtttgggttagggcctaggacttgtgtgggacagaatcttgctgtgaatgaggctaaaactgttctggctacgatcttgaagtattacagtttcaggttgtctccaagttatgctcatgctcctgttttatttgtgacgttgcagcctcaaaatggtgctcatcttctctttactaggatatcaagttaaaaaataccaagattggctggtattatggtttccggttttctggcgcgcc

SEQ ID NO: 44 - DNA, 1637 bp, Arabidopsis thaliana
ttaattaaatgggagagataatgaacgttgactttgtaaactgtttgatcttaatcctcctctgcctcctttcaatcctctgttactctttcttcttcaagaaaccaaaggatggtttcaatttgccaccgagccctccctctctaccgatcattggccatcttcatcatctcctctctctttttatgcacagatctttgcaaaaactctcctccaagtatggacctctcctctatcttcacgtcttcaatgttcccatactccttgtctcctctccctcaatagcctatgagatctttagggcacaagacgtaaacgtttccactcgcgacttccctacgaatgaggggtctctcttcctcggatcatttagcttcattaccgcaccttacggagaatactggaagttcatgaagaagctcatcgtcacaaagctcctcgggcctcaagcactcgagaggtcacaacgcatccgtgcaaatgaagtagagaggttttactcaaacctattagataaggcgatgaagaaagaaagtgttgagattgctgatgaagctatgaagctagtcaacaacataatctgcaagatgattatggggaggacctgttcagaagaaaatggtgaagcagagagaattagaggcttggtgaccaagtcagatgccttgttgaagaagtttttgctggcggccatcttgcggaaaccacttaagaagattgggatcacactgtttaaaaaggtgttcatggatatttctctcaagtttgacgaggtgttagagaagattcttgtggaaaacgaagagagacttgaggagaatcaacaaggtactgacataatggataagctcttagaagtttatggagacaaaacttccgagtataagatcactagagaccatatcaagtccttgtttgtggtaaatattcatctcttataacaaatttagcgaacaccaatggtttttcttgactaagaaacgtttgatactacaggatcttttctttgcaggtactgacaccgcaacacacactatagagtggaccatggccgagatcatgaacaactctttgattcttgagagattgagagaagaaattgattctgttgtagggaaaacaaggttgattcaagaaactgatctaccgaatctcctttacttgcaagcaactgtcaaagaagggctaagattgcaccctacgatccctcttgtgttgaggacgtttcaagacgggtgtacgatcggaggcttttctatacctaagaagacaaaacttgttgttaatggttatgctataatgagagatcctgataactgggaagatccactggagtttaaaccagagaggtttctagcttcttcaagatcaagccaaaaagacgcaataaaagaagaagttctaaaatatctttcattcggaagcggaaggagaggatgtcctggagtgaatctagcttatgtgtctgtagaaaccgctattggagtgatggtgcaatgctttgattggaagatcgacggacataagatcaacatgaatgaggttgctggtaaaggaacgttgagcatggctcatcctcttaagtgcactcttgttcctcgaagtgtaaccccattaacttcaaagtagggcgcgcc

SEQ ID NO: 45 - DNA, 914 bp, Arabidopsis thaliana
ttaattaattctcactctatatactcccaaaatggcttataactaccgttttgccattcttctcgttctcctctccgccaccgtcggctttaccgcagccgcgttgaagcctccggttcgaaccttgaacggaaacattactcttaatctcatttggtacggaaaattcaccccaatccaacggtccataatcgtcgatttcatccgctctatcagttctgtcaccgccgccaaaggtccatccgtcgcgtcgtggtggaagacgacggagaagtacaaaaccggcgtttcaactcttgttgtcggtaaacagctcctccttgagaattaccctctcggaaaatccctaaagagcccttaccttcgtgctctgtcaagcaaacttaacgctggtggtgctcggtcaataaccgtcgtcttaacggcgaaagacgtcaccgttgagggactctgtatgaaccgatgcgggactcacgggtcaaagtcaagttccgttaacagtggagcttacgtgtgggtcggaaactctgaaacgcagtgtcctggttactgcgcgtggccgtttcatcagcctatctacggacctcagtctccgccgttagtcgcacctaacggcgacgtcggagttgacggaatgattataaacatcgcgactcttcttgttaacaccgtaacgaatccgtctccagaagctgtctcggcttgtaccgggatattcggttcgggtgcttacccgggttacgcgggtcgggttctcgtagacaagacgagtggagcgagttacaacgctttgggtctcgccggtagaaaatatctattgccggcgttgtgggatcctcagacttcgacgtgtaaaactatggtttgaattttagatggtctgtgaacgagacacgggctagaattggcgcgcc

SEQ ID NO: 46 - DNA, 760 bp, Arabidopsis thaliana
ttaattaacatagagagagagcttgtggttgtggttgtgcgagataatatctagagatggggaagaagaagtgcgagttatgttgtggtgtagcgagaatgtattgtgagtcagatcaagcgagtttatgttgggattgtgacggtaaagttcacggagctaattttctggtggcgaaacacatgcgttgtcttctatgtagcgcgtgtcagtcacacacgccttggaaagcttctgggctgaatcttggcccaactgtttctatctgtgagtcttgtttagctcgtaagaagaataacaacagctccctcgccgggagggatcagaatcttaaccaagaagaagagatcattggttgtaacgacggagctgagtcttatgatgaggaaagcgatgaggatgaagaagaagaagaagtggagaatcaggttgttccggctgcggtggagcaagaacttccggtggtgagttcgtcgtcttcggttagtagtggtgaaggagatcaggtggtgaaaaggacgagacttgatttggatcttaacctctccgatgaggagaaccaatctagaccattgaaaagattatcgagagacgaaggtttgtcaagatcaactgttgtgatgaatagctcaatcgtgaaattacacggagggaggagaaaagcagagggatgtgatacatcatcgtcgtcttcgttttattgaaatcgccaaggaaagtagagattgtagccgttgagtattcttttgtttggcgcgcc

SEQ ID NO: 47 - DNA, 1360 bp, Glycine max
ttaattaaaccacaacagttttcagctctgtacaacgttggatttggatcagttttcgtgagagaatatttgagcatagaaacatggtagctgaagcagaggttgcgtgtcaacaaaacgtgggtgtgttggatgtgaagcattttccaaataagggaagcgatgttcaccagatcggagacgcagatgctaattcgcctccgtgttttgaccgagttcgtgccactgagtcggtctccgccgagttactcacttcacaagaagatgttaagtctgcagacaggatctcagatgctgctcttgaatctgcggttctgcagtctatcccttgcatccgttctggtagttttgctgacattgggccacggagatacatggaagatgaacatataaggatagatgatttgtcgtctcatctgggatcactatacaactttccccaaccaagtgccttttatggggtgtttgatggtcatggaggacctgaagctgcagcttatataaggaaaaacgtgacaaagttcttctttgaggatgtcaatttcccacggacatcagaagttgataacgtatttttggaagaggtagaggattccctcagaaagacatttcttttggctgattcagctttggccgatgattgcagtgtgaatagttcatcaggcaccacggcccttactgctttgatatttggaaagcttctaatggtggccaatgctggcgactgcagagcagttctctgtcgcaaaggagaggccattgacatgtctcaagatcacaggcctatttatccatcagagaggaggcgagttgaagaattgggtggctacatagaagatggttatctcaatggggttttatcagttactcgagcactgggggactgggacatgaagttacctaagggtgctccctcacctttgattgcagagccggagttccggcaagtggctctaacagatgatgatgaattcctcatcataggatgcgacggcatctgggatgtgatgtcaagtcagcatgctgttagccttgttcgcaaaggcctgaggcggcatgatgacccagagaaatgtgccagggacctggttatggaagcattacgcctgaacacattcgacaatctcacggtgatcattgtatgtttctcttcccttgaccacgtggagccagagccatcccctcctcgccaacggaagttgagatgctgtagcctctctgcagaggctctttgtagcttgaggagcttgttggaaggcagtgctagcaactgaatgtatgtacaaacacggttcatcaaataatgtgttgttgagattataccactgtttttggctgcttcagtttagacaatttaaat

SEQ ID NO: 48 - DNA, 568 bp, Arabidopsis thaliana
ttaattaaatgggaaactatgtttcttctgcactaagcaaaacgtcttcatcatcatcatcggcggcgaaagtgattctccccgacggtggagtacgtaacattcacgcgccgatgaaagctgccgagcttatgatggagattccaagcttcttcctcgtcgacgcaaagtctttaaagatcggtcggaagttttgtccgttagccgccgatgacgaccttcaaatcaaaggctgccacgtgtacgtagctttccctatgacgcgtgccacgtcagctgctaatgcttcggatttggctcggttattcgtagctgctaagaaacagcgccgccaccgcgtgggaagtgatcattcttccgccgccgtgaaacactgtcataataacggaagggtttcgccggacggggaaggagatgacgtcaaggtgatttcagcgggatcaaagctgaacctagaagatatcgaagagttttcggcggcggagtttatgcataggatctcagtttcgaaatctaagaaaccaaaattagaaactatagttgaagaatctttgtcttaaggcgcgcc

SEQ ID NO: 49 - DNA, 687 bp, Arabidopsis thaliana
ttaattaaagcaaacaaattgtgtcactaagcagccatcatggctagagtgatcttgtggtttcttgtttcctcgtatctttgtctcatcggtcatatgattgccgaggctgcaagagaaggtgcctccatgaggaaggaagcacactccagtgggattggaagagaaagtaagctcatgaggaatgaaaaacactccactgagattggaagagaaagtgcgtccatgaggaataaagcacgctcgagtgagattggaagagagagtaagctcatgaggaatgaagcacactccagtgagattggaaagagtatccgacacgtaaccggatttaagggtgaactcacagctggtggctacggcggtggaggcccgggatatggtggtggtggatacggtccaggtggcggcggtggtggtgttgtaatcggtggtggatttggtggaggtgccgggtatggttcaggtggtggtttgggttgggatggaggcaacggaggtggtggtccaggatacgggtcaggtggaggaggtattggtggtggaggaggtattggtggtggagtcatcattggcggtggtggtggaggatgcggaggttcatgcagcggaggcggtggtggtggaggaggatatggacacggcggagtcagcacgaagggatcaggcaaaaactagaggcgcgcc

SEQ ID NO: 50 - DNA, 1351 bp, Arabidopsis thaliana
ttaattaacttcagacttctcagtgatcgaagctatgatgacgacaacaaccaatactatggctatgcttcaaaacctcgtcttctctgttccaatctctcgtatggtagttcggcgtcactccctcgctaccaccttctccgctgccgccacaaccgtcgtaccgtctcctaaaccggtatcagccaaaccggcgcgtactccacacgtggactcacatgttctcatcggaatgtcagagcctgagcttcaagagcttgctatcaacctcggtcaagaaggatacagaggaaagcagctccatcatcttatttacaagagaaaggttaataaagttgaagactttagcaatttgccactgacgtttcgtaaaggacttgtggatggtggatttaaagtgggaagatcacccatttaccaaactgttactgccactgatggtaccattaagcttctgctaaagcttgaagataacctattgatcgaaactgttggtataccagttcaagatgatgagaagggcataacgcgcctcaccgcttgtgtctcttcccaggttggatgtccgcttcgttgttcgttttgtgccacgggaaaaggaggcttttcaagaaatctgcagcgccatgaaattattgagcaggtgttggctatcgaggacgtgttcaagcatagggtgacaaatgtggttttcatgggaatgggtgagccgatgttgaacctaaagtcagtacttgatgctcatcgttgtttgaacaaggacattgaaatcggacaacgaatgattacaatatcgactgtaggtgttccaaacacaatcaagaagcttgcatctcataagcttcagtcgaccttagctgtcagcttacatgcgccaaatcagagcctcagggagaaaattgtaccaagtgccaaggcttatccgctggaagcaattatgaaggattgtcgtgattacttccaagaaacaaatagacgagtctctttcgaatatgcccttctagctggagtcaatgatcaagttgagcatgcggtggaacttgcagagctactccgtgaatggggtaaaacttatcacgtaaatttgataccttacaacccgatagagggatcagagtaccagcgaccttacaagaaagcggtcctagcgtttgcagctgcgttggagtcgcgtaagataacagcaagcgtaaggcaaacaagaggacttgatgcaagtgctgcttgtggtcagctgaggaataagtttcagaaaagccctttgcttactgagacggatagtcaagagtctcagccagatgcagaagctgtcgcttgttgatgtcctggattgcacaaatttcggcgcgcc

SEQ ID NO: 51 - DNA, 1718 bp, Arabidopsis thaliana
ttaattaattgagattctgatagatccggtacggagtcatgtatatggagatttcttctgcttccgatgattcgatcgcttacgttgagacagatccttctggtcgctacggacgtttcagagaagtacttggcaaaggggcgatgaagacggtttataaagcatttgaccaggttttaggaatggaagttgcttggaatcaagttaagctcaatgaggttttccgatcacctgagcctttacaacgcctctactctgaggttcatctcctcaagaatctcaatcacgaatccattattcgttactgcacgtcttggatcgatgtcaaccgcagaacattcaacttcattactgagctgtttacatcaggcacccttagagagtatagaaggaagtatcaaaaggttgatatccgggcaatcaagagctgggcacgtcagatcttgaatggtcttgcttatctccatggacatgatcctcctgtcattcacagagacctcaaatgcgataatatcttcgttaatggacaccttgggcaagttaagattggtgacctgggcttagctgcaattcttcgtggatcacagaatgcgcacagcgtcataggaacgcctgaatttatggcaccagagctatatgaagaagattacaacgagcttgtagacatttattcgtttggtatgtgtgtcctagagatgcttaccggtgagtatccttatagtgaatgcaccaaccctgcccaaatatacaagaaagttacatcggggaagttgcctgactcattccatctaatccaacacacggaggcccaacgttttgttggtaaatgcttggaaactgtgtcaagaagattgcctgcaaaggagctcttagcggacccattccttgccgcaactgatgagagagatttggcgcctctttttagattgccgcaacaattggcaatccagaatttggctgcaaatggaacggtggtagagcatctgccgtcaacgactgatccaactagaacaacagatatgtcaataacaggaaagatgaactcagaagaccacaccatcttccttcaagtacagattctagatggcgatggtcacatgaggaacattcagttcccgttcaacattttaagtgacacacctctagaagtagctttggagatggtgaaggagcttgagatcactgattgggatcctttggagatcgctgcaatgatagaaaatgagatatctttgctcgtccccaactggagggccaatgactcttctatccggcacgaaagctttggtcatgaagatgatgaggacaatggcgacacagagggaagaacgcgccttttctcctctgcttcttcctctcacgactctcctgtagcagttagagagaacaatgacgattctagtaacgatgtgatcccagatatggatgatggcaatagaagctctaacaggttgctgaattcttcaacataccactactcacctgccattgatgatgatcaaaatcagcaacaacggagacgagtaaggctacaacagaaaatgagatcgctggtggacacgagaacacaggtgctacaccgatcgctcatggagttgatcaacaagcgtcgtgggcgtggctttgacccgaacacaaacgagctacaacctcaaccgtcgtccactgatttcattcgacgatgttgaaaatagtatgatgagagagcctggcgcgcc

SEQ ID NO: 52 - DNA, 821 bp, Arabidopsis thaliana
ttaattaagaatggatggcaaaatcgtgattataacagggggagccagtgggacaggagccgaatccgctaggttgttcactgaccacggagctcaagtggttgtagttgacttacaagaagagcaaggcaaaacgtcgccgtttcaatcggcaaagacagagcaagtttttaccgttgtgatgttacaaacgagacggaagtagaggacgcgtcattaagttcaccgtcgaaaaacatgggaagctagacgttctgttaagtaacgccggcgtcgttcttttcagccaacccggcgtcttggaaacaccgggaagcatccttgatttgaatcttgaacggtttcaccgaacaatggctgtcaacgttcgtggagcggctgtgtctatcaaacacgccgcacgagccatggtggagaaaggcacacgtggctccatcgtttgtacgaccagtgttacgtcggagatcgtggtcagggacctcatgaatacacggcgtcgaagcatgggctcgtcggactgattaaataggtttgtggtgatttagggaaacatgggattagaataaacggcgtcgcaccgttcgctgtggcgacggggtcacggggatgactagtcacgacgaggagacggcgaagcagacggaggagtattgcgaagccagagggatttttaaaggtgttgtgttaaaggctcgacacgtggcagaagctgctctgtttctcgcttcggatgattcggtttatatcagtggtcagaatttagcagtggacggtggtttttgcgtcgttaagcctatttgaaactaaataaatggcgcgcc

SEQ ID NO: 53 - DNA, 621 bp, Arabidopsis thaliana
ttaattaacaatgtcttcgaaaaagattgtgttgacaagctccgatggtgaatctttcaaggttgaagaagtggtggcaagaaaactgcagatcgtaggacacattatcgaagacgactgtgctacaaacaaaatccctattccaaacgttaccggagagattctcgccaaggttatcgagtactgcaagaaacacgttgaagacgatgatgacgtggtggagacgcatgaatcatcgacgaaaggagataaaacagttgaggaggcgaagaagaagcctgatgatgtggccgtacctgaatcaactgaaggagatgatgaagctgaggataagaaggagaagcttaatgagtgggatgcaaagttcatgaaggatttcgatattaagacgatcttcgacattattctggctgctaactatctcaacgtccaaggtctttttgatctctgtagcaagaccattgcagattacataaaagatatgacgccagaggaagttcgagaactctttaacatcgagaatgatttcacacctgaagaagaagaagcaattcgcaatgaaaacgcttggacttttgagcaagatggaaaacaacaagttccaaaccctagcggcgcgcc

SEQ ID NO: 54 - DNA, 768 bp, Arabidopsis thaliana
atgggagttttagtaatctcgcttctcgtggttcatctcctagctttttccgtctgcgttcagggcggctaccgtcgtggcggacaccatcccggcggtcacatgggaccttggatcaacgctcatgccactttttacggcggcggtgatgcttccggcactatgggtggagcatgcgggtacggcaatctgtatagccaaggttatggactggagacggcagcgctgagcacagcgttattcgaccaaggacttagttgtggcgcatgttttgagctgatgtgtgtcaacgatcctcaatggtgcataaaaggccgatccattgtggtcactgccactaacttttgtcctcctggtggtgcatgcgaccctcccaaccaccatttcgatctttctcagccgatctacgagaaaattgctctctacaaatccggtatcattcccgttatgtatagaagggttcggtgcaagagaagtggtgggataaggttcacgatcaacggccactcatactttaacttggtgttggtcacaaacgtgggtggagccggggacgtacactcggtctcaatgaaagggtcgaggacaaaatggcaattaatgtcgagaaattgggggcaaaattggcaaagcaactcttatctcaatggtcaaagtctgtcgtttgttgttaccacaagtgatcgtcgaagtgtcgtctcttttaatgttgcaccacccacttggtcctttggccagacctacaccggagggcagtttcggtattaa

SEQ ID NO: 55 - DNA, 2031 bp, Glycine max
ttgtttcttgtttgttgattaacccttaattaagagcagcggtccatttctctcccggaacacccataagatttccggcacggcgatggccgctgttcgcctccttctcctcctcctcttccctttctcctctctctccctttctgaaaacgaagcccttctcaacctcaagaaatcattctctaaccccgtagctctctcttcctgggttcccaaccagaacccttgctcctccaggtggctcggcgtcatctgcttcaacaacatcatcaacagcctccacctcgtcgacctctccctctccggcgccatcgatgtcaacgccctcacccaaatccccactctccgctccatcagcttcgtcaacaactccttctccggcccaatccctcccttcaaccaactcggggccctcaagtccctgtacttagcccacaaccagttctccggccaaatcccctccgatttcttctcgcaattagcttccttgaaaaaaatatggatctcaaacaacaagttctccggccccatcccgtcttccttgaccaaccttcgcttcctcaccgagctccacctcgagaacaacgagttctccggcccggtgccggagctcaagcaagacataaaatccttggacatgtcgaacaacaagctccagggagaaatccccgccgccatgtcgaggttcgaagcgaagtccttcgccaacaacgaaggactatgcgggaagccgctgaataatgagtgcgaggccggtggtagttcagaagtagggtcgggttgggggatgaaggtggttattgtcctcattgtcgctgttgctttggctttcatttttgcgttgacgcggtcgaagcgtcgacacgacgatgatttcagcgtgatgagcagggatcacgtggacgaggtggtgcaagtgcacgtgccgagctcgaaccatagcaggggggcctccgagggggggagcaagaaggagtcttcttcgtcgaagaaagggtcttcgcggggcggcatgggtgaccttgtgatggtgaacgacgagaagggcgtgtttggcttgcccgatttgatgaaggctgcggcggaggttctcgggaacggtgggttgggttcggcctacaaagctgccatgaacaatggcctctctgtggtggtcaagcggatgcgcgagatgaataaagtcagcagagacatctttgacgccgagatgagacgctttgggagactcagaaaccttaacatcattacgcctctcgcttatcattaccgcaaggaggaaaagctgtttgtcaccgaatacatgcccaaaggaagcttgctatacgtcttgcatggtgacagaggatcgagtcatgctgacctgaactggccaatccgtttgaatatcgtgaagggaattgcgcgagggttggactttatttattcagaattttccaacgaagacctgccacatggaaacctgaaatccagcaatgttctactaactgaaaattacgagcctctcctaagcgatttcgcctttcatccactcatcaaccccaactacgccatacagacaatgtttgcctacaaaacacccgattacgtatcataccagcatgtttcacagaagaccgacgtgtattgcctcggaatcatcgttcttgaaatcatcactgggaaattcccctctcagtatcacagtaatggcaagggtggcactgacgtagtgcactgggtgttcactgcgatttctgagagaagagaagcggaattgattgatccagagttaatgagcaatcactcgaactccctcaatcaaatgttgcaacttctccaagtaggggctgcttgcacggagagcaaccccgatcaacgacttaacatgaaggaagccattagaaggatagaggaggttcaggtttaaatatgttgtgtcaatatgctagcttagtacaaagttgcttttgtaggtgagaattgcagtgcaggcctaggaaagattgatttaaattggagctctgcagagctttcgttcgtatcatcggtttc

SEQ ID NO: 56 - DNA, 1459 bp, Arabidopsis thaliana
ttaattaaatgatgaagatgatgactcgagttctttcatcgccttcctcacatgtctcgtcgctcaaatactcacctcgcagagtgattcgagcttcacgagatcatcttcgtgctgaaactctaaagagtcatcaacttccttcaggctcctcctccaccagcttatgttcctgtggaagaaaacattttctcgaagcagctagcccgacgatgccctttcttcctatttgttcacctaatgcttcgcgttccaaggtgatttgtatttctttttatctttctcctagatgcattttgtgtataggtaccaagtttttacttgtgtgacaagattttactagtaaagattctgtttctttggcacaaagattattgctttggtactctgaatgaatgaatatggcactcttatatacttgagatgtggaggaaatgtaactgactgagatttatctgcacactaggatgtttcagaaacatttcatcctcagaggccagattggtataaggagctttttgcttggttcttgagcacaggaatgcgatcttatgaagcagaggtcagtctttgtgatttaaatgcatcattctatgatccatttcttgagaatgatagatctttttcatgttttatgtttgtgttatttggtaagatcgccgagtacaagaggaaactattcgaaaaactggctggtaaagcagaaacagtgctggagattggtgttggtactggccctaatctgaagtactttgctggtaatgaaaacgtctgtgtttttggtatggacccgaaccataaaatggaaaagtacgcatgtgaatctgccagagaagctgggatgaaacctgaaaactttagattcatgcatggagtaagtaaattgctctgttttgatttgtgagacatctctttttgtaatcccttgatgttacttatatgttgatcttaggtaggagaagctataccattagatgatgactctatggattcagtggttgcaacacttgttctatgttctgtctctgatgtcactcaaacactaaatggtaaacttcctaaacccttaaaagatctcactggatatattacttacctgattggtatcttcagagatcaagcgggtgctgaaaccgggtgggattttcttattcatcgagcacgtagcggctaaaggtatgtattcttttacatcaaaccccttgaaaagacaaaactggaatccaaagtttttgtttttgtggatgcagatggatctttttttaggcatgttcaaaatgtactggatccaatacagcaagtagttgcagatggatgtcatttgacaagaaacaccgacttacacatttcggctgcgggtttcgatggtggcactgagatcaacgatacggcaatctatagcttcccttggattataagacctcatgtctatggagcagcatacaagtaagggcgcgcc

SEQ ID NO: 57 - DNA, 2012 bp, Arabidopsis thaliana
ttaattaaaggaacagagtttggagtagacgactataatttctgtttctattgagagctatggcactacgatcagtaagcaggaggctcgggagcagaattttgaatcaacgttcctttgttgcttcgcttcactctcatgccacaagtttcggtaacattcttgtggatgactttcacaattcaagatcatctgttttgatgctatacgaaatgctttgttttctattatatggcttcttcttgagtttctactgtgtgagtttaacttcaatgttttaatttcagggtttcaagaagtaaaggaagaagagaaaagcaaattggttggtaatgtattcaccaatgtagcttcgagttatgatattatgaatgatgtgatgagtggtggtttgcataggctatggaaggaaaggttagactccgtgacacgtttatcactagtgttatgaattgctcttgtgtaaaaattgacacttttgttggtcttgtgatttcagactcgttgggaagctaagtccatttgcagggatgaagcatcttgatgtggccggaggaacaggttagtcaaatcaattttaaacatggaattttgctgtctctgatcatgagtccatacatgttattattgaaaatgttttaggctctttgttatagatattggttgtaatatgcaggtgatgttgcttttaggatctatgatgctgtttacagtgtcaaacgaagagcattgcagaaagttgatgaggcttctcttgaggaaactcagatatacgtatgtgacattaatcctaacatgttaaacgttgggaaacaacgagctgctgagagaggtgaaagatcagatgtttgtttgtgcaacaaatttgtatcctctgttattcctttatgttttttttctatgtatgtgtgagctcaggcttcatttactatcttgaataggtctaagagataacaagtcactcgtatgggtcgaaggagatgcagaggccttgagtttcgatgacaattcaatggatggatacaccattgcatttggaataaggaatgtcacacacatcgaaaaggctctagctgaggcttataggtacctattacaaattacttacaccctcttctattcgggtatattttcatgtgtcagcgttttgtgtatagtattctaaaactcttcccattgttagggtactcaaacggggaggaagatttttgtgccttgagctcagccatgtagaaattccggttttcaaaaatctgtaagttttgatgattagacatgttgtggaagtaagtccctaagtcttttttgtttcgatgataatctcactttgtttcttgtgttgcagatacgatttgtattctttccaggtcattccaaacttaggggaactaatcgccggggacagggaatcttatcagtacttggttgagagcgttcgtcggtttccccctcaggttcaaacattcaaccttttgttacctttgttgaaaatttggtatacaatatacacaatttttagattagttttcctgtgttttcgtgattttgctgcatggcttcttcaagaccattagtaataaatgtcatggccgaatctttcaattgaaggttgtgttagattcatgtaagataacttttaagttttaacttgtggacttcgtcaaaaccattagtaacaacaacttgccgtgatcaataccatagcttaaggttgtgttagattcctgtaagaagatcagttttaagttatgatagctatgattatatgagcatcgtgtgtgtgatcaggtgatgtctagtctataagacgtttttttagtcggaagcatgttttgtaatcactagatgcatgaaatgagtgcaggagcgatttgcatcaatgatcgcagatgcaggatttgagaaggtggagtacgagaaccttgttggtggagttgtcgccattcactctgccataaagctctgactttttttttccttctcttttgcttcagctgtttcaaaggcgcgcc

SEQ ID NO: 58 - DNA, 815 bp, Arabidopsis thaliana
ttaattaacatcataacaatatggtgcatgaacagttgaatcttattcggaagattgttggtatattaggaaacttcatctctctatgtttgtttctatcgccaacgccaacgtttatacacatagtgaaaaagaagtcagtggaaaaatactcaccattgccatatttagcgactctcctaaactgtttggttcgtgctctttatggacttcctatggttcatcctgatagcaccttgctcgttacaataagcggtataggaatcacgatcgaaatcgttttccttacaatcttttttgtattttgtggtcgtcaacaacatcggttggtaatatccgctgttttaaccgttcaagttgtgtttgtggctacccttgcggttttggtcttaactctcgaacacactaccgatcaacggacgataagcgttgggattgtatcttgcgttttcaacgctatgatgtatgcttctccattgtctgtcatgaaaatggtaataaaaacaaaaagtttggagttcatgccgtttttgttatcggtagttggttttctaaacgcaggtgtttggacaatttatggctttgtgccttttgatccattcctggctataccaaatgggattgggtgtgtttttggactagtacagttaatattgtatggtacctactacaaatctaccaaagggataatggaggaaaggaagaaccgactcggttacgttggtgaagtcggattatccaatgcgatcgctcaaactgaacccgagaacatcccatatttaaacaaaagagttagcggcgtttgatggcgcgcc

SEQ ID NO: 59 - DNA, 1487 bp, Arabidopsis thaliana
ttaattaagccggagaaaaagcaatttagttctctttcatctaccaaaatgacatcttctctgtcacttcactcctccttcgtaccttccttcgctgatctctccgaccgaggtttgatcagtaagaactctccgaccagtgtttccatttccaaggttccaacttgggagaagaagcagatctcaaatcggaactctttcaagctgaattgcgtgatggagaaaagtgtcgatggtcaaactcattctaccgttaacaataccactgatagcttaaatactatgaatatcaaagaagaagctagcgtctctacattattggtgaacttggataataaatttgatccctttgatgcaatgagcactccgctttaccaaactgctacttttaagcagccttctgctattgaaaatggaccttatgattatacaagaagtggcaatcctacacgggatgcattggaaagcctccttgcgaagcttgacaaggcagatagagcattttgctttactagcggaatggctgctcttagtgctgttacacatcttatcaaaaatggcgaagaaattgttgctggagatgatgtatatggtggctctgacagattactatcccaagttgttccaagatctggcgttgtggtaaaacgagtaaacacaactaagttagacgaggttgctgctgcaattggtccccaaacaaagcttgtgtggcttgagtctccaacaaacccaagacaacaaatttctgatatacgaaaaatatctgagatggctcatgctcaaggtgctcttgtgttggtggacaacagtattatgtcaccagtgctctctcggccattagaacttggagctgacatcgtgatgcactcggctactaagtttatagccggacacagtgacgtgatggcaggtgtgcttgctgtaaaaggcgaaaaattggcaaaggaggtgtatttcctccaaaactcagaaggttctggattagctcctttcgactgttggctttgccttcgaggaatcaagacaatggctttacggatagaaaagcaacaggaaaacgcacggaaaattgcaatgtacttgtcttctcatccaagagtaaagaaagtgtactatgctggtctaccagatcatcctggtcaccatctccacttctctcaggcgaagggtgcaggatcagtttttagctttataactggatcagttgcgctttcaaagcatctcgtagaaaccaccaaatacttcagcatagctgtcagttttgggagtgttaagtcactgataagcatgccatgcttcatgtcacatgcaagcatacctgcagaagttcgtgaggccagaggtttgacggaagatcttgtccgtatatctgcaggaattgaagatgttgatgatttgatatctgatcttgacattgccttcaaaaccttccctctctagttttggtttgttcttgtctcagcttttgtagtttcaggcgcgcc

SEQ ID NO: 60 - DNA, 568 bp, Arabidopsis thaliana
ttaattaaatgtctttttcttccctcaaattgccaatctttctcattctctcaagtcttctccatgcggctataggggaaaacattgtttgcgagaatctgccaacaaatatgtgctcgttctcaatatccgcttccgggaaaagatgtatattggagacggctaatgtcgccggagaattcacttgccgcacttccgcagtggacgtggaagggattgtaaaccacgtggagaccgacgagtgcgtttccgcttgtggggttgatcggaaaaccgtagggatctcgtcagactccttgatggaggcaggtttcgccgctaagctttgctcatccgcttgcttggactattgccctaacattcttgatctctatttcaacctcgccgccggtgaaggtgcatttttacctgatctatgtgatgctcaacggatgaatccccagcgttcgatgatggaattcatcagctccggcgccgcaccaggccctgtctccgaaattgcaccaggccccacctccgaagaagtctcatctcctgctctagctccggcttctatgtaaggcgcgcc

SEQ ID NO: 61 - DNA, 1666 bp, Arabidopsis thaliana
ttaattaaaaaatcactacattttccgtaacaaaaaaaatcaaactttgttttctcaatggacggtgccggagaatcacgactcggtggtgatggtggtggtgatggttctgttggagttcagatccgacaaacacggatgctaccggattttctccagagcgtgaatctcaagtatgtgaaattaggttaccattacttaatctcaaatctcttgactctctgtttattccctctcgccgttgttatctccgtcgaagcctctcagatgaacccagatgatctcaaacagctctggatccatctacaatacaatctggttagtatcatcatctgttcagcgattctagtcttcgggttaacggtttatgttatgacccgacctagacccgtttacttggttgatttctcttgttatctcccacctgatcatctcaaagctccttacgctcggttcatggaacattctagactcaccggagatttcgatgactctgctctcgagtttcaacgcaagatccttgagcgttctggtttaggggaagacacttatgtccctgaagctatgcattatgttccaccgagaatttcaatggctgctgctagagaagaagctgaacaagtcatgtttggtgctttagataaccttttcgctaacactaatgtgaaaccaaaggatattggaatccttgttgtgaattgtagtctctttaatccaactccttcgttatctgcaatgattgtgaacaagtataagcttagaggtaacattagaagctacaatctaggcggtatgggttgcagcgcgggagttatcgctgtggatcttgctaaagacatgttgttggtacataggaacacttatgcggttgttgtttctactgagaacattactcagaattggtattttggtaacaagaaatcgatgttgataccgaactgcttgtttcgagttggtggctctgcggttttgctatcgaacaagtcgagggacaagagacggtctaagtacaggcttgtacatgtagtcaggactcaccgtggagcagatgataaagctttccgttgtgtttatcaagagcaggatgatacagggagaaccggggtttcgttgtcgaaagatctaatggcgattgcaggggaaactctcaaaaccaatatcactacattgggtcctcttgttctaccgataagtgagcagattctcttctttatgactctagttgtgaagaagctctttaacggtaaagtgaaaccgtatatcccggatttcaaacttgctttcgagcatttctgtatccatgctggtggaagagctgtgatcgatgagttagagaagaatctgcagctttcaccagttcatgtcgaggcttcgaggatgactcttcatcgatttggtaacacatcttcgagctccatttggtatgaattggcttacattgaagcgaagggaaggatgcgaagaggtaatcgtgtttggcaaatcgcgttcggaagtggatttaaatgtaatagcgcgatttgggaagcattaaggcatgtgaaaccttcgaacaacagtccttgggaagattgtattgacaagtatccggtaactttaagttattagcttcgtttgaggaactgttattgtgtaacttcgagactaatccatggttgggcgcgcc

SEQ ID NO: 62 - DNA, 1764 bp, Saccharomyces cerevisiae
tcatttatttgtcagctttcaaactctttgtttcttgtttgttgattaacccttaattaagatggctagtgctgaaccaagaccccgtatgggactcgtcatcaatgctaaaccggactactatccgattgagctatctaatgcagaactactttctcacttcgaaatgctgcaagaataccaccaagaaatctccaccaatgttattgctcaatcatgtaagttcaaacctaatccaaaactaatagaccagcagcctgaaatgaaccccgtggaaacaagatccaacattatcacttttttgttcgagctgtctgtggtcactcgagtgacaaatggtattttttttcattcagttagattatatgaccgctattgttccaagagaatcgtgttacgggaccaagccaaattggttgtcgctacttgtctctggttggctgctaaaacttggggcggttgtaatcacatcatcaataatgtagtcatccctactggcggaagattttatggtcccaacccaagggcacgtatacctcgactctctgaactagttcattactgtggtgatggtcaggtctttgatgaatcaatgtttttacaaatggaaagacatatactagacactttaaattggaacatttatgaaccaatgatcaatgattacgttttaaatgttgatgaaaattgtttgatgcaatacgaactttatgaaaatcaagttacttatgacaaacaatgctctgaaaaacgtcagtctcaattatcccaggatagtgatgccactgtagacgagaggccctaccaaaacgaagaagaagaagaagaagacttaaaactaaagatcaagttgattaatttgaaaaaattcttgattgatgtatccgcgtggcagtacgacttacttagatatgaacttttcgaagtatcgcacggcatattctccattatcaatcaattcaccaatcaagaccacggtccttttttaatgactccaatgacatcagaaagcaaaaatggtgaaattttgagtaccttaatgaacggcattgtttccattcctaactccttgatggaagtgtataaaacggtcaatggtgttctacccttcattaatcaagtgaaagaatatcacttggatctacaaagaaaactgcaaattgcatccaacttgaacatttcgagaaagcttaccatatcaaccccatcatgctctttcgaaaattcaaatagcacatccattccttcgcccgcttcctcatctcaaagccacactccaatgagaaacatgagctcactctctgataacagcgttttcagccggaatatggaacaatcatcaccaatcactccaagtatgtaccaatttggtcagcagcagtcaaacagtatatgtggtagcaccgttagtgtgaatagtctggtgaatacaaataacaaacaaaggatctacgaacaaatcacgggtcctaacagcaataacgcaatcaatgattatattgatttgctaaacctaaatgagtctaacaaggaaaaccaaaatcccgcaacggcgcattacctcaatgggggcccacccaagacaagcttcattaaccatggaatgttcccctcgccaactgggaccataaatagcggtaaatctagcagtgcctcatctttaatttcttttggtatgggcaatacccaagtaatatagatataaatacccagcaaattggagctctgcagagctttcgttcgtatcatcggtttcgacaacgt

SEQ ID NO: 63 - DNA, 1440 bp, Arabidopsis thaliana
atggataaacaaccggcgaccagttggagtatccatacccggccggagataatcgccaagtacgagatcttcgagcgagtcggatccggagcttacgccgacgtttacagagctcgccgtctctccgacggtctaatcgtcgcgctcaaggagattttcgattaccaatctgcgttccgggagattgacgcgctcaccatcctcaatggatctcctaatgtagttgttatgcacgaatacttctggcgtgaggaagagaacgctgtgcttgtgcttgagtttcttaggtcggatctcgctgcggtgatccgagatggtaagaggaagaagaaggtagaaggaggggatggattctcggttggggagattaagagatggatgattcagattttaaccggtgttgatgcttgtcatcggaatttgattgtacatagagatttgaagcctgggaatatgttgatttctgatgatggagttcttaagcttgctgattttggtcaggctaggatactcatggagcatgatattgtagcttcagatgaaaaccaacaagcttacaaactggaagacaaagatggagaaaccagcgaaccaccagaagttattcctgattatgagaactcacctaggcaagggtctgatggtcaggaacgggaagcgatgagtaaagacgagtacttccgacaggtggaagagctcaaggctaaacaggttgttagagatgatactgataaggactcgaatgtgcatgatggagacatatcttgccttgcaacgtgcactgttagtgaaatggatgatgatctcggtaggaactcgttttcttacgatgctgacgaagcagtggatgatacacagggtttgatgacatcttgtgtgggaacccgatggtttaggccaccagaactgctctatggatctacgatgtatgggttagaggtcgatctatggtcgcttggttgtgtgtttgcagaactcttgtctcttgagcctttgttcccaggaatttcagatattgatcagatcagcagagtgaccaatgtgctgggaaatttaaatgaagaggtctggcctggttgtgttgatcttccagactacaagtcaatctcatttgctaaagtagaatctcctcttggtattgaaggatgccttcccaaccattcaggggatgtgatatcgctgctcaagaagcttatctgttatgatccagctagtagagctactactatggagatgctgaatgacaaatatttaagtgaagagcctcttccagttccagtttcagagctctatgtgcctccgacaatgagtggaccagatgaggattctccgagaaagtggaatgattacagagaaatggattcagattcagattttgatggctttggacccatgaatgtaaagcctaccagtagtggatttacaatagaattcccctga

SEQ ID NO: 64 - DNA, 956 bp, Saccharomyces cerevisiae
aaactctttgtttcttgtttgttgattaacccttaattaagatggctctcggtaatgagataaacatcacaaacaagctaaagaggcaagaaatttttgctgatataaaacatgaaaaaaataaagagcgccataccatgagaagaaagagagctaaggaagagagagagaatccggagctgcgggagcagagattaaaagagaacgtaacacagacgatagagaacactagagtgtacgatgagaccattaacaaggaagtggagggagatgaagacgatttgatgagatacttcaacagcaattctaatgagccaccaaagatctttctgaccacaaatgtaaacgctaagaagagcgcttatgaatttgctaacattttaatcgaaattttaccaaacgtcacatttgtgaaaagaaaatttggctacaaattgaaggaaatatctgatatttgtataaaaaggaatttcactgacatcgtgataatcaacgaggacaagaaaaaggttactggcctaacattcatacatctgccagagggcccaactttttattttaaattatcatcatttgttgaagtgaagaaaattgtcggtcatggtagaccaactagccatattccagaattgattctaaataatttccagaccagattgggtcaaacagtaggtaggttgtttcagtccattttacctcagaatcctgatattgaaggtcgacaagttatcaccctacataatcaaagagattacattttcttcagaaggcatcggtatgtcttcaaagataatgaaagggttggtttgcaagaactgggtccacaatttaccctcaagttgaaaagattgcaaaggggtattaaggaagaaactgaatgggagcataaacctgagatggacaaagaaaagaaaaagttttatttatagatttaaatacccagcaaattggagctc

SEQ ID NO: 65 - DNA, 1519 bp, Arabidopsis thaliana
ttaattaaagagagatgcgagcgattcatatcgtgacgacgcgattgagctcgagctttagacctattcttcttcttgacttggtttcttcttgttcgcctcctcgacagttctctatccctaggcgcctaatctgtgccgccgccaatggaggaggcaggtcaggttccattgttgctcctttggtgactgaagaagactttcacaagaagatcgatgtcaatcctcctaaaggaactcgtgattttcctcctgaggatatgcgtctccgcaattggctctttaaccacttcaaagaggtctcacggttatatgggtatgaggaagtggattatccagtactggagacggaggcattgttcatcagaaaagctggggaagagattagagaccaactttactgctttgaagatagaggaaatcggcgtgtagcattgaggcctgagcttacaccttctttagccaggcttgtcatacagaaaggaaaatctgtttcccttccattgaagtggtttgcaattgggcagtgttggcgatatgagagaatgacaagaggaaggcgacgtgagcattaccaatggaatatggatattattggtgtgcctcaagtaactgctgaagcagaactaatttcatctatagtcaccttcttcaagcgaattggaatcactgcgtcagatgtgggttttaaggtttcaagccgcaaggttttacaagaattgctaaaaaagtatggtgtacccgaagacctgtttggaagagtttgtatcattatagacaagatagaaaagataccaattgatgaaataaaaaaggaacttgggttcacggggatatcagaagatgctattgaacaattactgcaagtgctttctgtgaagtccttggatgatttggaagatataattggtggagcaggagaagccattgcagatttgaaacaactcttctcacttgctgaaaagtttggttattcagagtggatacagtttgatgcatctgttgtgcgcggtcttgcttattacactggtatcgtcttcgagggatttgatcgaaaagggaagctgcgagctatatgtggtggtgggagatatgataggttactctctacttatggaggtgatgactttcctgcttgtggttttggtttcggcgatgctgtaatagttgaattgctcaaagagaaggatttgttgccagaactgggacaagaagtagagaacatagtgtgtgcgttggacaaagatctccaaggagctgcagccacagttgcaacagctctcagagacaaaggccaaaccgttgatttggtattagagagtaaaccgctgaaatgggtgttcaagagagcagctcgggtaaacgcaagaaggctggttctggttgggaaaacagagtgggaagatggttcggtcagtgttaaggtgttgtcttcaggtgagcagttccaagtcaaactcagtgacttagagtagtatcttaaggctttattaacatgatgaaccattgttatttaaat

SEQ ID NO: 66 - DNA, 874 bp, Saccharomyces cerevisiae
tttgtttcttgtttgttgattaacccttaattaagatgaatcacgatcctttcagttggggcaggcccgcagactctacttatggtgcttacaatacacaaattgcgaacgcaggcgcctctcccatggttaatacacagcaaccaatagtaacaggtacttccgtcatatcaatgaaatatgataatggggttatcattgcagcagataatttaggttcatatggctctcttctaagattcaatggcgtggagaggcttattcccgtgggtgataacaccgttgtgggcatttcaggtgatatttctgatatgcaacacattgagagattattgaaagatctagtcactgaaaatgcgtatgacaatcctctagcggatgctgaagaagcgctcgaacccagctatatttttgaatatctagctaccgtcatgtaccagcgaagatcaaagatgaatccactttggaatgccatcattgttgctggtgtacagtctaatggtgatcaattcctaagatacgtaaatcttctaggtgttacgtattcgtctcccaccttggccacaggttttggggcacacatggcaaacccactgttaaggaaagttgtagatcgagaatctgatattccaaagaccactgtacaggttgctgaagaggcgatcgtaaatgcaatgagagttctttattatagagatgcccgttcttctagaaacttctcactggccataattgataagaacacaggtttaactttcaagaaaaacttgcaagttgaaaacatgaaatgggacttcgccaaggatattaaaggctacggtactcaaaaaatttagatttaaatacccagcaaattggagctctgcagagcttt

SEQ ID NO: 67 - DNA, 1600 bp, Saccharomyces cerevisiae
tattattcatttatttgtcagctttcaaactctttgtttcttgtttgttgattaacccttaattaagatggctcggggtgacggacatctatggacagagacatatgatagttccacagtcgtttttatgattttaggtgccgccctggttttcttcatggtaccggggctgggctttctttattccggtttagcaagaagaaaatctgctctggctttgatttgggtagtgataatggctaccttagtaggtatactgcaatggtatttttggggctattctttagcattctctaagactgcgacgaacaacaaatttatcggcaacttggattcatttgggtttagaaacgtctatggcaaaatttcggatgattccacgtatcctgaactgatttatgccattttccaaatgatgttcatgtgtgtcgcattgagtattatagctggtgccactgcggaaagaggtaagctttttccacatatggtttttctttttgtttttgcgactttggtttactgtcccatcacttattggatttgggccccaggtggttgggcctaccaatggggggtattagactgggctggcggtgggaatgttgaaatcctaagtgctgtggctggtttcgtttattcttattttctaggaagaagaaaagaaaacctcctgatcaactttagaccacataatgtttccatggtgactttgggtacttctatactttggtttggttggttgcttttcaatgctgcaagctcactgtcaccaaatatgaggtccgtatatgcgttcatgaacacttgtctcagcgccaccacgggtggaatgacgtggtgtttattagattatcgatctgaaaaaaaatggtccactgttgggttatgctccggcattatctgtggtttagttgctgccacgcctagctcgggttgtattactctatatggctctttgatccaaggtataatagcgggtgttgtttgtaattttgcaacaaaaataaagtattatttaaaagtggatgattccttagatctattagctgaacacggtatcgccggtgtggtgggattgatttttaacgctctatttgcagctgattgggttattggaatggacggcacaacaaagcataagggtggttggttgacgcataactggaaacaaatgtatattcaaattgcctatatcggtgcctctgccggctattgtgctgtggtcacggccatcatttgcttcgtattaggtaaaattccgggtgtccatctaagagtcactgaggaagccgaagcattggggttggatgaagatcaaataggcgaattcgcttacgattacgtggaggttaggagagattattaccagtggggtgtagatacagatgcacttcatactacatgcaatggcgctaattctgcgtctgagacaaatcctactgaggacagccaaaactcctcattgtcatcagctacagtaagcagccaaaacgaaaaaagtaataatcctaaattgcatcacgcaaaagaagcatgaatttaattacccagcaaattggagctctgcagagctttcgttcgtatcatcggtttcgacaac

SEQ ID NO: 68 - DNA, 701 bp, Glycine max
ttcaaactctttgtttcttgtttgttgattaacccttaattaagatggggagctttgaaactgagctgaatcttaaggccacagagttgaggttgggattacccggctgtgatgaaactcatgacaaaagttcatccagtagtggatctgttgttagaagcaacaagagatcttcaccagaacccagtgtggaagagtccaggtgcaactctaatggttcttcagattctaccaccacaagtgatcatgatgaagacagtgtccaacctgcaaaggtacaagtagtggggtggccaccaattagatcttttaggaagaacagtctgcaacaacagaagaaggtggagcagcagggtgatggaagtggaacgtatttgaaagtgagcatggctggtgcaccttacttgaggaagatagatctgaaggtttacaatagctacccagaactcctcatggccttgcaaaatttgttcaagtgcacatttggtgaatattcagagagggaaggttacaatggatctgaatacgctcctacttatgaagacaaggatggtgactggatgctggttggagatgttccatggaacatgtttgtatcctcctgcaagaggctgaaaataatcaaaggatcagaagcaaaggggttgggttgtttgtgaatttaaatacccaacaaattggagctctgcagagctttcgtt

SEQ ID NO: 69 - DNA, 2141 bp, Arabidopsis thaliana
tcatttatttgtcagctttcaaactctttgtttcttgtttgttgattaacccttaattaaggatggctggagttctaggatcagtggttttctggttgataattggtatccatgtaacctttttggtgttcgctcaagagggagatcattttgtgtattatgactttaggaatgcagatctggaactcgatggaatggcaaatacaaaccatggtccattgcatctaacaaataatacaaacacgggcaccggtcacgctttctacaacattcccatcaagttcacagcgtcttcactcagttcattttccttctcaacagaatttgtctttgcaatcttcccgctgcaaaaatctacctacggtcacggaatggcatttgtggtatctccaaccaaagatctcaggtctaacggcagtgcaaattcaaatttaggtattttcaatagagcaaatgataacaagactgcaacccatatctttgctgtagaacttgacactaatcaaaactcggagtcatttgacaaaggtggtaacgatgtgggtattgatattaacagtatagtttcagttgaatctgcggacgctagttactttaatgctagaaaaggaaagaatataagtctgccgcttgctagtggtaaaagtattctggtctggatagattatgatggaatagagaaagtactcaacgtaacgttagctccagtacaaactccaaagcccgattcgccttacttttcaagcttcattaaaccaaaagtgccactcttgtcaagatccatcaacctttcagaaattttcactgagacgatgtatgtaggtttttctggttctacaggctcaatcaaaagtaaccagtatatccttggatggagtttcaagcaaggcggaaaagcggaaagccttgacatttcaagactttcgaatccaccaccatcgcctaaaaggtttccattaaaagaggttctaggcgctaccatatcaacaattgcttttctaactctgggaggaattgtgtatctttacaagaaaaagaagtatgcagaggtgcttgaacaatgggaaaaggaatatagccctcaaaggtactcctttaggatcctttacaaagcaaccaaaggtttcagggagaatcagttacttggagcaggaggttttggaaaagtctataaaggaatacttccttctggtacacaaatcgcggttaagagagtctaccatgatgcagagcaaggaatgaaacagtatgtggcagagattgctagtatgggaaggctaaggcacaagaacttagttcatctccttggttactgcagaaggaaaggtgaattgcttttggtctatgattacatgccaaatggaagccttgatgactatttgttccataaaaacaagctaaaagacctcacttggtctcagagagtcaatataatcaagggagttgcctctgcccttctgtatcttcatgaagaatgggaacaagttgtactacatcgagatataaaagctagcaacattcttttagatgcggatctaaatggaaagttgggagactttgggttagccaggttccatgatcgtggtgtgaatctcgaagccacacgggtagtaggtaccattggctacatggcaccagagcttactgcaatgggagtcaccactacttgtaccgatgtctatgcttttggagcttttatccttgaagtggtatgtggaaggagaccagtagacccagatgcaccacgtgagcaggtgattttggttaagtgggttgcgagctgcgggaaaagagatgctttaactgatactgttgacagcaaactaatagactttaaagttgaggaggccaagcttcttttgaagctaggaatgctctgttcacagatcaacccagaaaacagacccagtatgagacagatattacaatatctggaaggaaatgtaagtgttccagctatatcgtttggtactgttgcacttggtatacccaatataagccatgaaacagtaacacaaatgacaacaacctcttcatcagctaatttctcatttgaggatgttacagtcctatttggtggtcgctaggatttaaatacccagcaaatacccagcaaattggagctctgcagagctttcgtt

SEQ ID NO: 70 - DNA, 1367 bp, Rhodopseudomonas palustris
aactctttgtttcttgtttgttgattaacccttaattaatccgggcgcgcctgatttatcacaagtttgtacaaaaaagcaggctcctgcaggaccatggcaaagacattccgcaccctcgacgacgtcgatgtgaagggcaagcgcgtgctgctgcgcgtcgatctcaacgtgccgatggacgccggcaaggtgaccgacaccacccggctcgaacgcgtgatgccgaccatcaccgagctgtcgggcaagggcgccaaggtgatcctgctggcgcatttcggccggccgaagggccgcgacgacaagaactcgctcaagccggtcgctgctgcgctggccgacgtcatcaagaagccggtcggcttcgccgacgactgcatcggcgagcccgccgccaaggcgatcgccgcgatggccgacggcgacatcctgtgcctggaaaacacccgcttccatcccgaggaagagaagaacgatccggcgttcgtcgccaagctcgccgagctcggcgacatctgggtcaacgacgcgttctcggccgcgcaccgcgcccacgccaccaccgaaggcctcggccacaagctgccggcttacgcgggccgcaccatgcaggccgagctcgtcgcgctgaacaaggcgctggaagcgccggtgaagccggtgatcgcgatcgtcggcggcgccaaggtgtcgaccaagatcgacctgctcgaaaacctggtcaccaaggtgcaggcgctggtgatcggcggcggcatggccaacaccttcctgcacgcccagggcgtcaaggtcggaaagtctctgtgcgagaaggacctggctccgactgcgctgcgcatcctcgataaggccgaagctgccaactgcgccatcatcctgccggtcgacgccaccgtggcctatcacttcgaggccaacgcgccgtcgttcgcctacgggctcgacgccatcccggacgatgccatgatcctcgacgtcggcccgcgctcgatcgagcgcattcacgccgcgatcgacgatgccgcgaccctggtgtggaacggcccggtcggcgcgttcgagctgacgccgttcgacaagggcacggtcgaagccgccaagcacgccgccaagcgcaccaaggccggcaagctggtgtcggtcgccggcggcggcgacaccgtcgcggcgctcaaccatgccggcgtggccgacgacttcacctacatctcgaccgccggcggcgccttcctggaatggatggaaggcaagccgctgccgggcgtcgaagtgctccaggtcaagtgactcgagacccagctttcttgtacaaagtggtgataaattggagctctgcagagctttcgttcgtatcatcggtt

SEQ ID NO: 71 - DNA, 2070 bp, Arabidopsis thaliana
caaaaactataagtcccacactcaagtcaattaaagcactccaatggtccaacaagtttcgtcgtctaccttgaaactcaacctttggatgattgatatacataaagacaggatctaaaaacacctaccgaacttgaatagtaggtgtgttgtgtttgagtgtctctctaggtaaacatggtagcagaagaagcaagaaaagaagccatggctaaatcagtatctggcgggaagattacttattttgtggtggcttcatgtgtcatggccgccatgggcggtgtcatcttcggctacgacatcggggtttcaggtggagtgatgtcaatggggccatttctaaaaagatttttcccaaaagtgtataagctccaagaagaagatagaagaagaagaggcaatagcaataaccactactgccttttcaatagccaacttcttacatccttcacatcttctctatacgtttccggtctcatcgctactctgttagcttcgtccgtgactcgttcatggggtcgcaagccctctatatttcttggcggtgtgtcctttctcgccggcgctgctcttggtggctctgctcaaaacgttgctatgctcattattgcgcgtctcttgctcggcgtaggagttggattcgctaaccagtcggttcctctgtatctctccgagatggcgccggcaaaatacagaggagcaatcagcaatggtttccagctctgtatcggaattggatttctatctgcaaatgtaataaactacgaaacccaaaatatcaaacatggttggagaatctctttagccacagctgcaatacctgcttcaatcctcactttaggatcactgtttctcccggaaacgccgaatagtatcatccagaccaccggagatgttcacaagaccgagcttatgcttcgccgtgtccgtggaactaacgacgttcaagatgagcttactgatctcgttgaagcgagttctggttctgatacagattcaaacgcgtttttgaaactgcttcaaagaaaatataggcctgagttagtgatggctttggtgatacctttctttcagcaagttactggaatcaatgttgttgctttctacgcaccggttttgtatagaaccgttgggtttggagagagtggttcgttgatgtcgaccctcgtgactggaatcgtgggaacctcgtcgacgttgttgtcgatgcttgtcgttgacagaatcggtagaaagactctgtttttgattggagggttacagatgctcgtgtcgcaagttaccattggtgtgatcgttatggtggctgatgttcacgacggtgtgatcaaggaagggtatggttacgcggttgtggttttggtgtgtgtctacgtggccgggtttggttggtcttggggtccattaggatggcttgtaccgagtgagatttttccgttggagataagatcggtggcgcagagtgtaactgtggcagtgagttttgtgtttacttttgcggtggctcaaagtgcaccaccgatgttgtgtaagtttcgagctgggattttcttcttttatggagggtggttggtggtaatgacggtagcggtgcagctgtttttgccggagactaagaatgttccaatcgagaaggtggttggactttgggagaagcattggttttggaggagaatgacgagcaagcgtgatatccaagaaaccaccattcttagccattgaaaacaataaaaaaaccagcacctcatgatttgagatgagacgcatcttttgttgccaaaaaaattattgcatataagttttaaaattttcaaagttcaaactaaattaaggatatttttttactattcacgtaacaataatcaaatcacatgatccaagattcgattattgttcaaattattttgtaaatttagccatagtttcattttttcacttatatgtttgtgaaataacgatttgtgtttggaattaaaattaggggtgttttataaatatagtaaaactaggatagtgataatgtaatatattgaacgttaaaggacaaagatgggaaaaaaaaaaaaaaaa

SEQ ID NO: 72 - DNA, 711 bp, Saccharomyces cerevisiae
catttatttgtcagctttcaaactctttgtttcttgtttgttgattaacccttaattaatccgggcgcgcctgatttatcacaagtttgtacaaaaaagcaggctcctgcaggaccatgtctactattccctcagaaatcatcaattggaccatcttaaatgaaattatatctatggatgacgatgattccgatttttctaaaggtctaattattcaatttatcgaccaggcacaaacaacttttgctcaaatgcaacgacagctggacggtgaaaaaaatcttaccgaattagacaatctgggccattttttaaagggttcttctgctgcattaggcttacaaagaattgcctgggtttgtgaaagaattcaaaacttgggaagaaaaatggaacatttcttccccaacaagaccgaattggtcaacactctgagcgataaatcgattattaatggaatcaatattgatgaagatgacgaggaaataaagatacaagtggacgataaagacgaaaattccatatatctcatcttgatagcaaaagctttgaaccagtctaggttggagttcaaactggcgagaattgagttatctaaatattacaacacaaacctataactcgagacccagctttcttgtacaaagtggtgataaattggagctctgcagagctttcgttcgtatcatcggtttcgacaacgttcgtcaa

SEQ ID NO: 73 - DNA, 609 bp, Arabidopsis thaliana
atggctatggctacgcgagcgattcgataccagttaccgtcaccgagatttagagctcctagatgcgaatcatcggaaccgattaagcagattcagatccagcaacgaccaagaggtggcgatttagccgagaacgggaagatcgtgctccaaccaaggctttgcacgctgagatcttatggatctgatatggtcatcgctaaaaaggacggcggagatggtggaggaggaggatctgatgttgagttagcgtctccgttttttgagacgcttacggattacatagagagttcgaagaagagtcaggatttcgaaaccatctccggtagactcgccatgattgtatttgcggtgacggtgacggaggagattgttacggggaactcgttgtttaagaaactagatgtggaaggattgagtgaagctattggagctggtctcgccgcgatgggatgcgcggcgatgtttgcttggttaacgatttctcggaacagagtcggacggatctttacagtgagttgcaactcgttcattgactcgttggttgatcagatcgttgatggactgttctacgataccaagcctagtgattggtctgatgatctttaa

SEQ ID NO: 74 - DNA, 2100 bp, Saccharomyces cerevisiae
ttatttgtcagctttcaaactctttgtttcttgtttgttgattaacccttaattaagtgtctggtaaagaaataacttttgtgcaagacaacagctgacaagatgatggcttttgagaatacaagtaaacgaccaccccaggactttgtagctcctatagatcaaaaaaaaaggaaggtccagttttccgatagtactggcctggtaacccttcaaccagaggagataaaagatgaagtgttttcagcggccatgtatagcaggttcgtgaaatctgccctagatgatctggataagaatgattcaacccagatcggcataattgccaatcaagtagcgcttccgagcaagaatcctgaaagaattaatgataagaatctcaatattcttttggatatcttatctagtaatatcaacaggatagaatcctccaggggaactttcctcatacaatctatcataaactttgagaagtggtgggaattgcctccacacactctaagtaaatatatatatttcatcaaaatcctttgctcgagtatacccaaatggtggcaagacgtttcgatgatactggtatcttgttttattttaccaatcaaacagacagtgtgtcatcatgatatgcttaaatatttcttaaggatgattccctcctcgatgggattcatagatacatatttggccaaatttttcccaaataaaaatgatactcggagaaagttggttaattacacttcaaatttgctgaaattgagaggctactgctctgagctaggattccaaatttggtccttactgatagaaaagattatttcgattgatgtcgagttacaaaatgaattagatgaattagatgatgatgtagatgacgatgatctagaggaagttgatctagaggatgacgacgatttagatgatgattcaggagacgatgatgatgaaaattgtgggaacagtaatgaagagttaaggtctggagcagccgacggtagtcaaagtgatagtgaagatatggacatcattgaaggtatggacggtactgaagaatataatgtggagttgacgcagggaatcaaagaactttccaccaaattggactctatcttaactttggtaagcacgcatgtggaagagcaagtgacgccggagagtttagaaagcggtgaaggcgtaggagtcttcaacactctaacaacattatttaaaacgcatgttctacccacgtactataccaggtcgattcaatatatcatgttccatgtttcacaacaacaattagaactaatggattcatttttagtgacactgatagatatttcgtttgccgtcaacgaagcagcagagaagaaaattaagtcattacaatatttggggtcgtacattgcgagggccaagaaactatccagaactcaaattattttcgttgcaagctatttaacgtcctggttgaatagatacgttatcgaaagagaagaagaagttgatcaacgtggaggtatggaaaggtttaaacatttctatgcagcatttcaagcactttgttacattttctgtttcagacataacatcttcagagatacagatggtaactgggagtgtgaactggacaaattctttcaaagaatggtcatttcaaaatttaacccattaaagttttgtaatgaaaatgtcatgttgatgtttgctcgtattgcccaacaagaaagcgtcgcgtactgtttcagcataattgaaaataacaacaatgaaagattgaggggaatcatcggcaaagctgatagcgacaagaaggaaaattccgcacaagcaaataccacatcgtcttcttggtctttagccactcgacaacaatttattgacttacagagttacttcccatatgatcctttgtttctgaaaaactataaaattttaatgaaggaatactacatagagtggagtgaagcaagcggggaatatgaaagtgatgggtcggatgactaaggtcttttttcataggtatcttcgagacatgcccgtcacaaactaatatttaaatacccagcaaattggagctctgcagagctttcgttcgtatcatcggtttcgacaacgttc

SEQ ID NO: 75 - DNA, 1882 bp, Saccharomyces cerevisiae
ttcatttatttgtcagctttcaaactctttgtttcttgtttgttgattaacccttaattaagatgggaatacacataccatatctcacgtcaaagacatcgcaatcaaatgttggtgatgccgttggcaacgctgatagtgtagagttcaacagtgagcatgactcaccttcaaagagaggtaaaattacacttgagtcacatgaaatacagagggctcccgctagcgatgatgaagataggattcaaattaaacccgtgaacgacgaggatgacacgtcggtcatgatcacttttaaccaatctctttcgcccttcatcatcactctgacttttgtcgcatccatatccggtttcatgtttggttacgacactggttatatatccagtgcgctgatctcgatcggcacagatctggaccacaaggtacttacttatggggagaaggaaattgtcactgcggctacctctctgggagctttgattaccagtattttcgccggtactgcagctgacatatttggtaggaaacgttgtttaatgggttcgaatctgatgtttgtcattggcgcaatcttacaggtctccgcacacacattctggcaaatggctgttggtagactgatcatgggtttcggtgtcggtatcggctccttgatcgcgccacttttcatcagtgaaattgctcccaaaatgatcagagggagactaactgtcatcaattccttatggttgactggtggtcaattagtcgcttacggttgcggtgctgggttaaactacgtcaacaatggttggagaattcttgttggattgtcactaattcccactgctgtgcaattcacatgcctgtgctttttacctgacactccgagatactacgttatgaagggcgacttggcaagggctactgaggtgttgaagagaagttacactgacacttcggaggaaatcattgaacgtaaggtggaagaacttgttactttgaatcaatctattcctggtaagaatgtccctgaaaaagtctggaataccatcaaagaattgcacacagtaccatctaatctaagggctttgatcattggttgtggtttacaagcaattcaacagtttaccggttggaattcgttgatgtatttctctggtaccatcttcgaaactgtcggtttcaaaaattcttccgctgtttcaatcatcgtgtccggtaccaattttattttcactttagttgcctttttttccattgacaaaataggccgtagaaccatattattgattggattaccaggcatgaccatggctttagtcgtgtgctctattgctttccattttctaggtattaagtttgatggcgctgtcgctgtggtggtttcctccggtttctcctcttggggtattgtgatcatcgtatttattatcgtatttgctgcgttctacgctcttggtatcggtactgttccatggcaacaatcggaactattcccccaaaacgtgagaggtattgggacttcatatgcaactgctacaaactgggctggttcactggttattgcatccacatttttgaccatgttacagaatatcactcctgcaggtacatttgcctttttcgcgggattgtcgtgcttatcaaccattttctgctacttctgttatccagaattatcgggattggagttagaagaggtacaaactattttgaaggacgggttcaacatcaaagcctcgaaagctttggccaagaagagaaaacagcaagttgccagagttcatgaattgaaatatgaaccaactcaagagattatagaggatatatagattaaatacccagcaaattggagctctgcagagctttcgttcgtatcatcggtttcgacaacgtt

SEQ ID NO: 76 - DNA, 763 bp, Glycine max
ttcatttatttgtcagctttcaaactctttgtttcttgtttgttgattaacccttaattaagatgcgccgagggagaaccgccgccgccgctgccgccgttgtggatcccacgccggaccaggccaaggagacgacgcggttccgtggcgtgaggaagcggccgtgggggcgattcgcggcggagattcgagatccgtggaagaagcagcgcgtttggctggggaccttcgattccgccgaggatgccgcgcgggcctacgacaaggctgcccgatccttccgcgggcccaaggccaaaaccaatttcccccccttccccggcccggcagaggcggaccaccactcgcagattccgctctaccaggcccatgggctttccaccaagttcgagcccgtcgtccaggtgaaccggcccacgagcagcggcatgagcagcaccgtggagtccttcagcgggcctagggttccctcctcctcctctcgcgctaagccccttgttgtggttgttaaccctatcatccctctcaacgacgacgaagacgattgccacagcgattgcgactcttcttcctccgtcgtcgacgacggccaggactgcgtcctcatctcctccttccggcaaccgctgcccttcgatctaaacctcccaccatccgatgccgacgacgacaacgacgacgacctgccggccaccgcgctgtgcctctgaatttaaataccaagcaaatacccagcaaattggagctctgcagagctttcgtt

SEQ ID NO: 77 - DNA, 881 bp, Arabidopsis thaliana
ttaattaagtgaaaaagttaggtaaagaggcacaagtattgaaagagcggaatctgatgaagaacgtaataaagccctcagctattgttcccgaaatcttgtgtacttgtgtcgatcaaacatttgcggcaatcttactgaacactactcttgcctgtcctatctcttctctgcttcactctccgcttgacgagtcatctgtccgtttcattaccggctcacttgtgtctgccatagaagacatacacaagaacgagattctcttcagaggttcatcccccgagttactgatgttggatcaatccggatatctacagattgtagacttcagattcgccaagaaattgtccggggaacgaacatttacaatctgtggaaatgcagattatttagccccagaaattgttcaaggcaaaggccatggttatgcagctgactggtgggctcttggagttttgatctactatatgctagaaggagaaatgccattcgggtcatggagagagagcgagctcgacacgtttcagaagattgcaaaaggccaactaactttccctcgagttctaagctcagaagctgaagatctcatcacaaagttgcttgaagttgatgaaaacctgcggtttggtagccaaggaggtccagaatcaatcaagaaacatccctggttcaatggtcttaaatgggaagctattagtaaccgcgaatttcaagttcctcaagagataatctcgcgaattcatcaccatttggagaatgataacgttctccctctagaaacttctaaatcgcttgacacaacagaagatcaagatgctcaaaactggcttgaagaatggtaagacacttcagacgaaaccgcggctcttttatggcgcgcc

SEQ ID NO: 78 - DNA, 1092 bp, Arabidopsis thaliana
ttaattaagttgttccgattcagagatcatcgtcgtcgtcgttcagaaaccttcaaaaatggctggaaaactcatgcacgctcttcagtacaactcttacggtggtggcgccgccggattagagcatgttcaagttccggttccaacaccaaagagtaatgaggtttgcctgaaattagaagctactagtctaaaccctgttgattggaaaattcagaaaggaatgatccgcccatttctgccccgcaagttcccctgcattccagctactgatgttgctggagaggtcgttgaggttggatcaggagtaaaaaattttaaggctggtgacaaagttgtagcggttcttagccatctaggtggaggtggacttgctgagttcgctgttgcaaccgagaagctgactgtcaaaagacctcaagaagtgggagcagctgaagcagcagctttacctgtggcgggtctaaccgctctccaagctcttactaatcctgcggggttgaagctggatggtacaggcaagaaggcgaacatcctggtcacagcagcatctggtggggttggtcactatgcagtccagctggcaaaacttgcaaatgctcacgtaaccgctacatgtggtgcccggaacatagagtttgtcaaatcgttgggagcggatgaggttctcgactacaagactcccgagggagccgccctcaagagtccgtcgggtaaaaaatatgacgctgtggtccattgtgcaaacgggattccattttcggtattcgaaccaaatttgtcggaaaacgggaaggtgatagacatcacaccggggcctaatgcaatgtggacttatgcggttaagaaaataaccatgtcaaagaagcagttagtgccactcttgttgatcccaaaagctgagaatttggagtttatggtgaatctagtgaaagaagggaaagtgaagacagtgattgactcaaagcatcctttgagcaaagcggaggatgcttgggccaaaagtatcgatggtcatgctactgggaagatcattgtcgagccataagagcgttgtagccatctttgactgtctgtgaatgtgggcgcgcc

SEQ ID NO: 79 - DNA, 1173 bp, Arabidopsis thaliana
ttaattaagtgaaagcagcagatcaagataagaaagaagaaagaatcatcaaaaaatgggaataatggaggcagagaggaaaacaacaggctgggctgccagagacccatctgggatcctctctccttacacttacactcttagagagactggaccagaggatgtgaacataagaatcatttgctgtggaatctgccacaccgatcttcatcaaactaaaaatgatcttggcatgtctaattaccccatggttcctgggcatgaagtggtaggggaagtagtggaggtgggatcagatgtgagcaagttcaccgtaggggacatagttggagttggttgcctcgttggatgttgcggaggttgtagcccctgcgagagagatctggaacagtattgtccaaagaagatttggagctacaatgatgtttacatcaatggtcaacctacacaaggcggcttcgctaaagccaccgtcgttcaccaaaagtttgtggtcaagattccagaaggaatggcggttgagcaggctgcgccgctactgtgcgctggtgtgactgtgtacagtccactgagccactttggtctgaaacaaccaggcctaagaggaggtatactagggttaggtggagtcggtcacatgggtgtgaaaatagccaaagcaatgggtcaccatgtgactgtcataagctcatcaaacaagaagagagaagaggcattgcaagatcttggagctgatgattacgtgatcggatccgaccaagcgaagatgagcgaattggctgattcgttggattacgtaattgacacggtgcctgttcatcatgcacttgagccatatttgtctctgcttaagcttgatggtaaactcattctcatgggagttatcaacaatccattacagtttctcactcctctgcttatgcttgggaggaaagtgataacggggagcttcatagggagcatgaaggagacagaggagatgcttgagttctgtaaagaaaagggtttgagttcgattatcgaagttgtgaagatggattatgttaacactgcgtttgagagactcgagaagaacgatgtgcgttataggttcgtcgttgatgtcgaaggaagcaatctcgacgcttgatatcatgaaactcgaggctttttatacatactcgaaggcgcgcc

SEQ ID NO: 80 - DNA, 1238 bp, Arabidopsis thaliana
ttaattaatcttcgttttgtgcttgaagtaagaaaatttgggagaacaatgtcggcttcttcttcctcctttgaacaacctcaagtcataacctgcaacgcggcggtggcatggcgtgctggtgagccattggttatggaggaagttgaagtgagtccacctcaaccacttgagatcagaattaaagttgtatgtacatctctctgtcgtagtgatctctctgcttgggaatctcagtctcttttgcctcgaatatttggccatgaagctgcaggtatagtggagagcattggagaaggtgtaactgagtttgaaaaaggagatcatgtgcttgctgtattcactggagaatgtgggtcatgtcggcattgcatatctgggaaaagtaacatgtgtcaggttcttggaatggagaggaaaggtttgatgcatagtgatcagaagacacgcttctccatcaaaggcaaacctgtttaccattactgcgcggtttcaagtttcagcgagtacactgtggttcactctggctgtgctgtcaaagtcgatccactggcacctctgcataaaatttgtcttctaagctgtggagtagctgcaggtcttggtgcagcatggaatgttgctgatgtacaaaaaggttcaagtgttgtgatatttggtcttggaactgtcggtctttctgttgctcaaggtgccaaacttagaggagcagctcaaatacttggggttgatataaatcccgctaaggctgaacaagcaaagacatttggtgtcacggatttcatcaattcaaatgacctctctgaacctataccccaggtgatcaaaagaatgacaggaggaggtgcagatttctcatttgaatgtgttggtgatacaggaatagctacaactgctttacaatcgtgctcggatggatggggaatgacggttactctaggtgtaccgaaagctaagcctgaagtttcagctcattacggacttttcctttctgggaaatctttaaaagggactctttttggtggttggaagcctaaatctgatcttccttcactcattgacaagtacatgaacaaggagattatgatcgatgaatttattacgcataacctgtcatttgatgaaatcaacaaagcttttgttcttatgagagaaggaaaatgtttgcgttgtgttcttcacatgccaaagtaatgtctcggaaaacacatgtcacagattcaagaaagaggcgcgcc

SEQ ID NO: 81 - DNA, 1284 bp, Arabidopsis thaliana
ttaattaatctcaccagaaaaacacacaccaaacaaaacaaaacaaaaaacagagagatggaaaacggaaactcctccagcgacaacaaatcttcacataaaccgatccgatgcaaagcggcggttagtaggaaggctggagagccgttggtgatggaagaaatcatggtggcgccgccgcagcctttcgaggttcggattcgaatcatctgcaccgcgttatgtcacagtgacgtcactttctggaaactccaagttcctccagcctgctttccgaggatactaggccacgaggcaataggcgtagtggaaagtgttggtgaaaatgtgaaggaagtggtagaaggagacaccgtactaccaacgttcatgcctgactgtggtgactgtgttgattgcaaatctcacaaaagcaacttatgtagcaaatttcctttcaaggtatccccttggatgccaagatacgataattccagcagattcaccgacctcaatggcgaaactctctttcatttcttgaacgtctccagcttcagcgaatacacggttcttgatgtcgctaacgttgttaagattgattcttcgattcctcctagtcgtgcttgcctcctaagctgcggagtctccaccggtgttggtgctgcttgggagaccgccaaagttgaaaaaggatcaaccgttgtgattttcggacttggttctatcggattagcggttgcagagggtgcgagactttgtggtgcctctagaatcattggtgtggatataaaccctaccaaattccaagttggccagaaatttggagttaccgagtttgtaaactctatgacatgtgagaaaaaccgtgttagcgaggtgatcaatgagatgactgatgggggagcggactattgcttcgaatgtgttggaagtagttctttggttcaagaagcttatgcttgctgtagacagggatggggaaagacaataactttaggggtggacaagccgggttcacaaatatgtttagattcgtttgatgttcttcaccatgggaagattctgatgggttcgttgtttggaggtttaaaggctaaaacacacattccaattcttcttaaacgctacttgagcaatgaacttgaattggataagtttgtgacacatgagatgaaattcgaggagatcaacgacgcattccagctacttcttgaagggaaatgcatcaggtgtgtcttatggatgggctaagtgaattgacttattttatctttccatcttttgcatcaatttcataggcgcgcc

SEQ ID NO: 82 - DNA, 978 bp, Arabidopsis thaliana
ttaattaaccactctctcgcgccttttaccccttctcagaatcttaaccatggcggcgacgagcgagcacaccatcttgcaatttgtgtctccgtcatcaacggcgtccgctacaacctctgtactcacggcgaggatccaccctctcgttatctttaacgtctgtgattgcttcgtgagacgtcctgactcagctgaacgagtcatcggaactctcctcggatctatcttacctgacggaaccgtcgatatccgcaattcatacgccgtccctcacaatgaatcatccgatcaggttgctgtggatattgattaccaccacaatatgttagcttcacaccttaaggtgaattcaaaggaaactattgtcggctggtattcaactggtgctggggttaatggcggtagttcgctgattcatgatttctatgctagagaagtacccaacccaattcacctaactgtggatactgggtttactaatggtgagggtactatcaaagcttttgtctcttcaaacctctcactcggtgatcgacaactcgttgcacattttcaagagattcctgttgatctccgcatggttgatgctgagagagtcggattcgatgtacttaaggcaacatctgttgacaaactcccaaatgacttggaaggaatggagttaacaatggagaggctgttaactctaatcaacgatgtctacaaatatgttgacagtgtcgtgggaggtcaaatagctccagacaacaacattggacgattcattgcagatgcagtagcctcccttcccaagttacctccacaagtcttcgataacctcgtgaatgatagtctccaggaccaattgcttctgttgtacctatcaagcataacaaggacacagttgagtctagcggagaagctaaacacagctgctcaaatgctataataagcttggaaacacaaggttttgctaaaaatggggaatggcgcgcc

SEQ ID NO: 83 - DNA, 1035 bp, Arabidopsis thaliana
ttaattaaatggcggcgctcgcaaggatcggtggccggcacctgaaatccgtctgcttaataaactcctccgcctcatgtttcttcacacaacgccgtggtgttgcttccaagctctttattggtggtaactctctattcatttttcctttttgaatctgtgattaatacaatccatttctaggctgtagaattttaaggttttagcggatgcaaatttgttgaatatgattcattttaattgaaaattggtaaatctcttctgtaatgatgttgtaagtcttgaaagttattttcttctgcgagctattctattcactgttgtccagtaaccatttcttctcatggctttgattttttactttgtgtttctcttcaaagccatgtttctgtgaaactttggtctttttgtgctcacatgttgttcggtttgtagtaaattgattatgaacctgatgttctctactttctgaacattttgaatttacaatctccaataatgcttaattcccaataattcgattctgtttacaggattatcgttttgcactacagagcaaggattgtctgaggcattttccaaatgtggccaagttgttgaaggtatcagatgaatatcgatcccacatgtgtttgatctgcttattgtatatctgagagtttttgagatatttttgtctggttcttatcagcacaaatagttatggacagagtctctgacagatcaaaaggtttcggtttcgtgacatttgcttctgctgacgaagctcagaaagctttgatggagttcaacggacaggtatactgtgtttgttgttgtcttgctgctttcacttgcttaaaactatttctttatgataacaaaagacagtttctttcagcaattaaacggccggacgatatttgtggactacgcaaaggcgaagcagtctcttggtggtggtggtggctatccaatagctagaggaccgcctgatccagccgtaatagctgccactagaacaaccgaaacatcgaaaagcgactaaggcgcgcc

SEQ ID NO: 84 - DNA, 861 bp, Arabidopsis thaliana
ttaattaatcacttcttctcaccgtgaagcgatggcttctttgttcaaggagcaagcaaagctatcagcttatcgtgatagaagattttcaggaacacaagaggagtttgatgaagcgctaagagcatctacaacggtttacattggcaatgtgtctttttacactactgaagaacagctttacgagcttttctctagagctggagaaatcaaaaagatcatcatgggtttggataagaacactaaaacaccttgtggcttttgtttcgtcctgttctactctagagaggatactgaagatgcagtcaagtatataagtgggactattctcgatgaccggcctattcgtgtggattttgattggggattccaagaaggaagacaatggggccgtggtagaagcggtggccaggttcgtgatgaataccgtacagattacgatcctgctagaggtggttatgggaaattagttcagaaggaactcgaagcacaaaggcagctcgtggattacggtactggctcattgggagcttatcctcaagctgcgccaacgaattatggaaatggaaggcgtggtggtggaaactatggtcaaggaggacaaaatcgccatggaagaggagactaccatcggaaacgacaaagagacgatgatcgctatggccgcgataactcaagaagaaacacagatcatgagtctaggagagacactgatagtgacatgagaccggagaagaacccacgattccgtgagagcggtgactccgatgacgatggtgaagatgatcggaagagaagatcttaaaacaaaactttagaagttgtcaatgttgctgaatggtcaatgtaatctggcgcgcc

SEQ ID NO: 85 - DNA, 916 bp, Arabidopsis thaliana
ttaattaaatgggggacaaaaataaggacgatagctctagccaaagcaaagcagtgcgtaaggaaaaaagagcgttccttttcaggaaatggacccgggttgatgtaatgagagtttcggctgttggggctgtgcatctattgtgtctattggctccgtttaactacacatgggaagctttccggtttgctgctatggtcggtatatcgactaatctcagcattacattttcataccataggaacttgactcaccgaagctttaagcttcctaaatggcttgaatatccattcgcttactctgcccttttcgcgcttcagggtcatccaatagattgggtgagtacacataggttccatcaccagttcacagattcggaccgtgacccacatagtcctatcgaaggattttggttcagtcacgtcttttggatattcgacaccagttacatcagagaaaagtgtggaggacgtgacaacgtgatggacttgaagcaacaatggttctataggtttcttcaaaacacaattggtctccacatcttaacattttggatcctcgtctatttatggggtggtctaccttacctaacttggagcgtgggtgttggaggagcaatcggttaccatgcgacttggctcataaactcggcatgccatatttggggttcgcgagcatggaacactaaggacacctctcgtaacatttggtggctagggccattcacgatgggagagagctggcacaacaaccaccatgcctttgaggcgtcggctaggcacgggctggaatggtatcaggtagacttaacgtggtacctcatttggttcttccaggttctcggtttagccacagatgtcaaattgcctaccgatgctcagaagcgaaaaatgtctttagctcgttagggcgcgcc

SEQ ID NO: 86 - DNA, 763 bp, Arabidopsis thaliana
ttaattaacaacacagtaaaacccattccctaatcccaaaattcgatctctcatctgatggctggttacagagccgatgaagagtacgattacctcttcaagctcgtgttgatcggcgactctggtgtcggcaaatcgaatctgctctctcggttcaccaagaacgagttcaatctcgaatccaagtctactattggtgttgagttcgctaccaaaaccactaaagtcgaaggcaaagtcgtcaaagctcagatttgggatactgctggtcaagagagataccgagcaatcacaagcgcttattacagaggagctgttggtgctttgcttatttacgacgtgacaaggcacgcaacatttgagaatgcagcaagatggctaagggaactaagaggacacacagacccaaacatagtggtgatgcttatagggaacaagtgcgatctgcgtcacttggtggcagtcaaaacagaagaggctaaagcctttgctgagagagaatccctctatttcatggagacttcagctctagacgcaaccaatgttgaaaacgcattcacggaagtgctcactcagatccacaagatagtgagcaaaagaagtgttgatggaggaggagagtcggctgatttaccgggaaaaggagagacgataaacgttaaagaagacggatcggttcttaagagaatgggttgctgctctaactagagtggggggattgtagatttggcttgatttggttagggtgagacaacggcgcgcc

SEQ ID NO: 87 - DNA, 820 bp, Arabidopsis thaliana
ttaattaaatggatccgcagctaactgaagtttcacagcagttcgagagattcaaggcggcgtttgcgaggaaggattacaatacctgtagcgatctgttgtctcagcttaaggttcttcttaccaaattcacaagtcttcctccattgttcgagaattcacctaatgcagccaaggaattgactattgcaagggacatttatgagcatgctgttgttctaagcgtcaaaaccgaggatcaagatgcttttgagagagatttcttccagctgaaaccttactatgtggatgccaggaaccgtattcctcagtctccacaggagaatcttatcctgggtcttaaccttctgaggctgctggtacaaaatagaattgctgaattccacaccgagcttgaattactttcatcagctacactagaggatccttgcatcaagcatgcagtagagcttgagcaatccttcatggagggtgcctataaccgtgtgttgagtgctagacagaccgcgcctgatgcaacttacgtctatttcatggatctcttggcaaagaccataagagatgaaatagctggatgcagcgagaaagcttatgattatgtctctatcagcgatgcccggcagatgttgttgttctcttctgatcaagaactcttaacctatgtcacagatgagcatcctgagtgggaagtgaaggaagggtttgttgtcttccagaaagccaaagaaactgcaccgtgcaaagagattccgtctctgcaactcatcaaccagactctaagctacgccagagagctggagcgtatcgtgtaaggcgcgcc

SEQ ID NO: 88 - DNA, 1118 bp, Arabidopsis thaliana
ttaattaaatggagcacggttcgttcacgaatgttagtcatgcttcgtttactttatcggaagaagatcacacacttgctaatgctgttagattcgtcttaaaccaagagtaagtatcttcttctttcaatccttttgaatctgttatgtatatatatagaagaagctatacactttcacagagaaaggctttagctttataatctcatacttagttcgtgacactctcaaattctgattattgagttcatagtttccctcattaggaatgaatctcttacctgtctttacctttgtttttggttagaattattgtgaagataatcaaattttgtttgaataatcagtgtgcacattgtatgtttgtgccattataaggtgattgtgaaggttgagttcgattcagattcatgttctgtggttagagactagaaaagatagtctagaattagctcttagatagagacagcagtgacgaggcattattgttccgatatctttcgttggatgagtttggtccattaagttcgccattatattgtgattgtgaaacttgagagttcgattaaatgttggtttacattcatgttatgttgttagagattctcattgtattcaatgaatgtcacattatcttatctttgaggttgatggagttgatatgctggtgtgtagacaatgatgattatgtcaataaccagtactgttttcaattctgcagtcccagagtaaccgtggctgcatacaccatcccacatccttcccttgaacaggtcaatatccgggtccagacaacaggtactgtttttcaaaaactctgttcatcagagttaagctatgttctttttggataactcttatccgagttctttgtctgtgtgtctaacaacataaaacgtgttggctctgtggcttttaggtgatccagcaagagaggtttttaaagatgcatgtcaagagctcatgcaaatgaacagacatgtgagaagcgtttttgataaggctgttgctgagtataaggatgaacaaaagcgtaaggaggaggctgaagaagaagagcttaagaggcagagggatctatttgggtccatggacattgaaaacaactgaggcgcgcc

SEQ ID NO: 89 - DNA, 601 bp, Arabidopsis thaliana
ttaattaaaactaagaactcagaaagagaccaacgacactgcaaatggcggatgaatctccaaagtctatctacgacttcaccgtcaaggatatcggaggtaacgatgtgagtttggaccaatacaaaggcaaaactcttttggttgtaaacgttgcttccaaatgtggtctgacggatgcgaactacaaggaactgaatgttctgtacgagaaatacaaggagcaagggttggagatattagcattcccgtgtaatcagttcttaggacaagaaccaggaaacaatgaagagattcaacaaactgtctgcaccaggttcaaagctgaattccccatctttgacaaggtggatgtgaacggtaagaacacggcaccattatacaagtacttgaaagcagagaaaggaggtttgctcattgatgctatcaaatggaacttcaccaaattcttggtttctcctgatggcaaggtcttacagagatattctcccagaacctctcctcttcaattcgagaaggacattcaaactgcgttgggacaggcctcttcttaatcaccagaagaagaagtttcaagaactttcgtttggtccggcgcgcc

SEQ ID NO: 90 - DNA, 798 bp, Arabidopsis thaliana
ttaattaatttgttttagacaacaagaatctgtgaactaacacaaaaacattgaaagaatgatcttaacaatgaaacttgttcaccctctccatcactctttgtcttcctccattccctttccctcaagaaaaaggcaatccaaaccgtaccggtgctcgttaccttctcccggctgcgaaaaggtcatcagaacagagactgtcctgcctccggcgccggtgagttgtgaagggagaagggtcttacttggatgtcttctcgctacagcttctgggattttgtcaactggttcagccgaggcagtaagcaccagtagaagagctctacgtgcatccaagttaccggaaagcgatttcacgactctccccaatggtctcaagtactatgatataaaggttggcaatggagcagaggctgtgaaaggatctcgggtcgcagttcactatgttgcaaaatggaaagggataacgttcatgacaagtcgacaaggacttggtgttggaggtggaacgccttatgggtttgacgttggtcaatcagagagaggcaatgttctgaaaggacttgatcttggtgttgaagggatgcgtgtaggcggtcagagattggtgattgttcctcccgagctggcttacgggaagaaaggagtgcaagagattcctccaaacgctacgatagagcttgacattgagctgttatcaatcaagcagagtcctttcgggacgccagtgaagatagttgaaggctaaaaggactaatgaagccaacattgtaccaagattttctgtggcgcgcc

SEQ ID NO: 91 - DNA, 653 bp, Arabidopsis thaliana
ttaattaaaacgcagtcttcagctaaatcatgagcaacgagtacgattatctgttcaagcttttgttgatcggtgactcctctgttggaaaatcgtgtcttcttctccgattcgctgatgatgcttacattgacagctacataagcaccattggtgttgacttcaaaattaggacgattgagcaggatgggaagacgattaagctgcaaatttgggatactgctggacaggagcgtttcaggaccatcactagcagctattacagaggagctcatggaatcattattgtttatgactgtactgagatggaaagcttcaacaatgtgaagcagtggttgagtgagatcgatagatatgccaatgagagtgtttgcaagcttttaatcggtaacaagaatgatatggttgaaagcaaagttgtttccaccgaaactggaagggccttagcagatgagcttggaattccctttcttgagaccagtgccaaggattctattaacgttgaacaggcattcttaactattgctggcgagataaaaaagaaaatgggaagccaaacgaatgcaaacaagacatctggtcctggaactgtccaaatgaaaggtcagccaatccaacagaacaatggcggttgctgcggtcagtagggcgcg

SEQ ID NO: 92 - DNA, 946 bp, Arabidopsis thaliana
ttaattaaatggcggatgagaggtataatcggaagaatccggcggtgaagaggattttgcaggaggttaaggagatgcaagctaatccgtctgatgattttatgtctcttcctcttgaggagaatatctttgagtggcaattcgccatccgaggtcctggtgatactgaattcgagggcgggatttatcatgggagaattcagttgcctgcagattatccattcaaacctccttcattcatgttattgacccctaacgggcgctttgaaactaacaccaagatttgcttgagcatttcaaactaccaccctgagcattggcaaccttcatggagtgttcggactgctttggtggctctcattgcatttatgcccacaagtcccaatggagcactgggctcagtagattatccaaaggatgagagacgtacactagccattaaatcacgtgagacaccacctaagtatggctctcctgaacggcaaaaaattattgatgagattcatcagtacatccttagcaaagcaaccgtggttccaaaacctcttcctctggaatgtagccaagcaccttccatcgtatcagaagctcactcccaagttgagccacaggaagcgataactgtagtagaagagcggtccatcgctacaacagacaccatagttgatgatcaaatcatagaagagacagctgaagcagtcaatacagcagctagtgtggttcccgctgcagcacctttaccagcggttgaagttgtggtcaaagcttctgtaagtggtgagcaaaggatggccagaagagcggctcagaagccagtcgatgacagactcttcacgtgggcggcggttgggctcacaatcgctatcatggttcttcttctgaagaagttcataaaatcaaatggttacagtactgggtttatggatgatcagtcttgaggcgcgcc

SEQ ID NO: 93 - DNA, 769 bp, Arabidopsis thaliana
ttaattaaatgtctcggagatatgatagccgtaccacaatcttctcgccagaaggtcgtctttaccaggtagagtatgctatggaggccattggaaacgccggttctgcgattggaatcttatccaaagacggtgttgtgttgatcggtgagaagaaagtcacctcaaagcttcttcaaacctcaacctctgctgagaaaatgtacaagattgatgaccatgttgcctgtgctgttgctggtataatgtctgatgctaacatacttatcaacacggctcgagttcaagctcaacgttacaccttcatgtaccaagagcccatgccggttgagcagctggttcaatctctttgtgacacaaaacaaggatacacacagtttggtggtcttcgcccgtttggtgtctcctttctctttgcaggatgggacaagcaccatggtttccagctttatatgagtgacccgagtgggaactatggtggttggaaagctgcagctgttggagcaaacaatcaggcggctcagtctatcctgaaacaagactacaaggacgatgcaaccagggaagaagcagtcgagcttgccttgaaggttctgaccaagacaatggacagcactagcttaacatctgagaagctagagcttgctgaagtgtatctgactccatccaagactgttaagtaccatgttcactcacctgagtcgctcaccaaactgttggtcaagcacggtgtgactcaacccgctgctgaaacatcttaaggcgcgcc

SEQ ID NO: 94 - DNA, 741 bp, Arabidopsis thaliana
ttaattaagatcgaagagagaaggagaaaatgacgcatagagtagatcaggaatatgattatttgtttaagattgtgttgattggtgattctggtgttgggaaatcgaatatcttgtcgagattcaccaggaatgagttttgcttggaatctaaatccactattggtgttgaattcgccaccagaactactcaggttgaaggaaagaccattaaggcccagatctgggacactgcaggtcaggagaggtacagggcgatcacaagcgcgtattacagaggcgcagtgggtgcacttcttgtctacgacattactaagagacagacctttgacaatgttttaaggtggctgcgcgaactgagagaccatgcagattccaacattgtgatcatgatggctgggaacaaatccgatctgaaccacttgagatccgttgctgaggaagatggtcaaagtttggctgagaaggaaggtctctctttcctggagacatctgctcttgaagcaacaaacgtcgagaaagcgtttcagaccatcttaggtgagatctaccatatcataagcaaaaaggcactggctgcacaagaagcagcagcagctaattctgcaatccctgggcaaggaactacgattaacgtcgatgacacatctggaggcgcgaaacgagcatgttgctcttcttaaactaaaggtaaactgtttatttcggttgctccttgttcagagattcaaacggcgcgcc

SEQ ID NO: 95 - DNA, 1273 bp, Arabidopsis thaliana
ttaattaaaaatggcaacagcaacatcagcttctctgttttcaactgtttcttcatcttactccaaagctagctccataccacattcaagactccaatctgtgaaattcaactcagtccctagcttcaccggtctcaaatcaacctctctcatctccggatctgattcctcttccttagccaagactctacgcggttccgtaacgaaagcacaaacatctgacaagaagccttacggattcaaaatcaacgcttcatacaaagtagctgttcttggtgctgctggtggtataggtcagcctttatcacttctcatcaagatgtctccgttagtctctacgcttcatctttacgatatcgccaatgttaaaggagttgctgctgatctaagtcattgtaacactccttctcaagttcgtgatttcactggtccttctgagttagctgattgtttgaaagatgttaacgttgttgtcatccctgctggtgtgccgaggaaacccggtatgactcgtgacgatcttttcaacatcaatgccaatattgtcaagactcttgttgaagctgttgctgagaattgccctaatgctttcattcatattattagtaacccggttaactctacggtacctattgctgctgaagtgttgaagaagaaaggtgtttatgatcctaagaagctgtttggtgtcactactttggatgttgtgagggctaacacttttgtttctcagaagaagaatcttaagcttattgatgttgatgttccggttattggtggacatgctggaatcaccattttgcctctcctctcgaagacaaaaccgtctgttaactttactgatgaagagatccaagagctcactgttaggattcagaacgctggtactgaggttgttgatgctaaggcaggtgcaggttcagctactttgtcaatggcttatgctgctgctagatttgtagagtcatctcttcgtgctcttgatggagacggagatgtctacgagtgctcgtttgtggagtcgactctgactgatcttcctttctttgcatcacgggttaagatagggaagaacggtcttgaagctgtgattgagtcagaccttcagggattgactgagtatgagcagaaagcactagaagctcttaaggtagaattgaaagctagcattgacaagggtgtcgcatttgcaaacaaaccagctgctgcagcagctaactagatcgcaagctgataacatttttcttctgatcattcgagttttgggcgcgcc

SEQ ID NO: 96 - DNA, 1035 bp, Arabidopsis thaliana
ttaattaaatgagcgcttcgaggttcgtaaagtgcgtgacggttggtgatggagctgtcggaaaaacttgtttgttgatttcttacacaagcaacactttccctacggttatgtcccaattattctttcatgtttcttgtttcattaccacaacaacaacatatctcatgtttcttgtttcttttgtggatatacaggattatgtgcctaccgttttcgataatttcagtgccaatgttgtggttaatggaagcactgtgaatcttggattgtgggacactgcaggtttttcattttcctatatatcttggtgtttgaaatttggaatatggtttttggatctgaagattttgaaaatttgggtatgaataaacagggcaagaggattacaatagattaagaccactgagttaccgtggagcagatgttttcattttggccttctctcttatcagtaaagccagttatgaaaacgtctccaaaaaggttttaaaaatccatcaatcttgtttcatattattgagttttcgtcacattttttgaactcttgtcacaaattgtgtttgcagtggatcccggagttgaaacattacgcgcctggtgtccccatcgtccttgttggaacaaagcttggtgagttttccattgttttttcctgatctcgctccttttactttattagttgtgactgagtttgtgtttttgctctccagatcttcgagatgataaacagttctttatcgaccatcctggtgctgttccgattactactgctcagggagaggagctgaggaagcaaataggagcacctacttacatcgaatgcagttccaaaactcaagaggtacgtagattagtatatatacccttgttgcagatttctaatgttaatgttaatgctaatgttgatgatgtgagagtgcagaatgtgaaggcggtgtttgacgcagccatccgagtggtgttgcaaccgccaaagcagaagaagaagaagagcaaagcgcagaaggcatgctccattctatgaggcgcgcc

SEQ ID NO: 97 - DNA, 985 bp, Arabidopsis thaliana
ttaattaaatggacggagaagagcttaccgagcaggagactgccttgtacgaccgccagattagggtttggggcgctaatgctcagagaagattgaccaaagctcatatcttggtatctggaattaaggggactgttgctgagttttgcaagaacattgtgctggcaggagttggttcagtgactttaatggatgatcgtttagcaaacatggaggccttgaacgctaactttttgattccgcctgatgaaaatgtttacagtggcaaaactgtggctgagatttgtagtgattcactcaaggatttcaaccctatggtccgtgtttccgtagagaaaggtgatttgtcaatgcttggcactgatttttttgagcagtttgatgtcgtagttataggctatggttctcgtgctaccaaaaaatatgtcaatgaaaaatgtcggaagttaaagaaacgtgtcgcattctatacagtcgattgtagagactcatgtggtgaaatctttgtggacctccaagattacaagtacacaaagaaaaagcttgaagagatggtggaatgcgaactaaattttccaagttttcaggaagctatatcggtaccatggaaaccgattcctcggagaacagcaaagctctactttgctatgagagtaatagaagtgtttgaagagagtgaagggcgtaaacatggagaatgttcgctactcgatcttgccagagtcttggaaatcaaaaagcaactctgtgaggcaaactctgtgagcgagagccatataccagatattctcttggagagacttatcactggtactactgaattcccgccagtttgtgccattgtgggaggaatattagcacaggaggtgatcaaagcagtatcaggcaaaggagacccgttgaaaaacttcttctactatgatggtgaagatgggaaaggtgtgatggaagacatttccgactcttttacctcttaaggcgcgcc

SEQ ID NO: 98 - DNA, 400 bp, Arabidopsis thaliana
ttaattaaatggaatccaattcatttttcttcaatccatctgcttcacatggcaacatcatgttcttctttaggaatctcaatcccgttgtccaaggttcttttctcactctcataatcttatttcatcatgttggaagtttccctgtttttgttttgttgtcttgtgaataaaatgttacgaacacacacacatcagaaccaatttgaatatgaataataacattcgactattgacaacagctgttcgtttgaattcacgaagggggaggaacaagatcgatgatgaacaaggaggaaacatcaaagcgaaggcccttctttagctctcttgaggatctttacgacgatgactattacgacgaccaattgctgaaaataagaggctgttagggcgcgcc

SEQ ID NO: 99 - DNA, 880 bp, Arabidopsis thaliana
ttaattaagttgatgaagaggatctgaagaagctgagatttaggaatgatgatgggttttgctgtatcggatgaattgttgggtactgttgctccgattgtggtgtactggttgtattctgggatttatgtagcgctctcctctttagagagttatagattgcattcaaaggttgaagaagaagagaagaatcttgtatcgaaatcttctgttgtgaaaggtgttcttgttcaacaggttgttcaagctgttgtcgctatccttttgttcacggtgacgggaagtgatgccgaagcagacaaagcgcaacagttttccttcttggtcctagcaagacagtttgtgactgccatgatagtcctcgacacatggcaatacttcatgcatcgatatatgcatcagaacaagttcttatacaaacatatccactctcaacaccaccgtcttatcgtcccttatgcatatggagctttatacaaccatccagtggaaggtcttctcttggatacaattggaggcgccttatctttcctagtctctggtatgtctccaagaacttccatcttcttcttctctttcgccacgatcaaaaccgtggacgaccattgcggtctctggctacctggaaacttattccatatggtcttcaagaacaactcggcttaccacgatatccatcatcagctctatggaaccaaatacaatttctctcagcctttctttgtcatgtgggatcggattcttggaacttacatgccttactcgcttgagaaaagagaagatggaggattcgaagctcgcccgactaaagaattcaaagacgattaagattttggagtttggatatatgttatgtatctgccctgaggttgggcgcgcc

SEQ ID NO: 100 - DNA, 880 bp, Arabidopsis thaliana
ttaattaaggagatccatcgtgttttctacttctgttggtatccatggattctctcgttgaatccggttggaagtaccttgttacgcatttcagtgactttcaactggcgtgtattgggagttttatacttcatgaaagcgtgtttttcttgtctggactcccttacattttcctagaaaggactggttttctgagcaactacaaaattcagaccaaaagtaatactcctgaagcccagggaaaatgcattgctcgactattactttaccattgctgcgtaaacttgcccctcatgatggcgtcgtatcctgtattcagattcatgggcatggaaagcagttttcctctgccgtcctggaaagtggtgtctgcccagatcttattctacttcatcattgaggattttgtattctattggggtcacaggatcttgcatactaaatggctctacaagaacgtgcacagtgtgcatcatgagtacgcgacaccgtttggtttgacatcagaatatgctcatcccgctgaaattctgttccttggttttgctaccattgttggtccggctctcaccgggcctcacctgatcaccctttggttatggatgatgctcagagttattgagacagttgaggcacattgtggttatcatttcccatggagcccctcgaattttcttcctctatacggcggtgctgacttccatgactaccatcatcgattactctacacaaagtctggcaactactcatcaacgtttgtttacatggactggatctttggcaccgataaaggttacagaaaacttaaggccctaaaagaaacctgacaacaaacaaacgtgaaattcgattcccgagagaggtcttgttctggcgcgcc

SEQ ID NO: 101 - DNA, 459 bp, Arabidopsis thaliana
ttaattaaaacagacacaaaagcatataagcaaaaaatacaaaacaaattatggcttcttcatcactcatcagtgtagccctaaccctaatcttgatcttccacctcatgccggaaacaaccgtcgctcgtcgtcttactgatcagaagccgagtgatgaagtagtcaccaccactaccgacgaagctaacaacctaccgtttccaccgggcttgccatttggcggtgttcctccgttaccgtcactttttccgccgtttgtaccttctccgttccctggaaatatcccacgtttaccatttccgtttccgtttccgacatcacctccggcgccatcccttcctggtttccctggctttacgtttcctcccctgccattcctcacaccgccacctctgtgaacgtatacgttagcgccgttataatgttagttatcccgttggaataatctggcgcgcc

SEQ ID NO: 102 - DNA, 2888 bp, Sinorhizobium meliloti
aactctttgtttcttgtttgttgattaacccttaattaatccgggcgcgcctgatttatcacaagtttgtacaaaaaagcaggctcctgcaggaccatgactgcaatcatcgacatcatcggccgagagatcctcgacagccgcggcaacccgaccgtcgaggtcgatgtccatctcgaggatggcagtttcggtcgcgcggcggttccctcgggcgcctccaccggtgcgcatgaagcggttgagctgcgcgatggcggcacgcgttatctcggcaagggcgtcgagcgcgccgtcgatgcggtgaacggcgagatattcgaggcgatcggcggcctcgacgctgaaaatcagatccagatcgaccgtaccatgatcgagctcgacggcacgccgaacaagtcgcgcctcggcgccaacgccattctcggcgtttcgctcgccgtcgcgaaggccgctgcggaagcctccggcctgccgctctaccgctatgtcggcggcccgaacgcgcatctcctgcccgttccgatgatgaacatcatcaatggcggcgcgcacgccgacaatccgatcgacttccaggaattcatgatcatgccggtcggcgccgagaccctgaaggacgccgtccgcatgggttcggaagtcttccacacgctgaagaagcagctcgctgcggatggccataacaccaatgtcggcgacgaaggcggctttgcgccgggcctcgcctcggcgcctgcagccctcgacttcatcatgaagtcgatcgagaaggccggttacaaacctggcgaggacatgtatgtcgccctcgactgcgcttcgaccgaattcttcaaggacggcaaatacgtgctcgagggtgagggccgtacgctggagccgggcgccatggccgagtatctcgccgagctcgccggcaaatatccgatcatctcgatcgaggacggcatggctgaagacgattgggacggctggaaatccctgaccgacctcgtcggcaacaagtgccagcttgtcggcgacgacctgttcgtcaccaattctgcgcgcctgcgtgacggcatcaagatgggcgtcgcgaactccatcctcgtcaaggtcaaccagatcggatcgctttcggaaacgctcgatgcggtcgagaccgcgcacaaggcgcgttataccgccgtcatgtcgcaccgctccggcgagaccgaggattcgacgattgccgacctcgcggtcgccaccaattgcggtcagatcaagaccggctcgctcgcacgttccgaccggctcgccaagtacaaccagttgatccgtatcgaagaacagctcggcccgcaggcgcaatatgccggccgctcggtcctgcgtggatgactcgagacccagctttcttgtacaaagtggtgataaattggagctctgcagagctttcgttcgtatcatcggtaactctttgtttcttgtttgttgattaacccttaattaatccgggcgcgcctgatttatcacaagtttgtacaaaaaagcaggctcctgcaggaccatgactgcaatcatcgacatcatcggccgagagatcctcgacagccgcggcaacccgaccgtcgaggtcgatgtccatctcgaggatggcagtttcggtcgcgcggcggttccctcgggcgcctccaccggtgcgcatgaagcggttgagctgcgcgatggcggcacgcgttatctcggcaagggcgtcgagcgcgccgtcgatgcggtgaacggcgagatattcgaggcgatcggcggcctcgacgctgaaaatcagatccagatcgaccgtaccatgatcgagctcgacggcacgccgaacaagtcgcgcctcggcgccaacgccattctcggcgtttcgctcgccgtcgcgaaggccgctgcggaagcctccggcctgccgctctaccgctatgtcggcggcccgaacgcgcatctcctgcccgttccgatgatgaacatcatcaatggcggcgcgcacgccgacaatccgatcgacttccaggaattcatgatcatgccggtcggcgccgagaccctgaaggacgccgtccgcatgggttcggaagtcttccacacgctgaagaagcagctcgctgcggatggccataacaccaatgtcggcgacgaaggcggctttgcgccgggcctcgcctcggcgcctgcagccctcgacttcatcatgaagtcgatcgagaaggccggttacaaacctggcgaggacatgtatgtcgccctcgactgcgcttcgaccgaattcttcaaggacggcaaatacgtgctcgagggtgagggccgtacgctggagccgggcgccatggccgagtatctcgccgagctcgccggcaaatatccgatcatctcgatcgaggacggcatggctgaagacgattgggacggctggaaatccctgaccgacctcgtcggcaacaagtgccagcttgtcggcgacgacctgttcgtcaccaattctgcgcgcctgcgtgacggcatcaagatgggcgtcgcgaactccatcctcgtcaaggtcaaccagatcggatcgctttcggaaacgctcgatgcggtcgagaccgcgcacaaggcgcgttataccgccgtcatgtcgcaccgctccggcgagaccgaggattcgacgattgccgacctcgcggtcgccaccaattgcggtcagatcaagaccggctcgctcgcacgttccgaccggctcgccaagtacaaccagttgatccgtatcgaagaacagctcggcccgcaggcgcaatatgccggccgctcggtcctgcgtggatgactcgagacccagctttcttgtacaaagtggtgataaattggagctctgcagagctttcgttcgtatcatcggt

SEQ ID NO: 103 - DNA, 992 bp, Bacillus subtilis subsp. subtilis str. 168
gctttcaaactctttgtttcttgtttgttgattaacccttaattaatccgggcgcgcctgatttatcacaagtttgtacaaaaaagcaggctcctgcaggaccatgataaaaaaagcgatcattcctgcaggcggattcggcacgagaaatctgccggtgacgaaggtgattccgaaagaaatgtttccggtaggatctaagcctgtgattcattatcttgttgaagaattaaaggagtcaggcattgaggacattttgatggttgtatcgagccataaaaatctgattgtcgactattttgattcctctttggcacttgaggcttttttggcctctaagaataaactgcatttacttagagagcatcccattccggatatacggattcactatgtgcggcagccttatgcaaagggtcttggcgacgccatttctttcggaaagcaatttgcaggaggagagccttttgccgtcgttttgccagatgatctgattttttccgccaatcagccggctttggggcagctgattgaagcgtatacgaaatatcagtccagtgtgatcggcttaaaagaaacaaaaacggaggatttacatcattacggggtgataaaaggggagcctgttgaaaaagggctttatcgcatacaggatattgtggaaaagcctaaacaaaaccctccgtctcattttgccgcagcagggcgttatattttcacaccggatatttttaatgagctggaggcattagaagctgatagcggaggagaagtgcaggtaacggatgcgataaaagcttcgctcggggcatgtaccgtatacgggaaattgctagagggcgagcggtatgacatcggcctgcaaaaggattatctgaagctgatttacgatatgctgaaaacggaaaagaacccccaataactcgagaccagctttcttgtacaaagtggtgataaattggagctctgcagagctttcgttcgtatcatcg

SEQ ID NO: 104 - DNA, 984 bp, Escherichia coli K12
gctttcaaactctttgtttcttgtttgttgattaacccttaattaatccgggcgcgcctgatttatcacaagtttgtacaaaaaagcaggctcctgcaggaccatggaaaagaaaatcggttttattggctgcggcaatatgggaaaagccattctcggcggtctgattgccagcggtcaggtgcttccagggcaaatctgggtatacaccccctccccggataaagtcgccgccctgcatgaccagttcggcatcaacgccgcagaatcggcgcaagaagtggcgcaaatcgccgacatcatttttgctgccgttaaacctggcatcatgattaaagtgcttagcgaaatcacctccagcctgaataaagactctctggtcgtttctattgctgcaggtgtcacgctcgaccagcttgcccgcgcgctgggccatgaccggaaaattatccgcgccatgccgaacactcccgcactggttaatgccgggatgacctccgtaacgccaaacgcgctggtaaccccagaagataccgctgatgtgctgaatattttccgctgctttggcgaagcggaagtaattgctgagccgatgatccacccggtggtcggtgtgagcggttcttcgccagcctacgtatttatgtttatcgaagcgatggccgacgccgccgtgctgggcgggatgccacgcgcccaggcgtataaatttgccgctcaggcggtaatgggttccgcaaaaatggtgctggaaacgggagaacatccgggggcactgaaagatatggtctgctcaccgggaggcaccaccattgaagcggtacgcgtactggaagagaaaggcttccgtgctgcagtgatcgaagcgatgacgaagtgtatggaaaaatcagaaaaactcagcaaatcctgactcgagacccagctttcttgtacaaagtggtgataaattggagctctgcagagctttcgttcgtatcatcg

SEQ ID NO: 105 - DNA, 1081 bp, Nostoc punctiforme
gctttcaaactctttgtttcttgtttgttgattaacccttaattaatccgggcgcgcctgatttatcacaagtttgtacaaaaaagcaggctcctgcaggaccatgactataaaatttggtttaattggtggtggggtaatgggagaagcgctcttatcccgccttatcgcgcgtggaatttatcaatcatcagaagtcatagttagcgaaccgctaccttcacgtctagattttttgcaacagcaatacggtgtttctgtgacgacagataatagtgaggttttcacccaagccaaagaagttgtctttttggcagtgaaaccgcaggtgttcagcgcgatcgcacaagaattagcagatattgatattattaatagagaacaatcacccttgataatttccatattggcgggtgcgcccttaaatcagctagaagctgcatttgtgcaattgccagttatcagagcaatgcccaacactccagccactgtgggagcaggaattaccgccatttgtttaggtgcatatactaataccaagcatcaccaaatagcacaacaagttttttctgctgtgggcgaagttgtggaagtctcagaagggttgatggatgcagtcacagggctatctggtagcggccccgcttacgtggcgctgctagtagaatcacttgctgatggcggagtatccgcaggtttacctagagcaattgccaatcaattagcattgcaaaccgtactgggaacagcgaaactgttgtatgaaaccaaaatgcacccagcagaacttaaagatcgcgttaccagtcccggtggtacaactattgccggaattgccaaactagaacaggcaggatttcgttcagctttaattgaagcagtgaaagctgccacagagcgatcgcaagaactgggaaaataataaagagttctttgtcattcgtcctttatcctttgtgaaaaactcatgactaatgactaatgacaaatgaccaataacgaagttgacactcgagacccagctttcttgtacaaagtggtgataaattggagctctgcagagctttcgttcgtatcatcg

SEQ ID NO: 106 - DNA, 1244 bp, Sinorhizobium meliloti
aactctttgtttcttgtttgttgattaacccttaattaatccgggcgcgcctgatttatcacaagtttgtacaaaaaagcaggctcctgcaggaccatgcctaagatgaaagccgcgatcttcgtcgcgcctggtcgcattgtgcttgacgagaagcagatccccgacgtcggtccgctcgacgcgctcatgcggattacgaccaccacaatatgcggcaccgacgtccacattctaaggggtgagtacccggtcgcacgcggcctgacgatagggcacgagccggtgggcgtgattgagaagctcgggtccgccgtgcggggatacagcgagggtcagcgtgtgatcgccggggcaatctgcacctcgggccacagtaatgcggccctgtgcggctgccatgcccaggacggccccgggacgaaacacggttggaaaggcatgggcggctggaagtttggcaacaccattgacggttcgcaggccgagtacgtcctcgtgcctgacgccatggcaaacttggctccagtgccggacgggctggccgacgagcaggtgctgatgtgccccgatatcatgtccacgggcttctctggggcggagagcggtgccgtccgcgttggcgacgccgtggcggtgttcgcgcaggggccgattggactgtgtgcgactgcgggtgcgcgtctcatcggcgcaacgacgattatcgcggtcgagagcgtcccggcccgcatggagatggcccgccgcatgggcgccgacgatgtcgtggatttcacggtatcggaccccactgcagaaatcatgcgtctgaccgacgggcgcggggtagatgtggccattgaggcgctcggaagacaggagaccttcgaaggtgctcttcgcgtccttaggcccggaggtacgctgtcgtcccttggcgtctattcaggtgatctaagaattccactcgacggcttcctcgcaggtttgggagaccatactattcggaccaccctctgcccgggcggcaaggaacgcatgcgtcgtttgatggaggtgatcgcatccggccgcgtcgacacgcgtcctctggtgactcaccgcttcaagctggaccaaatcgaggaggcatacgacctttttgcaaaccagcgtgacggggtgctcaaggtcgcgatcaatccatgactcgagacccagctttcttgtacaaagtggtgataaattggagctctgcagagctttcgttcgtatcatcggtt

SEQ ID NO: 107 - DNA, 1385 bp, Agrobacterium tumefaciens str. C58
aactctttgtttcttgtttgttgattaacccttaattaatccgggcgcgcctgatttatcacaagtttgtacaaaaaagcaggctcctgcaggaccatggaagagtttcataaggtccggcgtctgccgcaatacgtcttcgaacaggtcaaccgtttgaaagcgagcgcgcgagcggccggggccgatatcatcgatctcggcatgggtaatcccgaccttccgacccccaaggccatcgtcgacaagctctgcgaagtcgttcaggacccgcgcacccatcgttattcctcgtccaagggcattcccggccttcgccgcgcacaggccggctattatgcccgccgtttcggcgtgaagctgaaccccgatacgcaggtcgtcgccacgcttggctccaaggaaggtttcgccaatatggcgcaggccatcacggcaccaggtgacgtgatcctgtgcccgaacccgacctatccgatccatgccttcggcttcctgatggcgggcggcgttatccgttcgatgaatgtggagccggatgagagcttcttcgggcctttagagcgggcggtgcgtcactctattccaaagccgctggcgctaatcgtcaactatccgtcgaacccgacggcgcatgtcgcatcgctcgatttctacaaggatgtgatcgcgtttgcgaagaagcacgaaatcatagtgctctccgatcttgcctattcggaaatctacttcgacgacaacaatccgccgccttcggttctcgaagttcccggcgcgatcgacgttgcggtggagttcacctccatgtcgaagaccttctccatgcccggctggcgcatgggcttcgctgtcgggaacgagcggctgatcgcggcgctgacccgcgtgaagtcctacctcgattacggcgccttcacgccgatccaggtggcggcgacgcatgcgctgaacggtgacggttccgacatcgccgaagtgcgcagcgtctatcgccgccgccgcgatgtcatggtcgatacgttcggcaaggccggcttcgaggttccgccgccggcagcgacgatgttcgcctgggcgaagatcccggaaaaattccgccatctcggcagcctggagttttccaagcttctggtcgagaaggcagatatcgccgttgctcccggcatcggctttggcgaaatgggcgatgattacgtccgtcttgcgcttgtggaaaacgagcatcgaattcgtcaggcagcgcgcaatctgaagcgtttcctgtcgagtgctgacgaaacgatgcacaatgtcgtttcgctcaacgcccacagatagctcgagacccagctttcttgtacaaagtggtgataaattggagctctgcagagctttcgttcgtatca

SEQ ID NO: 108 - DNA, 1647 bp, Bacillus subtilis subsp. subtilis str. 168
gctttcaaactctttgtttcttgtttgttgattaacccttaattaatccgggcgcgcctgatttatcacaagtttgtacaaaaaagcaggctcctgcaggaccatgagtcaaacattattcattgacggagaatggatcagtgccgaaaaagaacagatccgcagtattatcaacccatttaatcaagaagaaattgcaactgtaagcgagggagggcgagaggacgccatcaaagcaatcgcagccgcacgtagagcatttgacaaaggagaatggtcatcgctatccgggcttgaacgcggaaaaattgttctgaaaattgcggaattaatcagacgcgatcttgaggagctggctgagcttgaatctcttgatacaggaaaaacactcgaagaaagcaaggccgatatggacgatatcgccaatgtttttcaatattacgccggcttggcagacaaagatggcggagagatcatttcatctccgattcctgattcagaaagcaaaattattagggagccaatcggggtttgcggccagatcactccatggaattatccgctccttcaagcgagctggaaaatcgcccctgcactggccgcaggaaacacaatcgtcatgaagccgagtgagattacgccgctgacgacaatcaaagtctttaagctgatggaagaagccggtgttccaaaaggtgtcgcaaatcttgttcttggaccgggagccacagtgggcgacgagcttgccgtaaacaaagacgtcgatttgatttcatttacgggcggaattgaaacaggcaaaaaaatcatgcgggcggcaagcggaaacgtcaaaaaaatcgcccttgaacttggcgggaaaaacccaaatattgttttcaaggacgcggatttagaagttgcggttgatcaggccttaaacgctgtatttttccacgccggccaagtatgctctgcaggttcccgcttgcttgttgaggatgccattcatgatcaatttttggcggagctggtcaaacgggcaaaacgcataaaactcggaaacggttttcatgctgagacagaaagcggtccgcttatttcggcggagcacagggcaaaggtagaaaaatatgtagagatcggaatagaggaaggcgcgaagctggagacaggaggcaaacgcccggaagatcctgagcttcaaaacggctttttctatgaacctactattttctcaaactgtaattctgacatgagaatcgttcaggaagaggttttcggtcctgtattgacagtcgaaaccttcagctctgaagaagaggtaatcgagcttgcgaatgataccatctatggcttggctggagcggtatggtcaaaagacattgaaaagtgcgaacgggtagcagcccgcttgagaatgggaaccgtttggatcaacgattttcatccgtactttgcacaagcgccatggggcggatataagcaatccgggttcggacgcgagcttggaaaaataggccttgaagaatacacagaagtcaaacatgtataccgcaatacaaaaccggcagcggttaactggtttaattcataactcgagacccagctttcttgtacaaagtggtgataaattggagctctgcagagctttcgttcgtatcatcg

SEQ ID NO: 109 - DNA, 992 bp, Bacillus halodurans
aactctttgtttcttgtttgttgattaacccttaattaatccgggcgcgcctgatttatcacaagtttgtacaaaaaagcaggctcctgcaggaccatggaaattaaaaaagcgattattccagcagctggatatggaactagatgtcttccgattactaaagtcgttccgaaagagatgttccctattaatggtaaagcagctctccattacattgtggaagaagctgttgcagccggaattgaagaaattttcatcattctttcgagaaatcgcacgttgattatggattactttgatcggtccattgaattggaaacatttctgaaaaaaatgaataagcagcatctcctagaaaagttagctcttcctgatgtaaccatccaatttattcgtcaacctcatgccaacggattaggggatgccattcgattaggagaacgatttgtcaatggagaaccctttgctgttttgttaccagatgatttgtttatttctccaaaacacacgtccgtattagcagaactagtgaacgtttataagcaatacaataaaagtattattgggctccaagaggtcgagtcggaactattaaagcgatatggagtcattgctggtcatccactgtcaagtgatgaatataaaatagagaatgtggtagaaaaaccacagacaaatcctccgtctaacttagccattgttggacggtatatatttgaacccgccatcttccaaaagctaaaaaatatagggattggcaaagggggagaagtacaattaacggacgcaataaaggctttgcttatttcgcataccgttataggaaaaatcatcgaagggtgtcgttatgacatcggcattgaggaagactaccaacgtttaatacaagagtttagcgaaaagaaaagctctacgtaactcgagacccagctttcttgtacaaagtggtgataaattggagctctgcagagctttcgttcgtatcatcggtt

SEQ ID NO: 110 - DNA, 1191 bp, Desulfitobacterium hafniense
aactctttgtttcttgtttgttgattaacccttaattaatccgggcgcgcctgatttatcacaagtttgtacaaaaaagcaggctcctgcaggaccatgaccaataccgtcaggaagatcgctgttcttaccagcgggggggatgctccgggaatgaatgcggccattcgggcagtggttcgcaagggaatttatcatggacttgaggtttttgggattcgcaaggggtatgaaggcctgattcatggggaattcataaccatgcatctgggagcagtagcggatatcattcataggggcggtaccatgctcatgaccgcacgttcccaggagatgctcaccccggagggacaaaaaaacgccgcggctcaattgcgttatcgcggtatcgatgcgctgattgtgatcgggggggatggttcttttcggggagcacagaccttgtctgctcaaggaatagccatcgtcggtataccgggtaccattgataacgatattaccggcacggatttaactatcggatttgatactgccgtcaataatgtggttcaagcggttagtaaaatccgggatacggcaacatcccatgatcgaacctttttagtggaagtcatgggacgggattgcggcaacatcgccttgcaatccggcgtagcctgcggtgcagaatccatccttgtgccggaaatcgaaccggatctggatgatattgtcgcgaaattggaacgcggccaccaacggggcaaacatcacagtatcattatggtggcagaaggggctatgagtgcttggaatctgggggaagaactccgtcagagaaccggctttgaaacccgggtcaccatcttaggccatatccaaaggggcggcaatccaagtgccctcgatgtggtcctggcctcgcaaatgggcgggaaagcagtggagatactctgcgccggggaaaccgatcggatgacagcctgtgtcaaccaggaaatccaatccctgcctttggaggtggcttatggtgagcgcaaacccttcaacaaagttctctatgatctggccaatcaattggctatctgagcaaaagaaatcagcggtctatagaggaaatcaggaagcgcaggtagaatctcgagaccagctttcttgtacaaagtggtgataaattggagctctgcagagctttcgttcgtatcatcggtt

SEQ ID NO: 111 - DNA, 1102 bp, Xenorhabdus nematophilus
gctttcaaactctttgtttcttgtttgttgattaacccttaattaatccgggcgcgcctgatttatcacaagtttgtacaaaaaagcaggctcctgcaggaccatgtcagttataaacaaaaaggtaaaaaaagctgttattcctgttgctggtttgggaacaaggatgttaccggctaccaaagccattcctaaagaaatgctcccgctggttgataaaccacttattcagtatgtcgttaatgaatgtattaaggcgggtattaatgaaattattctggttacacattcatccaaaaactctatagaaaaccattttgataccagttttgagctggaagcgatccttgaaaggagggtcaagcgccagttgctagatgaagtacagtcaatttgcccaaatcatgtgacaattatgcaaacccgtcaggggatcgcaaaaggattgggccatgcggtgttatgtgctaagccactgattggtgatgaaccatttgctgtcattctgccagatgtcattttggatgaatacagtacagatttgtcgaaatataatttgagtgaaatgttgtcacgctttaatagcagtggagcgagccagattttggttgaacccgttcctttggaaagcgtcgccgattatggggttgttgattgccttggtgaaaacctgcaacctggtgacagcaaacctattgttcgtgttgttgaaaaacccaaaccggaagaagccccatcgaatctttccatcgttggtcgctatgtgttgtctgaaaaaatctggccattattggcgaaaactgcacctggtgcaggagatgaaattcagctgacagatgccattgctatgctaatggaaaaagaacccgttgaagcttatcacttgcaaggccgcagtcatgattgtggtaataaattgggttatatgcaggcattcgtcgaatatggtatgaagcataaggacttaggtgcagcattcaaggattggatcatgacattgcagaatcagatcgaaaaataatctattggtaactcgagacccagctttcttgtacaaagtggtgataaattggagctctgcagagctttcgttcgtatcatc

SEQ ID NO: 112 - DNA, 1576 bp, Escherichia coli K12
tttcttgtttgttgattaacccttaattaaacaatggcttcctctatgctctcttccgctactatggttgcctctccggctcaggccactatggtcgctcctttcaacggacttaagtcctccgctgccttcccagccacccgcaaggctaacaacgacattacttccatcacaagcaacggcggaagagttaactgcatgcaggtgtggcctccgattggaaagaagaagtttgagactctctcttaccttcctgaccttaccgattccggtggtcgcgtcaactgcatgcaggccatgattgagaacattaccgccgctcctgccgacccgattctgggcctggccgatctgtttcgtgccgatgaacgtcccggcaaaattaacctcgggattggtgtctataaagatgagacgggcaaaaccccggtactgaccagcgtgaaaaaggctgaacagtatctgctcgaaaatgaaaccaccaaaaattacctcggcattgacggcatccctgaatttggtcgctgcactcaggaactgctgtttggtaaaggtagcgccctgatcaatgacaaacgtgctcgcacggcacagactccggggggcactggcgcactacgcgtggctgccgatttcctggcaaaaaataccagcgttaagcgtgtgtgggtgagcaacccaagctggccgaaccataagagcgtctttaactctgcaggtctggaagttcgtgaatacgcttattatgatgcggaaaatcacactcttgacttcgatgcactgattaacagcctgaatgaagctcaggctggcgacgtagtgctgttccatggctgctgccataacccaaccggtatcgaccctacgctggaacaatggcaaacactggcacaactctccgttgagaaaggctggttaccgctgtttgacttcgcttaccagggttttgcccgtggtctggaagaagatgctgaaggactgcgcgctttcgcggctatgcataaagagctgattgttgccagttcctactctaaaaactttggcctgtacaacgagcgtgttggcgcttgtactctggttgctgccgacagtgaaaccgttgatcgcgcattcagccaaatgaaagcggcgattcgcgctaactactctaacccaccagcacacggcgcttctgttgttgccaccatcctgagcaacgatgcgttacgtgcgatttgggaacaagagctgactgatatgcgccagcgtattcagcgtatgcgtcagttgttcgtcaatacgctgcaggaaaaaggcgcaaaccgcgacttcagctttatcatcaaacagaacggcatgttctccttcagtggcctgacaaaagaacaagtgctgcgtctgcgcgaagagtttggcgtatatgcggttgcttctggtcgcgtaaatgtggccgggatgacaccagataacatggctccgctgtgcgaagcgattgtggcagtgctgtaactcgagacccagctttcttgtacaaagttggcattataagaaagcattgcttatcccccaaatacccagcaaattggagctctgcaga

SEQ ID NO: 113 - DNA, 1545 bp, Bacillus subtilis subsp. subtilis str. 168
ttcttgtttgttgattaacccttaattaaacaatggcttcctctatgctctcttccgctactatggttgcctctccggctcaggccactatggtcgctcctttcaacggacttaagtcctccgctgccttcccagccacccgcaaggctaacaacgacattacttccatcacaagcaacggcggaagagttaactgcatgcaggtgtggcctccgattggaaagaagaagtttgagactctctcttaccttcctgaccttaccgattccggtggtcgcgtcaactgcatgcaggccatggaaaaacaatgtgtagccatgctccttgccggcgggaagggcagccgtctcagcggattaacaaaaaatatggccaaaccggctgtatctttcgggggaaaatacaggattattgattttaccctaagcaactgttctaattcaggcatagacacagtcgggattttaacgcaatatcagccgctcgagctgaattcctatattgggatcggcagtgcatgggacctggatagatataatggcggcgtgacggttttacccccttatgccgagtcatcagaagtcaaatggtataaagggacggcaagctccatttatgaaaatctcaattatttgaatcagtatgatcctgagtatgtactgattttatcaggagatcacatatacaaaatggactacggcaaaatgcttgattatcacattgaaaagaaagcagatgtgaccatctctgtcatcgaagtgggctgggaggaagcaagccggttcggcatcatgaaggccaatccagatgggacgatcacacattttgatgaaaagcccaaattccctaagagcaatcttgcctcaatgggaatttatatattcaattggccgcttttgaaacagtatcttgagatggacgatcaaaacccttattctagccacgacttcggcaaagacattattccactgcttttggaagagaaaaagaagctttctgcttatccgttcaagggatattggaaggatgtcggaacggtgcagagcttgtgggaagccaatatggatttgttaaaagaggactcggagctgaagctgtttgaacgcaaatggaaaatttactccgtcaatccaaatcagcctccgcaatttatttcatctgatgcgcaggttcaagattcgcttgtgaacgaaggttgtgttgtatatggaaatgtgtctcactccgttctttttcaaggtgtgactgttggtaagcatacgactgttacatcatccgtcataatgccggatgtgacgattggggagcatgtagtcattgaaaatgccatcgttcctaatgggatggtgctgccggatggcgcagtgattcgctccgaaaaagacattgaagaggtgctgctcgtttcagaggaatttgtagaaaaagaattgatttaactggagacccagctttcttgtacaaagttggcattataagaaagcattgcttatcccccaaatacccagcaaattggagctctgcagagctttcgttcgtatcatc

SEQ ID NO: 114 - DNA, 1611 bp, Pseudomonas fluorescens PfO-1
aactctttgtttcttgtttgttgattaacccttaattaatccgggcgcgcctgatttatcacaagtttgtacaaaaaagcaggctcctgcaggatcatgaccaagcgctatgacaactacatcaacggtgaatgggtcgccggcaacgattactcggcgaacatcaacccgtccgaactgagcgataccatcggcgattacgccaaggctgacctggctcaagtcaatgccgccatcgacgccgctcgcgccgcgttcccggcgtggtcgacttcgggcattcaggcccgtcacgactcgctggacaaagtcggcactgaaatcctcgcccgccgcgaagaactcggcaccctgctggcccgggaagagggcaagaccctgcccgaagccatcggcgaagtgacccgcgccggcaacatcttcaagttcttcgccggtgaatgcctgcgtctgtccggcgactacgtgccgtcggtgcgtccgggcgtcaacgttgaagtcacccgcgaagccctcggcgtggtcggtctgatcaccccgtggaatttcccgattgccatcccgtcgtggaaaatcgccccggccctggcctacggcaactgcgtggtgttgaagccggcggatctggtgccgggctgtgcctgggcgctggccgaaatcatctcccgcgcaggcttcccggccggcgtgttcaacctggtgatgggcagcggtcgcgtggtcggtgaagcactggtcaacagcccgaaagtcgacggcatcagcttcaccggctccgtcggtgtgggccgtcagatcgcggtcaattgcgtgtcgcgtcaggccaaggttcagctggagatgggcggcaagaacccgcagatcattctcgacgacgccgacctcaagcaggcggtcgagctgtcggtgcagagcgcgttctactccaccggccagcgttgcacggcatcgagccgtctgatcgtcaccgccggcattcacgacaagttcgtcgaagccatggccgagcgcatgaagtcgatcaaggtcggtcacgcgctgaaggccggcaccgacatcggtccggtggtctcgcaagcgcagcttgagcaggacatgaagtacatcgacatcggtcagtccgaaggtgcgcgtctggtcagcggcggtggtttggtgacgtgtgacaccgagggctacttcctcgcgccgaccctgtttgccgacagcgaagcctcgatgcgcatcagccgcgaagagatcttcggcccggtggccaacatcgtccgcgtggccgattacgaggctgcactggccatggccaacgacaccgaattcggtctgtcggcgggcatcgccaccacgtcgctgaagtacgccaaccacttcaagcgtcattcccaggccgggatggtgatggtcaacctgccgaccgccggtgtcgattatcacgttccgttcggtggccgtaagggttcatcctatggctcacgtgagcaaggccgctatgcacaagagttctacacggtcgtgaagaccagctacatcggttcgtaactcgagacccagctttcttgtacaaagtggtgataaattggagctctgcagagctttcgttcgtatcatcgtttc

SEQ ID NO: 115 - DNA, 1731 bp, Escherichia coli K12
aatattattcatttatttgtcagctttcaaactctttgtttcttgtttgttgattaacccttaattaaacaatggcttcctctatgctctcttccgctactatggttgcctctccggctcaggccactatggtcgctcctttcaacggacttaagtcctccgctgccttcccagccacccgcaaggctaacaacgacattacttccatcacaagcaacggcggaagagttaactgcatgcaggtgtggcctccgattggaaagaagaagtttgagactctctcttaccttcctgaccttaccgattccggtggtcgcgtcaactgcatgcaggccatgagcaacaatgaattccatcagcgtcgtctttctgccactccgcgcggggttggcgtgatgtgtaacttcttcgcccagtcggctgaaaacgccacgctgaaggatgttgagggcaacgagtacatcgatttcgccgcaggcattgcggtgctgaataccggacatcgccaccctgatctggtcgcggcggtggagcagcaactgcaacagtttacccacaccgcgtatcagattgtgccgtatgaaagctacgtcaccctggcggagaaaatcaacgcccttgccccggtgagcgggcaggccaaaaccgcgttcttcaccaccggtgcggaagcggtggaaaacgcggtgaaaattgctcgcgcccataccggacgccctggcgtgattgcgtttagcggcggctttcacggtcgtacgtatatgaccatggcgctgaccggaaaagttgcgccgtacaaaatcggcttcggcccgttccctggttcggtgtatcacgtaccttatccgtcagatttacacggcatttcaacacaggactccctcgacgccatcgaacgcttgtttaaatcagacatcgaagcgaagcaggtggcggcgattattttcgaaccggtgcagggcgagggcggtttcaacgttgcgccaaaagagctggttgccgctattcgccgcctgtgcgacgagcacggtattgtgatgattgctgatgaagtgcaaagcggctttgcgcgtaccggtaagctgtttgccatggatcattacgccgataagccggatttaatgacgatggcgaaaagcctcgcgggcgggatgccgctttcgggcgtggtcggtaacgcgaatattatggacgcacccgcgccgggcgggcttggcggcacctacgccggtaacccgctggcggtggctgccgcgcacgcggtgctcaacattatcgacaaagaatcactctgcgaacgcgcgaatcaactgggccagcgtctcaaaaacacgttgattgatgccaaagaaagcgttccggccattgctgcggtacgcggcctggggtcgatgattgcggtagagtttaacgatccgcaaacgggcgagccgtcagcggcgattgcacagaaaatccagcaacgcgcgctggcgcaggggctgctcctgctgacctgtggcgcatacggcaacgtgattcgcttcctgtatccgctgaccatcccggatgcgcaattcgatgcggcaatgaaaattttgcaggatgcgctgagcgattaatagcccaacgcaataatgtctgatgcgctgcgcttatctcgagacccagctttcttgtacaaagttggcattataagaaagcattgcttatcccccaaatacccagcaaattggagctctgcagagcttt

SEQ ID NO: 116 - DNA, 1602 bp, Escherichia coli K12
tttcttgtttgttgattaacccttaattaaacaatggcttcctctatgctctcttccgctactatggttgcctctccggctcaggccactatggtcgctcctttcaacggacttaagtcctccgctgccttcccagccacccgcaaggctaacaacgacattacttccatcacaagcaacggcggaagagttaactgcatgcaggtgtggcctccgattggaaagaagaagtttgagactctctcttaccttcctgaccttaccgattccggtggtcgcgtcaactgcatgcaggccatggcaaataaccctctgattccacaaagcaaacttccacaacttggcaccactattttcacccagatgagcgcgctggcgcagcaacaccaggcgattaacctgtcgcaaggctttcctgattttgatggtccgcgctatttacaggagcggctggcgcaccacgttgcacagggggcaaaccaatacgcgcccatgaccggcgtgcaggccttgcgcgaggcgattgctcagaaaacggaacgtttgtatggctatcaaccagatgccgatagcgatatcaccgtaacggcaggggcgacggaagcgttatacgcggcgattaccgcactggtgcgcaatggcgatgaagtgatttgttttgatcccagctatgacagttacgcccccgccatcgcgctttctgggggaatagtgaagcgtatggcactgcaaccaccgcattttcgcgttgactggcaggaatttgccgcattattaagcgagcgcaccagactggtgatcctcaacactccgcataaccccagtgcaactgtctggcagcaggctgatttcgccgctttgtggcaggcgatcgccgggcacgagatttttgtcattagcgatgaagtctacgagcacatcaacttttcacaacagggccatgccagtgtgctggcgcatccgcagctgcgtgagcgggcagtggcggtttcttcatttggcaagacctatcatatgaccggctggaaagtgggttattgtgttgcgccagcgcccatcagcgccgaaattcgcaaggtacatcagtatctgaccttttcggtgaataccccggcacagctggcgcttgctgatatgctacgtgcagaacctgagcattatcttgcgttaccggacttttatcgccagaagcgcgatattctggtgaatgctttaaatgaaagccggctggagattttaccgtgtgaaggtacatactttttgctggtggattacagcgcggtttctaccctggatgatgttgagttttgccagtggctgacgcaggagcacggcgtagcggcgattccgctgtcggtgttttgcgccgatcccttcccacataaactgattcgtctctgttttgccaagaaggaatcgacgttgctggcagcagctgaacgcctgcgccagctttagctatttaaccgtccaggcgcgggaatattgacggtcggcaaacgtcgagacccagctttcttgtacaaagttggcattataagaaagcattgcttatcccccaaatacccagcaaattggagctctgcagagctttcgttcgta

SEQ ID NO: 117 - DNA, 1661 bp, Escherichia coli K12
ctttgtttcttgtttgttgattaacccttaattaaacaatggcttcctctatgctctcttccgctactatggttgcctctccggctcaggccactatggtcgctcctttcaacggacttaagtcctccgctgccttcccagccacccgcaaggctaacaacgacattacttccatcacaagcaacggcggaagagttaactgcatgcaggtgtggcctccgattggaaagaagaagtttgagactctctcttaccttcctgaccttaccgattccggtggtcgcgtcaactgcatgcaggccatggcccccattgaaaaatccagcaaattagagaatgtctgttatgacatccgtggtccggtgctgaaagaagcaaaacgcctggaagaagaaggtaacaaggtactgaaactgaacatcggcaacccagccccgttcggttttgacgcgccagatgaaatcctcgttgacgtgatacgcaacctgcctaccgctcaagggtattgcgattccaaaggtctttactccgcgcgtaaagccatcatgcagcactaccaggctcgtggcatgcgtgatgttaccgtggaagatatttacatcggcaatggtgtatcggagcttatcgttcaggcaatgcaggcattgctgaacagcggggacgaaatgttggttcctgcaccagattacccactctggaccgcggcggtttcgctttccagcggtaaagcggtgcattatctttgcgatgaatcctctgactggttcccggacctcgatgatattcgcgctaaaattacgcctcgtacgcgtgggatcgttattatcaacccaaataacccaaccggcgcggtatattccaaagagcttttaatggagattgtggagattgcacgtcagcataatctcattatcttcgccgatgaaatttatgacaaaattctctacgacgacgctgagcatcactcaattgcgccgctggcacctgacctgctgaccattacctttaacggactgtcgaaaacgtaccgcgttgcaggcttccgtcaggggtggatggtgttgaacgggccgaaaaaacacgccaaaggctacatcgaaggtctggaaatgctggcttcaatgcgcctgtgtgctaacgttcctgcgcaacacgccattcagaccgcgctaggtggttatcagagcatcagtgaatttattacccctggcggtcgtctttatgagcagcgtaaccgcgcgtgggaactgatcaacgatattccgggcgtttcctgcgtgaaacctcgtggtgcgctgtatatgttcccgaaaatcgacgccaaacgctttaacattcacgacgatcagaaaatggtgttggatttcctgttgcaggaaaaagttctgttggtgcaagggacggcattcaactggccgtggccggatcacttccgcattgtcacgctaccgcgtgtcgatgatatcgagctgtctttgagcaagttcgcgcgtttcctttctggttatcatcagctgtaatcttaatttcactgccggagattgcatccggcagcgttatccctcgagacccagctttcttgtacaaagttggcattataagaaagcattgcttatcccccaaatacccagcaaattggagctctgcagagctttcgttcg

SEQ ID NO: 118 - DNA, 1680 bp, Escherichia coli K12
ctctttgtttcttgtttgttgattaacccttaattaaacaatggcttcctctatgctctcttccgctactatggttgcctctccggctcaggccactatggtcgctcctttcaacggacttaagtcctccgctgccttcccagccacccgcaaggctaacaacgacattacttccatcacaagcaacggcggaagagttaactgcatgcaggtgtggcctccgattggaaagaagaagtttgagactctctcttaccttcctgaccttaccgattccggtggtcgcgtcaactgcatgcaggccatggcgcaacaaaattatctggatgaactcactccggcttttacgtctttactggcgattaaagaagcctctcgctgtttattatgtcacgacgctccctgtagtcaggcttgcccggcacagaccgatccggggaaatttattcgctcaatctactttcgtaattttaaaggcgctgccgagacaattcgcgaaaataatgccctcggtgccgtttgtgccagagtgtgcccgacggagaaattatgccaaagcggttgtacccgtgccggtgttgatgctcccattgatatcggccgcttacagcgttttgttactgattttgaacaacaaaccggaatggaaatttatcagcccggtactaaaacgctcggcaaagtcgcgattattggcgcaggtcctgccggattgcaggccagtgtgacactgacaaaccagggttatgacgtcacgatttatgagaaagaagcgcaccccggtggctggttgcgtaacggtattccgcaattccggttaccgcaatcagtgctggatgcagagatcgcccgtattgaaaaaatgggcgtgaccattaagtgcaacaacgaagtcggtaacacactcacccttgagcagctgaaagcagaaaaccgcgcggtactggtcaccgtggggttatcaagcggttccgggctaccgctgtttgagcatagtgacgttgagattgccgtcgacttcttgcaacgtgcacgacaggcgcaaggcgatatcagcattccacaaagcgcattaattatcggcggcggtgatgtcgcgatggacgtagccagcacgctgaaagttctcggctgtcaggcggtaacttgcgtagcgcgtgaagagttagatgagtttccggcaagcgaaaaagagtttaccagcgcccgggagctgggcgtttcgatcatcgatggattcacgccagtagccgtggaaggcaataaagtcacgtttaagcatgtacggttatcgggcgaactgacgatggcggcagataaaattattctcgccgtcggtcagcatgccagactagatgcctttgcggagttagagccgcagcgtaacaccatcaaaacacaaaattaccagacccgcgacccgcaagtctttgctgctggcgatattgttgagggtgacaaaaccgtggtctatgccgtgaaaaccgggaaagaagccgccgaggcgattcatcactatttagagggagcttgctcatgttaacgaaagatctttcgattactttttggggcgtgaagtttgtcgagacccagctttctgtacaaagtggcattataagaaagcattgcttatcccccaaatacccagcaaattggagctctgcagagctttcgttcgta

SEQ ID NO: 119 - DNA, 2021 bp, Escherichia coli K12
actctttgtttcttgtttgttgattaacccttaattaaacaatggcttcctctatgctctcttccgctactatggttgcctctccggctcaggccactatggtcgctcctttcaacggacttaagtcctccgctgccttcccagccacccgcaaggctaacaacgacattacttccatcacaagcaacggcggaagagttaactgcatgcaggtgtggcctccgattggaaagaagaagtttgagactctctcttaccttcctgaccttaccgattccggtggtcgcgtcaactgcatgcaggccatggcaatccacaatcgtgcaggccaacctgcacaacagagtgatttgattaacgtcgcccaactgacggcgcaatattatgtactgaaaccagaagcagggaatgcggagcacgcggtgaaattcggtacttccggtcaccgtggcagtgcagcgcgccacagctttaacgagccgcacattctggcgatcgctcaggcaattgctgaagaacgtgcgaaaaacggcatcactggcccttgctatgtgggtaaagatactcacgccctgtccgaacctgcattcatttccgttctggaagtgctggcagcgaacggcgttgatgtcattgtgcaggaaaacaatggcttcaccccgacgcctgccgtttccaatgccatcctggttcacaataaaaaaggtggcccgctggcagacggtatcgtgattacaccgtcccataacccgccggaagatggtggaatcaaatacaatccgccaaatggtggcccggctgataccaacgtcactaaagtggtggaagacagggccaacgcactgctggccgatggcctgaaaggcgtgaagcgtatctccctcgacgaagcgatggcatccggtcatgtgaaagagcaggatctggtgcagccgttcgtggaaggtctggccgatatcgttgatatggccgcgattcagaaagcgggcctgacgctgggcgttgatccgctgggcggttccggtatcgaatactggaagcgtattggcgagtattacaacctcaacctgactatcgttaacgatcaggtcgatcaaaccttccgctttatgcaccttgataaagacggcgcgatccgtatggactgctcctccgagtgtgcgatggcgggcctgctggcactgcgtgataagttcgatctggcgtttgctaacgacccggattatgaccgtcacggtatcgtcactccggcaggtttgatgaatccgaaccactacctggcggtggcaatcaattacctgttccagcatcgtccgcagtggggcaaagatgttgccgtcggtaaaacgctggtttcatctgcgatgatcgaccgtgtggtcaacgacttgggccgtaaactggtagaagtcccggtaggtttcaaatggtttgtcgatggtctgttcgacggcagcttcggctttggcggcgaagagagtgcaggggcttccttcctgcgtttcgacggcacgccgtggtccaccgacaaagacggcatcatcatgtgtctgctggcggcggaaatcaccgctgtcaccggtaagaacccgcaggaacactacaacgaactggcaaaacgctttggtgcgccgagctacaaccgtttgcaggcagctgcgacttccgcacaaaaagcggcgctgtctaagctgtctccggaaatggtgagcgccagcaccctggcaggtgacccgatcaccgcgcgcctgactgctgctccgggcaacggtgcttctattggcggtctgaaagtgatgactgacaacggctggttcgccgcgcgtccgtcaggcacggaagacgcatataagatctactgcgaaagcttcctcggtgaagaacatcgcaagcagattgagaaagaagcggttgagattgttagcgaagttctgaaaaacgcgtaactcgagacccagctttcaaatacccagcaaattggagctctgcagagctttcgttcgtatcatcggtttcgacaa

SEQ ID NO: 120 - DNA, 1858 bp, Escherichia coli K12
ttcaaactctttgtttcttgtttgttgattaacccttaattaaacaatggcttcctctatgctctcttccgctactatggttgcctctccggctcaggccactatggtcgctcctttcaacggacttaagtcctccgctgccttcccagccacccgcaaggctaacaacgacattacttccatcacaagcaacggcggaagagttaactgcatgcaggtgtggcctccgattggaaagaagaagtttgagactctctcttaccttcctgaccttaccgattccggtggtcgcgtcaactgcatgcaggccatggtaaccgaatttgtgtttatcccgattttcgcgatcgcagccggagtggcgcaatccctgcaatacttaaatcggtatcatgtgatacgcgagcctccggagcatattttgaacaggttaccttcgagcgcatcggctttagcgtgcagcgcccacgccctgaatctcattgagaagcgaacgctggatcatgaggagatgaaagcacttaaccgagaggtgattgaatacttcaaagagcatgtcaatccggggtttttagagtatcgcaaatctgttaccgccggcggggattacggagccgtagagtggcaagcgggaagtttaaatacgcttgtcgacacccagggccaggagtttatcgactgcctgggaggttttggaattttcaacgtggggcaccgtaatccagttgtggtttccgccgtacagaatcaacttgcgaaacaaccgctgcacagccaggagctgctcgatccgttacgggcgatgttggcgaaaacccttgctgcgctaacgcccggtaaactgaaatacagcttcttctgtaatagcggcaccgagtccgttgaagcagcgctgaagctggcgaaagcttaccagtcaccgcgcggcaagtttacttttattgccaccagcggcgcgttccacggtaaatcacttggcgcgctgtcggccacggcgaaatcgaccttccgcaaaccgtttatgccgttactgccgggcttccgtcatgtgccgtttggcaatatcgaagccatgcgcacggctcttaacgagtgcaaaaaaaccggtgatgatgtggctgcggtgatcctcgaaccgattcagggtgaaggtggcgtaattctgccgccgccgggctatctcaccgccgtacgtaagctatgcgatgagttcggcgcactgatgatcctcgatgaagtacaaacgggcatggggcgcacgggcaagatgttcgcctgcgagcatgagaacgtacagccggatatcctctgccttgccaaagcgctcggcggcggcgtgatgccgattggcgcgaccatcgccactgaagaggtgttttcagttctgttcgacaacccattcctgcataccaccacctttggcggcaacccgctggcctgtgcggcggcgctggcgaccatcaatgtgttgctggagcagaacttaccggctcaggctgagcaaaaaggcgatatgttgctggacggtttccgtcaactggcgcgggaatatcccgatctggtacaggaagcgcgtggtaaagggatgttgatggcgattgagtttgttgataacgaaatcggctataactttgccagcgagatgttccgccagcgcgtactggtggccggaacgctcaataacgccaaaacgatccgcattgaaccgccactgacactgaccattgaacagtgtgaactggtgatcaaagcggcgcgtaaggcgctggcggccatgcgagtaagtgtcgaagaagcgtaactcgagacccagctttcaaatacccagcaaattggagctctgcagagctttcgttcg

SEQ ID NO: 121 - DNA, 1616 bp, Pseudomonas fluorescens PfO-1
attcatttatttgtcagctttcaaactctttgtttcttgtttgttgattaacccttaattaaacaatggcttcctctatgctctcttccgctactatggttgcctctccggctcaggccactatggtcgctcctttcaacggacttaagtcctccgctgccttcccagccacccgcaaggctaacaacgacattacttccatcacaagcaacggcggaagagttaactgcatgcaggtgtggcctccgattggaaagaagaagtttgagactctctcttaccttcctgaccttaccgattccggtggtcgcgtcaactgcatgcaggccatggctatcgagatcaaagcccccactttcccggaatcggttgccgatggcaccgttgccacctggcacaaacaaccgggcgacgccgtcaagcgtgacgaactgatcgtcgacatcgaaaccgacaaagtcgtactggaagtgctggctaccgccgacggcgtgctgggcgcaatcgtcaagggcgagggcgaaaccgtcctgtccgacgaagtcctgggctccatcgttgaaggcggcgctgcatccgctgctccggctgccgctgctgctcctgccgctgccgccgctgcacctgctgccgctgatggcgaagacgacccgatcgctgctcctgctgcgcgcaagctggctgaagagaacggcatcaacatcgcttccgttgccggcaccggcaaaggcggtcgcgtgaccaaggaagacgtggttgcagccgttgctgccaagaaagccgctccggctgctgcgcctgccaaggctgctgctccggccgccgccgctcctgtgttcgccgctggcgaccgcatcgagaagcgcgttccgatgacccgcgttcgtgccaccgttgccaagcgtctggttgaagctcaatcgaacatggcgatgctgaccactttcaacgaagtcgacatgaccgaagtcatggccctgcgttcgaagtacaaggatctgttcgagaagtcccacaacggcgtacgcctgggcttcatgtcgttcttcgtgaaggctgccaccgaagcgctgaaacgcttcccggcggtcaacgcttcgatcgatggcaacgacatcgtttaccacggttatgccgacatcggcgtcgctgtttccagcgaccgcggcctggtggttccggttctgcgtaacgccgaacacatgagcctggctgaaatcgaaggcggcatcgccaccttcggcaagaaagcccgtgacggcaaactgtcgatggacgaaatgaccggcggtaccttcaccatcaccaacggtggtaccttcggttcgatgatgtcgaccccgatcgtcaacccgccgcaggcagcgattctgggcatgcacaacatcatccagcgtccgatggccatcaacggtcaggtcgtgatccgtccgatgatgtacctggcactgtcctacgatcaccgtctgatcgatggcaaagaagctgtaaccttcctggtgaccatcaagaacctgctggaagatccggctcgtctgttgctggatatctgaatttaaatacccagcaaatacccagcaaattggagctctgcagagctttcgttcgtatcatcg

SEQ ID NO: 122 - DNA, 1631 bp, Pseudomonas syringae pv. tomato str. DC3000
tattcatttatttgtcagctttcaaactctttgtttcttgtttgttgattaacccttaattaaacaatggcttcctctatgctctcttccgctactatggttgcctctccggctcaggccactatggtcgctcctttcaacggacttaagtcctccgctgccttcccagccacccgcaaggctaacaacgacattacttccatcacaagcaacggcggaagagttaactgcatgcaggtgtggcctccgattggaaagaagaagtttgagactctctcttaccttcctgaccttaccgattccggtggtcgcgtcaactgcatgcaggccatgactatcgatatcaaagccccctctttcccggaatccgttgccgatggcaccatttccaagtggtacaaaaaagagggtgatgcggtaaagcgcgacgagatgctggttgacatcgagactgacaaggttgtcctggaagtactggccgaagctgatggcgtgatgggcgcgatcaccaaggaagagggcgctatcgtcctgtccaatgaagtgcttggcacgttgaatgacggtgccacggcatctgctgctccagcacccgctgctgcgcctgcttcggcacctgccgctgcaccggctgccgctggcgaagaagacccgattgccgcgcctgctgcgcgtcaactggctgaagagaacggcatcaacctggccagcgtcaagggcaccggtaaagacggccgtatcaccaaggaagacatcgttgctgccgttgaagcgaagaaatccgctccagccgctgcgcctgctgccaagcctgtcgccgctgctgctccggtcgttgccgctggcgaccgcaccgagaagcgcgtgccgatgacccgcgttcgtgcaaccgttgccaagcgtctggtcgaagcccagtcgaacatggcgatgctgaccacgttcaacgaagtcgacatgaccgaagtcatggcgctgcgttcgaagtacaaggacctgttcgagaagtcgcacaatggcgtacgtctgggcttcatgtccttcttcgtaaaagcggccaccgaagcgctgaaacgcttcccggcagtcaacgcttcgatcgacggttctgacatcgtttaccatggttatgccgacgtcggtgtagcggtttccagcgatcgcggcctggttgtgccggttctgcgtaacgccgagcacatgagcctggctgaaatcgaaggcggcatcgccaccttcggcaaaaaagcccgtgacggtaagctgtccatcgatgagatgaccggtggcaccttcacgatcaccaacggtggtactttcggttcgatgatgtcgacgccgatcgtcaacccgccacaggctgcaattttgggaatgcacaacattctgcaacgcccgatggcagtcaacggtcaggttgtgattcgcccgatgatgtatctggcgctgtcttacgatcaccgtttgatcgatggtaaagaagcagtaactttcctcgttaccatcaagaacctgctggaagatccagctcgtctgttgctggatatctgaatttaaatacccagcaaatacccagcaaattggagctctgcagagctttcgttcgtatcatcggtttcgacaacgttcgt

SEQ ID NO: 123 - DNA, 1346 bp, Xenorhabdus nematophilus
ttcatttatttgtcagctttcaaactctttgtttcttgtttgttgattaacccttaattaaacaatggcttcctctatgctctcttccgctactatggttgcctctccggctcaggccactatggtcgctcctttcaacggacttaagtcctccgctgccttcccagccacccgcaaggctaacaacgacattacttccatcacaagcaacggcggaagagttaactgcatgcaggtgtggcctccgattggaaagaagaagtttgagactctctcttaccttcctgaccttaccgattccggtggtcgcgtcaactgcatgcaggccatggccgataaactgacttccctgcgtaaactgacaacagttgtagcagataccggggatatcgcggcaatgaaactgtatcagccgcaagatgcaacaactaacccttctctgattttgaacgctgcccagatcccgaaatatcgccaactgattgatgacgccattgaatgggcacgtgctcagagcgattcccgtgaacaacagatcattgatgccggcgataaattggcggttaacatcggtctggaaattctgaaactgatccccggtcgtatttccactgaagttgatgcccgcctctcttatgacaccgaagccagtgtcgcaaaagcaaaacgcctgatcaaactgtacaacgaagcgggcatcagcaatgaccgtattctgatcaaactggcttccacatggcagggtatccgcgctgcggagcaactggaaaaagaaggtatcaactgtaacctgactctgctgttctcttttgctcaggctcgtgcttgtgcggaagcaggtgttttcctgatttctccattcgttggccgtattctggactggtacaaagcaaacagtgataagaaagaattcgcaccaaacgaagatccgggtgtgatttctgtttctgaaatttaccagtactacaaagaacacggctataacaccgttgttatgggtgcaagtttccgtaactccggtgaaattctggaactggctggttgtgaccgtctgactatctctcctgcattgctgaaagagctgtctgaaacagcaggcgaagttgagcataaactcagctatgaaggtgaaatcaagccacgtcctgcggcaatgactgaagctgaattctattgggaacatcatcaggatgcgatggcaaccgaaaaactggcggaaggtatccgtaagtttgctatcgatcagggtaaacttgagagcatgatcgctgacttgctgtagatttaaatacccagcaaatacccagcaaattggagctctgcagagctttcgttcgtatcatcgt

SEQ ID NO: 124 - DNA, 1629 bp, Xenorhabdus nematophilus
ttgtttgttgattaacccttaattaaacaatggcttcctctatgctctcttccgctactatggttgcctctccggctcaggccactatggtcgctcctttcaacggacttaagtcctccgctgccttcccagccacccgcaaggctaacaacgacattacttccatcacaagcaacggcggaagagttaactgcatgcaggtgtggcctccgattggaaagaagaagtttgagactctctcttaccttcctgaccttaccgattccggtggtcgcgtcaactgcatgcaggccatgggtagcgtagaaattctggttccagaccttcctgaatctgttgcggatgcgactgttgcaacatggcacaaaaaaccgggtgatgctgtagagcgtgatgacattctggttgaaattgaaactgacaaagtgattttagaagtaccagcaagtgaagcaggtgttctggaagctgttttggaagaagaaggcgccactgtattgtctaagcaattgcttggccgtattagcctgagcaacagtgctggtatgcctactgctgtgaaggaaaccactgaagcaactccggcacagcgccagactgcctctttggaagatgagagtaacgatgctcttagcccggcagttcgccgtctgattgcagagcacgatttagatccggctgcgattaaaggcagtggtgtaggtggtcgtattgtgcgtgaagatgtagaaaaacatatcgctgcgaacaaaaaagagagcgctaaacctgctgcatctgcaccagccgctcaacagtctgaactgccacaccgcagtgaaaaacgtgtgccaatgacgcgtttacgtaaacgtgttgcagaacgtctgcttgaagcgaagaacaatacggcaatgttgacgactttcaatgaagtcaacatgaaaccaattcaggaactgcgtaagcaatacggcgatgtgtttgaaaaacgtcatggcgttcgtctgggcttcatgtccttctatgtgaaagctgttgttgaagcactgaaacgttatccagaagttaatgcttcaattgatggcactgacgtggtttaccacaactattttgatatcagcattgcggtatcgactccacgtggtctggtaacgccagtattacgtgatgcagatgccctgagcatggctgatctcgaaaaaaccatcaaagagctggctattaaaggccgtgacggtaaattgaccgttgatgaactcaccggtggtaatttcaccattactaatggtggtgttttcggctctctaatgtccactccgatcattaacccaccacaaagtgcgattctgggcatgcatgccattaaagatcgcccaatggcagtaaatggtcaggttgagatccttccaatgatgtatctggcactgtcttatgaccatcgtctgattgacggacgtgagtctgtaggcttcctggtgaccatcaaagaaatgctggaagatccaacacgtttgttgctggatgtatagcatcaccatcagggcggagggtgttaaattccgctcagtctgaagtaatttaaatacccagaaatacccagcaaattggagctctgcagagctttcgttcgtatcatcggtttcgaca

SEQ ID NO: 125 - DNA, 738 bp, Synechocystis sp.
ttcttgtttgttgattaacccttaattaaacaatggcttcctctatgctctcttccgctactatggttgcctctccggctcaggccactatggtcgctcctttcaacggacttaagtcctccgctgccttcccagccacccgcaaggctaacaacgacattacttccatcacaagcaacggcggaagagttaactgcatgcaggtgtggcctccgattggaaagaagaagtttgagactctctcttaccttcctgaccttaccgattccggtggtcgcgtcaactgcatgcaggccatggctagcattatgatgaataccgtgcaaacgtatggtaagacggtggaaaagaactacaaagctggggaggtaattttccaggaaggcgcagtggaattgtctatgtttggggtgttggaaggcgaagtagagatgactttgcaaggtaagtttattgaaaccattgaggccggaggcatttttggcataggagccattgtccacagcgatcatcaaagggcttccacggcgatcgccaaaaccgattgcaagttagtggctatggaccgggaacattttctgtttgcagtgcaacaaaccccgatgtttgccttggaagtgatccagaactattcagaccgctaccggagtttgaaagcattgtacgagaaggcgatcgccgaatagattaaaaatacccagcaaattggagctctgcagagctttcgttcgtatcatc

SEQ ID NO: 126 - DNA, 1785 bp, Bacillus halodurans
ttcttgtttgttgattaacccttaattaaacaatggcttcctctatgctctcttccgctactatggttgcctctccggctcaggccactatggtcgctcctttcaacggacttaagtcctccgctgccttcccagccacccgcaaggctaacaacgacattacttccatcacaagcaacggcggaagagttaactgcatgcaggtgtggcctccgattggaaagaagaagtttgagactctctcttaccttcctgaccttaccgattccggtggtcgcgtcaactgcatgcaggccatggatagagttgcgatcgttggaggaggaccagccgggtatgtggcggcaattacagccgcccaccggggaaagcaagtaactttaattgagcaaaaaaaattaggtggcacgtgcttaaatgaagggtgtatgcctacgaaatcattgttagaaagtgcagccacctatgataaagtgaaacacgcaagtgattatggcattaagggaccagtagatgaaatgcgtatcgagtggggacaagtacaggcacgtaaaaatcaaattgtccaccagcttgtgaaagggatcgattatttactaaagaagcataaaatagagcttctggaaggcacggcttcgtttcaatcggcacatgaattacttgtgcaaacagaacgaggtcaacaaacaatcgaagcaaatcgaattatcatcgcgacaggttctgaaccgactccgttaccttttgctccttttgacagggaatgggttatcagtagtgaacaagcaatgtcgttacctatccagcctgaatctatgatcattgtagggggcggggtgattggttgtgaatttgcaagtatttatggacggatgggaacgaaagtgacgatcattgaaatggctgatcggttgctgtttggtgaggatcacgatatttgtaaggttttaatggaggagctcaaacgacaaggggttgaaatctatccatcgacggtcatcaaagaaatgcagcgtgaccgcaagcaggttgttgttgaacgagatggtcaagtggaggttttaactggtgattatgtgcttgttgccataggaagaaagccgcgtttacaagagataggattagagagaattggagttgattttacttcacgaggtataacggtcaatgaacacatgcagacgacgatcccacatatttacgcatgtggtgacgtaatcggagggattcagcttgcccacgtagcgtttcatgagggaagtgtcgctgctaagcatttgtgcggcgaacctattcaagtgagatatgaggcagttcctcgttgtatttacacatcacctgaaattgcaacggtcggcttgacggagacacaagcgcgggaaaactatggacacgttcgaattggtgaatatccgtttgctgccaacgggaaggcgcttattgtgaatgaaacgataggaaaagtaaaagttgtggtcgagcctgagtacgaggcgatcgtcgggttaacgatcgttggaccccatgccacggaattaattgctcaaggaacgctcatggtacacaatgaattaacgcttgatagtttagagtcgtttatcgctgctcacccaaccgtatcggaagctgtacatgaagctgtgctgcaagcattaggccaggcggttcatgtctaattttttggccattccttgattgatctcattgttagcgctttcttttgatttaaatacccagcaaatacccagcaaattggagctctgcagagctttcgttcgtatcatc

SEQ ID NO: 127 - DNA, 1783 bp, Bacillus halodurans
ttcttgtttgttgattaacccttaattaaacaatggcttcctctatgctctcttccgctactatggttgcctctccggctcaggccactatggtcgctcctttcaacggacttaagtcctccgctgccttcccagccacccgcaaggctaacaacgacattacttccatcacaagcaacggcggaagagttaactgcatgcaggtgtggcctccgattggaaagaagaagtttgagactctctcttaccttcctgaccttaccgattccggtggtcgcgtcaactgcatgcaggccatgacggaagagtacgatctcgtcattttaggtggagggactggtggctacgtagccgccatccgcgccacacaactcgatctaaaagtggcattagtcgaaaaaggaaaattaggtggcacgtgcttacataagggatgcataccgagtaaagcgttgcttcggtcggcagaagtattttcgacggttcagaaagccgatcagtttggcgtgaagattgacggagccgcgttagactttacgagtgtacaaaatcgaaaagaacaaattgtcacgcagcttcatcgcggggtcgaaatgctgatgaaaaaaggaaaaatcgatgtctataaaggccatggacgcattttaggtccatcgattttctcccctacgcctggtacgatctctgttgaaatgaacaacggcgaagacaatatgatgctcattccgcgaaacgtcattattgcaacaggttcctcacctcgcgtcttaccagggatggaaattgacggtgaggctgtcttaacgtctgacgaggcgctgaaaatggagcagttgccgaagtcgatgctcattgttggtggcggcgtgatcggaatcgagtgggcttcgatgctcaatgactttggcgttgacgtgacagtcattgaatacggtccacgaattttaccgaccgaagatgcggatattgcaaaggaagctgagcgtcttttaaaaaagagaggcgttacattcaaaacaaacgcaaaagtgttagcggaaacgttggaaaaaggagataactcggtcgtaattgaggcggaggttggcggtgtgagcgagcgtttcaccgctgaaaaaatgctcgtttccgttggacgaacaccgaacgtgaatgacatcggacttgaaaatacagatattgaagtcattgatggcgccattgcggtaaacgagtggtatcaaacgaaagagtcgcatatttatgcgatcggtgatgtgatcggcgggatgcagcttgcccatgtggcgtctcacgaaggaatccttgcagtcgagcatatgacggatcacaagcctgaaccacttaattacttaacggttgcccggtgtgtttatagccatccagaaatggcaagcatcggactatcagaagcggaggcaaaagagaaaggctacgaagtaaaagtcggaacgtttccgtttcaagcgatcggcaaagcacttgtctatggcgaatctgatggatttgtaaagatcctatctgataagaaaacagatgatctactcggtgttcatatgattgggccccatgtgaccgatatgatttctgaagctgcactagcaaaggttctcgatgcagcccattgggaagtggcccatacgattcatccccacccaacgttatccgaggttgttggtgaagcggcattagccgttgacggaaaggcgattcatttttaaatttaaatacccagcaaatacccagcaaattggagctctgcagagctttcgttcgtatcatc

SEQ ID NO: 128 - DNA, 1846 bp, Bacillus subtilis subsp. subtilis str. 168
tttcaaactctttgtttcttgtttgttgattaacccttaattaaacaatggcttcctctatgctctcttccgctactatggttgcctctccggctcaggccactatggtcgctcctttcaacggacttaagtcctccgctgccttcccagccacccgcaaggctaacaacgacattacttccatcacaagcaacggcggaagagttaactgcatgcaggtgtggcctccgattggaaagaagaagtttgagactctctcttaccttcctgaccttaccgattccggtggtcgcgtcaactgcatgcaggccatggtagtaggagatttccctattgaaacagatactcttgtaattggtgcgggacctggcggctatgtagctgccatccgcgctgcacagcttggacaaaaagtaacagtcgttgaaaaagcaactcttggaggcgtttgtctgaacgttggatgtatcccttcaaaagcgctgatcaatgcaggtcaccgttatgagaatgcaaaacattctgatgacatgggaatcactgctgagaatgtaacagttgatttcacaaaagttcaagaatggaaagcttctgttgtcaacaagcttactggcggtgtagcaggtcttcttaaaggcaacaaagtagatgttgtaaaaggtgaagcttactttgtagacagcaattcagttcgtgttatggatgagaactctgctcaaacatacacgtttaaaaacgcaatcattgctactggttctcgtcctatcgaattgccaaacttcaaatatagtgagcgtgtcctgaattcaactggcgctttggctcttaaagaaattcctaaaaagctcgttgttatcggcggcggatacatcggaactgaacttggaactgcgtatgctaacttcggtactgaacttgttattcttgaaggcggagatgaaattcttcctggcttcgaaaaacaaatgagttctctcgttacacgcagactgaagaaaaaaggcaacgttgaaatccatacaaacgcgatggctaaaggcgttgaagaaagaccagacggcgtaacagttactttcgaagtaaaaggcgaagaaaaaactgttgatgctgattacgtattgattacagtaggacgccgtccaaacactgatgagcttggtcttgagcaagtcggtatcgaaatgacggaccgcggtatcgtgaaaactgacaaacagtgccgcacaaacgtacctaacatttatgcaatcggtgatatcatcgaaggaccgccgcttgctcataaagcatcttacgaaggtaaaatcgctgcagaagctatcgctggagagcctgcagaaatcgattaccttggtattcctgcggttgttttctctgagcctgaacttgcatcagttggttacactgaagcacaggcgaaagaagaaggtcttgacattgttgctgctaaattcccatttgcagcaaacggccgcgcgctttctcttaacgaaacagacggcttcatgaagctgatcactcgtaaagaggacggtcttgtgatcggtgcgcaaatcgccggagcaagtgcttctgatatgatttctgaattaagcttagcgattgaaggcggcatgactgctgaagatatcgcaatgacaattcacgctcacccaacattgggcgaaatcacaatggaagctgctgaagtggcaatcggaagtccgattcacatcgtaaaataattttcatatcaaaaacagccccgctttgagcgagggctgtttttatttaaatacccagcaaatacccagcaaattggagctctgcagagctttcgttcgtatcatcggtttcgacaacgttc

SEQ ID NO: 129 - DNA, 1523 bp, Escherichia coli K12
ttgtttgttgattaacccttaattaaacaatggcttcctctatgctctcttccgctactatggttgcctctccggctcaggccactatggtcgctcctttcaacggacttaagtcctccgctgccttcccagccacccgcaaggctaacaacgacattacttccatcacaagcaacggcggaagagttaactgcatgcaggtgtggcctccgattggaaagaagaagtttgagactctctcttaccttcctgaccttaccgattccggtggtcgcgtcaactgcatgcaggccatgggtagcgtagatattctggtccctgacctgcctgaatccgtagccgatgccaccgtcgcaacctggcataaaaaacccggcgacgcagtcgtacgtgatgaagtgctggtagaaatcgaaactgacaaagtggtactggaagtaccggcatcagcagacggcattctggatgcggttctggaagatgaaggtacaacggtaacgtctcgtcagatccttggtcgcctgcgtgaaggcaacagcgccggtaaagaaaccagcgccaaatctgaagagaaagcgtccactccggcgcaacgccagcaggcgtctctggaagagcaaaacaacgatgcgttaagcccggcgatccgtcgcctgctggctgaacacaatctcgacgccagcgccattaaaggcaccggtgtgggtggtcgtctgactcgtgaagatgtggaaaaacatctggcgaaagccccggcgaaagagtctgctccggcagcggctgctccggcggcgcaaccggctctggctgcacgtagtgaaaaacgtgtcccgatgactcgcctgcgtaagcgtgtggcagagcgtctgctggaagcgaaaaactccaccgccatgctgaccacgttcaacgaagtcaacatgaagccgattatggatctgcgtaagcagtacggtgaagcgtttgaaaaacgccacggcatccgtctgggctttatgtccttctacgtgaaagcggtggttgaagccctgaaacgttacccggaagtgaacgcttctatcgacggcgatgacgtggtttaccacaactatttcgacgtcagcatggcggtttctacgccgcgcggcctggtgacgccggttctgcgtgatgtcgataccctcggcatggcagacatcgagaagaaaatcaaagagctggcagtcaaaggccgtgacggcaagctgaccgttgaagatctgaccggtggtaacttcaccatcaccaacggtggtgtgttcggttccctgatgtctacgccgatcatcaacccgccgcagagcgcaattctgggtatgcacgctatcaaagatcgtccgatggcggtgaatggtcaggttgagatcctgccgatgatgtacctggcgctgtcctacgatcaccgtctgatcgatggtcgcgaatccgtgggcttcctggtaacgatcaaagagttgctggaagatccgacgcgtctgctgctggacgtgtagatttaaataccc

SEQ ID NO: 130 - DNA, 1375 bp, Arabidopsis thaliana
gtttcttgtttgttgattaacccttaattaattctccactctcacaccaccaacttctgattccagatctcaacgatgcaaagctccgccgtattctccctctctccgtcgcttcctctcctaaaaccacgtcggctctctctccgccaccatcccataaccaccgccgcttcttcaagcgatctaaacgtttctccaaatgttgtctctattccttctttatctcgtcgatcttggcgcctcgcttcgtctgattcgcctctccgtgcttggtccggtgttccttctccgatctctcactccttagacacgaatcgtttcagaaccgccgctactgcagttcctgaaagtgctgaggaaggtgataacagtggtaaattgacgaaggttttggaacttggcttgttgttcgctatgtggtaccttttcaatatctacttcaacatctacaataaacaggttttgaaagctctacatgctccaatgactgtgactttggttcagtttgctgttggtagtgtgctcattactatcatgtgggttcttaacctgtacaagagaccaaagatcagtggtgctcagctagctgccatcttgccgcttgctgttgtgcacacacttggtaatctgtttacgaacatgagtcttgggaaagtttctgtttcctttactcacaccattaaagccatggagcctttcttctctgttttattgtctgctatgtttctcggggagaaacctactccatgggtactcggtgccattgtaccaattgttggtggagttgcacttgcttcaatttcggaggtctcattcaactgggctggattttcgagtgcaatggcatcaaacttgactaaccaatcccgtaatgtgctgagtaagaaagtcatggttaagaaagatgattctcttgacaacatcactctcttctcaattataacattgatgtctctcgttctgatggctcctgtgactttctttacggaaggcatcaagttcactccttcatacattcaatcagctggtgtgaatgttaaacaaatatatacaaagtctcttatcgctgcactctgcttccacgcataccagcaggtgtcgtacatgatattggcgagagtatcaccggttacacattctgtcggaaactgtgtgaaacgtgttgtggttattgtgagctctgtcatcttcttcaagacacccgtctcgcctgttaatgctttcggaactggaatcgcccttgcgggtgtcttcttatactccagagtgaagggtattaagccaaagccaaagactgcttaagcaaatatcggctaatacctaatgtcatatcactcccgcgctttgatttaatacccagaaattggagctctgc

SEQ ID NO: 131 - DNA, 2702 bp, Escherichia coli K12
  unsure (1)..(2702): unsure at all n locations
nnnnnnnnnnnnnnnnnnnnnnnnnnnnnnnnnnnnnnnnnnnnnnnnnnnnnnnnnnnnnnnnnnnnnnnnnnnnnnnnnnnnnnnnnnnnnnnnnnnnnnnnnnnnnnnnnnnnnnnnnnnnnnnnnnnnnnnnnnnnnnnnnnnnnnnnnnnnnnnnnnnnnnnnnnnnnnnnnnnnnnnnnnnnnnnnnnnnnnnnnnnnnnnnnnnnnnnnnnnnnnnnnnnnnnnnnnnnnnnnnnnnnnnnnnnnnnnnnnnnnnnnnnnnnnnnnnnnnnnnnnnnnnnnnnnnnnnnnnnnnnnnnnnnnnnnnaaaaaagcaggctcctgcaggaccatgggaccgctaccacggaaaggcaacatgaaacagaaaattacggattacctggacgaaatctacggtggaacatttaccgcaactcatttacagaaacttgtaacgcgtcttgagagtgcgaaacgattaattacacagcgacgtaaaaaacactgggatgaaagtgatgtcgtgttaattacctatgccgatcaatttcacagcaatgatttaaaaccattacccacatttaatcagttttaccatcaatggctgcaaagcattttttcacatgttcatttgttgccgttttatccatggtcatctgatgatggcttttcggtaattgattatcatcaggtcgccagtgaagcgggggagtggcaggatattcagcaactcggtgaatgcagtcatttaatgtttgattttgtctgcaaccatatgtcggcaaaaagtgaatggtttaaaaactatttacaacagcatccaggttttgaagatttttttattgccgttgacccgcaaaccgatctcagcgccgtcactcgcccgcgtgcgttaccgttattaacgccattccagatgcgcgatcattcaacgcgccatttatggaccacctttagtgacgatcaaattgacctgaattaccgtagccctgaagtgttgctggcgatggtggatgttttactctgttaccttgcgaaaggtgctgagtatgtccgcctggatgccgttggctttatgtggaaagagccgggaacaagctgcatccatctggaaaaaacacatctgattatcaaactgttacggtcgattattgataacgttgcgccaggtacagtgatcattaccgagaccaatgttccgcataaagacaacattgcttactttggcgcaggcgatgacgaagcacatatggtgtaccagttctcgctgccgccactggtgctgcatgcggtgcaaaaacagaacgttgaggcgctttgtgcgtgggcgcaaaacctgacactaccttccagcaacaccacctggtttaacttcctcgcctctcacgatggcatcgggctaaacccgctacggggcttgttgcctgaaagcgaaatattagagctggtcgaggcgttacagcaggaaggtgcattagtaaactggaaaaataatcccgacggtacacgcagtccgtatgaaataaatgtgacctatatggatgcgttaagccgccgtgagagtagcgatgaagaacgttgcgccaggtttatccttgcccatgcgattttgttaagtttccccggtgtgccagcgatatatattcaaagtattcttggctcgcgtaatgattacgcaggtgtcgaaaaactcggatataaccgtgcgattaaccgtaaaaaatatcacagtaaagagataacccgagaactgaacgatgaagctacattaaggcatgcggtatatcatgagttgtcgcgtttaattacacttcgtcgcagccataacgagtttcatccggataataattttaccattgatacgattaattcatccgtaatgcgtattccaagaagtaacgctgatggtaattgtctgactggattgtttaatgtcagtaaaaatattcagcatgtaaatattactaatctgcatggtcgggatctgattagtgaagttgatatattgggtaatgaaataacgctgcgcccctggcaggttatgtggattaaataactcgagacccagctttcttgtacaaannnnnnnnnnnnnnnnnnnnnnnnnnnnnnnnnnnnnnnnnnnnnnnnnnnnnnnnnnnnnnnnnnnnnnnnnnnnnnnnnnnnnnnnnnnnnnnnnnnnnnnnnnnnnnnnnnnnnnnnnnnnnnnnnnnnnnnnnnnnnnnnnnnnnnnnnnnnnnnnnnnnnnnnnnnnnnnnnnnnnnnnnnnnnnnnnnnnnnnnnnnnnnnnnnnnnnnnnnnnnnnnnnnnnnnnnnnnnnnnnnnnnnnnnnnnnnnnnnnnnnnnnnnnnnnnnnnnnnnnnnnnnnnnnnnnnnnnnnnnnnnnnnnnnnnnnnnnnnnnnnnnnnnnnnnnnnnnnnnnnnnnnnnnnnnnnnnnnnnnnnnnnnnnnnnnnnnnnnnnnnnnnnnnnnnnnnnnnnnnnnnnnnnnnnnnnnnnnnnnnnnnnnnnnnnnnnnnnnnnnnnnnnnnnnnnnnnnnnnnnnnnnnnnnnnnnnnnnnnnnnnnnnnnnnnnnnnnnnnnnnnnnnnnnnnnnnnnnnnnnnnnnnnnnnnnnnnnnnnnnnnnnnnnnnnnnnnnnnnnnnnnnnnnnnnnnnnnnnnnnnnnnnnnnnnnnnnnnnnnnnnnnnnnnnnnnnnnnnnnnnnnnnnnnnnn

SEQ ID NO: 132 - DNA, 3713 bp, Agrobacterium tumefaciens
  unsure (1)..(3713): unsure at all n locations
nnnnnnnnnnnnnnnnnnnnnnnnnnnnnnnnnnnnnnnnnnnnnnnnnnnnnnnnnnnnnnnnnnnnnnnnnnnnnnnnnnnnnnnnnnnnnnnnnnnnnnnnnnnnnnnnnnnnnnnnnnnnnnnnnnnnnnnnnnnnnnnnnnnnnnnnnnnnnnnnnnnnnnnnnnnnnnnnnnnnnnnnnnnnnnnnnnnnnnnnnnnnnnnnnnnnnnnnnnnnnnnnnnnnnnnnnnnnnnnnnnnnnnnnnnnnnnnnnnnnnnnnnnnnnnnnnnnnnnnnnnnnnnnnnnnnnnnnnnnnnnnnnnnnnnnnnnnnnnnnnnnnnnnnnnnnnnnnnnnnnnnnnnnnnnnnnnnnnnnnnnnnnnnnnnnnnnnnnnnnnnnnnnnnnnnnnnnnnnnnnnnnnnnnnnnnnnnnnnnnnnnnnnnnnnnnnnnnnnnnnnnnnnnnnnnnnnnnnnnnnnnnnnnnnnnnnnnnnnnnnnnnnnnnnnnnnnnnnnnnnnnnnnnttcttgtttgttgattaacccttaattaatccgggcgcgcctgatttatcacaagtttgtacaaaaaagcaggctcctgcaggaccatggcatccacggactatcatgtcgacctgaccaattgcgaccgcgaacccattcatattccaggctatattcaaccgcatggctgcctcatcgcctgcgataacgccatgcgaatggtgctgcggcattccgaaaactgcggcgaactgctgggacttgagggcgatctcaacggcaggaccgccgaggatgtgctcggcaaaaagctcgtccacgatctccgcaacgcgctcaccgtcaccggtagaaccacgcgccccgccatgctgcccgcaatggaaacaagcgacggccgcagcttcgatatttcactccatcgctacaaatccaccaccatcatcgaattcgagccctcgggcagcgacgcgcagccgctcggcacggcgcgcaagatggtggaccgcatccgcgaagccgacagcgtcgaaagcctgatctccagaaccacacgcctggtaaaggcgacgctgggttacgaccgggtgatgatctaccgcttccaggaagacggcgccggcaaggtcgtgtcggaggccaagcagcccgagctggagagctttctcgggcaatatttccccgccagcgatattccacagcaggctcgcgcactttatctcaagaacaccttgcgcatcatctccgatgccagcggcacccgcattccggtcctgccagccgtcgatgtctccggtgagccgctcgatctctcttacgcgcatttgcgcagcgtctcgcccatccattgcgaatatctccgcaatatgggtgttgccgcctccatgtcgatttctgtgattgtcgatggcgccctgtggggcctgatcgcctgccaccattattcgccgcgtgtgctgagcatgccagttcggatcgctgcggaaatgttcggggaatttttctccatgcatctgcaggttctgaagcagaagcgccgcctcgacaccatcaaccacgcccatgcggcgctcgaccggtttctgcggctggccgcccatcacgccaacattgaagaactgctggtcgacagttttcaggattttgccgatctgatgccctgcgacggtgtcgggctgtgggtcggcaacaactggcacggccatggcgcaacgccaccgcatgatgccattccaaggctggcgcgtttcgtcgcttcggcttcggaaggcagggtctgggcaacacacgccctgtcgcaggccataccggaagcggaaatatacgccggcaccgcggccggaatgcttgctatcccgctttcgcaggtcaagagcgactatctcctgtttttccgcaaggagatcgtgcagaacctgaactgggccggcaatccggaaaaatcctatgaaaccggcccgatgggcgaccgcctcacgccgcgtaaaagcttcgcaatctggaaagagaccgttcgcctgcaggcacagccctggtcggaagccgaccgggaaatcgccgaagccgcgagaatcgcgcttgtcgaagtggcgttccaccacagcgagttgatggcaggcgaaagagagcgcgccgaggtgcgccagcgcatgctaaacgaggagcttaatcaccgcgtcaagaatgttctcgccatcatcaaatcgctggtcggcaatccctcgcaggagggcaagaccctgcaggagtatgtcaccgcgctgaagggccgcatccaggcgctgtcctttgcccatgaccagatcattcgcggcgaaggcggcggcgcgctgcgcgatctgctggaggccgaattgtcgccccatcgttcgccggaaacgacggtgaagctcgaaggaccccagatcacactcgattcccgcgccttttcggtgatggcgctggttctgcacgaactggcgacgaatgccgccaaatatggtgcgctctcgcaaaatggcgggcaattgcatgtgcgctgggacgttaacgagaatcgcgattgcgaaatatcatggcgcgagaccctgctgaccactctgccggccccatcgcgcgccggtttcggcacggcgctcatcagccgcagcattccctacgatctcggcgggcgcagcacgatacggtatttgccgaatgggctggaggcagagattctcctgccgttccgccatgtatcatcggtctcagcggcgttcgagacaaaaaccgaggcggaaaccctgccgcaacccagacgttacaatcgggaggagccattgaaagtattgctcgtcgaagaccagatgctgatcgccatggatgtcgagaacatgctggaagataatggcatcaaggcaatcgaaaccgcgacctcgtcggccatggcgattgaaaagctgaaaacctatctgcctgacgtcgccattctcgacatcaatcttggttccgacacctccatccccgtcgcccgcgaactgcaccgccgcggcatcccgttcctcttcgccaccggttatgcggatggcagcatggtgccggatgaatttggcgccgtgccggttatccgaaaaccctatgacgaggatgcgctgatggctgggattggggtgttggtgggggatacggagcgggtttgagcgtagcctcccctcatccctgtgcttgtaacaggaatgaggtactcgagacccagctttcttgtacaaagtggtgataaattggagctctgcagagctttcgttcgtatcatcgnnnnnnnnnnnnnnnnnnnnnnnnnnnnnnnnnnnnnnnnnnnnnnnnnnnnnnnnnnnnnnnnnnnnnnnnnnnnnnnnnnnnnnnnnnnnnnnnnnnnnnnnnnnnnnnnnnnnnnnnnnnnnnnnnnnnnnnnnnnnnnnnnnnnnnnnnnnnnnnnnnnnnnnnnnnnnnnnnnnnnnnnnnnnnnnnnnnnnnnnnnnnnnnnnnnnnnnnnnnnnnnnnnnnnnnnnnnnnnnnnnnnnnnnnnnnnnnnnnnnnnnnnnnnnnnnnnnnnnnnnnnnnnnnnnnnnnnnnnnnnnnnnnnnnnnnnnnnnnnnnnnnnnnnnnnnnnnnnnnnnnnnnnnnnnnnnnnnnnnnnnnnnnnnnnnnnnnnnnnnnnnnnnnnnnnnnnnnnnnnnnnnnnnnnnnnnnnnnnnnnnnnnnnnnnnnnnnnnnnnnnnnnnnnnnnn

SEQ ID NO: 133 - DNA, 2943 bp, Bacillus halodurans
  unsure (1)..(2943): unsure at all n locations
nnnnnnnnnnnnnnnnnnnnnnnnnnnnnnnnnnnnnnnnnnnnnnnnnnnnnnnnnnnnnnnnnnnnnnnnnnnnnnnnnnnnnnnnnnnnnnnnnnnnnnnnnnnnnnnnnnnnnnnnnnnnnnnnnnnnnnnnnnnnnnnnnnnnnnnnnnnnnnnnnnnnnnnnnnnnnnnnnnnnnnnnnnnnnnnnnnnnnnnnnnnnnnnnnnnnnnnnnnnnnnnnnnnnnnnnnnnnnnnnnnnnnnnnnnnnnnnnnnnnnnnnnnnnnnnnnnnnnnnnnnnnnnnnnnnnnnnnnnnnnnnnnnnnnnnnnnnnnnnnnnnnnnnnnnnnnnnnnnnnnnnnnnnnnnnnnnnnnnnnnnnnnnnnnnnnnnnnnnnnnnnnnnnnnnnnnnnnnnnnnnnnnnnnnnnnnnnnnnnnnnnnnnnnnnnnnnnnnnnnnnnnnnnnnnnnnnnnnnnnnnnnnnnnnnnnnnnnnnnnnnnnnnnnnnnnnnnnnnnnnnnnnnnnnnnnnnnnnnnnnnnnnnnnnnnnnnnnnnnnnnnnnnnnnnnnnnnnnnnnnnnnnnnnnnnnnnnnnnnnnnnnnnnnnnnnnnnnnnttcttgtttgttgattaacccttaattaatccgggcgcgcctgatttatcacaagtttgtacaaaaaagcaggctcctgcaggaccatggggaacgaaagattaaaagcaccagaaggtccaccgagtgatgtagagcgcataaaagaagaaagtaattatttgcgcggcacgctgaaggaatcaatgctcgagccgattagtgccggaatatccgatgatgataaccggttgatgaaacatcacggtagttatttgcaagatgaccgagaccttcgcaatgagcggcaaaaacaaaagcttgaaccggcgtaccagttcatgttgcgtgttcggatgccgggcggagtggcaacgcctgaacagtggcttgtcatggatgaacttgctcagaaatatggaaatggcactatgaagctaacaacaagagaaacgtttcaattgcatggcattttaaagtggaacatgaaaaaaacgattcaggccatccactcagctttgttggatacaatcgcggcatgtggtgatgtgaaccgaaatgtcatgtgtacctcaaatccgtatcaatcggagatccatcaggaagtatatgaatggtcaaagaaattgagtgatgatttgcttccgcgtacacgcgcgtaccatgaaatttggcttgatgaagaaaaagtggcaggcacgccagaagcagaagaagttgaaccgatgtacggaccgctttatcttcctcggaaattcaaaattggtattgctgttccaccatccaatgacattgacgtcttttctcaagatctcggctttatcgcgattgtggaagatgacaagcttgtcggtttcaatgtggcgattggcggcggtatggggatgacgcacggggataaagcgacatacccgcagctcgctaaagtgattggcttctgtaaacctgaacaaatatacgatgtcgcggaaaaaattattacgattcagcgtgattacggtaatcgctcggtccgaaaaaatgcccgtttcaagtatacggtagaccgtctcggtttagagaccgtcaagaatgagctggaaaaccgccttggctggagccttgatgaggcgaagccgtatcatttcgatcataacggcgaccgctatggctgggtcaaaggtgtgaaaggaagatggcactttacattatttgtggagggcggtcgtgtcactgattatgcagattacaaattaatgaccggcttgcgcgagatcgcgaaaatccatactggtgatattcgcctcacgtccaaccaaaacttgattattgctaatgttactagccagaagaagaaaaagatcaatgagctaatcgagcagtacggtctgacggacggtaagcattatacagcactccgtcgcagctcgattgcctgtgttgcgcttccgacatgcggactggcaatggcggaagcagagcggtatttgccgaagctaatcgacaaaattgacgaaatcatcgaagaaaacggcctgaagaatgaagagattacgatccgtatgacagggtgcccgaacggctgtgcccgccatgcgctaggcgaaattggctttattggaaaagcgccgggtaagtacaatatgtaccttggagctgcttttgatggcagccgtctaagtaaaatgtaccgtgaaaatattggagaagaagaaattttaaaagaacttcgcgaaattctcccacgttatgcgaaagagcgtaaagaaggggagcattttggagattttgtcatccgagctggaatcatcaaagaaacgacggatggaacaaattttcatgattaaaataaactgatagatagccgcttcgaaacgatcgcatattttgcgtctagctcgagacccagctttcttgtacaaagtggtgataaattggagctctgcagagctttcgttcgtatcatcgnnnnnnnnnnnnnnnnnnnnnnnnnnnnnnnnnnnnnnnnnnnnnnnnnnnnnnnnnnnnnnnnnnnnnnnnnnnnnnnnnnnnnnnnnnnnnnnnnnnnnnnnnnnnnnnnnnnnnnnnnnnnnnnnnnnnnnnnnnnnnnnnnnnnnnnnnnnnnnnnnnnnnnnnnnnnnnnnnnnnnnnnnnnnnnnnnnnnnnnnnnnnnnnnnnnnnnnnnnnnnnnnnnnnnnnnnnnnnnnnnnnnnnnnnnnnnnnnnnnnnnnnnnnnnnnnnnnnnnnnnnnnnnnnnnnnnnnnnnnnnnnnnnnnnnnnnnnnnnnnnnnnnnnnnnnnnnnnnnnnnnnnnnnnnnnnnnnnnnnnnnnnnnnnnnnnnnnnnnnnnnnnnnnnnnnnnnnnnnnnnnnnnnnnnnnnnnnnnnn

SEQ ID NO: 134 - DNA, 2365 bp, Escherichia coli K12
  unsure (1)..(2365): unsure at all n locations
nnnnnnnnnnnnnnnnnnnnnnnnnnnnnnnnnnnnnnnnnnnnnnnnnnnnnnnnnnnnnnnnnnnnnnnnnnnnnnnnnnnnnnnnnnnnnnnnnnnnnnnnnnnnnnnnnnnnnnnnnnnnnnnnnnnnnnnnnnnnnnnnnnnnnnnnnnnnnnnnnnnnnnnnnnnnnnnnnnnnnnnnnnnnnnnnnnnnnnnnnnnnnnnnnnnnnnnnnnnnnnnnnnnnnnnnnnnnnnnnnnnnnnnnnnnnnnnnnnnnnnnnnnnnnnnnnnnnnnnnnnnnnnnnnnnnnnnnnnnnnnnnnnnnnnnnnnnnnnnnnnnnnnnnnnnnnnnnnnnnnnnnnnnnnnnnnnnnnnnnnnnnnnnnnnnnnnnnnnnnnnnnnnnnnnnnnnnnnnnnnnnnnnnnnnnnnnnnnnnnnnnnnnnnnnnnnnnnnnnnnnnnnnnnnnnnnnnnnnnnnnnnnnnnnnnnnnnnnnnnnnnnnnnnnnnnnnnnnnnnnnnnnnnnnnnnnnnnnnnnnnnnnnnnnnnnnnnnnnnnnnnnnnnnnnnnnnnnnnnnnnnnnnnnnnnnnnnnnnnnnnnnnnnnnnnnnnnnnnnnnnnnnnnnnnnnnnnnnnnnnnnnnnnnnnnnnnnnnnnnnnnnnnnnnnnnnnnnnnnnnnnnnnnnnnnnnnnnnnnnnnnnnnnnnnnnnnnnnnnnnnnnnnnnnnnnnnaaaaaagcaggctcctgcaggaccatgaaaattcgttcacaagtcggcatggtgctgaatctcgataagtgcatcggctgccacacctgttcagttacctgtaaaaacgtctggaccagccgtgaaggcgtggaatatgcgtggttcaacaacgtggaaaccaagccgggccagggcttcccgactgactgggaaaaccaggaaaaatacaaaggcggctggatccgtaaaatcaacggcaaactgcagccgcgcatgggtaaccgtgccatgctgctgggtaaaatcttcgctaacccgcatctgccggggatcgacgattattacgagccgttcgattttgactatcagaacctgcataccgcgccggaaggcagcaaatcgcagccgattgcccgtccgcgttcgctgattaccggggaacggatggcgaaaatcgaaaaagggccgaactgggaagatgacctgggcggtgagtttgacaaactggcgaaagacaagaacttcgacaacatccagaaggcgatgtatagccagttcgaaaacaccttcatgatgtatttgccgcgcctgtgcgaacactgcctgaacccggcatgtgtggcgacctgcccgagcggtgcgatttacaagcgtgaagaagatggcatcgtcctgatcgaccaggataaatgccgtggctggcgtatgtgcatcactggatgcccgtacaaaaaaatctacttcaactggaagagcggtaagtctgagaagtgcatcttctgctatccgcgtattgaagcgggtcagccgaccgtgtgctcagaaacctgtgtcggtcgtatccgttatcttggcgtgctgttgtacgatgccgacgctattgaacgtgcagccagcaccgagaacgagaaagatctttaccagcgtcagctggacgtgttcctcgatccgaacgatccgaaagtcatcgagcaggcgattaaagacggtattccgctgagcgttattgaagccgcacagcagtcgccggtttataaaatggcaatggaatggaaactggcgctgccgctgcatccggaatatcgcacactgccgatggtctggtacgtgccgcctctgtctccgattcagtctgcagcagacgcgggtgagctgggtagcaacggcattctgccagacgtcgaaagcctgcgtattccggtacagtatctggcgaatctgctgaccgccggtgataccaaaccggtactgcgcgcactgaaacgtatgctggcgatgcgtcattacaaacgtgctgaaaccgttgacggtaaagttgatacccgtgcgctggaagaggtcggtctgaccgaagcccaggcacaggagatgtaccgttatctggcgattgctaactacgaagatcgctttgtggtgccgagtagtcatcgtgaactggcacgggaagccttcccggagaaaaatggctgcggctttacctttggtgatggctgccacggttcagataccaaattcaatctgttcaacagccgtcgtatcgatgccatcgatgtgaccagcaaaacggagccgcatccatgactcgagacccagctttcttgtacaaannnnnnnnnnnnnnnnnnnnnnnnnnnnnnnnnnnnnnnnnnnnnnnnnnnnnnnnnnnnnn

SEQ ID NO: 135 - DNA, 2406 bp, Escherichia coli K12
  unsure (1)..(2406): unsure at all n locations
nnnnnnnnnnnnnnnnnnnnnnnnnnnnnnnnnnnnnnnnnnnnnnnnnnnnnnnnnnnnnnnnnnnnnnnnnnnnnnnnnnnnnnnnnnnnnnnnnnnnnnnnnnnnnnnnnnnnnnnnnnnnnnnnnnnnnnnnnnnnnnnnnnnnnnnnnnnnnnnnnnnnnnnnnnnnnnnnnnnnnnnnnnnnnnnnnnnnnnnnnnnnnnnnnnnnnnnnnnnnnnnnnnnnnnnnnnnnnnnnnnnnnnnnnnnnnnnnnnnnnnnnnnnnnnnnnnnnnnnnnnnnnnnnnnnnnnnnnnnnnnnnnnnnnnnnnnnnnnnnnnnnnnnnnnnnnnnnnnnnnnnnnnnnnnnnnnnnnnnnnnnnnnnnnnnnnnnnnnnnnnnnnnnnnnnnnnnnnnnnnnnnnnnnnnnnnnnnnnnnnnnnnnnnnnnnnnnnnnnnnnnnnnnnnnnnnnnnnnnnnnnnnnnnnnnnnnnnnnnnnnnnnnnnnnnnnnnnnnnnnnnnnnnnnnnnnnnnnnnnnnnnnnnnnnnnnnnnnnnnnnnnnnnnnnnnnnnnnnnnnnnnnnnnnnnnnnnnnnnnnnnnnnnnttcttgtttgttgattaacccttaattaatccgggcgcgcctgatttatcacaagtttgtacaaaaaagcaggctcctgcaggaccatgaaaaacatcaatccaacgcagaccgctgcctggcaggcactacagaaacacttcgatgaaatgaaagacgttacgatcgccgatctttttgctaaagacggcgatcgtttttctaagttctccgcaaccttcgacgatcagatgctggtggattactccaaaaaccgcatcactgaagagacgctggcgaaattacaggatctggcgaaagagtgcgatctggcgggcgcgattaagtcgatgttctctggcgagaagatcaaccgcactgaaaaccgcgccgtgctgcacgtagcgctgcgtaaccgtagcaataccccgattttggttgatggcaaagacgtaatgccggaagtcaacgcggtgctggagaagatgaaaaccttctcagaagcgattatttccggtgagtggaaaggttataccggcaaagcaatcactgacgtagtgaacatcgggatcggcggttctgacctcggcccatacatggtgaccgaagctctgcgtccgtacaaaaaccacctgaacatgcactttgtttctaacgtcgatgggactcacatcgcggaagtgctgaaaaaagtaaacccggaaaccacgctgttcttggtagcatctaaaaccttcaccactcaggaaactatgaccaacgcccatagcgcgcgtgactggttcctgaaagcggcaggtgatgaaaaacacgttgcaaaacactttgcggcgctttccaccaatgccaaagccgttggcgagtttggtattgatactgccaacatgttcgagttctgggactgggttggcggccgttactctttgtggtcagcgattggcctgtcgattgttctctccatcggctttgataacttcgttgaactgctttccggcgcacacgcgatggacaagcatttctccaccacgcctgccgagaaaaacctgcctgtactgctggcgctgattggcatctggtacaacaatttctttggtgcggaaactgaagcgattctgccgtatgaccagtatatgcaccgtttcgcggcgtacttccagcagggcaatatggagtccaacggtaagtatgttgaccgtaacggtaacgttgtggattaccagactggcccgattatctggggtgaaccaggcactaacggtcagcacgcgttctaccagctgatccaccagggaaccaaaatggtaccgtgcgatttcatcgctccggctatcacccataacccgctctctgatcatcaccagaaactgctgtctaacttcttcgcccagaccgaagcgctggcgtttggtaaatcccgcgaagtggttgagcaggaatatcgtgatcagggtaaagatccggcaacgcttgactacgtggtgccgttcaaagtattcgaaggtaaccgcccgaccaactccatcctgctgcgtgaaatcactccgttcagcctgggtgcgttgattgcgctgtatgagcacaaaatctttactcagggcgtgatcctgaacatcttcaccttcgaccagtggggcgtggaactgggtaaacagctggcgaaccgtattctgccagagctgaaagatgataaagaaatcagcagccacgatagctcgaccaatggtctgattaaccgctataaagcgtggcgcggttaactcgagacccagctttcttgtacaaagtggtgataaattggagctctgcagagctttcgttcgtatcatcgnnnnnnnnnnn

SEQ ID NO: 136 - DNA, 3833 bp, Nostoc punctiforme
  unsure (1)..(3833): unsure at all n locations
nnnnnnnnnnnnnnnnnnnnnnnnnnnnnnnnnnnnnnnnnnnnnnnnnnnnnnnnnnnnnnnnnnnnnnnnnnnnnnnnnnnnnnnnnnnnnnnnnnnnnnnnnnnnnnnnnnnnnnnnnnnnnnnnnnnnnnnnnnnnnnnnnnnnnnnnnnnnnnnnnnnnnnnnnnnnnnnnnnnnnnnnnnnnnnnnnnnnnnnnnnnnnnnnnnnnnnnnnnnnnnnnnnnnnnnnnnnnnnnnnnnnnnnnnnnnnnnnnnnnnnnnnnnnnnnnnnnnnnnnnnnnnnnnnnnnnnnnnnnnnnnnnnnnnnnnnnnnnnnnnnnnnnnnnnnnnnnnnnnnnnnnnnnnnnnnnnnnnnnnnnnnnnnnnnnnnnnnnnnnnnnnnnnnnnnnnnnnnnnnnnnnnnnnnnnnnnnnnnnnnnnnnnnnnnnnnnnnnnnnnnnnnnnnnnnnnnnnnnnnnnnnnnnnnnnnnnnnnnnnnnnnnnnnnnnnnnnnnnnnnnnnnnnnnnnnnnnnnnnnnnnnnnnnnnnnnnnnnnnnnnnnnnnnnnnnnnnnnnnnnnnnnnnnnnnnnnnnnnnnnnnnnnnnnnnnnnnnnnnnnnnnnnnnnnnnnnnnnnttcttgtttgttgattaacccttaattaatccgggcgcgcctgatttatcacaagtttgtacaaaaaagcaggctcctgcaggaccatgagtgaatttaccaaaactctttgtccttactgtggtgttggctgtggactagaagtttcacccccagcccaacttggcaaagcaactaatcgagatggtcaaggaaatccgacttggcgggtgcggggcgataaagcccatccatctagtcaaggaatggtttgtgtcaaaggcgcaacgatcgcagaatctttagataaaaatagattacattacccaatggtgcgagactctttagatcaagagtttcggcgcgttagttgggatgaagcttttaatctcatcacgcagcgtattcaaacagtccgcttcacccaagggccagaagcgttatgtatgtatggttccggtcagtttcaaaccgaagactactacatagcccagaagcttatgaaaggctgtctgggtactaataattttgatgccaactcccgtttatgtatgtctagtgctgtggctgggtacattcaaagttttggctcagatggtccgccctgctgttatgaagacttggagttaaccgactgtgcatttttaataggcactaatacagccgaatgtcatccaatcgtttttaaccgactagagaaatatcacaaaaagaaccgcaaagtcaaaatgattgtggtcgatccccgacgcacgccaaccgcagaagccgccgacttacatttagccattcgtccgggtacagatatcgatttgttgaacggtatcgctcacttattgatgcgctggaactacatcgataccatgttcatggacgactgcaccagcaactttcccgcttatgctgaagtgattcgccactattccccggaagtggtagctcgtcaatgcggaatcagtattgaagatttagaaacagcagcccgttattggggtgaatctaggcgggtactttctttgtggtcgatgggtgtgaatcaatcatcagaagggacagccaaggtaagaactatcatcaatctgcacctgatgactggacaaatcggcaaacctggggctggccctttttccctgactggtcagccgaatgcaatgggaggacgcgaagccggaggtttggcacatttattacctggttatcgggttgtgaaaaatcctcagcatcgcgcagaagttgaggagttttggggacttaaaccaggacagatttcacccaatcccggtttgactgcttgggatatgattactggcttggaaagtgatgctgtcgggttattgtggattgcagctactaatccggctgtaagtatgccagatttggagcgaactaagaaggcgttgttgcgatcgccttttaccatttaccaagatgcttattatcccacagaaacctctgcctatgctcacgttttgctaccagcagcccagtggggtgaaaaaactggtgtgatgacaaactccgaacgggtggtaactctgtgtcaagcatttcgccaaccaccaagagaagctaaagcagattgggaaattttcgctgaagttggacggagattaggttttgaaaaagagttcgcctttgctaactcggctgaagtttatgctgaattcgtccaattaactcaaaatcgcccctgcgatatgacaggtatcagtcatgagcaattgacacaaggcccaactcaatggccttacccagccaagaaagtagagtcagtatttatcgatactgaaacaggactcttaagttttcagccagaagaagaaactttctctgacaaagaagccgagaagaagcgtaagtaccatacactcagaatgggaaaacggctttacactgatttacgctttcatacccctgatggacgcgctcaatttggggcatattactcaaagggattggcagaaccaccagacccagattatccttttgtgctaactaatgggcgactttacggacattggcatacccaaacacgcaccggtcgcattgaaaaaatttgcaaaatgcaccccgaaccgtttatcgaaattcatccccgtgatgcggcgaagttaggtattttagataatcagtgtgtgcaagtgcgatcgcgtcggggtaaagctcaatttcctgctaaagtgacaaaagcgatcgcacctggtacagtttttgtccctatgcactggggttcattatgggcagataatgccgaagctaacgccctcacccatccagaatcttgcccggattcgctgcaaccagaattaaaagcctgtgctgtgcagctgattccaatttctgtagaagttgcagtcaaagattatcaattccagtcatcacaatgctaactcgagacccagctttcttgtacaaagtggtgataaattggagctctgcagagctttcgttcgtatcatcgnnnnnnnnnnnnnnnnnnnnnnnnnnnnnnnnnnnnnnnnnnnnnnnnnnnnnnnnnnnnnnnnnnnnnnnnnnnnnnnnnnnnnnnnnnnnnnnnnnnnnnnnnnnnnnnnnnnnnnnnnnnnnnnnnnnnnnnnnnnnnnnnnnnnnnnnnnnnnnnnnnnnnnnnnnnnnnnnnnnnnnnnnnnnnnnnnnnnnnnnnnnnnnnnnnnnnnnnnnnnnnnnnnnnnnnnnnnnnnnnnnnnnnnnnnnnnnnnnnnnnnnnnnnnnnnnnnnnnnnnnnnnnnnnnnnnnnnnnnnnnnnnnnnnnnnnnnnnnnnnnnnnnnnnnnnnnnnnnnnnnnnnnnnnnnnnnnnnnnnnnnnnnnnnnnnnnnnnnnnnnnnnnnnnnnnnnnnnnnnnnnnnnnnnnnnnnnnnnnnnnnnnnnnnnnnnnnnnnnnnnnnnnnnnnnnnnnnnnnnnnnnnnnnnnnnnnnnnnnnnnnnnnnnnnnnnnnnnnnnnnnnnnnnnnnnnnnnnnnnnnnnnnnnnnnnnnnnnnnnnnnnnnnnnnnnnnnnnnnnnnnnnnnnnnnnnnnnnnnnnnnnnnnnnnnnnnnnnnnnnnnnnnnnnnnnnnnnnnnnnnnnnnnnnnnnnnnnnnnnnnnnnnnnnnnnnnnnnnnnnnnnnnnnnnnnnnnnnnnnnnnnnnnnnnnnnnnnnnnnnnnnnnnnnnnnnnnnnnnnnnnnnnnnnnnnnnnnnnnnnnnnnnnnnnnnnnnnnnnnnnnnnnnnnnnnnnnn

SEQ ID NO: 137 - DNA, 2543 bp, Pseudomonas syringae pv. tomato str. DC3000
  unsure (1)..(2543): unsure at all n locations
nnnnnnnnnnnnnnnnnnnnnnnnnnnnnnnnnnnnnnnnnnnnnnnnnnnnnnnnnnnnnnnnnnnnnnnnnnnnnnnnnnnnnnnnnnnnnnnnnnnnnnnnnnnnnnnnnnnnnnnnnnnnnnnnnnnnnnnnnnnnnnnnnnnnnnnnnnnnnnnnnnnnnnnnnnnnnnnnnnnnnttcttgtttgttgattaacccttaattaatccgggcgcgcctgatttatcacaagtttgtacaaaaaagcaggctcctgcaggaccatggcgtactaccgcaatccttccgatgtgaccgctatgcctgcctggcaagcgctgaccaaacaccgccaggccatgcaggacttcagcatgcgcgaagcgtttacggatgatcccaagcgcttcagccagtttacgctcagcagcgccggtctgtttctggactactcgaaaaacctgatcaccgccgaaacccgtgacctgctggttgcgctggccggtgaagtgggcctcaaggacgcgatcaaggctcaatactatggcgagctggtcaactcatccgaaggtcgcccggcgctgcacaccgcattgcgtcgtccggtaggcgacaagctgaaagtcaacggcgtcgatgtgatacccgacgttcaccgcgtgcttaaccagatgaccgagctggtcggccgcatccacgacggcctgtggcgcggttacaccgaaaagccgatcaccgacgtggtgaacatcggcatcggcggctcgttcctcggccccgagctggtttccgaagcgctggtggcgtacgcgcacaagggtgtgcgttgccattacctggcaaacatcgatggcagtgagttccatgaactgtccatgaagatccgcgccgaaaccacactcttcatcgtttcgtcgaaatccttcaataccctcgaaaccctgaaaaatgcccaggccgcgcgcgcctggtacctggcgcagggcggctcggaagtcgaactgcatcgccacttcattgcggtctccagcaacaatgcggcagcggtcgcgttcggtatccgtgaagaaaacatcttcccgatgtgggactgggtcggcggccgttattcgctgtggtcggctattggtctgcctatcgcgctggccatcggcatgtccaacttcaaggaactgctgtccggcgcctacaccatggaccagcacttccagagcgcccctttcgaccagaacatgcccgtgctgctcgcgctgctgggtgtctggtacggcaacttctggaacgcgcagagccacgcgatcctgccgtacgaccactacctgcgcaacatcaccaaacacttgcaacagctggacatggaatccaacggcaaaagcgttcgccaggacggcacgccggcactcacggataccggcccggtcatctggggtggcgtaggtgccaatgggcagcacgcttaccaccagttgctgcaccaaggcacacagatgatcccggccgacttcatcgtgccgatcgtcagcttcaacccggttgccgaccaccatcaatggctctatgccaactgcctgtcgcaaagccaggcgttgatgatgggcaagacccgcgccgaagccgaagccgagctgcgtgacaagggcatgagcgaggaagaggtgcaaaaactcgcaccgcacaaggtcatccccggcaaccgtccgagcaacacgctggtggtcgaacgtatcagcccgcgtcgccttggcgcgctggtggccatgtatgagcacaaagtgttcgtacagagcgtgatctggggcaccaacgcctttgaccaatggggtgtggagctgggcaaggaaatgggcaaggctgtgtaccagcgtctgaccggcggcactgaagaaccggcagacgatgcatcgacccagggcctgatcaactacttccgcggccgtcaccgcggctaagcgcaatagccccccaggctccgtgctacacacaagctcgctcttgattctggccgaaggccgtgggagcgaacttgttcgcgaatacggtatttcagacgatatatttttggcgaatgtagcggccccttcgctcgagacccagctttcttgtacaaagtggtgataaattggagctctgcagagctttcgttcgtatcatcgnnnnnnnnnnnnnnnnnnnnnnnnnnnnnnnnnnnnnnnnnnnnnnnnnnnnnnnnnnnnnnnnnnnnnnnnnnnnnnnnnnnnnnnnnnnnnnnnnnnnnnnnnnnnnnnnnnnnnnnnnnnnnnnnnnnnnnnnnnnnnnnnnnnnnnnnnnnnnnnnnnnnnnnnnnnnnnnnnnnnnnnnnnnnnnnnnnnnnnnnnnnnnnnnnnnnnnnnnnnnnnnnnnnnnnnnnnnnnnnnnnnnnnnnnnnnnnnnnnnnnnnnnnnnnnnnnnnnnnnnnnnnnnnnnnnnnnnnnnnnnnnnnnnnnnnnnnnnnnnnnnnnnnnnnnnnnnnnnnnnnnnnnnnnnnnnnnnnnnnnnnnnnnnnnnnnnnnnnnnnnnnnnnnnnnnnnnnnnnnnnnnnnnn

SEQ ID NO: 138 - DNA, 1478 bp, Synechocystis sp. PCC 6803
aaaaaagcaggctcctgcaggaccatgtacgaaaaacttcagccccccagcgttgggtcaaaaatcacctttgttgcaggtaagcccgtagtacccaacgatccgattattccctacatccggggggacggcaccggggttgatatttggcccgctacggaattagtcatcaatgcagcgatcgccaaggcctatggcggcgagaggaaaatcaactggttcaaagtctatgccggggacgaagcctgtgaattgtacggcacttatcagtatttaccggaagacactttaacagcgattaaggagtatggggtagccatcaaagggcctctcacaaccccggtgggcggtggtatccgttccctaaacgtggccctgagacaaatttttgacctctacacctgtgtgcggccctgtcgttactatcccggtactccgtctccccacaaaaccccggaaaaattagacattatcgtttatcgggaaaatacggaagatatttacctaggcattgaatgggcggaaggtacggaaggggcgaaaaagttaatcgcttaccttaacgatgaactgattcccacaactccagctttgggcaaaaaacaaattcgcctcgactctggcattggtattaaaccgattagtaagactggttcccaacggttggtgcggcgggctattctccatgcattgcgcttgccgaaagcaaaacagatggtgacgttggtccataagggcaacattatgaagttcaccgaaggggcgtttcgggattggggttacgagttggctacgacggaatttcgggcggaatgcgttacggaacgggaatcttggattttgggcaataaggaaagtaatccggacttaaccattgaggccaacgcccacatgattgaccccggttatgacactttgaccgaagaaaaacaagcggtcattaaacaagaagtggagcaggttttaaattccatttgggaatcccatggtaatggccagtggaaagaaaaagtcatggtcaatgaccgcattgccgatagtattttccaacagatccaaacccgccccgatgagtattccattctggcgaccatgaatttgaatggggattacctttccgatgccgccgccgctgtggtgggaggtttgggcatgggccccggagctaacattggggatagtgcagccatttttgaagccacccacggcactgcccccaaacatgctggtttagaccggatcaaccccggctctgtgatcctttccggcgtaatgatgctggaatttatgggctggcaggaggccgctgatctgattaaaaaaggtatcggagcggcgatcgccaatcgggaagttacctacgatttagcccggttaatggaaccgaaggtggataaacccctaaaatgctccgagtttgcccaggcgatcgtcagtcatttcgatgattaactcgagacccagctttcttgtacaaa

SEQ ID NO: 139 - DNA, 2968 bp, Xenorhabdus nematophilus
  unsure (1)..(2968): unsure at all n locations
nnnnnnnnnnnnnnnnnnnnnnnnnnnnnnnnnnnnnnnnnnnnnnnnnnnnnnnnnnnnnnnnnnnnnnnnnnnnnnnnnnnnnnnnnnnnnnnnnnnnnnnnnnnnnnnnnnnnnnnnnnnnnnnnnnnnnnnnnnnnnnnnnnnnnnnnnnnnnnnnnnnnnnnnnnnnnnnnnnnnnnnnnnnnnnnnnnnnnnnnnnnnnnnnnnnnnnnnnnnnnnnnnnnnnnnnnnnnnnnnnnnnnnnnnnnnnnnnnnnnnnnnnnnnnnnnnnnnnnnnnnnnnnnnnnnnnnnnnnnnnnnnnnnnnnnnnnnnnnnnnnnnnnnnnnnnnnnnnnnnnnnnnnnnnnnnnnnnnnnnnnnnnnnnnnnnnnnnnnnnnnnnnnnnnnnnnnnnnnnnnnnnnnnnnnnnnnnnnnnnnnnnnnnnnnnnnnnnnnnnnnnnnnnnnnnnnnnnnnnnnnnnnnnnnnnnnnnnnnnnnnnnnnnnnnnnnnnnnnnnnnnnnnnnnnnnnnnnnnnnnnnnnnnnnnnnnnnnnnnnnnnnnnnnnnnnnnnnnnnnnnnnnnnnnnnnnnnnnnnnnnttcttgtttgttgattaacccttaattaatccgggcgcgcctgatttatcacaagtttgtacaaaaaagcaggctcctgcaggaccatgaaaacgatcatgaaaacaatgagcaatgaaaaacaaggtcctttgattgttgaaggtaaactcgctgacagtgaacgtatgaagtcagaaagcaactacttacgcgggacgatcagcgaagatttaaagaatgggctgacaggcgggtttgaaggcgataattttctcctcatccgtttccacggtatgtatcaacaggatgatcgtgacatcagagctgagcgcgcggaacagaaacttgaaccccgccatgccatgatgttgcgttgccgcttaccgggaggaattattactccccgccaatggctgggcattgatcagtttgcgacagagagcacgttgtatggcagtatccgattgactaaccgccagacattccagtttcacggcatcctgaaaaacaacgtcaaaccggcgcatcaattactggctcaaatgggattggattcactggcaaccgccaacgatgttaaccgtaatgtactgtgtacctctaatccagtgcagtcggctttgcatcagcaggcttatgaatgggcgaagaaaatatctgaacacctcctgccacgtaccaacgcgtacgctgagatctggctggataaagaaaagatcgctacaaccgacgaagagccgatcctcggtaaaacgtatctaccgcgtaaattcaaaacatcagtcgttatcccaccacaaaatgatgttgatctgcatgccaatgatatgaacttcgttgctattgcagagaatgatcagttgatcggctttaacgtgctggtgggtggtggattagccatgactcacggcgataagaacacttttccacgtctggcaagtgaatttggctatatcccactggagcatacactggctattgctgagtccattgtgacaacacagcgtgactggggtaaccgaactgaacgtaaaaacgctaaaaccaaatatacccttgagcgtgtcggcgttgaaactttcaggcaggaagttgaaaaacgtgcaggtgtgaaatttgagccagtccgcccttatgaatttactgggcgtggagatcagattggctggttaaaaggcattgatgatcaatggcatttgaccctgtttattgaaaacggccgcttgctggattatccggataaaccactaaaaaccggcgtggcagaaattgcccgaattcacaaaggcgattttcgtcttaccgcaaatcagaacctgatagtagcgggagtggcggaaaatgaaaaagcgcgtattgaatccattgcccgtgcgcatggtcttattgatgacggcgtgacctcactgcgtcaccattctatggcgtgtgtttcatttccgacttgccctttagcgatggcagaagcggaacgtttcctgccaacctttgttgatcatgtcgatgcgttaatggcaaaacacggagtcagccatgaacatatcgttctgcgtgttacaggctgccccaatggatgtggccgggcgatgctggcagaagtcgggctggtgggcaaagcgccggatcgttataacctgcatcttggtggaaatcgcaatggtagccgcattcctcgtatgtatcaggaaaatatcacctccgctgaaatcctgactattctggatgaacttattggtcgttgggctacagagcgtaatgaaaatgaagactttggcgatttcctgatccgaactgacattatcaaacctgtattgaactcagctatcgacttttacgactggcaggaggcagtatgagccggccacatttagctgagttactggctttgccccctcgagacccagctttcttgtacaaagtggtgataaattggagctctgcagagctttcgttcgtatcatcgnnnnnnnnnnnnnnnnnnnnnnnnnnnnnnnnnnnnnnnnnnnnnnnnnnnnnnnnnnnnnnnnnnnnnnnnnnnnnnnnnnnnnnnnnnnnnnnnnnnnnnnnnnnnnnnnnnnnnnnnnnnnnnnnnnnnnnnnnnnnnnnnnnnnnnnnnnnnnnnnnnnnnnnnnnnnnnnnnnnnnnnnnnnnnnnnnnnnnnnnnnnnnnnnnnnnnnnnnnnnnnnnnnnnnnnnnnnnnnnnnnnnnnnnnnnnnnnnnnnnnnnnnnnnnnnnnnnnnnnnnnnnnnnnnnnnnnnnnnnnnnnnnnnnnnnnnnnnnnnnnnnnnnnnnnnnnnnnnnnnnnnnnnnnnnnnnnnnnnnnnnnnnnnnnnnnnnnnnnnnnnnnnnnnnnnnnnnnnnnnnnnnnnnnnnnnnnnnnnnnnnnnnnnnnnnnnnnnnnnnn

SEQ ID NO: 140 - DNA, 877 bp, Arabidopsis thaliana
ttaattaattgagatgtcagttaaagcaaggagaatttctggtagattagagactgtagtaactaaggttaattatgcatttgatcctgttgacgatgacaaaatcataagaaaccggcttctaacccgaaccacgaccactcgaggcgagcctccattgaagaaacttcagaagaagttcacttcttttgtactcgaggtggataaagaagaagagaactataacgactgcggtagacttgccaaagcttttttacaggaactgtcaactttcgagattccgcttctgaagagccaagcggttgtggaagcaaaccttagggagaaagagagctttaatgaggtgaaagatgagacggaaaggcagataatgcaggcgaaagctgagattgaagatctaaagaagcagcttgaggagagtaaaatagatagacagcataaagaagagtgtgagacgataaggaaactgatttctgcgcaaccgccaaggtcagagacagagaaggttatatatgaattgaacaaggagattgctgagcttgaagcagagagcactgcaagttggagattgcttgagctaaggaagaagcagtttgctctcctgatgcatgtggtaatgtcaaaaaaccgaaccttttacgtttcagtcttcattacgtgatctatgtttgaagtttgagtttgtgattgtgaacgtttttgggaatgtaggtggatgagttgcagaatacaatggaagatgagcagaagagtttggtggacgagattcggtcagcgtcggaagatcagaggaacataaccgacgctatgtctgttgattaagtccaaatctcgataaaacctgcatcatgttcaagcgttgcttgtcatgcgcgcc

SEQ ID NO: 141 - DNA, 1136 bp, Arabidopsis thaliana
ttaattaactgagtctgagagatgctaggagcgattcatttgggagtattagcagcttgtttcgtcctcttcgttcccatggcaatggctggttggcatctgagcaggaacaagatgctcttctttagtggcgctttgtttatttctctcgcggtttgtgttcatctcacgccttatttcccttccgtttccgacatcgttgcctctgtttcctctgttgttgtctacgatcatcgtatctcttgtatcaacgaggttaatcagattgtctgggatgttaaaccggtaccgaatccggagtctgttcgtaggaacaatggctcaacaaagcttgattatttcgtgaagaactgggattggatgaaatcgaggaaagttttgagttgtgagtttcagaaattggataagttcgatgtttcggatttgttgaatggatcgtgggttgttgttgctggtgattctcaggcgagattcgtggctttgtctttgttgaatcttgttttgggttcggattccaaggctatggattcggttagaggggatttgtttaggagacatagtgattacagcattgtggttaaggagattgggatgaagcttgattttgtttgggctccttatgagaaagatttggatgatcttgtggtatcttataagaagatgaaaaagtatcctgatgttgtgatcatgggaactgggttatggcatatgcttcatgtgaacaatgcttcagattttggttttaggttgaggcaattgagtagtcatgtggagtctctagtgccccttacgccaaaggagcaagaaggaggtgggtcggtctccggtagatctgtgcatctgttctggattgggatgccggttttgatcaacgggatgttgaatacggatgagaagaaggagaagatgagtgatacggtgtggcatgagtatgatagatcactcggggagagtaagatcttacgtcaaatgggtggtcctcttatcttgcttgatatccagtcgtttacctggaactgtggaccgcaatgtacacttgacgggatgcattatgactctgcggtctatgatgccgctgtccatgtcatgctcaatgcgttgcttattgaatctcatcaatctttatgaggcgcgcc

SEQ ID NO: 142 - DNA, 1426 bp, Arabidopsis thaliana
ttaattaagaagaagaagcacggtaggaacgacgacgatgaatcgtgctttggtcctacttttatatgtttgtactgtttcttgtttagcttcaagcaaagttattttgatgaggaataacatcactctctcttttgatgacatcgaagctaacttcgctccgtcagtgaagggtacaggtgaaattggagtggtttatgtggctgagcctcttgacgcttgtcaaaatcttatgaataaaccagaacagagctccaatgaaacttctccttttgtgttgattgttagaggaggctgtagttttgaagagaaagttagaaaagctcagagagctggtttcaaagctgctattatctatgacaatgaagaccgtggaacattgatagcaatggcaggtaactctggaggtataaggattcatgcggtctttgttacgaaagaaacgggagaagttttaaaggagtatgcgggtttccccgatacgaaagtttggttgatcccaagttttgagaactcggcgtggtctattatggcggtttcgtttatctcgctgcttgcaatgtcggctgttctcgctacttgtttctttgtgcgtaggcatcgaataagaaggcggacatctcggtcctctcgagtgcgtgagtttcacggtatgagccgccgcttggtgaaagcaatgccgagtcttatattcagttcgtttcatgaagataacactactgcattcacttgtgctatttgccttgaagactacactgttggagacaagctcaggctcttaccttgctgtcacaagtttcatgctgcgtgtgttgactcatggttaacctcttggagaactttctgtccggtgtgcaaacgagatgcaagaacgagcacgggagagcctccagcttcagagagcacgccattgctctcatctgctgcatcgtctttcacttcttcctctctgcactcttcagtcagatcatctgcactattgattggtccttccttgggctcattaccaacttcaatctctttctctcccgcatacgcaagctcatcctatattagacaatcattccagtcttcctctaaccgtcgatcacctccaataagcgtaagtcgaagctcagtggatctcagacaacaagcagcttctccatctccatcaccatcacagagatcatacatttcccatatggcttctccacagtcactaggttacccaactatctcccctttcaacacgaggtacatgtcaccgtatagacctagcccgagcaatgcatcacctgcaatggctggatcatcgaattatccgttgaatccactgcgttacagtgaatcagctggaactttctctccatacgcctctgcaaactcgcttccagactgttagaaagtctacagaaccaaccactcttggtggcgcgccaaaaat

SEQ ID NO: 143 - DNA, 1303 bp, Arabidopsis thaliana
ttaattaacataaaaatggttgtcgccaatgatctctcgtccaagattctccccagagttctcatcgtctctcgtcggactctccgcaagaacaagtacgtggacttcgtaggagaataccatctcgatctcatcgtctcctccggtgccgtccctgtcattgtcccacgtgtcaatgggatccattctatgctccagagcttcgagcctattcatggtgtcctcctctgcgaaggagaagatgtcgatccttctctctacgcggacgatgaattatcagacctctcgccagaagacatggaggagattaagaaggcgcatgcagaggacatgaccatcgaccgagagaaagacagcattgagctgactctagctagactctgtctcgaaagaaacattcctttcttaggcatttgtcgtggctctcagattctcaacgttgccgcaggtggaactctttaccaagacatcgacaaagaactcggaactacgatgacaacgacaaatcatatagattatgacaactacgatgggcacagacacgaggctagaatcgtggaggagactccgttacataagttgttcgaggagatggagataatggtgaactcgtatcaccatcaaggtgtgaagagactggctcaacgttttgtgccgatggcttatgctcctgatggtttgattgaaggattttatgatccgaatcgatatgatccaaaggaaggtcagttcttgatgggtctgcagtttcatccagagaggatgaggcttccaggctctgatgagtttgattatccaggctgcgctttagtttatcaggagtttgtgaaagctgtgatcgcatttcagaagaaacaagtaaacgcaacacaggttgagatgaagaggaagaccaccacactcgtcaaaagcttctcccaagctgagtttctagaggtcagagattcgtttgttttacatacatacaggctctatgttttgccactcaatattggattttctgacatggctgaatgaatcatgcaggctaatacagttctaagcaagcaacaagagaataggctgaagcagatgggagcgacggtgaggaactcatgtgtgtatatgaaaaggatgaaaatgaaagaggaacaagagagagcaatggacaaactttcggcggagcggctgtctgatatgctttccttccaccatatgatggctcgtctttgctccaatgccatcaagagaaaactactagaacccgaacacacagataggaccatagagtcctccttttttctcaactattagccggcgcgcc

SEQ ID NO: 144 - DNA, 473 bp, Arabidopsis thaliana
ttaattaatgatgaacaaaggcggtggttccggtggaggaagcggaccaacagctgctgcggcagccgctgcgttacagaagcaaaaggcgttgttgcagagagttgatactgacatcacatctgtcgtcgataacttcaatcaaatcgtcaatgtcgcaagggtgagtgatccgccaatgaagaactctcaggaagcatacatgatggagatgcgagcatcaagattggttcaagcagctgattctcttttgaaacttgtatcagagctgaagcaaaccgcgattttttcaggatttgcatcattaaacgatcatgtagaacaaagaattgcagagtttgatcaagaggccgagaagacgaatcgattgttggctagaattgctgatgatgcatctgctagtcttaaagagcttgagtctcactattactcttctgctcagagatcgactctagactaaatccaggcgcgcc

SEQ ID NO: 145 - DNA, 693 bp, Arabidopsis thaliana
ttaattaattttatccatgagtcgcataatgggattgttcgatctcgagaaacacttcgccttctacggtgcttaccatagcaatccgatcaacattctaatccacatcatcttcgtttggccaatcttcttctcagttttacttctcctccactcgtcgaccccaattttcgacccctctcaattagggttttctcaatcgttgaccctcgacggcgttttgcgatttaacgttgggtttatattcgccttgatttatgctctgttctatatcggtttggataagaaatctggatttgtagctgctcttatgtgtttctcttgctgggttggttccagttttcttgctgttcgactaggatcttctcttgccttaaaggttgggttagcatctcagctgttatgttggaccgggcagttcgttggccatggagtattcgagaaacgggcacctgcgctgttagacaatttactccaagcttttctcatggctcctttcttcgtgttgctcgaggttcttcaatcggttttcgggtatgaaccatatcccggttttcaagcgcgtgtgaatgccaaggtagaaagtgacatcaaggaatatagggcaaagaagcagaagaagaataagatcacataagcttggattatatataactgaagaacttgaacccatttgtcgtgtttcggcgcgcc

SEQ ID NO: 146 - DNA, 1422 bp, Arabidopsis thaliana
ttaattaacatggggaaggaaaatgctgtgtctcggccattcactcgttcccttgcctctgctttgcgcgcttcagaagtgacttctactacacagaatcaacagagagtaaacacaaaaagaccagccttggaggatacaagagccactggacccaacaagaggaagaagcgagcggttctaggggagatcacaaatgttaactccaatacagctatacttgaggccaaaaacagcaagcagataaagaaaggacgcggtcatggattggcgagtacatcccagttggcaacttctgttacttcagaagtcacagatcttcagtccaggaccgatgcaaaagttgaagttgcatcaaatacagcaggaaacctttctgtttctaaaggcacagataacacagctgataactgtattgagatatggaattctagattgcctccaagacctcttgggagatcagcttctacagctgagaaaagtgctgttattggtagttcaactgtaccggatatcccaaaatttgtagacatcgattcagatgacaaggatcctttactgtgctgcctctatgcccctgaaatccactacaatttgcgtgtttcagagcttaaacgcagaccacttccggactttatggagagaatacagaaggatgtcacccagtccatgcggggaattctggttgattggcttgtggaggtctctgaagaatacacacttgcatctgacactctctacctcacagtgtatctcatagactggttcctccatggaaactacgtgcaaagacagcaacttcaactgctcggcatcacttgcatgctaattgcctcgaagtatgaggaaatctctgctccacgcattgaggagttttgcttcattacggataacacctacacaagagatcaggtcctggaaatggagaaccaagtacttaagcattttagctttcaaatatacactcccactccaaaaacgttccttaggagatttctcagagcagctcaagcctctcgcctgagcccaagccttgaagtcgagtttctagccagctatctaacagagttgacattaatagactaccatttcttaaagtttcttccttccgttgttgctgcttcagcggtttttctcgccaagtggacaatggaccaatcaaaccacccatggaatccaacacttgagcattacacaacgtacaaagcatcggatctgaaagcatctgttcatgccttacaagatctgcagcttaacaccaaaggttgccccttgagcgctatacgcatgaagtataggcaagagaaatacaaatctgtggcggttctcacgtctccaaagctacttgacacgctattctgaggcgcgccaaaaataaccgataatagttttgtcacattgatggtccaatttcgttttcat

SEQ ID NO: 147 - DNA, 1119 bp, Glycine max
aactctttgtttcttgtttgttgattaacccttaattaatccgggcgcgcctgatttatcacaagtttgtacaaaaaagcaggctcctgcaggaccatggctgtggaactcatggggttcccaaaactagacgaacaaaaggccattcaagaagccgcatcagaaggcctcaagggcatgaaacacctgatccgaaccctttccaaccaaccctctcacttaaacaccgaacttaccgacgttaccgtttcaaagttcaagaaacttatttcactcttaaatcgaaccggccacgcccggttcagacgcgccccggttcagtactcatctccacacgcacccgttcacaacactaacgcttccacctcatcaattcaactccctcctccgccgcaaaaccctaatattcccgcgctggcgcagtttcctactccggcgccggtggccgtgcaccacacgccggtgacgctcgatttcacgaagccgcacaacgcgcttctgagctccaacgccaaatccgtcgagctcgagttctcgaaggaaaccttcagcgtttcctctaactcctctttcatgtcctccgcgatcaccggcgacggcagcgtctccaatgggaagattttcctcgcgccaccggcgacctccgccggaaaacgtccggcgttcaagaagcggtgccacgaacaccgcgaacactccgacgatgtctccggcaacagcaagtgccactgcgttaagcgaaggaaaaatagggtgaagagcactgtgagagtgccggcgattagttcaaaagtcgccgatattccaccggacgagtactcgtggaggaagtacggtcagaaaccgatcaagggttccccatacccaaggggttactacaagtgcagcacgattagagggtgcccagcgaggaagcacgtggagcgcgcaccagacgatcctgcaatgctgatagtgacgtacgagggggagcacaggcacgcggttcaggctgcgatgcaggagaacgcagccggggtggtggggttggtgttcgagtcaacgtagctcgagacccagctttcttgtacaaagtggtgataaattggagctctgcagagctttcgttcgtatcatcgg

SEQ ID NO: 148 - DNA, 1223 bp, Zea mays
ttcttgtttgttgattaacccttaattaatccgggcgcgcctgatttatcacaagtttgtacaaaaaagcaggctcctgcaggaccatgtcgcggacgctggtgcagccggtggggcagaagcgcctcaccaacgtggcggtggtgcggctgcgcaagcacggccagcgcttcgagatcgcctgcttcccaaacaaggtgctctcgtggcgctcccgcgtcgagaaggacatcgacgaggtgctccagtcccacaccgtctactccaacgtctccaagggcatcctcgccaactccaaggaactcgccaaggccttcggcaccgacgacctgacccaaatctgcatcgagattctggagaaaggggaactccaggtctccggcaaggagagggaggcgcagctctccagccagttccgcgacatcgcaactattgtcatggagaagaccatcaacccagagacccgccgcccctacaccatcaccatgatcgagcgcctcatgcacgagatacacttcgccgtcgacccaaaccttacctccaaggaacaggctctaaaagttatcaagaagctcacagagcatttccccataaagcgtgcaccactaagggtgcggttcactgcaccaaaacccaattttccaggccttatggagaagattggcggatggaatgctaccatcatttcaaaggatgaattgagcactcagccttctattgtatgcgagatcgagccatctcttctgcgctcatgtgaggagcggttgaaggatgtgcaagggagggtcgaagtgctgtctgtctccacgcacgtagaaagtggcccatctgtggaacaacacgacagtgtggaagtgccacaagcggctcctgtaaaggaacctgatgctgttgctcagataagtgagaccatgcagaaacagagcatttctactgaaagccagggcaatgcacaaggcaagcaacagagaaggtgcaaggagtgtgatgtactcgtggaggacaagctatacagagagcactgcaagagtgggtggcacaaacacaactacacacgccacaagaatgggctcccgcctctcagccaagaggagtgtatggtggagatggaattggccgactccaagaaagaccttaaagactacgatttctgactcgagacccagctttcttgtacaaagtggtgataaattggagctctgcagagctttcgttcgtatcat

SEQ ID NO: 149 - DNA, 545 bp, Zea mays
ttcttgtttgttgattaacccttaattaatccgggcgcgcctgatttatcacaagtttgtacaaaaaagcaggctcctgcaggaccatggctccggggaagcgaggcaaggccaaaggggcggcggcgccgctgcccaccgcggcggcgagtaccggagctgtagggttccctggctgcctccgcctgatgccgccgtcgaccgtggccatatctatacacgccaagcccggctccaaggtcgccaccatcacagagattggggacgaggcggtgggcgtgcagatcgacgcgccggcgagggatggcgaagccaacgccgcgcttgtcgactttatcagctcggtacttggggtgaagaaaagagaagtgtctataggctcgggttctaaatcgagggaaaaggttgtgctggtacaagatgcgactcttgaaggtgtctacgatgctctgaagaagtcttgtaattgtgcatgactcgagacccagctttcttgtacaaagtggtgataaattggagctctgcagagctttcgttcgtatcat

SEQ ID NO: 150 - DNA, 528 bp, Zea mays
ttcttgtttgttgattaacccttaattaatccgggcgcgcctgatttatcacaagtttgtacaaaaaagcaggctcctgcaggaccatgcgtggggaaaacaacatagtcctccttctcctcctcctgtttgctgtaatttctccgaaccaagtaattggtagtgcttgtactccggaacagaaggctgccatcctaaatcaatgcgaagagtacatcaagcctggatacccccttatactgccatcgtacgccagtgtgtgttgcgacaaggtgagagatgtgccaaatagggacatgaactgcatcgtcgatctgctcacgcctccagagaaggcgaaacacggtgtcgacaagataaaacgtctgaaagatctctgcgataactcgcctcatcatcaggtggtggtgtagacagacagcagctgtcattgctaatggagttcggaggcaagatatactcgagacccagctttcttgtacaaagtggtgataaattggagctctgcagagctttcgttcgtatcat

SEQ ID NO: 151 - DNA, 1337 bp, Glycine max
aactctttgtttcttgtttgttgattaacccttaattaatccgggcgcgcctgatttatcacaagtttgtacaaaaaagcaggctcctgcaggaccatgagggatatttgtaggaacttccagcgaggcagctgtcaatatggagaaaggtgtagatatttacatgttcagcaacagcggaaacctaatgttaatgggtttggaggacagagcagttctcatcaacagcaaaatacaaatccctttggatttgggtctggctctggctcacaacaacagcagaagggtaatccttttggttttggcaagcataacagctcccagttgaatggggggcctcattctgagaacaaacccaaccaatacaagccttttgaaaacaaatggaatcgacagtcatccaaaccccagcagaacggcgtgaaatctgaaaacaaccccaaacaatcagaacatcatatatgcacagatcctgagaactgcaagcgccagattgcagtagattttgagcaagagaaaccactttggatacttacatgctacagtcattgcaaaggtgctccttgtgacattgttggtgatattagctatgaagaattgcgggcatcagcttacgaggatgctaatcgtggtatgagcttgcaatcaatagttgagaaagagagaaatatactaaaatccaagttggttgagtttgacaaactactttctgaaccttacaaaataccaataagttcttctcttggcagtcaaacaccccaatctattggagccaatgcaaatccgttttcaacatctcaaagtaatggtccattgtcagtctcaagctttagccaattgagtactccattgaacatgggttttgaaaggccatctgcaccactaacaaacactccgacgaagcctggtttctttggaagtggaggaaactctttggcatccaacacagcaaacctaaacagcaatggtgtcttcggtgttcaaagcggcccatattctacaccattggatttgaaaatgtttccaggttcaactcaggaaacatcgactgctttcagtaactctggtcccacttcaatgtttcaaacaacaccagatgtccagttgttaagtcagtcccaagtggagaaagtgtcggtagatccgagtatttggttaaaagagaaatggaatccgggagagattccagaagaagctcctcctgatacatttgtacggtagacatttgtgtattggcatctgaaacacggcactcaatactagctcgagacccagctttcttgtacaaagtggtgataaattggagctctgcagagctttcgttcgtatcatcggtt

SEQ ID NO: 152 - DNA, 614 bp, Zea mays
ttcttgtttgttgattaacccttaattaatccgggcgcgcctgatttatcacaagtttgtacaaaaaagcaggctcctgcaggaccatggggtcagttttgctgccaacgctgcggctgaagagtgaggtcgacgccgccatccgcgacaccctcgataaggtcctcgttctccgatttggtcgcgccaccgacgccacttgcctccacctagatgacatcctggctaaatcttcttgggacatatccaagtttgctatggtagcattagttgacatggactctgaggagattcaagtttacattgactactttgacatcactttggttccagcaaccattttcttcttcaatgcccatcacatgaagatggattcagggacacctgaccacacaaaatggataggttcttttagcagcaaacaggactttatcgatgtagttgaggcaatattcagaggtgcgatgaaaggcaaactgatagtgtcttgcccccttcctcctgagaggataccaagattccagcttcttttcaaggatgtctgactcgagacccagctttcttgtacaaagtggtgataaattggagctctgcagagctttcgttcgtatcat

SEQ ID NO: 153 - DNA, 909 bp, Synechocystis sp.
aactctttgtttcttgtttgttgattaacccttaattaaacaatggcttcctctatgctctcttccgctactatggttgcctctccggctcaggccactatggtcgctcctttcaacggacttaagtcctccgctgccttcccagccacccgcaaggctaacaacgacattacttccatcacaagcaacggcggaagagttaactgcatgcaggtgtggcctccgattggaaagaagaagtttgagactctctcttaccttcctgaccttaccgattccggtggtcgcgtcaactgcatgcaggccatggagctcatcgattcccgtggcagaattttcggcatagtcagcctgttggatctgggggccgccttgatcatcctcatggtagctgtgggaattttcgttctgccgggcagttctggcaaaagcattcttgcccaagccaacgccgcttccattgaattgacgaccattgtccggggattaaacgtattagatccccaggtggtgctggatgagtttaaagccgaaaaaaccaacatcattattcgcaatcaaccggctggccaggtggaggtagtgaatgtgcaggaactccctcgcaatttagcagtgccccagcctgatggttccgtcaaatctctgccggatcctcggccagagtctaattacagccgggatatgctcctgaccctcaaaggtaggggggatttcacctccaccggcatggttttagggggacaaaaggtgaaaattggcacggttttagaattagaaggcaaaaactataacttcaatgccagtgtggtgggcatcaatcaaccaaagtgaatttaaatacccagcaaatacccagcaaattggagctctgcagagctttcgttcgtatcatcggtttcgacaacg

SEQ ID NO: 154 - DNA, 1435 bp, Xanthomonas campestris
ttcttgtttgttgattaacccttaattaaacaatggcttcctctatgctctcttccgctactatggttgcctctccggctcaggccactatggtcgctcctttcaacggacttaagtcctccgctgccttcccagccacccgcaaggctaacaacgacattacttccatcacaagcaacggcggaagagttaactgcatgcaggtgtggcctccgattggaaagaagaagtttgagactctctcttaccttcctgaccttaccgattccggtggtcgcgtcaactgcatgcaggccatggcacagtccaagccgctgttccccctcaacgcgtggtacgccgtcgcctgggaccacgaggtcaagcacgcgctcaccccgcgcaagctctgcaacctggacgtggtgctctaccgcaccaccgccggggccgtggtggcgttggaagatgcctgctggcaccggctggtgccgttgtcgatgggcaagctgcgcggcgacgacgtggtctgcggctaccacgggctggtctacaacgcgcagggccgctgcgtgcacatgccctcgcaggaaaccatcaacccctcggcctgcgtgcgcggctttcctgtcgccgaaaagcaccgctacgtgtgggtgtggccgggcgacccggcgcaggccgatgtggcgctgatcccggacctgcactggtcgcacgatccggcctgggccggcgacggccgcaccatccacgccaaatgcgattaccggctggtgctggacaacctgatggacctcacccacgaaaccttcgtgcatggctcgagtatcggccaggacgaagtggccgaagcgccgttcgaggtggtgcacggcgaccgcacggtgaccgtgtcgcgctggatgcacaacatcgacccaccgccgttctgggccggccagatcgcgcggcacctgaactaccacggcaaggtggaccgctggcagatcatccatttcgaagcaccgggcaccatcgccatcgatgtcggcgtggccatcaccggcaccggcgcgccgcagggtgaccgcagccagggcgtcaacgggttcgtgctcaacaccatcaccccggaaaccgacaccacctgccattacttctgggcattcatgcgcaactacgcgctgcatgaccagtcattgaccacgctcacgcgcgaaggcgtcaccggcgtattcggcgaagacgaagccgtgctggaagcccagcaacgcgcgatcgaagcgcatccggaccacgcgttctacaacctcaacgtggacgccggcggcatgtgggcgcggcgcgtcatcgaccgcctgatcgcgcgcgaacagcgcgccggcgacctgtccttgcgcatggtggggtgaatttaaatacccagcaaatacccagcaaattggagctctgcagagctttcgttcgtatcatc

SEQ ID NO: 155 - DNA, 1165 bp, Synechocystis sp.
tttcttgtttgttgattaacccttaattaaacaatggcttcctctatgctctcttccgctactatggttgcctctccggctcaggccactatggtcgctcctttcaacggacttaagtcctccgctgccttcccagccacccgcaaggctaacaacgacattacttccatcacaagcaacggcggaagagttaactgcatgcaggtgtggcctccgattggaaagaagaagtttgagactctctcttaccttcctgaccttaccgattccggtggtcgcgtcaactgcatgcaggccatggccgtcactgatttaagtttgaccaattcttccctgatgcctacgttgaacccgatgattcaacagttggccctggcgatcgccgctagttggcaaagtttacccctcaagccctatcaattgccggaggatttgggctacgtagaaggccgcctggaaggggaaaagttagtgattgaaaatcggtgctaccaaacgccccagtttcgcaaaatgcatttggagttggccaaggtgggcaaagggttggatattctccactgtgtaatgtttcctgagcctttatacggtctacctttgtttggctgtgacattgtggccggccccggtggagtaagtgcggctattgcggatctatcccccacccaaagcgatcgccaattgcccgcagcgtaccaaaaatcattggcagagctaggccagccagaatttgagcaacaacgggaattgcccccctggggagaaatattttctgaatattgtttattcatccgtcccagcaatgtcactgaagaagaaagatttgtacaaagggtagtggactttttgcaaattcattgtcaccaatccatcgttgccgaacccttgtctgaagctcaaactttggagcaccgtcaggggcaaattcattactgccaacaacaacagaaaaatgataaaacccgtcgggtactggaaaaagcttttggggaagcttgggcggaacggtatatgagccaagtcttatttgatgttatccaataaaagcacttccagcttttagcgaacattgctttttatttaaatacccagcaaatacccagcaaattggagctctgcagagctttcgttcgtatcatcggtttcgacaacgttcgtcaagttc

SEQ ID NO: 156 - DNA, 1423 bp, Synechocystis sp.
aactctttgtttcttgtttgttgattaacccttaattaaacaatggcttcctctatgctctcttccgctactatggttgcctctccggctcaggccactatggtcgctcctttcaacggacttaagtcctccgctgccttcccagccacccgcaaggctaacaacgacattacttccatcacaagcaacggcggaagagttaactgcatgcaggtgtggcctccgattggaaagaagaagtttgagactctctcttaccttcctgaccttaccgattccggtggtcgcgtcaactgcatgcaggccatggttcaacaattagaacgtagtcagcaaaaattaaaaattacgccctttgcaaaaaagttgggtagtccccttggtaaacaaactatttctaccctgcaaatcaatttgggtaaacgctgtaatctagcctgtagccattgccatgtggaagctagtcccaaacgcactgaagaaatatcaccggaggtttgtgaacaactaattgccattattcaaaaatttccccaaattaaagtggtagatctcaccgggggagcaccggaaatgctctacggctttaagcccctggtggaagcatctaggaagatgagaaaagaagtcattgtccgctctaatttaaccatttactttgaaatgggatttggagacattcccgcatattgtgcccagcatcagttgagagttgtggcgtcattgccctgttaccttgaagataatgtggataaaatgcgtggcaacggggtttatgaaaaatcaattaaagctcttcaatggttgaataatctcggctatgggaaggatgctaatctagttctagatttagtttataaccctcctttactaacctcagataaattttccctcccccctgcccaggaaccccttgaacaggattacaaaaagttcctcaaagaacattttgatatcaattttaatcacttgctaactatcacaaacttacccattggccggagtaaatttcatcttgacaagcatcaactgcaccaaaaatatttgactttcctagaaagcaattttaatccagatacggttaataatctaatgtgtcgtaatgaactttccattgactatttaggtaacgtttatgattgtgattttaatcaaatggaaaatattcctgcggaagataaatccagccataagttaaccgttgctgatctactaagagctgacaatttagacttaattcagcaggttaaaaccgccgattattgttatggttgtaccgctggttccggctctagttgcggaggggcattaatttgattttgactgatattattcctgctttcctcatacatttacactgcaatttaaatacaaatacccagcaaattggagctctgcagagctttcgttcgtatcatcggtt

SEQ ID NO: 157 - DNA, 570 bp, Arabidopsis thaliana
atgtcgatctccggagctgtgcttagtgggttgggtccttcgttcttgatcagtggaggcaagagaagcggcgttggcggtggagctatgaaagttggccggaagaatgtgatcattgcacctcagcgcaagaagtcatgggtctcagccgccgtgaaaggtgctggtaactcaccgaacgaccccaaatggcttgatgatgcctcagagaaagcttcggggtacgtgaaagagaagggaagtgaagtgggaaacgtgtctgctcaaaagggacaagagcttcaaaatcagatggagagagcaaaagactacatttttgggaaagctggtgaagcgatggactcggtggctgaaaatgcaaagagagcttcggattttgtgaccgagaaaggcaaagaggtgaaggaagaaactacttcaaggacggacaaagccaaagattttatcgttgaaaaagccggtgacgtaaaagatacggctatggatatgagaaacaaaacgtctaagtacgtcggagataaagcaacggaggctaaagaagcaatattgcctccaaaaactgatgcatag

SEQ ID NO: 158 - DNA, 871 bp, Synechocystis sp.
ttcttgtttgttgattaacccttaattaaacaatggcttcctctatgctctcttccgctactatggttgcctctccggctcaggccactatggtcgctcctttcaacggacttaagtcctccgctgccttcccagccacccgcaaggctaacaacgacattacttccatcacaagcaacggcggaagagttaactgcatgcaggtgtggcctccgattggaaagaagaagtttgagactctctcttaccttcctgaccttaccgattccggtggtcgcgtcaactgcatgcaggccatggacgttaccatttatctccgttggtccgcctacgctaccatcgccagttttatctttatggtactggcctttgtttttcgttgggggttccgctttcgcctggtgggggtgacgagctttatgacagttttaacgataggcatttttggcctgggtttgggcatgttcgaccgccccacggtggaaggctcagtgaagttcaatcgggtgtacgacaatggtgctaaccaaattgtcatcagtgtgccggtgacagtgtccgctacggaagtggaagccaccctcaaacaggccgccaataattacttttccctgggccgcatttccaccgacggcaaagaacaaatggtgatccgggcccgaaccctgattcatccccagcctggcctaactaaacccctctatttaggctctgcttaccgcaccctgggcaccaaagaaaacgatcagattgagattaaacttgaccgcaaagccctccgggaattagagcgcaaccaggccgcatgaatttaaatacccagcaaatacccagcaaattggagctctgcagagctttcgttcgtatcatc

SEQ ID NO: 159 - DNA, 897 bp, Bacillus halodurans
ttcttgtttgttgattaacccttaattaaacaatggcttcctctatgctctcttccgctactatggttgcctctccggctcaggccactatggtcgctcctttcaacggacttaagtcctccgctgccttcccagccacccgcaaggctaacaacgacattacttccatcacaagcaacggcggaagagttaactgcatgcaggtgtggcctccgattggaaagaagaagtttgagactctctcttaccttcctgaccttaccgattccggtggtcgcgtcaactgcatgcaggccatgggagatgagattcaagagatcttgataacagaggaagagattcaagcaaaaatcgtcgagctaggcaaacagattaccgaagaatatgaagggaaatttcccctcgtcattggcgtattaaaaggtgccatgccatttatgggtgatttaacgaaacgaattgatactcatttagaaatggatttcatggatgtctctagctacggtaaaggaacagtttcctctggagaggtgaaaattattaaggatttggatacgtctgtagaaggacgggacgtattaattgtggaagatattatagacagtggcctcacgcttagctatctgattgagctgttccattatcgaaaagcgaagtcagtgaaggttgtgacactactggacaaaccggaaggacgtaaagtcgacctcgttcctgatatggcaggcttcacggtaccggatgcgtttgtagtaggatatggattagactacgccgagcgttatcgaaaccttccgtttattgggattctcaagcctgaagtttacgaaagctaactcgagacccagctttcaaatacccagcaaattggagctctgcagagctttcgttcgtatc

SEQ ID NO: 160 - DNA, 1821 bp, Saccharomyces cerevisiae
ttcttgtttgttgattaacccttaattaatccgggcgcgcctgatttatcacaagtttgtacaaaaaagcaggctcctgcaggaccatgaacaatatatttcatggaactgaagatgaatgtgccaatgaagacgttcttagtttccaaaaaatttccttgaaaagtccctttggtaagaagaagaacatatttagaaatgttcagaccttctttaagtcaaaaagcaaacattcgaatgtcgacgatgatttaatcaataaagagaatcttgcctttgataaatctccattgttaacaaatcacaggagtaaggaaattgatggtccttcaccgaatataaagcagcttggccatcgcgatgagttagatgaaaatgaaaatgaaaatgatgatatagtcttaagcatgcattttgcttctcaaaccttacaaagtccaacaagaaactcatcaagaagatctttgaccaataatagggataatgatcttttaagtagaatcaagtatcctggcagtccccagaggtcgagctctttttcaaggtcaaggtccttgtcgagaaagccaagcatgaatagcagtagcaattcaagcaggagggtgcaacggcaagatgggaaaattccgaggtcatcgagaaaaagttcacagaaattttctaacattactcagaatactttgaacttcacgtctgcgtcatccagtccactagctcctaattcggtaggggtgaaatgttttgaatcatgcctagccaaaacacagataccatattattatgacgatcgtaactcaaatgactttttccctcgaatttctccagaaacgttgaaaaatattctgcagaataatatgtgcgagtcattttataattcatgtcgtattatagattgtcggtttgaatacgaatatactggcggccacataataaactccgttaacatacactcgagagatgagttagagtacgaatttatccataaagttttgcatagcgatactagcaacaacaacactctaccaactcttttaattatccattgcgaatttagttcccaccggggaccttcattggcctctcatttgagaaattgtgatcgtataataaatcaggatcattatcccaaattattctatcccgacatattgatattggatggcggatacaaagctgtttttgacaattttcctgaactatgttatccacgtcagtacgtgggaatgaactcacaagaaaatttgctgaattgtgaacaagaaatggataagtttaggagagaatctaaaagatttgctactaaaaataattcttttagaaaactagcttccccttcaaatcctaacttcttttatagagatagccatcaatcttcaacaacaatggcatcttctgcactatcgttcaggtttgagccgcctccgaagctgtcattaaaccacagaagagtctctagtggttcatcattaaattcaagtgagagtacaggcgacgaaaatttcttccccatcttaagtaagtcgtctatgagtagtaacagtaacctaagcacttcacatatgctactaatggacggactggataccccatcatattttagtttcgaagatgagagaggcaatcatcagcaagtaagtggagatgaagagcaagacggagattttactttcgttggttccgaccgagaagatttacccaggcccgcaagaagatcgttattcccttctctagagactgaagataaaaaatgactcgagacccagctttcttgtacaaagtggtgataaattggagctctgcagagctttcgttcgtatcatc

SEQ ID NO: 161 - DNA, 373 bp, Zea mays
ttcttgtttgttgattaacccttaattaatccgggcgcgcctgatttatcacaagtttgtcaaaaaagcaggctcctgcaggaccatggggaaggtgccggtgcggatgaaggcggtggtgtacgcgctatcaccgttccagcagaaggtgatgccggggctgtggaaggacatcaccaccaagatccaccacaaggtcacggagaactggatctccgccacgctcctcgtcaccccagtcgtcggcacctaccaatacgccatgtggtacaaagagcaggagaagctttcccacagatactagctcgagacccagctttcttgtacaaagtggtgataaattggagctctgcagagctttcgttcgtatcat

SEQ ID NO: 162 - DNA, 802 bp, Glycine max
aaaaaagcaggctcctgcaggaccatggcgactcttgattccgacgtgcctatggttcccgccggcgagccctcgagcagcgccggtccttcttccaagaagcccaagcgcttcgagatcaagaagtggaacgccgtcgctctctgggcttgggacatcgttgtcgataactgtgctatctgccggaaccacatcatggatctctgcatcgagtgccaagccaaccaggctagcgccactagcgaggaatgcactgtggcttggggagtttgtaaccatgcttttcacttccattgcatcagtcgatggctcaagactcgtcaagtttgtcctctagataacagtgagtgggagtttcagaaatatggccactagctcgagacccagctttcttgtacaaaaaaaaagcaggctcctgcaggaccatggcgactcttgattccgacgtgcctatggttcccgccggcgagccctcgagcagcgccggtccttcttccaagaagcccaagcgcttcgagatcaagaagtggaacgccgtcgctctctgggcttgggacatcgttgtcgataactgtgctatctgccggaaccacatcatggatctctgcatcgagtgccaagccaaccaggctagcgccactagcgaggaatgcactgtggcttggggagtttgtaaccatgcttttcacttccattgcatcagtcgatggctcaagactcgtcaagtttgtcctctagataacagtgagtgggagtttcagaaatatggccactagctcgagacccagctttcttgtacaaa

SEQ ID NO: 163 - DNA, 2806 bp, Zea mays
aaaaaagcaggctcctgcaggaccatggaggagggtctggtatcagtggacaagttctccggtggcagccaggcgtactttctgacgcacctccaccaggaccacacccgtggcctcggcgcggtgggcgggtggcgccacggcccgctctactgctctccgaccacggcgcgcctcctccccatccgcttcccgggaatcgacgcctccctcctccgcccgctagccccaggtgcctctgcctccatctctctgttctctccctcctcgggccagtccctctcccttcacgtcactgccatccccgcgctgcactgccccggatcgctcatgtacctcttccgcggagacctcgggtgcatgctgtacacgggggacttccggtgggagctcggatgcgatgaagcgcggcgagcgaagcaggatttactggacgcgcttgacggggataccattgatgtgctctatctggacaacacctactgccacccatcgctcaacttccctccacgccccgtcgtcgctgagcaggtgattgatattattcggtcacatcctgatcacgaagttatcattggtgttgacactcttggaaaagaagacctcttgcttcatatatctagagcactacaaacgaagatctgggtttggccccagcgcctacagacaatacacctcctagggattgatgaaaaccgtgatatttttaccacacagaccagtttgactaggatccgtgctgttccaaggtacagtgtcaccattgataatcttgaagctctaaacacagtgtgccccactatagggatcttgccttctgctattccttgtctttggaagagcagtgaaggaaaggccaaatccaagggtaggtcatcagtgaagtctatcaggtgctcagggagaggtgaaggcctaacagaaatggactgcaatcccttgtcaccaccaaagctgtttgacaaggattcgtatactttgccatattctgagcatgcttgcttttcagagctggaggattttatgcatacattgagtccattgacagtcagcggcatcgtcagctcatcgttctgctatgtgaatccccgtcaccacttcagacatctttgtttagacaataatgttaatgatgacactgacaggacgcccataaaaaataagggtaaggataatgataagctgacaccaaagagttggcgaaatggttctgtgactccaaaagaaaggaaggtcaggatctccagttcaagtctgtatagaagcaaagttacaatgaaacggaaggagtgctgcggtgcaaggatcaatgacactgaagaacacattggtgttacctgacttgtcgctttccaagtgatgttatgttttcttttgctcgagacccagctttcttgtacaaaaaaaaagcaggctcctgcaggaccatggaggagggtctggtatcagtggacaagttctccggtggcagccaggcgtactttctgacgcacctccaccaggaccacacccgtggcctcggcgcggtgggcgggtggcgccacggcccgctctactgctctccgaccacggcgcgcctcctccccatccgcttcccgggaatcgacgcctccctcctccgcccgctagccccaggtgcctctgcctccatctctctgttctctccctcctcgggccagtccctctcccttcacgtcactgccatccccgcgctgcactgccccggatcgctcatgtacctcttccgcggagacctcgggtgcatgctgtacacgggggacttccggtgggagctcggatgcgatgaagcgcggcgagcgaagcaggatttactggacgcgcttgacggggataccattgatgtgctctatctggacaacacctactgccacccatcgctcaacttccctccacgccccgtcgtcgctgagcaggtgattgatattattcggtcacatcctgatcacgaagttatcattggtgttgacactcttggaaaagaagacctcttgcttcatatatctagagcactacaaacgaagatctgggtttggccccagcgcctacagacaatacacctcctagggattgatgaaaaccgtgatatttttaccacacagaccagtttgactaggatccgtgctgttccaaggtacagtgtcaccattgataatcttgaagctctaaacacagtgtgccccactatagggatcttgccttctgctattccttgtctttggaagagcagtgaaggaaaggccaaatccaagggtaggtcatcagtgaagtctatcaggtgctcagggagaggtgaaggcctaacagaaatggactgcaatcccttgtcaccaccaaagctgtttgacaaggattcgtatactttgccatattctgagcatgcttgcttttcagagctggaggattttatgcatacattgagtccattgacagtcagcggcatcgtcagctcatcgttctgctatgtgaatccccgtcaccacttcagacatctttgtttagacaataatgttaatgatgacactgacaggacgcccataaaaaataagggtaaggataatgataagctgacaccaaagagttggcgaaatggttctgtgactccaaaagaaaggaaggtcaggatctccagttcaagtctgtatagaagcaaagttacaatgaaacggaaggagtgctgcggtgcaaggatcaatgacactgaagaacacattggtgttacctgacttgtcgctttccaagtgatgttatgttttcttttgctcgagacccagctttcttgtacaaa

SEQ ID NO: 164 - DNA, 1011 bp, Arabidopsis thaliana
gttcaatccttttcctcttctttgtttctaaaaagagaaaagtcacttatggcggatatctcgggaaacggctatggcaacgccagagaagaagtagtaatggtgaatctcaaggatgaagtcgaacatcaacaagaaatggaagacattcataacccaagacccttgaagaaacaagactctctactctcagtctctgtccctttcttacaaaagttgatcgcggagtttcttggaacctactttttggtattcaccggttgtgcatcggtggttgtaaacatgcaaaacgacaatgtcgtgactcttccagggatcgctatcgtttggggactcaccattatggtcctcatttactctcttggtcacatctctggtgctcatatcaatccggccgttaccattgccttcgcctcttgtggccgtttccctctcaaacaggttccagcttatgtcatatcacaagtgataggatcaacgctcgcggctgcgacattacggttgttgttcggacttgatcacgacgtttgtagcggaaaacacgatgtgtttatcggatcatcaccagtgggatcagatcttcaggcgtttacgatggagtttatcgtcactttctatctaatgttcatcatttctggcgttgctaccgataatagagcgatcggagaacttgctggattagcaataggatcaacggtgctacttaacgtgctaattgccgcaccggtatcgagtgcgtcgatgaatccaggaagaagtttaggacctgcactggtctatggttgctacaaaggaatttggatatacttagttgcgccaactcttggtgcgattgcgggtgcatgggtttataacacagttagatataccgataaaccattgcgagaaatcactaaaagtggttcatttctaaagaccgtgagaatcggtagcacttgataagagaaaagaaaacatgggtggagttgatggagtattttcaaatgaatgtaacaactttcaccacacttc

SEQ ID NO: 165 - DNA, 805 bp, Zea mays
ttcttgtttgttgattaacccttaattaatccgggcgcgcctgatttatcacaagtttgtacaaaaaagcaggctcctgcaggaccatggccgcagcgacgtcaatggggcacccttacgcgccagccgagctggaccttccgggtttcgtgccgctgaagctgtcccaggtcgagatcctcgtgtcctacctcggcgcctccgtcttcgttttcctcgccgtctggctcgtctccggaagatgtgttagattatccaagaccgaccgtctgctcatgtgctggtgggcatttacagggttgacccacataatgatcgaggggccctttgtcttcactcctgatttctttaagaaggagaaccccaatttctttgatgaagtttggaaagagtatagtaagggagactctaggtatgttgctagggacactgcaactgttacggttgaagggatcaccgctgtattggaaggccctgcatcactacttgttgtctacgccattgcatccaggaagtccttcagccacattctccagttcgccgtatgtctgggccagctctacggatgcctggtttacttcatcaccgcgtacttggacggcttcaacttctgggtcggcccgttctacttctgggcgtatttcattggcgcaaacagcttctggatctggataccgatgctcatcgccgtaaggtcctggaagaaaacctgcgccgcgtttcaagctgagaaggtgaagaagaccaaataactcgagacccagctttcttgtacaaagtggtgataaattggagctctgcagag

SEQ ID NO: 166 - DNA, 870 bp, Zea mays
ttcttgtttgttgattaacccttaattaatccgggcgcgcctgatttatcacaagtttgtacaaaaaagcaggctcctgcaggaccatgtcgtcctcgcccctccccaccacctccggcggggctcacatcttcccgtctccgcctcgaccgcgccaccgccggtgctgccaagtaatcgtcgccgccgccgcttcgccccgttcctacggcgtcggtcgccgcgccgtctccctagccggcgtcgccgcctggcttgccactatcgtaggccgggcagacgcggccagtccatttgacaagtacgtcaagaggaagaagctggagcctttggagacctacgttccggctgtcctgctgaccattgaccaattcgttgatctagagaaatccttagaatttgagaaaccaaggtatgacgagagcagatcattacttcgctctggaccggcatcatctttaagagtcaacattcgggcagtggcacaatatgcttctagtaatggtcaaggcaaggctgcatcagatgctgtggacgagtgcttacgagcactcgaagatctcgactcactactactacatgcatcacggaatgatccgtcagcatccgttgaaaccatgaggagcaagatcagtgttgcccttgcagcattagacaatctcttgcaaacggtgccatctgcagtactggataaaggaaaggcgattgctgatgcataccgaactccagtagatgattatgtagaggaaaatgctgccgagttggatcccaggctgaaacagttggagggtattctttaactcgagacccagctttcttgtacaaagtggtgataaattggagctctgcagagctttcgttcgtatcatc

SEQ ID NO: 167 - DNA, 1104 bp, Zea mays
aaaaaagcaggctcctgcaggaccatggcagctgaggaagatgtcaagcagaggcagatcattgaaaatcgtgccagaaatataagccacaatgttaggtgcactgagtgtggtagccaatcgattgaagattcacaggctgatgttgctattctcctaaggaagctcattcgtgatgaaataaaagcaggaaagagtgataaagagatctacaagaaactagaggatgattatggggagacagtactatatgcccctaaatttgatcttcagactgctgggatttggctttcgcctgtcattgttggtggtatagcagctggaatctgggcttaccaaaggcataggcaaaggacaaatgttcacattatggctctgaacctggtccgaggggtaccactgactccaagggagaaggagaccatgctagacatccttacacctccaccggctccaaggaaatggtggtggccaggcaaatgatgtagaattcatgtgctggacctggtagatgctcaaaaatggtctcgagacccagctttcttgtacaaaaaaaaagcaggctcctgcaggaccatggcagctgaggaagatgtcaagcagaggcagatcattgaaaatcgtgccagaaatataagccacaatgttaggtgcactgagtgtggtagccaatcgattgaagattcacaggctgatgttgctattctcctaaggaagctcattcgtgatgaaataaaagcaggaaagagtgataaagagatctacaagaaactagaggatgattatggggagacagtactatatgcccctaaatttgatcttcagactgctgggatttggctttcgcctgtcattgttggtggtatagcagctggaatctgggcttaccaaaggcataggcaaaggacaaatgttcacattatggctctgaacctggtccgaggggtaccactgactccaagggagaaggagaccatgctagacatccttacacctccaccggctccaaggaaatggtggtggccaggcaaatgatgtagaattcatgtgctggacctggtagatgctcaaaaatggtctcgagacccagctttcttgtacaaa

SEQ ID NO: 168 - DNA, 650 bp, Zea mays
aaaaaagcaggctcctgcaggaccatgggcctgtggacattgctggagggttttttgcttcttgcaaatgcgttagcgatattgaacgaagaccgcttccttggtccaaggggatggagcatgtctgaagtatcaggaaacgggcaaaccaagtcgttcaagggccagatcgtggggcttatctacgctacacagtttctgcggatgcccttaattgctctcaacgttctcatcatcgttgtcaaattggtgtctggctgagcctgatgaattggtatctgttccacctttatgtaagactcgagacccagctttcttgtacaaaaaaaaagcaggctcctgcaggaccatgggcctgtggacattgctggagggttttttgcttcttgcaaatgcgttagcgatattgaacgaagaccgcttccttggtccaaggggatggagcatgtctgaagtatcaggaaacgggcaaaccaagtcgttcaagggccagatcgtggggcttatctacgctacacagtttctgcggatgcccttaattgctctcaacgttctcatcatcgttgtcaaattggtgtctggctgagcctgatgaattggtatctgttccacctttatgtaagactcgagacccagctttcttgtacaaa

SEQ ID NO: 169 - DNA, 722 bp, Zea mays
ttcttgtttgttgattaacccttaattaatccgggcgcgcctgatttatcacaagtttgtacaaaaaagcaggctccgcaggaccatggtcgatgccggcgacataacggccggagggccgccacgcgctcacgaggaggagcaagcgggaactccggcatacggttcggtggtcctcggcggcacttttgaccgcctccacgacggccaccgccgccttctcaaggcctccgcggatttggggagagaccggatcgtggtgggcgtctgcacgggacctatgctcgccaagaaggagtatgcggagcttattgagcccgtcgacaagcgcatcaagggtgtggaggattacatcaagtctataaagccagaactgatagtacaagtggagcctattgaggacccttatggcccatccataactgacgagaagttggatgccattattgtcagtaaggagacattaaatggtggactggctgtaaataggaaaagagaagagaaagggttcccactgttgaaggttgaggttgttgatctcctttccggtggtgtggagggggaaaaattgagttcttctgctttaaggaaacttgaggcagaacaagctcaacaaagtgaaacaaaatctggtagccttgaagcttcttagctcgagacccagctttcttgtacaaagtggtgataaattggagctctgcagagctttcgttcgtatcatc

SEQ ID NO: 170 - DNA, 778 bp, Glycine max
ttcttgtttgttgattaacccttaattaatccgggcgcgcctgatttatcacaagtttgtacaaaaaagcaggctcctgcaggaccatgtgtggcggagcaatcatcgcagatttcatacctcggcagcgtccccgcaccctcacagcctccgaactctggcccaagcgcagcgaacctcaacctcaacctcctcctcctccagttaagaggcagaggaaaaacctctacagagggatcaggcagcggccctggggcaaatgggccgcggagattcgcgatccacgtaaaggagttcgtgtctggcttggcaccttcaacaccgccgaagaagccgccagagcctacgacaaagaagcccgaaaaatccgcggcaagaaagccaaagtcaatttccccaacgaggacgaccctctgccgcaatacggatcttgcaagagcctcaacttggagttcggttacgatctcaaccaaacagggcttttcccttcttctaacgctgatgagaattgcgggtcccacgtggcttactccgttacggaagccaacaacaaagtagagaagctttccgaggagcttatggcgtacgagaatttaatgaggttttatcagattccggaaaacgtcgttggggatttgtgggcctttcctgacacctctccacctctctgatttctgtcacatcgtttcttctatcattaattctccactcgagacccagctttcttgtacaaagtggtgataaattggagctctgcagagctttcgttcgtatcatc

SEQ ID NO: 171 - DNA, 937 bp, Glycine max
ttcttgtttgttgattaacccttaattaatccgggcgcgcctgatttatcacaagtttgtacaaaaaagcaggctcctgcaggaccatggagaatattggagaagagtacaagcattactgggagaccaacatgttcctccaaacccaagaacttgacagttgggggttggatgaggccttatctgggtactacgattcgagttccccggacggcgctgcttcgtctgcggcatctaagaacattgtttccgagaggaatcggaggaagaagctcaatgaaaggctttttgcgcttagatcggtggtacctaacattagcaagatggacaaggcttcgattatcaaggatgctattgagtacatccagcacttgcacgagcaagagaagattatccaagctgagataatggaacttgaatctgggatgccaagaaagagtccaagctatggttttgagcaagaacagcttcctgtggttctcaggtccaagaagaagagaacagagcagctatatgattctgttacttcaagaaacaccccaattgaagtccttgagctgagggttacatacatgggggagaaaactgttgtggtgagtttgacatgcagcaaaaggacagacacaatggtgaaactgtgtgaagtgttcgaatctttgaagctcaagatcatcactgccaacatcacttcgttttcagggaggcttttgaagactgtcttcattgaggcaaatgaagaagagaaagatcatttgcagataaagatccagacagccattaaagctcttaataatgaccctttaagccccatgagcatttgaggaagaaaatatataaattggggttctcattttggggtcactagtactcgagacccagctttcttgtacaaagtggtgataaattggagctctgcagagctttcgttcgtatcatc

SEQ ID NO: 172 - DNA, 1062 bp, Glycine max
ttcttgtttgttgattaacccttaattaatccgggcgcgcctgatttatcacaagtttgtacaaaaaagcaggctcctgcaggaccatggcgattcaagatcaaaatggatttttcagatcacagggtggtcctccagaagaaggtggtgtatctttgagttctgggcattctgtcacacatattcaacttaatgaccagttttcttgtgggaatgactatgctctgaaggtaaggaagccgtatactatcactaaacagagagagcgatggacagatgaagaacataagaagttccttgaagctttaaagctgtatggacgggcttggcgacgtattgaagaacatgttggcacaaagactgctgttcagattcgaagtcatgctcagaagtttttttctaaggttcttcacgatcctactgggaacaatacaaacacagtggagtcaattgaaattcctcctccaagaccgaaacgaaagccgatgcatccttaccctcgtaaactagttgagaccccaaataaggaaatttcgatcccagaacaacctatgaagtctaattctctgaagtcgtcagactttgatcaagaaaaccaatctccaaaatcagtattatcaggagttggttcagacagccttggctcctctgattcagacacaccaaatggaagtttgtcgcccatgtcatccattagtggcttccatacaagcagttttacacgtgccaaacccaaaacaacaacatctgaggaagaagctgggatggacactgattcaactcatgatgagaaacctcttatgaaattcaagcttcctccaaatggatgtgtttccatcaaagaagacaacacagcagaagaatcttccggtcggactttcaaactctttggaatgactctatttgtaacagacacctgcaaaccatctccaacaatcgaggaatgctaaagatacctctaaacattcgcgcgcaacgcctttcctcctccatctcgagaccagctttcttgtacaaagtggtgataaattggagctctgcagagctttcgttcgtatcatc

SEQ ID NO: 173 - DNA, 759 bp, Zea mays
ttgtttgttgattaacccttaattaatccgggcgcgcctgatttatcacaagtttgtacaaaaaagcaggctcctgcaggaccatgtcggcagcggcgcgagtgctgccgaaggcggtgaccttcgtgacgggcaacgccaagaagctggaggaggtccgcgccatcctcgggtcttccgtcccattccagtcgctcaagctcgacctgcctgaactgcaaggggagccagagtacatatccaaagagaaagcacgaatcgctgcatctcaggtgaatgggcctgtactggtggaggacacctgcctatgttttaatgcgctcaaaggcctaccaggaccctacataaagtggtttcttgagaagattgggcatgaaggtttaaataatctgttaaaagcttatgaagataaatcagcgtttgctatgtgcatcttctctcttgctcttggacctggagaggaaccaatcacatttgttggcaaaactgcgggaaagatcgtgcctgctagaggccctaattattttgggtgggatcctgtgttccagccagatggttttgaacaaacatatgctgagatgcccaagtcagtgaagaacaacatatctcacagagggaaagctcttgctctggtgaaagaacacttcgcatctgctagctatacagttcagagcaacgactcaacttaactcgagacccagctttcttgtacaaagtggtgataaattggagctctgcagagctttcgttcgtatcatc

SEQ ID NO: 174 - DNA, 854 bp, Glycine max
ttcttgtttgttgattaacccttaattaatccgggcgcgcctgatttatcacaagtttgtacaaaaaagcaggctcctgcaggaccatgggaagagggaaggtggttctggagagaatacagaacaaaatcaatcgccaagtaaccttctcaaagcgcagaaatggtttgctcaagaaagctttcgagctatctgttctatgcgatgctgaaatcgctctcgtcatcttctccagccgtggcaagctttttcagtatagtagcactgacattaacagaatcattgagaagtatcgtcaatgctgcttcaacatgtctcagactggcgatgtagctgaacatcaatcggagcagtgcttataccaggagcttttggtattaagagtcaagcatgagtcactccagcggactcaaaggaatcttctgggagaagaactagagccacttagcatgaaagaattgcatagtttagagaaacaactggatagaacgcttgcacaagctcggaagcacctgacacagaagctggtatcacgaattgacgaattacatggaaaggtgcatagcctggagcaggctaacaagcatttggaatctcaggaaagaggtaaatgtacccagatttgtgaaggttctcctaatggccatattttgcaagataaacaagtcaatcagtttgaatatggaacagcaggttcgtttcggcttcagcaagagcaaactactgcttccaaaggaaaagaaatagagacgatcgaggactggttgaggccaaagcagtcataactcgagacccagctttcttgtacaaagtggtgataaattggagctctgcagagctttcgttcgtatcat

SEQ ID NO: 175 - DNA, 902 bp, Glycine max
ttcttgtttgttgattaacccttaattaatccgggcgcgcctgatttatcacaagtttgtacaaaaagcaggctcctgcaggaccatggggatggctgcagcggagtcacagtttcatgtcttggctgttgatgacagcatcatagataggaaactcattgagaggctcctcagaacctcttcctatcaagttactacagttgattctggtagcaaggctttagagtttctggggttgcgtgagaatgatgagagcaatccaagtataccatctgtttgtcccaacaaccatcagcctcaggaggtggaggtgaatcttgttataacagattactgtatgcctggcatgacaggctatgacttgcttaagaaaatcaaggaatcttcatctttgagaaacataccagtggtgattatgtcatctgaaaatgtgccttcaaggattaacagatgtttggaggaaggagccgaagaatttttcttgaagcctgtgaggttgtcagatttgaacaagcttaaaccccacatgaagaaaaccaagttcaaagatcaaaagcaagaaacagtagaaaggtttgaagactcagaagttcaacagcaacagtcacaacaacaaatcatcatccaaaatgagcatcaccaagcaccaaaattacaagttcttcagccagagtcagaatcagagtcacatccacaaccaactattgaacaacagcaacaaattctacaacaagccaacaacaataacaagaggaagaccatggaacagggcctttcacctgagactgacagaacaagaccaagatacagtggcatagccactgtggtatgactcgagacccagctttcttgtacaaagtggtgataaattggagctctgcagagctttcgttcgtatcatc

SEQ ID NO: 176 - DNA, 1268 bp, Zea mays
aaaaaagcaggctcctgcaggaccatgcaacggaacggggtggtggaatgcagcgtgtgccgctcccgggtggtggtgccgagcccccggagcgtgtccagggcgtacgacaagcaccgcaacaagatgtcgtccaagttccgggcgctcaacgtcttcctcgtcgtcggcgactgcatccttgttggtctccagcccatcctagtgttcatgtcaaaggttgatgggaagtttcagttcagtcccatcagtgttaactttctgacggaggttatgaaagtcatctttgctgtcgtcatgctcataattcagtctagaaagcaaaaggttggagaaaagccacttttggcacgttcaaccttcatacaggcagcccgtaataatgtacttctagctgttcctgctcttctatatgcaatcaacaattacctaaaattcatcatgcagttgtacttcaatcctgcaactgtgaaaatgctaagtaacctaaaggtactggttatagcttttcttctgaaatttataatgagaaggagattctcagttattcagtgggaagctcttgctctattgcttattggaatcagcatcaatcaactccgaactgtacctgtgggcaacacagcatttggtcttcctgtcactgctattgcgtacatatatacattgatttttgtaactgttccttcagtggcttctgtctacaatgaatatgccttgaaaagtcaatatgacactagcatctatctccagaacttgtttctgtacggatatggagcaatattcaacttgcttggcattcttgggactgtcctattccaagggccagagagttttaatattcttcgaggccattcaagggccacaatatttctcatatgtaacaatgctgcacaaggcattctatcttcattcttctttaagtatgcagacacaattttgaagaaatattcgtcaactgttgccacaatatttactggcctagcttctgctgcatttttggggcattccttgaccattaattttctcctgggcatatcagtggtgtttatttcaatgcaccagttcttctctccgcttgcaaaagtcaaagatgacaaaccagctgactcaatagagttggaagatacacaaaatgaccgcccatctgaatcttcttttgtaaatatgactgctggtgccgctgatgatgcaagccatcggattggaactgatgagaggcagccgctattgcctatatgactcgagacccagctttcttgtacaaa

SEQ ID NO: 177 - DNA, 755 bp, Glycine max
ttcttgtttgttgattaacccttaattaatccgggcgcgcctgatttatcacaagtttgtacaaaaaagcaggctcctgcaggaccatggggaagaagaaggtggagataaagcgaatcgagaacaaaagcactcggcagataacattctccaagaggcgcaatggattgatgaagaaagctcgcgagctatccattctctgcgatgcgaaggtggcgctgctcatcttctccagcaccggaaagctctacgagctctgcaacggtgacagtttggccgaggtcgtgcagcaatattgggatcatttaggagcgagcggtactgacacaaagtcgcaggaactatgctttgaaattgcagatatctggtctggttcagcgttttctcaaatgatcaaaaggcacttcggtgtttctgaacttgagcatctgagtgtgtctgaccttatggaactagagaaactgactcatgctgctctttcgcgaatcagatcagcaaagatgcgattgatgatggaatctgtagtgaatcttaagaaaaagattgaggcactagaaaaaactaatgacgtcaataacgtggtgacacggtctattgactgtgatcaaacagatggggtgacgcataatctgttcccaggtctctaatggagctgaaagccactactctgggtataacttgcacactcgagacccagctttcttgtacaaagtggtgataaattggagctctgcagagctttcgttcgtatcatc

SEQ ID NO: 178 - DNA, 1316 bp, Glycine max
ttcttgtttgttgattaacccttaattaatccgggcgcgcctgatttatcacaagtttgtacaaaaaagcaggctcctgcaggaccatggcttcttcagatcccatctcttctcgccactacacttacaacagaaaacaaaaatctctaggccttctctgcactaatttcttgagcttgtacaaccgagacaccgttcacttgattggcctagacgatgctgccacccgattaggtgttgagagacggcggatctatgacattgtgaatgtcctggagagtatcggggtactctcaaggaaagcaaaaaatcaatacacatggagagggtttgccgcaatccctctcactctacaggatctcaaggaagaggggttgaaggagaattctaattccctacgtgggcctggaaaccatgataaagtttccgacgacgaagatgacgaggaaacacagtccaatcccgccgctactggaagtcaaagtgacaagttgaaccctaattctactcttcctaaacctctgaaaaatgaaaatcgaagagaaaaatctctggctctgcttacccagaattttgtcaagctctttgtctgctctaatgtggaattgatctcccttgacgaggctgcaaaattgctacttggggatgcccataatacgtctgtaatgagaactaaagttagacgcctatatgacatcgcaaatgtgctatcctccatgaaccttattgagaagacccatacaatggatacacgaaaaccagcattcaggtggctcggttctgaagggaagacatgggatgagacacttcacaaatcaaacctaaacgactctaggaaaagggcgtttggaagtgatatcactaacatcagttttgagaggaataaagtggaattgttcacgagtggggacttgaatccgaatcctaagaagccaagaatggaaaatggtagtgggctgggtgaggcagacgaaaacaatttaaaacaaggcataaaacaagcttcaaagagctatgaatttggtcctttcgctccagcttgcgtgcccaaagttggagcctctcagaataataatatgaagcaggtgcatgactggggcagtcttgcaactgcacatagccctcagtatcaaaatgaagcttctccctctctgttgcagcaaggccactgcacggtcaaagcatctagctgtgcctcctttgtgtgattttcaaagctttctgatgcatatatcctctttgagcgctcgagacccagctttcttgtacaaagtggtgataaattggagctctgcagagctttcgttcgtatcatc

SEQ ID NO: 179 - DNA, 594 bp, Zea mays
ttcttgtttgttgattaacccttaattaatccgggcgcgcctgatttatcacaagtttgtacaaaaaagcaggctcctgcaggaccatgatgcggggagtcggaggtccgctgctcaccatcggggatctactcagcgacctcgctgtcgacgacccactcgtcggcgtcggagatgcgtctgtcccatcatctccatcggcggcgcagcaagcggggaaggccaatccgtccgatctcagccggctctttgaggaacactatgacgatttgatgaaggctctacaagagaaggatccttcatggccctcactgatgctgaagctgtgcgcgacgctgaagactgcggataggctgatgagttgcgcggacacgaacgcggaacagctgctggagaaggtgaaggcactggagggcgtcctcgacaggagcggtcatgcggtggcagagattgttgaagctctccagaggttaggcctagccaatgatggtcacggttcccagtcaaaatcggctagcaagtagctcgagacccagctttcttgtacaaagtggtgataaattggagctctgcagagctttcgttcgtatcatc

SEQ ID NO: 180 - DNA, 635 bp, Zea mays
ttcttgtttgttgattaacccttaattaatccgggcgcgcctgatttatcacaagtttgtacaaaaaagcaggctcctgcaggaccatggcggacgacgattacaacgaaattgacatggggtatgaggatgagcccccagaaccggagattgaggaaggagctgaagaagagcctgagaacaatgaagatgcccctgatgacgtcataggtggtgagggtgaagataaggaacaggaaaagaccaagcgtgaacgcaaaacaacaaaatacatgacgaagtacgaacgtgcgcgcatcctgggtacacgagccttgcagataagcatgaatgctccagtcatggttgagcttgagggagaaactgaccctcttgagattgcaatgaaggagctgagagcgcgcaagatacccttcacgatcagacgttacttacctgatggaagctatgaagactggggagtagacgagctcattgtggaggactcctggaaacgtcaggttggtggagactgaagacgcggatatacttggcatggaaagggtctgtggtgcagtgggtgtttctcgagacccagctttcttgtacaaagtggtgataaattggagctctgcagagctttcgttcgtatcatc

SEQ ID NO: 181 - DNA, 669 bp, Zea mays
ttcttgtttgttgattaacccttaattaatccgggcgcgcctgatttatcacaagtttgtacaaaaaagcaggctcctgcaggaccatgcagcggcacgtcgcctccggccggccgtcgggcacggacggctccgacttttcttaccgcatggtcgtcgaatcccggtaccagagggtcgccgagggcagatcccgcctcgcgcgcctcatcctcgtgcaggcgctgcacctagtggccggaggcttgcttctattgctgtcgttgtccaagggggcggcggtgaacaagttcgccgtgctgtccatggccgcgggattcctggctatagtggtgggggaattagggcgaatgcggaccatgtcagtgctgcttcggctctacacaagcttgtcatcaattgcggttgcattctctgtgacgtgcattatccggtcagagttgttcttaaaggttatgaagcaaaacacagaggccatcacaagctacgaaatgcttgatgcggttcgtgttgctcttggtatcctgctgcaaatggtggttatagctacaactaccagactcctgcagaatatgtctcctcccaagagagcttcatgactcgagacccagctttcttgtacaaagtggtgataaattggagctctgcagagctttcgttcgtatcatc

SEQ ID NO: 182 - DNA, 1141 bp, Glycine max
ttcttgtttgttgattaacccttaattaatccgggcgcgcctgatttatcacaagtttgtacaaaaaagcaggctcctgcaggaccatgtacccgaggctcatacacccccacgatgggattgtgacgcaggatgagttgcagggtggtgctgcttccaacctctctcacgctcacaagggtgacccttgtctcgttttaacggctgatcccaagcctcgtcttcgttggactcaggacttgcatgaacgcttcgttgatgcggtcacgcagcttggtggagctagtaaagctacaccaaaagcaatcatgcggactatgaatgtcaagggtttgactctgtttcatttgaagagtcatcttcagaaatacaggcttggtaagcaatctgggaaagatgtgggcgaaggatgcaaagatggttcatatcttttagaaagccctggtgctgataacacttctccaaagttgccaactcctgatacaaatgagggttatgaaatcaaggaggcattgagagcacagatggaagtgcaaagtaaattacatttgcaagtggaggcggaaaagcacttgcagattcgccaggatgcagagaggagatacatggcgatgctcgaaagagcttgcaagatgctggctgatcaatttatcagtgctacagttatagacacagacagccaaaagttccaaggaattggaagcaaagcacctagaggtaccttggttgatcctcttggtttttactccttgccatccactgaggtagccggagtgaatgtcccggaagaagaaatactgccaagtctcccaccccaaagggccgattgttcaaccgaaagttgtttaacctcgcatgagagctctggaggattggctttagaaggatctccaggcgagggaaaaaggaggatgctaggcatggactctatggcagcacctttgatctggagtgaagctaagatgagaactcaagccatcaatgtagctcaaggtaatcatcctcaaggaataactaggtatggcatgtagggatggaaggtcttcttgatggttcatcccctcataatatctcgagacccagctttcttgtacaaagtggtgataaattggagctctgcagagctttcgttcgtatcatc

SEQ ID NO: 183 - DNA, 1518 bp, Glycine max
ttcttgtttgttgattaacccttaattaatccgggcgcgcctgatttatcacaagtttgtacaaaaaagcaggctcctgcaggaccatggctgctcagaagcgttccttccctgatgctcctaacgataacaaccgccacgccaaacatcaccacgaagaagcaaaaactgaagaagaagaagaagaagaagaagaagaagcacaacaacaacaacagcatgatgaagaagaagaagaagaggataataattacaaatcagacgattctcctcccgaagacaaatccgaatatgtgtttgtagaacttctggaaatacgcaaagaagtccaatgtccaatttgcctaggtattattaagaaaacacgtactgttatggaatgcttgcaccgggtttgcagggaatgcattgacaagtcgatgcgactagggaacaatgaatgccctgcttgtcgaacacactgtgccagtcgtcgttctttgagagatgatccaaactacgatgccttaattgcagctttatatcctaatattgagaagtatgaacaagaggagcttgaatttcgtgaagaggacaagaaccgcaataagcaggcttcaattgcaaaagttgttcaacgacaatctgaagcactggttaagagacgtagagatacaccaggttcatttgtgacaagatcacagcgcaatcaacgaaatgttctctctaggagacaaaaccaagggatggataatcaaggatctgaagataatgaggaggaaaatgacaataatgaaaaggactcatcttccacagatgagcgatgtacagaactcaggcagagaaggcgaaagaggcggaccagaggtcgtccttctcagccctcatcatcgacggcaagtcctgatggtggatgcatagaaagtgacatggacataagaatttcttctagactggtgtcaaaacctcaaaaactaacttggggaaggggtggttttaggagtcacacacggcatggcagtggcaatggtagcaatagcaaaagttcccgcagtagtcgcttggctaagttagttgattatctccatagcttgaatgaaaacactgatgagttagatgtccatctcattcttttgtctttagacaaacaaattacaccaagcttgcagcagccacacctttgctgtcggccaacattgtctgtgaagcatctttgtgaatatgttgctcatcagacacctttgctgcttgaagaagttgagatattggcagttaaaggatgctgcagtacagtttgtgacaagtcatttgatgagacttcatcctctgatgagctaactacgctggttatagatcctagcaaagatgaactggaaactctgcaagggcatgaatctctggcagggattaaatctaaatgcatatctaaaagggagcatttgattctggcatacaggaggaaggaatgactcgagacccagctttcttgtacaaagtggtgataaattggagctctgcagagctttcgttcgtatcatc

SEQ ID NO: 184 - DNA, 1511 bp, Glycine max
ttcttgtttgttgattaacccttaattaatccgggcgcgcctgatttatcacaagtttgtacaaaaaagcaggctcctgcaggaccatgggtctcggtaacgatgaagaagaggacaataacaacaacaataataataataagaataacaatgataaggttgtggatgacggagatgctggaggaggaaagtctttcggttcagtgtcgtgttccatttgcctcgaggttgttgccgataatggggatagatcctggtctaagcttcaatgcggtcatcaatttcatctcgattgcattggttcggcattcaacataaaaggagcaatgcagtgccctaattgtcggaagattgagaaaggtcaatggctatatgctaatggttgtcggtcatatcctgaatttagcatggatgagtggactcacgatgaggacctttatgatcttagctactctgagatgtcctttggagttcattggtgcccttttggcaacctggcacgacttccatcatcctttgaggaaggggagttttcgtcatctgcatatcatgatgtattgggacaacatgctatatttgctgaacatacagctgtgtcatctgccagtcatccttgcccgtatattgcttactttggaccaatacatccatcctcctcgaattcgggtggaactgtatcagaagcttcaaacttcaaccattggaatggttcatctgtgcccagtgacatgccaacttcctacacatttcctgctgtggatcttcattatcacagttgggaacaccactcccctcctttctctacagcaagtagtcgtctagttgctgctgatcagccatcagtatcccctggtagtcaaaggccagccaggggtggttcggatgtaccaagatcaggatcttttatgcatcccttccttgttggtcacagagtggggagctcggttgcttcctcaatgatccctccttatcctggtagcaatgctcggacccgtgatagagtccaggctcttcaggcgtactatcaaccacagcaacctcctaattcaaccacaatgcggacacctattgcttctggcacccgaagatccagtagtcataatggatctcctcaattagccccaataaccacatcgtcagaccaaagtggtggcttctttcttatcccatcaagttcatcaggacacaattttcaagaagaaaatcatcatctaccaaatcacttccatgcttgggaaagagaccacttgccttcgttgtcattgagccatgtcgatagagattcaggttggagagcgtaccaccaggccaccagccggtcagacccaggtaccaggtccagcagctttcgtttgaggcatggatcggatagaacgccttcacaaaatcggtaatacacttgtatcctgttcactgtgaagcaaactaccattactatggactcgagacccagctttcttgtacaaagtggtgataaattggagctctgcagagctttcgttcgtatcatc

SEQ ID NO: 185 - DNA, 934 bp, Glycine max
ttcttgtttgttgattaacccttaattaatccgggcgcgcctgatttatcacaagtttgtacaaaaaagcaggctcctgcaggaccatggcaactatgctgacaaaggagcatggtctgaacctcaaggagaccgagctttgcctcggtttgcctggtgggggaggcggcggcggcggcggtggtgaggtggaaactccaagggccactgggaagagagggttctctgagactgttgatctgaaacttaatcttcattccaaggaagatctgaatgagaatctgaagaatgtctcaaaggagaagaccctccttaaggatcctgccaagccaccggctaaggctcaagtggttggttggccaccagtgaggtcatacaggaagaacatgatggcagtacaaaaggttagcactgaggatgtggcagagaagacaacaagcagcactgctaattctggggcatttgtcaaggtttccatggatggagcaccttacctgcgcaaggtggacctcacaatgtacaaaagctacaaagagttatctgatgccttggccaaaatgttcagctccttcaccatgggtaactatggggcccaaggaatgatagacttcatgaatgagagcaagttgatggatcttcttaacagctctgagtatgtgccaagctatgaagataaggatggtgactggatgctcgtgggtgatgtcccatgggagatgtttgttgagtcatgcaagcgtctgcgaataatgaagggatcagaagcgattgggcttgcgccaagagcaatggaaaaatgcaaaagcagaagctgaagcgggcctaatacaatgttcaatgaaatcccgtaccaaagtggacctatctcgagacccgctttcttgtacaaagtggtgataaattggagctctgcagagctttcgttcgtatcatc

SEQ ID NO: 186 - DNA, 1239 bp, Glycine max
ttcttgtttgttgattaacccttaattaatccgggcgcgcctgatttatcacaagtttgtacaaaaaagcaggctcctgcaggaccatggggaggcctccttgctgtgacaaagttggcatcaagaaaggtccatggacacctgaggaggatattatccttgtctcttacatccaagaacatggtccaggaaattggagatcagtgcctactaatactgggttatcaaggtgcagcaaaagttgcaggcttagatggacaaattacctaaggccaggaatcaagagagggaacttcaccccccatgaggaagggatgataattcatttgcaagctctactgggtaacaaatgggcagccatagcttcctatcttccacaaagaacagacaatgacataaagaattattggaacacacatctaaagaagaagctgaagaaatttcaagcagctttggatcctcactcagcatcagactcaacagccagtggtcaatttctaccaaagagctttagtgacagaagaagtactttagacatcagcagcaacaacaacaataatcatggctcgtccattaggcttagtcatcatcaatctcagtcctcttccacaacaacatatgcctcaagcactgagaatatctcaagactcttggaaggttggatgagatcttccccaaagcaactcaacaagggatcaataatatcccaatatgatgaagatcatcagctccaaggcatcaatgatgatgatgataataacaacaacaactttgtaagcactactaagctagtgaaccttcatcatcttcatcagcacaaaattagaaacaaagatcatgagcaagagggtggtggagtagataataacatggtttctcatcatgaagagttcgattctattttgtcctttgagaaccaaaacaatgctgcttgggacaagtccacttgtgattccatgccagaaaagagttctgaagcttctgctgctgctgatcatcatcatcatcatcatcatgatatagctgctgctcatgagaggaacaatgtcaggcaaaaatctgagaatagtagtggtgctcctccattgtcatttcttgagaagtggctcttggatgaaaacgttggtcatcaagtggaggagatgatggagttgtctccgatgttctagctcgagacccagctttcttgtacaaagtggtgataaattggagctctgcagagctttcgttcgtatcatc

SEQ ID NO: 187 - DNA, 1180 bp, Glycine max
acaagtttgtacaaaaaagcaggctcctgcaggaccatggccaaaaaatcacagctgcgtacccagaaaaacaatgttaccaccaatgacgataataatcttaacgtaaccaacactgtgaccaccaaggtgaaacgaacaaggagaagtgtccctagagactccccacctcaacgcagctcaatataccgaggagtcactaggcaccgatggacaggccgatacgaagctcatttgtgggacaaacattgctggaatgaatcacagaacaaaaaagggcgacaagtctaccttggcgcttatgacaatgaagaggcagcagcacatgcttatgatctagcagcactgaaatactggggtcaagataccattcttaattttccgttatcaaactacctgaacgaactgaaagaaatggagggtcaatcacgggaggagtatatcggatcgctgaggaggaaaagcagtggtttttctcggggaatttctaaatacagaggtgttgcaaggcatcatcataacggaaggtgggaggctcggattggcaaagtttttggcaataaatatctttacctcggaacttatgctacccaagaagaagctgctactgcctatgacctggcagccatagaataccgtggactcaatgctgtcaccaatttcgatctcagccgttacattaagtggcttaagcctaacaacaacaccaacaacgttatcgacgaccagattagtattaatctcactaacataaacaataataataattgcactaacagcttcaccccaagtcctgatcaagaacaagaagctagcttcttccacaacaaagattcactcaataatactattgtagaagaagtcacgttggtgccacatcagcctcgtccagcgagtgccacgtcagcattggagcttctacttcagtcatcaaagttcaaggaaatgatggagatgacatctgtggccaatctttcatcaacacagatggaatctgagttgccacagtgcacatttcctgatcacattcagacgtactttgagtatgaagattccaatagatatgaggaaggagatgatctcatgttcaagttcaacgagttcagctccattgtgccgttttaccaatgtgacgagttcgagagttgactcgagacccagctttcttgtacaaagtggt

SEQ ID NO: 188 - DNA, 1218 bp, Glycine max
ttcttgtttgttgattaacccttaattaatccgggcgcgcctgatttatcacaagtttgtacaaaaaagcaggctcctgcaggaccatggatcccaagggctcaaagcagcagccacagcaatcacaggaggtggtaccaaacttcctcagcctcccccaacagcaacaagggaataccaacaacaacaacatgggagagaacaaacctgcagaggtgaaggatttccagatagtggtagctgagaacaaggaagagagcaagaaacagcagcaacagttggcaccaaagaggagttccaacaaggacaggcacaccaaggttgaaggcaggggaaggaggataaggatgcctgctctctgcgcagccagaatcttccagttgaccagggaattgggtcacaaatctgatggggaaaccatccagtggctcctccagcaggctgagccatccatcatagctgccactgggactggcacaataccagcatctgctcttgctgctgctggaaactcactctcaccacaagctgcttctctttcatcatccttgcaccaacatcaacaaaagattgatgaattgggtgggtcaggggggagtagtagtagggccagctggcaaatggttggggggaatttggggagaccccatttgggtgtgggtgtggccacagcagcaggcctatggccccctcatgtcagtggatttggatttcaaacaccaccaacaacaacaacaccaacaacaacaacatcatcatctggtccatctaatgccaccttagccactgagagctccaattaccttcagaaaattgcattccctggctttgacttgcctacttctgccactaacatgatgggtcacatgagtttcacctcaattttgggtggaggtgggggtggtggggcccagcatatgcctggcttggagcttggtctttcccaggatggccatattggggtgttgaatcaacaggccttgaaccagatttatcagcagatgaatcaggctggtagagtgcatcatcatcagcatcagcatcatcatcagcatcatcagcagcaacaacaccatcagcaaactcctgctaaggatgattctcaaggctcaggaggacagtagtagagtgtttaattatggatttggatgaaagaaagaaaaactcgagacccagctttcttgtacaaagtggtgataaattggagctctgcagagc

SEQ ID NO: 189 - DNA, 1467 bp, Glycine max
ttcttgtttgttgattaacccttaattaatccgggcgcgcctgatttatcacaagtttgtacaaaaaagcaggctcctgcaggaccatgttttatgcagtgcctgaaaattatgtacaccagccttctaattctaattatgacagacaagcattttctgctgctgatgggggttttattgatcttacaatgggaaatggacgagggcctcacaagcgaaagagccctggaattcctccagtctgtgaaagaggcagtacaagcagatattccaatgctacaaatgcagctgatcgtcctacatcttcagaattgcagccagagaagcccaatatggattctctatatatgccttgggaccatgttaatatgacacccacatttagaggtagaggcctatctataaggggtgagggtcctttaaggaatgtgaggagccgttctgcacttgatttggaatccaacctggctaggacccatttatcaaatactcatccacacaactcatactctactggtctaccaattgaccattctaacatggtcgatctttcaactcaaacttctggcactttgaccagggattggagcccaatgagtatatgtcctcctcatggaagggtgtcatcatcagatgcaaatgcttttaatcacgaggcaagtcatttccttattggaagcagttctagtaatgctcctgtagatgttggaggttttcataatgaatttggaactagtagaaatcctactgctcctcaaagttttcataataatctgactcaaactgcaagaggagttcacagtaactactctcaaagatccactccaacttttagggcttcttctagcttacgtttgggacgtgtggcaccttctgatgatggattgcatatggtgtccgaaagttactcttctagacagccaaggccattgaccaccgttggctggcagaacaataatagaaatggaagatcaagaatacctagtgacagatatcggtcattggatgatgagggtttcatgattgttgatcgcacttcactgtatggacctaggaatatgcttgatcgacatagagacatgaggatggacatagacaacatgagttatgaggaactacttgcacttggagagagaataggccatgtgagcacaggattgtctgaggatttgatttccaagtatttgacagaaacaatatactgttcatctgagcaaagtcaagaagaagcttgtgcaatctgcctggaagaatacaagaacatggacgatgtcgggacgctgaaagcttgtggacatgattaccatgtgggttgcattaggaagtggttgtctatgaagaaagtatgtcctatatgcaaagcttctgctttgcctgaggataagaagggcaaataactcgagacccagctttcttgtacaaagtggtgataaattggagctctgcagagctttcgttcgtatcatg

SEQ ID NO: 190 - DNA, 1227 bp, Glycine max
ttcttgtttgttgattaacccttaattaatccgggcgcgcctgatttatcacaagtttgtacaaaaaagcaggctcctgcaggaccatgcctgccatgaaaaagaatcctgagctaacttgtattggttctgtattcaacatgttggggaaggagcttggagaacctgtagactttgaacttccagattcatttaataaatccaagccaatgcagtacacctatataaaacgcaatatatatctcactaagaaggtcaagagatcccggtttgatgatgatggcatattctgttcctgtactccttcccctggatctactagtgtatgtggtagagattgccactgtggaatgcttctgtctagctgttcatcaggctgtaaatgtgggagctcctgtctcaacaaaccatttcagaaccgtcctgtgaaaaaaatgaaattggtcaagaccgagaaatgtggttctggaattgtggcggatgaagatatcaagcttggggagtttgtcattgaatatgttggagaagtcattgatgacaaaacatgcgaggaaaggctttggaacatgaaacatagtggggaaacaaacttctacttatgtgaaatcaatcgagatatggtgatagatgcaacatacaagggaaacaaatcaagatacatcaatcatagttgctgccccaatactgagatgcagaaatggataattgatggtgaaacaagaattggcatatttgcaactcgtgacatacaaaagggcgagcatctgacttatgattaccagtttgttcaatttggtgcagatcaagattgccactgtggtgctgctgagtgtaggcgtaagttgggtgtccgacctaccaagtctaaactttcttcagatgctgcattaaaattagttgcatatcaggtttatcagaatggaggtttgcaaattggaagttctcgtgttgttgaccaaccaaagtgcttgcacaattgcattggtgaagttattaggataaaacatcttgaaaatgagaggtttggaattattaaacgatttgataagtattcccgaaaacattcgatcatgtttgaggatggttgtgttgaaatttatgacatgtcaaaagaggactttgaacttgtgagatagtgatgcaactgttgggtgcaggtgaaaggaattgaaactcgagacccagctttcttgtacaaagtggtgataaattggagctctgcagagc

SEQ ID NO: 191 - DNA, 1282 bp, Glycine max
ttcttgtttgttgattaacccttaattaatccgggcgcgcctgatttatcacaagtttgtacaaaaaagcaggctcctgcaggaccatggggaagaagaagaagagagtttcctcgaaggtgtggtgttattactgcgatcgcgaattcgacgacgagaagatcttggtgcagcatcagaaagccaagcactttaagtgccatgtctgccacaagaagctctctaccgctggcggcatggccatccacgtcctccaggtccacaaggaatccgtcaccaaggtacccaacgcaaaacctggcagagagagtacggatattgaaatatatggaatgcaagggattccaccagatatcttggctgctcattacggtgaagaagaggatgatgttccgtcaaaggcagccaaggtggatattccaccaactcagcttgtaggtggaatgattccacctcctttgggtacaggatatcctccgcgaccaaccttgcccacaatgccaccaatgtataatcctgctgtacctgtgcctccaaatgcttggatggttccacctcgacctcagccatggttttcacagcctccagctgtttcagttcctcctgctgccccatacacacagcagccattatttcctgtgcagaacgtgaggcctccactgccagctactgctcctgcgctccaaactcagattactcctcctggattgcctacatctgcacctgtcccagtttcacaacctttatttcctgttgttggaaataaccatacaactactcaaagttcaacattttctgctccacctctgccctcaagtgttccatcagttacttcagtgatgtctgcaaatgttcctgttgatacacatttgagcagcaattcttctgtaacaagtagttatcaggctatagggattccaggtggagcagctagtaactcacattcttatgcttctggtccaaatactggtggtccttcaattgggcctcccccagtaattgcaaacaaagctcctgctactcagcctgccaccaacgaagtctacttagtttgggatgatgaggcaatgtccatggaggaaagaagaatgtctttgccaaaatatcaggtgcatgatgaaagtagccagatgagctccattgatgcagccatagataagaggattcttgagagtaggctggctggtcgtatggcattttagatcaatctcatccatacactcttgtcaaatttcttcagtgataagggctctcgagacccagctttcttgtacaaagtggt

SEQ ID NO: 192 - DNA, 1116 bp, Glycine max
ttcttgtttgttgattaacccttaattaatccgggcgcgcctgatttatcacaagtttgtacaaaaaagcaggctcctgcaggaccatgtcaagtgggacaacatactggtgttacacatgcaggcagccaatctggcttgaagggagggaaggcttttgcccctactgcgatggaggctttgtgcaagaactcaacgagatgcgaggagttgcgcgccaacacggcttctcaacgcggatggaagatgttcatcaaatgcctgacattatggatgctgtaagagctgttatggagcaaagaggttctgaaccgagcattcgggttagagatgctgttgataactttatgaggcagagaatggccggaagatacacaaactttgatgtgagaaggaggtctgattctggttctggttctggttctattcttattcctgatgagacttggggtgtctttagttctggtccttatttgatatttcatggtcaagcaccagggttcaccaattctaatgggagctcaagagggggtcctaggggtgttgattttggtgactactttcttggtcctagactagaaggactcattgaacaacacatttcgaatgaccggcttggtccaccgcctgcattgcgctcttcgattgatgcaatgccaactatcaagatcacacatgagcaccttgagtctgattcacactgtccagtttgtaaggaacgatttgaacttggttccaaggcaaggaagatgccatgtaaccacatttaccactcagattgtattgttccatggttagttcttcataactcgtgtcctgtgtgtcgtgttgagctgccaccgaaagaacatactagttctcgaggtagacgtatttggggaggtagaaatggtaatgacagtggtagtgacaatgatatctctaggggaagggagaatacacagatgaacaatggaaggagaaatctgctatcatatttgtggccatttcggtcctctagttcaagtacttagtgtgtgtttgttttacctgaatcacgtgttccaaagctcgagacccagctttcttgtacaaagtggtgataaattggagctctgcagagctttcgttcgtatc

SEQ ID NO: 193 - DNA, 1122 bp, Glycine max
ttcttgtttgttgattaacccttaattaatccgggcgcgcctgatttatcacaagtttgtacaaaaaagcaggctcctgcaggaccatgaacaggggaattgaagttctttctccagcctcatacctccgaagttccaattggctgttccaagaaagcttggggaccaggtggactccacaggagaacaagctctttgagaatgctttggctgtgtttgacaaggacactccggaccggtggctgaaggtggcggccttgattcccggcaagacggtcggcgatgtgatcaaacagtatagggaacttgaagaagatgtgagtgtcattgaatcagggtttattccacttccagggtacactgctgctgattcctttacattggagtgggtcaacaatcaaggatttgatgggctcaggcagttttatggtgttactggcaaaaggggtgcttccactagaccatctgagcaggagaggaagaaaggtgtgccatggactaaagaggagcacaggcaatttctgatgggtctgaagaagtatggtaaaggagactggagaaacatctctcgcaattttgtgaccacaagaacaccaactcaggttgcaagtcatgctcagaagtatttcatcaggcaactaagtggaggaaaggacaagaagagatccagtatccatgacatcacaatggtgaatctcccagaagcaaaatctccttcatcagagagtaacaacagaccctattcaccagatcactcagtgaaggatgtgaatccaccatcccagaatcaaagattgtctactactatggtaattaaacaggaacatgattggaaattgccatgtgaaactgtgcctatgcttttcaattccacaaatgggaacatgttcatgacaccactttgtgggatttcttcatatggatctaaaccacttcaggagcagtatttcctcagtggatgccagtttggaccttatgatacaattatgcaaatgccgtccatgcaaaatcaatgaactatatagaatgcagggattaaagttaaggtactactcgagacccagctttcttgtacaaagtggtgataaattggagctctgcagagctttcgttcgtatcatc

SEQ ID NO: 194 - DNA, 1580 bp, Glycine max
ttcttgtttgttgattaacccttaattaatccgggcgcgcctgatttatcacaagtttgtacaaaaaagcaggctcctgcaggaccatgggtagcagaagtagaacagtaaacgttaacactaaggacactgacaaggttctgaacgggatgccaagctacgctcctccattgccttcttcttccaattccatggccatggaagcaactaatgctcatccttcccgtatttctgaatttggaaccctggagcaatctcttggatttcgtgttgaagataccattaatcttagcagaaatccgatgtttaatcaaatgaaatcaaatagccaagctctaggtgctgatattcaatttggtgctttaaataagtcaattgcaacatcggatataaacctctctgctgctattgctgcatctcaggcactggtattccaaaaagattcgcaaccaactctggcttcgacatctgctggtcgtgagaactggggagagaccaacatggctgatgctagccctaggactgatacttcaacagatgatacagaagacaaaaatcaaaggcctgaaagggatgaatccagtggatcaaaagataaatcagatcaaaagacattaagacggcttgctcaaaatcgtgaggctgccaggaaaagccgactgaggaaaaaggcatatgtgcaacaattagagagcagtaggttgaaactgacccaacttgagcaggagctccagcgatctcgccagcagggaatatttatttcaagtactggagatcaggcacagtcaatgagtggaaatggcgctatggcatttgatgtagagtacgcacgatggttagaagagcataatagacaaaccaatgagctaagggctgcaataaattctcatgctggagatattgaacttcgaaccattgttgacaatttcatgacgcagtttgatgatatcttcagactgaaaggtattgcagcaaaagctgatgttttccacattctgtcaggaatgtggaagactccagctgagaggtgtttcatgtggattggaggctttcggtcatccgaactcctcaagcttcttctaagtcagttggagcctttagccgagcaacaattgatgggcatctacaacttgcagcaatcatcccagcagactgaagatgctctttcccaagggatggatgcattgcagcaatcactatctgagacattggctaatggttcgcccagctcatcaggctcctcgggaaatgtggcaaattacatggggcaaatggctatggccatgggaaagcttggtacacttgaggggtttcttcaccaggctgacaatctgcggcagcagatattacaacaaatgcttcgaatattaacgaccaggcaatcggctcgtgctcttcttgccatcagtgattatttctcacggctgagagcgctgagttctttgtggcttgccaggccaagggagtgaagcatttcacagccccattagtggacttctttcatgcctgactcgagacccagctttcttgtacaaagtggtgataaattggagctctgcagagctttcgttcgtatcatc

SEQ ID NO: 195 - DNA, 1294 bp, Glycine max
ttcttgtttgttgattaacccttaattaatccgggcgcgcctgatttatcacaagtttgtacaaaaaagcaggctcctgcaagaccatgaagacagtcctattcctccttctggtgtcagcgttaatccccatcgccgtcgcgcagcccaatgacttctccgacgcaaacctcaacgagttcaactcctccatagccataatcataatcatattagtaatcgcgtttttcctcatggcctttttctccatctacgtgcgccactgcgctgattccccttccaacaccgtcaggcctctcaccaccgcacgctccaggagggccgcgcgtggccttgaccccgctctgattcaaacattccctatcctcgaatactccgttgttaagatccacaaaatcggaaaagaagctttggaatgcgctgtgtgtttgtgcgagttcgaggacaccgaaacgctgcgtttgctccccaagtgcgaccacgttttccaccccgagtgcatcgacgagtggttgagctcccacaccacgtgccccgtgtgccgcgccaacctccttcccaccgagtccgaggatgctattgctaacgccaacgccaacggtgttgttccagttccggaaacgttaacgcgagacatcgaatcccaaaacgacgccgtgcaagccgcgccagagcagcagaacgcggaggctgacccagttttacccgaaccggaagttgtttccctggacaaaacgctaaaccggaaccgcacgcgagggtcgcggtcgaaccggccgcggaggtttcccaggtcacactcgaccgggcactcgctggtccaaccgggagaaaacactgaccggttcactttaaagttgcctttggaggtgaggaagcaattaataaaccgccaattacaacgtgcgagtagcttgatcgtgttaccgagggaaggtagttcgagacagggttaccgaaccgggggagaagggagtagtagagccaaaatctcgaggcggctggaccggagtttgaaatcggaccggtggattttctcaatggctgcgcccttttttgcaagggcgttgtctattagatcgcctagggttcgaaacaatgatgttgaaggagcggcgtcctcgtcgtctcccaccgcgcctatcatgccgccgacggccgttgactcggcaaggcctccggtttaaccggagtttcgccaacctccacataccttgtcattttctcgagacccagctttcttgtacaaagtggtgataaattggagctctgcagagctttcgttcgtatcatc

SEQ ID NO: 196 - DNA, 1806 bp, Glycine max
ttcttgtttgttgattaacccttaattaatccgggcgcgcctgatttatcacaagtttgtacaaaaaagcaggctcctgcaggaccatgaacgcctccatcattgatccgttgcagggcgatttccctgaagtgatagaggagtatttggaatatggttgtatgaaatgcattgccttcaatcgccgtggcacccttcttgctgctggatgcaacaatggaagttgtgttatttgggattttgaaaccagaggcattgctaagattctgcgtgatgatgaatgttcttctcccataactagcatttgctggtcaaagtatggtcatcaaattcttgtatctgctgctgataaatcattgatattgtgggatgttatgagtagtaagaagataacacggatagttttgcaacaaacccccctacaagctcgtcttcatccaggatcctcgaccccatctctttgcttagcatgtcctctttcatgtgctccaatgattgttgatctgaacacaggaaacacaactttacttaaagtttctgtcttagagacatgcaatggaccaacaccaacccctccttcacgtaataaatgttctgatggaattacctccttcacaccaactgctgcttgttttaataagtatgggactctggtttatgtgggaaactcaaaaggggaaattcttgccattgattacaaaaatggtgacgtgcgtgctgtagttccaatctctggtggttctgttgtaaagaacattgtgttcagcaggaatgggcagtatctgctcacaaattcaaatgatcgaataattcgaatctatgaaaaccgtctacccctgaaagatgaagtcagagcccttgatgacctgagtgagaaccacaatgttctaaataatatcgagaatttgaaggctgttggatcaaaatgtttaactttattccgggaatttcaagattccatcacgaaggtacactggaaagcaccttgtttcagtggtgatggtgagtgggtagtcggtggttctgctagcaaaggtgagcacaagatttacatatgggatagagctggacatcttgtgaaaatccttgaagggcctaaggaagctctgatagatttagcatggcatcctgtgcatcctattgttgtatctgtttcgctgaatggtttggtttatatatgggcaaaagattatactgagaactggagtgcatttgctcctgatttcaaggagcttgaggaaaatgaggagtatgtagagcgtgaagatgaatttgatctgattcctgagactgagaaggtgaaaggacctgatgttaatgaagatgaggaagttgacattataacagtggagaaagatgctgctttcagtgattctgatatgtctcaagaagagctatgttacttgccatcaacccctagtcgtgatgttcctgagcagcaagagaagtgtgtagaaagttcttctaagttgttggacagcaataacactggatcccctctttcggaagaagctggaccaaatggacatatgatgaatcatgcatctagtcctcttgaagatgatgctgggcgcatgaaaagaaagcggaaaccttcagagaaggtgttggaattacaagcagaaaaagttaagaaaccctcaaaatctagcaaattggcaaaacctaagagcaaatctttggccgatcaagataatggtaacggttttcatggtgatggactttatgatgaataactcgagacccagctttcttgtacaaagtggtgataaattggagctctgcagagctttcgttcgtatcatc

SEQ ID NO: 197 - DNA, 696 bp, Glycine max
ttcttgtttgttgattaacccttaattaatccgggcgcgcctgatttatcacaagtttgtacaaaaaagcaggctcctgcaggaccatgagtaggagttcggcgatgcatggaattacaagcacaaacaacaagttgaagggagttcggcgtcgaaaatggggcaaatgggtgtcggagattcgtgttccgggcacgcaagagcgtttgtggttgggaacctacgccacgccggaggctgccgcggtggctcacgacgttgccgtctactgtctaagtaggccttcttcgttggacaaacttaacttccccgaaaccttgtcttcgtacagtgttcagctcagggacatgtctccgaggtctgtgcagaaggtggcttccgatgttggcatggatgttgatgcaagaaacattgttgcgggcaaaacttcaacggtgggggcagaaactaattgcgagagtgatgagaggactagtactgcgtctgtgtgtaatgttgttggagaaggtggtgctgatcattcggatgtgttttggtgggatgatgatggtgggtcttggcatggaagtggtggagattctacggaaagggatgccttgagcatttccattgaagattatctttagctcgagacccagctttcttgtacaaagtggtgataaattggagctctgcagagctttcgttcgtatcatc

SEQ ID NO: 198 - DNA, 1708 bp, Zea mays
ttcttgtttgttgattaacccttaattaatccgggcgcgcctgatttatcacaagtttgtacaaaaaagcaggctcctgcaggaccatggcggaggctggttacttccgcccgttgatacagtacctcaaacaaggttcagacatgaacaaggtcctcatggcaacggccatctcgaaaatgttcctatctgaacatatgaaatcttccctcggcgaggatggagctattgaaccgctcgtggacatgtttaaacatggaaaccttgaagccaagcactcggccttaggcgccttgtgtaatctctctagctctctacagaatgcagaactcctgataaattctggcataacaggaccgctgctccagctccttttctccgtgacgtcagcactcatggccctcagagagccggcctcggctatactcgcagctatagcacaatctgagcgtattctacttcataaggatgtagcgcctcagatgctctcgcttcttaatttatcgagtccggtgattcaacttcatctcctgagggccttgaacagcatttccgggcacgcgaatgctaaaagagccaggagtaaaatcaggcaaaatggaggagtgcagctgcttctacctttcctgacagaaaagaatgtgggtatcaaaatcgccgcgttgcacttaatgttccatttgtcgaaagactcttctcaagaattggctgagcagttcagggagacccatctggatatttttgtgaagatcatctcttcccctacttctcgagacgagaaggctgcagctgtcggtatcctgagcaacctcccagcgacagacaagaaggcaactgagattctgatgcgggcaaacttgctccctattctgatcaccttgtttgaggcaaacatggccgctgccgtgacacctcaaagaatgtggttgcttgagggcatcgctggtgtgtttatccggttcacagtcacctgggacaggaagctgcagagttcagcagttggacacggggtggttccttgccttgtgaagttgctttcagaaggatcggtggacgccaagtctaaagcggcaacatccttggcccaactgtcacagagcacgatggcgctgcgcaagtcaaaaacgccaaggtggctctgcgttcctccatcggccgaatcctactgtacagtccacagctgccagtgcacagtcaaaagcaccttctgcttagtaaaagccggcgccgtccatcctctggtccagacactggaaggcgaagagcgcggagctgatggagcggcgctggaagcgttgggcacccttatggaggacgaggtctgggagaacgggagcagggtgatagaaagggcgtcaggcatccatgctctgctgaggatcgccgaagccggagagccgagctcccaggacaaggcgatatggatgctggagaggatgttccggctcgaagcccacagggagcggtacggcgagatcgcgcaggctctgctcatcgatctcgcccagaaaggagaccctgccctgaaaccgatgatcggcaagatactggctcaccttgagctgctgcaaacacaatctagctacttttaagcgtgctggcgggcgtcgctgcagataccagatcgccagatttgtgctcgagacccagctttcttgtacaaagtggtgataaattggagctctgcagagctttcgttcgtatcatc

SEQ ID NO: 199 - DNA, 1521 bp, Chloroflexus aurantiacus
ttcttgtttgttgattaacccttaattaatccgggcgcgcctgatttatcacaagtttgtacaaaaaagcaggctcctgcaggaccatggctgcgcctgctgtgcgccacattcgtcttgtcactgaaatacccggcccgcgttcgcgcgcattactggcgcggcgtgatgcggcggtggttgccggtttggggcgggcaacgccgatagcgattgcctccggccagggtgcgctggtgaccgatgttgatggcaataccctgatcgattttgttagtgggattgggacgctcgccgtcggccactgtcctcctgaagtggttcaggcgattcaggctcaggccgaacagttgatccatctttcggcgttagttggcacctacgaaccgtatgtcgccctctgcgagcggttaaatgcgctggcacccatcagcgagccgtgcaagacgttgctatcgaattcgggcgccgaaggggtggaaaatgcgatcaaatttgcccgcgctgcgaccggtcgtccggccattatcgtgttcgatggcgcgtaccacgggcgaacgctgcttacgctttcgctcacgtcccgcacctacttcaaaaagaaattcggcccctttgccccagagatttaccgcgcaccttttccttacgcttatcggatgggcatgagtgaagcggaggcagttgagcagtgctgggccgcatttgaacgcatgcagattgccggtgtcgatcccgaaacggtggctgcggtcttgattgaaccggtgcagggtgaaggtggctttatcccggtgccggtcgaatttatgcggcgcttacgcgaattctgcacgcgcaacggctcactgttgattgtcgatgaagtgcagagtggttttggccgtaccggtacgctcttcgcgattgagcagtttggggttgaacccgacatcattgtagcggccaagagtattgctgccggtatgccactggctgccacaattggtcgtgcccgcattatggattgcgcccactacggcggtgtcggtggtacctacggcggcaatccgctcgcctgtgtcgcagcgctggccactatcgatctgattgaacgcgagcgcttgctggaacgggcaaaggtgatcggccaacagattcgggccagatttgaaccattactgaccgatgattcactcgatccactggttggtgatgttcgtggtctgggggcaatgatcgggatcgagctggtcaaggatcgccgcaaacgcacgccagccgccgccgaagaggtgctggcgatcctggggcgtgcgcttgaacgtggtgtgctggcgatgcgggccggtctgtatgtgaactgtatccgcttgctggtaccacttgttatcaccgatgatcagctcgatgaagggttagaggtgctgataggggcaatgcgccactgaagagcattgaggcagccgtgactcgagacccagctttcttgtacaaagtggtgataaattggagctctgcagagctttcgttcgtatcatc

SEQ ID NO: 200 - DNA, 1779 bp, Chloroflexus aurantiacus
ttcttgtttgttgattaacccttaattaatccgggcgcgcctgatttatcacaagtttgtacaaaaaagcaggctcctgcaggaccatggcacgtccacgtccggtggtcttgataattatggatggctggggtattgcgccgccagggccgggtaatgcggctgatttggccgatacgccccatgttgatgcgtggatggcgaattgcccctttacaacattgggagcttcagggcttgatgttggcctgcctgaaggtcagattgggaactccgaggtaggccatctcaatattggggccggttttgtggtctatcaagaactgacgcgcatcagcaaagcgattgccgatggtgatttttttaccaacccggtcttgctccaggctatcgaacacgtcaaacagcgcaactcggccttacatttgatggggttgtttgggcctggaggcgtccatgcccatgaagatcacctgcacgcgctgctggaactggcccaccgccatcatctccagcgcgtctatctccacctcttcctcgacgggcgcgatgtgttgccgcgcagtgccctgggttttctcgacaccctcgaaggggtgatcgcccggcttggcgtcggcacgattgctaccgtttccggtcgttactatgcgatggatcgtgataagcgctgggaacgcacgggacgggcgtatgcggccctggttgatggggtgggtgagaaggcaccttcagcgcgggcagcgattgaggcatcgtatgcccgtgatgtcagtgatgaatttgtcttacccacagtgattgtcaccgccagcggcgaaccaaccgctaccgtgcgcgatggcgatgccgtgatctttaccaacttccgccccgaccgcggtcggcagttgacccgcgcttttgttgatccagacctcaacgaacgtattcgtcagcactatgaacggcaaaaggctgaaggccagccgttgcctgccacgatctggcagcgtgagcgtcagttgcgcgatctctgtttcgtgaccatgacccaatacgaagagggcttgccggtactggttgccttcccgccccgttacgtcaccaatccgctggccgctgtgatcagtcaggccgggctgcgccagtttcatattgccgagaccgagaaatacccgcacgtcaccttcttcctcaatggtgggcgcgaagagccgtttcctggcgaagatcgtcagctcattccatcacccaaagtcgccacttacgatctgaaaccggaaatgagtgccccggaagtcaccgaggctctgctggccgcaattgatagcgatcaatacgatttcatcgtggtcaattacgccaaccctgatatggttggtcacaccgggagtatcccggcggtgatcaaagcctgtgaagccgttgatgccgggttggcgcgggtggtgccggccattctggagcggggcggcgtggccctcgtcatcgccgatcacgggaacgccgagcagatgattgacccggaaactggggggccgcacacggcacacaccaccaatccggcaccttgtttcctgatcggtggtgccggttatggcaaagatgctatcgaactgcggcacggtggacgattggccgacgtggcaccaacactgctcgaactgttggagttagaaccgtcacccgatatgaccgggcagagcctgattgtgcgtcgtgcttagctcgagacccagctttcttgtacaaagtggtgataaattggagctctgcagagctttcgttcgtatcatc

SEQ ID NO: 201 - DNA, 1227 bp, Arabidopsis thaliana
atgtttggtggaaaaagtcatatactcagagggagtgtatcactggccttgatcgtccttattcttttggtcattatactcctggtttctgaggaaaacccgcttcgtgattctctctttgaagtaaaacgtcagttttcatcttcttcttcttcttcttcttcagtttgtaactttgcaaagggaaaatgggttgaagaccggaagagaccattgtattctggttttgaatgtaaacaatggttatcatccatgtggtcatgtagaataatgggcagacccgatttctcatttgagggttaccgttggcagccagaaggttgcaacatgccacagtttgacagattcactttcttgacaagaatgcagaacaagacgatagcatttataggagactcattggggcggcaacagtttcaatccctaatgtgtatggccagtggtggtgaagatagcccagaggttcaaaacgtgggatgggagtacggtttggtgaaagccaaaggagctctccgtcctgatggttgggcttatcggttcccaaccacaaacacgacgatcttgtattattggtcagctagcttatcagatttggtacccatgaacaatacagatccacctagtcttactgcaatgcatctagatcgtccaccagcattcatgagaaactaccttcaccgtttcgatgtattggttctaaacactggtcaccattggaacagaggtaagattgaaggaaaccattgggtgatgcatgtaaatggaacacaggtcgaaggcgaatatctcaaagatatcagaaacgccaaggattttacaatacacagcgttgcgaagtggctcgatgcacagcttccattgcatccgcggttgaaagctttctttaggacaatttctccgaggcattttaaaaacggagattggaatacaggtggaaactgtaacaacacggttcctttgtctagaggcagcgaaatcacaggggatgatggatcgatcgatgcaacagttgagagtgctgtgaacgggacaaggatcaagattcttgacataactgcactttctgagctaagagacgaagctcatatctcagggtctaaactcaaaccccgaaaaccgaagaaggcaagtaacgtgacctcaactccaacgatcaacgattgcttgcattggtgcttaccagggatcccagatacttggaatgaacttttcattgctcagatttga

SEQ ID NO: 202 - DNA, 1333 bp, Arabidopsis thaliana
ttaattaacagcaacaataacagacacataaccaatggcaaagcgacaactgttgatgctgggtattagaactagctttcatactatcgccgccgtgcttgtggccggattaatattcactgccgtgtttttgtccagaaacagtttgccaaaggaaaatcctcaaagccacggtgttacggatcgcggaggggacagtggcagagaatgtaatttgttcgaagggaaatgggtatttgataacgtatcataccctctttataaagaagaagattgcaagttcatgtctgaccagttggcttgtgagaagtttgggaggaaagatctgagttacaaattctggaggtggcaacctcacacgtgtgatcttcccaggtttaatggaacgaagttgctggagaggctaagaaataagaggatggtgtacgtaggagactctctgaacagaggccaatgggtatcaatggtgtgtatggttagttcggtaattacaaacccaaaggcgatgtatatgcacaacaatggctctaacctcatcacgttcaaagctctcgaatacaatgctacaatagactactattgggctcctttgctggtggaatccaactcggacgacccgacaaaccatagattccccgatcggatagttcggatccaatcaatagaaaaacatgcaaggcattggacgaactctgatatcattgttttcaactcttacttatggtggagaatgcctcatatcaagtcactgtggggatcgtttgagaaattagatggaatatacaaggaagtggagatggtgagagtttatgaaatggctttgcaaacactgtctcagtggttggaggttcacgttaaccccaatattaccaaacttttcttcatgtccatgtctcccacccatgaaagggctgaagaatggggaggaatacttaatcagaactgttatggagaagctagtctaatagataaagaaggatatactggaagagggtcagatccaaagatgatgagagtcttagaaaatgtgcttgacgggctaaaaaatcgaggattaaacatgcagatgataaacattacgcaactatcagagtatcgaaaagaaggtcatccttcgatctacagaaaacaatggggaacagtgaaggaaaatgaaatctcgaatccaagtagtaacgcagattgtatacattggtgtttgcctggagttcctgatgtttggaatgaactcctttatgcttatattcttgaccatcattctagttgaaaactactattatatcttttgtttttttacctattccacttcaattgtacaggcgcgccaaaaatt

SEQ ID NO: 203 - DNA, 1362 bp, Arabidopsis thaliana
tcagctcaatagcaagaagtagttctaaacgagctaattactccgagaagtctgtttcaaatgtctatacaaacaactgcagattcgaggatgattcaatccatcttccaagttgtgcttgttagtcttctagttctaggatccgtgagatggatacttgatgaactcaagagcaaagaaagtcgaatatccaaactatatggtttcagacagaaagaggcagtgtttgtcactaaagaggatcagcttgatgagagctgcaatgtctttgaaggacaatgggtttgggacaatgtctcttatcctctttatacagagaagagctgtccttatttagtcaaacaaacaacatgtcaacgaaatggacggcctgattcttattaccagaactggagatggaaaccgagctcatgcgacttgccaaggttcaatgctctgaaactgttggacgtgttgagaaacaaaagactaatgttcataggagactcagtgcagagaagcacgttcgagtcaatggtctgtatggtgcaatcagtaattcctgagaagaagaagtccttccataggattcctcctatgaagatcttcaaagctgaggaatacaatgcatccatcgagtattactgggcacctttcatcgtggaatcgatttcagatcatgcaactaatcatacagtacacaaaaggttggttaagctcgacgccattgaaaaacatagcaagagctgggaaggggttgatgttctagtctttgagagctataagagcttagaaggaaaacttatacgcatatgcaggtatggagataccagtgaagtccgagagtataatgtgacgactgcttataaaatggcgttagaaacatgggccaagtggtttaagacgaagatcaattccgagaagcaaaaagttttcttcacgagtatgtctccgactcatctatggagctgggagtggaatccagggagcgatggaacctgttatgatgagttatatccaatagacaaaagatcatattggggtacaggatcaaatcaagaaatcatgaagattgttggtgatgttctaagcagagttggagaaaatgtcacgttcctgaacattacgcaactgtcggaatacaggaaagatggacatacgactgtgtatggagaacggagagggaagctcttgacaaaggaacagagagctgatccgaaaaactatggagattgcatccactggtgtttgccaggagttcctgatacatggaatgagattctctatgcatatttgcttcgcagtcaccgcaatttcttctgatcccttcttggggagtgttaagctcaagtttcttaagttttatcaacaatgggtttcatt

SEQ ID NO: 204 - DNA, 1756 bp, Arabidopsis thaliana
ttaattaaatgaagtttatgaaacttggatccaaacctgattcgtttcagtctgatgaagattgcgtaagatatgtagcaacggagttagcgactgatgtagttgtaattgttggagacgtgaaatttcatcttcataagtttcctcttctttccaaaagcgctcgtcttcagaagttgatagccacaaccacgaccgatgagcaatcagatgatgatgaaatccgcattcccgatatcccgggagggccaccagcgtttgagatatgcgcgaaattctgttacggaatggctgtgactctcaacgcatacaatgttgtagctgtgcgttgcgctgctgagtatctcgagatgtatgaatcgattgaaaacgggaatcttgtttacaagatggaggttttcttgaactctagtgttttgagaagctggaaagactccattatagttctccagacgacgagatcattttatccgtggtctgaagatgtgaaactcgatgtacggtgtttggagtcaatcgctttgaaagctgctatggatcctgcaagagttgattggtcttatacttataaccgaagaaagcttcttccccccgagatgaacaacaatagcgtaccgagagattggtgggtcgaggatctcgctgagctcagcattgatttatttaaaagagtggtttcgactattagacgaaaaggcggtgttttgcctgaggttatcggagaagctcttgaggtatatgcagcaaagagaatccctggtttcatgattcaaaacgatgataatgatgatgaagaagatgtgatggaacaaagatctttgttggagacattggtttcgatgttgcctagtgagaaacagagtgtttcttgtggattcttgatcaagctgttgaaatcctctgtttctttcgaatgtggagaagaagagaggaaagagttaagtagaagaatcggagagaagctagaggaagcaaatgtgggtgatctcttgatcagagctccagagggaggtgaaacagtctatgacattgacattgttgaaaccttaatcgatgagtttgttacacaaacagagaaaagagacgagcttgactgttcagacgacatcaacgacagttcaaaagcaaatgtcgccaagttaatcgatggatacttagctgaaatctccagaatcgaaaccaatttgtctactacaaagttcattacaattgcagaaaaggtttcaactttcccaagacaatcacacgatggtgtgtatcgtgccattgacatgttcttgaagcaacatccaggaataacaaagagtgagaagaaatcatcaagcaaattaatggattgccggaaattatcgccggaggcttgtgctcacgccgtgcaaaacgagaggttaccattacgagtcgttgtacaaatcctcttcttcgagcaagttcgtgccaccacgaaaccttctcttccaccgagcggctcgcacgggagctcaagaacgacaacagaagaagagtgtgagtcagtcacagccacggaggagacgacaactacgacgagagacaagacgagtagttctgagaagacgaaagcaaaaggagttgtaatgtctcggattttctcgaagctttggacaggtaaagataaagatggcgttggagatgttagtagctcagatacatctgaaagtcctggctcagttactaccgtcggtgataaatcgacgccgtcgactcgccggagaaggtcatcgtcttgaggcgcgcc

SEQ ID NO: 205 - protein, 87 aa, Arabidopsis thaliana
MNRVISQFSGKLMKEKSVTGVSGGDTTLRSAVKESVSSPQSASSSSSVRRLKGDLESSRFGAAASERLRQAEESLRTVMFLSCWGSC

SEQ ID NO: 206 - protein, 163 aa, Arabidopsis thaliana
MAEEHRLQEPRLCANNCGFFGSTATQNLCSKCFRDLQHQEQNSSTAKHALTQSLAAVGAAASSSVSPPPPPPADSKEIVEAKSEKRAAAEPEEADGPPQDPKRCLTCRRRVGITGFRCRCGFVFCGTHRYAEQHECSFDFKRMGKDKIAKANPIVKADKLEKI

SEQ ID NO: 207 - protein, 221 aa, Arabidopsis thaliana
MDSLATDPAFIDSDVYLRLGLIIEGKRLKKPPTVLSRLSSSLERSLLLNHDDKILLGSPDSVTVFDGRSPPEISIAHYLDRIFKYSCCSPSCFVIAHIYIDHFLHKTRALLKPLNVHRLIITTVMLAAKVFDDRYFNNAYYARVGGVTTRELNRLEMELLFTLDFKLQVDPQTFHTHCCQLEKQNRDGFQIEWPIKEACRANKETWQKRTPDSLCSQTTAR

SEQ ID NO: 208 - protein, 644 aa, Arabidopsis thaliana
MASLLRSLILLLIVQSFLVAIAFGSKEVEEFSEALLLKPLPDRKVLAHFHFENRAPPSNSHGRHHHLFPKAISQLVQKFRVKEMELSFTQGRWNHEHWGGFDPLSSMNAKPVGVELWAVFDVPQSQVDTSWKNLTHALSGLFCASINFLESSTSYAAPTWGFGPNSDKLRYGSLPREAVCTENLTPWLKLLPCRDKDGISALMNRPSVYRGFYHSQRLHLSTVESGQEGLGSGIVLEQTLTVVLQPETTSVESNMQPSWSLSSLFGRQVVGRCVLAKSSNVYLQLEGLLGYESKNVDTEIEAHQLWKNAEFELSLKPERVIRESCSFLFIFDIDKSSDSEPFDLGLTWKRPSKWSCQQAPLHSSRFLMGSGNERGAIAILLKATESQEKLSGRDLTNGQCTIKANIFQIFPWYIKVYYHTLQIFVDQQQKTDSEVLKKINVSPSTDKVSSGMMEMMLELPCEVKSVAISIEYDKGFLHIDEYPPDANQGFDIPSALISFPDHHASLDFQEELSNSPLLSSLKEKSLVRSYTEVLLVPLTTPDFSMPYNVITITCTIFALYFGSLLNVLRRRIGEEERFLKSQAGKKTGGLKQLLSRITAKIRGRPIEAPSSSEAESSVLSSKLILKIILVAGAAAAWQYFSTDE

SEQ ID NO: 209 - protein, 300 aa, Arabidopsis thaliana
MRVLSEIAESPFVISRLSPDSTATGGFIGGWVGKCHGFLHNTVLVLASILFVAYLAYEAKKSLSKLSNRRSYIMIAYYGFLWLVSLLNLAWCCLQAWECTPGKEVIWNLLTLFTTSGMLFLEVSLVAFLFQGNYASGAEALTRTFLISGLVIGLDLLLKAIYLFGFGVPLFIDNNEHIHKFKWGLWVIHKLLLAGIYGMIFFMYNSKWRERLPARPAFYKYITVMLALNGLSLFACALTANGAHFGLWLYGITSVCYHAFYLPLLYVTFLADFFQEEDLNLENVYYSEMKDAGFFDADWE

SEQ ID NO: 210 - protein, 138 aa, Arabidopsis thaliana
  unsure (1)..(138): unsure at all Xaa locations
MIPQQWTPPCGSKCTNKYSAFTQLPXVFCKKGCDADSDSWEDCVGDCSEICYKDPVLKDRPWTAVIDRSPGDAKYSEECFHACVAGCGYKFDVEAEIVNKVKPKRPPPPPPKPQPPPPPPRSQKPMQPPTEDVLATSA

SEQ ID NO: 211 - protein, 71 aa, Arabidopsis thaliana
MGGGMETNKNKFIEDWGSARENLEHNFRWTRRNFALIGIFGIALPIIVYKGIVKDFHMQDEDAGRPHRKFL

SEQ ID NO: 212 - protein, 579 aa, Arabidopsis thaliana
MEKRVKYKSFVKDPGTLGSLELSEVMLLFVPNDPKSDLKLKVQTHNIKSQKYTKEGSNKPPWLNLTSKQGRSHIFEFENYPDMHACRDFITKALAKCEEEPNKLVVLTPAEQLSMAEFELRFKLLRENSELQKLHKQFVESKVLTEDEFWSTRKKLLGKDSIRKSKQQMGLKSMMVSGIKPSTDGRTNRVTFNLTSEIIFQIFAEKPAVRQAFINYVPKKMTEKDFWTKYFRAEYLYSTKNTAVAAAEAAEDEELAVFLKPDEILAQEARQKMRRVDPTLDMDADEGDDYTHLMDHGIQRDGTNDIIEPQNDQLKRSLLQDLNRHAAVVLEGRCINVQSEDTRIVAEALTRAKQVSKADGEITKDANQERLERMSRATEMEDLQAPQNFPLAPLSIKDPRDYFESQQGNILSEPRGAKASKRNVHEAYGLLKESILVIRMTGLSDPLIKPEVSFEVFSSLTRTISTAKNILGKNPQESFLDRLPKSTKDEVIHHWTSIQELVRHFWSSYPITTTYLSTKVGKLKDAMSNTYSLLDAMKQSVQSDLRHQVSLLVRPMQQALDAAFQHYESDLQRRTAKIT

SEQ ID NO: 213 - protein, 492 aa, Arabidopsis thaliana
MDPYKYRPASSYNSPFFTTNSGAPVWNNNSSMTVGPRGPILLEDYHLVEKLANFDRERIPERVVHARGASAKGFFEVTHDISNLTCADFLRAPGVQTPVIVRFSTVIHERGSPETLRDPRGFAVKFYTREGNFDLVGNNFPVFFIRDGMKFPDMVHALKPNPKSHIQENWRILDFFSHHPESLNMFTFLFDDIGIPQDYRHMDGSGVNTYMLINKAGKAHYVKFHWKPTCGVKSLLEEDAIRVGGTNHSHATQDLYDSIAAGNYPEWKLFIQIIDPADEDKFDFDPLDVTKTWPEDILPLQPVGRMVLNKNIDNFFAENEQLAFCPAIIVPGIHYSDDKLLQTRVFSYADTQRHRLGPNYLQLPVNAPKCAHHNNHHEGFMNFMHRDEEVNYFPSRYDQVRHAEKYPTPPAVCSGKRERCIIEKENNFKEPGERYRTFTPERQERFIQRWIDALSDPRITHEIRSIWISYWSQADKSLGQKLASRLNVRPSI

SEQ ID NO: 214 - protein, 421 aa, Arabidopsis thaliana
MSNQRKRSNDEREEEDDEDAEGIGEWERAYVDDRSWEELQEDESGLLRPIDNSAIYHAQYRRRLRMLSAAAAGTRIQKGLIRYLYIVIDFSRAAAEMDFRPSRMAIMAKHVEAFIREFFDQNPLSQIGLVSIKNGVAHTLTDLGGSPETHIKALMGKLEALGDSSLQNALELVHEHLNQVPSYGHREVLILYSALCTCDPGDIMETIQKCKKSKLRCSVIGLSAEMFICKHLCQETGGLYSVAVDEVHLKDLLLEHAPPPPAIAEFAIANLIKMGFPQRAAEGSMAICSCHKEVKIGAGYMCPRCKARVCDLPTECTICGLTLVSSPHLARSYHHLFPIAPFDEVPALSSLNDNRRKLGKSCFGCQQSLIGAGNKPVPCVTCRKCKHYFCLDCDIYIHESLHNCPGCESIHRPKSVSLMEE

SEQ ID NO: 215 - protein, 461 aa, Arabidopsis thaliana
MASGPIAGGGVSKTKHKWSDSGNKSQKRSKPTVANSNSLGLEDNHQMMKISLSSISKLEVRNLKRKLQAELEEVRSLIKRLEPQGNNFAPVPNKKLKTANGGKKGGVHGAAADKGTVQILKSCNNLLTKLMKHKSGWIFNTPVDVVTLGLHDYHNIIKEPMDLGTVKTRLSKSLYKSPLEFAEDVRLTFNNAMLYNPVGHDVYHMAEILLNLFEEKWVPLETQYELLIRKQQPVRDIDFHAPVSTNTHNVEALPLPAPTPSLSPPPPPKVVENRTLERAESMTNPVKPAVLPVVPEKLVEEASANRDLTFDEKRQLSEDLQDLPYDKLEAVVQIIKKRTPELSQQDDEIELDIDSLDLETLWELFRFVTEYKESLSKKKEEQGLDSERDAESFHNSVHESNTLVTGLESSKVTELGHVASTVRQEVNVGGSSSSNSSSSGSGSGSSGSDSDSSGHESDTGN

SEQ ID NO: 216 - protein, 351 aa, Arabidopsis thaliana
MKKQYLKSGSGTRKEKDKAKRWFLDNGSIFLRELVADCNGKSIPIRSFSPEQILKATNNFDSSCFVSQDVYYKWYRGEIEDRSYMIKRFSEDEITGKRHRVKEVYNDIVLSARMSNHSNFLQLLGCCLEFPFPVLVFEFAEHGAMNQRGGVIVNGEESLLPWSVRLKIGKEIANAVTYLHTAFPKIIIHRDVKPMHVFLDKNWTAKLSDLSFSISLPEGKSRIEAEWVLGTFGYIDPLYHKTCFVTEYTDVYSFGICLLVIITGKPAIMTISDGDLQGILSLVRELCENGKLDEVIDPRLMKDITSGQRLQVEACVVLALRCCKERDEDRPKMIQVAKELKQIEASLKNSS

SEQ ID NO: 217 - protein, 636 aa, Arabidopsis thaliana
MKSRVILNHRDRRDKNHNNNNTNHYTQVDTMERKPLEVEPSTTTTNTDVVDSFEEEQRKIVYRGWKVMPFIIGNETFEKLGIIGTLSNLLVYLTSVFNLKSYTAATIINAFSGTINFGTFIAAFLCDTYFGRYKTLSVAVIACFLGSFVILLTAAIPSLHPVACGNKISCEGPSVGQILFLLMGLGFLVVGAGGIRPCNLAFGADQFNPKSESGKKGINSFFNWYFFTFTFAQIISLTAVVYIQSNVSWTIGLIIPVALMFLACVIFSAGDRLYVKVKASGSPLAGIARVIAAAIKKRGLKPVKQPWVNLYNHIPSNYANTTLKYTGQFRFLDKAAIMTPEEKLNSDGTASDPWKLCTLQQVEEVKCIVRVIPIWFASTIYYLAITIQMTYPVFQALQSDRRLGSGGFRIPAATYVVFLMTGMTVFIIFYDRVLVPSLRRVTGLETGISLLQRIGAGFTFAIMSLLVSGFIEERRRNFALTKPTLGMAPRTGEISSMSALWLIPQLTLAGIAEAFAAIGQMEFYYKQFPENMKSFAGSIFYVGAGVSSYLASFLISTVHRTTAHSPSGNWLAEDLNKAKLDYFYFMLTGLMVVNMAYFLLMARWYRYKGGNDEDITEIETNEEETKQQQLQDKNSV

SEQ ID NO: 218 - protein, 297 aa, Arabidopsis thaliana
MLREMLGCCKVYISEARNKTALEAIERALKPFPPAAIVNKFEDAAYGRVGYTVVSSLANGSSSSLKNAVFAMVKTALDTINLELHCGSHPRLGVVDHICFHPLSQTSIEQVSSVANSLAMDIGSILRVPTYLYGAAEKEQCTLDSIRRKLGYFKANREGHEWAGGFDLEMVPLKPDAGPQEVSKAKGVVAVGACGWVSNYNVPVMSNDLKAVRRIARKTSERGGGLASVQTMALVHGEGVIEVACNLLNPSQVGGDEVQGLIERLGREEGLLVGKGYYTDYTPDQIVERYMDLLNNS

SEQ ID NO: 219 - protein, 278 aa, Arabidopsis thaliana
MSGCVKSREKVRKENMSEEKRKQHFVLVHGACHGAWCWYKVKPLLEALGHRVTALDLAASGIDTTRSITDISTCEQYSEPLMQLMTSLPNDEKVVLVGHSFGGLSLALAMDKFPDKISVSVFVTAFMPDTKHSPSFVEEKFASSMTPEGWMGSELETYGSDNSGLSVFFSTDFMKHRLYQLSPVEDLELGLLLKRPSSLFINELSKMENFSEKGYGSVPRAYIVCKEDNIISEDHQRWMIHNYPANLVIEMEETDHMPMFCKPQLLSDHLLAIADNFC

SEQ ID NO: 220 - protein, 391 aa, Arabidopsis thaliana
MGEHSPSQPSSHTLPPNQPESPNHETPNPIPPETNDDDSASSAGVSGSIVSSTTIEAPQVTELGNVSSPPTKIPLRPRKIRKLSPDDDASDGFNPEHNLSQMTTTKPATKSKLSQSRTVTVPRIQARSLTCEGELEAALHHLRSVDPLLASLIDIHPPPTFETFQTPFLALIRSILYQQLAAKAGNSIYTRFVALCGGENGVVPENVLPLTPQQLRQIGVSGRKASYLHDLARKYQNGILSDSGIVNMDEKSLFTMLTMVNGIGSWSVHMFMINSLHRPDVLPVNDLGVRKGVQMLNGMEDLPRPSKMEQLCEKWRPYRSVASWYLWRLIESKNTPPNAAAATAGAALSFPQLEDIQQQEQEQQHQQHQQQQPQLMDPLNNVFSIGAWGQT

SEQ ID NO: 221 - protein, 410 aa, Saccharomyces cerevisiae
MFSIFNSPCVFEQLPSFSQPLHSRYFDCSSPVSYYPECKRRKAIKANLRAPKKSDANCSEPLRYALAETPNGYTLSLSKRIPYELFSKYVNEKLGELKENHYRPTYHVVQDFFGNQYYVEDEADEDALLRSALKDLDFRAIGKKIAKDLFQDYEIELNHRGDELSILSKKDKIFKEFSLDQVFEDVFVIGCGVENIDDGSREKYALLKIGLVKHEEEISEGGINEPKMPIIESKIDESHDDVNMSESLKEEEAEKAKEPLTKEDQIKKWIEEERLMQEESRKSEQEKAAKEDEERQKKEKEARLKARKESLINKQKTKRSQQKKLQNSKSLPISEIEASNKNNNSNSGSAESDNESINSDSDTTLDFSVSGNTLKKHASPLLEDVEDEEVDRYNESLSRSPKGNSIIEEI

SEQ ID NO: 222 - protein, 492 aa, Arabidopsis thaliana
MEDPLLLGDNQIITGSLKPTPTWRMNFTAELKNLSRMALPMATVTVAQYLLPVISVMVAGHRSELQLSGVALATSFTNVSGFSVMFGLAGALETLCGQAYGAKQYAKIGTYTFSAIVSNVPIVVLISILWFYMDKLFVSLGQDPDISKVAGSYAVCLIPALLAQAVQQPLTRFLQTQGLVLPLLYCAITTLLFHIPVCLILVYAFGLGSNGAALAIGLSYWFNVLILALYVRFSSSCEKTRGFVSDDFVLSVKQFFQYGIPSAAMTTIEWSLFEFLILSSGLLPNPKLETSVLSICLTTSSLHYVIPMGIGAAGRLVILFTLGSIRVSNELGAGNPEVARLAVFAGIFLWFLEATICSTLLFICRDIFGYAFSNSKEVVDYVTELSPLLCISFLVDGFSAVLGGVARGSGWQHIGAWANVVAYYLLGAPVGLFLGFWCHMNGKGLWIGVVVGSTAQGIILAIVTACMSWNEQAAKARQRIVVRTSSFGNGLA

SEQ ID NO: 223 - protein, 272 aa, Arabidopsis thaliana
MGRSNSQCPSHWILLCFFISSQFWGFSLPTSIIQQNLEGFKDPEDGFHEIHCSRERSRVAWKIIQEYLMPYVEKERYQLPSTCRVHRDNDIYREQEEHKLRSDINEWRCGFCKKAFYEEKYLDKHFDSRHYNLLNASHGKCLSDLCGALHCDLVVDTARLKSKCNPAAAAKNRHLCESLANSCFPVNKGSSANRLHDFFLRQFCDAHTCSGGSKPLSQKPKKRSIVYIIFSIIVLVVLLLYYSFVYLFRRGLKRRSQDLKRIRHNGLKKKPF

SEQ ID NO: 224 - protein, 269 aa, Arabidopsis thaliana
MMHNSTEESEWEVRPGGMLVQRRDDAASSDHKPLQDPDSASAAFAQTIRITVSHGSSHHDLHISAHATFGDVKKALVQKTGLEASELKILFRGVERDDAEQLQAAGVKDASKLVVVVEDTNKRVEQQPPVVTKEMEKAIAAVNAVTGEVDKLSDRVVALEVAVNGGTQVAVREFDMAAELLMRQLLKLDGIEAEGDAKVQRKAEVRRIQNLQEAVDKLKARCSNPFVDQSKAAAVSTEWESFGNGVGSLNPPPPASPSANVTQDWEKFD

SEQ ID NO: 225 - protein, 379 aa, Arabidopsis thaliana
METLFHTLLRLLLFVAISHTLSPLAGSFRISNDFPAVFNFGDSNSDTGELSSGLGFLPQPSYEITFFRSPTSGRFCNGRLIVDFLMEAIDRPYLRPYLDSISRQTYRRGCNFAAAASTIQKANAASYSPFGFGVQVSQFITFKSKVLQLIQQDEELQRYLPSEYFFSNGLYMFDIGQNDIAGAFYTKTVDQVLALVPIILDIFQDGIKRLYAEGARNYWIHNTGPLGCLAQVVSIFGEDKSKLDEFGCVSDHNQAAKLFNLQLHGLFKKLPQQYPNSRFTYVDIFSIKSDLILNHSKYGFDHSIMVCCGTGGPPLNYDDQVGCGKTARSNGTIITAKPCYDSSKYVNWDGIHYTEAANRFVALHILTGKYSETASSLNL

SEQ ID NO: 226 - protein, 449 aa, Arabidopsis thaliana
MSQRWSRKKSRLPLAGLLFILVVTFMILFNERSIQQIHHHAASHTQNLREPSTFDFVKPNVPRINYLGAHEVLDRFSKCNSTKEYSGKKIGWVDPFEDHPGQVTKEEQKCDVFSGKWVFDNSSSYPLHKESQCPYMSDQLACQKHGRKDLEYQHWRWQPHACNLKRWNAIEMWEKLRGKRLMFVGDSLNRGQWISMVCLLQSVIPRDKQSMSPNAHLTIFRAEDYNATVEFLWAPLLVESNSDDPVNHRLSERIIRPDSVLKHASKWQHADILIFNTYLWWRQDSVKLRWSSEEKGSCEEVKSAEGMEMAMDSWGDWVANNVDPNKKRVFFVTMSPTHQWSREWNPGSEGNCYGEKKPIEEESYWGSGSDIPTMRMVKRVLERLGPKVSVINITQLSEYRKDGHPSVYRKFWEPLNEDRLKNPASYSDCTHWCVPGVPDVWNQLLFHFL

SEQ ID NO: 227 - protein, 501 aa, Arabidopsis thaliana
MAIPMPTRQLFIDGEWREPILKKRIPIVNPATEEVIGDIPAATTEDVDVAVNAARRALSRNKGKDWAKAPGAVRAKYLRAIAAKVNERKTDLAKLEALDCGKPLDEAVWDMDDVAGCFEFYADLAEGLDAKQKAPVSLPMESFKSYVLKQPLGVVGLITPWNYPLLMAVWKVAPSLAAGCTAILKPSELASVTCLELADICREVGLPPGVLNVLTGFGSEAGAPLASHPGVDKIAFTGSFATGSKVMTAAAQLVKPVSMELGGKSPLIVFDDVDLDKAAEWALFGCFWTNGQICSATSRLLVHESIASEFIEKLVKWSKNIKISDPMEEGCRLGPVVSKGQYEKILKFISTAKSEGATILHGGSRPEHLEKGFFIEPTIITDVTTSMQIWREEVFGPVLCVKTFASEDEAIELANDSHYGLGAAVISNDTERCDRISEAFEAGIVWINCSQPCFTQAPWGGVKRSGFGRELGEWGLDNYLSVKQVTLYTSNDPWGWYKSPN

SEQ ID NO: 228 - protein, 293 aa, Arabidopsis thaliana
MAASCFAIPLSSSSRSSHNAIPKYKTLISSSSYSYLESLKLQFSSSNSFHHSSLSRPFVAQPLQIKVSSSELSVLDEEKEEEVVKGEAEPNKDSVVSKAEPVKKPRPCELYVCNIPRSYDIAQLLDMFQPFGTVISVEVSRNPQTGESRGSGYVTMGSINSAKIAIASLDGTEVGGREMRVRYSVDMNPGTRRNPEVLNSTPKKILMYESQHKVYVGNLPWFTQPDGLRNHFSKFGTIVSTRVLHDRKTGRNRVFAFLSFTSGEERDAALSFNGTQYEGRRIIVREGIEKSES

SEQ ID NO: 229 - protein, 572 aa, Saccharomyces cerevisiae
MCGIFAAFKHEDIHNFKPKALQLSKKIRHRGPDWSGNAVMNSTIFVHERLAIVGLDSGAQPITSADGEYMLGVNGEIYNHIQLREMCSDYKFQTFSDCEPIIPLYLEHDIDAPKYLDGMFAFCLYDSKKDRIVAARDPIGVVTLYMGRSSQSPETVYFASELKCLTDVCDSIISFPPGHVYDSETDKITRYFTPDWLDEKRIPSTPVDYHAIRHSLEKAVRKRLMAEVPYGVLLSGGLDSSLIAAIAARETEKANADANEDNNVDEKQLAGIDDQGHLHTSGWSRLHSFAIGLPNAPDLQAARKVAKFIGSIHHEHTFTLQEGLDALDDVIYHLETYDVTTIRASTPMFLLSRKIKAQGVKMVLSGEGSDEIFGGYLYFAQAPSAAEFHTESVQRVKNLHLADCLRANKSTMAWGLEARVPFLDKDFLQLCMNIDPNEKMIKPKEGRIEKYILRKAFDTTDEPDVKPYLPEEILWRQKEQFSDGVGYSWIDGLRDTAERAISDAMFANPKADWGDDIPTTKEAYWYRLKFDAWFPQKTAADTVMRWIPKADWGCAEDPSGRYAKIHEKHVSA

SEQ ID NO: 230 - protein, 521 aa, Glycine max
MDSNGSLRANTWARSSSLTSPASGLSSDPLSFPGFGLQHNQQKWDVPSNSDFGIRAEAPFKEFNQPSQTQSPLPCNSNNEIEIPGQENCHLSESSQTNTLQDWDPSVMLNNLSFLEEKIHQLQDLVHLIARQKGIGQPNELVTQEQQLVTTDLTSIIIQLISTAGSLLPSARHNLVNTSSLVGQIDQLRGTTIPPGTGASNGCIQPQNNGGKILSDQSMQTDLPNSGEMEQKYNMVEHDLKDEEDVEDGENLAPGSYEILQLEKEEILAPHTHFCTICGKGFKRDANLRMHMRGHGDEYKTPAALAKPHKESASPKPIKRYSCPYPGCKRNKDHKKFQPLKTILCVKNHYKRTHCDKSYTCSRCNTKKFSVMADLKTHEKHCGKDKWLCSCGTTFSRKDKLFGHIALFQGHAPAIPLDDTKGAGVAEAPIHDSKENNSKVQSMNFTFGSNPSNANEVPNAMDVKGDSDDPINYFSSLNFEANFGEFNEFTRPLFDDPEGSFSFVMPGSFKSGGESSSDNLL

SEQ ID NO: 231 - protein, 212 aa, Glycine max
MSNSNWVLDYDYLDNIPLTTLEPPNFSWSSSSPPPTLSVELDDSFGILDGLKENRSRKRLRPSDSKACREKMRRDRLNDRFMELGSILDPRKPLKMDKAVILSDAVRVVSQLREEAQKLRESTENLQEKINALKDEKNELRDEKQRLKVEKENLEQKVKALSSQPSFLAAAGQVVGSKLVPFMGYPGVAMWQFLSPAAVDTSQDHVLRPPVA

SEQ ID NO: 232 - protein, 374 aa, Glycine max
MLQALMNLFSLCWKPFGRDADRIDSIGVIGREGKDGLLWFRDFGKYGSGDFSMAVVQANQVLEDQSQIESGPLGTFVGIYDGHGGPDASRYVCDHLFRHFQAISAESRGVVTTETIERAFRQTEEGYMALVSGSWNARPHIASAGTCCLVGVIFQQTLFVANAGDSRVVLGKKVGNTGGMAAIQLSTEHNANLEAVRQELKELHPHDPQIVVLKHGVWRVKGIIQVSRSIGDVYLKHAQFNREPLNAKFRLPEPMNMPILSANPTILSHALQPNDSFLIFASDGLWEHLSNEKAVDIVNSNPHAGSAKRLIKAALHEAARKREMRYSDLRKIDKKVRRHFHDDISVIVLFLNHDLISRGTVLDPTLSIRSALDH

SEQ ID NO: 233 - protein, 165 aa, Glycine max
MGLQNQLNDVSSGSIPLLVLAQIATCVNYLRSMLFALLQTLGLCRFHSDQIVDERFLAAVGSGLAGLIMLSDQLTLSSQFFHHHHAGAGGHDHHPCVVCQATFEDGDQVRMLPCRHVFHRRCFDGWLHHYKFNCPLCRSPLFSDERVAVTERRLGQQLISWFSLH

SEQ ID NO: 234 - protein, 237 aa, Glycine max
MCGGAIISDFIGVKRGRNLAAQELWSELDPFSDFLGFDTTNSKNQPPLQKIPDKKVVSSCEKKKKSVVGAEKKKSDSGRARKNVYRGIRQRPWGKWAAEIRDPHKGVRVWLGTFPTAEEAAQAYDDAAIRIRGDKAKLNFPATTISAAAAPPPSKKQRCLSPDIITEESSSSSSHSTTGSTGESGGGNDELDLKQIEWFLGLENELPVSNNIGAEWDNMDDLWMLDDVVVPNRHLIY

SEQ ID NO: 235 - protein, 266 aa, Glycine max
MVNVMEWQKQRWQPNGNAEMMYVKVMTDEQLETLRKQIAVYATICEQLIEMHKNISSHQDLAGIRLGNMYCDPLLGSGGHKIASRQRWTPSAMQLQILERIFDQGTGTPTKEKIKEITNELSQHGQISETNVYNWFQNRRARSKRKQQNVAPSANAESEVETEVDSKDKKTKPDEFQSPPSVSAVPADDNLGFQNHGSLQYLNPESNKPDSVFPSDASLRSTRNFNHVPVFDGLLSNSTSDYLTGKMEAPENYDLYQPAGDFNMAG

SEQ ID NO: 236 - protein, 160 aa, Glycine max
MGFPVGYTELMLPKVFLQVLSVLGLIRKLITVLLCYMGFHDFFESDIAWPERAPEFQSVWAVLIREILPVVKFSEMEMEMAEAPESCAVCLYEFEGEDEIRRLTNCRHIFHRGCLDRWMGYDQRTCPLCRTPFIPHHMQAAFNDRLWAASGIPDFYYNHE

SEQ ID NO: 237 - protein, 354 aa, Glycine max
MSSSLVLPSTPFFAHGTRTLPLTRSRLSMTVSAGSQPSLRDALFADYKASTSFLFPGQGAQAVGMGKEAQNVPTAAVLFNKANDVLGFDLLDICINGPKEKLDSTVISQPAIYVTSLAAVELLRARDGGQQIIDSVDVTCGLSLGEYTALAFAGAFSFEDGLKLVKLRGEAMQDAADAAKSAMVSVIGLDSEKVQQLCDAANQEVPEAEKVQIANYLCPGNYAVSGGLKGVEVLESKAKSFKARMTVRLAVAGAFHTSFMKPAVSRLEAALATTEIRTPRIPVISNVNAQPHTDPDSIKKILACQVTSPVQWETTVQTLLTKGLKKSYELGPGKVIAGIIKRTDKGADIENIGA

SEQ ID NO: 238 - protein, 309 aa, Glycine max
MAITLNNGFKMPIIGLGVWRMEGNEIRDLILNSIKIGYRHFDCAADYKNEAEVGDALKEAFDSGLVKREDLFITTKLWNSDQGHVLEACKDSLKKLQLTYLDLYLVHFPVAVRHTGVGNTSSPLGDDGVLDIDTTISLETTWHAMEDLVSSGLVRSIGISNYDIFLTRDCLAYSKIKPAVNQIETHPYFQRDSLVKFCQKHGICVTAHTPLGGAAANAEWFGTVSCLDDQVLKGLAEKYKKTAAQISLRWGIQRNTVVIPKSSKLERLKENFQVFDFELSKEDMELIGSIDRKYRTNQPAVFWGIDLYA

SEQ ID NO: 239 - protein, 255 aa, Glycine max
MEITKLGKRFQGKVAIVTASTLGIGFSIAERLGLEGASVVISSRKQQNVDEAAGKLRAKGIEVLAVVCHVSNAQQRKNLIDKTLQKYGKIDVVVSNAAVHPSVDPILQTQESILDKLWEINVKSTILLLKDAAPHLKKGSSVVLIASLVAYNPPPTMAMYGVTKTAVLGLTKAMASEMGPNTRVNCVVPGIVPTHFVALYTSNDATREELERKALLGRLGTTEDMAAATAFLASDDASYITGENLVVSGGMPSRL

SEQ ID NO: 240 - protein, 454 aa, Glycine max
MASSRPANVGILAMDIYFPPTCVTQDALEGHDGVSKGKYTIGLGQDCMAFCSEVEDVISMSLTVVTSLLEKFNVDPKQIGHLAVGSETVIDKSKSIKTFLMQVFEASGNTDIEGVDSTNACYGGTAALFNCVNWVESSSWDGRYGLVVCTDTAVYAEGPARPTGGAAAIAMLVGPDAPIAFESKLRGSHMSHAYDFYKPNLASEYPIVDGKLSQTCYLMALDSCYRLYCEKFEKLEGRPFSMSDSDYFVFHSPYNKLVQKSFGRLYFNDFLRNASFVDEVARETLAPYASLSGDESYQSRDLEKANQQAAKHLYDAKVQPSTLIPKQVGNMYTASLYAAFASLLHNKNSSLVGKRVVMFSYGSGLTATMFSFQLQEGQHPFNLSNIVTVMNVSDKLKQRVEIPPEKFVETLKIMEHRYGGKDFVTSKDCSYLTPGTFYLTNVDSMYRRFYAKKD

SEQ ID NO: 241 - protein, 241 aa, Glycine max
MGRGRVELKRIENKINRQVTFAKRRNGLLKKAYELSVLCDAEVALIIFSNRGKLYEFCSSSSMLKTLERYQKCNYGAPEANVSTREALELSSQQEYLKLKARYEALQRSQRNLMGEDLGPLSSKELESLERQLDSSLKQIRSTRTQFMLDQLSDLQRKEHLLSEANRSLRQRLEGYQINPLQLNPGVEEMGYGRHPAQTHGEALFQQMECEPTLQIGYQPDPVSVVTAGPSMSNYMAGWLP

SEQ ID NO: 242 - protein, 260 aa, Glycine max
MPQGDYIERHRRDYGYRLDHFERKRKKEARQVHKRSSIAQKALGIKGKMIAKKNYAEKAQMKKTLAMHEESTSRRKTDDNVQDGAVPAYLLDRDNTTRAKVLSNTIKQKRKEKAGKWDVPLPKVRPVAEDEMFKVVRTGKRKTKQWKRMVTKATFVGPGFTRKPPKYERFIRPTGLRFTKAHVTHPELKCTFNLELIGVKKNPNGPMYTSLGVITRGTIIEVNVSELGLVTPAGKVVWGKYAQVTNNPENDGCINAVLLV

SEQ ID NO: 243 - protein, 239 aa, Glycine max
MDYLDHDHDHDPFHDHDDFNRRILIMAIVSLSVVLVLVFALHLYARVFLRRQTRRRAAIYQLSLNVAQAHAEPHNNTGLNPALITTLPSFPFKQNQHHDSAECAVCLSVLEDGEHVRLLPNCKHSFHVSCIDTWLSSHSTCPVCRTKAGPVQLEPVRLEPQPREGPTGLVLADVVAPTAPLLFENVEGTSDGANNNGSPKVSGSNSRLSSFRRILSRERSMRRILPSSHDDVEHDLERQ

SEQ ID NO: 244 - protein, 298 aa, Glycine max
MERYKCKLCSRTFSNGRALGGHMKAHLATLPLPPQNQQPPLSPSAAASFSSNSSSEQEQATHDEKSLIYGLRENPKKCFRLADPEFDTGSVVQDRESETESKNPTRRRSKRTRRPVNLEQKKPKLSFMESPEPVSSVSDTSPEEDVAMCLMMLSRDRWSKNNNINVVNVNDEDVVEEEEEEEEEEEEGGRSVLEIKLRRVRGKHQCQSCGKTFRSSRALGSHRSICEGSGNDSKIFQCPFCSKVFGSGQALGGHKRSHLMPSSSTTANNDSVRLKESFIDLNLPAPPEDDDLSVVSDA

SEQ ID NO: 245 - protein, 482 aa, Glycine max
MLPQKQGEETMMSNLNETTIERGEEREEENVGGGSHSSLKSILWHGGSAYDAWFSCASNQVAQVLLTLPYSFSQLGMLSGIIFQVFYGIMGSWTAYLISILYIEYRTRKEKESVSFKNHVIQWFEVLEGLLGPYWKAIGLAFNCTFLLFGSVIQLIACASNIYLINDHLDKRTWTYIFGACCATTVFVPSFHNYRIWSFLGLGMTTYTAWYMTIAAIAHGQVENVTHTGPKKLVLYFTGATNILYTFGGHAVTVEIMHAMWKPQKFKYIYLYATLYVFTLTLPSAVAVYWAFGDKLLDHSNAFSLLPRSGWRDAGVILMLIHQFITFGFACTPLYFVWEKVIGMHDTKSICLRALARLPVVIPIWFLAIIFPFFGPINSAVGALLVSFTVYVIPACAHMLTYKSASARQNAAEKLPFFIPNWTAMYVVNAFVVVWVLVVGFGFGGWASMTNFIKQVDTFGLFAKCYQCPPKVPASNNTMLHH

SEQ ID NO: 246 - protein, 141 aa, Arabidopsis thaliana
MAMSLSGAVLSGMGSSFHNVGAKQSGVGTVRVGRKSELVVVAQRKKSLIYAVKSDGNILDDLNEATKKASDFVTDKTKEALADGEKTKDYIVEKTIEANETATEEAKKALDYVTEKGKEAGNKAAEFVEGKAEEAKNATKS

SEQ ID NO: 247 - protein, 505 aa, Arabidopsis thaliana
MAVFFILVLVFFFLVFRFIYSNIWVPWRIQSHFKKQSVTGPSYRIFSGNSGEVSRLTAEAKSKPIPSGRNPHEFVHRVAPHYHEWSRVYGKTFLYWFGSKPVVATSDPRLIREALTTGGSFDRIGHNPLSKLLYAQGLPGLRGDQWAFHRRIAKQAFTMEKLKRWVPQMVTSTMMLMEKWEDMRNGGEEIELEVHKEMHNLSAEMLSRTAFGNSVEEGKGIFELQERMMRLFYLVRWSVYIPGFRFFPSKTNREIWRIEKQIRVSILKLIENNKTAVEKSGTLLQAFMSPYTNQNGQEEKLGIEEVTDECKTFYFAAKETTANLMTFVLVLLAMNQEWQNIAREEVICVLGQTGLPTLDILQDLKTLSMIINETLRLYPPAMTLNRDTLKRAKLGDLDIPAGTQLYLSVVAMHHDKETWGDDAEEFNPRRFEDPKKQSALLVPFGLGPRTCVGQNLAVNEAKTVLATILKYYSFRLSPSYAHAPVLFVTLQPQNGAHLLFTRISS

SEQ ID NO: 248 - protein, 514 aa, Arabidopsis thaliana
MGEIMNVDFVNCLILILLCLLSILCYSFFFKKPKDGFNLPPSPPSLPIIGHLHHLLSLFMHRSLQKLSSKYGPLLYLHVFNVPILLVSSPSIAYEIFRAQDVNVSTRDFPTNEGSLFLGSFSFITAPYGEYWKFMKKLIVTKLLGPQALERSQRIRANEVERFYSNLLDKAMKKESVEIADEAMKLVNNIICKMIMGRTCSEENGEAERIRGLVTKSDALLKKFLLAAILRKPLKKIGITLFKKVFMDISLKFDEVLEKILVENEERLEENQQGTDIMDKLLEVYGDKTSEYKITRDHIKSLFVDLFFAGTDTATHTIEWTMAEIMNNSLILERLREEIDSVVGKTRLIQETDLPNLLYLQATVKEGLRLHPTIPLVLRTFQDGCTIGGFSIPKKTKLVVNGYAIMRDPDNWEDPLEFKPERFLASSRSSQKDAIKEEVLKYLSFGSGRRGCPGVNLAYVSVETAIGVMVQCFDWKIDGHKINMNEVAGKGTLSMAHPLKCTLVPRSVTPLTSK

SEQ ID NO: 249 - protein, 278 aa, Arabidopsis thaliana
MAYNYRFAILLVLLSATVGFTAAALKPPVRTLNGNITLNLIWYGKFTPIQRSIIVDFIRSISSVTAAKGPSVASWWKTTEKYKTGVSTLVVGKQLLLENYPLGKSLKSPYLRALSSKLNAGGARSITVVLTAKDVTVEGLCMNRCGTHGSKSSSVNSGAYVWVGNSETQCPGYCAWPFHQPIYGPQSPPLVAPNGDVGVDGMIINIATLLVNTVTNPSPEAVSACTGIFGSGAYPGYAGRVLVDKTSGASYNALGLAGRKYLLPALWDPQTSTCKTMV

SEQ ID NO: 250 - protein, 215 aa, Arabidopsis thaliana
MGKKKCELCCGVARMYCESDQASLCWDCDGKVHGANFLVAKHMRCLLCSACQSHTPWKASGLNLGPTVSICESCLARKKNNNSSLAGRDQNLNQEEEIIGCNDGAESYDEESDEDEEEEEVENQVVPAAVEQELPVVSSSSSVSSGEGDQVVKRTRLDLDLNLSDEENQSRPLKRLSRDEGLSRSTVVMNSSIVKLHGGRRKAEGCDTSSSSSFY

SEQ ID NO: 251 - protein, 396 aa, Glycine max
MVAEAEVACQQNVGVLDVKHFPNKGSDVHQIGDADANSPPCFDRVRATESVSAELLTSQEDVKSADRISDAALESAVLQSIPCIRSGSFADIGPRRYMEDEHIRIDDLSSHLGSLYNFPQPSAFYGVFDGHGGPEAAAYIRKNVTKFFFEDVNFPRTSEVDNVFLEEVEDSLRKTFLLADSALADDCSVNSSSGTTALTALIFGKLLMVANAGDCRAVLCRKGEAIDMSQDHRPIYPSERRRVEELGGYIEDGYLNGVLSVTRALGDWDMKLPKGAPSPLIAEPEFRQVALTDDDEFLIIGCDGIWDVMSSQHAVSLVRKGLRRHDDPEKCARDLVMEALRLNTFDNLTVIIVCFSSLDHVEPEPSPPRQRKLRCCSLSAEALCSLRSLLEGSASN

SEQ ID NO: 252 - protein, 183 aa, Arabidopsis thaliana
MGNYVSSALSKTSSSSSSAAKVILPDGGVRNIHAPMKAAELMMEIPSFFLVDAKSLKIGRKFCPLAADDDLQIKGCHVYVAFPMTRATSAANASDLARLFVAAKKQRRHRVGSDHSSAAVKHCHNNGRVSPDGEGDDVKVISAGSKLNLEDIEEFSAAEFMHRISVSKSKKPKLETIVEESLS

SEQ ID NO: 253 - protein, 212 aa, Arabidopsis thaliana
MARVILWFLVSSYLCLIGHMIAEAAREGASMRKEAHSSGIGRESKLMRNEKHSTEIGRESASMRNKARSSEIGRESKLMRNEAHSSEIGKSIRHVTGFKGELTAGGYGGGGPGYGGGGYGPGGGGGGVVIGGGFGGGAGYGSGGGLGWDGGNGGGGPGYGSGGGGIGGGGGIGGGVIIGGGGGGCGGSCSGGGGGGGGYGHGGVSTKGSGKN

SEQ ID NO: 254 - protein, 428 aa, Arabidopsis thaliana
MMTTTTNTMAMLQNLVFSVPISRMVVRRHSLATTFSAAATTVVPSPKPVSAKPARTPHVDSHVLIGMSEPELQELAINLGQEGYRGKQLHHLIYKRKVNKVEDFSNLPLTFRKGLVDGGFKVGRSPIYQTVTATDGTIKLLLKLEDNLLIETVGIPVQDDEKGITRLTACVSSQVGCPLRCSFCATGKGGFSRNLQRHEIIEQVLAIEDVFKHRVTNVVFMGMGEPMLNLKSVLDAHRCLNKDIEIGQRMITISTVGVPNTIKKLASHKLQSTLAVSLHAPNQSLREKIVPSAKAYPLEAIMKDCRDYFQETNRRVSFEYALLAGVNDQVEHAVELAELLREWGKTYHVNLIPYNPIEGSEYQRPYKKAVLAFAAALESRKITASVRQTRGLDASAACGQLRNKFQKSPLLTETDSQESQPDAEAVAC

SEQ ID NO: 255 - protein, 549 aa, Arabidopsis thaliana
MYMEISSASDDSIAYVETDPSGRYGRFREVLGKGAMKTVYKAFDQVLGMEVAWNQVKLNEVFRSPEPLQRLYSEVHLLKNLNHESIIRYCTSWIDVNRRTFNFITELFTSGTLREYRRKYQKVDIRAIKSWARQILNGLAYLHGHDPPVIHRDLKCDNIFVNGHLGQVKIGDLGLAAILRGSQNAHSVIGTPEFMAPELYEEDYNELVDIYSFGMCVLEMLTGEYPYSECTNPAQIYKKVTSGKLPDSFHLIQHTEAQRFVGKCLETVSRRLPAKELLADPFLAATDERDLAPLFRLPQQLAIQNLAANGTVVEHLPSTTDPTRTTDMSITGKMNSEDHTIFLQVQILDGDGHMRNIQFPFNILSDTPLEVALEMVKELEITDWDPLEIAAMIENEISLLVPNWRANDSSIRHESFGHEDDEDNGDTEGRTRLFSSASSSHDSPVAVRENNDDSSNDVIPDMDDGNRSSNRLLNSSTYHYSPAIDDDQNQQQRRRVRLQQKMRSLVDTRTQVLHRSLMELINKRRGRGFDPNTNELQPQPSSTDFIRRC

SEQ ID NO: 256 - protein, 266 aa, Arabidopsis thaliana
  unsure (1)..(266): unsure at all Xaa locations
LRMDGKIVIITGGASGTGAESARLFTDHGAQVVVVDLQEEQGXNVAVSIGKDRASFYRCDVTNETEVEDXVIKFTVEKHGKLDVLLSNAGVVLFSQPGVLETPGSILDLNLERFHRTMAVNVRGAAVSIKHAARAMVEKGTRGSIVCTTSVTSEIXGQGPHEYTASKHGLVGLIKXVCGDLGKHGIRINGVAPFAVATXVTGMTSHDEETAKQTEEYCEARGIFKGVVLKARHVAEAALFLASDDSVYISGQNLAVDGGFCVVKPI

SEQ ID NO: 257 - protein, 203 aa, Arabidopsis thaliana
MSSKKIVLTSSDGESFKVEEVVARKLQIVGHIIEDDCATNKIPIPNVTGEILAKVIEYCKKHVEDDDDVVETHESSTKGDKTVEEAKKKPDDVAVPESTEGDDEAEDKKEKLNEWDAKFMKDFDIKTIFDIILAANYLNVQGLFDLCSKTIADYIKDMTPEEVRELFNIENDFTPEEEEAIRNENAWTFEQDGKQQVPNPSGA

SEQ ID NO: 258 - protein, 255 aa, Arabidopsis thaliana
MGVLVISLLVVHLLAFSVCVQGGYRRGGHHPGGHMGPWINAHATFYGGGDASGTMGGACGYGNLYSQGYGLETAALSTALFDQGLSCGACFELMCVNDPQWCIKGRSIVVTATNFCPPGGACDPPNHHFDLSQPIYEKIALYKSGIIPVMYRRVRCKRSGGIRFTINGHSYFNLVLVTNVGGAGDVHSVSMKGSRTKWQLMSRNWGQNWQSNSYLNGQSLSFVVTTSDRRSVVSFNVAPPTWSFGQTYTGGQFRY

SEQ ID NO: 259 - protein, 606 aa, Glycine max
MAAVRLLLLLLFPFSSLSLSENEALLNLKKSFSNPVALSSWVPNQNPCSSRWLGVICFNNIINSLHLVDLSLSGAIDVNALTQIPTLRSISFVNNSFSGPIPPFNQLGALKSLYLAHNQFSGQIPSDFFSQLASLKKIWISNNKFSGPIPSSLTNLRFLTELHLENNEFSGPVPELKQDIKSLDMSNNKLQGEIPAAMSRFEAKSFANNEGLCGKPLNNECEAGGSSEVGSGWGMKVVIVLIVAVALAFIFALTRSKRRHDDDFSVMSRDHVDEVVQVHVPSSNHSRGASEGGSKKESSSSKKGSSRGGMGDLVMVNDEKGVFGLPDLMKAAAEVLGNGGLGSAYKAAMNNGLSVVVKRMREMNKVSRDIFDAEMRRFGRLRNLNIITPLAYHYRKEEKLFVTEYMPKGSLLYVLHGDRGSSHADLNWPIRLNIVKGIARGLDFIYSEFSNEDLPHGNLKSSNVLLTENYEPLLSDFAFHPLINPNYAIQTMFAYKTPDYVSYQHVSQKTDVYCLGIIVLEIITGKFPSQYHSNGKGGTDVVHWVFTAISERREAELIDPELMSNHSNSLNQMLQLLQVGAACTESNPDQRLNMKEAIRRIEEVQV

SEQ ID NO: 260 - protein, 310 aa, Arabidopsis thaliana
MMKMMTRVLSSPSSHVSSLKYSPRRVIRASRDHLRAETLKSHQLPSGSSSTSLCSCGRKHFLEAASPTMPFLPICSPNASRSKDVSETFHPQRPDWYKELFAWFLSTGMRSYEAEIAEYKRKLFEKLAGKAETVLEIGVGTGPNLKYFAGNENVCVFGMDPNHKMEKYACESAREAGMKPENFRFMHGVGEAIPLDDDSMDSVVATLVLCSVSDVTQTLNGKLPKPLKDLTGYITYLIGIFRDQAGAETGHVQNVLDPIQQVVADGCHLTRNTDLHISAAGFDGGTEINDTAIYSFPWIIRPHVYGAAYK

SEQ ID NO: 261 - protein, 288 aa, Arabidopsis thaliana
MALRSVSRRLGSRILNQRSFVASLHSHATSFGFQEVKEEEKSKLVGNVFTNVASSYDIMNDVMSGGLHRLWKERLVGKLSPFAGMKHLDVAGGTGDVAFRIYDAVYSVKRRALQKVDEASLEETQIYVCDINPNMLNVGKQRAAERGLRDNKSLVWVEGDAEALSFDDNSMDGYTIAFGIRNVTHIEKALAEAYRVLKRGGRFLCLELSHVEIPVFKNLYDLYSFQVIPNLGELIAGDRESYQYLVESVRRFPPQERFASMIADAGFEKVEYENLVGGVVAIHSAIKL

SEQ ID NO: 262 - protein, 261 aa, Arabidopsis thaliana
MVHEQLNLIRKIVGILGNFISLCLFLSPTPTFIHIVKKKSVEKYSPLPYLATLLNCLVRALYGLPMVHPDSTLLVTISGIGITIEIVFLTIFFVFCGRQQHRLVISAVLTVQVVFVATLAVLVLTLEHTTDQRTISVGIVSCVFNAMMYASPLSVMKMVIKTKSLEFMPFLLSVVGFLNAGVWTIYGFVPFDPFLAIPNGIGCVFGLVQLILYGTYYKSTKGIMEERKNRLGYVGEVGLSNAIAQTEPENIPYLNKRVSGV

SEQ ID NO: 263 - protein, 464 aa, Arabidopsis thaliana
MTSSLSLHSSFVPSFADLSDRGLISKNSPTSVSISKVPTWEKKQISNRNSFKLNCVMEKSVDGQTHSTVNNTTDSLNTMNIKEEASVSTLLVNLDNKFDPFDAMSTPLYQTATFKQPSAIENGPYDYTRSGNPTRDALESLLAKLDKADRAFCFTSGMAALSAVTHLIKNGEEIVAGDDVYGGSDRLLSQVVPRSGVVVKRVNTTKLDEVAAAIGPQTKLVWLESPTNPRQQISDIRKISEMAHAQGALVLVDNSIMSPVLSRPLELGADIVMHSATKFIAGHSDVMAGVLAVKGEKLAKEVYFLQNSEGSGLAPFDCWLCLRGIKTMALRIEKQQENARKIAMYLSSHPRVKKVYYAGLPDHPGHHLHFSQAKGAGSVFSFITGSVALSKHLVETTKYFSIAVSFGSVKSLISMPCFMSHASIPAEVREARGLTEDLVRISAGIEDVDDLISDLDIAFKTFPL

SEQ ID NO: 264 - protein, 183 aa, Arabidopsis thaliana
MSFSSLKLPIFLILSSLLHAAIGENIVCENLPTNMCSFSISASGKRCILETANVAGEFTCRTSAVDVEGIVNHVETDECVSACGVDRKTVGISSDSLMEAGFAAKLCSSACLDYCPNILDLYFNLAAGEGAFLPDLCDAQRMNPQRSMMEFISSGAAPGPVSEIAPGPTSEEVSSPALAPASM

SEQ ID NO: 265 - protein, 516 aa, Arabidopsis thaliana
MDGAGESRLGGDGGGDGSVGVQIRQTRMLPDFLQSVNLKYVKLGYHYLISNLLTLCLFPLAVVISVEASQMNPDDLKQLWIHLQYNLVSIIICSAILVFGLTVYVMTRPRPVYLVDFSCYLPPDHLKAPYARFMEHSRLTGDFDDSALEFQRKILERSGLGEDTYVPEAMHYVPPRISMAAAREEAEQVMFGALDNLFANTNVKPKDIGILVVNCSLFNPTPSLSAMIVNKYKLRGNIRSYNLGGMGCSAGVIAVDLAKDMLLVHRNTYAVVVSTENITQNWYFGNKKSMLIPNCLFRVGGSAVLLSNKSRDKRRSKYRLVHVVRTHRGADDKAFRCVYQEQDDTGRTGVSLSKDLMAIAGETLKTNITTLGPLVLPISEQILFFMTLVVKKLFNGKVKPYIPDFKLAFEHFCIHAGGRAVIDELEKNLQLSPVHVEASRMTLHRFGNTSSSSIWYELAYIEAKGRMRRGNRVWQIAFGSGFKCNSAIWEALRHVKPSNNSPWEDCIDKYPVTLSY

SEQ ID NO: 266 - protein, 545 aa, Saccharomyces cerevisiae
MASAEPRPRMGLVINAKPDYYPIELSNAELLSHFEMLQEYHQEISTNVIAQSCKFKPNPKLIDQQPEMNPVETRSNIITFLFELSVVTRVTNGIFFHSVRLYDRYCSKRIVLRDQAKLVVATCLWLAAKTWGGCNHIINNVVIPTGGRFYGPNPRARIPRLSELVHYCGDGQVFDESMFLQMERHILDTLNWNIYEPMINDYVLNVDENCLMQYELYENQVTYDKQCSEKRQSQLSQDSDATVDERPYQNEEEEEEDLKLKIKLINLKKFLIDVSAWQYDLLRYELFEVSHGIFSIINQFTNQDHGPFLMTPMTSESKNGEILSTLMNGIVSIPNSLMEVYKTVNGVLPFINQVKEYHLDLQRKLQIASNLNISRKLTISTPSCSFENSNSTSIPSPASSSQSHTPMRNMSSLSDNSVFSRNMEQSSPITPSMYQFGQQQSNSICGSTVSVNSLVNTNNKQRIYEQITGPNSNNAINDYIDLLNLNESNKENQNPATAHYLNGGPPKTSFINHGMFPSPTGTINSGKSSSASSLISFGMGNTQVI

SEQ ID NO: 267 - protein, 479 aa, Arabidopsis thaliana
MDKQPATSWSIHTRPEIIAKYEIFERVGSGAYADVYRARRLSDGLIVALKEIFDYQSAFREIDALTILNGSPNVVVMHEYFWREEENAVLVLEFLRSDLAAVIRDGKRKKKVEGGDGFSVGEIKRWMIQILTGVDACHRNLIVHRDLKPGNMLISDDGVLKLADFGQARILMEHDIVASDENQQAYKLEDKDGETSEPPEVIPDYENSPRQGSDGQEREAMSKDEYFRQVEELKAKQVVRDDTDKDSNVHDGDISCLATCTVSEMDDDLGRNSFSYDADEAVDDTQGLMTSCVGTRWFRPPELLYGSTMYGLEVDLWSLGCVFAELLSLEPLFPGISDIDQISRVTNVLGNLNEEVWPGCVDLPDYKSISFAKVESPLGIEGCLPNHSGDVISLLKKLICYDPASRATTMEMLNDKYLSEEPLPVPVSELYVPPTMSGPDEDSPRKWNDYREMDSDSDFDGFGPMNVKPTSSGFTIEFP

SEQ ID NO: 268 - protein, 295 aa, Saccharomyces cerevisiae
MALGNEINITNKLKRQEIFADIKHEKNKERHTMRRKRAKEERENPELREQRLKENVTQTIENTRVYDETINKEVEGDEDDLMRYFNSNSNEPPKIFLTTNVNAKKSAYEFANILIEILPNVTFVKRKFGYKLKEISDICIKRNFTDIVIINEDKKKVTGLTFIHLPEGPTFYFKLSSFVEVKKIVGHGRPTSHIPELILNNFQTRLGQTVGRLFQSILPQNPDIEGRQVITLHNQRDYIFFRRHRYVFKDNERVGLQELGPQFTLKLKRLQRGIKEETEWEHKPEMDKEKKKFYL

SEQ ID NO: 269 - protein, 486 aa, Arabidopsis thaliana
MRAIHIVTTRLSSSFRPILLLDLVSSCSPPRQFSIPRRLICAAANGGGRSGSIVAPLVTEEDFHKKIDVNPPKGTRDFPPEDMRLRNWLFNHFKEVSRLYGYEEVDYPVLETEALFIRKAGEEIRDQLYCFEDRGNRRVALRPELTPSLARLVIQKGKSVSLPLKWFAIGQCWRYERMTRGRRREHYQWNMDIIGVPQVTAEAELISSIVTFFKRIGITASDVGFKVSSRKVLQELLKKYGVPEDLFGRVCIIIDKIEKIPIDEIKKELGFTGISEDAIEQLLQVLSVKSLDDLEDIIGGAGEAIADLKQLFSLAEKFGYSEWIQFDASVVRGLAYYTGIVFEGFDRKGKLRAICGGGRYDRLLSTYGGDDFPACGFGFGDAVIVELLKEKDLLPELGQEVENIVCALDKDLQGAAATVATALRDKGQTVDLVLESKPLKWVFKRAARVNARRLVLVGKTEWEDGSVSVKVLSSGEQFQVKLSDLE

SEQ ID NO: 270 - protein, 266 aa, Saccharomyces cerevisiae
MNHDPFSWGRPADSTYGAYNTQIANAGASPMVNTQQPIVTGTSVISMKYDNGVIIAADNLGSYGSLLRFNGVERLIPVGDNTVVGISGDISDMQHIERLLKDLVTENAYDNPLADAEEALEPSYIFEYLATVMYQRRSKMNPLWNAIIVAGVQSNGDQFLRYVNLLGVTYSSPTLATGFGAHMANPLLRKVVDRESDIPKTTVQVAEEAIVNAMRVLYYRDARSSRNFSLAIIDKNTGLTFKKNLQVENMKWDFAKDIKGYGTQKI

SEQ ID NO: 271 - protein, 489 aa, Saccharomyces cerevisiae
MARGDGHLWTETYDSSTVVFMILGAALVFFMVPGLGFLYSGLARRKSALALIWVVIMATLVGILQWYFWGYSLAFSKTATNNKFIGNLDSFGFRNVYGKISDDSTYPELIYAIFQMMFMCVALSIIAGATAERGKLFPHMVFLFVFATLVYCPITYWIWAPGGWAYQWGVLDWAGGGNVEILSAVAGFVYSYFLGRRKENLLINFRPHNVSMVTLGTSILWFGWLLFNAASSLSPNMRSVYAFMNTCLSATTGGMTWCLLDYRSEKKWSTVGLCSGIICGLVAATPSSGCITLYGSLIQGIIAGVVCNFATKIKYYLKVDDSLDLLAEHGIAGVVGLIFNALFAADWVIGMDGTTKHKGGWLTHNWKQMYIQIAYIGASAGYCAVVTAIICFVLGKIPGVHLRVTEEAEALGLDEDQIGEFAYDYVEVRRDYYQWGVDTDALHTTCNGANSASETNPTEDSQNSSLSSATVSSQNEKSNNPKLHHAKEA

SEQ ID NO: 272 - protein, 204 aa, Glycine max
MGSFETELNLKATELRLGLPGCDETHDKSSSSSGSVVRSNKRSSPEPSVEESRCNSNGSSDSTTTSDHDEDSVQPAKVQVVGWPPIRSFRKNSLQQQKKVEQQGDGSGTYLKVSMAGAPYLRKIDLKVYNSYPELLMALQNLFKCTFGEYSEREGYNGSEYAPTYEDKDGDWMLVGDVPWNMFVSSCKRLKIIKGSEAKGLGCL

SEQ ID NO: 273 - protein, 674 aa, Arabidopsis thaliana
MAGVLGSVVFWLIIGIHVTFLVFAQEGDHFVYYDFRNADLELDGMANTNHGPLHLTNNTNTGTGHAFYNIPIKFTASSLSSFSFSTEFVFAIFPLQKSTYGHGMAFVVSPTKDLRSNGSANSNLGIFNRANDNKTATHIFAVELDTNQNSESFDKGGNDVGIDINSIVSVESADASYFNARKGKNISLPLASGKSILVWIDYDGIEKVLNVTLAPVQTPKPDSPYFSSFIKPKVPLLSRSINLSEIFTETMYVGFSGSTGSIKSNQYILGWSFKQGGKAESLDISRLSNPPPSPKRFPLKEVLGATISTIAFLTLGGIVYLYKKKKYAEVLEQWEKEYSPQRYSFRILYKATKGFRENQLLGAGGFGKVYKGILPSGTQIAVKRVYHDAEQGMKQYVAEIASMGRLRHKNLVHLLGYCRRKGELLLVYDYMPNGSLDDYLFHKNKLKDLTWSQRVNIIKGVASALLYLHEEWEQVVLHRDIKASNILLDADLNGKLGDFGLARFHDRGVNLEATRVVGTIGYMAPELTAMGVTTTCTDVYAFGAFILEVVCGRRPVDPDAPREQVILVKWVASCGKRDALTDTVDSKLIDFKVEEAKLLLKLGMLCSQINPENRPSMRQILQYLEGNVSVPAISFGTVALGIPNISHETVTQMTTTSSSANFSFEDVTVLFGGR

SEQ ID NO: 274 - protein, 398 aa, Rhodopseudomonas palustris
MAKTFRTLDDVDVKGKRVLLRVDLNVPMDAGKVTDTTRLERVMPTITELSGKGAKVILLAHFGRPKGRDDKNSLKPVAAALADVIKKPVGFADDCIGEPAAKAIAAMADGDILCLENTRFHPEEEKNDPAFVAKLAELGDIWVNDAFSAAHRAHATTEGLGHKLPAYAGRTMQAELVALNKALEAPVKPVIAIVGGAKVSTKIDLLENLVTKVQALVIGGGMANTFLHAQGVKVGKSLCEKDLAPTALRILDKAEAANCAIILPVDATVAYHFEANAPSFAYGLDAIPDDAMILDVGPRSIERIHAAIDDAATLVWNGPVGAFELTPFDKGTVEAAKHAAKRTKAGKLVSVAGGGDTVAALNHAGVADDFTYISTAGGAFLEWMEGKPLPGVEVLQVK

SEQ ID NO: 275 - protein, 514 aa, Arabidopsis thaliana
MVAEEARKEAMAKSVSGGKITYFVVASCVMAAMGGVIFGYDIGVSGGVMSMGPFLKRFFPKVYKLQEEDRRRRGNSNNHYCLFNSQLLTSFTSSLYVSGLIATLLASSVTRSWGRKPSIFLGGVSFLAGAALGGSAQNVAMLIIARLLLGVGVGFANQSVPLYLSEMAPAKYRGAISNGFQLCIGIGFLSANVINYETQNIKHGWRISLATAAIPASILTLGSLFLPETPNSIIQTTGDVHKTELMLRRVRGTNDVQDELTDLVEASSGSDTDSNAFLKLLQRKYRPELVMALVIPFFQQVTGINVVAFYAPVLYRTVGFGESGSLMSTLVTGIVGTSSTLLSMLVVDRIGRKTLFLIGGLQMLVSQVTIGVIVMVADVHDGVIKEGYGYAVVVLVCVYVAGFGWSWGPLGWLVPSEIFPLEIRSVAQSVTVAVSFVFTFAVAQSAPPMLCKFRAGIFFFYGGWLVVMTVAVQLFLPETKNVPIEKVVGLWEKHWFWRRMTSKRDIQETTILSH

SEQ ID NO: 276 - protein, 167 aa, Saccharomyces cerevisiae
MSTIPSEIINWTILNEIISMDDDDSDFSKGLIIQFIDQAQTTFAQMQRQLDGEKNLTELDNLGHFLKGSSAALGLQRIAWVCERIQNLGRKMEHFFPNKTELVNTLSDKSIINGINIDEDDEEIKIQVDDKDENSIYLILIAKALNQSRLEFKLARIELSKYYNTNL

SEQ ID NO: 277 - protein, 202 aa, Arabidopsis thaliana
MAMATRAIRYQLPSPRFRAPRCESSEPIKQIQIQQRPRGGDLAENGKIVLQPRLCTLRSYGSDMVIAKKDGGDGGGGGSDVELASPFFETLTDYIESSKKSQDFETISGRLAMIVFAVTVTEEIVTGNSLFKKLDVEGLSEAIGAGLAAMGCAAMFAWLTISRNRVGRIFTVSCNSFIDSLVDQIVDGLFYDTKPSDWSDDL

SEQ ID NO: 278 - protein, 627 aa, Saccharomyces cerevisiae
MMAFENTSKRPPQDFVAPIDQKKRKVQFSDSTGLVTLQPEEIKDEVFSAAMYSRFVKSALDDLDKNDSTQIGIIANQVALPSKNPERINDKNLNILLDILSSNINRIESSRGTFLIQSIINFEKWWELPPHTLSKYIYFIKILCSSIPKWWQDVSMILVSCFILPIKQTVCHHDMLKYFLRMIPSSMGFIDTYLAKFFPNKNDTRRKLVNYTSNLLKLRGYCSELGFQIWSLLIEKIISIDVELQNELDELDDDVDDDDLEEVDLEDDDDLDDDSGDDDDENCGNSNEELRSGAADGSQSDSEDMDIIEGMDGTEEYNVELTQGIKELSTKLDSILTLVSTHVEEQVTPESLESGEGVGVFNTLTTLFKTHVLPTYYTRSIQYIMFHVSQQQLELMDSFLVTLIDISFAVNEAAEKKIKSLQYLGSYIARAKKLSRTQIIFVASYLTSWLNRYVIEREEEVDQRGGMERFKHFYAAFQALCYIFCFRHNIFRDTDGNWECELDKFFQRMVISKFNPLKFCNENVMLMFARIAQQESVAYCFSIIENNNNERLRGIIGKADSDKKENSAQANTTSSSWSLATRQQFIDLQSYFPYDPLFLKNYKILMKEYYIEWSEASGEYESDGSDD

SEQ ID NO: 279 - protein, 584 aa, Saccharomyces cerevisiae
MGIHIPYLTSKTSQSNVGDAVGNADSVEFNSEHDSPSKRGKITLESHEIQRAPASDDEDRIQIKPVNDEDDTSVMITFNQSLSPFIITLTFVASISGFMFGYDTGYISSALISIGTDLDHKVLTYGEKEIVTAATSLGALITSIFAGTAADIFGRKRCLMGSNLMFVIGAILQVSAHTFWQMAVGRLIMGFGVGIGSLIAPLFISEIAPKMIRGRLTVINSLWLTGGQLVAYGCGAGLNYVNNGWRILVGLSLIPTAVQFTCLCFLPDTPRYYVMKGDLARATEVLKRSYTDTSEEIIERKVEELVTLNQSIPGKNVPEKVWNTIKELHTVPSNLRALIIGCGLQAIQQFTGWNSLMYFSGTIFETVGFKNSSAVSIIVSGTNFIFTLVAFFSIDKIGRRTILLIGLPGMTMALVVCSIAFHFLGIKFDGAVAVVVSSGFSSWGIVIIVFIIVFAAFYALGIGTVPWQQSELFPQNVRGIGTSYATATNWAGSLVIASTFLTMLQNITPAGTFAFFAGLSCLSTIFCYFCYPELSGLELEEVQTILKDGFNIKASKALAKKRKQQVARVHELKYEPTQEIIEDI

SEQ ID NO: 280 - protein, 215 aa, Glycine max
MRRGRTAAAAAAVVDPTPDQAKETTRFRGVRKRPWGRFAAEIRDPWKKQRVWLGTFDSAEDAARAYDKAARSFRGPKAKTNFPPFPGPAEADHHSQIPLYQAHGLSTKFEPVVQVNRPTSSGMSSTVESFSGPRVPSSSSRAKPLVVVVNPIIPLNDDEDDCHSDCDSSSSVVDDGQDCVLISSFRQPLPFDLNLPPSDADDDNDDDLPATALCL

SEQ ID NO: 281 - protein, 261 aa, Arabidopsis thaliana
MKNVIKPSAIVPEILCTCVDQTFAAILLNTTLACPISSLLHSPLDESSVRFITGSLVSAIEDIHKNEILFRGSSPELLMLDQSGYLQIVDFRFAKKLSGERTFTICGNADYLAPEIVQGKGHGYAADWWALGVLIYYMLEGEMPFGSWRESELDTFQKIAKGQLTFPRVLSSEAEDLITKLLEVDENLRFGSQGGPESIKKHPWFNGLKWEAISNREFQVPQEIISRIHHHLENDNVLPLETSKSLDTTEDQDAQNWLEEW

SEQ ID NO: 282 - protein, 329 aa, Arabidopsis thaliana
MAGKLMHALQYNSYGGGAAGLEHVQVPVPTPKSNEVCLKLEATSLNPVDWKIQKGMIRPFLPRKFPCIPATDVAGEVVEVGSGVKNFKAGDKVVAVLSHLGGGGLAEFAVATEKLTVKRPQEVGAAEAAALPVAGLTALQALTNPAGLKLDGTGKKANILVTAASGGVGHYAVQLAKLANAHVTATCGARNIEFVKSLGADEVLDYKTPEGAALKSPSGKKYDAVVHCANGIPFSVFEPNLSENGKVIDITPGPNAMWTYAVKKITMSKKQLVPLLLIPKAENLEFMVNLVKEGKVKTVIDSKHPLSKAEDAWAKSIDGHATGKIIVEP

SEQ ID NO: 283 - protein, 357 aa, Arabidopsis thaliana
MGIMEAERKTTGWAARDPSGILSPYTYTLRETGPEDVNIRIICCGICHTDLHQTKNDLGMSNYPMVPGHEVVGEVVEVGSDVSKFTVGDIVGVGCLVGCCGGCSPCERDLEQYCPKKIWSYNDVYINGQPTQGGFAKATVVHQKFVVKIPEGMAVEQAAPLLCAGVTVYSPLSHFGLKQPGLRGGILGLGGVGHMGVKIAKAMGHHVTVISSSNKKREEALQDLGADDYVIGSDQAKMSELADSLDYVIDTVPVHHALEPYLSLLKLDGKLILMGVINNPLQFLTPLLMLGRKVITGSFIGSMKETEEMLEFCKEKGLSSIIEVVKMDYVNTAFERLEKNDVRYRFVVDVEGSNLDA

SEQ ID NO: 284 - protein, 381 aa, Arabidopsis thaliana
MSASSSSFEQPQVITCNAAVAWRAGEPLVMEEVEVSPPQPLEIRIKVVCTSLCRSDLSAWESQSLLPRIFGHEAAGIVESIGEGVTEFEKGDHVLAVFTGECGSCRHCISGKSNMCQVLGMERKGLMHSDQKTRFSIKGKPVYHYCAVSSFSEYTVVHSGCAVKVDPLAPLHKICLLSCGVAAGLGAAWNVADVQKGSSVVIFGLGTVGLSVAQGAKLRGAAQILGVDINPAKAEQAKTFGVTDFINSNDLSEPIPQVIKRMTGGGADFSFECVGDTGIATTALQSCSDGWGMTVTLGVPKAKPEVSAHYGLFLSGKSLKGTLFGGWKPKSDLPSLIDKYMNKEIMIDEFITHNLSFDEINKAFVLMREGKCLRCVLHMPK

SEQ ID NO: 285 - protein, 390 aa, Arabidopsis thaliana
MENGNSSSDNKSSHKPIRCKAAVSRKAGEPLVMEEIMVAPPQPFEVRIRIICTALCHSDVTFWKLQVPPACFPRILGHEAIGVVESVGENVKEVVEGDTVLPTFMPDCGDCVDCKSHKSNLCSKFPFKVSPWMPRYDNSSRFTDLNGETLFHFLNVSSFSEYTVLDVANVVKIDSSIPPSRACLLSCGVSTGVGAAWETAKVEKGSTVVIFGLGSIGLAVAEGARLCGASRIIGVDINPTKFQVGQKFGVTEFVNSMTCEKNRVSEVINEMTDGGADYCFECVGSSSLVQEAYACCRQGWGKTITLGVDKPGSQICLDSFDVLHHGKILMGSLFGGLKAKTHIPILLKRYLSNELELDKFVTHEMKFEEINDAFQLLLEGKCIRCVLWMG

SEQ ID NO: 286 - protein, 293 aa, Arabidopsis thaliana
MAATSEHTILQFVSPSSTASATTSVLTARIHPLVIFNVCDCFVRRPDSAERVIGTLLGSILPDGTVDIRNSYAVPHNESSDQVAVDIDYHHNMLASHLKVNSKETIVGWYSTGAGVNGGSSLIHDFYAREVPNPIHLTVDTGFTNGEGTIKAFVSSNLSLGDRQLVAHFQEIPVDLRMVDAERVGFDVLKATSVDKLPNDLEGMELTMERLLTLINDVYKYVDSVVGGQIAPDNNIGRFIADAVASLPKLPPQVFDNLVNDSLQDQLLLLYLSSITRTQLSLAEKLNTAAQML

SEQ ID NO: 287 - protein, 146 aa, Arabidopsis thaliana
MAALARIGGRHLKSVCLINSSASCFFTQRRGVASKLFIGGLSFCTTEQGLSEAFSKCGQVVEAQIVMDRVSDRSKGFGFVTFASADEAQKALMEFNGQQLNGRTIFVDYAKAKQSLGGGGGYPIARGPPDPAVIAATRTTETSKSD

SEQ ID NO: 288 - protein, 257 aa, Arabidopsis thaliana
MASLFKEQAKLSAYRDRRFSGTQEEFDEALRASTTVYIGNVSFYTTEEQLYELFSRAGEIKKIIMGLDKNTKTPCGFCFVLFYSREDTEDAVKYISGTILDDRPIRVDFDWGFQEGRQWGRGRSGGQVRDEYRTDYDPARGGYGKLVQKELEAQRQLVDYGTGSLGAYPQAAPTNYGNGRRGGGNYGQGGQNRHGRGDYHRKRQRDDDRYGRDNSRRNTDHESRRDTDSDMRPEKNPRFRESGDSDDDGEDDRKRRS

SEQ ID NO: 289 - protein, 299 aa, Arabidopsis thaliana
MGDKNKDDSSSQSKAVRKEKRAFLFRKWTRVDVMRVSAVGAVHLLCLLAPFNYTWEAFRFAAMVGISTNLSITFSYHRNLTHRSFKLPKWLEYPFAYSALFALQGHPIDWVSTHRFHHQFTDSDRDPHSPIEGFWFSHVFWIFDTSYIREKCGGRDNVMDLKQQWFYRFLQNTIGLHILTFWILVYLWGGLPYLTWSVGVGGAIGYHATWLINSACHIWGSRAWNTKDTSRNIWWLGPFTMGESWHNNHHAFEASARHGLEWYQVDLTWYLIWFFQVLGLATDVKLPTDAQKRKMSLAR

SEQ ID NO: 290 - protein, 216 aa, Arabidopsis thaliana
MAGYRADEEYDYLFKLVLIGDSGVGKSNLLSRFTKNEFNLESKSTIGVEFATKTTKVEGKVVKAQIWDTAGQERYRAITSAYYRGAVGALLIYDVTRHATFENAARWLRELRGHTDPNIVVMLIGNKCDLRHLVAVKTEEAKAFAERESLYFMETSALDATNVENAFTEVLTQIHKIVSKRSVDGGGESADLPGKGETINVKEDGSVLKRMGCCSN

SEQ ID NO: 291 - protein, 267 aa, Arabidopsis thaliana [sequence omitted]

SEQ ID NO: 292 - protein, 122 aa, Arabidopsis thaliana
MEHGSFTNVSHASFTLSEEDHTLANAVRFVLNQDPRVTVAAYTIPHPSLEQVNIRVQTTGDPAREVFKDACQELMQMNRHVRSVFDKAVAEYKDEQKRKEEAEEEELKRQRDLFGSMDIENN

SEQ ID NO: 293 - protein, 169 aa, Arabidopsis thaliana
MADESPKSIYDFTVKDIGGNDVSLDQYKGKTLLVVNVASKCGLTDANYKELNVLYEKYKEQGLEILAFPCNQFLGQEPGNNEEIQQTVCTRFKAEFPIFDKVDVNGKNTAPLYKYLKAEKGGLLIDAIKWNFTKFLVSPDGKVLQRYSPRTSPLQFEKDIQTALGQASS

SEQ ID NO: 294 - protein, 230 aa, Arabidopsis thaliana
MILTMKLVHPLHHSLSSSIPFPSRKRQSKPYRCSLPSPGCEKVIRTETVLPPAPVSCEGRRVLLGCLLATASGILSTGSAEAVSTSRRALRASKLPESDFTTLPNGLKYYDIKVGNGAEAVKGSRVAVHYVAKWKGITFMTSRQGLGVGGGTPYGFDVGQSERGNVLKGLDLGVEGMRVGGQRLVIVPPELAYGKKGVQEIPPNATIELDIELLSIKQSPFGTPVKIVEG

SEQ ID NO: 295 - protein, 205 aa, Arabidopsis thaliana
MSNEYDYLFKLLLIGDSSVGKSCLLLRFADDAYIDSYISTIGVDFKIRTIEQDGKTIKLQIWDTAGQERFRTITSSYYRGAHGIIIVYDCTEMESFNNVKQWLSEIDRYANESVCKLLIGNKNDMVESKVVSTETGRALADELGIPFLETSAKDSINVEQAFLTIAGEIKKKMGSQTNANKTSGPGTVQMKGQPIQQNNGGCCGQ

SEQ ID NO: 296 - protein, 309 aa, Arabidopsis thaliana
MADERYNRKNPAVKRILQEVKEMQANPSDDFMSLPLEENIFEWQFAIRGPGDTEFEGGIYHGRIQLPADYPFKPPSFMLLTPNGRFETNTKICLSISNYHPEHWQPSWSVRTALVALIAFMPTSPNGALGSVDYPKDERRTLAIKSRETPPKYGSPERQKIIDEIHQYILSKATVVPKPLPLECSQAPSIVSEAHSQVEPQEAITVVEERSIATTDTIVDDQIIEETAEAVNTAASVVPAAAPLPAVEVVVKASVSGEQRMARRAAQKPVDDRLFTWAAVGLTIAIMVLLLKKFIKSNGYSTGFMDDQS

SEQ ID NO: 297 - protein, 250 aa, Arabidopsis thaliana
MSRRYDSRTTIFSPEGRLYQVEYAMEAIGNAGSAIGILSKDGVVLIGEKKVTSKLLQTSTSAEKMYKIDDHVACAVAGIMSDANILINTARVQAQRYTFMYQEPMPVEQLVQSLCDTKQGYTQFGGLRPFGVSFLFAGWDKHHGFQLYMSDPSGNYGGWKAAAVGANNQAAQSILKQDYKDDATREEAVELALKVLTKTMDSTSLTSEKLELAEVYLTPSKTVKYHVHSPESLTKLLVKHGVTQPAAETS

SEQ ID NO: 298 - protein, 217 aa, Arabidopsis thaliana
MTHRVDQEYDYLFKIVLIGDSGVGKSNILSRFTRNEFCLESKSTIGVEFATRTTQVEGKTIKAQIWDTAGQERYRAITSAYYRGAVGALLVYDITKRQTFDNVLRWLRELRDHADSNIVIMMAGNKSDLNHLRSVAEEDGQSLAEKEGLSFLETSALEATNVEKAFQTILGEIYHIISKKALAAQEAAAANSAIPGQGTTINVDDTSGGAKRACCSS

SEQ ID NO: 299 - protein, 403 aa, Arabidopsis thaliana
MATATSASLFSTVSSSYSKASSIPHSRLQSVKFNSVPSFTGLKSTSLISGSDSSSLAKTLRGSVTKAQTSDKKPYGFKINASYKVAVLGAAGGIGQPLSLLIKMSPLVSTLHLYDIANVKGVAADLSHCNTPSQVRDFTGPSELADCLKDVNVVVIPAGVPRKPGMTRDDLFNINANIVKTLVEAVAENCPNAFIHIISNPVNSTVPIAAEVLKKKGVYDPKKLFGVTTLDVVRANTFVSQKKNLKLIDVDVPVIGGHAGITILPLLSKTKPSVNFTDEEIQELTVRIQNAGTEVVDAKAGAGSATLSMAYAAARFVESSLRALDGDGDVYECSFVESTLTDLPFFASRVKIGKNGLEAVIESDLQGLTEYEQKALEALKVELKASIDKGVAFANKPAAAAAN

SEQ ID NO: 300 - protein, 227 aa, Arabidopsis thaliana
MSASRFVKCVTVGDGAVGKTCLLISYTSNTFPTVMSQLFFHVSCFITTTTTYLMFLVSFVDIQDYVPTVFDNFSANVVVNGSTVNLGLWDTAGQEDYNRLRPLSYRGADVFILAFSLISKASYENVSKKWIPELKHYAPGVPIVLVGTKLDLRDDKQFFIDHPGAVPITTAQGEELRKQIGAPTYIECSSKTQENVKAVFDAAIRVVLQPPKQKKKKSKAQKACSIL

SEQ ID NO: 301 - protein, 322 aa, Arabidopsis thaliana
MDGEELTEQETALYDRQIRVWGANAQRRLTKAHILVSGIKGTVAEFCKNIVLAGVGSVTLMDDRLANMEALNANFLIPPDENVYSGKTVAEICSDSLKDFNPMVRVSVEKGDLSMLGTDFFEQFDVVVIGYGSRATKKYVNEKCRKLKKRVAFYTVDCRDSCGEIFVDLQDYKYTKKKLEEMVECELNFPSFQEAISVPWKPIPRRTAKLYFAMRVIEVFEESEGRKHGECSLLDLARVLEIKKQLCEANSVSESHIPDILLERLITGTTEFPPVCAIVGGILAQEVIKAVSGKGDPLKNFFYYDGEDGKGVMEDISDSFTS

SEQ ID NO: 302 - protein, 71 aa, Arabidopsis thaliana
MESNSFFFNPSASHGNIMFFFRNLNPVVQGGGTRSMMNKEETSKRRPFFSSLEDLYDDDYYDDQLLKIRGC

SEQ ID NO: 303 - protein, 260 aa, Arabidopsis thaliana
MMMGFAVSDELLGTVAPIVVYWLYSGIYVALSSLESYRLHSKVEEEEKNLVSKSSVVKGVLVQQVVQAVVAILLFTVTGSDAEADKAQQFSFLVLARQFVTAMIVLDTWQYFMHRYMHQNKFLYKHIHSQHHRLIVPYAYGALYNHPVEGLLLDTIGGALSFLVSGMSPRTSIFFFSFATIKTVDDHCGLWLPGNLFHMVFKNNSAYHDIHHQLYGTKYNFSQPFFVMWDRILGTYMPYSLEKREDGGFEARPTKEFKDD

SEQ ID NO: 304 - protein, 260 aa, Arabidopsis thaliana
MDSLVESGWKYLVTHFSDFQLACIGSFILHESVFFLSGLPYIFLERTGFLSNYKIQTKSNTPEAQGKCIARLLLYHCCVNLPLMMASYPVFRFMGMESSFPLPSWKVVSAQILFYFIIEDFVFYWGHRILHTKWLYKNVHSVHHEYATPFGLTSEYAHPAEILFLGFATIVGPALTGPHLITLWLWMMLRVIETVEAHCGYHFPWSPSNFLPLYGGADFHDYHHRLLYTKSGNYSSTFVYMDWIFGTDKGYRKLKALKET

SEQ ID NO: 305 - protein, 116 aa, Arabidopsis thaliana
MASSSLISVALTLILIFHLMPETTVARRLTDQKPSDEVVTTTTDEANNLPFPPGLPFGGVPPLPSLFPPFVPSPFPGNIPRLPFPFPFPTSPPAPSLPGFPGFTFPPLPFLTPPPL

SEQ ID NO: 306 - protein, 424 aa, Sinorhizobium meliloti
MTAIIDIIGREILDSRGNPTVEVDVHLEDGSFGRAAVPSGASTGAHEAVELRDGGTRYLGKGVERAVDAVNGEIFEAIGGLDAENQIQIDRTMIELDGTPNKSRLGANAILGVSLAVAKAAAEASGLPLYRYVGGPNAHLLPVPMMNIINGGAHADNPIDFQEFMIMPVGAETLKDAVRMGSEVFHTLKKQLAADGHNTNVGDEGGFAPGLASAPAALDFIMKSIEKAGYKPGEDMYVALDCASTEFFKDGKYVLEGEGRTLEPGAMAEYLAELAGKYPIISIEDGMAEDDWDGWKSLTDLVGNKCQLVGDDLFVTNSARLRDGIKMGVANSILVKVNQIGSLSETLDAVETAHKARYTAVMSHRSGETEDSTIADLAVATNCGQIKTGSLARSDRLAKYNQLIRIEEQLGPQAQYAGRSVLRG

SEQ ID NO: 307 - protein, 272 aa, Bacillus subtilis subsp. subtilis str. 168
MIKKAIIPAGGFGTRNLPVTKVIPKEMFPVGSKPVIHYLVEELKESGIEDILMVVSSHKNLIVDYFDSSLALEAFLASKNKLHLLREHPIPDIRIHYVRQPYAKGLGDAISFGKQFAGGEPFAVVLPDDLIFSANQPALGQLIEAYTKYQSSVIGLKETKTEDLHHYGVIKGEPVEKGLYRIQDIVEKPKQNPPSHFAAAGRYIFTPDIFNELEALEADSGGEVQVTDAIKASLGACTVYGKLLEGERYDIGLQKDYLKLIYDMLKTEKNPQ

SEQ ID NO: 308 - protein, 283 aa, Escherichia coli K12
FITSLYKKAGSCRTMEKKIGFIGCGNMGKAILGGLIASGQVLPGQIWVYTPSPDKVAALHDQFGINAAESAQEVAQIADIIFAAVKPGIMIKVLSEITSSLNKDSLVVSIAAGVTLDQLARALGHDRKIIRAMPNTPALVNAGMTSVTPNALVTPEDTADVLNIFRCFGEAEVIAEPMIHPVVGVSGSSPAYVFMFIEAMADAAVLGGMPRAQAYKFAAQAVMGSAKMVLETGEHPGALKDMVCSPGGTTIEAVRVLEEKGFRAAVIEAMTKCMEKSEKLSKS

SEQ ID NO: 309 - protein, 272 aa, Nostoc punctiforme
MTIKFGLIGGGVMGEALLSRLIARGIYQSSEVIVSEPLPSRLDFLQQQYGVSVTTDNSEVFTQAKEVVFLAVKPQVFSAIAQELADIDIINREQSPLIISILAGAPLNQLEAAFVQLPVIRAMPNTPATVGAGITAICLGAYTNTKHHQIAQQVFSAVGEVVEVSEGLMDAVTGLSGSGPAYVALLVESLADGGVSAGLPRAIANQLALQTVLGTAKLLYETKMHPAELKDRVTSPGGTTIAGIAKLEQAGFRSALIEAVKAATERSQELGK

SEQ ID NO: 310 - protein, 357 aa, Sinorhizobium meliloti
MPKMKAAIFVAPGRIVLDEKQIPDVGPLDALMRITTTTICGTDVHILRGEYPVARGLTIGHEPVGVIEKLGSAVRGYSEGQRVIAGAICTSGHSNAALCGCHAQDGPGTKHGWKGMGGWKFGNTIDGSQAEYVLVPDAMANLAPVPDGLADEQVLMCPDIMSTGFSGAESGAVRVGDAVAVFAQGPIGLCATAGARLIGATTIIAVESVPARMEMARRMGADDVVDFTVSDPTAEIMRLTDGRGVDVAIEALGRQETFEGALRVLRPGGTLSSLGVYSGDLRIPLDGFLAGLGDHTIRTTLCPGGKERMRRLMEVIASGRVDTRPLVTHRFKLDQIEEAYDLFANQRDGVLKVAINP

SEQ ID NO: 311 - protein, 420 aa, Agrobacterium tumefaciens str. C58
FITSLYKKAGSCRTMEEFHKVRRLPQYVFEQVNRLKASARAAGADIIDLGMGNPDLPTPKAIVDKLCEVVQDPRTHRYSSSKGIPGLRRAQAGYYARRFGVKLNPDTQVVATLGSKEGFANMAQAITAPGDVILCPNPTYPIHAFGFLMAGGVIRSMNVEPDESFFGPLERAVRHSIPKPLALIVNYPSNPTAHVASLDFYKDVIAFAKKHEIIVLSDLAYSEIYFDDNNPPPSVLEVPGAIDVAVEFTSMSKTFSMPGWRMGFAVGNERLIAALTRVKSYLDYGAFTPIQVAATHALNGDGSDIAEVRSVYRRRRDVMVDTFGKAGFEVPPPAATMFAWAKIPEKFRHLGSLEFSKLLVEKADIAVAPGIGFGEMGDDYVRLALVENEHRIRQAARNLKRFLSSADETMHNVVSLNAHR

SEQ ID NO: 312 - protein, 490 aa, Bacillus subtilis subsp. subtilis str. 168
MSQTLFIDGEWISAEKEQIRSIINPFNQEEIATVSEGGREDAIKAIAAARRAFDKGEWSSLSGLERGKIVLKIAELIRRDLEELAELESLDTGKTLEESKADMDDIANVFQYYAGLADKDGGEIISSPIPDSESKIIREPIGVCGQITPWNYPLLQASWKIAPALAAGNTIVMKPSEITPLTTIKVFKLMEEAGVPKGVANLVLGPGATVGDELAVNKDVDLISFTGGIETGKKIMRAASGNVKKIALELGGKNPNIVFKDADLEVAVDQALNAVFFHAGQVCSAGSRLLVEDAIHDQFLAELVKRAKRIKLGNGFHAETESGPLISAEHRAKVEKYVEIGIEEGAKLETGGKRPEDPELQNGFFYEPTIFSNCNSDMRIVQEEVFGPVLTVETFSSEEEVIELANDTIYGLAGAVWSKDIEKCERVAARLRMGTVWINDFHPYFAQAPWGGYKQSGFGRELGKIGLEEYTEVKHVYRNTKPAAVNWFNS

SEQ ID NO: 313 - protein, 273 aa, Bacillus halodurans
MEIKKAIIPAAGYGTRCLPITKVVPKEMFPINGKAALHYIVEEAVAAGIEEIFIILSRNRTLIMDYFDRSIELETFLKKMNKQHLLEKLALPDVTIQFIRQPHANGLGDAIRLGERFVNGEPFAVLLPDDLFISPKHTSVLAELVNVYKQYNKSIIGLQEVESELLKRYGVIAGHPLSSDEYKIENVVEKPQTNPPSNLAIVGRYIFEPAIFQKLKNIGIGKGGEVQLTDAIKALLISHTVIGKIIEGCRYDIGIEEDYQRLIQEFSEKKSST

SEQ ID NO: 314 - protein, 351 aa, Desulfitobacterium hafniense
  unsure (1)..(351): unsure at all Xaa locations
MTNTVRKIAVLTSGGDAPGMNAAIRAVVRKGIYHGLEVFGIRKGYEGLIHGEFITMHLGAVADIIHRGGTMLMTARSQEMLTPEGQKNAAAQLRYRGIDALIVIGGDGSFRGAQTLSAQGIAIVGIPGTIDNDITGTDLTIGFDTAVNNVVQAVSKIRDTATSHDRTFLVEVMGRDCGNIALQSGVACGAESILVPEIEPDLDDIVAKLERGHQRGKHHSIIMVAEGAMSAWNLGEELRQRTGFETRVTILGHIQRGGNPSALDVVLASQMGGKAVEILCAGETDRMTACVNQEIQSXCLWRWLMVSANPSTKFSMIWPINWLSEQKKSAVYRGNQEAQVESRDQLSCTKW

SEQ ID NO: 315 - protein, 305 aa, Xenorhabdus nematophilus
MSVINKKVKKAVIPVAGLGTRMLPATKAIPKEMLPLVDKPLIQYVVNECIKAGINEIILVTHSSKNSIENHFDTSFELEAILERRVKRQLLDEVQSICPNHVTIMQTRQGIAKGLGHAVLCAKPLIGDEPFAVILPDVILDEYSTDLSKYNLSEMLSRFNSSGASQILVEPVPLESVADYGVVDCLGENLQPGDSKPIVRVVEKPKPEEAPSNLSIVGRYVLSEKIWPLLAKTAPGAGDEIQLTDAIAMLMEKEPVEAYHLQGRSHDCGNKLGYMQAFVEYGMKHKDLGAAFKDWIMTLQNQIEK

SEQ ID NO: 316 - protein, 484 aa, Escherichia coli K12
MASSMLSSATMVASPAQATMVAPFNGLKSSAAFPATRKANNDITSITSNGGRVNCMQVWPPIGKKKFETLSYLPDLTDSGGRVNCMQAMIENITAAPADPILGLADLFRADERPGKINLGIGVYKDETGKTPVLTSVKKAEQYLLENETTKNYLGIDGIPEFGRCTQELLFGKGSALINDKRARTAQTPGGTGALRVAADFLAKNTSVKRVWVSNPSWPNHKSVFNSAGLEVREYAYYDAENHTLDFDALINSLNEAQAGDVVLFHGCCHNPTGIDPTLEQWQTLAQLSVEKGWLPLFDFAYQGFARGLEEDAEGLRAFAAMHKELIVASSYSKNFGLYNERVGACTLVAADSETVDRAFSQMKAAIRANYSNPPAHGASVVATILSNDALRAIWEQELTDMRQRIQRMRQLFVNTLQEKGANRDFSFIIKQNGMFSFSGLTKEQVLRLREEFGVYAVASGRVNVAGMTPDNMAPLCEAIVAVL

SEQ ID NO: 317 - protein, 468 aa, Bacillus subtilis subsp. subtilis str. 168
MASSMLSSATMVASPAQATMVAPFNGLKSSAAFPATRKANNDITSITSNGGRVNCMQVWPPIGKKKFETLSYLPDLTDSGGRVNCMQAMEKQCVAMLLAGGKGSRLSGLTKNMAKPAVSFGGKYRIIDFTLSNCSNSGIDTVGILTQYQPLELNSYIGIGSAWDLDRYNGGVTVLPPYAESSEVKWYKGTASSIYENLNYLNQYDPEYVLILSGDHIYKMDYGKMLDYHIEKKADVTISVIEVGWEEASRFGIMKANPDGTITHFDEKPKFPKSNLASMGIYIFNWPLLKQYLEMDDQNPYSSHDFGKDIIPLLLEEKKKLSAYPFKGYWKDVGTVQSLWEANMDLLKEDSELKLFERKWKIYSVNPNQPPQFISSDAQVQDSLVNEGCVVYGNVSHSVLFQGVTVGKHTTVTSSVIMPDVTIGEHVVIENAIVPNGMVLPDGAVIRSEKDIEEVLLVSEEFVEKELI

SEQ ID NO: 318 - protein, 479 aa, Pseudomonas fluorescens PfO-1
MTKRYDNYINGEWVAGNDYSANINPSELSDTIGDYAKADLAQVNAAIDAARAAFPAWSTSGIQARHDSLDKVGTEILARREELGTLLAREEGKTLPEAIGEVTRAGNIFKFFAGECLRLSGDYVPSVRPGVNVEVTREALGVVGLITPWNFPIAIPSWKIAPALAYGNCVVLKPADLVPGCAWALAEIISRAGFPAGVFNLVMGSGRVVGEALVNSPKVDGISFTGSVGVGRQIAVNCVSRQAKVQLEMGGKNPQIILDDADLKQAVELSVQSAFYSTGQRCTASSRLIVTAGIHDKFVEAMAERMKSIKVGHALKAGTDIGPVVSQAQLEQDMKYIDIGQSEGARLVSGGGLVTCDTEGYFLAPTLFADSEASMRISREEIFGPVANIVRVADYEAALAMANDTEFGLSAGIATTSLKYANHFKRHSQAGMVMVNLPTAGVDYHVPFGGRKGSSYGSREQGRYAQEFYTVVKTSYIGS

SEQ ID NO: 319 - protein, 509 aa, Escherichia coli K12
MASSMLSSATMVASPAQATMVAPFNGLKSSAAFPATRKANNDITSITSNGGRVNCMQVWPPIGKKKFETLSYLPDLTDSGGRVNCMQAMSNNEFHQRRLSATPRGVGVMCNFFAQSAENATLKDVEGNEYIDFAAGIAVLNTGHRHPDLVAAVEQQLQQFTHTAYQIVPYESYVTLAEKINALAPVSGQAKTAFFTTGAEAVENAVKIARAHTGRPGVIAFSGGFHGRTYMTMALTGKVAPYKIGFGPFPGSVYHVPYPSDLHGISTQDSLDAIERLFKSDIEAKQVAAIIFEPVQGEGGFNVAPKELVAAIRRLCDEHGIVMIADEVQSGFARTGKLFAMDHYADKPDLMTMAKSLAGGMPLSGVVGNANIMDAPAPGGLGGTYAGNPLAVAAAHAVLNIIDKESLCERANQLGQRLKNTLIDAKESVPAIAAVRGLGSMIAVEFNDPQTGEPSAAIAQKIQQRALAQGLLLLTCGAYGNVIRFLYPLTIPDAQFDAAMKILQDALSD

SEQ ID NO: 320 - protein, 474 aa, Escherichia coli K12
MASSMLSSATMVASPAQATMVAPFNGLKSSAAFPATRKANNDITSITSNGGRVNCMQVWPPIGKKKFETLSYLPDLTDSGGRVNCMQAMANNPLIPQSKLPQLGTTIFTQMSALAQQHQAINLSQGFPDFDGPRYLQERLAHHVAQGANQYAPMTGVQALREAIAQKTERLYGYQPDADSDITVTAGATEALYAAITALVRNGDEVICFDPSYDSYAPAIALSGGIVKRMALQPPHFRVDWQEFAALLSERTRLVILNTPHNPSATVWQQADFAALWQAIAGHEIFVISDEVYEHINFSQQGHASVLAHPQLRERAVAVSSFGKTYHMTGWKVGYCVAPAPISAEIRKVHQYLTFSVNTPAQLALADMLRAEPEHYLALPDFYRQKRDILVNALNESRLEILPCEGTYFLLVDYSAVSTLDDVEFCQWLTQEHGVAAIPLSVFCADPFPHKLIRLCFAKKESTLLAAAERLRQL

SEQ ID NO: 321 - protein, 493 aa, Escherichia coli K12
MASSMLSSATMVASPAQATMVAPFNGLKSSAAFPATRKANNDITSITSNGGRVNCMQVWPPIGKKKFETLSYLPDLTDSGGRVNCMQAMAPIEKSSKLENVCYDIRGPVLKEAKRLEEEGNKVLKLNIGNPAPFGFDAPDEILVDVIRNLPTAQGYCDSKGLYSARKAIMQHYQARGMRDVTVEDIYIGNGVSELIVQAMQALLNSGDEMLVPAPDYPLWTAAVSLSSGKAVHYLCDESSDWFPDLDDIRAKITPRTRGIVIINPNNPTGAVYSKELLMEIVEIARQHNLIIFADEIYDKILYDDAEHHSIAPLAPDLLTITFNGLSKTYRVAGFRQGWMVLNGPKKHAKGYIEGLEMLASMRLCANVPAQHAIQTALGGYQSISEFITPGGRLYEQRNRAWELINDIPGVSCVKPRGALYMFPKIDAKRFNIHDDQKMVLDFLLQEKVLLVQGTAFNWPWPDHFRIVTLPRVDDIELSLSKFARFLSGYHQL

SEQ ID NO: 322 - protein, 500 aa, Escherichia coli K12
MASSMLSSATMVASPAQATMVAPFNGLKSSAAFPATRKANNDITSITSNGGRVNCMQVWPPIGKKKFETLSYLPDLTDSGGRVNCMQAMAQQNYLDELTPAFTSLLAIKEASRCLLCHDAPCSQACPAQTDPGKFIRSIYFRNFKGAAETIRENNALGAVCARVCPTEKLCQSGCTRAGVDAPIDIGRLQRFVTDFEQQTGMEIYQPGTKTLGKVAIIGAGPAGLQASVTLTNQGYDVTIYEKEAHPGGWLRNGIPQFRLPQSVLDAEIARIEKMGVTIKCNNEVGNTLTLEQLKAENRAVLVTVGLSSGSGLPLFEHSDVEIAVDFLQRARQAQGDISIPQSALIIGGGDVAMDVASTLKVLGCQAVTCVAREELDEFPASEKEFTSARELGVSIIDGFTPVAVEGNKVTFKHVRLSGELTMAADKIILAVGQHARLDAFAELEPQRNTIKTQNYQTRDPQVFAAGDIVEGDKTVVYAVKTGKEAAEAIHHYLEGACSC

SEQ ID NO: 323 - protein, 634 aa, Escherichia coli K12
MASSMLSSATMVASPAQATMVAPFNGLKSSAAFPATRKANNDITSITSNGGRVNCMQVWPPIGKKKFETLSYLPDLTDSGGRVNCMQAMAIHNRAGQPAQQSDLINVAQLTAQYYVLKPEAGNAEHAVKFGTSGHRGSAARHSFNEPHILAIAQAIAEERAKNGITGPCYVGKDTHALSEPAFISVLEVLAANGVDVIVQENNGFTPTPAVSNAILVHNKKGGPLADGIVITPSHNPPEDGGIKYNPPNGGPADTNVTKVVEDRANALLADGLKGVKRISLDEAMASGHVKEQDLVQPFVEGLADIVDMAAIQKAGLTLGVDPLGGSGIEYWKRIGEYYNLNLTIVNDQVDQTFRFMHLDKDGAIRMDCSSECAMAGLLALRDKFDLAFANDPDYDRHGIVTPAGLMNPNHYLAVAINYLFQHRPQWGKDVAVGKTLVSSAMIDRVVNDLGRKLVEVPVGFKWFVDGLFDGSFGFGGEESAGASFLRFDGTPWSTDKDGIIMCLLAAEITAVTGKNPQEHYNELAKRFGAPSYNRLQAAATSAQKAALSKLSPEMVSASTLAGDPITARLTAAPGNGASIGGLKVMTDNGWFAARPSGTEDAYKIYCESFLGEEHRKQIEKEAVEIVSEVLKNA

SEQ ID NO: 324 - protein, 584 aa, Escherichia coli K12
MASSMLSSATMVASPAQATMVAPFNGLKSSAAFPATRKANNDITSITSNGGRVNCMQVWPPIGKKKFETLSYLPDLTDSGGRVNCMQAMVTEFVFIPIFAIAAGVAQSLQYLNRYHVIREPPEHILNRLPSSASALACSAHALNLIEKRTLDHEEMKALNREVIEYFKEHVNPGFLEYRKSVTAGGDYGAVEWQAGSLNTLVDTQGQEFIDCLGGFGIFNVGHRNPVVVSAVQNQLAKQPLHSQELLDPLRAMLAKTLAALTPGKLKYSFFCNSGTESVEAALKLAKAYQSPRGKFTFIATSGAFHGKSLGALSATAKSTFRKPFMPLLPGFRHVPFGNIEAMRTALNECKKTGDDVAAVILEPIQGEGGVILPPPGYLTAVRKLCDEFGALMILDEVQTGMGRTGKMFACEHENVQPDILCLAKALGGGVMPIGATIATEEVFSVLFDNPFLHTTTFGGNPLACAAALATINVLLEQNLPAQAEQKGDMLLDGFRQLAREYPDLVQEARGKGMLMAIEFVDNEIGYNFASEMFRQRVLVAGTLNNAKTIRIEPPLTLTIEQCELVIKAARKALAAMRVSVEEA

SEQ ID NO: 325 - protein, 495 aa, Pseudomonas fluorescens PfO-1
MASSMLSSATMVASPAQATMVAPFNGLKSSAAFPATRKANNDITSITSNGGRVNCMQVWPPIGKKKFETLSYLPDLTDSGGRVNCMQAMAIEIKAPTFPESVADGTVATWHKQPGDAVKRDELIVDIETDKVVLEVLATADGVLGAIVKGEGETVLSDEVLGSIVEGGAASAAPAAAAAPAAAAAAPAAADGEDDPIAAPAARKLAEENGINIASVAGTGKGGRVTKEDVVAAVAAKKAAPAAAPAKAAAPAAAAPVFAAGDRIEKRVPMTRVRATVAKRLVEAQSNMAMLTTFNEVDMTEVMALRSKYKDLFEKSHNGVRLGFMSFFVKAATEALKRFPAVNASIDGNDIVYHGYADIGVAVSSDRGLVVPVLRNAEHMSLAEIEGGIATFGKKARDGKLSMDEMTGGTFTITNGGTFGSMMSTPIVNPPQAAILGMHNIIQRPMAINGQVVIRPMMYLALSYDHRLIDGKEAVTFLVTIKNLLEDPARLLLDI

SEQ ID NO: 326 - protein, 494 aa, Pseudomonas syringae pv. tomato str. DC3000
MASSMLSSATMVASPAQATMVAPFNGLKSSAAFPATRKANNDITSITSNGGRVNCMQVWPPIGKKKFETLSYLPDLTDSGGRVNCMQAMTIDIKAPSFPESVADGTISKWYKKEGDAVKRDEMLVDIETDKVVLEVLAEADGVMGAITKEEGAIVLSNEVLGTLNDGATASAAPAPAAAPASAPAAAPAAAGEEDPIAAPAARQLAEENGINLASVKGTGKDGRITKEDIVAAVEAKKSAPAAAPAAKPVAAAAPVVAAGDRTEKRVPMTRVRATVAKRLVEAQSNMAMLTTFNEVDMTEVMALRSKYKDLFEKSHNGVRLGFMSFFVKAATEALKRFPAVNASIDGSDIVYHGYADVGVAVSSDRGLVVPVLRNAEHMSLAEIEGGIATFGKKARDGKLSIDEMTGGTFTITNGGTFGSMMSTPIVNPPQAAILGMHNILQRPMAVNGQVVIRPMMYLALSYDHRLIDGKEAVTFLVTIKNLLEDPARLLLDI

SEQ ID NO: 327 - protein, 405 aa, Xenorhabdus nematophilus
MASSMLSSATMVASPAQATMVAPFNGLKSSAAFPATRKANNDITSITSNGGRVNCMQVWPPIGKKKFETLSYLPDLTDSGGRVNCMQAMADKLTSLRKLTTVVADTGDIAAMKLYQPQDATTNPSLILNAAQIPKYRQLIDDAIEWARAQSDSREQQIIDAGDKLAVNIGLEILKLIPGRISTEVDARLSYDTEASVAKAKRLIKLYNEAGISNDRILIKLASTWQGIRAAEQLEKEGINCNLTLLFSFAQARACAEAGVFLISPFVGRILDWYKANSDKKEFAPNEDPGVISVSEIYQYYKEHGYNTVVMGASFRNSGEILELAGCDRLTISPALLKELSETAGEVEHKLSYEGEIKPRPAAMTEAEFYWEHHQDAMATEKLAEGIRKFAIDQGKLESMIADLL

SEQ ID NO: 328 - protein, 493 aa, Xenorhabdus nematophilus
MASSMLSSATMVASPAQATMVAPFNGLKSSAAFPATRKANNDITSITSNGGRVNCMQVWPPIGKKKFETLSYLPDLTDSGGRVNCMQAMGSVEILVPDLPESVADATVATWHKKPGDAVERDDILVEIETDKVILEVPASEAGVLEAVLEEEGATVLSKQLLGRISLSNSAGMPTAVKETTEATPAQRQTASLEDESNDALSPAVRRLIAEHDLDPAAIKGSGVGGRIVREDVEKHIAANKKESAKPAASAPAAQQSELPHRSEKRVPMTRLRKRVAERLLEAKNNTAMLTTFNEVNMKPIQELRKQYGDVFEKRHGVRLGFMSFYVKAVVEALKRYPEVNASIDGTDVVYHNYFDISIAVSTPRGLVTPVLRDADALSMADLEKTIKELAIKGRDGKLTVDELTGGNFTITNGGVFGSLMSTPIINPPQSAILGMHAIKDRPMAVNGQVEILPMMYLALSYDHRLIDGRESVGFLVTIKEMLEDPTRLLLDV

SEQ ID NO: 329 - protein, 217 aa, Synechocystis sp.
MASSMLSSATMVASPAQATMVAPFNGLKSSAAFPATRKANNDITSITSNGGRVNCMQVWPPIGKKKFETLSYLPDLTDSGGRVNCMQAMASIMMNTVQTYGKTVEKNYKAGEVIFQEGAVELSMFGVLEGEVEMTLQGKFIETIEAGGIFGIGAIVHSDHQRASTAIAKTDCKLVAMDREHFLFAVQQTPMFALEVIQNYSDRYRSLKALYEKAIAE

SEQ ID NO: 330 - protein, 547 aa, Bacillus halodurans
MASSMLSSATMVASPAQATMVAPFNGLKSSAAFPATRKANNDITSITSNGGRVNCMQVWPPIGKKKFETLSYLPDLTDSGGRVNCMQAMDRVAIVGGGPAGYVAAITAAHRGKQVTLIEQKKLGGTCLNEGCMPTKSLLESAATYDKVKHASDYGIKGPVDEMRIEWGQVQARKNQIVHQLVKGIDYLLKKHKIELLEGTASFQSAHELLVQTERGQQTIEANRIIIATGSEPTPLPFAPFDREWVISSEQAMSLPIQPESMIIVGGGVIGCEFASIYGRMGTKVTIIEMADRLLFGEDHDICKVLMEELKRQGVEIYPSTVIKEMQRDRKQVVVERDGQVEVLTGDYVLVAIGRKPRLQEIGLERIGVDFTSRGITVNEHMQTTIPHIYACGDVIGGIQLAHVAFHEGSVAAKHLCGEPIQVRYEAVPRCIYTSPEIATVGLTETQARENYGHVRIGEYPFAANGKALIVNETIGKVKVVVEPEYEAIVGLTIVGPHATELIAQGTLMVHNELTLDSLESFIAAHPTVSEAVHEAVLQALGQAVHV

SEQ ID NO: 331 - protein, 562 aa, Bacillus halodurans
MASSMLSSATMVASPAQATMVAPFNGLKSSAAFPATRKANNDITSITSNGGRVNCMQVWPPIGKKKFETLSYLPDLTDSGGRVNCMQAMTEEYDLVILGGGTGGYVAAIRATQLDLKVALVEKGKLGGTCLHKGCIPSKALLRSAEVFSTVQKADQFGVKIDGAALDFTSVQNRKEQIVTQLHRGVEMLMKKGKIDVYKGHGRILGPSIFSPTPGTISVEMNNGEDNMMLIPRNVIIATGSSPRVLPGMEIDGEAVLTSDEALKMEQLPKSMLIVGGGVIGIEWASMLNDFGVDVTVIEYGPRILPTEDADIAKEAERLLKKRGVTFKTNAKVLAETLEKGDNSVVIEAEVGGVSERFTAEKMLVSVGRTPNVNDIGLENTDIEVIDGAIAVNEWYQTKESHIYAIGDVIGGMQLAHVASHEGILAVEHMTDHKPEPLNYLTVARCVYSHPEMASIGLSEAEAKEKGYEVKVGTFPFQAIGKALVYGESDGFVKILSDKKTDDLLGVHMIGPHVTDMISEAALAKVLDAAHWEVAHTIHPHPTLSEVVGEAALAVDGKAIHF

SEQ ID NO: 332 - protein, 558 aa, Bacillus subtilis subsp. subtilis str. 168
MASSMLSSATMVASPAQATMVAPFNGLKSSAAFPATRKANNDITSITSNGGRVNCMQVWPPIGKKKFETLSYLPDLTDSGGRVNCMQAMVVGDFPIETDTLVIGAGPGGYVAAIRAAQLGQKVTVVEKATLGGVCLNVGCIPSKALINAGHRYENAKHSDDMGITAENVTVDFTKVQEWKASVVNKLTGGVAGLLKGNKVDVVKGEAYFVDSNSVRVMDENSAQTYTFKNAIIATGSRPIELPNFKYSERVLNSTGALALKEIPKKLVVIGGGYIGTELGTAYANFGTELVILEGGDEILPGFEKQMSSLVTRRLKKKGNVEIHTNAMAKGVEERPDGVTVTFEVKGEEKTVDADYVLITVGRRPNTDELGLEQVGIEMTDRGIVKTDKQCRTNVPNIYAIGDIIEGPPLAHKASYEGKIAAEAIAGEPAEIDYLGIPAVVFSEPELASVGYTEAQAKEEGLDIVAAKFPFAANGRALSLNETDGFMKLITRKEDGLVIGAQIAGASASDMISELSLAIEGGMTAEDIAMTIHAHPTLGEITMEAAEVAIGSPIHIVK

SEQ ID NO: 333 - protein, 493 aa, Escherichia coli K12
MASSMLSSATMVASPAQATMVAPFNGLKSSAAFPATRKANNDITSITSNGGRVNCMQVWPPIGKKKFETLSYLPDLTDSGGRVNCMQAMGSVDILVPDLPESVADATVATWHKKPGDAVVRDEVLVEIETDKVVLEVPASADGILDAVLEDEGTTVTSRQILGRLREGNSAGKETSAKSEEKASTPAQRQQASLEEQNNDALSPAIRRLLAEHNLDASAIKGTGVGGRLTREDVEKHLAKAPAKESAPAAAAPAAQPALAARSEKRVPMTRLRKRVAERLLEAKNSTAMLTTFNEVNMKPIMDLRKQYGEAFEKRHGIRLGFMSFYVKAVVEALKRYPEVNASIDGDDVVYHNYFDVSMAVSTPRGLVTPVLRDVDTLGMADIEKKIKELAVKGRDGKLTVEDLTGGNFTITNGGVFGSLMSTPIINPPQSAILGMHAIKDRPMAVNGQVEILPMMYLALSYDHRLIDGRESVGFLVTIKELLEDPTRLLLDV

SEQ ID NO: 334 - protein, 408 aa, Arabidopsis thaliana
MQSSAVFSLSPSLPLLKPRRLSLRHHPITTAASSSDLNVSPNVVSIPSLSRRSWRLASSDSPLRAWSGVPSPISHSLDTNRFRTAATAVPESAEEGDNSGKLTKVLELGLLFAMWYLFNIYFNIYNKQVLKALHAPMTVTLVQFAVGSVLITIMWVLNLYKRPKISGAQLAAILPLAVVHTLGNLFTNMSLGKVSVSFTHTIKAMEPFFSVLLSAMFLGEKPTPWVLGAIVPIVGGVALASISEVSFNWAGFSSAMASNLTNQSRNVLSKKVMVKKDDSLDNITLFSIITLMSLVLMAPVTFFTEGIKFTPSYIQSAGVNVKQIYTKSLIAALCFHAYQQVSYMILARVSPVTHSVGNCVKRVVVIVSSVIFFKTPVSPVNAFGTGIALAGVFLYSRVKGIKPKPKTA

SEQ ID NO: 335 - protein, 568 aa, Escherichia coli K12
MGPLPRKGNMKQKITDYLDEIYGGTFTATHLQKLVTRLESAKRLITQRRKKHWDESDVVLITYADQFHSNDLKPLPTFNQFYHQWLQSIFSHVHLLPFYPWSSDDGFSVIDYHQVASEAGEWQDIQQLGECSHLMFDFVCNHMSAKSEWFKNYLQQHPGFEDFFIAVDPQTDLSAVTRPRALPLLTPFQMRDHSTRHLWTTFSDDQIDLNYRSPEVLLAMVDVLLCYLAKGAEYVRLDAVGFMWKEPGTSCIHLEKTHLIIKLLRSIIDNVAPGTVIITETNVPHKDNIAYFGAGDDEAHMVYQFSLPPLVLHAVQKQNVEALCAWAQNLTLPSSNTTWFNFLASHDGIGLNPLRGLLPESEILELVEALQQEGALVNWKNNPDGTRSPYEINVTYMDALSRRESSDEERCARFILAHAILLSFPGVPAIYIQSILGSRNDYAGVEKLGYNRAINRKKYHSKEITRELNDEATLRHAVYHELSRLITLRRSHNEFHPDNNFTIDTINSSVMRIPRSNADGNCLTGLFNVSKNIQHVNITNLHGRDLISEVDILGNEITLRPWQVMWIK

SEQ ID NO: 336 - protein, 850 aa, Agrobacterium tumefaciens
MASTDYHVDLTNCDREPIHIPGYIQPHGCLIACDNAMRMVLRHSENCGELLGLEGDLNGRTAEDVLGKKLVHDLRNALTVTGRTTRPAMLPAMETSDGRSFDISLHRYKSTTIIEFEPSGSDAQPLGTARKMVDRIREADSVESLISRTTRLVKATLGYDRVMIYRFQEDGAGKVVSEAKQPELESFLGQYFPASDIPQQARALYLKNTLRIISDASGTRIPVLPAVDVSGEPLDLSYAHLRSVSPIHCEYLRNMGVAASMSISVIVDGALWGLIACHHYSPRVLSMPVRIAAEMFGEFFSMHLQVLKQKRRLDTINHAHAALDRFLRLAAHHANIEELLVDSFQDFADLMPCDGVGLWVGNNWHGHGATPPHDAIPRLARFVASASEGRVWATHALSQAIPEAEIYAGTAAGMLAIPLSQVKSDYLLFFRKEIVQNLNWAGNPEKSYETGPMGDRLTPRKSFAIWKETVRLQAQPWSEADREIAEAARIALVEVAFHHSELMAGERERAEVRQRMLNEELNHRVKNVLAIIKSLVGNPSQEGKTLQEYVTALKGRIQALSFAHDQIIRGEGGGALRDLLEAELSPHRSPETTVKLEGPQITLDSRAFSVMALVLHELATNAAKYGALSQNGGQLHVRWDVNENRDCEISWRETLLTTLPAPSRAGFGTALISRSIPYDLGGRSTIRYLPNGLEAEILLPFRHVSSVSAAFETKTEAETLPQPRRYNREEPLKVLLVEDQMLIAMDVENMLEDNGIKAIETATSSAMAIEKLKTYLPDVAILDINLGSDTSIPVARELHRRGIPFLFATGYADGSMVPDEFGAVPVIRKPYDEDALMAGIGVLVGDTERV

SEQ ID NO: 337 - protein, 572 aa, Bacillus halodurans
MGNERLKAPEGPPSDVERIKEESNYLRGTLKESMLEPISAGISDDDNRLMKHHGSYLQDDRDLRNERQKQKLEPAYQFMLRVRMPGGVATPEQWLVMDELAQKYGNGTMKLTTRETFQLHGILKWNMKKTIQAIHSALLDTIAACGDVNRNVMCTSNPYQSEIHQEVYEWSKKLSDDLLPRTRAYHEIWLDEEKVAGTPEAEEVEPMYGPLYLPRKFKIGIAVPPSNDIDVFSQDLGFIAIVEDDKLVGFNVAIGGGMGMTHGDKATYPQLAKVIGFCKPEQIYDVAEKIITIQRDYGNRSVRKNARFKYTVDRLGLETVKNELENRLGWSLDEAKPYHFDHNGDRYGWVKGVKGRWHFTLFVEGGRVTDYADYKLMTGLREIAKIHTGDIRLTSNQNLIIANVTSQKKKKINELIEQYGLTDGKHYTALRRSSIACVALPTCGLAMAEAERYLPKLIDKIDEIIEENGLKNEEITIRMTGCPNGCARHALGEIGFIGKAPGKYNMYLGAAFDGSRLSKMYRENIGEEEILKELREILPRYAKERKEGEHFGDFVIRAGIIKETTDGTNFHD

SEQ ID NO: 338 - protein, 512 aa, Escherichia coli K12
MKIRSQVGMVLNLDKCIGCHTCSVTCKNVWTSREGVEYAWFNNVETKPGQGFPTDWENQEKYKGGWIRKINGKLQPRMGNRAMLLGKIFANPHLPGIDDYYEPFDFDYQNLHTAPEGSKSQPIARPRSLITGERMAKIEKGPNWEDDLGGEFDKLAKDKNFDNIQKAMYSQFENTFMMYLPRLCEHCLNPACVATCPSGAIYKREEDGIVLIDQDKCRGWRMCITGCPYKKIYFNWKSGKSEKCIFCYPRIEAGQPTVCSETCVGRIRYLGVLLYDADAIERAASTENEKDLYQRQLDVFLDPNDPKVIEQAIKDGIPLSVIEAAQQSPVYKMAMEWKLALPLHPEYRTLPMVWYVPPLSPIQSAADAGELGSNGILPDVESLRIPVQYLANLLTAGDTKPVLRALKRMLAMRHYKRAETVDGKVDTRALEEVGLTEAQAQEMYRYLAIANYEDRFVVPSSHRELAREAFPEKNGCGFTFGDGCHGSDTKFNLFNSRRIDAIDVTSKTEPHP

SEQ ID NO: 339 - protein, 549 aa, Escherichia coli K12
MKNINPTQTAAWQALQKHFDEMKDVTIADLFAKDGDRFSKFSATFDDQMLVDYSKNRITEETLAKLQDLAKECDLAGAIKSMFSGEKINRTENRAVLHVALRNRSNTPILVDGKDVMPEVNAVLEKMKTFSEAIISGEWKGYTGKAITDVVNIGIGGSDLGPYMVTEALRPYKNHLNMHFVSNVDGTHIAEVLKKVNPETTLFLVASKTFTTQETMTNAHSARDWFLKAAGDEKHVAKHFAALSTNAKAVGEFGIDTANMFEFWDWVGGRYSLWSAIGLSIVLSIGFDNFVELLSGAHAMDKHFSTTPAEKNLPVLLALIGIWYNNFFGAETEAILPYDQYMHRFAAYFQQGNMESNGKYVDRNGNVVDYQTGPIIWGEPGTNGQHAFYQLIHQGTKMVPCDFIAPAITHNPLSDHHQKLLSNFFAQTEALAFGKSREVVEQEYRDQGKDPATLDYVVPFKVFEGNRPTNSILLREITPFSLGALIALYEHKIFTQGVILNIFTFDQWGVELGKQLANRILPELKDDKEISSHDSSTNGLINRYKAWRG

SEQ ID NO: 340 - protein, 760 aa, Nostoc punctiforme
MSEFTKTLCPYCGVGCGLEVSPPAQLGKATNRDGQGNPTWRVRGDKAHPSSQGMVCVKGATIAESLDKNRLHYPMVRDSLDQEFRRVSWDEAFNLITQRIQTVRFTQGPEALCMYGSGQFQTEDYYIAQKLMKGCLGTNNFDANSRLCMSSAVAGYIQSFGSDGPPCCYEDLELTDCAFLIGTNTAECHPIVFNRLEKYHKKNRKVKMIVVDPRRTPTAEAADLHLAIRPGTDIDLLNGIAHLLMRWNYIDTMFMDDCTSNFPAYAEVIRHYSPEVVARQCGISIEDLETAARYWGESRRVLSLWSMGVNQSSEGTAKVRTIINLHLMTGQIGKPGAGPFSLTGQPNAMGGREAGGLAHLLPGYRVVKNPQHRAEVEEFWGLKPGQISPNPGLTAWDMITGLESDAVGLLWIAATNPAVSMPDLERTKKALLRSPFTIYQDAYYPTETSAYAHVLLPAAQWGEKTGVMTNSERVVTLCQAFRQPPREAKADWEIFAEVGRRLGFEKEFAFANSAEVYAEFVQLTQNRPCDMTGISHEQLTQGPTQWPYPAKKVESVFIDTETGLLSFQPEEETFSDKEAEKKRKYHTLRMGKRLYTDLRFHTPDGRAQFGAYYSKGLAEPPDPDYPFVLTNGRLYGHWHTQTRTGRIEKICKMHPEPFIEIHPRDAAKLGILDNQCVQVRSRRGKAQFPAKVTKAIAPGTVFVPMHWGSLWADNAEANALTHPESCPDSLQPELKACAVQLIPISVEVAVKDYQFQSSQC

SEQ ID NO: 341 - protein, 554 aa, Pseudomonas syringae pv. tomato str. DC3000
MAYYRNPSDVTAMPAWQALTKHRQAMQDFSMREAFTDDPKRFSQFTLSSAGLFLDYSKNLITAETRDLLVALAGEVGLKDAIKAQYYGELVNSSEGRPALHTALRRPVGDKLKVNGVDVIPDVHRVLNQMTELVGRIHDGLWRGYTEKPITDVVNIGIGGSFLGPELVSEALVAYAHKGVRCHYLANIDGSEFHELSMKIRAETTLFIVSSKSFNTLETLKNAQAARAWYLAQGGSEVELHRHFIAVSSNNAAAVAFGIREENIFPMWDWVGGRYSLWSAIGLPIALAIGMSNFKELLSGAYTMDQHFQSAPFDQNMPVLLALLGVWYGNFWNAQSHAILPYDHYLRNITKHLQQLDMESNGKSVRQDGTPALTDTGPVIWGGVGANGQHAYHQLLHQGTQMIPADFIVPIVSFNPVADHHQWLYANCLSQSQALMMGKTRAEAEAELRDKGMSEEEVQKLAPHKVIPGNRPSNTLVVERISPRRLGALVAMYEHKVFVQSVIWGTNAFDQWGVELGKEMGKAVYQRLTGGTEEPADDASTQGLINYFRGRHRG

SEQ ID NO: 342 - protein, 475 aa, Synechocystis sp. PCC 6803
MYEKLQPPSVGSKITFVAGKPVVPNDPIIPYIRGDGTGVDIWPATELVINAAIAKAYGGERKINWFKVYAGDEACELYGTYQYLPEDTLTAIKEYGVAIKGPLTTPVGGGIRSLNVALRQIFDLYTCVRPCRYYPGTPSPHKTPEKLDIIVYRENTEDIYLGIEWAEGTEGAKKLIAYLNDELIPTTPALGKKQIRLDSGIGIKPISKTGSQRLVRRAILHALRLPKAKQMVTLVHKGNIMKFTEGAFRDWGYELATTEFRAECVTERESWILGNKESNPDLTIEANAHMIDPGYDTLTEEKQAVIKQEVEQVLNSIWESHGNGQWKEKVMVNDRIADSIFQQIQTRPDEYSILATMNLNGDYLSDAAAAVVGGLGMGPGANIGDSAAIFEATHGTAPKHAGLDRINPGSVILSGVMMLEFMGWQEAADLIKKGIGAAIANREVTYDLARLMEPKVDKPLKCSEFAQAIVSHFDD

SEQ ID NO: 343 - protein, 583 aa, Xenorhabdus nematophilus
MKTIMKTMSNEKQGPLIVEGKLADSERMKSESNYLRGTISEDLKNGLTGGFEGDNFLLIRFHGMYQQDDRDIRAERAEQKLEPRHAMMLRCRLPGGIITPRQWLGIDQFATESTLYGSIRLTNRQTFQFHGILKNNVKPAHQLLAQMGLDSLATANDVNRNVLCTSNPVQSALHQQAYEWAKKISEHLLPRTNAYAEIWLDKEKIATTDEEPILGKTYLPRKFKTSVVIPPQNDVDLHANDMNFVAIAENDQLIGFNVLVGGGLAMTHGDKNTFPRLASEFGYIPLEHTLAIAESIVTTQRDWGNRTERKNAKTKYTLERVGVETFRQEVEKRAGVKFEPVRPYEFTGRGDQIGWLKGIDDQWHLTLFIENGRLLDYPDKPLKTGVAEIARIHKGDFRLTANQNLIVAGVAENEKARIESIARAHGLIDDGVTSLRHHSMACVSFPTCPLAMAEAERFLPTFVDHVDALMAKHGVSHEHIVLRVTGCPNGCGRAMLAEVGLVGKAPDRYNLHLGGNRNGSRIPRMYQENITSAEILTILDELIGRWATERNENEDFGDFLIRTDIIKPVLNSAIDFYDWQEAV

SEQ ID NO: 344 - protein, 236 aa, Arabidopsis thaliana
MSVKARRISGRLETVVTKVNYAFDPVDDDKIIRNRLLTRTTTTRGEPPLKKLQKKFTSFVLEVDKEEENYNDCGRLAKAFLQELSTFEIPLLKSQAVVEANLREKESFNEVKDETERQIMQAKAEIEDLKKQLEESKIDRQHKEECETIRKLISAQPPRSETEKVIYELNKEIAELEAESTASWRLLELRKKQFALLMHVVDELQNTMEDEQKSLVDEIRSASEDQRNITDAMSVD

SEQ ID NO: 345 - protein, 368 aa, Arabidopsis thaliana
MLGAIHLGVLAACFVLFVPMAMAGWHLSRNKMLFFSGALFISLAVCVHLTPYFPSVSDIVASVSSVVVYDHRISCINEVNQIVWDVKPVPNPESVRRNNGSTKLDYFVKNWDWMKSRKVLSCEFQKLDKFDVSDLLNGSWVVVAGDSQARFVALSLLNLVLGSDSKAMDSVRGDLFRRHSDYSIVVKEIGMKLDFVWAPYEKDLDDLVVSYKKMKKYPDVVIMGTGLWHMLHVNNASDFGFRLRQLSSHVESLVPLTPKEQEGGGSVSGRSVHLFWIGMPVLINGMLNTDEKKEKMSDTVWHEYDRSLGESKILRQMGGPLILLDIQSFTWNCGPQCTLDGMHYDSAVYDAAVHVMLNALLIESHQSL

SEQ ID NO: 346 - protein, 448 aa, Arabidopsis thaliana
MNRALVLLLYVCTVSCLASSKVILMRNNITLSFDDIEANFAPSVKGTGEIGVVYVAEPLDACQNLMNKPEQSSNETSPFVLIVRGGCSFEEKVRKAQRAGFKAAIIYDNEDRGTLIAMAGNSGGIRIHAVFVTKETGEVLKEYAGFPDTKVWLIPSFENSAWSIMAVSFISLLAMSAVLATCFFVRRHRIRRRTSRSSRVREFHGMSRRLVKAMPSLIFSSFHEDNTTAFTCAICLEDYTVGDKLRLLPCCHKFHAACVDSWLTSWRTFCPVCKRDARTSTGEPPASESTPLLSSAASSFTSSSLHSSVRSSALLIGPSLGSLPTSISFSPAYASSSYIRQSFQSSSNRRSPPISVSRSSVDLRQQAASPSPSPSQRSYISHMASPQSLGYPTISPFNTRYMSPYRPSPSNASPAMAGSSNYPLNPLRYSESAGTFSPYASANSLPDC

SEQ ID NO: 347 - protein, 425 aa, Arabidopsis thaliana
  unsure (1)..(425): unsure at all Xaa locations
MVVANDLSSKILPRVLIVSRRTLRKNKYVDFVGEYHLDLIVSSGAVPVIVPRVNGIHSMLQSFEPIHGVLLCEGEDVDPSLYADDELSDLSPEDMEEIKKAHAEDMTIDREKDSIELTLARLCLERNIPFLGICRGSQILNVAAGGTLYQDIDKELGTTMTTTNHIDYDNYDGHRHEARIVEETPLHKLFEEMEIMVNSYHHQGVKRLAQRFVPMAYAPDGLIEGFYDPNRYDPKEGQFLMGLQFHPERMRLPGSDEFDYPGCALVYQEFVKAVIAFQKKQVNATQVEMKRKTTTLVKSFSQAEFLEVRDSFVLHTYRLYVLPLNIGFSDMAEXIMQANTVLSKQQENRLKQMGATVRNSCVYMKRMKMKEEQERAMDKLSAERLSDMLSFHHMMARLCSNAIKRKLLEPEHTDRTIESSFFLNY

SEQ ID NO: 348 - protein, 150 aa, Arabidopsis thaliana
MMNKGGGSGGGSGPTAAAAAAALQKQKALLQRVDTDITSVVDNFNQIVNVARVSDPPMKNSQEAYMMEMRASRLVQAADSLLKLVSELKQTAIFSGFASLNDHVEQRIAEFDQEAEKTNRLLARIADDASASLKELESHYYSSAQRSTLD

SEQ ID NO: 349 - protein, 206 aa, Arabidopsis thaliana
MSRIMGLFDLEKHFAFYGAYHSNPINILIHIIFVWPIFFSVLLLLHSSTPIFDPSQLGFSQSLTLDGVLRFNVGFIFALIYALFYIGLDKKSGFVAALMCFSCWVGSSFLAVRLGSSLALKVGLASQLLCWTGQFVGHGVFEKRAPALLDNLLQAFLMAPFFVLLEVLQSVFGYEPYPGFQARVNAKVESDIKEYRAKKQKKNKIT

SEQ ID NO: 350 - protein, 450 aa, Arabidopsis thaliana
MGKENAVSRPFTRSLASALRASEVTSTTQNQQRVNTKRPALEDTRATGPNKRKKRAVLGEITNVNSNTAILEAKNSKQIKKGRGHGLASTSQLATSVTSEVTDLQSRTDAKVEVASNTAGNLSVSKGTDNTADNCIEIWNSRLPPRPLGRSASTAEKSAVIGSSTVPDIPKFVDIDSDDKDPLLCCLYAPEIHYNLRVSELKRRPLPDFMERIQKDVTQSMRGILVDWLVEVSEEYTLASDTLYLTVYLIDWFLHGNYVQRQQLQLLGITCMLIASKYEEISAPRIEEFCFITDNTYTRDQVLEMENQVLKHFSFQIYTPTPKTFLRRFLRAAQASRLSPSLEVEFLASYLTELTLIDYHFLKFLPSVVAASAVFLAKWTMDQSNHPWNPTLEHYTTYKASDLKASVHALQDLQLNTKGCPLSAIRMKYRQEKYKSVAVLTSPKLLDTLF

SEQ ID NO: 351 - protein, 316 aa, Glycine max
MAVELMGFPKLDEQKAIQEAASEGLKGMKHLIRTLSNQPSHLNTELTDVTVSKFKKLISLLNRTGHARFRRAPVQYSSPHAPVHNTNASTSSIQLPPPPQNPNIPALAQFPTPAPVAVHHTPVTLDFTKPHNALLSSNAKSVELEFSKETFSVSSNSSFMSSAITGDGSVSNGKIFLAPPATSAGKRPAFKKRCHEHREHSDDVSGNSKCHCVKRRKNRVKSTVRVPAISSKVADIPPDEYSWRKYGQKPIKGSPYPRGYYKCSTIRGCPARKHVERAPDDPAMLIVTYEGEHRHAVQAAMQENAAGVVGLVFEST

SEQ ID NO: 352 - protein, 355 aa, Zea mays
MSRTLVQPVGQKRLTNVAVVRLRKHGQRFEIACFPNKVLSWRSRVEKDIDEVLQSHTVYSNVSKGILANSKELAKAFGTDDLTQICIEILEKGELQVSGKEREAQLSSQFRDIATIVMEKTINPETRRPYTITMIERLMHEIHFAVDPNLTSKEQALKVIKKLTEHFPIKRAPLRVRFTAPKPNFPGLMEKIGGWNATIISKDELSTQPSIVCEIEPSLLRSCEERLKDVQGRVEVLSVSTHVESGPSVEQHDSVEVPQAAPVKEPDAVAQISETMQKQSISTESQGNAQGKQQRRCKECDVLVEDKLYREHCKSGWHKHNYTRHKNGLPPLSQEECMVEMELADSKKDLKDYDF

SEQ ID NO: 353 - protein, 129 aa, Zea mays
MAPGKRGKAKGAAAPLPTAAASTGAVGFPGCLRLMPPSTVAISIHAKPGSKVATITEIGDEAVGVQIDAPARDGEANAALVDFISSVLGVKKREVSIGSGSKSREKVVLVQDATLEGVYDALKKSCNCA

SEQ ID NO: 354 - protein, 108 aa, Zea mays
MRGENNIVLLLLLLFAVISPNQVIGSACTPEQKAAILNQCEEYIKPGYPLILPSYASVCCDKVRDVPNRDMNCIVDLLTPPEKAKHGVDKIKRLKDLCDNSPHHQVVV

SEQ ID NO: 355 - protein, 374 aa, Glycine max
MRDICRNFQRGSCQYGERCRYLHVQQQRKPNVNGFGGQSSSHQQQNTNPFGFGSGSGSQQQQKGNPFGFGKHNSSQLNGGPHSENKPNQYKPFENKWNRQSSKPQQNGVKSENNPKQSEHHICTDPENCKRQIAVDFEQEKPLWILTCYSHCKGAPCDIVGDISYEELRASAYEDANRGMSLQSIVEKERNILKSKLVEFDKLLSEPYKIPISSSLGSQTPQSIGANANPFSTSQSNGPLSVSSFSQLSTPLNMGFERPSAPLTNTPTKPGFFGSGGNSLASNTANLNSNGVFGVQSGPYSTPLDLKMFPGSTQETSTAFSNSGPTSMFQTTPDVQLLSQSQVEKVSVDPSIWLKEKWNPGEIPEEAPPDTFVR

SEQ ID NO: 356 - protein, 152 aa, Zea mays
MGSVLLPTLRLKSEVDAAIRDTLDKVLVLRFGRATDATCLHLDDILAKSSWDISKFAMVALVDMDSEEIQVYIDYFDITLVPATIFFFNAHHMKMDSGTPDHTKWIGSFSSKQDFIDVVEAIFRGAMKGKLIVSCPLPPERIPRFQLLFKDV

SEQ ID NO: 357 - protein, 263 aa, Synechocystis sp.
MASSMLSSATMVASPAQATMVAPFNGLKSSAAFPATRKANNDITSITSNGGRVNCMQVWPPIGKKKFETLSYLPDLTDSGGRVNCMQAMELIDSRGRIFGIVSLLDLGAALIILMVAVGIFVLPGSSGKSILAQANAASIELTTIVRGLNVLDPQVVLDEFKAEKTNIIIRNQPAGQVEVVNVQELPRNLAVPQPDGSVKSLPDPRPESNYSRDMLLTLKGRGDFTSTGMVLGGQKVKIGTVLELEGKNYNFNASVVGINQPK

SEQ ID NO: 358 - protein, 446 aa, Xanthomonas campestris
MASSMLSSATMVASPAQATMVAPFNGLKSSAAFPATRKANNDITSITSNGGRVNCMQVWPPIGKKKFETLSYLPDLTDSGGRVNCMQAMAQSKPLFPLNAWYAVAWDHEVKHALTPRKLCNLDVVLYRTTAGAVVALEDACWHRLVPLSMGKLRGDDVVCGYHGLVYNAQGRCVHMPSQETINPSACVRGFPVAEKHRYVWVWPGDPAQADVALIPDLHWSHDPAWAGDGRTIHAKCDYRLVLDNLMDLTHETFVHGSSIGQDEVAEAPFEVVHGDRTVTVSRWMHNIDPPPFWAGQIARHLNYHGKVDRWQIIHFEAPGTIAIDVGVAITGTGAPQGDRSQGVNGFVLNTITPETDTTCHYFWAFMRNYALHDQSLTTLTREGVTGVFGEDEAVLEAQQRAIEAHPDHAFYNLNVDAGGMWARRVIDRLIAREQRAGDLSLRMVG

SEQ ID NO: 359 - protein, 336 aa, Synechocystis sp.
MASSMLSSATMVASPAQATMVAPFNGLKSSAAFPATRKANNDITSITSNGGRVNCMQVWPPIGKKKFETLSYLPDLTDSGGRVNCMQAMAVTDLSLTNSSLMPTLNPMIQQLALAIAASWQSLPLKPYQLPEDLGYVEGRLEGEKLVIENRCYQTPQFRKMHLELAKVGKGLDILHCVMFPEPLYGLPLFGCDIVAGPGGVSAAIADLSPTQSDRQLPAAYQKSLAELGQPEFEQQRELPPWGEIFSEYCLFIRPSNVTEEERFVQRVVDFLQIHCHQSIVAEPLSEAQTLEHRQGQIHYCQQQQKNDKTRRVLEKAFGEAWAERYMSQVLFDVIQ

SEQ ID NO: 360 - protein, 424 aa, Synechocystis sp.
MASSMLSSATMVASPAQATMVAPFNGLKSSAAFPATRKANNDITSITSNGGRVNCMQVWPPIGKKKFETLSYLPDLTDSGGRVNCMQAMVQQLERSQQKLKITPFAKKLGSPLGKQTISTLQINLGKRCNLACSHCHVEASPKRTEEISPEVCEQLIAIIQKFPQIKVVDLTGGAPEMLYGFKPLVEASRKMRKEVIVRSNLTIYFEMGFGDIPAYCAQHQLRVVASLPCYLEDNVDKMRGNGVYEKSIKALQWLNNLGYGKDANLVLDLVYNPPLLTSDKFSLPPAQEPLEQDYKKFLKEHFDINFNHLLTITNLPIGRSKFHLDKHQLHQKYLTFLESNFNPDTVNNLMCRNELSIDYLGNVYDCDFNQMENIPAEDKSSHKLTVADLLRADNLDLIQQVKTADYCYGCTAGSGSSCGGALI

SEQ ID NO: 361 - protein, 189 aa, Arabidopsis thaliana
MSISGAVLSGLGPSFLISGGKRSGVGGGAMKVGRKNVIIAPQRKKSWVSAAVKGAGNSPNDPKWLDDASEKASGYVKEKGSEVGNVSAQKGQELQNQMERAKDYIFGKAGEAMDSVAENAKRASDFVTEKGKEVKEETTSRTDKAKDFIVEKAGDVKDTAMDMRNKTSKYVGDKATEAKEAILPPKTDA

SEQ ID NO: 362 - protein, 258 aa, Synechocystis sp.
MASSMLSSATMVASPAQATMVAPFNGLKSSAAFPATRKANNDITSITSNGGRVNCMQVWPPIGKKKFETLSYLPDLTDSGGRVNCMQAMDVTIYLRWSAYATIASFIFMVLAFVFRWGFRFRLVGVTSFMTVLTIGIFGLGLGMFDRPTVEGSVKFNRVYDNGANQIVISVPVTVSATEVEATLKQAANNYFSLGRISTDGKEQMVIRARTLIHPQPGLTKPLYLGSAYRTLGTKENDQIEIKLDRKALRELERNQAA

SEQ ID NO: 363 - protein, 267 aa, Bacillus halodurans
MASSMLSSATMVASPAQATMVAPFNGLKSSAAFPATRKANNDITSITSNGGRVNCMQVWPPIGKKKFETLSYLPDLTDSGGRVNCMQAMGDEIQEILITEEEIQAKIVELGKQITEEYEGKFPLVIGVLKGAMPFMGDLTKRIDTHLEMDFMDVSSYGKGTVSSGEVKIIKDLDTSVEGRDVLIVEDIIDSGLTLSYLIELFHYRKAKSVKVVTLLDKPEGRKVDLVPDMAGFTVPDAFVVGYGLDYAERYRNLPFIGILKPEVYES

SEQ ID NO: 364 - protein, 554 aa, Saccharomyces cerevisiae
MNNIFHGTEDECANEDVLSFQKISLKSPFGKKKNIFRNVQTFFKSKSKHSNVDDDLINKENLAFDKSPLLTNHRSKEIDGPSPNIKQLGHRDELDENENENDDIVLSMHFASQTLQSPTRNSSRRSLTNNRDNDLLSRIKYPGSPQRSSSFSRSRSLSRKPSMNSSSNSSRRVQRQDGKIPRSSRKSSQKFSNITQNTLNFTSASSSPLAPNSVGVKCFESCLAKTQIPYYYDDRNSNDFFPRISPETLKNILQNNMCESFYNSCRIIDCRFEYEYTGGHIINSVNIHSRDELEYEFIHKVLHSDTSNNNTLPTLLIIHCEFSSHRGPSLASHLRNCDRIINQDHYPKLFYPDILILDGGYKAVFDNFPELCYPRQYVGMNSQENLLNCEQEMDKFRRESKRFATKNNSFRKLASPSNPNFFYRDSHQSSTTMASSALSFRFEPPPKLSLNHRRVSSGSSLNSSESTGDENFFPILSKSSMSSNSNLSTSHMLLMDGLDTPSYFSFEDERGNHQQVSGDEEQDGDFTFVGSDREDLPRPARRSLFPSLETEDKK

SEQ ID NO: 365 - protein, 72 aa, Zea mays
MGKVPVRMKAVVYALSPFQQKVMPGLWKDITTKIHHKVTENWISATLLVTPVVGTYQYAMWYKEQEKLSHRY

SEQ ID NO: 366 - protein, 116 aa, Glycine max
MATLDSDVPMVPAGEPSSSAGPSSKKPKRFEIKKWNAVALWAWDIVVDNCAICRNHIMDLCIECQANQASATSEECTVAWGVCNHAFHFHCISRWLKTRQVCPLDNSEWEFQKYGH

SEQ ID NO: 367 - protein, 459 aa, Zea mays
MFSFARDPAFLYKKKAGSCRTMEEGLVSVDKFSGGSQAYFLTHLHQDHTRGLGAVGGWRHGPLYCSPTTARLLPIRFPGIDASLLRPLAPGASASISLFSPSSGQSLSLHVTAIPALHCPGSLMYLFRGDLGCMLYTGDFRWELGCDEARRAKQDLLDALDGDTIDVLYLDNTYCHPSLNFPPRPVVAEQVIDIIRSHPDHEVIIGVDTLGKEDLLLHISRALQTKIWVWPQRLQTIHLLGIDENRDIFTTQTSLTRIRAVPRYSVTIDNLEALNTVCPTIGILPSAIPCLWKSSEGKAKSKGRSSVKSIRCSGRGEGLTEMDCNPLSPPKLFDKDSYTLPYSEHACFSELEDFMHTLSPLTVSGIVSSSFCYVNPRHHFRHLCLDNNVNDDTDRTPIKNKGKDNDKLTPKSWRNGSVTPKERKVRISSSSLYRSKVTMKRKECCGARINDTEEHIGVT

SEQ ID NO: 368 - protein, 279 aa, Arabidopsis thaliana
MVNLKDEVEHQQEMEDIHNPRPLKKQDSLLSVSVPFLQKLIAEFLGTYFLVFTGCASVVVNMQNDNVVTLPGIAIVWGLTIMVLIYSLGHISGAHINPAVTIAFASCGRFPLKQVPAYVISQVIGSTLAAATLRLLFGLDHDVCSGKHDVFIGSSPVGSDLQAFTMEFIVTFYLMFIISGVATDNRAIGELAGLAIGSTVLLNVLIAAPVSSASMNPGRSLGPALVYGCYKGIWIYLVAPTLGAIAGAWVYNTVRYTDKPLREITKSGSFLKTVRIGST

SEQ ID NO: 369 - protein, 221 aa, Zea mays
MAAATSMGHPYAPAELDLPGFVPLKLSQVEILVSYLGASVFVFLAVWLVSGRCVRLSKTDRLLMCWWAFTGLTHIMIEGPFVFTPDFFKKENPNFFDEVWKEYSKGDSRYVARDTATVTVEGITAVLEGPASLLVVYAIASRKSFSHILQFAVCLGQLYGCLVYFITAYLDGFNFWVGPFYFWAYFIGANSFWIWIPMLIAVRSWKKTCAAFQAEKVKKTK

SEQ ID NO: 370 - protein, 237 aa, Zea mays
MSSSPLPTTSGGAHIFPSPPRPRHRRCCQVIVAAAASPRSYGVGRRAVSLAGVAAWLATIVGRADAASPFDKYVKRKKLEPLETYVPAVLLTIDQFVDLEKSLEFEKPRYDESRSLLRSGPASSLRVNIRAVAQYASSNGQGKAASDAVDECLRALEDLDSLLLHASRNDPSASVETMRSKISVALAALDNLLQTVPSAVLDKGKAIADAYRTPVDDYVEENAAELDPRLKQLEGIL

SEQ ID NO: 371 - protein, 152 aa, Zea mays
MAAEEDVKQRQIIENRARNISHNVRCTECGSQSIEDSQADVAILLRKLIRDEIKAGKSDKEIYKKLEDDYGETVLYAPKFDLQTAGIWLSPVIVGGIAAGIWAYQRHRQRTNVHIMALNLVRGVPLTPREKETMLDILTPPPAPRKWWWPGK

SEQ ID NO: 372 - protein, 78 aa, Zea mays
MGLWTLLEGFLLLANALAILNEDRFLGPRGWSMSEVSGNGQTKSFKGQIVGLIYATQFLRMPLIALNVLIIVVKLVSG

SEQ ID NO: 373 - protein, 188 aa, Zea mays
MVDAGDITAGGPPRAHEEEQAGTPAYGSVVLGGTFDRLHDGHRRLLKASADLGRDRIVVGVCTGPMLAKKEYAELIEPVDKRIKGVEDYIKSIKPELIVQVEPIEDPYGPSITDEKLDAIIVSKETLNGGLAVNRKREEKGFPLLKVEVVDLLSGGVEGEKLSSSALRKLEAEQAQQSETKSGSLEAS

SEQ ID NO: 374 - protein, 194 aa, Glycine max
MCGGAIIADFIPRQRPRTLTASELWPKRSEPQPQPPPPPVKRQRKNLYRGIRQRPWGKWAAEIRDPRKGVRVWLGTFNTAEEAARAYDKEARKIRGKKAKVNFPNEDDPLPQYGSCKSLNLEFGYDLNQTGLFPSSNADENCGSHVAYSVTEANNKVEKLSEELMAYENLMRFYQIPENVVGDLWAFPDTSPPL

SEQ ID NO: 375 - protein, 244 aa, Glycine max
MENIGEEYKHYWETNMFLQTQELDSWGLDEALSGYYDSSSPDGAASSAASKNIVSERNRRKKLNERLFALRSVVPNISKMDKASIIKDAIEYIQHLHEQEKIIQAEIMELESGMPRKSPSYGFEQEQLPVVLRSKKKRTEQLYDSVTSRNTPIEVLELRVTYMGEKTVVVSLTCSKRTDTMVKLCEVFESLKLKIITANITSFSGRLLKTVFIEANEEEKDHLQIKIQTAIKALNNDPLSPMSI

SEQ ID NO: 376 - protein, 287 aa, Glycine max
MAIQDQNGFFRSQGGPPEEGGVSLSSGHSVTHIQLNDQFSCGNDYALKVRKPYTITKQRERWTDEEHKKFLEALKLYGRAWRRIEEHVGTKTAVQIRSHAQKFFSKVLHDPTGNNTNTVESIEIPPPRPKRKPMHPYPRKLVETPNKEISIPEQPMKSNSLKSSDFDQENQSPKSVLSGVGSDSLGSSDSDTPNGSLSPMSSISGFHTSSFTRAKPKTTTSEEEAGMDTDSTHDEKPLMKFKLPPNGCVSIKEDNTAEESSGRTFKLFGMTLFVTDTCKPSPTIEEC

SEQ ID NO: 377 - protein, 201 aa, Zea mays
MSAAARVLPKAVTFVTGNAKKLEEVRAILGSSVPFQSLKLDLPELQGEPEYISKEKARIAASQVNGPVLVEDTCLCFNALKGLPGPYIKWFLEKIGHEGLNNLLKAYEDKSAFAMCIFSLALGPGEEPITFVGKTAGKIVPARGPNYFGWDPVFQPDGFEQTYAEMPKSVKNNISHRGKALALVKEHFASASYTVQSNDST

SEQ ID NO: 378 - protein, 232 aa, Glycine max
MGRGKVVLERIQNKINRQVTFSKRRNGLLKKAFELSVLCDAEIALVIFSSRGKLFQYSSTDINRIIEKYRQCCFNMSQTGDVAEHQSEQCLYQELLVLRVKHESLQRTQRNLLGEELEPLSMKELHSLEKQLDRTLAQARKHLTQKLVSRIDELHGKVHSLEQANKHLESQERGKCTQICEGSPNGHILQDKQVNQFEYGTAGSFRLQQEQTTASKGKEIETIEDWLRPKQS

SEQ ID NO: 379 - protein, 248 aa, Glycine max
MGMAAAESQFHVLAVDDSIIDRKLIERLLRTSSYQVTTVDSGSKALEFLGLRENDESNPSIPSVCPNNHQPQEVEVNLVITDYCMPGMTGYDLLKKIKESSSLRNIPVVIMSSENVPSRINRCLEEGAEEFFLKPVRLSDLNKLKPHMKKTKFKDQKQETVERFEDSEVQQQQSQQQIIIQNEHHQAPKLQVLQPESESESHPQPTIEQQQQILQQANNNNKRKTMEQGLSPETDRTRPRYSGIATVV

SEQ ID NO: 380 - protein, 405 aa, Zea mays
MQRNGVVECSVCRSRVVVPSPRSVSRAYDKHRNKMSSKFRALNVFLVVGDCILVGLQPILVFMSKVDGKFQFSPISVNFLTEVMKVIFAVVMLIIQSRKQKVGEKPLLARSTFIQAARNNVLLAVPALLYAINNYLKFIMQLYFNPATVKMLSNLKVLVIAFLLKFIMRRRFSVIQWEALALLLIGISINQLRTVPVGNTAFGLPVTAIAYIYTLIFVTVPSVASVYNEYALKSQYDTSIYLQNLFLYGYGAIFNLLGILGTVLFQGPESFNILRGHSRATIFLICNNAAQGILSSFFFKYADTILKKYSSTVATIFTGLASAAFLGHSLTINFLLGISVVFISMHQFFSPLAKVKDDKPADSIELEDTQNDRPSESSFVNMTAGAADDASHRIGTDERQPLLPI

SEQ ID NO: 381 - protein, 186 aa, Glycine max
MGKKKVEIKRIENKSTRQITFSKRRNGLMKKARELSILCDAKVALLIFSSTGKLYELCNGDSLAEVVQQYWDHLGASGTDTKSQELCFEIADIWSGSAFSQMIKRHFGVSELEHLSVSDLMELEKLTHAALSRIRSAKMRLMMESVVNLKKKIEALEKTNDVNNVVTRSIDCDQTDGVTHNLFPGL

SEQ ID NO: 382 - protein, 373 aa, Glycine max
MASSDPISSRHYTYNRKQKSLGLLCTNFLSLYNRDTVHLIGLDDAATRLGVERRRIYDIVNVLESIGVLSRKAKNQYTWRGFAAIPLTLQDLKEEGLKENSNSLRGPGNHDKVSDDEDDEETQSNPAATGSQSDKLNPNSTLPKPLKNENRREKSLALLTQNFVKLFVCSNVELISLDEAAKLLLGDAHNTSVMRTKVRRLYDIANVLSSMNLIEKTHTMDTRKPAFRWLGSEGKTWDETLHKSNLNDSRKRAFGSDITNISFERNKVELFTSGDLNPNPKKPRMENGSGLGEADENNLKQGIKQASKSYEFGPFAPACVPKVGASQNNNMKQVHDWGSLATAHSPQYQNEASPSLLQQGHCTVKASSCASFV

SEQ ID NO: 383 - protein, 145 aa, Zea mays
MMRGVGGPLLTIGDLLSDLAVDDPLVGVGDASVPSSPSAAQQAGKANPSDLSRLFEEHYDDLMKALQEKDPSWPSLMLKLCATLKTADRLMSCADTNAEQLLEKVKALEGVLDRSGHAVAEIVEALQRLGLANDGHGSQSKSASK

SEQ ID NO: 384 - protein, 142 aa, Zea mays
MADDDYNEIDMGYEDEPPEPEIEEGAEEEPENNEDAPDDVIGGEGEDKEQEKTKRERKTTKYMTKYERARILGTRALQISMNAPVMVELEGETDPLEIAMKELRARKIPFTIRRYLPDGSYEDWGVDELIVEDSWKRQVGGD

SEQ ID NO: 385 - protein, 184 aa, Zea mays
FITSLYKKAGSCRTMQRHVASGRPSGTDGSDFSYRMVVESRYQRVAEGRSRLARLILVQALHLVAGGLLLLLSLSKGAAVNKFAVLSMAAGFLAIVVGELGRMRTMSVLLRLYTSLSSIAVAFSVTCIIRSELFLKVMKQNTEAITSYEMLDAVRVALGILLQMVVIATTTRLLQNMSPPKRAS

SEQ ID NO: 386 - protein, 314 aa, Glycine max
MYPRLIHPHDGIVTQDELQGGAASNLSHAHKGDPCLVLTADPKPRLRWTQDLHERFVDAVTQLGGASKATPKAIMRTMNVKGLTLFHLKSHLQKYRLGKQSGKDVGEGCKDGSYLLESPGADNTSPKLPTPDTNEGYEIKEALRAQMEVQSKLHLQVEAEKHLQIRQDAERRYMAMLERACKMLADQFISATVIDTDSQKFQGIGSKAPRGTLVDPLGFYSLPSTEVAGVNVPEEEILPSLPPQRADCSTESCLTSHESSGGLALEGSPGEGKRRMLGMDSMAAPLIWSEAKMRTQAINVAQGNHPQGITRYGM

SEQ ID NO: 387 - protein, 453 aa, Glycine max
MAAQKRSFPDAPNDNNRHAKHHHEEAKTEEEEEEEEEEAQQQQQHDEEEEEEDNNYKSDDSPPEDKSEYVFVELLEIRKEVQCPICLGIIKKTRTVMECLHRVCRECIDKSMRLGNNECPACRTHCASRRSLRDDPNYDALIAALYPNIEKYEQEELEFREEDKNRNKQASIAKVVQRQSEALVKRRRDTPGSFVTRSQRNQRNVLSRRQNQGMDNQGSEDNEEENDNNEKDSSSTDERCTELRQRRRKRRTRGRPSQPSSSTASPDGGCIESDMDIRISSRLVSKPQKLTWGRGGFRSHTRHGSGNGSNSKSSRSSRLAKLVDYLHSLNENTDELDVHLILLSLDKQITPSLQQPHLCCRPTLSVKHLCEYVAHQTPLLLEEVEILAVKGCCSTVCDKSFDETSSSDELTTLVIDPSKDELETLQGHESLAGIKSKCISKREHLILAYRRKE

SEQ ID NO: 388 - protein, 435 aa, Glycine max
MGLGNDEEEDNNNNNNNNKNNNDKVVDDGDAGGGKSFGSVSCSICLEVVADNGDRSWSKLQCGHQFHLDCIGSAFNIKGAMQCPNCRKIEKGQWLYANGCRSYPEFSMDEWTHDEDLYDLSYSEMSFGVHWCPFGNLARLPSSFEEGEFSSSAYHDVLGQHAIFAEHTAVSSASHPCPYIAYFGPIHPSSSNSGGTVSEASNFNHWNGSSVPSDMPTSYTFPAVDLHYHSWEHHSPPFSTASSRLVAADQPSVSPGSQRPARGGSDVPRSGSFMHPFLVGHRVGSSVASSMIPPYPGSNARTRDRVQALQAYYQPQQPPNSTTMRTPIASGTRRSSSHNGSPQLAPITTSSDQSGGFFLIPSSSSGHNFQEENHHLPNHFHAWERDHLPSLSLSHVDRDSGWRAYHQATSRSDPGTRSSSFRLRHGSDRTPSQNR

SEQ ID NO: 389 - protein, 242 aa, Glycine max
MATMLTKEHGLNLKETELCLGLPGGGGGGGGGGEVETPRATGKRGFSETVDLKLNLHSKEDLNENLKNVSKEKTLLKDPAKPPAKAQVVGWPPVRSYRKNMMAVQKVSTEDVAEKTTSSTANSGAFVKVSMDGAPYLRKVDLTMYKSYKELSDALAKMFSSFTMGNYGAQGMIDFMNESKLMDLLNSSEYVPSYEDKDGDWMLVGDVPWEMFVESCKRLRIMKGSEAIGLAPRAMEKCKSRS

SEQ ID NO: 390 - protein, 360 aa, Glycine max
MGRPPCCDKVGIKKGPWTPEEDIILVSYIQEHGPGNWRSVPTNTGLSRCSKSCRLRWTNYLRPGIKRGNFTPHEEGMIIHLQALLGNKWAAIASYLPQRTDNDIKNYWNTHLKKKLKKFQAALDPHSASDSTASGQFLPKSFSDRRSTLDISSNNNNNHGSSIRLSHHQSQSSSTTTYASSTENISRLLEGWMRSSPKQLNKGSIISQYDEDHQLQGINDDDDNNNNNFVSTTKLVNLHHLHQHKIRNKDHEQEGGGVDNNMVSHHEEFDSILSFENQNNAAWDKSTCDSMPEKSSEASAAADHHHHHHHDIAAAHERNNVRQKSENSSGAPPLSFLEKWLLDENVGHQVEEMMELSPMF

SEQ ID NO: 391 - protein, 370 aa, Glycine max
MAKKSQLRTQKNNVTTNDDNNLNVTNTVTTKVKRTRRSVPRDSPPQRSSIYRGVTRHRWTGRYEAHLWDKHCWNESQNKKGRQVYLGAYDNEEAAAHAYDLAALKYWGQDTILNFPLSNYLNELKEMEGQSREEYIGSLRRKSSGFSRGISKYRGVARHHHNGRWEARIGKVFGNKYLYLGTYATQEEAATAYDLAAIEYRGLNAVTNFDLSRYIKWLKPNNNTNNVIDDQISINLTNINNNNNCTNSFTPSPDQEQEASFFHNKDSLNNTIVEEVTLVPHQPRPASATSALELLLQSSKFKEMMEMTSVANLSSTQMESELPQCTFPDHIQTYFEYEDSNRYEEGDDLMFKFNEFSSIVPFYQCDEFES

SEQ ID NO: 392 - protein, 345 aa, Glycine max
MDPKGSKQQPQQSQEVVPNFLSLPQQQQGNTNNNNMGENKPAEVKDFQIVVAENKEESKKQQQQLAPKRSSNKDRHTKVEGRGRRIRMPALCAARIFQLTRELGHKSDGETIQWLLQQAEPSIIAATGTGTIPASALAAAGNSLSPQAASLSSSLHQHQQKIDELGGSGGSSSRASWQMVGGNLGRPHLGVGVATAAGLWPPHVSGFGFQTPPTTTTPTTTTSSSGPSNATLATESSNYLQKIAFPGFDLPTSATNMMGHMSFTSILGGGGGGGAQHMPGLELGLSQDGHIGVLNQQALNQIYQQMNQAGRVHHHQHQHHHQHHQQQQHHQQTPAKDDSQGSGGQ

SEQ ID NO: 393 - protein, 436 aa, Glycine max
MFYAVPENYVHQPSNSNYDRQAFSAADGGFIDLTMGNGRGPHKRKSPGIPPVCERGSTSRYSNATNAADRPTSSELQPEKPNMDSLYMPWDHVNMTPTFRGRGLSIRGEGPLRNVRSRSALDLESNLARTHLSNTHPHNSYSTGLPIDHSNMVDLSTQTSGTLTRDWSPMSICPPHGRVSSSDANAFNHEASHFLIGSSSSNAPVDVGGFHNEFGTSRNPTAPQSFHNNLTQTARGVHSNYSQRSTPTFRASSSLRLGRVAPSDDGLHMVSESYSSRQPRPLTTVGWQNNNRNGRSRIPSDRYRSLDDEGFMIVDRTSLYGPRNMLDRHRDMRMDIDNMSYEELLALGERIGHVSTGLSEDLISKYLTETIYCSSEQSQEEACAICLEEYKNMDDVGTLKACGHDYHVGCIRKWLSMKKVCPICKASALPEDKKGK

SEQ ID NO: 394 - protein, 349 aa, Glycine max
MPAMKKNPELTCIGSVFNMLGKELGEPVDFELPDSFNKSKPMQYTYIKRNIYLTKKVKRSRFDDDGIFCSCTPSPGSTSVCGRDCHCGMLLSSCSSGCKCGSSCLNKPFQNRPVKKMKLVKTEKCGSGIVADEDIKLGEFVIEYVGEVIDDKTCEERLWNMKHSGETNFYLCEINRDMVIDATYKGNKSRYINHSCCPNTEMQKWIIDGETRIGIFATRDIQKGEHLTYDYQFVQFGADQDCHCGAAECRRKLGVRPTKSKLSSDAALKLVAYQVYQNGGLQIGSSRVVDQPKCLHNCIGEVIRIKHLENERFGIIKRFDKYSRKHSIMFEDGCVEIYDMSKEDFELVR

SEQ ID NO: 395 - protein, 371 aa, Glycine max
MGKKKKRVSSKVWCYYCDREFDDEKILVQHQKAKHFKCHVCHKKLSTAGGMAIHVLQVHKESVTKVPNAKPGRESTDIEIYGMQGIPPDILAAHYGEEEDDVPSKAAKVDIPPTQLVGGMIPPPLGTGYPPRPTLPTMPPMYNPAVPVPPNAWMVPPRPQPWFSQPPAVSVPPAAPYTQQPLFPVQNVRPPLPATAPALQTQITPPGLPTSAPVPVSQPLFPVVGNNHTTTQSSTFSAPPLPSSVPSVTSVMSANVPVDTHLSSNSSVTSSYQAIGIPGGAASNSHSYASGPNTGGPSIGPPPVIANKAPATQPATNEVYLVWDDEAMSMEERRMSLPKYQVHDESSQMSSIDAAIDKRILESRLAGRMAF

SEQ ID NO: 396 - protein, 308 aa, Glycine max
MSSGTTYWCYTCRQPIWLEGREGFCPYCDGGFVQELNEMRGVARQHGFSTRMEDVHQMPDIMDAVRAVMEQRGSEPSIRVRDAVDNFMRQRMAGRYTNFDVRRRSDSGSGSGSILIPDETWGVFSSGPYLIFHGQAPGFTNSNGSSRGGPRGVDFGDYFLGPRLEGLIEQHISNDRLGPPPALRSSIDAMPTIKITHEHLESDSHCPVCKERFELGSKARKMPCNHIYHSDCIVPWLVLHNSCPVCRVELPPKEHTSSRGRRIWGGRNGNDSGSDNDISRGRENTQMNNGRRNLLSYLWPFRSSSSST

SEQ ID NO: 397 - protein, 309 aa, Glycine max
MNRGIEVLSPASYLRSSNWLFQESLGTRWTPQENKLFENALAVFDKDTPDRWLKVAALIPGKTVGDVIKQYRELEEDVSVIESGFIPLPGYTAADSFTLEWVNNQGFDGLRQFYGVTGKRGASTRPSEQERKKGVPWTKEEHRQFLMGLKKYGKGDWRNISRNFVTTRTPTQVASHAQKYFIRQLSGGKDKKRSSIHDITMVNLPEAKSPSSESNNRPYSPDHSVKDVNPPSQNQRLSTTMVIKQEHDWKLPCETVPMLFNSTNGNMFMTPLCGISSYGSKPLQEQYFLSGCQFGPYDTIMQMPSMQNQ

SEQ ID NO: 398 - protein, 460 aa, Glycine max
MGSRSRTVNVNTKDTDKVLNGMPSYAPPLPSSSNSMAMEATNAHPSRISEFGTLEQSLGFRVEDTINLSRNPMFNQMKSNSQALGADIQFGALNKSIATSDINLSAAIAASQALVFQKDSQPTLASTSAGRENWGETNMADASPRTDTSTDDTEDKNQRPERDESSGSKDKSDQKTLRRLAQNREAARKSRLRKKAYVQQLESSRLKLTQLEQELQRSRQQGIFISSTGDQAQSMSGNGAMAFDVEYARWLEEHNRQTNELRAAINSHAGDIELRTIVDNFMTQFDDIFRLKGIAAKADVFHILSGMWKTPAERCFMWIGGFRSSELLKLLLSQLEPLAEQQLMGIYNLQQSSQQTEDALSQGMDALQQSLSETLANGSPSSSGSSGNVANYMGQMAMAMGKLGTLEGFLHQADNLRQQILQQMLRILTTRQSARALLAISDYFSRLRALSSLWLARPRE

SEQ ID NO: 399 - protein, 366 aa, Glycine max
MKTVLFLLLVSALIPIAVAQPNDFSDANLNEFNSSIAIIIIILVIAFFLMAFFSIYVRHCADSPSNTVRPLTTARSRRAARGLDPALIQTFPILEYSVVKIHKIGKEALECAVCLCEFEDTETLRLLPKCDHVFHPECIDEWLSSHTTCPVCRANLLPTESEDAIANANANGVVPVPETLTRDIESQNDAVQAAPEQQNAEADPVLPEPEVVSLDKTLNRNRTRGSRSNRPRRFPRSHSTGHSLVQPGENTDRFTLKLPLEVRKQLINRQLQRASSLIVLPREGSSRQGYRTGGEGSSRAKISRRLDRSLKSDRWIFSMAAPFFARALSIRSPRVRNNDVEGAASSSSPTAPIMPPTAVDSARPPV

SEQ ID NO: 400 - protein, 549 aa, Glycine max
MNASIIDPLQGDFPEVIEEYLEYGCMKCIAFNRRGTLLAAGCNNGSCVIWDFETRGIAKILRDDECSSPITSICWSKYGHQILVSAADKSLILWDVMSSKKITRIVLQQTPLQARLHPGSSTPSLCLACPLSCAPMIVDLNTGNTTLLKVSVLETCNGPTPTPPSRNKCSDGITSFTPTAACFNKYGTLVYVGNSKGEILAIDYKNGDVRAVVPISGGSVVKNIVFSRNGQYLLTNSNDRIIRIYENRLPLKDEVRALDDLSENHNVLNNIENLKAVGSKCLTLFREFQDSITKVHWKAPCFSGDGEWVVGGSASKGEHKIYIWDRAGHLVKILEGPKEALIDLAWHPVHPIVVSVSLNGLVYIWAKDYTENWSAFAPDFKELEENEEYVEREDEFDLIPETEKVKGPDVNEDEEVDIITVEKDAAFSDSDMSQEELCYLPSTPSRDVPEQQEKCVESSSKLLDSNNTGSPLSEEAGPNGHMMNHASSPLEDDAGRMKRKRKPSEKVLELQAEKVKKPSKSSKLAKPKSKSLADQDNGNGFHGDGLYDE

SEQ ID NO: 401 - protein, 179 aa, Glycine max
MSRSSAMHGITSTNNKLKGVRRRKWGKWVSEIRVPGTQERLWLGTYATPEAAAVAHDVAVYCLSRPSSLDKLNFPETLSSYSVQLRDMSPRSVQKVASDVGMDVDARNIVAGKTSTVGAETNCESDERTSTASVCNVVGEGGADHSDVFWWDDDGGSWHGSGGDSTERDALSISIEDYL

SEQ ID NO: 402 - protein, 501 aa, Zea mays
MAEAGYFRPLIQYLKQGSDMNKVLMATAISKMFLSEHMKSSLGEDGAIEPLVDMFKHGNLEAKHSALGALCNLSSSLQNAELLINSGITGPLLQLLFSVTSALMALREPASAILAAIAQSERILLHKDVAPQMLSLLNLSSPVIQLHLLRALNSISGHANAKRARSKIRQNGGVQLLLPFLTEKNVGIKIAALHLMFHLSKDSSQELAEQFRETHLDIFVKIISSPTSRDEKAAAVGILSNLPATDKKATEILMRANLLPILITLFEANMAAAVTPQRMWLLEGIAGVFIRFTVTWDRKLQSSAVGHGVVPCLVKLLSEGSVDAKSKAATSLAQLSQSTMALRKSKTPRWLCVPPSAESYCTVHSCQCTVKSTFCLVKAGAVHPLVQTLEGEERGADGAALEALGTLMEDEVWENGSRVIERASGIHALLRIAEAGEPSSQDKAIWMLERMFRLEAHRERYGEIAQALLIDLAQKGDPALKPMIGKILAHLELLQTQSSYF

SEQ ID NO: 403 - protein, 447 aa, Chloroflexus aurantiacus
MAAPAVRHIRLVTEIPGPRSRALLARRDAAVVAGLGRATPIAIASGQGALVTDVDGNTLIDFVSGIGTLAVGHCPPEVVQAIQAQAEQLIHLSALVGTYEPYVALCERLNALAPISEPCKTLLSNSGAEGVENAIKFARAATGRPAIIVFDGAYHGRTLLTLSLTSRTYFKKKFGPFAPEIYRAPFPYAYRMGMSEAEAVEQCWAAFERMQIAGVDPETVAAVLIEPVQGEGGFIPVPVEFMRRLREFCTRNGSLLIVDEVQSGFGRTGTLFAIEQFGVEPDIIVAAKSIAAGMPLAATIGRARIMDCAHYGGVGGTYGGNPLACVAALATIDLIERERLLERAKVIGQQIRARFEPLLTDDSLDPLVGDVRGLGAMIGIELVKDRRKRTPAAAEEVLAILGRALERGVLAMRAGLYVNCIRLLVPLVITDDQLDEGLEVLIGAMRH

SEQ ID NO: 404 - protein, 540 aa, Chloroflexus aurantiacus
MARPRPVVLIIMDGWGIAPPGPGNAADLADTPHVDAWMANCPFTTLGASGLDVGLPEGQIGNSEVGHLNIGAGFVVYQELTRISKAIADGDFFTNPVLLQAIEHVKQRNSALHLMGLFGPGGVHAHEDHLHALLELAHRHHLQRVYLHLFLDGRDVLPRSALGFLDTLEGVIARLGVGTIATVSGRYYAMDRDKRWERTGRAYAALVDGVGEKAPSARAAIEASYARDVSDEFVLPTVIVTASGEPTATVRDGDAVIFTNFRPDRGRQLTRAFVDPDLNERIRQHYERQKAEGQPLPATIWQRERQLRDLCFVTMTQYEEGLPVLVAFPPRYVTNPLAAVISQAGLRQFHIAETEKYPHVTFFLNGGREEPFPGEDRQLIPSPKVATYDLKPEMSAPEVTEALLAAIDSDQYDFIVVNYANPDMVGHTGSIPAVIKACEAVDAGLARVVPAILERGGVALVIADHGNAEQMIDPETGGPHTAHTTNPAPCFLIGGAGYGKDAIELRHGGRLADVAPTLLELLELEPSPDMTGQSLIVRRA

SEQ ID NO: 405 - protein, 408 aa, Arabidopsis thaliana
MFGGKSHILRGSVSLALIVLILLVIILLVSEENPLRDSLFEVKRQFSSSSSSSSSVCNFAKGKWVEDRKRPLYSGFECKQWLSSMWSCRIMGRPDFSFEGYRWQPEGCNMPQFDRFTFLTRMQNKTIAFIGDSLGRQQFQSLMCMASGGEDSPEVQNVGWEYGLVKAKGALRPDGWAYRFPTTNTTILYYWSASLSDLVPMNNTDPPSLTAMHLDRPPAFMRNYLHRFDVLVLNTGHHWNRGKIEGNHWVMHVNGTQVEGEYLKDIRNAKDFTIHSVAKWLDAQLPLHPRLKAFFRTISPRHFKNGDWNTGGNCNNTVPLSRGSEITGDDGSIDATVESAVNGTRIKILDITALSELRDEAHISGSKLKPRKPKKASNVTSTPTINDCLHWCLPGIPDTWNELFIAQI

SEQ ID NO: 406 - protein, 410 aa, Arabidopsis thaliana
MAKRQLLMLGIRTSFHTIAAVLVAGLIFTAVFLSRNSLPKENPQSHGVTDRGGDSGRECNLFEGKWVFDNVSYPLYKEEDCKFMSDQLACEKFGRKDLSYKFWRWQPHTCDLPRFNGTKLLERLRNKRMVYVGDSLNRGQWVSMVCMVSSVITNPKAMYMHNNGSNLITFKALEYNATIDYYWAPLLVESNSDDPTNHRFPDRIVRIQSIEKHARHWTNSDIIVFNSYLWWRMPHIKSLWGSFEKLDGIYKEVEMVRVYEMALQTLSQWLEVHVNPNITKLFFMSMSPTHERAEEWGGILNQNCYGEASLIDKEGYTGRGSDPKMMRVLENVLDGLKNRGLNMQMINITQLSEYRKEGHPSIYRKQWGTVKENEISNPSSNADCIHWCLPGVPDVWNELLYAYILDHHSS

SEQ ID NO: 407 - protein, 413 aa, Arabidopsis thaliana
MSIQTTADSRMIQSIFQVVLVSLLVLGSVRWILDELKSKESRISKLYGFRQKEAVFVTKEDQLDESCNVFEGQWVWDNVSYPLYTEKSCPYLVKQTTCQRNGRPDSYYQNWRWKPSSCDLPRFNALKLLDVLRNKRLMFIGDSVQRSTFESMVCMVQSVIPEKKKSFHRIPPMKIFKAEEYNASIEYYWAPFIVESISDHATNHTVHKRLVKLDAIEKHSKSWEGVDVLVFESYKSLEGKLIRICRYGDTSEVREYNVTTAYKMALETWAKWFKTKINSEKQKVFFTSMSPTHLWSWEWNPGSDGTCYDELYPIDKRSYWGTGSNQEIMKIVGDVLSRVGENVTFLNITQLSEYRKDGHTTVYGERRGKLLTKEQRADPKNYGDCIHWCLPGVPDTWNEILYAYLLRSHRNFF

SEQ ID NO: 408 - protein, 579 aa, Arabidopsis thaliana
MKFMKLGSKPDSFQSDEDCVRYVATELATDVVVIVGDVKFHLHKFPLLSKSARLQKLIATTTTDEQSDDDEIRIPDIPGGPPAFEICAKFCYGMAVTLNAYNVVAVRCAAEYLEMYESIENGNLVYKMEVFLNSSVLRSWKDSIIVLQTTRSFYPWSEDVKLDVRCLESIALKAAMDPARVDWSYTYNRRKLLPPEMNNNSVPRDWWVEDLAELSIDLFKRVVSTIRRKGGVLPEVIGEALEVYAAKRIPGFMIQNDDNDDEEDVMEQRSLLETLVSMLPSEKQSVSCGFLIKLLKSSVSFECGEEERKELSRRIGEKLEEANVGDLLIRAPEGGETVYDIDIVETLIDEFVTQTEKRDELDCSDDINDSSKANVAKLIDGYLAEISRIETNLSTTKFITIAEKVSTFPRQSHDGVYRAIDMFLKQHPGITKSEKKSSSKLMDCRKLSPEACAHAVQNERLPLRVVVQILFFEQVRATTKPSLPPSGSHGSSRTTTEEECESVTATEETTTTTRDKTSSSEKTKAKGVVMSRIFSKLWTGKDKDGVGDVSSSDTSESPGSVTTVGDKSTPSTRRRRSSS

SEQ ID NO: 409 - protein, 334 aa, Saccharomyces cerevisiae
MLSRVAKRAFSSTVANPYKVTVLGAGGGIGQPLSLLLKLNHKVTDLRLYDLKGAKGVATDLSHIPTNSVVKGFTPEEPDGLNNALKDTDMVLIPAGVPRKPGMTRDDLFAINASIVRDLAAATAESAPNAAILVISNPVNSTVPIVAQVLKNKGVYNPKKLFGVTTLDSIRAARFISEVENTDPTQERVNVIGGHSGITIIPLISQTNHKLMSDDKRHELIHRIQFGGDEVVKAKNGAGSATLSMAHAGAKFANAVLSGFKGERDVIEPSFVDSPLFKSEGIEFFASPVTLGPDGIEKIHPIGELSSEEEEMLQKCKETLKKNIEKGVNFVASK

SEQ ID NO: 410 - protein, 381 aa, Eremothecium gossypii
MQASTYYVISNMPHTTADSSTQRVRVAVLGAAGGIGQPLSLLLKTQLAQVLGDANASLELALYDVAADALAGVAADLSHVNTPVEVSHHVPSSREDEEALREALTGASVVVIPAGVPRKPGMTRDDLININAGIIKTLAKGIAGACDLEKVFVLVISNPVNSLVPVMVRQLIRHAEAKQAPHAGVERRVFGVTQLDMVRASAFVRSLGELGNEVPSVPVIGGHSGETILPLFGPVQQRLQFSLEQRKKLTHRVQYGGDEIVAAKKGAGSATLSMAYAAYVVAERFTNLVLGNVSEIQETLYVSLYDRENKPIAEGAAELLSNIGETPYFAVPVKISADAGVVRVEHEVWQQLDDYDREHLLPACLEGLRKNIETGETLGSN

SEQ ID NO: 411 - protein, 243 aa, Zea mays
  unsure (1)..(243): unsure at all Xaa locations
MATTTDLGFEATELRLGLPGGGGGGEPALGGEGRSSSSASGKRGFAETIDLKLKLEPAAVVEAEEEEEDHGVAVALEKEEEAGKMKRSPSQSSVAAAAAAVLADPAEKPRAAKAQVVGWPPXRSFRKNIMSVQSDKGAGKDAAAANGDKSSAAXAGGAAFVKVSLDGAPYLRKVDLKMYRSYQQLSKALENMFSSFTIGSCGSQGMNGMNESKLVDLLNGSEYVPTYEDKDGDWMLVGDVPWE

SEQ ID NO: 412 - protein, 423 aa, Aquifex aeolicus VF5
MRALGFIGIILSIFSSFAYASEAKLDTGNTAWMLVASALVVFMTVPGLALFYGGLDKSKSILNTIAMSFSAFAVVTLTWIFVGYSVAYGDDIFGFIGNPFQYVLGKGISGINSDTGYPALLDLMFQLTFATITTALISGSFVGRMKFSAWILFAILWSVFVYPPVAHWVWGGGFLANDGALDFAGGTVVHINAGIAGLVGALILGRRKDTSLIPNNVPLVALGAGILWFGWFGFNAGSALGANESAAWAMINTTVATSTAALAWMFTEWLHVGKPTVVGISSGIVAGLVAITPAAGFVNLIGSIFIGAIASVCAYFMVALVKPKFGYDDALDVFGIHGVRGIVGAVLTGVFADPNVGGTPGLLYGNPKQVLIQIEGVIATILYSAILTAVILLVLKAVVGLRVSEEEELELDSSLHGEKAYNL

SEQ ID NO: 413 - protein, 185 aa, Triticum aestivum
  unsure (1)..(185): unsure at all Xaa locations
MAPTVMASSATSVAPFQGLKSTAGLPVSRRSNGASLGSVSNGGRIRCMQVWPIEGIKKFETLSYLPPLSTEALLKQVDYLIRSKWVPCLEFXSKVGFIFREHNASPGYYDGRYWXTMWKLPMFGXAPDATQVINEVEESKKEYXDAYVRIIGFDNMRXVQCVSXIASKQRGCKIRKAKQSSRQAY

SEQ ID NO: 414 - protein, 340 aa, Paracoccidioides brasiliensis
MFAARRAFGFAQRRAFSVSAPQSSKVAILGAAGGIGQSLSLLMKLSPRVTQLALYDIRGGPGVAADLSHINTNSTVTGYDPTPSGLRDALKDSEIVLIPAGVPRKPGMTRDDLFNTNASIVRDLAKAAADASPNANILVIANPVNSTVPIVAEVFKSKNVYNPKRLFGVTTLDVIRASRFISQVKGTDPKDEKVTVVGGHSGVTIVPLISQSNHPDISGEKLETLVNRIQFGGDEVVKAKDGAGSATLSMAMAGARFAESLLKASQGEKGVIEPTFVDSPLYKDQGIDFFASRVELGPNGVEKILPVGKVSEYEQKLLDACLVDLKKNIAKGVEFVKTNP

SEQ ID NO: 415 - protein, 229 aa, Cucumis melo
MSSSKEQSPSPETESSSSSSSDSNKKPKRINSNSSSNSKHAVYRGVRMRNWGKWVSEIREPRKKSRIWLGTFPSPEMAARAHDVAALSIKGNSAILNFPDLVHLLPRPVSLAPRDVQAAAAKAAHMHNLSSNANTNNHNTNSNSSSAFSDELSEIVELPALGTSYDGGVGVGGEFVFVESELESAAWLYQPPWVQSLQEDYDDIDGDGDCGKLGMGFVSNGFKGFLFDY

SEQ ID NO: 416 - protein, 273 aa, Cucumis melo
MCGGAIIADLIPRRDGQRVTASDIWPNSSFFHFNKIRSDQVSTPLKRTPLPASSEASKPKKRQRKNLYRGIRQRPWGKWAAEIRDPRKGIRVWLGTFNTAEEAARAYDREARKIRGKKAKVNFPNEDDAYSIQAPIPQFHPHLYTVPENSEFPYDLNQIGDFTGTHFPVAIEEQSGSGSEDSYSPPKRFGVKEAEDQKPEQKVSVIAAAEEENEVQKLSEELMAYENYMKFYQIPYLDGQSTVTNPAEEQVVGDLWSFDDEDGLHGSVSSSEL

SEQ ID NO: 417 - protein, 425 aa, Methanococcoides burtonii DSM 6242
MNSISEEAKYTIQKVHAREILDSRGNPTVEVDIYTGCGFGRASVPSGASTGSNEALELRDKDADRYNGKGVLKAVDNINKTLSKELLGMDARNQREIDELMIALDGTENKKTFGANAILGISMATAKAAADSLGIALYRYLGGTNAFALPVPTMNVINGGKHAGNDLSIQEFMIQPKGADTFSNALRMGAETYHALGKVLEDKYGASATNVGYEGGYAPPISTTADALDALVSAIEEAGYTESEISIGLDSAASEFFDGDKYFIDGNKLAPAELVDYYLDLIETYPILSIEDPFHEESFEDFAALTSEAWDTIIVGDDLFVTNVNRLAKGIEMEAANALLLKVNQIGTISESFDAANLAQRNGYSVVVSHRSAETEDTMIADISVAIGGDLIKTGAPARSERTAKYNQLLRIEEDLGDAARYVQL

SEQ ID NO: 418 - protein, 360 aa, Ferroplasma acidarmanus
MSIKAVVMAGGKGTRLRPITYSIPKPVVPIAGKPCMLYLLDSYYNAGIKDVIITTGYKFSSLITSIIENRHNDQAILFSVEKEPAGTAGSVKMVSNFIDDTLIVGSGDILSDFNISDIINFHKKNKAMVTIVLTEVEDPRQFGIVEMENNRIVRFLEKPDRDQTFSHIASTGIYVIEPEILDYITTMPYDFAKDLFPELMKRNIDIYGYMGKGVWLDTGRPNDLITANQIMVEKYGKPSNVDFIKGKNIILDMAGIHNTGIDKCYIGRNIKAGDNVYIKYSALYDNEVIGNNVEITNSLLMDNVTVRENTKIRNSVIMKNCVIGENSEIVDSIIAPDMDLRGKSRIYNVSLASKVIEDEI

SEQ ID NO: 419 - protein, 253 aa, Escherichia coli
IVAAGIKEIVLVTHASKNSVENHFDTSYELEALLEQRVKRQLLAEVQSICPPGVTIMNVRQAQPLGLGHSILCAHPIVGDNPFVVVLPDIVLDNASADPLRYNLAAMVARFNETGRSQVLAKRMPGDLSEYSVIKTKEPLDVEGKVSRIVDFIEKPDQPQTLESDLMAVGRYVLSADIWPELAKTVPGAWGRIQLTDAIAELANKQSVDAMLMTGESYDCGKKMGYMQAFVQYGLRNLKEGAKIRKSIEKLLS

SEQ ID NO: 420 - protein, 289 aa, Escherichia coli
MKGIILAGGSGTRLYPITRGVSKQLLPIYDKPMIYYPLSTLMLAGIQDILIITTEEDNASFQRLLGDGSNFGIRLNYAVQPSPDGLAQAFLIGEKFIGNDKVCLVLGDNIFYGQSFIKILQNAVAREYGATVFGYQVKDPERFGVVEFDSEMRAVSIEEKPSKPKSNYAVTGLYFYDNRVIDFAKKVKPSVRGELEITDLNDMYLKEGTLNVELLGRGFAWLDTGTHESLHEASSFVQTIQNVQGLKVACLEEIALRNGWLSKEEAIKNALPMKKNDYGQYIIARAKGE

SEQ ID NO: 421 - protein, 469 aa, Corynebacterium glutamicum ATCC 13032
MAKRIVIIGGGPAGYEAALAGAKYGAEVTVIEDVGVGGSAVTMDCVPSKSFIAGTGIKTDLRRADDMGLNRGLGKAHLEIDALNIRVKDLAKAQSEDILGQLQRSDVRMINGVGRFDDYNTKQTTHYIKVTHSDGSEETVECDLVLVATGATPRILKGAEPDGERILTWRQVYDIEELPTHLIVVGSGVTGAEFVSAFAELGVKVTMVASRDRILPHDDADAADVLETVLAERGVSLEKHARVESVTRTEDGGVCVRTADGREIYGSHALMTVGSIPNTADLGLENIGVELAPSGHIKVDRVSRTNIPGVYAAGDCTDLFPLASVAAMQGRIAMYHALGEGVSPIRLKTVATAVFTRPEIAAVGITHAQVDSGEVSARVIVLPLATNPRAKMRSLRHGFVKLFCRRNSGLIIGGVVVAPTASELILPIAVAVTNRLTVADLADTFAVYPSLSGSITEAARQLVQHDDLG

SEQ ID NO: 422 - protein, 249 aa, Oryza sativa (japonica cultivar-group)
MARYDRAITVFSPDGHLFQVEYALEAVRKGNAAVGVRGTDTVVLGVEKKSTPKLQDSRSMRKIASLDTHIALACAGLKADARVLINRARVECQSHRLTVEDPVTVEYITRYIAGLQQKYTQSGGVRPFGLSTLIVGFDPYTEKPALYQTDPSGTFSAWKANATGRNSNSMREFLEKNYKDTSGKETIKLAIRALLEVVESGGKNIEIAVMTHKDGLRELEEAEIDEYVAEIEAEKAAAEAAKKGAPKET

SEQ ID NO: 423 - protein, 488 aa, Acinetobacter sp. ADP1
MVKELYIAGEWRLGRGKVIQSTFPADNSVNAEISTASFEDIEEAIVKADQAWRAPEWRNRLPHERAKILYKVADIIEARVDALAALQTRDNGKPLAETRGLVFSAAATARYVAAACETMNDELTSQRAPDFMTFSVHEPVGVVAAITPWNSPIASEVQKLAPALAGGNAVILKPAEATSLIALELAKIFEEAGLPKGLLSVLVGKGSVVGDAIVKHPLVRKISFTGGTTTGRHLAHIAADKLITTSLELGGKSPTIVLPDADIELAAKGIAYGIFSSAGQACIAGSRLFIHSSIYDQFLARLVEITKSLRVGHPEQKDVHMGSLINAAHLASVDRYVQLAKQEGGEILTGGQAMTEGEFAKGSFYLPTIITGLKNQAQVCQEEIFGPVLVVMKYEHEDDLIEQANDSCFGLAAGIWTESYRKAWRIARVLEVGTVWINTYKKFSISAPFGGFKDSGIGREKGRQGILSYMQQKSIYMGLNEQPNPWAD

SEQ ID NO: 424 - protein, 476 aa, Mycobacterium tuberculosis CDC1551
MGRPHLNIVAVRRISMSFVNVAPQLVSTAAADAARIGSAINTANTAAAATTQVLAAAQDEVSTAIAALFGSHGQHYQAISAQVAAYQQRFVLALSQAGSTYAVAEAASATPLQNVLDAINAPVQSLTGRPLIGDGANGIDGTGQAGGNGGWLWGNGGNGGSGAPGQAGGAGGAAGLIGNGGAGGAGGQGLPFEAGANGGAGGAGGWLFGNGGAGGNGGIGGAGTNLAIGGHGGNGGNAGLIGAGGTGGAGGTGGGEPSAGASGGNGGNGGNGGLLIGNSGDGGAAGNGAGISQNGPASGFGGNGGHAGTTGLIGNGGNGGAGGAGGDVSADFGGVGFGGQGGNGGAGGLLYGNGGAGGNGGAAGSPGSVTAFGGNGGSGGSGGNGGNALIGNAGAGGSAGAGGNGASAGTAGGSGGDGGKGGNGGSVGLIGNGGNGGNGGAGSLFNGAPGFGGPGGSGGASLLGPPGLAGTNGADG

SEQ ID NO: 425 - protein, 126 aa, Zea mays
  unsure (1)..(126): unsure at all Xaa locations
ARDPSARGDGRRRRRWRRGGELTAQETALYDRQIRVWGVDAQKRLSKAHVLVCGMNGTTIEFCKNIVLAGVGSLSLMDDNVVTEEDLNANFLIPPDESIXGGRSXSQVCCESLIDFNPIEFLVISF

SEQ ID NO: 426 - protein, 161 aa, Zea mays
  unsure (1)..(161): unsure at all Xaa locations
QKIYYLTGAKGTXDRXAAGEKAENATTAQXEGHXTXQEGXDAGEEANNQNETKDATTNRARTPTXEKTRKTKARGGKRRXPGEGPQEKTGGXPQXHKAPNKKEXQEETXRKKKAQXPQDGTRANKATXAWGGEAGDPIHDKRCNSGTTDMDPERNMRKRGR

SEQ ID NO: 427 - protein, 453 aa, Nitrosomonas europaea ATCC 19718
MQVAEVKKVLVPDIGDFEDIPVIEIMVKPGDSVQVEDPLIVLESDKATVEVPSPYSGIIREIRVQMGSKVSKDSEILTMEVVSAESDNKTTSSQPQPSAGSQPAQPTRPIETGAGQSEEEPAAKPAATTTKPATPSAPIQIPDHTIDQHNKIIPHASPSVRRFARELGVDLSKVVGTGPKQRILKEDVQAFVKQALTGGRNARGGTLDLLPWPHVDFAKFGPIELKSLSRIREISGANLHRNWVMIPHVTQFDEADVTDLEALRKNHNETRQNNGTKLTILAFLIKAVTAALKKFPEFNASLDNSTTESQLIIKRYYHLGFAADTPNGLVVPVIRDADQKGVIGIAEELTRLSSLAREGKLKPGDMQGASFTISSLGGIGGTGFTPIINAPEVAILGVSRASLKPVYQNGQFVPRLVLPLSLSYDHRVIDGASAARFTAHLASILADMRLALF

SEQ ID NO: 428 - protein, 108 aa, Oryza sativa
MEHGSVTDSTASTFSIVEEDHTLANSVRFVLNQDPRVAFCGYSIPHPADNKVNIRVQTTGDPAKDVLKDSLQDLMVMCQHVRGTFDTAVTQFRQNNPTGMNIDQNKKK

SEQ ID NO: 429 - protein, 456 aa, Oceanobacillus iheyensis HTE831
MLKKSFLIFTALLLLATPVYAATPTPESLELSVNLIWVMLGAFLVFFMHAGFAMVESGFTRSKNTLNILMKNFLTISVASILFFLVGYGIMFGSSAGSIIGSDGFLLSEISEIDFFVFQAMFVATCATIISGAVAERIKLGSYILIVAAMTTIIYPVVGHWVWQGDGWLTSLGFSDFAGSTVVHLTGAVGAFVVVLILGPRIGKYKGKKVNVIQGHNLPLGALGVFILWLGWFGFNGGSTLAADPSLVPYVIGTTLLSTSAALVSSSLYTKLRFKKVDASLSMNGVLGGLVGITAGAAEISLGGSIIVGLISGVVLVEGIRFLDTKLRIDDPVGAIAVHGICGIWGTLAIGLFSVNTGLFYGNGISQLGIQAIGVLAVVAWVAITAGGFTYVINKISQIRVSEEEEISGLDFAEHGSSAYNFKESLLEGTDNNSSSGLAERLNNNIPIGKTSNQSS

SEQ ID NO: 430 - protein, 543 aa, Trichoderma harzianum
MAIGNIYVIAGVSVVGGALFGFDISSVSAQLAEQSYLCYFNQDENPPTTADGKCGGPRSLVQGGITASMAAGSWLGALISGPLSDRLGRKYSIMVGCIIWVIGSTLSCASQNIGMLIVARIINGISVGIESAQVPVYIAEISPPSKRGRFIGMQQWAITWGILIMYYISYGCSFIGEDNPVSYNTAAWRIPWGLQMIPAFFLFFMMMPLPESPRWLARKDRWEDCRAVLTLVHGKGDPNHPFVAYELQDIKDMCEFERQHADVTYLDLFKPRMINRTFIGLFTQIWSQLTGMNVMMYYIANIFSMAGYSGNANLLASSIQYIINVLMTIPALLWVDKWGRRPTLLIGSVLMALWMYANAGILATYGEVVPGGIDHVAAQSMRVTGAPAKGLIACTYRFVASFAPTWGPVSWTYPPELFPLRLRGKGVAMATSGNWAFNTALGLFTPVAFANIKWKSYLIFAVFNTVAFFHVFFVFPETAGKTLEETEAMFEDPNGIPYMGTPAWKTKVATSLTVRAEQGDLEAKIAHDTEKPPIHTHEEETTQ

SEQ ID NO: 431 - protein, 288 aa, Zea mays
MGRPPCCDRAGVKKGPWTPEEDIVLVSYVQEHGPGNWRAVPVSTGLMRCSKSCRLRWTNYLRPGIRRGNFTPHEEGIIVHLQALLGNRWAAIASYLPQRTDNDIKNYWNTHLKKKLRKQQAIGAIFAPPPPSEPTAGHADCRRHDMTRSSKDSHACLADSTPAADEVVTQLIAQQFAATDGDTSSSSSYSYASSTDNISKLLNGFMKSASPARDDATDTIKTSSAIDIDPFDHKSGGALLPPPKKRQQQQQHLSSIENWLFDDATEQVVVQLMEEISGGSCSVPMLLY

SEQ ID NO: 432 - protein, 180 aa, Capsicum annuum
MASSVMSTATVATGANAAQASMIASFNGLKSAASFPVTRKQDLDITSIASNGGRVQCMLVWPPINKKKYETLSYLPDLSDEQLLKEIEYLLQKGWVPCLEFETEHGFVYREHHRSPGYYDGRYWTMWKLPMFGCTDATQVLNEVQEAKKAYPQAWIRIIGFDNVRQVQCISFIAYKPEGY

SEQ ID NO: 433 - protein, 381 aa, Methylococcus capsulatus str. Bath
MRIEISVPPLPESVSDAKLLDWHKNVGETVGKGENLVDLETDKVVLEVPAPEDGVVVEVRGGKGDVVVSGQPIAVIDTSVRPAAPAASAATEKPAPVLSPAVRRLVAEHALDPAVIPASGREGRLTKQDVLDFLETRPAAEKARLPAGGRSERRVPMSRLRARIAERMLEAQHRTATLTTFNEVNLQKVFDIRNAHKARFEQQHGIKLGFMSFFVKASVEALRRFPIVNASLEGEEIVYHDYYDIGIAVSTDRGLVVPILRDADRTDFAGIEKAIAEFGQKARSGKLSLDELSGGTFTITNGGIFGSMLSTPILNPPQSAILGMHAIKERPVVEDGQIVIRPMIYLALSYDHRLIDGRDAVSFLFTIKELLEDPVRLMLAV

SEQ ID NO: 434 - protein, 490 aa, Acinetobacter sp. ADP1
MSDVKLHRLYIHGQYTDATSGKTFDSINPATGEVIATIQQASQTDIEAAVKSAAEGQKVWAAKTAVERSRILRRAVDILRERNDELAQLETLDTGKAFSETSTVDIVTGADVLEYYAGLATAIQGEQVPLRESSFFYTRREPLGVVAGIGAWNYPIQIALWKSAPALAAGNAMIFKPSEVTPLTAFKLAEIYSEAGLPAGVFNVVQGAGREIGQWLTEHAVIEKISFTGGVETGKKVMASAAGSTLKEVTMELGGKSPLIICEDANLDRAADIAVMANFFSSGQVCTNGTRVFIPQRLKAAFEQAVVERVKRIRMGDPQHTDTNFGPLVSFPHMEKVLSYIESGKQQGAKVLIGGERATTGLLAQGAYVQPTVFTDCHDDMKIVQEEIFGPVMSILTYDTIEEAIERANNTNFGLAAGVVTQNISQAHQIIHQLEAGICWINTWGESPAEMPVGGYKESGVGRENGISTLNHYTRTKSIQVELGDYQSVF

SEQ ID NO: 435 - protein, 246 aa, Cathaya argyrophylla
YTYTLRNTEPEDVIIRVIYCGICHSDLVQMHNEVGMSRYPMVPGHEVVGMVTEIGSEVKKFKVGEHVGVGCIVGSCRSCPNCKESMEQYCNKRIWTYNDVNPDGTATQGGFASSMVVNQMFVVRIPENLPLEQAALLLCAGVTVYSPMKHFGMTEPGKRCGILGLGGVGHMGVKIAKAFGLHVTVISSSDKKKEEALEVLHADAYLVSKDTEKMREAAESLDYILDTIPVGHPLEPYLALLKTNGK

SEQ ID NO: 436 - protein, 306 aa, GIBBERELLA ZEAE PH-1
MAPSTFKLNTGQEIPAVGLGTWQSPAGEVEKAVTYALKDGYKLIDCAYCYGNEEEVGAGLKAAFKAGVKREDIFVVTKAWATYNTRVELALDKSLKALGLDYVDLFLVHWPLLLNPDGNDDKFPKKPDGSRDVIRDYNHVDGWKLMEKLPATGKTRAVGVCNYSKKYLEELLPHATIVPAVNQIENHPELPQQEIVDFCKEKGIHIEAYSPLGSTGGPVMSAEPVVKIADKKGVSASTVLLSYHGNTVLAKSVNPERITANKTIVDLDDEDMKALNDYSAELQKNNQVKRYVYPPFGIDFGFPDKS

SEQ ID NO: 437 - protein, 600 aa, Zea mays
MGSMTIGAKYKTTIKDPGTPGILRMNGDRFTFTPNDPRSAMKFNVDFRTIKGHKFNKVEGNKAALLNLSKEDKAGGYIFEFDNVGNRDQCRDFVARVLGKHQGIVPPRPTVAPENSVASAALEQLSAAEVERRVKLLREDSELQKLHKKFVLGNILQESEFWATRKNLLDDEANKRSKQKPGFKSALVDIRPTTDGRTNKVTFQITPEMIHQIFAEKPAVRRAYLDFVPKKMSETRFWEKYCRAEYLVRTKNTAAATAEAAGDEELAIFLKNDDILAKEAKLKIKRVDPTLDMEADTGDDYIHLPDHGIHRDGSKETVDADSELARRTLSQDLNRHAAVVLEGRSLDVESTDPKTLAEALARSKKEPPSTSNVDDDNHERLMKVARMTEIEDLQAPRSLLYAPLCIKDPREYFDSQQANALRSLGGSNGGRKAHRCSLSTEEVFHHLMDQMSSVKVNRLNCPMVQSDMALKVLNELNEGISRSRRLNLKNPQEGLLGQLPQHTRDELMDHWTAIQELLRHFWSSYPITSAVLYNKVQRVKEAMTQIYQKLQLIKELAQPDVRHEISRLVKPMTQALDAAFNHDLEQQQKSSKAGNRHNGF

SEQ ID NO: 438 - protein, 242 aa, Sulfolobus tokodaii
MAFGPAAMGYDRAITIFSPDGSLYQVDYAFEAVKKGWTTLGVKTKAGVVLIGEKRKATQLLDVDSIEKVFILDDHVGCSFAGLASDGRILIDYARSQALQHRLIYDEPINIDYLTKLVSDVKQMYTQHGGVRPFGVALIIGGIDRGKTPKLLMTEPSGQFMPYYAVAIGQGGYTATEYFEKNYREDLNMQDTILLGIRALASTLKPGEKLAPSNIEVGFADVDSGMFRKMSFEERASILQKL

SEQ ID NO: 439 - protein, 314 aa, Xanthomonas campestris pv. campestris str. ATCC 33913
MTESTLAFVFPGQGSQSLGMLAELAELHPQIRETFVEASDGAGVDLWALSQGGPEEMLNRTEYTQPALLAAGVAVWRLWNAQRGERPAVLAGHSLGEYTALVAAGALSLHDGAHLVRLRGQFMQAAAPAGVGAMAAVLGAEDALVREVCVEASGSQVVVPANFNSPGQIVIGGDAAAVDRALALLAERGVRKAVKLAVSVPSHTPLMREAANQLGEAMAGLTWHTPQIPVVQNVDAQVHAGHEAIRQALVEQLYLPVQWTGCVQALAAQGISRIAECGPGKVLSGLIKRIDKSLDARSLATPADYAGALDAWAH

SEQ ID NO: 440 - protein, 227 aa, Zea mays
MCGGAIIFDYIPARRRVSAADFWPDSEADAEDSDSHAPDPERVPRPRGKAKRGRKNQYRGIRQRPWGKWAAEIRDPVKGVRVWLGTYPTAEAAARAYDRAARRIRGAKAKVNFPNDASSSSVTAPTAASGVAAQAPAVFLPAPKVEARAQVSDEVKELSEELMAYENYMNFLGVPYMEGGNAAVSATTAAAAAAAVPEEAQVPAPAPAGLWSFEDYYYPPSLSLFTE

SEQ ID NO: 441 - protein, 473 aa, Zea mays
SLYQRGESASERKTYPNPLQDNPAYSVVKQYFVNPDDTVTQKIVVHKTSARGTHFRRAGPRQRVYFQSDEVNAAIVTCGGLCPGLNTVIRELVCGLYDMYGVSSVVGIEGGYKGFYSKNTVALTPKSVNDIHKRGGTVLGTSRGGHDTAKIVDCLQDRGINQVYIIGGDGTQKGASVIYEEVRRRGLKCSVVGVPKTIDNDIAVIDKSFGFDTAVEEAQRAINAAHVEAESAENGIGVVKLMGRNSGFIAMYATLASRDVDCCLIPESPFYLEGKGGLLEFVERRLKDNGHMVIVVAEGAGQDLIARSMNFVDTQDASGNKLLLDVGLWLSQKIKDHFKKKPSFPITLKYIDPTYMIRAVRSNASDNVYCTLLAHSALHGAMAGYTGFTVAPVNGRHAYIPFYRITEKQNKVVITDRMWARVLCSTNQPCFLSHEDVENMKHDDDEHHHMHNTQLLEGGSSPVSKCNGSAAAV

SEQ ID NO: 442 - protein, 473 aa, Zea mays
MAVAVPNAPGRLFLLQSTPFPNPSSSASAARAQSFRVPPLRLSLFRRMAGRSLTVIAGASGGSERDLSASAVSVEALDSVASDSDLETKEPSVSTMLTSFENSFDKYGALSTPLYQTATFKQPSATDYGTYDYTRSGNPTRDVLQSLMAKLEKADQAFCFTSGMAALAAVTHLLQAGQEIVAGEDIYGGSDRLLSQVVPRNGIVVKRVDTTKISDVVDVVSAIGPSTRLVWLESPTNPRQQITDIKTISEIAHSHGALVLVDNSIMSPVLSRPIELGADIVMHSATKFIAGHSDLMAGILAVKGESLAKEVGFLQNAEGSGLAPFDCWLCLRGIKTMALRVEKQQANAQKIAEFLASHPRVKQVNYAGLPDHPGRALHYSQAKGAGSVLSFLTGSLALSKHVVETTKYFSVTVSFGSVKSLISLPCFMSHASIPASVREERGLTDDLVRISVGIEDVEDLIADLDRALRTGPV

SEQ ID NO: 443 - protein, 513 aa, Solanum tuberosum
MIMTAATVVIAAIVVILVAYFVGKVLYTVWWWPKMIEIKLKKEGIHGEPYKLLFGNFKEMMKMSKEAKKQPLLNHDIIPWVNPFLLRLSNTYKKIFVVWYGPTPRVTVTDPKLIREVLNRYNEFHKPEANAFIHLFVSGLGSYNGEKWDTHRKILNPAFHVERLKRMFPAISVCCDEMINRWDKLVSKEGSCELDVTDEFLNLSGDVISRAAFGSNIEEGRSIFLLQKEQCELIFASPFTLFFPSLRFLPTASNRKAKYIHKKVISLIRGIIEKREDAVRRGVSENDDILGLLLKARNEENAAGRGSVSLSTDDVIEECKQFYFAGQDTATALLSWTLVVLSMHPEWQDKARNEVFQVIGKNKPQFDDLNQLKLMNMIFQEVLRLYPAIFLIRGTSKDTQLGDMTIPPGVQVCVPTHLVHRDPQVWGDDALMFNPERFSEGVTKAAKEQLYFPFGWGARMCIGLNFGMLEAKLIFAQILQHFWFELSPSYTHSPQLILVMKPQYGAQIILHKL

SEQ ID NO: 444 - protein, 275 aa, Zea mays
PCIAVQLVSLSRSLAGAGGAADLDDGAARSPAPNDGGDSDSSDHDPFHADADADADDDGRLPPAGSYEVIELGEEEILAPHVHSCKVCGKGFKRDANLRMHMRGHGEEYKTAAALAKPAAAAAATAQSSSSSTRCFYSCPFVGCKRNREHRSFQPLKTAVCVKNHYRRSHCDKSYTCRRCNVKRFSVLADLRTHEKHCGRDRWVCSCGTSFSRKDKLFAHVAAFDGHAPALPPEDDAAAHNVADGRNDGHRGSERNGELGVLLGHHARALRGTEL

SEQ ID NO: 445 - protein, 552 aa, Glycine max
MALAPPSVFALYIVIDLKIEIYMTISAMCGILAVLGCVDNSQTKRARIIELSRRLRHRGPDWSGIHCYEDCYLAHQRLAIVDPTSGDQPLYNEDKTVIVTYEEHGEEFVNMLDGMFAFILLDTRDKSFIAARDAIGITPLYLGWGHDGSTWFASEMKALSDDCERFISFPPGHIYSSKQGGLRRWYNPPWFSEDIPSTPYDPTLLRETFERAVVKRMMTDVPFGVLLSGGLDSSLVAAVVNRYLAESESARQWGSQLHTFCIGLKGSPDLKAAKEVADYLGTRHHELYFTVQEGIDALEEVIYHIETYDVTTIRASTAMFLMSRKIKALGVKMVLSGEGSDEIFGVFMALMIWQIKALHLYDCLRANKSTAAWGVEARVPFLDKEFINVAMSIDPEWKMIRPDLGRIEKWVLRNAFDDDKNPYLPKHILYRQKEQFSDGVGYSWIDGLKDHANKQVTDATMMAANFIYPENTPTTKEGYLYRTIFEKFFPKNAAKATVPGGPSVACSTAKAVEWDAAWSKNLDPSGRAALGIHDAAYDAVDTKIDEPKNGTL

SEQ ID NO: 446 - protein, 355 aa, Streptomyces griseus
MKALVLAGGTGTRLRPITHTSAKQLVPVANKPVLFYGLEAIRAAGIIDVGIVVGDTADEIVAAVGDGSRFGLKVSYIPQSKPLGLAHCVLISRDFLGEDDFIMYLGDNFVVGVVEDSVREFRAARPDAHLMLTRVPEPRSFGVAELSDSGQVLGLEEKPAHPKSDLALVGVYLFSPAIHEAVAAITPSWRGELEITDAVQWLIDAGRDVRSTVISGYWKDTGNVTDMLEVNRLVLETTEPRCDGLVDERSDLIGRVLVEEGAEVRNSRVMGPTVIGAGTRVTNSYVGPFTSLAEDCVVEDSEVEFSIVLRGASISGVRRIEASLIGRHVQVTSAPEVPHAHRLVLGDHSRAQISS

SEQ ID NO: 447 - protein, 308 aa, Chlamydophila pneumoniae AR39
MKKRYAFLFPGQGSQYVGMGQDLYMEYPEVRELFDFANERLGFSLTSIMFEGPEDLLMETVHSQLAIYLHSMAVVKVLSQRSSIQPSLVSGLSLGEYTALVASDRISVLDGLELVRKRGQLMNEACNQSPGAMAALLGLPSEVIEENITSLGQGIWIANYNAPKQLVVAGIAEKVDQAIELFRDLGCKKAVRLKVSGAFHTPLMQVAQDGLAPDIYALCMKDSSLPLVSHVVGKSLVNTEEMRECLARQMTSPTLWYQSCYHIESEVDEFLELGPGKVLAGLNRSIGISKPITSLGTFAQIEKFLSEV

SEQ ID NO: 448 - protein, 232 aa, Zea mays
TSPSSFLLSSLSPHAQWRGLARTAPPPNNNSNTTNAGNAAVDLAARVKPKRTRKSVPRESPSQRSSVYRGVTRRRCAAFFQLWYVYNNGVVLLTIVSLHGLHAGAYDDEDAAARAYDLAALKYWGPDTILNFPASAYEAELKEMEGQSREEYIGSLRRKSSGFSRGVSKYRGVARHHHNGRWEARIGRVFGNKYLYLGTYGTQEEAAMAYDMAAIEYRGLNAVTNFDLSRYI

SEQ ID NO: 449 - protein, 246 aa, Pinus banksiana
YTYNLRKKGPEDVIVKVIYCGICHSDLVQMRNEMGMSHYPMVPGHEVVGIVTEIGSEVKKFKVGEHVGVGCIVGSCRSCGNCNQSMEQYCSKRIWTYNDVNHDGTPTQGGFASSMVVDQMFVVRIPENLLLEQAAPLLCAGVTVFSPMKHFGMTEPGKKCGILGLGGVGHMGVKIAKAFGLHVTVISSSDKKKEEAMEVLGADAYLVSKDTEKMMEAAESLDYIMDTIPVAHPLEPYLALLKTNGK

SEQ ID NO: 450 - protein, 538 aa, Mycobacterium bovis AF2122/97
MSFVSVAPEIVVAAATDLAGIGSAISAANAAAAAPTTAVLAAGADEVSAAIAALFSGHAQAYQALSAQAAAFHQQFVQTLAGGAGAYAAAEAQVEQQLLAAINAPTQALLGRPLIGNGADGAPGTGQAGGAGGILYGNGGNGGSGAAGQAGGAGGPAGLIGHGGSGGAGGHGGWLWGNGGVGGSGGAGVGAGVAGGHGGAGGAAGLWGAGGGGGNGGNGADANIVSGGDGGLGGAGGGGGWLYGDGGAGGHGGQGAIGLGGGAGGDGGQGGAGRGLWGTGGAGGHGGQGGGTGGPPLPGQAGMGAAGGAGGLIGNGGAGGDGGVGASGGVAGVGGAGGNAMLIGHGGAGGAGGDSSFANGAAGGAGGAGGHLFGNGGSGGHGGAVTAGNTGIGGAGGVGGDARLIGHGGAGGAGGDRAGALVGRDGGPGGNGGAGGQLYGNGGDGGPGGQGGQAFGANNIGGTGGAGGNGGPAILSGNGGNGGAGGAGGAGGAGGGAGGVGGAGGAPGTGGTLQAAVSGLVTALFGAPGQPGDTGQPG

SEQ ID NO: 451 - protein, 257 aa, Oryza sativa
MAVDLMGFSPRGGCRPSVETEQLAFQEAAAAGLRSLELLVSSLSAGGEHHHRRRPQEKQSSPPLGEIADQAVSRFRKPAAAVKSLTLDFTNPAKVAAASVTSTSFFSSVTAGGDGSVSKGRSLVSSGKPPLAGGVKRKHPHPPCAAAGDGHGHGAGHAHAHGGCHCSKKRKQRVRRTVRVAAASARVADIPADEYSWRKYGQKPIKGSPYPRGYYRCSTVKGCPARKHVERAADDPATLVVTYEGDHRHSPPPPPLV

SEQ ID NO: 452 - protein, 245 aa, Pinus armandii
YTYSLRKKGPEDVIVKVIYCGICHSDLVQMRNEMGMSNYPMVPGHEVVGMVTELGSEVKKFKVGDHVGVGCIVGSCRSCGNCNQSMEQYCSKRIWTYNDVNHDGTPTQGGFASSMVVDQMFVVRIPENLPLEQAAPLLCAGVTVFSPMKHFGMTEPGKRCGILGLGGVGHMGVKIAKAFGLHVTVISSSDKKKEEAMEVLGADAYLVSKDAEKMMEAAESLDYIMDTIPVAHPLEPYLALLKTNG

SEQ ID NO: 453 - protein, 513 aa, Acinetobacter sp. ADP1
MSEIKTLEIPKWGLSMEEGTVAQWLIEEGTSFKKGDEICEIETTKIVNVLEAPFDGTLRQILAHAGDTLPVGGLIAICAEADVSDTEIQNFAQNLNGTQSSNTPADAKVTTVQTPEVDQLAVANSQAQSQAIIETKAQVSKDGVEIPAALQGFKASDAFTTPHAFKLAEKHNIDLSQVTGTGRLGRISVQDLQSAVQAAGGQWAEIKRQGSSKAIKSTADDRHIAATPVARRLAQTWGINLNDCRVSGTRGRVCKEDVEAVYYREHPVSETASTASCADTPVELNSVKPIAMNAMRKAIASRLQLAKRNAPHFRLSIEVNVEALQALRQQINDTVPQLKLSINDMLIKAAAAALIKVPEVNVQYDEQKQQILQFKDADISVAVAIENGLITPIVKAANQKSLATISSTMRDLATRAKTGKLQPDEFQGGSFSISNLGMLGIKNFDAIINPPQGAIMALGRSEARAVVEHDLIVIRQMMTVTLSCDHRVIDGALGAKFLASFKQFVENPALILV

SEQ ID NO: 454 - protein, 246 aa, Pinus armandii
YTYSLRKKGPEDVIVKVIYCGICHSDLVQMRNEMGMSNYPMVPGHEVVGMVTELGSEVKKFKVGDHVGVGCIVGSCRSCGNCNQSMEQYCSKRIWTYNDVNHDGTPTQGGFASSMVVDQMFVVRIPENLPLEQAAPLLCAGVTVFSPMKHFGMTEPGKRCGILGLGGVGHMGVKIAKAFGLHVTVISSSDKKKEEAMEVLGADAYLVSKDAEKMMEAAESLDYIMDTIPVAHPLEPYLALLKTNGK

SEQ ID NO: 455 - protein, 468 aa, Acinetobacter sp. ADP1
MSMSDTQFDLVVIGAGPGGYVAAIRAAQLGLKTAIVEATHLGGICLNWGCIPTKALLAGAELAHQFKHASQFGFELGDINFDLSKLVQHSRQVSAQLVQGIEHLLRKNQVSVFYAKARFIAKERLELVDAQQQKQMIRAPHIIVATGAHAASLPQIPVDGDYVWSYKEALQPKQLPKSLLVIGSGAIGSEFASLYQDLGSQVTLLDLARQILPTEDHEVAQYVRKQFEQKGMRILTESTVQHLEVCEGKVHCEIHDPSGVQSLSFDHVLSAVGVKPNTQNLGLEQLGVALTNGFIQTDEWCRTNVVGIYAIGDVAGAPCLAHKASHEAILCVEKIAGIADVHPLNRLQIPGCIFTHPQVASIGLTEQQAKAEGKQIHIGKFPMSANGKAIALGQTAGFVKTIVDVESGELLGAHMVGHEVTEQIQGYAIAQALEATDEHLAQVIFPHPTLSEAMHESILASMQRAIHI

SEQ ID NO: 456 - protein, 246 aa, Picea smithiana
YTYTLRNKGPEDVIVRVIYCGICHSDLVQMHNEMGMSNYPMVPGHEVVGVVTEIGSEVKKFKVGEHVGVGCIVGSCRSCSNCNGSMEQYCSKRIWTYNDVNHDGTPTQGGFASSMVVDQMFVVRIPENLPLEQAALLLCAGVTVYSPMKHFGMTEPGKKCGILGLGGVGHMGVKIAKAFGLHVTVISSSDKKKEEALEVLGADAYLVSKDAEKMQEAAESLDYIMDTIPVAHPLEPYLALLKTNGK

SEQ ID NO: 457 - protein, 788 aa, Mycobacterium tuberculosis CDC1551
MRVVRSRRSQMSFVIAVPEALTMAASDLANIGSTINAANAAAALPTTGVVAAAADEVSAALAALFGSYAQSYHAFGAQLSAFHAQFVQSLTNGARSYVVAEATSAAPLQDLLGVVNAPAQALLGRPLIGNGANGADGTGAPGGPGGLLLGNGGNGGSGAPGQPGGAGGDAGLIGNGGTGGKGGDGLVGSGAAGGVGGRGGWLLGNGGTGGAGGAAGATLVGGTGGVGGATGLIGSGGFGGAGGAAAGVGTTGGVGGSGGVGGVFGNGGFGGAGGLGAAGGVGGTASYFGTGGGGGVGGDGAPGGDGGAGPLLIGNGGVGGLGGAGAAGGNGGAGGMLLGDGGAGGQGGPAVAGVLGGMPGAGGNGGNANWFGSGGAGGQGGTGLAGTNGVNPGSIANPNTGANGTDNSGNGNQTGGNGGPGPAGGVGEAGGVGGQGGLGESLDGNDGTGGKGGAGGTAGTDGGAGGAGGAGGIGETDGSAGGVATGGEGGDGATGGVDGGVGGAGGKGGQGHNTGVGDAFGGDGGIGGDGNGALGAAGGNGGTGGAGGNGGRGGMLIGNGGAGGAGGTGGTGGGGAAGFAGGVGGAGGEGLTDGAGTAEGGTGGLGGLGGVGGTGGMGGSGGVGGNGGAAGSLIGLGGGGGAGGVGGTGGIGGIGGAGGNGGAGGAGTTTGGGATIGGGGGTGGVGGAGGTGGTGGAGGTTGGSGGAGGLIGWAGAAGGTGAGGTGGQGGLGGQGGNGGNGGTGATGGQGGDFALGGNGGAGGAGGSPGGSSGIQGNMGPPGTQGADG

SEQ ID NO: 458 - protein, 168 aa, Cucumis sativus
GSVRAKNTMNIMLTNVLDAAAGGLFYYLFGFAFAFGTPSNPFIGRHFFGLKSIPSTAADYSFFLYQWAFAIAAAGITSGSIAERTQFVAYLIYSSVLTGFVYPVVSHWFWSPDGWASPSRTDGDLLFGTGVIDFAGSGVVHMVGGIAGLWGALIEGPRIGRFDKTGRS

SEQ ID NO: 459 - protein, 452 aa, Magnaporthe grisea 70-15
MATAQAAYAAEKAVGHQEGGITRQDVSDYTETGDPSRTMKALVWMGKNKVEIADMPRPKIIEPKDVILKVTGSTVCGSDLHLLHGSVIQMNKNDILGHEFCGIVDEVGPEVTKCKPGKRYVASFQIACGECFFCKQKLSSQCERTNDNTIAKAMYGNQTAGMFGYSHFTGGFAGGQAEYVRVPFGDVNLLEIPDDVPDEKALYLSDVLPTSYNAVKDTAVYPGDTVAVFGAGPIGQMAGYWALLEGAEKVIFVDTEPRLSYIQERFNAEQKAKTTCIDYKKLSSGITNKETVVSKLKEMCGGRGPDCAIECAAGEYAKGWAHWLEMTLGAETDTSEILNEMIEGVRNYGRVGVTGVYVGYTNHFNIGSLMQRGVRLIGNGQAPVHKYWEELLARIQSNDFDPLQMLSHRVRLEDLDKVYYKFEKREDSMQKIFVETKFSLPRATGTPELTTY

SEQ ID NO: 460 - protein, 328 aa, Prochlorococcus marinus subsp. pastoris str. CCMP1378
MIILHIGLFENSFSNIMKSVIFQETANLKKPVPAEKVIELSDKLLEPSSHSKRYPPRLHKTWGTIFFMIAIHLLSLLALQPQFWSMPAVTALFFFYWLTACLGVTLGYHRLLSHRSFVVPKWLERFFATCGAISCQHGPIDWVGLHRHHHSFSDTEVDHHNSKRGFWWSHMGWMFKDVEALKAVPKLSADLIKDPYYRFLNKYFLFLQIPIGLCLYAIGQKLGVGGWALVLWGIPLRLVVVYHITWLVNSATHCWGKAPFESGDGSKNNAWVAALTFGEGWHNNHHAFPNSARQGLFRGQIDLTWEHIKILAKLGFAKKVKLPSRSYY

SEQ ID NO: 461 - protein, 118 aa, Zea mays
  unsure (1)..(118): unsure at all Xaa locations
IRLEVSSTYFSRTSTQTVLATLLKDPIELSAYRDRRFKGTQEENEAGLLAWTTLYIGNMSFYTTEEQAYELLYLAGKIKKIMIGLEQNSKIPCXIXFVLYYSREDAENAVKYMSGTML

SEQ ID NO: 462 - protein, 298 aa, Thermosynechococcus elongatus BP-1
MPMTKTAWLFPGQGSQHPEMMADLLTAYPPAKARCEQAAAILGWSVIDCCGGRIGNLDQTLYTQPSLFLVESLLVDALKERGAKADFVAGHSLGEYVALYAAEVFDFETGLQLVQRRAALMNAAGGGKMVALIGFDREELQQAIARIPNVVLANDNHPGQVVISGLPEAVDALLAKIKVKRAVPLNVSGAFHSPFMAEAAATFATLLDECQFQEAVFPVLNNVEPEPTTDAALIKARLRSQMTGSVRWVDTCYALAAAGVTQALEIGPGNVLAGLVKRTTPEITVTGVATIASLESLV

SEQ ID NO: 463 - protein, 990 aa, Pichia pastoris
MPEPSISALSFTSFVTNDDKLFEETFNFYTKLGFHATRSYVKDNRSDFELTGISTDSIKEIWLESFPLSEVVETSAGRELRKPLQESVGYQSEALLGYSPYQSDGVVIKLRLSNHDLQKNKDLPGEVTFFTASIDKLRAKLIEIGAEIIPSEIDLVEFSTKDPMGDVISFSSYPSLSSKKKITSPDFFLHPKKEVRSQESIVEQVKSEEGKKKIAIITSGGDAPGMNAAVRAVTRAGIFYGCKVYACYEGYTGLVKGGDMLKELQWQDVRGLLSIGGTIIGTARSKEFRERWGRLQACYNMVSNGIDALVVCGGDGSLTGADLFRNEWPELIKELLGEGKITKEQYETHRNLTIVGLVGSIDNDMCGTDSTIGAYSSLERIIELVDYIDATAASHSRAFVVEVMGRHCGWLGLMSGIATGADYIFIPERPPSETNWKDDLKKVCLRHREKGRRKTTVIVAEGAIDDQLNPITSEEVKDVLVEIGLDTRITRLGHVQRGGAPCAFDRFLATVQGVDAVRAVLESTPAIPSPVISILENKIVRQPLVESVAQTKTVSDAIEAKDFDKALKLREQEFATSYESFLSVSKYDDGSYLVPESSRLNIAIIHVGAPTSALNPATRVATLNSLAKGHRVFAIRNGFAGLIRHGAVRELNWIDVEDWHNTGGSEIGTNRSLPSDDMGTVAYYFQQYKFDGLIIIGGFEAFTALYQLDAARAQYPIFNIPMCCLPATVSNNVPGTEYSLGSDTCLNTLSGYCDAVKQSASASRRRTFVVEVQGGYSGYLASYAGLITGALAVYTPENPINLQTVQEDIELLTRTYEEDDGKNRSGKIFIHNEKASKVYTTDLIAAIIGEAGKGRFESRTAVPGHVQQGKSPSSIDRVNACRLAIKCCNFIEDANFQVKHNANLSADERHLRFFCDDGVKTSAVSGKSSVIDDNTSVVIGIQGSEVTFTPVKQLWEKETHHKWRKGKNVHWEQLNIVSDLLSGRLSIRTT

SEQ ID NO: 464 - protein, 357 aa, Ralstonia metallidurans CH34
MAGMQAAVFQGPGKIVLQEKPIPAVGPTDALIRITTTTICGTDIHILKGEYPVERGLTIGHEPVGIIEKLGSGVTGYHEGQRVIAGAICPSFYSYACQDGCASQDGQGHSHGYKPMGGWRFGNTIDGTQAEYVLVPDAQANLAPIPDGLTDEQVLMCPDIMSTGFSGAEHANIKIGDIVAVFAQGPIGLCATAGARLRGASLIIAVDGIDDRLNISRQMGADVTLNFRNTDVVQEILRITGGRGVDASIEALGTQATFESALRVLKPGGTLSSLGVYSSDLKIPLDAFAAGLGDHRIITSLCPGGKERMRRLMNVIETQRIDLGPLVTHRFKLADIEAAYDLFGHQRDGVLKVAITP

SEQ ID NO: 465 - protein, 197 aa, Pisum sativum
MSASRFIKCVTVGDGAVGKTCLLISYTSNTFPTDYVPTVFDNFSANVVVNGSTVNLGLWDTAGQEDYNRLRPLSYRGADVFILAFSLISKASYENVSKKWIPELKHYAPGVPIILVGTKLDLRDDKQFFVDHPGAVPITTAQGEELRKLINAPAYIECSSKSQQNVKAVFDAAIRVVLQPPKQKKKKSKAQKACSIL

SEQ ID NO: 466 - protein, 245 aa, Rhodopseudomonas palustris CGA009
MPLLSNDHYRVGRSKTGLGLFALKPIKKGAKIIRYFGPLLDAHNKKHDGIENKYLFELNKRWTIDGSVRKNVARYINHACKPNAESDVNPRKKRVIIRAIKNIEPGEEINYDYGTDYFKAYLKPIGCKCVSCEKKRKKKAAEARAEKAKLKLKAERKAQAEAEKAARKAAKAAGKAKPEKPSKPEKVAKSKAPKAVKAKTTAKSKGSSKAVKTKVVTAKAGKTKAAQPAKTTSSRKTAASKSKAA

SEQ ID NO: 467 - protein, 420 aa, Zea mays
MRAAQYNSCCRDAPPPRRGRVQLGTSRPAGTQKHRRRVHQEEAGQPTDSPDPPDRSRAPCSSQLSPSLSPALLLPAPMAAASAAAPTKTANIPATMRAVQYDSCGGGAAGLKHVEVPVPSAKKNELLLKLEAASINPVDWKVQKGMLRPFLPRKLPFIPVTDVAGVVADVGPGINGFQAGDQVVAMLNSFNGGGLAEYAVASENLTVKRPPEVSAAEGAGLPIAAGTALQALRTIGAKFDGTGKAMNVLVTAASGGVGLYAVQLAKRAGLHVTATCGARNVELVKSLGADEVLDYRTPEGASLQSPSGKKYDGVVHCTVGTSWSTFEPVLAATGKVIDITPNLTAILKSALHSVTFARKRLVPLLLSPNKADLEFLVGLLKDGKLKTLIDSRFPLSEVSKAWEKSIEGHATGKIIVEMGD

SEQ ID NO: 468 - protein, 263 aa, Zea mays
  unsure (1)..(263): unsure at all Xaa locations
MSGQQCLRRLPAAMRSVRALRASPRCTPTARSYSALTKANSSGLLGQASRRPAQLSSQRLCALEQIRTYADTIVKVPEMAESITEGTLKQWSKQVGDFVEQDEEIATIETDKIDVAVNAPEAGIIKEFLVNEEDTVTVGQEIVKLEPGAAPEGGKKEASQEPKEPASQDQETSSQPEGQQEQSQPEAPKEESKPAPPKQQEQPKQESKPEPKKDSKPKEEPKPATPGSREERRVKMNRMRLRIAERLXQSQNTAXSLTTFTKS

SEQ ID NO: 469 - protein, 347 aa, Agrobacterium tumefaciens str. C58 (U. Washington)
MRGVVIHAAKDLRVEDVAGQPLAADEVRVAVAVGGICGSDLHYYNHGGFGTVRVREPMALGHEFAGTVVEVGSSVSHLVPGMRVAVNPSLPCGTCRYCAQGRQNQCLDMRFMGSAMRSPHVQGGFREVVTVHSTQPVQIADGLSMGEAAMAEPLAVCLHAARQAGSLLGKTVLITGAGPIGMLSLLVARLAGAAHIVVTDVADAPLDLARRIGADEAVNILRDADMLEKYRFEKGVFDVLFEASGNQAALLPALDLLRPGGIIVQLGLGGDFTIPMNLIVAKELQLRGTFRFHEEFAQAVNMMGRGLIDVKPLISATLPFDQAREAFDLAGDRAKSMKVQLAFSGAA

SEQ ID NO: 470 - protein, 293 aa, Bacillus cereus ATCC 10987
MKKVRKAIIPAAGLGTRFLPVTKAMPKEMLPIVDKPTIQYIVEEAIESGIEDIIIVTGKGKRAIEDHFDHSFELEQNLLEKGKYEMLEKVQASSKINIHYIRQKEPKGLGHAVWCARKFIGNEPFAVLLGDDIVQAETPCLRQLMDQYEETQSSVIGVQTVPENETHRYGIIDPIEKNERRYQVRQFVEKPAEGTAPSNLAIMGRYVLTPEIFMFLEDQQTGAGGEIQLTDAIQRLNEIQRVFAYDFEGIRYDVGEKFGFIKTTIEMALQNEELNVELMKYMKELVKKEEAHS

SEQ ID NO: 471 - protein, 563 aa, Xylella fastidiosa Temecula1
MCSIFGIFNLQPSDNLQILRHQALECSQRQRHRGPDWSGVYVDVGAILVHERLAIVDPAGGAQPLFSEDGTLALAVNGEIYNHAVLKGTLQQPYAFQTHSDCEVINALYREETPTSFLNRLNGIFAFALWDKTTGRGLIARDPMGVVPLYWGHDQDGRLRVASEMKALVEHCPDVAQFPPGHWYDTTTGTLVKYYERPWKNYSAVEGVQVSLQELREAFERAVHRQLMTDVPYGVLLSGGLDSSLVAAVAARYARHRIETNDQSEAWWPRLHSFAIGLKDSPDLSAANVAAEALNTVHHGFEYTFQEGLDVLPEVIRHIETYDVTTIRASTPMFLLARRIKAMGVKMVLSGEGSDEIFGGYLYFHKAPNAREFHEELVRKLNALYYYDCLRANKAMMAWGVEPRVPFLDREFLDVAMRMDAQHKMVDKTSNGPQRMEKGILRAAFDGYLPPSILWRQKEQFSDGVGYGWIDGLKAHAETQVSDHALATAETRFQVNPPQTKEAYYYRSIFERFFPSPAAAETVPGGKSIACSSPAAIAWDASFATMADPSGRAVSGVHQQALL

SEQ ID NO: 472 - protein, 132 aa, Triticum aestivum
  unsure (1)..(132): unsure at all Xaa locations
AVERTTQKPPTTHPIPEFDRSRRRASTPRKEGEAARRGERWGRMPVRMKAVVYALSPFQQQVLPGLWKDITTKIHHKVSENSISATLLITPXVGTYQYAMWLQGAGRTLSHSILKVAAFSKYRSSWRFPCCL

SEQ ID NO: 473 - protein, 246 aa, Cedrus atlantica
YTFTLRKKGPEDVILRVIYCGICHSDLVQMHNEVGMSRYPMVPGHEVVGIVTEIGSEVKKFKVGDHVGVGCIVGSCRSCGNCNDSMEQYCSKRIWTYNDVNHDGTTTQGGFASTMVVDQMFVVRIPENLSLEQAAPLLCAGVTVYSPMKHFGMTEPGKKCGILGLGGVGHMGVKIAKAFGLHVTVISSSDKKKEEALEVLGADAYLVSKDAEKMQEAAESLDYILDTIPVGHPLEPYLSLLKTNGK

SEQ ID NO: 474 - protein, 246 aa, Pseudotsuga menziesii
YTYILRNIGPEGVLLRVIYCGICHSDLVQMRNEMGMSNYPMVPGHEVVGIVTEIGSEVKKFKVGEHVGVGCIVGSCRSCGNCNQSMEQYCSKRIWTYNDVNHDGTTTQGGFASTMVVDQMFVVRIPENLPLEQAAPLLCAGVTVFSPMKHFGMTEPGKKCGILGLGGVGHMGVKIAKAFGLHVTVISSSDKKKEEALEVLHADAYLVSRDAEKMMEAAESLDYILDTIPVSHPLEPYLALLKTNGK

SEQ ID NO: 475 - protein, 121 aa, Triticum aestivum
  unsure (1)..(121): unsure at all Xaa locations
MAVTITWVKARQIFDSRGNPTVEVDVGLSDGSYARGAVPSGASTGXYMRLGSLRDGGSDYXGKGVLKGCQAMLNTIIGPSIGWERPTEQFELTLQWPTLDGTSNGXGWCKQNLGANASLRS

SEQ ID NO: 476 - protein, 246 aa, Pseudotsuga menziesii
YTYILRNIGPEGVLLRVIYCGICHSDLVQMRNEMGMSNYPMVPGHEVVGIVTEIGSEVKKFKVGERVGVGCIVGSCRSCGNCNQSMEQYCSKRIWTYNDVNHDGTTTQGGFASTMVVDQMFVVRIPENLPREQAAPLLCAGVTVFSPMKHFGMTEPGKKCGILGLGGVGHMGVKIAKAFGLHVTVISSSDKKKEEALEALHADAYLVSRDAEKMMEAAESLDYILDTIPVSHPLEPYLALLKTNGK

SEQ ID NO: 477 - protein, 175 aa, Kluyveromyces thermotolerans
HRLWSHRAYSARWPLRLFFAIFGAASVEGSIKWWGHSHRIHHRYTDTVRDPYDARRGLWYSHMGWMLLQPNPKYRARADIADLTDDWIVRFQHRHYIPIMAFSAFILPALLCKYLFNDFIGGLVYGGVLRVFAIQQTTFCIDSLAHYLGDQPFDDRRTPRDNWITALVTFGEGYH

SEQ ID NO: 478 - protein, 246 aa, Larix gmelinii
YTYTLRNKGPEDVIVRVIYCGICHSDLVQMRNEMGMSHYPMVPGHEVVGIVTEVGSEVKKFKVGEHVGVGCIVGSCRSCGNCNQSMEQYCSKRIWTYNDVNHDGTPTQGGFASTMVVDQMFVVRIPENLPLEQAAPLLCAGATVFSPMKHFGMTEPGKKCGILGLGGVGHMGVKIAKAFGLHVTVISSSDRKKEEALEVLHADAYLVSKDAEKMMEAAESLDYILDTIPVSHPLEPYLALLKTNGK

SEQ ID NO: 479 - protein, 246 aa, Larix gmelinii
YTYTLRNKGPEDVIVRVIYCGICHSDLVQMRNEMGMSHYPMVPGHEVVGIVTEVGSEVKKFKVGEHVGVGCIVGSCRSCGNCNQSMEQYCSKRIWTYNDVNHDGTPTQGGFASTMVVDQLFVVRIPENLPLEQAAPLLCAGVTVFSPMKHFGMTEPGKKCGILGLGGVGHMGVKIAKAFGLHVTVISSSDRKKEEALEVLHADAYLVSKDAEKMMEAAESLDYILDTIPVSHPLEPYLALLKTNGK

SEQ ID NO: 480 - protein, 342 aa, Zea mays
MVRMSSSSSASGVNLTEQIENVFDQLISKIEQADPDFDPRPFLKQLNVLGRYEPIKRNVYFTKRYIEDYGISCHCKPSPGSSVVCGRDCYCSMLFSCCSSQCECDIACTNKSFQHRPLTKTKLIKTEKCGHGLVAEDEIKKGEFVIEYVGEVIDDRTCENRLWTMKRLDDTDFYLCEVSSNMVIDATNKGNLSRFINHSCEPNTAMQKWTVDGETRVGIFALRDIKIGEELTYDYKFVQFGAAQVCHCGSSKCRKMLGTTKYSGSSQNHRTKKKKRKTSCENCIQQFLRLWHPRQKMYVGCWIVDFDQGTKMHTLQFIDHHTEKFDLKEEEWHFLEVDSDED

SEQ ID NO: 481 - protein, 488 aa, Agrobacterium tumefaciens
MKNSVQLITYVDRLSGGGFPELRALLDGRLQGLFGGVHALPFFNPIDGADAGFDPTDHTIVDPRLGSWDDVRTLAGSVEIMADLIVNHVSAQSSWFQDFIAKGPDSEFADMFMTFGKVFPRGASEQDLLNIYRPRPGLPFSKATLGDGSQRMLWTTFTPQQIDIDVHSAHGALYLETILDRFAEANVTAIRLDAAGYAIKKAGTSCFMIDETYAFLAKLAEKARDRGMEVLVEIHSYYRDQIEIARKVDRVYDFALPPLILHSLFTGDATALARWLEISPRNAITVLDTHDGIGVIDVGAHGHGRAGLLEPQAIDHLVEEIHRRSEGQSRLATGAAASNLDLYQVNCTYYDALGRSDNDYLIARAIQFFAPGIPQVYYVGLLGGLNDMELLRKTGVGRDINRRFFEDREIDLALESPLVKRLSDLIRFRNTHPAFNGSFEVATDDTGSLVLSWNFDAEFARLVVSFSQGKATITASGCYDFTFSGDVA

SEQ ID NO: 482 - protein, 586 aa, Securigera parviflora
MCGILAVLGCSDDSQAKRVRVLELSRRLKHRGPDWSGLHQHGDCFLAHQRLAIVDPASGDQPLFNEDQSIIVTVNGEIYNHEELRKQMPNHKFRTGSDCDVIAHLYEEHGENFVDMLDGIFSFVLLDTRDNSFIVARDAIGVTSLYIGWGLDGSVWIASELKGLNDDCEHFETFPPGHLYSSKEREFRRWYNPPWFSESIPSAPYDPLALRQAFEKAVVKRLMTDVPFGVLLSGGLDSSLVASITARHLADTKAAKQWGAKLHSFCVGLEGSPDLKAGKEVADYLGTVHHEFQYTVQDGIDALEDVIYHIETYDVTTIRASTPMFLMSRKIKSLGVKWVISGEGSDEIFGGYLYFHKAPNKEELHKETCRKIKALHKYDCLRANKSTFAWGLEARVPFLDKEFINVAMNIDPENKMIKLDEGRIEKWILRKAFDDEENPYLPKHILYRQKEQFSDGVGYGWIDGLKDHAAKHVTDRMMLNASNIYPFNTPTTKEAYYYRMIFERFYPQNSARLSVPGGASVACSTEKALEWDAEWSKNLDPSGRAALGVHVSAYENQLSSSVSKGVEPEKIIPKMEISPLGVAIQS

SEQ ID NO: 483 - protein, 158 aa, Staphylococcus epidermidis ATCC 12228
MSIYDIAVENYDGSTYLLKRYKGKVLIIVNTATNCTLNDQFNKLEMLYKKYHKYGLEILSFPCNDFNNQEPELIKDIYRVYKYKFGITFPIHAKINVNGEHEHPLYTLLKCKQPGLFGSQIKWNFTKFVVDQQGNIVKRFLPCDNPNQMEKLIRQLLK

SEQ ID NO: 484 - protein, 449 aa, Staphylococcus epidermidis ATCC 12228
MLMKQYDVVFLGSGHAAWHAALTLKQSGKQVAIVEKDTIAGTCTNYGCNAKIFLEGPYEVLEEAKQYPNIIDSHNLEVNWKNLMHYKEQVINPMSETLTSMFEQQGIDVIMGKGKLVDAHTIEVNNTTLQSDYIVIATGQHSHQLDIEGKEYTHDSREFLSMQSLPDSITFIGAGIISIEFASIMIKSGVEVNVVHHTNQALEGFNESHVNKLIQKLKDEGVKFYFSENTKSVKPNAQRFIVETESGKMIETDYVLDATGRKPNVQQIGLEKVGILFSDRGIEVDDYLRTNVKNIYASGDVINKMIPKLTPTATFESNYIAAHILGLNTDAIQYPPIPSVLYSLPRLSQIGVTVSEAKKDDTYMIKDIPFGRQMVFEYQNETEAEMSIVLDSHKRLVGAEIYGNDAGDLVNLLVFIINQKLTAQDLNKNIFAFPGASSGVIDLLKLAMM

SEQ ID NO: 485 - protein, 400 aa, Pseudomonas syringae pv. syringae
MNDALAQLQSYPFEKLRTLLNGVTPNASLRPIALSIGEPKHPSPAFVKTALAANLDKMSVYPATLGIPELRAAIADWCQQRFDVPKGWLDPARHILPVNGTREALFAFTQTVVRRDSNGLVISPNPFYKIYEGAAILAGATPHYLPCLESHGFNPDFDSVPADIWKRCQLLFLCSPGNPTGALVPLDALKKLISLADEHDFVIAADECYSEIYFDETSPPPGLLTACAELGRSDFKRCVVFHSLSKRSNLPGLRSGFVAGDADILKAFLLYRTYHGCAMPVHSQLASICAWKDEDHVRENRDLYREKFDAVLAILSPVMDVKKPDGSFYLWAKVPMDDAEFCRELFEQTHITVIPGSYLSREVDGVNPGAERIRMALVAPLAECVEAAERIRDFLLQRRL

SEQ ID NO: 486 - protein, 333 aa, Corynebacterium efficiens YS-314
MTELPHTMPAVGLVDSLPTDHPDFLIDVEVPRPDPGPRDLLVEIAAVSINPVDTKVRMRVGKQDTPKILGYDAAGTVVAVGSGVSLFRPGDTVFYAGSNQRQGTNARFHLVDERLVGHAPGSVDATHAAALPLVFLTAWEALFDRLPVTQSTTGTLLVLGGAGGVPSALIQLARALTNLRVVATASRPESTRWVREMGAHDVIDHHHDLREQISGVDFVFSSWTTGREEELTAVMSPQSHLVLIDDPLNPNLGAFKQKSIAVHWEFMFTRAMFATPDMAVQGQILTKIADMIDRGQLRSITDRVLTGMTAETLMEGHRLIEEGHTTGKIVVKV

SEQ ID NO: 487 - protein, 512 aa, Triticum aestivum
  unsure (1)..(512): unsure at all Xaa locations
MIARGLLRSNASSQASKLVKYLTSAGSLQGHADSLSDASVRHFSSASSPQTNSTEENGFKGHGMLAPFTAGWQSNDVHPLVIERSEGSYVYDINGNKYLDXLAGLWCTALGGSEPRLVKAATDQLNKLPFYHSFWNRTTKPTLDLADDLLSMFTASKMGKAFFTNSGSEANDSHVKLVWYYNNALGRPNKKKFIARSKAYHGSTLISASLTGLPALHQKFDLPAPFVLHTDCPHYWRFHLPGETEEEFATRLAKNLEDLILKEGPETIAAFIAEPVMGAGGVIPPPKTYFDNIQXVVKKYDILFIXDEVITAFARLGTMFRSDMYNIKPDLVTLAKALSSAYVPIGAXLLLAPEIAAVVDSQSNKLGSFAHGFTYSGHPVACAVAIEALKIYRERNIPDHVKQIAPRFQEGTKAFAGSPIVGEIRGVGLILGTEFANNKSRDDPFPAEWGVGAIFGQECQKRGMLVRVAGDSIMMSPPLTMTPGEVDELVSIYGEAMKATEERVAELKSKKN

SEQ ID NO: 488 - protein, 201 aa, Glycine max
MSNEYDYLFKLLLIGDSSVGKSCLLLRFADDSYVDSYISTIGVDFKIRTVELEGKTVKLQIWDTAGQERFRTITSSYYRGAHGIIIVYDVTEMESFNNVKQWLNEIDRYANDTVCKLLVGNKSDLVDNKVVDSLTAKAFADELGIPFLETSAKDSINVEQAFLTMTAEIKKKMGSQTTAGKSAETVQMKGQPIPQKSNCCG

SEQ ID NO: 489 - protein, 498 aa, Oryza sativa
MSGDAFNMSVAYQPSGMAVPEWLNKGDNAWQMISATLVGMQSVPGLVILYGSIVKKKWAVNSAFMALYAFAAVWLCWVTWGYNMSFGHKLLPFWGKARPALGQSFLLAQAVLPQTTQFYKGGGGADAVVETPWVNPLYPMATMVYFQCVFAAITLILLAGSLLGRMNIKAWMLFVPLWLTFSYTVGAFSLWGGGFLFHWGVMDYSGGYVIHLSSGVAGFTAAYWVGPRSTKDRERFPPNNVLLMLTGAGILWMGWAGFNGGDPYSANIDSSLAVLNTNICAATSLLVWTCLDVIFFKKPSVIGAVQGMITGLVCITPGAGLVQGWAAIVMGILSGSIPWFTMMVVHKRSRLLQQVDDTLGVFHTHAVAGFLGGATTGLFAEPVLCSLFLPVTNSRGAFYPGRGGGLQFVRQVAGALFIICWNVVVTSLVCLAVRAVVPLRMPEEELAIGDDAVHGEEAYALWGDGEKYDSTKHGWYSDNNDTHHNNNKAAPSGVTQNV

SEQ ID NO: 490 - protein, 169 aa, Zea mays
MAKPRSGGGGGLLDLEGHYAFYGAYHSNPVNVGIHELFVWPIFLTALMLLHLTAPSTHAAGISAAVYAAYYFLLDRRAGALAALLCYLCWAASGALSARLGFSVGWKKRAPALLDNLVQAFLMAPFFVLLEILHTFGGYEPYPGFHDKVSKLIEEARKEWEDKKSKKSS

SEQ ID NO: 491 - protein, 192 aa, Blumeria graminis
MAEIRRKLVIVGDGACGKTCLLIVFSKGTFPEVYVPTVFENYVADVEVDGKHVELALWDTAGQEDYDRLRPLSYPDSHVILICFAVDSPDSLDNVQEKWISEVLHFCCGLPIILVGCKKDLRHEQKTLEELHKTSQKPVTPEQGEEVRKKIGAYKYLECSAKTNEGVREVFEHATRAALLTKKKKEKRCIIL

SEQ ID NO: 492 - protein, 353 aa, Shigella flexneri 2a str. 2457T
MLYTSQTTPEKAPKMSMIKSYAAKEAGGELEVYEYDPGELKPQDVEVQVDYCGICHSDLSMIDNEWGFSQYPLVAGHEVIGRVVALGSAAQDKGLQVGQRVGIGWTARSCGHCDACISGNQINCEQGAVPTIMNRGGFAEKLRADWQWVIPLPENIDIESAGPLLCGGITVFKPLLMHHITATSRVGVIGIGGLGHIAIKLLHAMGCEVTAFSSNPAKEQEVLAMGADKVVNSRDPQALKALSGQFDLIINTVNVSLDWQPYFEALTYGGNFHTVGAVLTPLSVPAFTLIAGDRSISGSATGTPYELRKLMRFAARSKVAPTTELFPMSKINDAIQHVRDGKARYRVVLKADF

SEQ ID NO: 493 - protein, 302 aa, Oryza sativa
LILGWRYTIFLLLYCAAFNPRMLFLVKPDPIVLKDHHGVVLSGNVTVNVLYYGRFTPAQRAVVAGFVRSASAAQHPRVPSVAAWWSTTSLYRGGGARLRLGMQVMDERMSLGRSLSLDNVTALTRAAGHHRGAVTAVLTAPDVLVAPFCMSRCGVHGHGGGVGAHGRARYAYLWAGNPAQQCPGQCAWPFHQPVYGPQAPPLVPPNGDVGVDGMVISLAALLAGTVTNPFGDGYYQGDAGAGMEAATACAGVFGSGAFPGYPGKLLKDPVTGASYNAVGLAGRKYLLPALWDPTTSQCKTLV

SEQ ID NO: 494 - protein, 246 aa, Larix gmelinii
YTYTLRNKGPEDVIVRVIYCGICHSDLVQMRNEMGMSHYPMVPGHEVVGIVTEVGSEVKKFKVGEHVGVGCIVGSCRSCGNCNQSMEQYCSKRIWTYNDVNHDGTPTQGGFASTMVVDQMFVVRIPENLPLEQAAPLLCAGVTVFSPMKHFGMTEPGKKCGILGLGGVGHMGVKIAKAFGLHVTVISSSDRKKEEALEVLHADAYLVSKDAEKMMEAAESLDYILDTIPVSHPLEPYLALLKTNGK

SEQ ID NO: 495 - protein, 201 aa, Zea mays
  unsure (1)..(201): unsure at all Xaa locations
DAWADAWADAWADAWALLPIVGGVALASLTEASFNWAGFWSAMASNVTFQSRNVLSKKLMVKKEESLDNINLFSIITVMSFFLLAPVTLLTEGVKASPPVLHPAGLNLKQVYTRSLIAXFCFHAYQQVSYMILATVSPQPHSMGNRVERPTIIVTSALFFRTPVSTINSLGLHLFLLLLLTIVFLFLYSQLKRLKPKPKTA

SEQ ID NO: 496 - protein, 324 aa, Oryza sativa
MAKKQSLLLAMMLVVAGLAVSAMADRKLMSLVKPQPNQLTYHNGAVLSGDIPVSILWYGRFTPAQKAVVTDFVLSLAAPLQAAPAPSVSQWWGSIHRLYLSKAVAVGKNGGAHGGGGGGRAKNARVVLSGQVSDEGCSLGKSLKLSQLPTLAARARPGKGGVALVLTAQDVAVEGFCMSRCGTHGPVSRAGAAYAWVGNSATQCPGQCAWPFHQPVYGPQAAPLVPPSGDVGMDGMVINVASMVAGAVTNPFGDGFYQGERGAALEAATACTGVYGKGAYPGYAGALLVDKATGASYNAHGAHGRKYLLPALFDPDTSACSTLV

SEQ ID NO: 497 - protein, 246 aa, Keteleeria evelyniana
YTYTLRKKGPEDVILRVLYCGICHSDLVHMHNEFGMSRYPLVPGHEVVGIVTEIGSEVKKFKVGEHVGVGFIVGSCRTCGHCNESMEQYCSKKIWSYDDVNHDGTPTQGGFASTMVVDQMFVVRIPENLSLEQAAPLLCAGVTVYSPMKHFGMTEAGKRCGILGLGGVGHMGVKIAKAFGLHVTVISSSDEKKEEALEVLGADAYLVSKDAEKIKEAAESLDYIMDTIPVAHPLDPYLSLLKTNGK

SEQ ID NO: 498 - protein, 246 aa, Keteleeria evelyniana
YTYTLRKKGPEDVILRVLYCGICHSDLVHMHNEFGMSRYPLVPGHEVVGIVTEIGSEVKKFKVGEHVGVGCIVGSCRSCGNCNQSMEQYCSKRIWTYNDVNHDGTPTQGGFASTMVVDQMFVVRIPENLPLEQAAPLLCAGVTVFSPMKHFGMTEPGKKCGILGLGGVGHMGVKIAKAFGLHVTVISSSDKKKEEALEVLGADAYLVSKDAEKMQEAAESLDYIMDTIPVAHPLDPYLSLLKTNGK

SEQ ID NO: 499 - protein, 480 aa, Streptomyces coelicolor A3(2)
MASAPAFDYAPAPESRAVVDIAPSYGVFIDGEFTEAADGKVFKTVSPATEEVLSEVAEAGEADVDRAVKAARKAFEKWSALPGAERAKYLFRIARIIQERSRELAVLETLDNGKPIRETRDADLPLVAAHFFYYAGWADKLDHAGYGADPRPLGVAGQVIPWNFPLLMLAWKIAPALATGNTVVLKPAETTPLSALFFADICRQAGLPKGVVNIITGDGRAGAALTAHPDVNKVAFTGSTAVGKQIARTVAGTRKKLTLELGGKGANIVFDDAPIDQAVEGIVNGIFFNQGQVCCAGSRLLVQESIHDELLDSLKRRLTTLRLGDPLDKNTDIGAINSAEQLARITALADQGEAEGAERWSPACELPSAGYWFAPTLFTNVTQAHTVARDEIFGPVLSVLTFRTPDEAVAKANNTPYGLSAGIWTEKGSRILAVANKLRAGVIWSNTFNKFDPTSPFGGYKESGFGREGGRHGLEAYLDV

SEQ ID NO: 500 - protein, 204 aa, Arabidopsis thaliana
MQNKHKCKLCSKSFCNGRALGGHMKSHLVSSQSSARKKLGDSVYSSSSSSSDGKALAYGLRENPRKSFRVFNPDPESSTIYNSETETEPESGDPVKKRVRGDVSKKKKKKAKSKRVFENSKKQKTIHESPEPASSVSDGSPEQDLAMCLMMLSRDSRELEIKLKKPEEERKPEKRHFPELRRCMIDLNLPPPQEAEAVTVVSAI

SEQ ID NO: 501 - protein, 445 aa, Ustilago maydis 521
MAIQKIQARMVIDSRGNPTVEVDLTTEKGLFRAAVPSGASTGIHEAVELRDGDKSSWMGKGVSKAIDNVNNVIAPELIKSGLPVTSQKEIDDFLIKLDGTPNKGKLGANAILGVSIAVAKAGAGEKGVPLYKYLAELSGVKAPYVLPAPAMNVINGGSHAGNALAFQEFMIVPTGAKSFTESIKIGTEVYHNLKKVINTKYGIDATNVGDEGGFAPNVQSADEALEILTEAIKKAGYEGQVHISLDVASSEFYKDGKYDLDFKNPNSDSSKWLTGKELADVYLGFIKKYPITSIEDPFDQDDWEAWSHLRANAGITIIGDDLTVTNPLRIKTAIEKKACNGLLLKINQIGTISESIQAAQLSQSDNWSVMVSHRSGETEDVTIADLVVGLGVGIIKTGAPCRSERTAKYNQLLRIESLEPSAVYAGIDGFTQGETAPKLITNKSA

SEQ ID NO: 502 - protein, 393 aa, Agrobacterium tumefaciens str. C58 (U. Washington)
MGRAAVPSGASTGAHEAVELRDGGKRYLGKGVEKAVEAVNTEIFDAIGGFDAENQIQIDQMMIALDGTPNKSRLGANAILGVSLAIAKAAAEASGLPLYRYVGGPNAHLLPVPMMNIINGGAHADNPIDFQEFMILPVGAENIREAVRMGSEVFHTLKKELSAQGHNTNVGDEGGFAPGLESAPAALDFIMKSIEKAGYRPGEDMYVGLDCASTEFFKDGKYVLEGEGRTLEPGAMAEYLAELVNKYPIISVEDGMAEDDWEGWKTLTDLVGNKCQLVGDDLFVTNSARLRDGIKMGVANSILVKVNQIGSLSETLDAVETAHKAGYTAVMSHRSGETEDSTIADLAVATNCGQIKTGSLARSDRLAKYNQLIRIEEMLGPQAAYAGRSILRG

SEQ ID NO: 503 - protein, 521 aa, Zea mays
MQFSSVLPLEGKACMSPVRRGSGGYGSERMRINCCSIRRNKALRRMCFSARGAVSSTQCVLTSDAGPDTLVRPNHPFRRNYADPNEVAAVILGGGTGTQLFPLTSTRATPAVPIGGCYRLIDIPMSNCFNSGINKIFVMTQFNSASLNRHIHRTYLGGGINFTDGSVEVLAATQMPGEAAGWFQGTADAVRKFIWVLEDYYKHKAIEHILILSGDQLYRMDYMELVQKHVDDNADITLSCAPVGESRASDYGLVKFDSSGRVIQFSEKPKGAALEEMKVDTSFLNFATCTLPAEYPYIASMGVYVFKRDVLLDLLKSRYAELHDFGSEILPKALHEHNVQAYVFTDYWEDIGTIRSFFDANMALCEQPPKFEFYDPKTPFFTSPRYLPPTKSDKCRIKDAIISHGCFLRECAIEHSIVGVPSRLNSGCELKNTMMMGADLYETEDEISRLLAEGKVPIGVGENTKISNCIIDMNCQGWKERLHNKQRGRSKSPDRPGRRILIRSGIVVVLKNATIKDGTVI

SEQ ID NO: 504 - protein, 208 aa, Cicer arietinum
EVSARDLTEISSNTEKDVAEKKNEVTDANYDGFNGGGNYGNGGGYPSNGGGNYGHGGGNYGNGGGNYGHGGNGGGNYGNGGGNYGHGGGNYGHGSNGGGNYGNGGGNYGHGGGNYGHGGNGGGNYGNGGGSYGNGGGNYGHGGGNYGNGGGNYGHGGGNYGHGGGYPGNGGHGGGYPGNGGHGGGHGGHGGGYVGEATDVQREDKTLN

SEQ ID NO: 505 - protein, 263 aa, Arabidopsis thaliana
MEDLDHEYKNYWETTMFFQNQELEFDSWPMEEAFSGSGESSSPDGAATSPASSKNVVSERNRRQKLNQRLFALRSVVPNISKLDKASVIKDSIDYMQELIDQEKTLEAEIRELESRSTLLENPVRDYDCNFAETHLQDFSDNNDMRSKKFKQMDYSTRVQHYPIEVLEMKVTWMGEKTVVVCITCSKKRETMVQLCKVLESLNLNILTTNFSSFTSRLSTTLFLQVTLSLSPSLISLFGNVITSTNYKILNASREYCTCLVLV

SEQ ID NO: 506 - protein, 246 aa, Tsuga canadensis
YTYNLRNKGPEDVIVRVIYCGICHSDLIQMRNEMGMSHYPMVPGHEVVGIVTELGSEVKKFKVGEHVGVGCIVGSCRKCGNCNESMEQYCSKRIWTYNDVNHDGTPTQGGFASSMVVDQMFVVRIPENLPLEQAAPLLCAGVTVYSPMKHFGMTEAGKRCGILGLGGVGHMGVKIAKAFGLHVTAISSSDKKKEEALEVLHADAYLVSKDAEKMQEAAESLDYILDTIPVAHPLEPYLSLLKTNGK

SEQ ID NO: 507 - protein, 246 aa, Tsuga canadensis
YTYNLRNKGPEDVIVRVIYCGICHSDLIQMRNEMGMSHYPMVPGHEVVGIVTELGSEVKKFKVGEHVGVGCIVGSCRKCGNCNESMEQYCSKRIWTYNDVNHDGTPTQGGFASSMVVDQMFVVRIPENLPLEQAAPLLCAGVTVYSPMKHFGMTEAGKRCGILGLGGVGHMGVKIAKAFGLHVTVISSSDKKKEEALEVLHADAYLVSKDAEKMQEAAESLDYILDTIPVAHPLEPYLSLLKTNGK

SEQ ID NO: 508 - protein, 227 aa, Tsuga canadensis
NKGPEDVIVRVIYCGICHSDLIQMRNEMGMSHYPMVPGHEVVGIVTELGSEVKKFKVGEHVGVGCIVGSCRKCGNCNESMEQYCSKRIWTYNDVNHDGTPTQGGFASSMVVDQMFVVRIPENLPLEQAAPLLCAGVTVYSPMKHFGMTEAGKRCGILGLGGVGHMGVKIAKAFGLHVTVISSSDKKKEEALEVLHADAYLVSKDAEKMQEAAESLDYILDTIPVAHP

SEQ ID NO: 509 - protein, 232 aa, Glycine max
  unsure (1)..(232): unsure at all Xaa locations
LVAEVVGTYFLIFAGCASVVVNLDXDKVVTQPXISIVWGLTVMVMVYSVGHISGAHFNPAVTIAHATTKRFPLKQVSAHVIAQVVGATLGYGTLXRLIFNGKSDHFXGTLPCGSDLQSFVVEFIITFYLMFVISGVATDNRAIGELAGLAVGSTVLLNVMFAGPLTGASMNPARSLGPAIVHNEYKGIWIYLVSPPLGAVAGTWAYNFIRYTNKPVREITKSASFLKGGEAE

SEQ ID NO: 510 - protein, 227 aa, Tsuga canadensis
NTGPEDVIIRVIYCGICHSDIFHTRNKMGLSHYPMVPGHEVVGIVTEIGSEVKKFKVGEHVGVGCIVGSCRICGNCNDSMEQYCKNMIWSYNDVNHDGTPTQGGFASTMVVDQMFVVRIPENLSLEQAAPLLCAGVTVYSPMKHFGMTEAGKRCGILGLGGLGHMGVKIAKAFGLHVTVISSSDKKKEEALEVLRADAYLVSKDAEKMQEAAESLDYILDTIPVAHP

SEQ ID NO: 511 - protein, 292 aa, Zea mays
MAVDLMGCYAPRRANDQLAIQEAAAAGLRNLELLVTSLSTQAAAPHRAADQPFGEIAGQAVSKFRKVISILDRTGHARFRRGPVEPSPPPAPPVVPGPPVSVAQPPQSLTLDFTKPNLSVSAATSVTSTSFFSSVTAGEGSVSKGRSLMSSGKPPLSGHKRKPCAGAHSEATTNGSRCHCSKRRKNRVKRSIRVPAISSKVADIPPDEYSWRKYGQKPIKGSPYPRGYYKCSTVRGCPARKHVERATDDPAMLVVTYEGEHRHTPGAVQGPSPLATASPVPVAVSAGNGLVV

SEQ ID NO: 512 - protein, 307 aa, Chloroflexus aurantiacus
MASKKQRIGVLTSGGDAPGLNAVIRAVVKSASGLGWEVIGIHDGFEGLLGTKSYRVLTNADVQVLLPRGGTILRTTNKGHFGPRRSDELSEADPYVRAVKAIEEMGLRALITIGGEGTQRIALELHKLGAPVIGVPKTIDNDLAGTDRTFGFDTALQVATDAIDRLHTTAASHNRVMVLEVMGRHTGWIALHAGLAGGADVILIPEIPFSIERVAEKVMARDQQGSSFSIIVVAEGARPRGGSEMYIAEGRLGGIGHWVGEQLEKLTAKEVRVVVLGHLQRGGSPSPYDRLLSTRYGAAQCRGSSGI

SEQ ID NO: 513 - protein, 246 aa, Tsuga mertensiana
YTYNLRNKGPEDVIVRVIYCGICHSDLIQVRNEMGMSHYPMVPGHEVVGIVTELGSEVKKFKVGEHVGVGCIVGSCRKCGNCNESMEQYCSKRIWTYNDVNHDGTPTQGGFASSMVVDQMFVVRIPENLPLEQAAPLLCAGVTVYSPMKHFGMTEAGKRCGILGLGGVGHMGVKIAKAFGLHVTVISSSDKKKEEALEVLHADAYLVSKDAEKMQEAAESLDYILDTIPVAHPLEPYLSLLKTNGK

SEQ ID NO: 514 - protein, 351 aa, Nostoc sp. PCC 7120
MSSLSQTVPIHDVRQLGINLNHWYVVARSHEVTSKPLGVTLWHQVIALYRDSEGQIHALEDRCPHRQVKLSHGQVIGNELECAYHGWRLNHHGECATVPYLAPNQKLPNCTIRPYPVKEQDGFIWLFPGDGEPSLEPLGLPEWDHLNYIASVAIINCQAHYSYLIENLMDMYHGHLHQDLQAWAQAELQDIEENDQRVDAHYQAQSYYKIDKIWSISQLFFPALRRLHPEPLDVSYIYPHWMSTLGKDFKIYCLLCPVNETQTKAYLIHFTSLNAFWRLHKLPVWFRRFVKDSLFGAAQKFLDGLVIKDVQMIEEEQQAYLQNPQRRNYELNRALVSVQRLMKNQVVEKLR

SEQ ID NO: 515 - protein, 475 aa, Streptomyces coelicolor A3(2)
MIIGGGPGGYEAALVAAQLGAEVTVVDCDGLGGASVLTDCVPSKTLIATAEVMTTFDSSYEELGIIVADDTPPMEQAARVVGVDLGKVNRRVKRLALAQSHDITASVTRAGARVMRGRGRLEGMQGLDGSRKVVVRAADGSEETLTADAVLIATGGHPRELADARPDGERILNWTQVYDLEELPEELVVVGSGVTGAEFAGAYQALGSRVTLVSSRDRVLPGEDPDAAAVLEDVFRRRGMNVMSRSRAQSVKRVGDRVEVTLSDGRVIGGSHCLMAVGAIPNTEGMGLEEAGVRLKDSGHIKTDRVSRTSAPGVYAAGDVTGVFALASVAAMQGRIAMYHFLGDAVTPLNLKTVSANVFTDPEIATVGYSQADVDAGKIDARVVKLPLLRNPRAKMQGIRDGFVKIFCRPGTEIVVGGVVVAPRASELIHPISIAVDNNLTVEQIANAFTVYPSLSGSIAEVARQLHTRKAGGEQ

SEQ ID NO: 516 - protein, 474 aa, Escherichia coli K12
MQHKLLINGELVSGEGEKQPVYNPATGDVLLEIAEASAEQVDAAVRAADAAFAEWGQTTPKVRAECLLKLADVIEENGQVFAELESRNCGKPLHSAFNDEIPAIVDVFRFFAGAARCLNGLAAGEYLEGHTSMIRRDPLGVVASIAPWNYPLMMAAWKLAPALAAGNCVVLKPSEITPLTALKLAELAKDIFPAGVINILFGRGKTVGDPLTGHPKVRMVSLTGSIATGEHIISHTASSIKRTHMELGGKAPVIVFDDADIEAVVEGVRTFGYYNAGQDCTAACRIYAQKGIYDTLVEKLGAAVATLKSGAPDDESTELGPLSSLAHLERVGKAVEEAKATGHIKVITGGEKRKGNGYYYAPTLLAGALQDDAIVQKEVFGPVVSVTPFDNEEQVVNWANDSQYGLASSVWTKDVGRAHRVSARLQYGCTWVNTHFMLVSEMPHGGQKLSGYGKDMSLYGLEDYTVVRHVMVKH

SEQ ID NO: 517 - protein, 264 aa, Triticum aestivum
  unsure (1)..(264): unsure at all Xaa locations
RVDTTKINDXTAAIGPLTRLVWLXSPTNPRQQITXIKKIXEXANSHGALVLVDNSIMSPVLSRSIELGADIVMXSATKFIAGHSDLMAGILAVKGESLAKEIAFLQNAEGSGLAPFDCWLCLRXIKTMXLRVEKQQDNAQKIAEFLASHPRVKQVNYAGLPDHPGRSLHYSQAKGAGSVLSFQTGSLSLSKHVVETTKYFNVTVSFGSVKSLISLPCFMSHASMPSSVREERGLTDDLVRISVGIEDVDDLIADLDYALRSGPA

SEQ ID NO: 518 - protein, 220 aa, Oryza sativa (japonica cultivar-group)
MASTTAAAEDHKGKRPLPPEEADEAAAAPPPAAAEEEGEKLVLVSDDGVEVLASVAAARVSKTLRGMIEDECATGAIPIAGVHSDVLALLVEYCERHAPHYDPEASDRDRYPFPPFPVELPPTASSIKPVTFVDPDADPHGLKAFDKKFLDVDNSTLFEIIMAANYLNIEELLDDACTAVADKMRGKKPEEIRDIFEIENDYTPEQEAEVRRENAWAFED

SEQ ID NO: 519 - protein, 405 aa, Agrobacterium tumefaciens str. C58
MEAVDEGTVAKLVVPAGTEAVKVNALIAILAAEGEDVAEAAKGGDAVPAKAEAPKPEAAKAEAPKEEAAPVKAEKPVADQAAASSTPAPVAKSGERIFASPLARRLAKEAGLDLSAVSGSGPHGRIVKTDVEKAAASGGAKAAPAAAASAGAPAPALAKGQSDEAVLKLFEQGSYELVPHDGMRKVIAKRLVESKQTVPHFYVSVDCELDTLLALRAQLNAAAPEKDGKPVYKLSVNDMVIKALALALRDVPDANVSWTESAMVKHKHADVGVAVSIPGGLITPIIRKAEEKSLSTISNEMKDYGKRAKERKLKPEEYQGGTTAVSNMGMMGVKSFSAVINPPHATILAVGAGEQRAVVKNGEIKIANVMTVTLSTDHRCVDGALGAELIGAFKRYIENPMGMLV

SEQ ID NO: 520 - protein, 180 aa, Triticum aestivum
MSYLLPHLHSGWAVDQAILAEEERLVIIRFGHDWDETCMQMDEVLSGVAETIKNFAVIYLVDITEVPDFNTMYELYDPSTVMFFFRNKHIMIDLGTGNNNKINWAMKDKQEFVDIVETVYRGARKGRRPPPHFSFFFFEPQRHGTRRSKVSAMPKSAHHPGDTENHQRHTNGNTRPQRNP

SEQ ID NO: 521 - protein, 243 aa, Triticum aestivum
  unsure (1)..(243): unsure at all Xaa locations
MDPCKFRPSSSFDTKTTTTNAGQPVWNDNEALTVGPRGPILLEDYHLLEKIAHFARERIPERVVHARGASAKGFFECTHDVTGLTCADFLRAPGARTPVIVRFSTVIHERGSPETIPDPRGFAVKFYTREGNWXTWSGNNFPLFLIXNGIKFPHPIPPFNPKPPSPCARSTWPPLPTFLFPTPPKPSPNPFFLPLLTHLPPPPPPPPPYHPPFPTNPPPSLPPPPPTPPSPHHPPPPPPQPFP

SEQ ID NO: 522 - protein, 428 aa, Chlamydophila caviae GPIC
MISLLKMPKLSPTMEVGTIVKWHKSNGDKIEFGDVLIEISTDKAVLEHTASEEGWFRECLIKEGTKVQIGTPIAVISSEKDESFNLEELLPKSPISQPSIENVEQGDVAASDVSHQNASMMVAFGFRPEPPLSEPLSLKQDSSKVPVSPLAKRLAKEKNLDISGIKGSGPGGRIVEKDLEKAPAKGIAGFGYPEAPEVHPGAYHEEALSPVREIIAQRLQAAKTFVPHFYVRQKVYTSPLLALLKELQAQGIKLSINDCIVRACALALKEFPEVNSGFNSIDNKIVRFETIDISIAVAIPDGVITPIVRCADRKNVGMISAEIKSLASKARSQSLKEEEYKGGSFCVSNLGMTGITEFTAIINPPQAAILAVGSVQEEPVVMNGEIVAGSTCILTLSIDHRVIDGYPAAMFMKRLQKILEAPSVLLLN

SEQ ID NO: 523 - protein, 481 aa, Arabidopsis thaliana
MALKALDYDTLNENVKKCQYAVRGELYLRASELQKEGKKIIFTNVGNPHALGQKPLTFPRQVVALCQAPFLLDDPNVGMLFPADAIARAKHYLSLTSGGLGAYSDSRGLPGVRKEVAEFIQRRDGYPSDPELIFLTDGASKGVMQILNCVIRGNGDGILVPVPQYPLYSATISLLGGTLVPYYLDESENWGLDVANLRQSVAQARSQGITVRAMVIINPGNPTGQCLSEANIREILKFCYNEKLVLLGDEVYQQNIYQDERPFISSKKVLMEMGSPFSKEVQLVSFHTVSKGYWGECGQRGGYFEMTNLPPRVVEEIYKVASIALSPNVSAQIFMGLMVNPPKPGDISYDQFARESKGILESLRRRARLMTDGFNSCKNVVCNFTEGAMYSFPQIRLPTGALQAAKQAGKVPDVFYCLKLLEATGISTVPGSGFGQKEGVFHLRTTILPAEDEMPEIMDSFKKFNDEFMTQYDNNFGYSKM

SEQ ID NO: 524 - protein, 362 aa, Corynebacterium glutamicum ATCC 13032
MTLTDNSKNVDAVILVGGKGTRLRPLTVNTPKPMLPTAGHPFLTHLLARIKAAGITHVVLGTSFKAEVFEEYFGDGSEMGLEIEYVVEDQPLGTGGGIRNVYDKLRHDTAIVFNGDVLSGADLNSILDTHREKDADLTMHLVRVANPRAFGCVPTDEDGRVSEFLEKTEDPPTDQINAGCYVFKKELIEQIPAGRAVSVERETFPQLLEEGKRVFGHVDASYWRDMGTPSDFVRGSADLVRGIAYSPLLEGKTGESLVDASAGVRDGVLLLGGTVVGRGTEIGAGCRVDNTVIFDGVTIEPGAVIENSIISSGARIGANAHISGCIIGEGAQVGARCELNAGMRVFPGVVIPDSGIRFSSDQ

SEQ ID NO: 525 - protein, 245 aa, Tsuga mertensiana
YTYNLRNKGPEDVIVRVIYCGICHSDLIQMRNEMGTSHYPMVPGHEVVGIVTELGSEVKKFKVGEHVGVGCIVGSCRKRGNCNESMEQYCSKRIWTYNDVNHDGTPTQGGFASSMVVDQMFVVRIPENLPLEQAAPLLCAGVTVYSPMKHFGMTEAGKRCGILGLGGVGHMGVKITKAFGLHVTVISSSDKKKEEALEVLHADAYLVSKDAEKMQEAAESLDYILDTIPVAHPLEPYLSLLKTNG

SEQ ID NO: 526 - protein, 227 aa, Tsuga mertensiana
NTGLEDVIIRVIYCGICHSDIFHTRNKMGLSHYPMVPGHEVVGIVTEIGSEVKKFKVGEHVGVGCIVGSCRICGNCNDSMEQYCKNMIWSYNDVNHDGTPTQGGFASTMVVDQMFVVRIPENLSLEQAAPLLCAGVTVYSPMKHFGMTEAGKRCGILGLGGLGHMGVKIAKAFGLHVTVISSSDKKKEEALEVLRADAYLVSKDAEKMQEAADSLDYILDTIPVAHP

SEQ ID NO: 527 - protein, 791 aa, Bordetella parapertussis 12822
MKERDTNAARPDGEPPVQWRRHSSHWGVFDAAHTGDRLKVRPFAGDPDPNRLIENLPDAIRHGVRVPEPMVRLGWLRDGPGPDTRRGSDDYVPMSWDEILDRLARELRRVVDHHGTAGVFGGSYGWSSAGRFHHAQSQLHRFLNVALGGYVRSVHSYSSGAAQVVLPHVVGGFDEVTLCNVSWEQITRHTDVVLAFGGMALKNSRVAAGGVSRHIERQAMAQAAGRGCRFYTIGPQRDDLPTEAAATWLPVVPGTDVALMLGIAHTLVAAGLHDRDFVVDFCDGWPVFEDYLLGRADGLAKNAAWAAALCGIDAAAITELALGLAGKRVLVTVAHSLQRADHGEQPVWMGLVLAALLGQVGLEGGGYSYALGSISKYGRRKNAVSIAALPQGANHEKRFIPCARIADMLLSPGETFPYNGRTLRYPHIRLAYWAGGNPFHHHQDLGRLAQAFQRLDTFVVHEIGWTATARHADIVLPCTMTLERDDIGASPTDDLMVAMQQVVPPYADARNDYDIFSDLAQRMGCGAAMTEGRSASDWLQWIYAATREQLAAKGLDAPSFDAFWEKGELRLPQRPDDGGAQRAFRLDPAAHPLPTPSGRIQIASAQIAAFGYDDCPGHPAWLPPADPVSAAYPLYLVANQPANKLHSQFDYGGYSQASKREGREVCTLHPALARAREIGEGDIVRIYSPRGSCLAAATLSTDIREDVVRLPTGAWYDPEQDERGLPMCVHGNPNAVTRDAGTSSLAQGCSGQLTAVQIEKYLGPLRDVRAYCPPAIATRPGPPGPLAPPAG

SEQ ID NO: 528 - protein, 311 aa, Oryza sativa
  unsure (1)..(311): unsure at all Xaa locations
VTVRGPPDAPAQLVFHHETYDVTTIRASTPMFLMARKIKALGVKMVLSGEGSDEXSVGGYLYFGRVGNKEEFHKETCRKVKALHQYDCLRANKATSAWGLEVRVPFLDKEFINVAMSMDPEWKMYNADLGRIEKWVMRKAFDDEEHPYLPKHILYRQKEQFSDGVGYNWIDGLKAFTEQQVSDEMMKNAAKVYPHNTPVNKEAYYYRMIFERLFPQESARETVPWGPSIACSTPAAIEWVEQWKASHDPSGRLIASHNSASASANHTNHANANANGNSNGKANGNCAMAANGTNGVGLVVANGTANGKMEA

SEQ ID NO: 529 - protein, 228 aa, Tsuga mertensiana
NTGPEDVIIRVIYCGICHSDIFHTRNKMGLSHYPMVPGHEVVGIVTEIGSEVKKFKVGEHVGVGCIVGSCRICGNCNDSMEQYCKNMIWSYNDVNHDGTPTQGGFASTMVVDQMFVVRIPENLSLEQAAPLLCAGVTVYSPMKHFGMTEAGKRCGILGLGGLGHMGVKIAKAFGLHVTVISSSDKKKEEALEVLRADAYLVSKDAEKMQEAAESLDYILDTIPVAHPL

SEQ ID NO: 530 - protein, 397 aa, Moraxella sp.
MFSVLKPLPTDPILGLMAAYKQDTNPNKIDLGVGVYKDELGNTPVLKAVKKAEAFRLENETSKSYIGLAGNLDYCQKMESLLLGEHKTLLANRVRTAQAPGGTGALRVAAEFIMRCNPKATVWVTTPTWANHISLFEAAGLTVKEYPYYDYENKDLLFDEMINTLKQVPKGDVVLLHACCHNPSGMDLNEAQWKVVAELAKEVGFTPLVDIAYQGFGSSLEEDARGLRILADAVEELIICSSCSKNFGLYRERIGACSLIAKDSATADISNSVLLSVVRSIYSMPPAHGADIVNTILSSTELTQMWHQELDEMRSRINGLRTQIKETLATKDIAQDFSFIERQHGMFSFLGINKEQITRLQKEYGIYIVGSSRVNVAGVSDANIEYFANAVADVCKS

SEQ ID NO: 531 - protein, 227 aa, Nothotsuga longibracteata
NKGPEDVIVRVIYCGICHSDLIQMRNEMGMSHYPMVPGHEVVGIVTELGSEVKKFKVGEHVGVGCIVGSCRKCGNCNESMEQYCSKRIWTYNDVNHDGTPTQGGFASSMVVDQMFVVRIPENLPLEQAAPLLCAGVTVYSPLKHFGMTEAGKKCGILGLGGVGHMGVKIAKAFGLHVTVISSSDKKKEEALEVLHADAYLVSKDAEKMQEAAESLDYILDTIPVAHP

SEQ ID NO: 532 - protein, 230 aa, Nothotsuga longibracteata
NTGPEDVIIRVIYCGICHSDIFHTRNKMGLSHYPMVPGHEVVGIVTEIGSEVKKFKVGEHVGVGCIVGSCRICGNCNESMEQYCKNMIWSYNDVNHDGTPTQGGFASTMIVDQMFVVRIPENLSLEQAAPLLCAGVTVYSPMKHFGLTEAGKRCGILGLGGLGHMGVKIAKAFGLHVTVISSNDKKKEEALEVLHADTYLVSKDAEKMQEAAESLDYILDTIPVAHPLEP

SEQ ID NO: 533 - protein, 515 aa, Escherichia coli CFT073
MEYPSHNDMSQQFNPYLCYFRPDTCVSCSRIFSLCLTLCWQEKMVTINTESALTPRPLRDTRRMNMFVSVAAAVAGLLFGLDIGVIAGALPFITDHFVLTSRLQEWVVSSMMLGAAIGALFNGWLSFRLGRKYSLMAGAILFVLGSIGSAFATSVEMLIAARVVLGIAVGIASYTAPLYLSEMASENVRGKMISMYQLMVTLGIVLAFLSDTAFSYSGNWRAMLGVLALPAVLLIILVVFLPNSPRWLAEKGRHIEAEEVLRMLRDTSEKAREELNEIRESLKLKQGGWALFKINRNVRRAVFLGMLLQAMQQFTGMNIIMYYAPRIFKMAGFTTTEQQMIATLVVGLTFMFATFIAVFTVDKAGRKPALKIGFSVMALGTLVLGYCLMQFDNGTASSGLSWLSVGMTMMCIAGYAMSAAPVVWILCSEIQPLKCRDFGITCSTTTNWVSNMIIGATFLTLLDSIGAAGTFWLYTALNIAFVGITFWLIPETKNVTLEHIERKLMAGEKLRNIGV

SEQ ID NO: 534 - protein, 466 aa, Rhodospirillum rubrum
MTETSFDVVVLGAGPGGYVAAIRAAQLGLKTAVVEREHLGGICLNWGCIPTKALLRSAEVFRQIRHAGAYGLKVTGAEVDVAAVVKRSRGVAKQLAGGVGHLLKKNKVTVIDGHGRLAGAGKLTVEKDGKTTTLAAKAIILATGGRARTLPGLEADGKLVWTYKNAMIPESLPKRLLVVGSGAIGIEFASFYTDCGSQVTVVEVLERVLPVEDEEISAFAKKSFEKQGMTIKTATTVKALKKSGDEVTATLEKDGKTEEITVDRVIMAVGIAANIEDIGLETVPSIKVERGHVVTDAFCRTGDPGIFAIGDLTAPPWLAHKASHEGVLVAEVIAGKKDLHPLDTMKIPGCTYCHPQVASIGLSEAKAKAKGFTVKVGRFPFVGNGKAIALGEAEGLIKTVFDARTGELLGAHMIGAEVTELIQGFAIAKTLETTEEDLIHTVFAHPTLSEMVHESVLDAYGRAIHF

SEQ ID NO: 535 - protein, 427 aa, Rhodospirillum rubrum
MEEGTLAKWLKKEGDPIAAGDVIAEIETDKATMEFEATDEGVLGKILVADGTAGIKVNQPIGILLEEGEDASALVQAAPAKAPDAPAKAAPEPAPVAAASQSDAAPAPAAAAPKRAAGERLFASPLARRIAAAEGLDLGALQGSGPHGRIVRRDVEAALAAGTGKTAEKAVAAPVAPAAPPQAVAAAAPKPVALPDAPHTKVANTSMRKIIARRLTESKQTVPHFYLTVDCKIDALLDLRKSLNARAEKRGDGVKLSVNDLIIKAVALALRKVPAANASWSDEAIVLWSDVDISVAVATPGGLITPIVRKADQKGLATISAEMKDLATRARDGKLKPEEFQGGGFSISNLGMYGIREFAAIINPPQGCILAVGAGEQRPVVEAGALAIATVMSCTLSVDHRVVDGAVGAEFLSAFKILIEDPMAMML

SEQ ID NO: 536 - protein, 262 aa, Schizosaccharomyces pombe
MSFLELTEVWGKPQKDIFFPSGSEVEESTDAPIQRTVQPIVTGSSVLALKFADGVMIAADNLASYGSLARFYDVERLTKVGDNTIVGAGGDISDYQQIQRLLEKLEIKEGNYGDGYALQPSYIHEYLSKVLYARRNKLDPYWNQLIVAGVDGENKEPYVAFADLRGTTYSAPAIATGFAMHLALPMLRKATDDDRWKTLSKESARATIDECMRVLFYRDARSLNKFSVATITPEGIEFQTDQSVSSKWAFAEKQYGYGTQTV

SEQ ID NO: 537 - protein, 425 aa, Rhodospirillum rubrum
MAEIIDIHAREILDSRGNPTVEVDVLLDSGAFGRAAVPSGASTGAHEAVELRDGDKTRYAGKGVLKAVEAVNGELFSALSGLDATDQLLIDQAMIDLDGTPNKARLGANAILGVSLACAKAAAEEAELPLYRYIGGARSHILPVPMMNIINGGQHADNPIDVQEFMIMPVSAPTVADAVRMGAEVFHALKKKLKDAGHNTNVGDEGGFAPNLASADEALAFIVKAIEAAGYKAGEDIVLALDAASSEFYKDGKYVLAGEGKTLDAEGMVKYYAELCKRYPILSIEDGCAEDDWAGWSLLTAELGAKVQLVGDDLFVTNPLRLAEGIRKGVANSILVKVNQIGTLSETLEAVEMAHKAGYTSVLSHRSGETEDSTIADIAVATNCGQIKTGSLSRSDRLAKYNQLIRIEEELGPVAVYAGASILRG

SEQ ID NO: 538 - protein, 369 aa, Photorhabdus luminescens subsp. laumondii TTO1
MKSRAAVAFGPGRPLEVVEIDVAPPQAGEVLVKISHTGVCHTDAFTLSGDDPEGVFPVILGHEGAGVVVEVGEGVTSVKPGDHVIPLYTAECGECLFCKSGKTNLCVAVRTTQGKGVMPDGTTRFSYKGQPIYHYMGCSTFSEYTVVAEVSLAKINPEANHEEVCLLGCGVTTGIGAVHNTAKVQSGDSVAVFGLGGIGLAVIQGARQAKAGKIIAIDTNPAKFELARQFGATDCLNPNDYDKPIQQVIIEMTEWGVDHTFECIGNVNVMRAALESAHRGWGQSVIIGVAGAGQEISTRPFQLVTGRSWRGTAFGGVKGRSQLPKMVEEAMKGEIELKPFVTHTLPLERINEAFDLMHEGKSIRTVIHY

SEQ ID NO: 539 - protein, 1016 aa, Shigella flexneri 2a str. 2457T
  unsure (1)..(1016): unsure at all Xaa locations
MQVSRRQFFKICAGGMAGTTAAALGFAPSVALAETRQYKLLRTRETRNTCTYCSVGCGLLMYSLGDGAKNAKASIFHIEGDPDHPVNRGALCPKGAGLVDFIHSESRLKFPEYRAPGSDKWQQISWEEAFDRIAKLMKEDRDANYIAQNAEGVTVNRWLSTGMLCASASSNETGYLTQKFSRALGMLAVDNQARVXHGPTVASLAPTFGRGAMTNHWVDIKNANLVVVMGGNAAEAHPVGFRWAMEAKIHNGAKLIVIDPRFTRTAAVADYYAPIRSGTDIAFLSGVLLYLLNNEKFNHEYTEAYTNASLIVREDYGFEDGLFTGYDAEKRKYDKSSWTYELDENGFAKRDTTLQHPRCVWNLLKQHVSRYTPDVVENICGTPKDAFLKVCEYIAETSAHDKTASFLYALGWTQHSVGAQNIRTMAMIQLLLGNMGMAGGGVNALRGHSNIQGLTDLGLLSQSLPGYMTLPSEKQTDLQTYLTANTPKPLLEGQVNYWGNYPKFFVSMMKAFFGDKATAENSWGFDWLPKWDKGYDVLQYFEMMKEGKVNGYICQGFNPVASFPNKNKVIGCLSKLKFLVTIDPLNTETSNFWQNHGELNEVDSSKIQTEVFRLPSTCFAEENGSIVNSGRWLQWHWKGADAPGIALTDGEILSGIFLRLRKMYAEQGGANPDQVLNMTWNYAIPHEPKSEEVAMESNGKALADITDPATGAVIVKKGQQLSSFAQLRDDGTTSCGCWIFAGSWTPEGNQMARRDNADPSGLGNTLGWAWAWPLNRRILYNRASADPQGNPWDPKRQLLKWDGTKWTGWDIPDYSAAPPGSGVGPFIMQQEGMGRLFALDKMAEGPFPEHYEPFETPLGTNPLHPNVISNPAARIFKDDAEALGKADKFPYVGTTYRLTEHFHYWTKHALLNAILQPEQFVEIGESLANKLGIAQGDTVKVSSNRGYIKAKAVVTKRIRTLKANGKDIDTIGIPIHWGYEGVAKKGFIANTLTPFVGDANTQTPEFKSFLVNVEKV

SEQ ID NO: 540 - protein, 308 aa, Chlamydophila caviae GPIC
MTKKIGFLFPGQGSQYVGMGKDLVENYPEAAEVFSLADETLGFSLSSIMFDGPEEKLLETAYSQLAIYLHSLAVVKILASRTSITPAAVSGLSLGEYTALVASGRISPIDGFNIISKRAQFMNQACQQSPGAMAAILGLTADVVEQNLESLGEGIWVANYNAPKQLVIAGLREKIEEAVALFTDLGAKRAILLKVFGAFHTPLMQTAEDELSPYLHNLDMNSSEVPFVSNVVADFLTNNDEIRQCLVKQMTSPTLWYQSCSKIDLEVDEFLEIGPGKVLAGLNRSIGLKKPIKSLGTVESINNFLAEL

SEQ ID NO: 541 - protein, 286 aa, Fraxinus excelsior
MESKEEDVRVGANKFNERQPIGTAAQSQDKDYKEPPPAPLFDPGELSSWSFYRAGIAEFIATFLFLYIAILTVMGVSKSDSKCSTVGIQGIAWAFGGMIFALVYCTAGISGGHINPAVTFGLFLARKLSLTRAIFYMVMQCLGAICGAGVVKGFGKTLYMTKGGGANVVAPGYTKGDGLGAEIVGTFVLVYTVFSATDAKRSARDSHVPILAPLPIGFAVFLVHLATIPITGTGINPARSLGAAIIYNKDHAWDDHWIFWVGPFIGAALAALYHVVVIRAIPFKNK

SEQ ID NO: 542 - protein, 357 aa, Pinus taeda
MGSLESEKTVTGYAARDSSGHLSPYTYNLRKKGPEDVIVKVIYCGICHSDLVQMRNEMGMSHYPMVPGHEVVGIVTEIGSEVKKFKVGEHVGVGCIVGSCRSCGNCNQSMEQYCSKRIWTYNDVNHDGTPTQGGFASSMVVDQMFVVRIPENLPLEQAAPLLCAGVTVFSPMKHFAMTEPGKKCGILGLGGVGHLGVKIAKAFGLHVTVISSSDKKKEEAMEVLGADAYLVSKDTEKMMEAAESLDYIMDTIPVAHPLEPYLALLKTNGKLVMLGVVPEPLHFVTPPLILGRRSIAGSFIGGMEETQETLDFCAEKKVSSMIEVVGLDYINTAMERLEKNDVRYRFVVDVAGSELDN

SEQ ID NO: 543 - protein, 357 aa, Pinus taeda
MGSLESEKTVTGYAARDSSGHLSPYTYNLRKKGPEDVIVKVIYCGICHSDLVQMRNEMGMSHYPMVPGHEVVGIVTEIGSEVKKFKVGEHVGVGCIVGSCRSCGNCNQSMEQYCSKRIWTYNDVNHDGTPTQGGFASSMVVDQMFVVRIPENLPLEQAAPLLCAGVTVFSPMKHFAMTEPGKKCGILGLGGVGHMGVKIAKAFGLHVTVISSSDKKKEEAMEVLGADAYLVSKDTEKMMEAAESLDYIMDTIPVAHPLEPYLALLKTNGKLVMLGVVPEPLHFVTPLLILGRRSIAGSFIGSMEETQETLDFCAEKKVSSMIEVVGLDYINTAMKRLEKNDVRYRFVVDVAASKLDN

SEQ ID NO: 544 - protein, 627 aa, Ipomoea batatas
MEREWFLPFKVLGLGIWMLIATSCSATLSPSGVNYEVVALIAIKTGLHDPYNVLENWDVNSVDPCSWRMVTCSPDGYVSALGLPSQSLSGTLSPGIGNLTNLQSVLLQNNAISGHIPAEIGKLERLQTLDLSNNKFNGDIPSTLGDLRNLNYLRLNNNSLSGQIPESLSKVDGLTLVDVSFNNLSGRPPKLPARTFKVIGNPLICGQSSENNCSVIYPEPLSFPPDAGKGQSDAGAKKHHVAIAFGASFGALFLIIVLVSLIWWRYRRNQQIFFDLNDNYDPEVCLGHLRRYTYKELRTATDHFNSKNILGRGGFGIVYKGSLNDGTIVAVKRLKDYNAAGGEIQFQTEVEMISLAVHRNLLRLWGFCSTENERLLVYPYMPNGSVASRLKDHVHGRPVLDWSRRKRIALGTARGLVYLHEQCDPKIIHRDVKAANILLDEDFEAVVGDFGLAKLLDHRESHVSTAVRGTVGHIAPEYLSTGQSSEKTDVFGFGILLLELITGQKAVDFGRGANQKGVILDWVKTLHQEGKLNLMVDKDLKNNFDRVELEEMVQVALLCTQFNPSHRPKMSEVLRMLEGDGLAEKWEASQRNDTPRYRTHENTPQRYSDFIEESSLIVEAMELSGPR

SEQ ID NO: 545 - protein, 258 aa, Glycine max
  unsure (1)..(258): unsure at all Xaa locations
RSAWYRNRLKHYVQAHGEYDGAWGCATSRTRLESKGDNVTVFELSASWMNLMSIIASDKYLVQFEHLLELMTTIPSKXELWNKSGHSFGGMNIALAMEKFPEKVAVIFFLTAFAPDTEHRPSYVLEQNKSSEDLDNEFAPSGNKTSMLFGPEYLPKKQYQLSPVEDLELAKTLVRPSSLFIEDLSKQKNFSKHGYGSVPRAYIVCTEDLAIPLEYQLWMIQNAGINDVLMIKGADHAAMFSKPRELFNSLQKIATKYD

SEQ ID NO: 546 - protein, 244 aa, Nothotsuga longibracteata
TYTLRKKGPEDVIIRVIYCGICHSDLSAMRNEMGMSHYPMVPGHEVVGIVTEIGSEVKKFKVGEHVGVGFIVGSCRNCSNCNESNEQYCNKKIWSYNDVNPDGTPTQGGFASTMVVDQMYVVRIPENLSLEQAAPLLCAGVTVYSPMKHFGMTEIGKRCGILGLGGVGHMGVKIAKAFGLHVTVISSSDKKKEEALEVLGADAYLVSKDAEKMQEAAESLDYILDTIPVAHPLEPCLSLLKTNG

SEQ ID NO: 547 - protein, 330 aa, Yersinia pestis biovar Medievalis str. 91001
MPKVHAQTMRNDNMTDKLTSLRQITTVVADTGDIAAMKLYQPQDATTNPSIILNAAQIPEYRKLIDEAIAWAREQSSDHAQQIVDATDKLAVNIGLEILKLIPGRISTEVDARLSYDTVASVAKAKRLIKLYNEAGISNDRILIKLASTWQGIRAAEQLEKEGINCNLTLLFSFAQARACAEAGVFLISPFVGRILDWYKANGDQKEFAPSEDPGVVSVTEIYQYYKKHGYKTVVMGASFRNLGEIIELAGCDRLTIAPSLLKELAESEGPVERKLAYTGEIQAKPAPLTEAEFYWQHNQDPMAVDKLADGIRKFAIDQGKLEKMISDLL

SEQ ID NO: 548 - protein, 244 aa, Vibrio cholerae
VLEVLIANGIEVIVQENNGYTPTPGISHAILTYNLKHTDKADGIVITPSHNPPQDGGIKYNPPHGGPAEGELTQAIEDRANAYISQQLAGVKRMPIALAKQSELLKQVDLVKPYVDDLVNVVDMAAIQKAKLKIGVDPLGGSGIDYWRQIGNAYQLDLTLVSEAIDPSFQFMSLDKDGVIRMDCSSPYAMAGLLALKDEYDLAFGNDPDYDRHGIVTPKGLMNPNHFLAVCIDYLYRHRQGWAG

SEQ ID NO: 549 - protein, 240 aa, Pseudolarix amabilis
YTYTLGNKGPEDVIVRVIYCGICHSDLVQMRNEMGMSHYPMVPGHEVVGIVTELGSEVKKFKVGEHVGVGCIVGSCRKCGNCNESMEQYCSKRIWTYNDVNHDGTPTQGGFASTMVVDQMFVVRIPANIPLEQAAPLLCAGVTVYGPLKHFGMTESGKRCGILGLGGVGHMGVKIAKAFGLHVTVISSSDKKKEEALEVLRADAYLVSKDAEKMQEAAESLDFIMDTIPVAHPLEPYLAL

SEQ ID NO: 550 - protein, 245 aa, Vibrio cholerae
SVLEVLIANGIEVIVQENNGYTPTPGISHAILTYNLKHADKADGIVITPSHNPPQDGGIKYNPPHGGPAEGELTQAIEDRANAYISQQLAGVKRMPIALAKQSELLKQVDLVKPYVDDLVNVVDMAAIQKAKLKIGVDPLGGSGIDYWRQIGNAYQLDLTLVSEAIDPSFQFMSLDKDGVIRMDCSSPYAMAGLLALKDEYDLAFGNDPDYDRHGIVTPKGLMNPNHFLAVCIDYLYRHRQGWAG

SEQ ID NO: 551 - protein, 1408 aa, Mycobacterium tuberculosis CDC1551
  unsure (1)..(1408): unsure at all Xaa locations
MMSLVIVAPETVAAAALDVARIGSSIGAANAAAAGSTTSVLAAGADEVSAAIATLFGSHAREYQAISTQVAAFHDRFAQTLSAAVGSYVSAEATNAAPLATLEHNVLNALNAPTQALLGRPLIGDGAAGAPGTGQAGGAGGILWGNGGAGGSGAPGQVGGAGGAAGLFGTGGAGGAGGAGAXGGAGGSGGWLLGNGGVGGAGGQSLLGGATGGAGGNAGLFGVGGTXGPGGPGGPGGVGGTGGAGGLGGTLYGAGGHGGAGGPGPIGGVGGHGGVGGAAGLLGVGGHGGAGGHGAEGVAGAAGEDLSPHGTSGGVGGDAGDGGTGGRGGWLAGAGGAGGAGGVGGTGGAGGAGFSRALIVAGDNGGDGGNGGMGGAGGAGGPGGAGGLISLLGGQGAGGAGGTGGAGGVGGDGGAGGPGNQAFNAGAGGAGGHGGDPGAGGAGGTGGAGSTIGAHGAAGASPTSGGNGGAGGNGAHFSSGGKAGGNGGAGGAGGLVGNGGAGGAGGNGAPGAPPSGGDPNGGGGGAGGAGGKGGDGGAQAGDGGAGGAGGKGGNGGNGATGATGLNGLGAGADGTDGGKGGNGGAGGGGGAGGQGGKALAATHQDGSMGAGGAGGNGGAGGMGGDGGNGAKGTFDNGGDGVGGNGGNGGSRGIGGAGGIGGAGSTAGADGARGATPTSGGNGGTGGNGANATVAGGAGGASGKGGNGGLVGNGGAGGKGGDGMAGVAGSSPTTAGESGTSGQNGGAGGAGGAGGRGGDFGGDGGTGGAGGNGADGGAGGNGANGANATTPGAKGGDGGHGGPGAQGGNGGQGGPGGLAGNLFGQNGIQGVGGSGGKGGAGGLAGDGGNGANGNFAFGDGNGGHGGNGGNPGAGGQGGSGGAGSTPGAKGAHGFTPTSGGDGGDGGNGGNSQVVGGNGGDGGNGGNGGSAGTGGNGGRGGDGAFGGMSANATNPGENGPNGNPGGNGGAGGAGGAGLNGGNGGAGGNGGLGGFGGNGAAGANGVAVGAPGQPGGAGGHGGAGGNGGAGGNGGQGVVSDGAGGAGGAGGDGGAPGDGANGGNGQGAGAFAGGGGGRGGDGGNAGNAGAGGPGGTGSTAGKAGPAGSIXHDGGNGGHGGHGAASGGNGGPGGHGGNGGNGGTGANGGNGGIGGTGGAGSTGAKGVLGTNEGDGGDGGRGGNGGRGGNGGQGLTGAGGNGGTGGTPGNGGNGGNGASGDLVTSPGDGGGGGRGGDAGRGGDAGLGGSSGPGGTPGDWGTGGTGGTGGTGGQGANGGLTGGRGGTGGNGGNGNTGGTGGAGGTGGTGHNGSQPGMGGNGGAGGFGGNGFAGVGGRGGMGGSGGTGGTGDAGPFGTGTGGTGGHGGQGGGGGFSILLGLGGLGGLGSPGSIATGTAGGAGGGGGFGGLGGGEFV

SEQ ID NO: 552 - protein, 241 aa, Vibrio cholerae
SVLEVLIANGIEVIVQENNGYTPTPGISHAILTYNLKHTDKADGIVITPSHNPPQDGGIKYNPPHGGPAEGELTQAIEDRANAYISQQLAGVKRMPIALAKQSELLKQVDLVKPYVDDLVNVVDMAAIQKAKLKIGVDPLGGSGIDYWRQIGNAYQLDLTLVSEAIDPSFQFMSLDKDGVIRMDCSSPYAMAGLLALKDEYDLAFGNDPDYDRHGIVTPKGLMNPNHFLAVCIDYLYRHRQ

SEQ ID NO: 553 - protein, 184 aa, Triticum aestivum
MDHRPQAWGRPRDDVYGAYDASFMSDNGPKQNTQQPIVTGTSVIAVKFKDGVVIAADNLASYGSLARFTDVKRLRPFADSSVVGFSGDISDMQYLDRHLIELSLDEAYTSPDAPRLNAANLHRYLAKLLYRRRSKFDPLWNHILVVGLDDDDKPFLAAADLLGSTYSAPSLATGFGAMLAQPIM

SEQ ID NO: 554 - protein, 237 aa, Abies firma
YTYNLRNKGPEDVILRVIYCGICHSDLVQMRNEMGMSNYPMVPGHEVVGIVTEIGSEVKKFKVGEQVGVGCIVGSCRKCGNCNESMEQYCSKRIWTYNDVNHDGTPTQGGFASTMVVDQMFVVRIPDNLPLEQAAPLLCAGVTVYSPLKHFGMTESGKRCGILGLGGVGHMGVKIAKAFGLHVTVISSSDKKKEEALEVLGADAYLVSKDAEKMQEAAESLDFIMDTIPVAHPLEPY

SEQ ID NO: 555 - protein, 245 aa, Vibrio cholerae
SVLVVLIANGIEVIVQENNGYTPTPGISHAILTYNLKHTDKADGIVITPSHNPPQDGGIKYNPPHGGPAEGELTQAIEDRANAYISQQLAGVKRMPIALAKQSELLKQVDLVKPYVDDLVNVVDMAAIQKAKLKIGVDPLGGSGIDYWRQIGNAYQLDLTLVSEAIDPSFQFMSLDKDGVIRMDCSSPYAMAGLLALKDEYDLAFGNDPDYDRHGIVTPKGLMNPNHFLAVCIDYLYRHRQGWAG

SEQ ID NO: 556 - protein, 235 aa, Vibrio cholerae
ANGIEVIVQENNGYTPTPGISHAILTYNLKHADKADGIVITPSHNPPQDGGIKYNPPHGGPAEGELTQAIEDRANAYISQQLAGVKRMPIALAKQSELLKQVDLVKPYVDDLVNVVDMAAIQKAKLKIGVDPLGGSGIDYWRQIGNAYQLDLTLVSEAIDPSFQFMSLDKDGVIRMDCSSPYAMAGLLALKDEYDLAFGNDPDYDRHGIVTPKGLMNPNHFLAVCIDYLYRHRQG

SEQ ID NO: 557 - protein, 263 aa, Zea mays
MDKYWEETQRYLEYEELSIYLEAQEDAMSCYDSSSPDGSISHSSSSAAACGNKNILMERDRRRKLNDKLYALRSVVPNITKMDKASIIKDAIEYIQQLQAEERRVLQELRVLDDDTAAATAQVECCDVDGGLLRREAERAKKMKRAQSVASGAQSAPPPPPPAPPHVEVLELRVSEVGDHVLVVSVTCRKRRDAMARVCRAIEDLRLRVITANVTSVAGCHVHTVFVEVDKIDHIQVKNMIEAALTLLDAPGSPHSSMSYYET

SEQ ID NO: 558 - protein, 561 aa, Psychrobacter sp. 273-4
MYQYNYADQTLVEERVAQFRDQTERFLAGELPEEQFLPLRLQNGLYIQRYAPMLRIAIPYGLLASYQLRKLAEITRKYDKGYGHFTTRTNIQLNWPKLEEVPDIMAELASVQMHSIQTSGNCIRNTTTDPYAGIHQEEIADPRPYCEIIRQWSTFHPEFAFLPRKFKIAVIGTANDRAATQVHDVGLHVKTNDAGELGFEVIVGGGLGRTPVIGKVIKEFLPRQHLLSYLDAILRVYNLHGRRDNKYKARIKILVESMGGPAFAKLVDAEWEAHIKDGPLTLTDASFDTASRFFSEPDYVTFDALQVQSELQQQLSADKEFANWYQQNTVAHKVAGYRAVVISLKAGLVDGTYIPSGDVSESQMDALADLADTYSFSELRGTYQQNLVFADVQTNQLYELWQQLSELHLARANINTLTDMIVCPGWDYCSLANATTHNIAEQIEKQFDDLDYLYDLGEIRLNMSGCMNACAHHHTGDIGILGVDKKGEHWYQISLGGNSSDNAKIGKILGKAVPADDVATTLQKILDVYLEQRVSNEHDIEGFGDLVDRVGITPFKEKVYG

SEQ ID NO: 559 - protein, 182 aa, Triticum aestivum
  unsure (1)..(182): unsure at all Xaa locations
MAPTVMASSATSVAPFQGLKSTAGLPVSRRSNGASLGSVSNGGRIRCMQVWPIEGIKXFETLSYLPPLNTXEALLKQVDYLIRSKWVPCLEFXSKVGFIFREHNASPGYYDGRYWXTMWKLPNVXGCTDATQVINEVEEVKKXEYPDAYVXRIIGFXDNMRQVQCVSFIAFKPPGCEESGKA

SEQ ID NO: 560 - protein, 258 aa, Ferroplasma acidarmanus
MYNDLKGKNVLVTGGTKGIGKAISLGFAVEGARVISISRHTPEDTDDRITYYNCDVSSSNDVKSTIENILSKFNTIDILVNNAGIEEYASLDKTDEGMWDRIMDINVKGVYNVSKYCIQEMIKNHGGNIINISSVQANIITKNAAAYVTSKHAIIGLTKSIALDYAPEIRCNAVLPATIDTPLVRKAAILEVGNNEEKIKEKIREWGLQHPLGRIGKPEEVANTVLFLASNQSSFITGASIMVDGGLSIKAPISTPDE

SEQ ID NO: 561 - protein, 557 aa, Nicotiana tabacum
ATSLSTPKLSTTLSSPTLHSLLYKHKFSLLSLSNPIKPLHFNFLTHSRSTPSSLSCTRRRFTAPRAESSNGADAPRHYDFDLFTIGAGSGGVRASRFASNFGASVAVCELPFSTISSDSTGGVGGTCVLRGCVPKKLLVYASKYSHEFEESCGFGWNYDVEPRFDWSTLIANKNAELQRLTGIYKNILKNAGVTLIEGRGKVVDPHTVDVDGKLYSAKNILISVGGRPFIPDIPGSEYAIDSDAALDLPTKPNKIAIVGGGYIALEFAGIFNGLKSEVHVFIRQKKVLRGFDEEIRDFVGEQMSLRGIEFHTEESPQAIVKSADGSLSLKTSRGTVEGFSHIMFATGRRPNTKNLGLETVGVKMTKNGAIEVDEYSRTSVPSIWAVGDVTDRINLTPVALMEGGALAKTIFAHEPTKPDYRNVPAAVFSQPPIGQVGLMEEQAIKEFGDVDVYTANFRPLKATISGLPDRVFMKLIVCAKTSKVLGLHMCGDDAPEIVQGFAIAVKAGLTKADFDATVGIHPTSAEEFVTMRTPTRKVRSSPSEGKAEHDIKAAAGV

SEQ ID NO: 562 - protein, 738 aa, Mycobacterium tuberculosis CDC1551
MMSLVIVTPETVAAAASDVARIGSSIGVANSAAAGSTTSVLAAGADEVSAAIATLFGSHAREYQAISTQVAAFHDRFAQTLSAAVGSYVSAEATNAAPLATLEHNVLNALNAPTQALLGRPLIGDGAAGAPGTGQAGGAGGILWGNGGAGGSGAPGQVGGAGGAAGLFGTGGAGGAGGAGAAGGAGGSGGWLLGNGGVGGAGGQSLLGGATGGAGGNAGLFGVGGTGGPGGPGGPGGVGGTGGAGGLGGTLYGAGGHGGAGGPGPIGGVGGHGGVGGAAGLLGVGGHGGAGGHGAEGVAGAAGEDLSPHGTSGGVGGDAGDGGAGGRGGWLAGAGGAGGDGGIGGAGGAGGGGHSLVIATGQAGGAGGSGGAGGVGGVGGAGGLISLLGGQGAGGAGGTGGAGGVGGDRGAGANGNQAFNAGAGGHGGNGGNPGTGGAGGTGGAGSITGAQGAIGATPTSGGNGGAGGNGANATTAGTNGANGGPGGHGGLVGNGGAGGNGANGAAGTNASDSGAVGGKGNSGGNGGQGGAGGDGGTLAGNGGAGGTGGRGADGGLGGSGAEGANATTAGERGQDGGKGGNGGVGGTGGNAVAPGANGGHGGNGGNPGFSGAGGLGGLSGDGVTRAAQGATPDFADTGGKGGNGGNGANAVAPGGTGASGGAGGNAGAGGKGGENIIGDGGGGNGGAGGKGGAGTLLGLTVFGDNGGAGVLGDSTDPDGSGGAGGAGGAGGAGGDPTI

SEQ ID NO: 563 - protein, 459 aa, Zea mays
MATAAAFSVSSPAASAVAARSKVFGGVNQARTRTGCRVGITRKNFGRVMMALAVDVSRFEGVPMAPPDPILGVSEAFKADKSELKLNLGVGAYRTEELQPYVLNVVKKAENLMLEKGENKEYLPIEGLAAFNKATAELLLGADNPVINQGLVATLQSLSGTGSLRLAAAFIQRYFPEAKVLISSPTWGNHKNIFNDARVPWSEYRYYDPKTVGLDFEGIIADIEAAPEGSFVLLHGCAHNPTGIDPTPEQWEKIADVIQEKKHMPFFDVAYQGFASGSLDEDAFSVRLFVKRGMEVFVAQSYSKNLGLYSERVGAINVVCSAPEVADRVNSQLKRLARPMYSNPPIHGAKIVANVVGDPTMFASGKQEMELMAGRIKNVRQKLYDSLSAKDKSGKDWSFILRQIGMFSYTGLNKAQSDNMTDKWHIYMTKDGRISLAGLSLAKCDYLADAIIDSFHNVN

SEQ ID NO: 564 - protein, 392 aa, Bacillus cereus ATCC 10987
MKKKHMETALIHHGYTSEEYKGSLTPPLFQTSTFTFETAQQGEASFAGVDPSYIYSRLGNPTVKLFEERMAVLEGGEEALAFGSGMAAISATLIGFLKAGDHIICSNGLYGCTYGFLEVLEEKFMITHSFCDMETEADMENKIRPNTKLIFVETPINPTMKLIDLKQVIRVAKRNGLLVIVDNTFCSPYLQRPLELGCDAVVHSATKYIGGHGDVVAGVTICKTKALAEKIRPMRKDIGGIMAPFDAWLLLRGLKTLAVRMDRHCDNAEKIVSFLKNHDAVEGVWYPEGELASRQMKRGGGVISFSIKGGKEETQAFINDLHFITIAVSLGDTETLIQHPATMTHAAIPAALRQEMGIYDNLIRLSVGLESWEDIVSDLEQALKKISTVSNQ

SEQ ID NO: 565 - protein, 364 aa, Staphylococcus aureus subsp. aureus MW2
MITAEKKKKNKFLPNFDKQSIYSLRFDEMQNWLVEQGQQKFRAKQIFEWLYQKRVDSIDEMTNLSKDLRQLLKDNFTVTTLTTVVKQESKDGTIKFLYELQDGYTIETVLMRHDYGNSVCVTTQVGCRIGCTFCASTLGGLKRNLEAGEIVSQVLTVQKALDATEERVSQIVIMGIGEPFENYDEMMDFLRIVNDDNSLNIGARHITVSTSGIIPRIYDFADEDIQINFAVSLHAAKDEVRSRLMPINRAYNVEKLIEAIQYYQEKTNRRVTFEYGLFGGVNDQLEHARELAHLIKGLNCHVNLIPVNHVPERNYVKTAKNDIFKFEKELKRLGINATIRREQGSDIDAACGQLRAKERQVETR

SEQ ID NO: 566 - protein, 237 aa, Vibrio cholerae
SVLDVLIANGIEVIVQENNGYTPTPGISHAILTYNLKHADKADGIVITPSHNPPQDGGIKYNPPHGGPAEGELTQAIEDRANAYISQQLAGVKRMPIALAKQSELLKQVDLVKPYVDDLVNVVDMAAIQKAKLKIGVDPLGGSGIDYWRQIGNAYQLDLTLVSEAIDPSFQFMSLDKDGVIRMDCSSPYAMAGLLALKDEYDLAFGNDPDYDRHGIVTPKGLMNPNHFLAVCIDYLY

SEQ ID NO: 567 - protein, 555 aa, Moritella marina
MCSIFGILDIKSDIKPLREQALELSKLLRHRGPDWSGIYTSDNAILVHERLAIVDVNNGAQPLYNEEKTHVLAVNGEIYNHKDLKKTLNVDFEFQTESDCEVILALYKEKGTQFLDDLNGIFAFALYDETEDAYLIGRDHIGIIPLYTGYDEHGNFYVASEMKALVPICTQIEEFPAGHYLWSKDGVVTPYYQRDWKDFDNVAQNGGDKSVVKQGLEDAVKRQLMCDVPYGVLLSGGLDSSVISAITQQYAKRRIEDGGKTEAWWPQLHSFSVGLNGSPDLAAAQKVADHLGTIHHSIEFTVQEGIDALRDVIYHIETYDVTTIRASTPMYLMARKIKAMGIKMVLSGEGADELFGGYLYFHKAPNAKEFHEETVRKVNKLHMFDCLRANKSMAAWGIEARVPFLDKEFVDASMRLNPELKMITGDRIEKNIIREAFEDLLPEEIVWRQKEQFSDGVGYSWIDQLKVHVEEAVTDQMLASAAFKFPINTPDTKEGYYYRAIFEDHFPGDSAAKCVPFGKSVACSTVEALAWDESFQNNADPSGRAAGVHNEAYED

SEQ ID NO: 568 - protein, 234 aa, Vibrio cholerae
EVLIANGIEVIVQENNGYTPTPGISHAILTYNLKHADKADGIVITPSHNPPQDGGIKYNPPHGGPAEGELTQAIEDRANAYISQQLAGVKRMPIALAKQSELLKQVDLVKPYVDDLVNVVDMAAIQKAKLKIGVDPLGGSGIDYWRQIGNAYQLDLTLVSEAIDPSFQFMSLDKDGVIRMDCSSPYAMAGLLALKDEYDLAFGNDPDYDRHGIVTPKGLMNPNHFLAVCIDYLY

SEQ ID NO: 569 - protein, 243 aa, Vibrio cholerae
SVLEVLIANGIEVIVQENNGYTPTPGISHAILTYNLKHADKADGIVITPSHNPPQDGGIKYNPPHGGPAEGELTQAIEDRANAYISQQLAGVKRMPIALAKQSELLKQVDLVKPYVDDLVNVVDMAAIQKAKLKIGVDPLGGSGIDYWRQIGNAYQLDLTLVSEAIDPSFQFMSLDKDGVIRMDCSSPYAMAGLLALKDEYDLAFGNDPDYDRHGIVTPKGLMNPNHFLAVCIDYLYRHRQGW

SEQ ID NO: 570 - protein, 378 aa, Streptomyces coelicolor A3(2)
MRTTVGWQATGPTLRRAPLERRDLRPDDLAVRVDYCGVCHTDLHAVRAGAADGSGPRPLVPGHEFTGVVTETGTAVTRFRPGDPVAVGNIVDSCGTCAMCRIGQENFCHSFPTLTYGGTDRRDGSTTLGGYSREYVLGERFAYALPAALDPAAAAPLLCAGITVWEPLRALGAGPGTRVAVAGLGGLGHLAVKLAVALGADTSVISRSPDKAEDARRLGARELVVSTDPERLAAARERFDIVVDTVSAPHDLGAYLRLVALDGTLSHLGHLGPVTVETLDLLIGRKKLSSAGSGGRKGTAEMLAFCAEHGITADIELLPSARVNEALDRLDRGDVRHRFVLDLSDLDHSGLPDLGLSDPSDPDLRGPDRSGPQDPAAG

SEQ ID NO: 571 - protein, 240 aa, Vibrio cholerae
LEVLIANGIEVIVQENNGYTPTPGISHAILTYNLKHTDKADGIVITPSHNPPQDGGIKYNPPHGGPAEGELTQAIEDRANAYISQQLAGVKRMPIALAKQSELLKQVDLVKPYVDDLVNVVDMAAIQKAKLKIGVDPLGGSGIDYWRQIGNAYQLDLTLVSEAIDPSFQFMSLDKDGVIRMDCSSPYAMAGLLALKDEYDLAFGNDPDYDRHGIVTPKGLMNPNHFLAVCIDYLYRHRQG

SEQ ID NO: 572 - protein, 368 aa, Bordetella parapertussis 12822
MKTKAAIAWKAGAPLTVEDVDLEGPKAGEVLVEIKATGICHTDYYTLSGADPEGIFPAILGHEGAGVVMDVGPGVTTLKKGDHVIPLYTPECRQCKFCLSRKTNLCQAIRTTQGKGLMPDGTSRFSIDGKPLFHYMGTSTFANHIVVPEIALAKVRPDAPFDKICYIGCGVTTGIGAVVFTAKVEAGANVVVFGLGGIGLNVIQGAKMVGADKIIGVDLNPAREAMARKFGMTHFVNPSEVENVVDHIIQMTDGGADYSFECIGNTKVMRQALECCHKGWGQSVIIGVAEAGAEISTRPFQLVTGREWKGSAFGGARGRTDVPKIVDWYMEGKINIDDLITHTLPLDRINEGFDLMKRGESIRSVVVY

SEQ ID NO: 573 - protein, 1015 aa, Escherichia coli K12
  unsure (1)..(1015): unsure at all Xaa locations
MDVSRRQFFKICAGGMAGTTVAALGFAPKQALAQARNYKLLRAKEIRNTCTYCSVGCGLLMYSLGDGAKNAREAIYHIEGDPDHPVSRGALCPKGAGLLDYVNSENRLRYPEYRAPGSDKWQRISWEEAFSRIAKLMKADRDANFIEKNEQGVTVNRWLSTGMLCASGASNETGMLTQKFARSLGMLAVDNQARVXHGPTVASLAPTFGRGAMTNHWVDIKNANVVMVMGGNAAEAHPVGFRWAMEAKNNNDATLIVVDPRFTRTASVADIYAPIRSGTDITFLSGVLRYLIENNKINAEYVKHYTNASLLVRDDFAFEDGLFSGYDAEKRQYDKSSWNYQLDENGYAKRDETLTHPRCVWNLLKEHVSRYTPDVVENICGTPKADFLKVCEVLASTSAPDRTTTFLYALGWTQHTVGAQNIRTMAMIQLLLGNMGMAGGGVNALRGHSNIQGLTDLGLLSTSLPGYLTLPSEKQVDLQSYLEANTPKATLADQVNYWSNYPKFFVSLMKSFYGDAAQKENNWGYDWLPKWDQTYDVIKYFNMMDEGKVTGYFCQGFNPVASFPDKNKVVSCLSKLKYMVVIDPLVTETSTFWQNHGESNDVDPASIQTEVFRLPSTCFAEEDGSIANSGRWLQWHWKGQDAPGEARNDGEILAGIYHHLRELYQSEGGKGVEPLMKMSWNYKQPHEPQSDEVAKENNGYALEDLYDANGVLIAKKGQLLSSFAHLRDDGTTASSCWIYTGSWTEQGNQMANRDNSDPSGLGNTLGWAWAWPLNRRVLYNRASADINGKPWDPKRMLIQWNGSKWTGNDIPDFGNAAPGTPTGPFIMQPEGMGRLFAINKMAEGPFPEHYEPIETPLGTNPLHPNVVSNPVVRLYEQDALRMGKKEQFPYVGTTYRLTEHFHTWTKHALLNAIAQPEQFVEISETLAAAKGINNGDRVTVSSKRGFIRAVAVVTRRLKPLNVNGQQVETVGIPIHWGFEGVARKGYIANTLTPNVGDANSQTPEYKAFLVNIEKA

SEQ ID NO: 574 - protein, 194 aa, Zea mays
MSLAPDPADGGAGTGTGTGDDWFLDCGILDDLPAAACGAFPWDASPSSSNPSVEVGSYVNTNDVFKEPNDVFKEPGSNKRLRSGSNDVHVPTSKASREKLRRNKLNDRFLELGSTLEPGKPVKADKAAILSDVTLMVIQLRSEAQQLKETNGSLEEKIKELKVIQPFLLNTVNPQIIPCTSMVRTCPCVIQESG

SEQ ID NO: 575 - protein, 539 aa, Oryza sativa
MTTPRATTTTSPFSSLLLLPISPSAATPPRRARTPPPAVAHGGVRWTAGGRRRRRGCRAAAAVVEDGVLLPKEQEDDASAARYDWREEWYPLYLAKEVPDDAALPLTVFDRQLVLYRDAAGVLRCHEDRCPHRLAKLSEGQLVDGKLECLYHGWQFDGEGKCVKIPQLPDGAKIPRNACARSYEVRDSQGVVWAWMSGTNPPDERKLPWFEPYARPGFTDLSTVHELPYDHSILLENLMDPAHVPISHDRTDWTAKREDAQPLFFEVTERTPRGFAGYWGKQRTPHLRNLLRFEAPCVLTNTLEFVDKDGKEQCFSAHFLCRPAGQGKSMLLVRFGSTQTSPLVKVLPRWYFHQNACKVFEQDMGFLSSQNEVLLREKVPTKELYLNLRSSDTWVAEYRRWMDRAGHGMPYYFGHSTLSPPPVPAVVEQAPAGAVAGMSASFPAKGGVGATHAPNPTNRYFRHVVHCKGCRDSVKRYASLKNAFAALAAAAVAAAILAATRQLKAVLLASAAALAAASYACNWVLSLITTNFIRTHRRL

SEQ ID NO: 576 - protein, 240 aa, Vibrio cholerae
VLIANGIEVIVQENNGYTPTPGISHAILTYNLKHTDKADGIVITPSHNPPQDGGIKYNPPHGGPAEGELTQAIEDRANAYISQQLAGVKRMPIALAKQSELLKQVDLVKPYVDDLVNVVDMAAIQKAKLKIGVDPLGGSGIDYWRQIGNAYQLDLTLVSEAIDPSFQFMSLDKDGVIRMDCSSPYAMAGLLALKDEYDLAFGNDPDYDRHGIVTPKGLMNPNHFLAVCIDYLYRHRQGWA

SEQ ID NO: 577 - protein, 207 aa, Eremothecium gossypii
MHCSQPEGVDQRIGHMDIAQFPTDKLLEMLTGLLYKIIKSNDRLKPFDQEKHDINNKYVAHVLSFRGKHIPTITLGDYFARIQKYCPITNDVFLSLLVYFDRIAKRCNALDPQLFVMDSYNIHRLIIAAVTVSTKFFSDFFYSNSRYARVGGISLEELNRLELQFSILCDFELIVSIQELQRYADLLYKFWHREHLAKASTNAAVPH

SEQ ID NO: 578 - protein, 496 aa, Escherichia coli O157:H7 EDL933
MITTFVFIPIFAIAAGVAQSLQYLNRYHVIREPPEHILNRLPSSASALACSAHALNLIEKRTLDHEEMKALNREVIEYFKEHVNPGFLEYRKSVTAGGDYGAVEWQAGGLNTLVDTQGQEFIDCLGGFGIFNVGHRNPVVVSAVQNQLAKQPLHSQELLDPLRAMLAKTLAALTPGKLKYSFFCNSGTESVEAALKLAKAYQSPRGKFTFIATSGAFHGKSLGALSATAKSTFRKPFMPLLPGFRHVPFGNIEAMRTALNECKKTGDDVAAVILEPIQGEGGVILPPPGYLTAVRKLCDEFGALMILDEVQTGMGRTGKMFACEHENVQPDILCLAKALGGGVMPIGATIATEEVFSVLFDNPFLHTTTFGGNPLACAAALATINVLLEQNLPAQAEQKGDMLLDGFRQLAREYPDLVQEARGKGMLMAIEFVDNEIGYNFASEMFRQRVLVAGTLNNAKTIRIEPPLTLTIEQCELVIKAARKALAAMRVSVEEA

SEQ ID NO: 579 - protein, 199 aa, Prochlorococcus marinus str. MIT 9313
MSIFVGNLPFRAEQEDVIELFAPFGEVANCALPLERDTGRKRGFAFVEMADESAEPAAIEALQGAEMMGRPLRINKAEPRGSAPRRGGGYGGGGGGGGGGYGGGGGGGYGGGGGGYGGGGGGYGGGGYGGGGYGGGGYGGGGGGGDRGSGARGWEDRSYGGASPETSSYDEGRTRRRRGGAAPEGEGGDSYSGYGGAEG

SEQ ID NO: 580 - protein, 560 aa, Acinetobacter sp. ED23-35
MTTLKITGMTCDSCAAHVKEALEKVPGVQSALVSYPKGTAQLAIEAGTSSDALTTAVAGLGYKAMLADAPPTDNRTGLFDKVRGWMGAADKGSGGERPLQVAVIGSGGPAMAAALKAVEQGAQVTLIERGTIGGTCVNVGCVPSKIMIRAAHIAHLRRESPFDGGMPPTPPTILRERLLAQQQARVEELRHAKYEGILDGNSAITVLHGEARFKDDQSLIVSLNEGGERVVMFDRCLVATGASPAMPPIPGLKESPYWTSTEALVSDTIPERLAVIGSSVVALELAQAFARLGSQVTIQARSTLFFREDPAIGEAVTAAFRAEGIKVLEHTQASQVAHVDGEFVLTTGQGEVRADKLLVATGRTPNTRSLALEAAGVAVNAQGAIVIDKGMRTSSPNIYAAGDCTDQPQFVYVAAAAGTRAAINMTGGDAINLTAMPAVVFTDPQVATVGYSEAEAHHDGIETDSRTVTLDNVPRALANFDTRGFIKLVIEEGSGRLIGVQAVAPEAGELIQTAVLAIRNRMTVQELADQLFPYLTMVEGLKLAAQTFSKDVKQLSCCAG

SEQ ID NO: 581 - protein, 246 aa, Zea mays
SARAQASSISQKDDTYEDIPNSQIRKVIAKRLLESKQTTPHLYLSKDVVLDPLLAFRNELKELHGIKVSVNDIIIKAVAIALRNVPEANAYWNNDKEETQKCDSVDISIAVATEKGLMTPIIRNADQKTISAISAEVKQLAEKARAGKLAPNEFQGGTFSISNLGMYPVDHFCAIINPPQSGILAVGRGNKVVEPVVDSDGTEKAAAVTKMSLTLSADHRVFDGQVGGKFFTELALNFSDIRRLLL

SEQ ID NO: 582 - protein, 73 aa, Zea mays
  unsure (1)..(73): unsure at all Xaa locations
MGGGLEVHKTRXIYEWNAGRXNLQFNLRLDPRATXVRQSAVFGLDVPILFYTGISRXFHVQDEDAGLTYMKFL

SEQ ID NO: 583 - protein, 274 aa, Triticum aestivum
  unsure (1)..(274): unsure at all Xaa locations
FGRPQGPAREGGGIPLAVSHALLGPFGPIAVYWLYSGLSVALDGGEGLDGYLLHAWGEDAASYVVSSGAALRGVLDQLATLAAFSVMMFAXIRALRLSRNRKGGGFESRPVKSVEQTXLINTCIFSDSRSATILIHTASSRXHSLTVKKLFEALVLDXLVGVILVSITRAFFLLLSGMTPRTSIFFFSFATIKTVDDHCGLWLPGNILHALFNNNTAYHDIHHQLYGNKYNFSQPFFVLWDKILGTYMPYSLEHRKGGGFESRPVKPVEQTKAD

SEQ ID NO: 584 - protein, 464 aa, Paracoccus denitrificans
MSTYDLIVIGAGPGGYVCAIRAAQLGLKVACVEGRETLGGTCLNVGCIPSKALLHASHMLHETHENFEKMGLMGAKPKVDWGKMQGYKAETVGGNTKGIEFLFKKNKIDWLKGWASIEAPGKVKVGDTTHETKNIVIATGSEPASLKGVEVDNDAGIVVDSTGALSLPKIPKSMVVIGAGVIGLELGSAYARLGAEVTVVEFLDAITPGMDGEVQKQFQRILAKQGLKFVLGAAVSGVEVEKGKAEVKYKLRKDDSEHEIKAECVLVATGRRPYVAGLGLDKVGVALTDRGFVQIDDHWQTSVKGIYAIGDAVPGPMLAHKAENEGMAVAEVIAGKHGHVNYDVIPGVIYTTPEVASVGLTEEAAKESGRKIKVGKFPFMGNARAKALFQAEGFVKMIADAETDRVLGCHIIGPNAGEMIHEVCVAMEFGASAQDIALTCHAHPTCSEAVREAALACGDGAIHA

SEQ ID NO: 585 - protein, 251 aa, Erwinia carotovora subsp. atroseptica SCRI1043
MASEQEKTADFGFRTVAKDEKEVMVAEVFHSVAAKYDLMNDLMSFGIHRIWKRFTIECSGVRRNQRVLDLAGGTGDLTAKFSRMVGEGGEVILADINASMLKVGREKLRNKGIIDNINYVQANAEALPFPDDFFDCITISFGLRNVTDKNKALRSMYRVLKPGGRLLVLEFSKPVIKQLSTIYDAYSFHILPRIGEAVASDAGSYRYLAESIRMHPDQETLKGMMSDAGFDSVNYFNLTGGIVALHRGFKF

SEQ ID NO: 586 - protein, 432 aa, Synechococcus sp.
VTSSPFKTIKSDEIFAAAQKLMPGGVSSPVRAFKSVGGQPIVFDRVKDAYAWDVDGNRYIDYVGTWGPAICGHAHPEVIEALKVAMEKGTSFGAPCALENVLAEMVNDAVPSIEMVRFVNSGTEACMAVLRLMRAYTGRDKIIKFEGCYHGHADMFLVKAGSGVATLGLPSSPGVPKKTTANTLTTPYNDLEAVKALFAENPGEIAGVILEPIVGNSGFIVPDAGFLEGLREITLEHDALLVFDEVMTGFRIAYGGVQEKFGVTPDLTTLGKIIGGGLPVGAYGGKREIMQLVAPAGPMYQAGTLSGNPLAMTAGIKTLELLRQPGTYEYLDQITKRLSDGLLAIAQETGHAACGGQVSGMFGFFFTEGPVHNYEDAKKSDLQKFSRFHRGMLEQGIYLAPSQFEAGFTSLAHTEEDIDATLAAARTVMSAL

SEQ ID NO: 587 - protein, 506 aa, Pseudomonas fluorescens
MSQDPKKCPVTHLTTEAGAPVVDNQNSMTAGARGPLLAQDLWLNEKLANFVREVIPERRMHAKGSGAFGTFTVTNDITQYTRAKIFSEVGKKTEMFARFSTVAGERGAADAERDIRGFALKFYTEEGNWDLVGNNTPVFFLRDARKFPDLNKAVKRDPFSNKRSATNNWDFWTLLPEAFDQVTIVMSDRGIPAGYRHIDGFGSHTFSFINTQNERFWVKFHMRTQQGIQNLTDAEAADLIAKDRESSQTDLFDAIERGEYPKWKMYVQIMPELEAETVPYHPFDLTKVWPKGDYPLIEVGEFELNRNPENYFQDVEQAAFAPSNLVPGISYSPDRMLQARLVNYADAARYRVGVNHSQVPVNAARCPVNSNRRDGQGRMDGNYGSLPHYEPNSFNQWQEQPQFKEPALKITGDADFWDFREDDNDYFSQPRALFNLMNDEQKQALFNNTAAAMGDALDFIKYRHIRNCYACDPAYGQGVAKALGMTVADAQAARETDPAKGLPSFL

SEQ ID NO: 588 - protein, 486 aa, Xylella fastidiosa Temecula1
MMHHNVHQSEILADPCDLQRAERWRQRDLRVLWHPCTQMREHPDTLPLVPIVRGEGVWLVGHDGRRYLDAVSSWWTNLFGHADPRISAAIAAQARTLEHVMLAGFSHEPAVRLAEALLRLAPRQDGREPLSKVFYADNGSAGVEVALKMAFHYFRNRGEEQRTRFIALHNGYHGETIGALAVGDIPLYRRVYAPLLTEVLFAPSPDAYLAEPGQSAAEYALQAAEALEALFKRYSGQICALILEPLLQCAGGMRMHHPVYLHRVRELCDAHGALLICDEIATGFGRTGTLFACEQACSAISTDTDDKDLGIMPDLLCLSKGLTGGFLPLAAVLTTQQLYEEFLDDSRERAFLHSHSYTGNPLACIAALTTLDIFENDCIIERNQVTAARMTQLAASLSGHPHVADVRQTGMVVAFELTRDGNKRTPFPPQARLGLHVYRAALARGVILRPLGDVVYWMPPYCVDEQQLHLLAETTRVAIDEAIACV

SEQ ID NO: 589 - protein, 131 aa, Synechococcus sp. WH 8103
TGQPNAIGGREAGGLAHLLPGYRLVANPEHRAEVEQAWKLPAGQIAAKPGLAAWQQVEAMERGDLDLWWVAATNPLVSMPDLDRVKQAMGNCPLVVVSEAYADSETSHYAHLLLPAAQWSEKAGAMTNTER

SEQ ID NO: 590 - protein, 492 aa, Bordetella parapertussis 12822
MRISMGKITGFMEFQRLQEAAEAPQKRLKHWREFVLHLNDEQAKQQAARCMDCGIPFCSNGCPVNNIIPDWNDLVYRQDWRRALDVLHSTNNFPEFTGRICPAPCEAACTLNINSDAVGIKSIEHAIIDKGWAEGWVTPQVPVRKTGKKVAVVGSGPAGLACSQQLARAGHSVTLFEKSDRIGGLLRYGIPDFKLEKSQIDRRIAQMEAEGVEFAPSTYIGNPDDAAADGLTVRTPQSLLADFDAVVMTGGSETPRDLPVPGRELSSVYYAMDFLRQQNKAVAGDRLSGQTLAKDKHVVVIGGGDTGSDCVGTSNRHGAASVTQFELLPQPPECEDKPMVWPYWPLKLRTSSSHDEGCERDWSVATKALAGSDGQVEKLVGVRVEWFKDEATGQMKMREVEDSEFEIPADLVLLAIGFVSPVATVLDAFGVDRDARGNVRANTDDYRTNVDKVFAAGDMRRGQSLVVWAIREGRQCARSVDEYLMGASELPR

SEQ ID NO: 591 - protein, 261 aa, Bacillus subtilis
MHSLLIEKTAVVTGAAGGIGLEIAKEFAREGAAVIISDVNEQAGKEAAAKLTDEGCEAVSITCDVTNEKQVADMLQTVEKQFGRLDVLVNNAGIQHVAPIEEFPTEQFERLIRLMLTAPFIAMKHAFPIMKKQQFGRIINMASVNGLIGFHGKAAYNSAKHGVIGLTKVGALEGAAAGITVNALCPGYVDTQLVRNQLKDISATRNVPYERVLEDVIFPLVPQQRLLSVKEIADYAVFLASDKAKGITGQAVVMDGGYTAQ

SEQ ID NO: 592 - protein, 308 aa, Staphylococcus aureus subsp. aureus MW2
MSKTAIIFPGQGAQKVGMAQDLFNNNDQATEILTSAAKTLDFDILETMFTDEEGKLGETENTQPALLTHSSALLAALKNLNPDFTMGHSLGEYSSLVAADVLSFEDAVKIVRKRGQLMAQAFPTGVGSMAAVLGLDFDKVDEICKSLSSDDKIIEPANINCPGQIVVSGHKALIDELVEKGKSLGAKRVMPLAVSGPFHSSLMKVIEEDFSSYINQFEWRDAKFPVVQNVNAQGETDKEVIKSNMVKQLYSPVQFINSTEWLIDQGVDHFIEIGPGKVLSGLIKKINRDVKLTSIQTLEDVKGWNEND

SEQ ID NO: 593 - protein, 748 aa, Mycobacterium bovis AF2122/97
MTSSDWLPTACILCECNCGIVVQVDDRRLARIRGDKAHPGSAGYTCNKALRLDHYQNNRARLSSPMRRRADGTYEEIDWDTAIVEIAEGFKQIRDTHGGDKIFYYGGGGQGNHLGGAYSGAFLKALGSRYRSNALAQEKTGEAWVDFQLYGGHTRGEFENAEVSVFVGKNPWMSQSFPRARVVLNEIAKDPGRSMIVIDPVVTDTAKMADFHLRVQPGCDAWCLAALAAVLVQENLCNEAFLAAHVHGVDTVRAALQEVPVADYAQRCGVDEELLRAAARRIGTAASVSVFEDLGIQQAPNSTVCSYLNKLLWILTGNFAKKGGQHLHSSFAPLFSQVSGRTPVTGAPIIAGLIPGNVVPEEILTEHPDRFRAMIVESGNPAHSLADSAACRAAFQALELMVVVDVAMTETARLAHYVLPAASQFEKPEATFFNFEFPRNGFQLRRPLFPPLPGTLPEPEIWARLVRALGVVDEADLRPLREAAAQGRQAYTEAFLAAAATNPTVAKLTAYVLYETLGPTLPDGLAGAAALWGLAQKTAMAYPDAVRRAGHADGNALFDAILERPSGVTFTVHNYEDDFALISHPDHKIALEIPEMLAEIRSLTQTPSRLTTPQLPIVLSVGERRAYTANDIFRDPSWRKRDANGALRVSVEDAQALGLADGCLARITTAAGSAEATVEVTETMLAGHAALPNGFGLDYTGDDGRTVVAGVAPNALTSTRWRDPYAGTPWHKHVPAAIRRADAESPIW

SEQ ID NO: 594 - protein, 459 aa, Capsicum chinense
MANITNEFMGHDMLAPFTAGWQSDMEPLVIEKSEGSYVYDINGKKYLDTLSGLWCATLGGSETRLVEAANKQLNTLPFYHSFWNRTTKPSLDLAKELLNMFTANKMAKVFFTNSGSEANDTQVKMVWYYNNALGRPQKKKIIARAKAYHGSTYISAGLSGLPPMHQKFDLPPPFVLHTECPHYWAYHLPGETEEEFSTRLANNLESLILKEGPETVAAFIAEPVLGAAGVILPPATYFDKVQAILRKHDILFIADEVVCGFGRLGTMFGSDKYNIKPDLVSVGKALSSGYMPIAAVLVSQKISSVILSESNKIGAFCHGFTYSGHPVACAVALEALKIYKERNITEVVNKISQKFQEGLKAFADSPIIGEIRGTGLALSTEFVDNKSPNDPFPYEWAVGTYFGAQCAKYGMLVSSTGDHVNMAPPFILSLEELDELIRIYGKALKDTEKRVEELKSQKQ

SEQ ID NO: 595 - protein, 199 aa, Zea mays
  unsure (1)..(199): unsure at all Xaa locations
MAYSMLSSAAVVTSPAQATMVAPFTGLKSSSAFPVTRKANNDITSIVSNGGRVSCMKVWPPXGKRKFETLSYLXPDLTEXXNWVRKVDYLSPATGGFLGGESRVGATGFGYRGSTGKHPPETTKGRYWEKGETFPLGRKGPHLWLKGVKEAPKGEKGEPPNRLSTGILGFQNTPGEAGGSCFFPPKKTTNFSGGLKLPL

SEQ ID NO: 596 - protein, 375 aa, Mycobacterium tuberculosis CDC1551
MRRCQMSFVVANTEFVSGAAGNLARLGSMISAANSAAAAQTTAVAAAGADEVSAAVAALFGAHGQTYQVLSAQAAAFHSQFVQALSGGAQAYAAAEATNFGPLQPLFDVINAPTLALLNRPLIGNGADGTAANPNGQAGGLLIGNGGNGFSPAAGPGGNGGAAGLLGHGGNGGVGALGANGGAGGTGGWLFGNGGAGGNSGGGGGAGGIGGSAVLFGAGGAGGISPNGMGAGGSGGNGGLFFGNGGAGASSFLGGGGAGGRAFLFGDGGAGGAALSAGSAGRGGDAGFFYGNGGAGGSGAGGASSAHGGAGGQAGLFGNGGEGGDGGALGGNGGNGGNAQLIGNGGDGGDGGGAGAPGLGGRGGLLLGLPGANGT

SEQ ID NO: 597 - protein, 400 aa, Bacillus subtilis
MNNLAFLFPGQGSQFVGMGKQFWNDFVLAKRLFEEASDAISLDVKKLCFNGDMNELTKTMNAQPAILTVSVIAFQVYMQEIGVKPRFLAGHSLGEYSALVCAGALSFQDAVTLVRERGILMQNADPQQQGTMAAVTQLSLQTLQEICSKVSTEDFPAGVACMNSEQQHVISGHRQAVERVIKMAEEKGAAYTYLNVSAPFHSSMIRSASEQFQTVLHRYSFRDAAWPIISNVTARPYSSGNSISEHLKQHMTMPVRWTESMHYLLLHGVTEVIEMGPNNVLAGLLRKTTNHIVPYPLGQTSDVPPLSNSTERKKHIVHLRKKQLNKLMIQSVIARNYNKDSAAYSTMTTPLFTQIQELKERMKRHEDVLSEQELEHSIHLCKLICEAKQLPAWEELRILK

SEQ ID NO: 598 - protein, 706 aa, Mycobacterium avium subsp. paratuberculosis str. k10
MATDHTSGAPDPKQRDLESARFRRDTGYLTTQQGVRVDHTDDALTVGERGPTLLEDFHAREKITHFDHERIPERVVHARGAGAYGYFEPYDDRLAQYTAAKFLTSPGTRTPVFVRFSTVAGSRGSADTVRDVRGFATKFYTEQGNYDLVGNNFPVFFIQDGIKFPDFVHAVKPEPHNEIPQAQSAHDTLWDFVSLQPETLHAIMWLMSDRALPRSYRMMQGFGVHTFRLVNARGEGTFVKFHWKPRLGVHSLIWDECQKIAGKDPDYNRRDLWEAIESRQYPEWELGVQLVAEDDEFSFDFDLLDATKIIPEEQVPVLPVGKMVLNRNPDNFFAETEQVAFHTANVVPGIDFTNDPLLQFRNFSYLDTQLIRLGGPNFAQLPVNRPVAQVRTNQHDGYGQHTIPQGRSSYFKNSIGGGCPALADEDVFRHYTQRVDGQTMRKRAEAFQNHYGQARMFFKSMSPVEAEHIVAAFAFELGKVEMPEIRSAVVAQLARVDDQLAAQVAAKLGLPEPPEEQVDESAPVSPALSQVTDGGDTIASRRIAVLAADGVDVVGTQRFTELMEQRGAVVEVLAPVAGGTLAGGSGGELRVDRSFTTMASVLYDAVVVACGPRSVSTLSDDGYAVHFVTEAYKHLKPIGAYGAGVDLLRKAGIDNRLAEDTDVLNDQAVVTTKAAADELPERFAEEFAAALAQHRCWQRRTDAVPA

SEQ ID NO: 599 - protein, 491 aa, Mycobacterium tuberculosis CDC1551
MSFVIASPEALLAAATDLAAIRSTIRAANAAAAVPTTGALAPAADEVSAGIAALFGAQAQSYQAVSAQAAAFHDRFVQLLNAGGGSYASAEIANAQQNLLNAVNAPTQTLLGRPLVGDGADGASGPVGQPGGDGGILWGNGGNGGDSTSPGVAGGAGGSAGLIGNGGRGGNGAPGGAGGNGGLGGLLLGNGGAGGVGGTGDNGVGDLGAGGGGGDGGLGGRAGLIGHGGAGGNGGDGGHGGSGKAGGSGGSGGFGQFGGAGGLLYGNGGAAGSGGNGGDAGTGVSSDGFAGLGGSGGRGGDAGLIGVGGGGGNGGDPGLGARLFQVGSRGGDGGVGGWLYGDGGGGGDGGNGGLPFIGSTNAGNGGSARLIGNGGAGGSGGSGAPGSVSSGGVGGAGNPGGSGGNGGVWYGNGGAGGAAGQGGPGMNTTSPGGPGGVGGHGGTAILFGDGGAGGAGAAGGPGTPDGAAGPGGSGGTGGLLFGVPGPSGPDG

SEQ ID NO: 600 - protein, 149 aa, Oryza sativa
MASSMLSSAAVVTSPAQATMVAPFTGLKSSAAFPVTRKTNKDITSIASNGGRVSCMKVWPPIGKKKFETLSYLPDLSDVELAKEVDYLLRNKWIPCVEFELEHGFVYREHGNTPGYYEGRYWTMWKLPLFGCTDSAQVLKEVEECKKEY

SEQ ID NO: 601 - protein, 375 aa, Mesorhizobium loti
MKTRAAVAVAAGKPLEIMEVDLDGPREGEVLVEIKATGICHTDEFTLSGADPEGLFPAILGHEGAGVVVDVGKGVTSVKKGDHVIPLYTPECRQCPSCLSRKTNLCTAIRATQGQGLMPDGSSRFSIGKDKIFHYMGCSTFSNFTVLPEIALAKVNPDAPFDKICYIGCGVTTGIGAVINTAKVEQGATAVVFGLGGIGLNVIQGLKLAGADMIIGVDLNNDKKAWGERFGMTHFVNPKEIDGDIVPHLVNMTKRGADQIGGADYTFDCTGNTKVMRQALEASHRGWGKSVVIGVAGAGQEISTRPFQLVTGRTWMGTAFGGARGRTDVPRIVDWYMDGKIQIDPMITHLLKLEDINKGFDLMHEGKSIRSVVVY

SEQ ID NO: 602 - protein, 286 aa, Lactobacillus plantarum WCFS1
MTALTKLTDTYTLNNGTKIPIVGFGTWQTPDGQVAYDSVLAALKAGYRHIDTAAAYGNEESVGKAIADSGVAREDLFVTTKLWNADHGYDAAKKALDTSLAKLGLDYVDLYLIHWPNPAAMRDNWEQLNADTWRAMEEAYTARKARAIGVSNFRPKHLDALLKTAKVVPAVNQIFLNPSDMEDEVVAYNRKHDILSEAYSPLGTGKIFSIPELKTLADKYDKSVAQVVLRWSLQHGFLPLPKSVHADRIEQNTELFDFELSDDDMKVIDGFHGVAGLANDPDQVNF

SEQ ID NO: 603 - protein, 503 aa, Zea mays
MMLAILARRRAAEAVLRRPQAAAGAAVSAWRAYAAAGEESDVVVVGGGPGGYVAAIKAAQLGLKTTCIEKRGTLGGTCLNVGCIPSKALLHSSHMYHEAKSSFAHHGVKFSNLEVDLPAMMAQKDKAVAGLTKGIEGLFKKNKVTYVKGFGKLSSPSEVSVDLIDGGSTIVKGKNIIIATGSDVKSLPGITIDEKKVVSSTGALCLSEIPKKLVVIGAGYIGLEMGSVWNRLGSEVTVVEFAPDIVPSMDGEVRKQFQRMLEKQKFKFMLKTKVVGCDTSGDGVKLTLEPAAGGEQTILEADVVLVSAGRSPFTSGIGLETLGVETDKAGRILVDKRFMTNVKGVYAIGDAIPGPMLAHKAEEDGVACVEFIAGKEGHVDYDTVPGVVYTHPEVASVGKTEEQVTALGIPYRVGKFPLLANSRAKAIDDAEGVVKVIAEKETDKILGVHIMAPNAGEIIHEAVIALQYGASSEDVARTCHAHPTVSEALKEACLQTFDKAIHI

SEQ ID NO: 604 - protein, 545 aa, Porphyra purpurea
MKFHGSYQQDDRELRKRGAEKAYQFMLRLKMPAGEFPAAMYRELDDLSTELGNTTLRATTRCTFQMHGILKKNLKSVFSRILNAGGSTIGACGDLSRNVMCTPAPIDAPEYVAARHLSRMLAELFAPQTGAFSEIWLDGEKAASLEYWKKDLDMGAVGQLMREDANDTHLTFPGHEEPIYGDQYLPRKFKIGVTVAGDNSIDIYTQDIGVVVVMNADNTEVEGYNLTVGGGMGRTHKKETTFARTGDHLGYVPAADIYTACKAIIAAQRDHGNREVRANARMKYLVDKMGIDAFRTLVEGYYGKSFEEYRQLPAWEFKDWLGWYDQGNGKAFLGLFIENGRIKDEGTFRLKTALRKIVDDFGYDFVVTPNQNVLIRDVPNERKADLDSLLTEHGITLPADVNINHRLAMACPALPLCGLAVTEAERHMPTVIDRVNSVLAEADLADMPVVMRMTGCPNGCARPYMAELGFVGSGPQAYQLWLGGCPDQTRLAYPYDEKVKDADIEATLRPLLAAYKEDRTDGESFGAFTARWGKDALHKYVAEHA

SEQ ID NO: 605 - protein, 248 aa, Triticum aestivum
  unsure (1)..(248): unsure at all Xaa locations
MATGTGGRPATMRAVQYSGYGGGSAALKYVEIPVPSLKKGEVLIKVEAASINPADCRIQKGLLRPFVPQFPFIPVTDVAGEIVEVGSAVQQFKVGDKVVSKLIFWKAGGLAEYVAASESITVPLPAGVSSADAAGLPVAGLTALQAVKAIGTKFDGTGVGSNILITAASGGIGSYAVQLAKLGNHNVTATCGARNLELVADIGADEALDYRTPEGAALKNSSGKKYDYIVNTTNGXKWSAFKPSLSSH

SEQ ID NO: 606 - protein, 95 aa, Glycine max
  unsure (1)..(95): unsure at all Xaa locations
ASSKISFPVVTTDNRAGAGMVAPFTGLIFMAGFPTIKTNIDITSIASNGGRVQXFQVWPPAGNKKFETLTFLTDLDNAQLSNEVKYLLKKGWIPC

SEQ ID NO: 607 - protein, 484 aa, Comamonas testosteroni
MKDIQNFINGAYVSTGRSFDKHSPLTGKVIAKVHEAGRNEVDAAVTAARTALNGPWGRMSVAERVEKLYAVADGINRRFEEFLAAECADTGKPRSVASHIDIPRGAANFKIFADVVKNVPTEFFEMATPDGRGAINYGHRGPVGVVGVICPWNLPLLLMTWKVGPALACGNTVVVKPSEESPQTAALLGEVMNEAGIPPGVYNVVHGFGPDSAGEFVTSHPGVDAITFTGETRTGEAIMKAAAKGARPVSLEMGGKNAAIVFADCDFDAAIDGTLRSAFVNSGQVCLGTERVYVERPIYERFVAALKQQIEGWKIGVPEDDDTKLGPLISKEHQAKVLSYYQLAVQEGATVVTGGGMPDLGAQYADGAWVQPTIWTGLPETARVIKEEIFGPCCHIAPFDTEEEVLTKANDNVYGLASAIWTQDLARAHRVAQRMHVGISWVNSWFLRDLRTPFGGAKQSGIGREGGVHSLEFYTELKNVCIKL

SEQ ID NO: 608 - protein, 440 aa, Glycine max
  unsure (1)..(440): unsure at all Xaa locations
SARAGGPDNDFGIKYNVNNGGPAPESVTDKIFQRTKEISAYKVLDAGELDLSKIGSSTYGPMEVEIVDSVKDYVTLLKDIFDFPLIKSFLQSNPSYRVLFDGLNGVTGPYAKAIFLDTLGLAPSSVQQCVPLPDFGGSHPDPNLTYAHSLVEVVERENIAFGAASDGDGDRNMIYGKGAFVTPSDSVAIIADWAXVIPYFKKTGIRGLARSMPTSNAIDYVAKAKGFEIFEVPTGWKFFGNLMDAGRLSICGEESFGTGSDHIREKDGIWAVIAWLNIIAAANQKTPGTGINELLQDHYTKYGRSFFSRYDYEEVSSEGSKQFTDNLDALFASSSFVGSKHGEFIVKKTTNFSYTDPIDGSVSKNQGHIVLFEDGSRVVFRLSGTGSQGATVRVYIERYSKDPSQFKKDTAEGLQPLIDAALEFTKLKEYLGRDKPTVIT

SEQ ID NO: 609 - protein, 823 aa, Rhodobacter capsulatus
MTKFSGNELRAELYRRAFLSYSVAPGALGMFGRSLLAKGARAEALANGTVMSGSHWGVFTATVENGRATAFTPWEKDPHPTPMLEGVLDSIYSPTRIKYPMVRREFLEKGVNADRSTRGNGDFVRVSWDQALDLVAAEVKRVEETYGPQGVFGGSYGWKSPGRLHNCTTLLRRMLTLAGGYVNGAGDYSTGAAQVIMPHVVGTLEVYEQQTAWPVLAENTEVMVFWAADPIKTSQIGWVIPEHGAYPGLEALKAKGTKVIVIDPVRTKTVEFFGADHVTPKPQTDVAIMLGMAHTLVAEDLYDKDFIANYTSGFDKFLPYLMGETDSTPKTAEWASDISGVPAETIKELARLFISKRTMLAAGWSMQRMHHGEQAHWMLVTLASMLGQIGLPGGGFGLSYHYSGGGTPSTSGPALSGITDGGAATKGPEWLAASGASVIPVARVVDMLENPGAEFDFNGTRSKFPDVKMAYWVGGNPFVHHQDRNRMVKAWEKLETFIVHDFQWTPTARHADIVLPATTSYERNDIETIGDYSNTGILAMKKIVEPLYEARSDYDIFAAVAERLGKGKEFTEGKDEMGWIKSFYDDAAKQGKAGGVEMPAFDAFWAEGIVEFPVTDGADFVRYASFREDPLLNPLGTPTGLIEIYSKNIEKMGYDDCPAHPTWMEPLERLDGPGAKYPLHIAASHPFNRLHSQLNGTVLREGYAVQGHEPCLMHPDDAAARGIADGDVVRVHNDRGQILTGVKVTDAVMKGVIQIYEGGWYDPSDVTEPGTLDKYGDVNVLSADIGTSKLAQGNCGQTVLAEVEKYTGPAVTLTGFVAPKAAE

SEQ ID NO: 610 - protein, 322 aa, Acinetobacter sp. ADP1
MFTFRSDNMSNENQKPQTPTEQAQRSDTQSPFLNQPLPQGTPQGQQQSLQQDLTNSSTRAVPKYNLPRGAGKTGNVGETTHFGYQTVNADDKAQKVAEVFHSVASKYDIMNDLMSFGIHRLWKRFAINMSGVRRGQHVLDIAGGTGDLAKVFSREVGPQGHVVLSDINESMLNVGRDRLIDAGCTNVDFVLANAETLEPFADNSFDLVTISFGLRNVTDKDAALEAMYRVLKPGGRLLVLEFSKPVFEPFSKLYDFYSFTALPLMGKLVANDSESYKYLAESIRMHPDQRTLKGMMEQAGFQNCDYHNLTGGIVAVHRGFKL

SEQ ID NO: 611 - protein, 505 aa, Pseudomonas aeruginosa UCBPP-PA14
MVLNLDKCIGCHTCSITCKNVWTSREGMEYAWFNNVETKPGIGYPKEWENQEKWKGGWVRAADGSIRPRIGGKFRVLANIFANPDLPEIDDYYEPFDFDYQHLHTAPKAEHQPVARPRSLVSGQRMEKIEWGPNWEEILGTEFAKRRKDKNFDQVQADIYGEYENTFMMYLPRLCEHCLNPACVASCPSGAIYKREEDGIVLIDQDKCRGWRMCISGCPYKKIYFNWKSGKSEKCIFCYPRIEAGQPTVCSETCVGRIRYLGVLLYDADRIHEVASCENERELYEKQLEIFLDPFDPAVIAQARKDGVADSVIEAAQKSPVYKLAMDWKLALPLHPEYRTLPMVWYVPPLSPIQNAAAEGHIGSDGVIPDVESLRIPVQYLANLLTAGDTAPVLLALKRLLAMRAYKRAEHVEGRQDLEVLAKVGLSVEQVEEMYRYLAIANYEDRFVIPSAHREEALSDAFAERSGCGFSFGNGCSGGSNSAVNLFGGKPTNRRDVIQVVQIQE

SEQ ID NO: 612 - protein, 220 aa, Oryza sativa
  unsure (1)..(220): unsure at all Xaa locations
MELSLSARLGPSRSRRRRWTARPRRPAAFACRCCSGGASHDGTTRRRWLASLLAATAAAVGIGVAGGEADAVSTSRRALRSAKIPESEFTTLXPNGLKYYDITVGSGLKAVKGSRVAVHYVAKWKGITFMTSRQGLGVGGGTPYGFDIGNSERGNVLKGLDLGVEGMKVGGQRLIIVPPELAYGKKGVQEIPPNATIELDVELLSVKQNSYGTPVKIIEG

SEQ ID NO: 613 - protein, 341 aa, Pseudomonas putida KT2440
MLVTKQPVLRRFWYALLPMTALEDGPKPFTLLGEALVLWKRPDGTPVAMRDRCCHRTAKLSKGFVSAEGNIACGYHGWEYDCTGTCVKIPQSPTGAIPPGAAVKAYHCQEKYGYAWVSLDDPLQPIPEFPEDGAPGYRRIFQFYEEWKTSPLRVMENSFDNSHFSFVHKANFGLFDQPQPASYEFRETDYGFEAETRVPIRNPEASFRITGTTEPITQRHLLNRYYLPFSRRFGCMYPDSGIHHIIYNCATPIDDNRLMLVQWLYRNDSEEQCSTQELIDWDAAITAEDRDILEATDPDACVDTRRRVELHMPSDKPGLVIRRQLLGLLEAHGESEVFLSH

SEQ ID NO: 614 - protein, 652 aa, Glycine max
MQWAATSHASSCLLNRIKSLIHNDMALSRLRHPLFSRSLRILSSPARSLSRTSNSSIFTLGGDHHNIIRPAFCSRLTGIHDRSLKSKWTDVKYFSSSDSSHEVLGMPALSPTMTQGNIAKWRKKEGEKIEVGDVLCEIETDKATLEFESLEEGFLAKILVPEGSKDVPVGQPIAITVEDENDIQNVPASAGGETRVEEKKPTREDVTDERKSESTSAIINASELPPHVLLEMPALSPTMNQGNIAKWRKQEGDKIEVGDILCEIETDKATLEFETLEEGYLAKILAPEGSKEVAVGHPIAITVEDASDIEAIMNSVSRSSTNQQKAPQRDTKSEAKAQKNNIIRISPAAKLLITEYGLDASTLNATGPYGTLLKGDVLSAIKSGKLSPKPASSKEKASSFQSHQQVAASQESKSDLKMSDAYEDFPNSQIRKVIAKRLLDSKQNTPHLYLSSDVVLDPLLSLRKDLKEQYDVKVSVNDIIVKVVAAALRNVPEANAYWNVETGEVVLNDSIDICIAVATEKGLMTPIIKNADQKTISAISSEVKELAAKARAGKLKPHEFQGGTFSISNLGMFPVDKFCAIINPPQACILAVGRGNKVVEPVIGTDGIEKPSIATKLSLTLSADHRVFDGKVGGAFLSALQSNFSDIRRLLL

SEQ ID NO: 615 - protein, 504 aa, Glycine max
MVIIIKYYTYIYIPTIEKSEQNPTKAAMAAMQRPLKRTIAIAKQRACFSSLLPSAAAAAAADTVAPPQLPPFDHQPHPYNGPSADEVFAKRKTFLGPSVFHYYKKPLNIVEGKMQYLYDDSGRRYLDAFAGIVTVSCGHCHPEILNAITEQSKLLQHATTIYLHHTIGDFAEALAAKMPGNLKVVYFVNSGSEANELAMMMARLYTGNLGMISLRNAYHGGSSSTLGLTALNSWKYPIPEGHVHHVMNPDPYHGAFGTDAASYANDVQDHIDYGTSGKVAGFIAESIQGVGGAVELAPGYLKLVYDIIHKAGGVCIADEVQTGFGRTGSHYWGFETQGVIPDIVTMAKGIGNGLPLGAVVTTPEIASVMAQKIQFNTFGGNPVCSAGGLAVLRVLDKEKRQAHCADVGSYLLERLRFLMERHDIIGNVRGRGLMVGLELVTDRTNKTPAKAETAVVFEKLRELGVLVGKGGLHGNVFRIKPPMCFSKDDADFLVDALDYSLSKL

SEQ ID NO: 616 - protein, 838 aa, Campylobacter jejuni subsp. jejuni NCTC 11168
MLDRRKFLKIGASLSALPLIPSLSAGKTVEASKVSLGLVKNGEVITAAHWGILKLTIKDGKIVKSEPWEKVTKMDNPLQHYTADMVYKSRVKYPYVRKSYLENPDNPKPELRGKDEFVRVSYDEAIKLIAKELKKTRDSKGASAIFGGSYGWKSSGNMQNSRILLHRFLNVTGGFVGATGDYSTGASQVIMPYVVGSIEVYEQQTSWENILSDSKYVVIWGADPLSTLRIAWTSNEQRGLAYFEKLKDSKIKVICIDPVKTTTAKFLNAKWIAPRPNTDVALMMGMASHLIAKKKVNYEFLDTYTTGFDKFKDYLEGKEDGVKKDTKWASKICGIDEKTIKNLAETFYDNSTMIMSGWGMQRAHHGEQPHWMLVTLCAMLGQIGTKGGGFGLSYHYSNGGVPTCKGGVIGGMTAGSLGIWKNGKFKGLSKAEASSEGAEWLQNAASYSFPVARIADALLHPGKTIDHNGAKITYPDIDFIYWVGGNPLVHHQNTNTNVKAWRKPRTVVVNEIYWTPTAKMADIVMPVTSSYERDDITMTGDYSNMHIAPMKQAVEPVGESKDDYVIFSDICKIYGKDVFNAYTENGKKAKDFIKEYYNSALKQTQSFGEAFATPMPSFEEFWAKNEPITFEPTAESLEWTRFSEFIEDPILNALGTDSGLIEIYSETIKNYNYDDCKAHPTWFEPIEWLGNASKEAPFHLLTNHPRDRLHSQLCHTSLRDTYAIKDREPILINSKDAKKLGIKNGDVVRVFNKRGEVLAGAVVSDEIMQGVVRLCEGAWYDPNENGLCKCGNANVLTMDIPTSKLANGNISHTGLVNIEKFKGELPKLTAFSAPKGAN

SEQ ID NO: 617 - protein, 438 aa, Thermobifida fusca
MSEQRIIRPTPISGFPEWTPRIRSVELRWLDHIRRGFERYGFSSVETPSVEVLDVLLSKGETSQEIYTLQRLQADADDSSDARLGLHFDLTVPFARYVAQHFNDLVFPFKRYQIQRVWRGERPQEGRFREFTQCDIDVINVDRIPLHFDAELPRIVHEVLTGLDIPAWTLNINNRKVLQGFYEGLGITDPLAVIRAVDKLHKIGADAVREILIDQAGLSSDQAAACLELAEIRGSDTTVVDAVAKLGVSHPTLTAGLDELGEVLDELSDLPSGSVVADLSIARGLDYYTGTVYEATFNDDPGYGSICAGGRYENLAGQFIRRSLPGVGISIGLTRIFAKLVSEGRITGGRFCPTDVLVVLPSDERRSAALAVAAQLRERGFNTEVYHQAAKIGKQIQYAVKKDIPFVWFPPFDDGRPHEVKNLATGEQVEADPASWNG

SEQ ID NO: 618 - protein, 564 aa, Thermobifida fusca
MPSAPTPTGRPARKTTRPRRGEGQWALGYREPLNKNEEIKKNDDGLNVRKRIIDIYSKQGFDSIDPADLRGRFRWYGLYTQRAPGIDGGKTAVLEPEELDDRYFMMRVRTDGGQLNVAQLRVLAEVSTAYGRDTADITDRQNIQMHWVRIEDVPTIWERLESVGLTTTEACGDTPRGLLGCPLAGIAEDEIIDATPQLRQIVADHIGSPLFSNLPRKFKTAIDGCAVHCTNYEVNDVAFVGVIGPDGTPGYDLFVGGGLSTNPMFAQRLGAFVRPEQVSEVWAGVCSVFRDYGYRRLRHRARIKFLIKDWGPQKFREVLEKEYLGYSLPDGPEPVLDPGTRRDHVGIHRQKDGRFFVGFAPRVGRVSGTILGRIADIAEAHGSNRVRTTADQKLAILDITEDRLDSVVAALEAEDLQVNPSVFRRQTMACTGIEYCKLAIVETKNRAMALIDELERRLPDFTEPLTINVNGCPNACARTQIADIGLKGQLVTDAHGNQVEGFQIHLGGGLGLQAGFGRKVRGLKTTAAELPDYIERVVRRFAEQRQAEETFAEWVARADEADLK

SEQ ID NO: 619 - protein, 319 aa, Pseudomonas huttiensis
MLILGGGIIGLEMGTVYSTLGARLDVVEMMDGLMQGADRDLVKIWQKMNAKRFDNIMLKTKTVGAEATPEGIKVTFAPAEEGGTTPEPQVYDLVLQAVGRTPNGKKIAAEKAGVAVTDRGFINVDIQMRTNVPHIFAIGDIVGQPMLAHKAVHEAHVAAEVIAGELQGNKELASAAFNARVIPSVAYTDPEVAWVGLTEDQAKAQGIKVKKGLFPWTASGRAIANGRDEGFTKLLFDDSPEAGSGDGHAGRGHGKILGGGMVGTHAGDMIGEIALAIEMGADAVDIGKTIHPHPTLGESIGMAAEVAHGSCTDVPPARK

SEQ ID NO: 620 - protein, 518 aa, Zea mays
  unsure (1)..(518): unsure at all Xaa locations
MQFALALDTNSGPHQIRSCEGDGIDRLEKLSIGGRKQEKALRNRCFGGRVAATTQCILTSDACPETLHSQTQSSRKNYADANRVSXIILGGGTGSQLFPLTSTRATPAVPVGGCYRLIDIPMSNCFNSGINKIFVMSQFNSTSLNRHIHRTYLEGGINFADGSVQVLAATQMPEEPAGWFQGTADSIRKFIWVLEDYYSHKSIDNIVILSGDQLYRMNYMELVQKHVEDDADITISCAPVDESRASKNGLVKIDHTGRVLQFFEKPKGADLNSMRVETNFLSYAIDDAQKYPYLASMGIYVFKKDALLDLLKSKYTQLHDFGSEILPRAVLDHSVQACIFTGYWEDVGTIKSFFDANLALTEQPSKFDFYDPKTPFFTAPRCLPPTQLDKCKMKYAFISDGCLLRECNIEHSVIGVCSRVSSGCELKDSVMMGADIYETEEEASKLLLAGKVXVGIGRNTKIRNCIIDMNARIGKNVVITNSKGIQEADHPEEGYSYYIRSGIVVILKNATINDGSVI

SEQ ID NO: 621 - protein, 248 aa, Nicotiana glauca
MPGIAFGRIDDSFSVGSLKAYLAEFISTLLFVFAGVGSAIAYNKLTANAALDPAGLVAVAVCHGFALFVAVAVGANISGGHVNPAVTFGLALGGQITLLTGLFYIIAQLLGSIVACLLLKVVTGGLAVPTHNVAAGVGALEGVVMEIIITFALVYTVYATAADPKKGSLGTIAPIAIGFIVGANILAAGPFSGGSMNPARSFGPAVASGDFTNNWIYWAGPLVGGGLAGLTYSNVFMQHEHAPLSSDF

SEQ ID NO: 622 - protein, 161 aa, Thinopyrum intermedium
FGSVYKGVLREPEKEVAVKRMSHDSRQGVKEFIAEVLSIGRLRHRNLTQLLGYCRRKDELLLVYEYMENGSLDKYLHSRNGQLLCWSQRYSIIKGVASSLLYLHEDWEQVVIHRDIKASNVLLDSKMNGRLGDFGLARIYDHETTAETTHVSGTMGYIAPE

SEQ ID NO: 623 - protein, 108 aa, Triticum aestivum
MEHGSLDDSSSSTFSIMEEDHTLANSVRFVLNQDPRVAFCGYSIPHPAENKVNIRVQTTGDPAKDVLKDALQDLMVMCQHIRGTLDTAVADFRGNKTAEAMDIDLNKK

SEQ ID NO: 624 - protein, 430 aa, Zea mays
MAPEERMKQTEGSHKVVTAAGGKMAVGVRSIVTSLVAFFILASSVVFLLLDREAGLQEEPAIRAGGGDEECSWSRGRWVYDNVSRPLYDGLKCAFIFPEVACDKYGRKDVMYQHWRWQPHGHGCDLPRFDGIKLLEELRNKRMVFVGDSVNRNQWVSLVCMVEASIPDDRLKIRTFNGSLISFKALEYNATIDFYWSPLLVESNSDNPIIHRVEYRIIRADRIEKHASVWRDADIIVFNSYLWWRKQKDDMRMKVMYGSFEDGDAKLDEMEMVDGFEIAIKKLTEWLAENIDKNKTRIFFAGSSPTHSWASNWGGQDKNKCLNETEPISYRPGGGYKAATTDYSLMAMARSYFRRTLEPRGIRVQILNITELSDYRKDGHPTVFRRQFVPLTKEQIADPASYADCTHWCLPGVPDVWNEFLYGYLTQQRK

SEQ ID NO: 625 - protein, 498 aa, Zea mays
  unsure (1)..(498): unsure at all Xaa locations
MACPRGRTPFPLCFFLMICLMAQLGASNVVLMANNTTLSLDDVEATFTPAVEGSGVSGVLYAVEPKDACSPLRAKAIQGSVSPFALIIRGGCQFDDKIRNAQNAGFKAAVVYNNEDNDILVSMAGSSLGVQIYAVFISKASGEELKKYSGQTDAELWIIPTYENSAWPIMAISFVSLLAMSAILVACFFARRHQIRRDRARLPRAQESHGMSSQLVKAIPSLIFTKVQEDNCTSATCAICLEDYSVGEKIRVLPCRHKFHAACVDLWLTSWRTFCPVCKRDASAGTSDPPVSESTPLLSSSATRLPESTVLASLRSTAAASPPRTISRHPLLRSISRNYSVSGSSILRTPDSRFDANSSICTSGSNLDLANVPSPWSGTWHRASAHSLCRGYLSPPIGIRNTSAHVSRSANGSPSRYVGSSRMSHGSSGQQHPHLRHCTLSGPSLFTMXPQSPQQNQLQHGGYSETNLSAAASAQSFRQLYLQHCPDSDTSSQSLPGC

SEQ ID NO: 626 - protein, 548 aa, Yersinia pestis biovar Medievalis str. 91001
MKNINPSQTAAWKALQQHFEQMKDVTISSLFAKDDQRFNRFSATFDDQMLVDFSKNRITSETLEKLQDLAKETDLAGAIKSMFSGEKINRTEDRAVLHIALRNRSNTPIVVDGKDVMPEVNAVLAKMKQFCDRVISGDWKGYTGKAITDVVNIGIGGSDLGPYMVTEALRPYKNHLNMHFVSNVDGTHIAEALKPLNPETTLFLVASKTFTTQETMTNAHSARDWFLSAAGDPAHVAKHFAALSTNAKAVGEFGIDTNNMFEFWDWVGGRYSLWSAIGLSIALSVGFEHFEQLLSGSHAMDKHFAETPAEKNLPVLLALIGIWYNNFFGAETEAILPYDQYMHRFPAYFQQGNMESNGKYVDRNGHPVDYQTGPIIWGEPGTNGQHAFYQLIHQGTKLIPCDFIAPAISHNPLSDHHAKLLSNFFAQTEALAFGKSLEDVEAEFAAAGKTPEQVAHVAPFKVFEGNRPTNSILLREITPFSLGALIALYEHKIFTQGVILNIYTFDQWGVELGKQLANRILPELADDQEVTSHDSSTNALINRFKNWR

SEQ ID NO: 627 - protein, 247 aa, Ipomoea nil
MGRGRVQLKRIENKINRQVTFSKRRTGLLKKAHEISVLCDAEVALIVFSTKGKLFEYATESCMEKILERYERYSYAERQLNSTDQNSQGSWTLEHAKLKARMEVLQRNQRHYEGEDLDSLSLKELQNLERNLIQHSNIRSKRNQLMYESILCSEKDKHCRTKYQLSKKIKEREKEMATQQQQQQEVQWEQPNDDINSSYVVPPPLVHLSSEGEYQGEGEYGETEGTQRQQQNNTSAMPQWMLSHLQG

SEQ ID NO: 628 - protein, 160 aa, Zea mays
MSTKKIVLKSSDGESFEVDEAVALESQTIAHMVEDDCVDNGVPLPNVTSKILAKVIEYCKKHVDAAASKSEAVDGGGSSDDDLKAWDAEFMKIDQATLFELILAANYLNIKNLLDLTCQTVADMIKGKTPEEIRTTFNIKNDFSPEEEEEVRRENQWAFE

SEQ ID NO: 629 - protein, 539 aa, Enterococcus faecalis
MAYQFKLPDIGEGIAEGEIVKWFVKPGDTINEDDTLLEVQNDKSVEEIPSPVTGTVKNIVVPEGTVANVGDVLIEIDAPGHEDNDAAPAAPAQEQTPAQPAAVPTTEAAGGFFQFKLPDIGEGIAEGEIVKWFVKAGDTINEDDSLLEVQNDKSVEEIPSPVTGTVKNIVVPEGTVANVGDVLVEIDAPGHNSAAPAAAAPATNAPKAEASAPAASTGVVAAADPNKRVLAMPSVRQYAREKNVDITQVTATGKGGRVIKADIDAFVSGGSQAAPATEAAATEAAPKAEAAAPKAAPKAFTSDLGEMETREKMTPTRKAIAKAMVNSKHTAPHVTLHDEVEVSKLWDHRKKFKDVAAANGTKLTFLPYVVKALTSTVQKFPILNASIDDAAQEIVYKNYFNIGIATDTDHGLYVPNVKNANTKSMFAIADEINEKAALAIEGKLTAQDMRDGTITISNIGSVGGGWFTPVINYPEVAILGVGTIAQEPVVNADGEIVVGRMMKLSLSFDHRIVDGATAQKAMNNIKRLLADPELLLMEG

SEQ ID NO: 630 - protein, 256 aa, Xanthomonas axonopodis pv. citri str. 306
MTVSIPTTPNNRLQGKRCLITAAGAGIGRESALACARAGAQVIATDIDAAALQALAAESDAITTQLLDVTDAAAINALIAAHGPFDVLFNCAGFVHQGSILDCDEPAWRRSFSINVDAMYYTCKAVLPGMLERGRGSIINMSSVASSIKGVPNRFVYGVTKAAVIGLSKAIAADHVAQGVRCNAICPGTIKTPSLGERVKALGGDEQAVWKSFTDRQPMGRLGDPREIAQLVVYLASDESSFTTGQTHIIDGGWSN

SEQ ID NO: 631 - protein, 208 aa, Ralstonia metallidurans CH34
MSRQRTLESVQRTALAGALTLAAAVAVMLPPPAHAAEKAVPAAAQPAGNCPASLNFRFPRLQDESPQNLCQYAGKVVLVVNTASYCGFTPQYEGLEALYAKYRERGLVVLGFPSNDFSQEPGSSKDIADFCYNTYGVKFPMLGKSHVRGSDANPMYALLAQETGTAPKWNFYKYLIDRKGQVIGSYNSMVKPDDKQFVSKIEELLNAR

SEQ ID NO: 632 - protein, 512 aa, Mortierella alpina
MGSLTSPTMRTTRSSSGKSSSMKTSLSAISSSSSSNSDCSDSEAVERLSISSAASVTSLEDSSSPVIAKHIKAIPKITTKNDFSVLYEPWTIGNFYKKLDWVHMLGLVFMPIYGFYMAFTSVPLQQKTAIFAVAYYFFTGLGITAGYHRLWSHRAYAAGPALQFILMIASTGAMQGSIRWWCRNHRAHHRYTDTEKDPYGAQKGLIWSHILWMLVRQDPTTVGWADVADLKANKLVRFQHDHFLWLAPLISLGLPTMVAGFGWGDYWGGFIYGGIIRQVVVHHATFCVNSLAHWLGDMPFDDRHTPRDHILTALVTLGEGYHNFHHEFPQDYRNAIRFYQYDPTKWLIAFCAFLGLASDLKRFPTNEIKKGEVRMQQQKLDRVKAGLIWGTPIDQLPVFTYEEFEALATEKGQAVTLIEGIIYDIEAFVDEHPGGRSLIKGAIGKDATTSFNGGVYDHSNAARHLLERMRVGVVAGGGFVEHRKSSTAPKQLSTIPLGSYPPASIPVVSRTA

SEQ ID NO: 633 - protein, 556 aa, Rhodospirillum rubrum
MYRYDEFDAAIVADRISEFRDQVNRRLSGELDEEAFRPLRLMNGVYLQLHAYMLRVCIPYGEINATQLRRLGAIAQRYDRGYGHFTTRQNIQFNWVALSDIPAVLEELAEVGMHAIQTSGNCIRNTTTDPLAGVAADEVEDPRPWAELIRQWSTFHPEFTFLPRKFKVAITGASHDRAAIRFHDIGLELAPIGGGEIGFKVFVGGGMGRTPRLGRLLRDDLPKQHLLSYIEAILRVYNRQGQRENKYKARIKILVDSLGVEAFRAEVDAEWEAMGRATIDVPEAEIARIQSYFVPQDSAPEDGGLAASRAITKRRASDPAFAGWLDANVHAHKVAGHAGVTISLKPAGGIPGDATTAQLETIADLAERYSKGLLRVTHEQNLLLPHVRQEDLPALWAALVAAGLETANVGRIGDIISCPGLDYCSLATARSIPIAQALSARFADPARLRDIGPITLNISGCINACGHHHAGNIGILGLEKTGNEAYQLVLGGAADETAAIARITGQGFSADAIVGAVETVVDTYIGLRQDGETFIETFRRVGVTPFKEALYGSVAA

SEQ ID NO: 634 - protein, 297 aa, Azotobacter vinelandii
MSMQSQDIVKRSATSALTPPTQVRDHQAEVAKLIDVSICIGCKACQVACSEWNDLRDEVGHNVGVYDNPTDLSAKSWTVMRFDEVQQENGRLEWLIRKDGCMHCADPGCLKACPSPGAIVQYANGIVDFQSEHCIGCGYCVAGCPFNVPRLSQEDNKAYKCTLCSDRVAVGQEPACAKTCPTGAINFGTKADMRDLAGQRVEELQGRGYANAGLYDPQGVGGTHVMYVLHHADRPELYHELPRDPRISSAIQGWKGWMKPAAAVAFFATLAGTLFHYVGVGPNQVDEHADEHEETEA

SEQ ID NO: 635 - protein, 394 aa, Leuconostoc mesenteroides subsp. mesenteroides ATCC 8293
MHFEESDLLKTLPKQFFATLVAKVNAKIAAGKDVINLGQGNPDQPTPEYIVESLQAAAENPADHKYSLFRGEERFKKAIAEFYADEYGVSIDPETEVAILAGSKIGLVELPWALMNPGETLLLPDPGYPDYLSAAALGRVNYEAVPLKQENNFLVDYEAIPNSVAEAAKFLYLNYPNNPTGAIATSEFYQQTVRFAEENQVGIVSDFAYGAIGYDGHKPLSFLQTENSKSVGIETYTFSKTFNMAGWRVGFAVGNAEMIEALNLIQDHLFVSLFPAVQDAAIEALTNRAAREKAVTDLTNLYQRRRDVFINAVREFGWEPYVPRGAFYVLMPVPKGYTSSEFADLLLEEANVAVADASGFGKGGQGYIRVGLTIVEERLAEAAKRISKLPIFSK

SEQ ID NO: 636 - protein, 465 aa, Triticum aestivum
MAAERVKDVGILAMDIYFPPNCVLQEELEAHDGVSKGKYTIGLGQDSMAFCTEVEDVISMSLTVVKTLLKNYNIDPKCIGRLEVGSETVIDKSKSIKTWLMQIFEECGNTDIEGVDSSNACYGGTAALFNCVNWVESNSWDGRYGLVVCTDSAVYAEGPARPTGGAAAIAMLIGPNAPISLESKFRGSHMAHVYDFYKPDLASEYPVVDGKLSQTCYLMALDSCYKTFCKRYEKIEGKPFSIVDADSFVFHSPYNKLVQKSFARLYYNDFLRSCSIVDKDSREKLEPYSGLSSEESYQSRDLEKVCQQVAKPLYDTKVQPTTLIPKQLGNMYTASLYAAFASVVHNKRDALVGQRIVMFSYGSGMTSTMFSFKINECQHPFSLSNIANILDISNKLESRHVVPPKKFVEALKLMEHRYGAKDFVTSQDTRLLVPGTYYLTLVDSMYRRFYAVKGDAAATPVTNGH

SEQ ID NO: 637 - protein, 303 aa, Zea mays
  unsure (1)..(303): unsure at all Xaa locations
MAQRGDANVGLWGNNPTLPFADREACFSPGVKGSGVTGIDYANEPLNACSPITINAANGPPSPFALIVRGGCTFEEKVKNAQDAGFKAAIVYDHENSGVLVSMAXSSSGIHIYAVFVSKASGEVXKKSSGHTDVEXTCFFVRRHRIRRDHPRIPEAREFHGMSSQLVKAMPSLIFTKVQEDNCTSSMCAICLEDYSVGEKLRVLPCRHKFHAACVDLWLTSWRTFCPVCKRDATSGVSELPATEATPLLSSAVRLPSQPSSFRSSVAASPPRPISRHPSLHSVSRAYSVSSTPHSPNPFRSHT

SEQ ID NO: 638 - protein, 528 aa, ASPERGILLUS NIDULANS FGSC A4
MVTTAQSQCRHATEVRPPEACLWPQTRFFFRNSSTSTGRSCWSAWFILANSSGGSGAFGHFEVTKDVSDLTKAHFLRSPGIKTPVFIRFSTVTLGREYPDLARNPRGFAVKFYTGEGNYDIVGLNFPVFFCRDPIQGPDVIRSQYRNPQNFLLDHNSLFDLLANTPEGNHAGMMFFSDHGTPAGWQNIHGYGCHTFKWVNAEGKFVYIKYHFLADHGQKQFNADEALRYGGEDPDYSKRELWRTIENGKELSWTAYVQVMKPEDADPEKLGFDPFDVTKVWPKKQFPLQEFGKLTLNKNPENFHRDVEQAAFSPGSMVPGIEDSPDPLLQFRMFFYRDAQYHRIGVNLHQVPVNCPFMASSYSSLNFDGQLRVDANHAMNPQYAPNSFVHKFRTDTAEAPYQLADGTVSRKSHFFHEGKASEYDQPRELYERVMDEKARQHLHTNTARLLKLVEYPKIQAKYLGQLLRISEKYARGVYDLLPEKKFGFDEVQSFAKGAEVAGKEAKFRPNMPTDKLLGLCPAMAVYGP

SEQ ID NO: 639 - protein, 389 aa, Escherichia coli
TLQNGKLNVPENPIIPYIEGDGIGVDVTPAMLKVVDAAVEKAYKGERKISWMEIYTGEKSTQVYGQDVWLPAETLDLIREYRVAIKGPLTTPVGGGIRSLNVALRQELDLYICLRPVRYYQGTPSPVKHPELTDMVIFRENSEDIYAGIEWKADSADAEKVIKFLREEMGVKKIRFPEHCGIGIKPCSEEGTKRLVRAAIEYAIANDRDSVTLVHKGNIMKFTEGAFKDWGYQLAREEFGGELIDGGPWLKVKNPNTGKEIVIKDVIADAFLQQILLRPAEYDVIACMNLNGDYISDALAAQVGGIGIAPGANIGDECALFEATHGTAPKYAGQDKVNPGSIILSAEMMLRHMGWIEAADLIVKGMEGAINAKTVTYDFERLMEGAKLL

SEQ ID NO: 640 - protein, 393 aa, Mycobacterium avium subsp. paratuberculosis str. k10
MKAVTWHGKRDVRVDSVPDPKIEQPTDAIIEVTSTNICGSDLHLYEILGAFMKPGDILGHEPMGVVREVGTETGDLRVGDRVVIPFQICCGSCYMCGQQLYTQCETTQVRDQGMGAALFGYSELYGEVPGGQAELLRVPQAQFTHIKVPVGPPDSRFVYLSDVLPTAWQAVAYADIPDGGTVAVLGLGPIGDMAARIADHLGYRVIAVDLVPERLGRAAQRGIHTIDLARLDAGLGDAIRDLTDGRGADSVIDAVGMEAHGSPAAKLAQQVAGVLPDALGKRLMQTAGVDRLSALYSAIDAVRRGGTISLIGVYGGMADPLPMLTLFDKQVTLRMGQANVKRWVDDIMPLLTDDDPLGVDDFATHVLPLERAPHAYEIFQKKQDGAVKVILKP

SEQ ID NO: 641 - protein, 49 aa, Zea mays
FCGNNECPACRTHCASRRSLRDDPNYDALIAALYPDIDKYEEEEFAFSE

SEQ ID NO: 642 - protein, 385 aa, Escherichia coli
  unsure (1)..(385): unsure at all Xaa locations
TLQNGKLNVPENPIIPYIEGDGIGVDVTPAMLKVVDAAVEKAYKGERKISWMEIYTGEKSTQVYGQDVWLPAETLDLIREYRVAIKGPLTTPVGGGIRSLNVALRQELDLYICLRPVRYYQGTPSPVKHPELTDMVIFRENSEDIYAGIEWKADSADAEKVIKFLREEMGVKKIRFPEHCGIGINPCSEEXXXXXVRAAIEYAIATDRDSVTLVXKGNIMKFTEGAFKDWGYQLAREEFGGELIDGGPWLKVKNPNTGKEIVIKDVIADAFLQQILLRPAEYDVIACMNLNGDYISDALAAQVGGIGIAPGANIGDECALFEATHGTAPKYAGQDKVNPGSIILSAEMMLRHMGWTEAADLIVKGMEGAINAKTVTYDFERLMEG

SEQ ID NO: 643 - protein, 293 aa, Nostoc sp. PCC 7120
MQINKVRKAVIPAAGFGTRLFPATKVVKKELFPIIDQDGRAKPVILAIVEEAISAGITEVGIVVQPDDIGIFADLFKNPPAPELLQKLSPQNQEYSQYLQDLGQKVVLLTQSEQEGYGHAVFCAKDWVGNEPFLLMLGDHVYKSDIKKSCAQQVVEIYAQVHQSVVGLTTMPAAIINKAGCIAGVWQEFNSILELTQLAEKPNLDYAREHLRVEGMAEDEFLCVFGLYVLTPKIFDFLADSINQNLRDRGEFQLTNCLDKLCQAEGMTGYVVKGKCFDTGLPNTYRQSLIDFI

SEQ ID NO: 644 - protein, 462 aa, Volvox carteri f. nagariensis
MALSMKMRANARVVSGRRVAAVAPRVVPFSSVARPVLRSTFAPEVSIDIRRAGRSRIVVEAVKKSVGDLGKADLEGKRVFVRADLNVPLDKKTLAITDDTRIRAAVPTLKYLLDNGAKVLLTSHLGRPKGGPEDKYRLTPVVARLSELLGKEVKKVDDCIGPSVEQAVASLKSGELLLLENVRFYKEEEKNDPEFAKKLASNADLYVNDAFGTAHRAHASTEGVTKFLKPSVAGFLLQKELDYLDGAVSAPKRPFVAIVGGSKVSSKITVIEKLMEKCDKIIIGGGMIFTFYKARGLKVGSSLVEEDKLELAKNLEAIAKAKGVQLLLPSDVVVADKFDANANTQTVSVEAIPDGWMGLDIGPDSIKTFQDALADAKTVVWNGPMGVFEFPKFAVGTVAIANTLSELTPKGAITIIGGGDSVAAVEQAGVAEKMSHISTGGGASLELLEGKVLPGVAALDEK

SEQ ID NO: 645 - protein, 322 aa, Thermus thermophilus
MKRIGVFTSGGDAPGMNAAIRAVVRQAHALGVEVIGIRRGYAGMIQGEMVPLGVRDVANIIQRGGTILLTARSQEFLTEEGRAKAYAKLQAAGIEGLVAIGGDGTFRGALFLVEEHGMPVVGVPGTIDNDLYGTDYTIGFDTAVNTALEAIDRIRDTAASHERVFFIEVMGRHAGFIALDVGLAGGAEVIAVPEEPVDPKAVAEVLEASQRRGKKSSIVVVAEGAYPGGAAGLLAAIREHLQVEARVTVLGHIQRGGSPTAKDRILASRLGAPAVEALVGGASGVMVGEVEGEVDLTPLKEAVERRKDINRALLRLSQVLAL

SEQ ID NO: 646 - protein, 275 aa, Hordeum vulgare subsp. vulgare
MAAAPPAPAPAFRLGFVGAGNLAESIARGVAASGVLPASAVRTAPHRRPERAAAFASLGATILASNAQVVDDSDVIVISVKPQIVKQVLVELKPLLSEEKLLVSIAAGIKMKDLQDWSGQRRIIRVMPNTPSAVGQAASVMCLGETATENDENRVKSLFSAIGKLAAEEKFDPVTGLSGSGPAYIFLAIEAMADGGVAAGLPRDLALGLAAQTVLGAATMVSETGKHPGQLKDQVTSPAGTTIAGVHELEKGSFRGTLINAVVAATTRCRELSKN

SEQ ID NO: 647 - protein, 388 aa, Escherichia coli
  unsure (1)..(388): unsure at all Xaa locations
TLQNGKLNVPENPIIPYIEGDGIGVDVTPAMLKVVDAAVEKAYKGERKISWMEIYTGEKSTQVYGQDVWLPAETLDLIREYRVAIKGPLTTPVGGGIRSLNVALRQELDLYICLRPVRYYQGTPSPVKHPELTDMVIFRENSEDIYAGIEWKADSADAEKVIKFLREEMGVKKIRFPEHCGIGIKPCSEEGTKRLVRAAIEYAIAXDRDSVTLVHKGNIMKFTEGAFKDWGYXLAREEFGGELIDGGPWLKVKNPNTGKEIVIKDVIADAFLQQILLRPAEYDVIACMNLNGDYISDALAAQVGGIGIAPGANIGDECALFEATHGTAPKYAGQDKVNPGSIILSAEMMLRHMGWTEAADLIVKGMEGAINAKTVTYDFERLMEGAKL

SEQ ID NO: 648 - protein, 237 aa, Lactobacillus plantarum WCFS1
MANRYLHNVQGLFDTIAPNYDRMNNIISLGTHRHWRKQTMAQIHLASNAHVLDLCCGTGDWTIALAKELQAPGEVIGLDFSAPMLKLAQQKVTQQQVADRVWLRRGNAMHLPFKDNTFDLVTIGFGLRNLPDKAQALTEIYRVLKPGARLVCLETSQPDQPLIKPVWQWYFTKVVPLFGRLFAHQYQEYSYLQETTRHFASYQQLATMFQQAGFQNVHFQRFNFGAAAAHFGTKEAK

SEQ ID NO: 649 - protein, 423 aa, Neurospora crassa
MLYKGLRLAARAAPKLALCNATPALRQLPLQFQHVRTYADQVIKVPQMAESISEGTLKQWNKKVGDYVEQDEEIATIETDKIDVAVNAPEAGTIKEFLVNEEDTVTVGQDIVRLELGGAPKEGGAEKPAASESKEAAPKDSAPAPEKAPEPKKETKPAAAPAPTPAKKETPAPKQESTPAKEAPAALGNREERRVKMNRMRLRIAERLKQSQNTAASLTTFNEVDMSGLMDFRKQYKDEILKKTGVKLGFMSAFSRACVLAMRDIPAVNASIEGPNGGDTIVYRDYVDISVAVATEKGLVTPVVRNVEAMDLVGIEKSIADMGKKARDGKLTIEDMAGGTFTISNGGVFGSLMGTPIINLPQSAVLGLHAIKERPVAVNGKVEIRPMMYLALTYDHRLLDGREAVQFLVKVKEYIEDPRKMLL

SEQ ID NO: 650 - protein, 250 aa, Lactobacillus plantarum WCFS1
MTGSWEARYAAEFFGTLILVLLGNGAVANAFLKNTTGNDDPGLANGGWLLVASGYGLGVMLPAMMFGSISGNHLNPAITIGQAVIGIFPWAHVAPYLIWQFLGAIAGQCLILALYWPHYRQTTDNEAVLGTFATSDHANSQLNGFVTEMVGTAVLIFGAMGLYRGMFFHQNIDIANIGVGLLIAAMVISLGGPTGPALNPARDLGPRLVHALFPVPNKGSSHWEYSWVPVVAPIVGAVIGIWIYKIFFGL

SEQ ID NO: 651 - protein, 163 aa, Glycine max
  unsure (1)..(163): unsure at all Xaa locations
HAGAGMGAPFTGLKSMVGFLTRKTNNDITFIDSNGGRMQCMQVWTRVGMKKLDTLSYLPDLDDAQWAKEVQYLLRKGWIPCLECKLXHGFVYREHNRSPGYYDGRYWIMWKLPMIGCTDASQVTKELQDAKTAYTNGLIPIFGFDNVRXVQSIIFVVYKPPSF

SEQ ID NO: 652 - protein, 214 aa, Oryza sativa
PGCRSSRHGFFFSQLNDDVFVFLACLLVSSWPCRCWFLDMGNYLSCTMAKVPGGKGARVILPDDGGLRQVALPATAAELMMDAPGHFLADARAARVGARLAALSADEELELGAVYATFPMKRLGTPLAPADMARLAAVATREARRSAKVAAAVVAPPPTPLQAEDAAPRLRLDEMVDDEAVAADMNVYKHRLSSARSRRPTLETIQEENYMSTN

SEQ ID NO: 653 - protein, 467 aa, Arabidopsis thaliana
MSRLLQTPFLPSVSLPTKTRSSVTGFRVKPRIIPIQAKIREIFMPALSSTMTEGKIVSWVKSEGDKLNKGESVVVVESDKADMDVETFYDGYLAAIMVEEGGVAPVGSAIALLAETEDEIADAKAKASGGGGGGDSKAPPASPPTAAVEAPVSVEKKVAAAPVSIKAVAASAVHPASEGGKRIVASPYAKKLAKELKVELAGLVGSGPMGRIVAKDVEAVAAGGGVQAAVAVKEVVAAPGVELGSVVPFTTMQGAVSRNMVESLGVPTFRVGYTISTDALDALYKKIKSKGVTMTALLAKATALALAKHPVVNSSCRDGNSFVYNSSINVAVAVAIDGGLITPVLQNADKVDIYSLSRKWKELVDKARAKQLQPQEYNTGTFTLSNLGMFGVDRFDAILPPGTGAIMAVGASQPSVVATKDGRIGMKNQMQVNVNVTADHRVIYGADLAQFLQTLASIIEDPKDLTF

SEQ ID NO: 654 - protein, 248 aa, Arabidopsis thaliana
MCGGAIISDYAPLVTKAKGRKLTAEELWSELDASAADDFWGFYSTSKLHPTNQVNVKEEAVKKEQATEPGKRRKRKNVYRGIRKRPWGKWAAEIRDPRKGVRVWLGTFNTAEEAAMAYDVAAKQIRGDKAKLNFPDLHHPPPPNYTPPPSSPRSTDQPPAKKVCVVSQSESELSQPSFPVECIGFGNGDEFQNLSYGFEPDYDLKQQISSLESFLELDGNTAEQPSQLDESVSEVDMWMLDDVIASYE

SEQ ID NO: 655 - protein, 251 aa, Shigella flexneri 2a str. 2457T
MVDKSQETTHFGFQTVAKEQKADMVAHVFHSVASKYDVMNDLMSFGIHRLWKRFTIDCSGVRRGQTVLDLAGGTGDLTAKFSRLVGETGKVVLADINESMLKMGREKLRNIGVIGNVEYVQANAEALPFPDNTFDCITISFGLRNVTDKDKALRSMYRVLKPGGRLLVLEFSKPIIEPLSKAYDAYSFHVLPRIGSLVANDADSYRYLAESIRMHPDQDTLKAMMQDAGFESVDYYNLTAGVVALHRGYKF

SEQ ID NO: 656 - protein, 436 aa, Arabidopsis thaliana
MSEEQPHANLAVPAFKTEKEPITQTRNGQSSVWRFGGSDKAAKASTVTLRGVIYMLFDNCGKDVNKTILPLGHGDPSVYPCFRTCIEAEDAVVDVLRSGKGNSYGPGAGILPARRAVADYMNRDLPHKLTPEDIFLTAGCNQGIEIVFESLARPNANILLPRPGFPHYDARAAYSGLEVRKFDLLPEKEWEIDLEGIEAIADENTVAMVVINPNNPCGNVYSHDHLKKVAETARKLGIMVISDEVYDRTIFGDNPFVSMGKFASIVPVLTLAGISKGWVVPGWKIGWIALNDPEGVFETTKVLQSIKQNLDVTPDPATIIQAALPAILEKADKNFFAKKNKILKHNVDLVCDRLKDIPCVVCPKKPESCTYLLTKLELSLMDNIKDDIDFCVKLAREENLVFLPGKIMKLSSMSLDLSFDTKMGFVGNVLQGMLWV

SEQ ID NO: 657 - protein, 640 aa, Arabidopsis thaliana
MSSTFRAPAGAATVFTADQKIRLGRLDALRSSHSVFLGRYGRGGVPVPPSASSSSSSPIQAVSTKPETATKRSKVEIIKEKSNFIRYPLNEELLTEAPNVNESAVQLIKFHGSYQQYNREERGGRSYSFMLRTKNPSGKVPNQLYLTMDDLADEFGIGTLRLTTRQTFQLHGVLKQNLKTVMSSIIKNMGSTLGACGDLNRNVLAPAAPYVKKDYLFAQETADNIAALLSPQSGFYYDMWVDGEQFMTAEPPEVVKARNDNSHGTNFVDSPEPIYGTQFLPRKFKVAVTVPTDNSVDLLTNDIGVVVVSDENGEPQGFNIYVGGGMGRTHRMESTFARLAEPIGYVPKEDILYAVKAIVVTQREHGRRDDRKYSRMKYLISSWGIEKFRDVVEQYYGKKFEPSRELPEWEFKSYLGWHEQGDGAWFCGLHVDSGRVGGIMKKTLREVIEKYKIDVRITPNQNIVLCDIKTEWKRPITTVLAQAGLLQPEFVDPLNQTAMACPAFPLCPLAITEAERGIPSILKRVRAMFEKVGLDYDESVVIRVTGCPNGCRRPYMAELGLVGDGPNSYQVWLGGTPNLTQIARSFMDKVKVHDLEKVCEPLFYHWKLERQTKESFGEYTTRMGFEKLKELIDTYKGVSQ

SEQ ID NO: 658 - protein, 179 aa, Staphylococcus epidermidis ATCC 12228
MHKDLKNVLLSEEDIQNICKEMGAIITEDYKDRPLVCVGILKGSVMFMADLIKRIDTHLSIDFMDVSSYHGGTESTGEVQILKDLGASIENKDVLIIEDILETGTTLKSITELLQSRKVNSLEIATLLDKPNRRKADIEAKYVGKKIPDEFVVGYGLDYRELYRNLPYIGTLKAEVYSK

SEQ ID NO: 659 - protein, 364 aa, Psychrobacter sp. 273-4
MSMMKSLIFIEPGKIEVAEKKIPDVGPNDALIKITTTTICGTDIHIFKGEYPVAKGLTIGHEPVGIIEKLGSAVMGYQEGQRVIAGAICPSFTSYASQDGFPSQDGGYIQPDGTCACHGYKATGGWRFGNIIDGTQAEYVLVPDAQANLAPVPDGLTDEQVLMCPDIMSTGFKGAENANIKIGDIVAIFAQGPIGLCATAGAKLRGASTIIAIDGNNERLAMSKKLGADITLNFKEVDVVDEIMKITGGRGVDSSIEALGLQSTFEQGIKVLKPGGTLSSLGVYSADLKIPMAYFASGLGDHTIRTALCPGGKERMRRLLNVVESGRVDFSEMVTHTYALDDIVEAYDLFMHQRDGVLKIAIKP

SEQ ID NO: 660 - protein, 299 aa, Triticum aestivum
MRSIGHSINWFSPASRSLPPSYLLSPAYLPSPPATIPTPGNICPRQGPGPLPAYCGYDLQRRGAGGGAAALRRRRGGGAAGRRLHLRGRPAAGMRRARGLRSSQGGGRRGCPAGHRRRQEKESSPERTRPARHQGQATMQLQRRQARLRRVSIELCAVLEPGQPPKAAKGAILSDATRLLDQLRAEAQKLKASNESLQDSIKSLKSEKSELRDEKTQLKAERERLEQMLKGVSAAPRQFVPHPAAPAAPQFHPAAAYAHAGKFVPAYAAGYPPPAAFWQWIPPTSLDTSKDPAHWPPVA

SEQ ID NO: 661 - protein, 481 aa, Zea mays
  unsure (1)..(481): unsure at all Xaa locations
MSSSSGTTMPLAYQTSASSPEWLNKGDNAWQLTAATLVGLQSFPGLVVLYGGVVKKKWAVNSAFMALYAFAAVWICWVTWAYNMSFGDRLLPLWGKARPALSQGGLVGQAGLPATXHHFASGALETPAAEPLYPMATVVYFQCVFAAITLVLVAGSLLGRMSFAAWMLFVPLWLTFSYTVGAFSVWGGGFLFQWGVIDYCGGYVIHLSAGFAGFTAAYWVGPRAQKDRERFPPNNILFTLTGAGLLWMGWAGFNGGGPYAANVVASMSVLNTNICTAMSLLVWTCLDVVFFKKPSVVGAVQGMITGLVCITPAAGLVQGWAAMVMGVLAGSVPWYTMMILHKRSRLLKHVDDTLGVIHTHGVAGLLGGLLTGLLADPTLCALFLPVTNSKGAFYGDGAQLGKQLAGALFIIGWNVAVTSIICVAINAVVPLRMTQDKLEVGDDAVHGEEAYALWGDGELYDVTDHGPRAAAAVAPMSTPPN

SEQ ID NO: 662 - protein, 502 aa, Ceratodon purpureus
  unsure (1)..(502): unsure at all Xaa locations
KSVGQSAESVPAGAVTAYLQRMQREGLIQNFGCMVAVEEPNFCVIAYSENASEFLDLIPQAVPSMGEMDVLGIGTDIRTLFTPSSSAALEKAAATQDISLLNPITVHCRRSGKPLYAIAHRIDIGIVIDFEAVKMIDVPVSAAAGALQSHKLAARAITRLQALPGGDIELLCDTIVEEVRELTGYDRVMAFKFHEDEHGEVVAEIRRMDLEPYMGLHYPATDIPQASRFLLMKNRVRLIADCYASPVKLIQDPDIRQPVSLAGSTLRAPHGCHAQYMGNMGSIASLVMAVIINDNEEYSRGAIQRGRKLWGLVVCQHTSPRTVPFPLRSVCEFLMQVFGMQLNLHVELAAQLREKHILRTQTLLCDMLLRDAPIGIVSQTPNIMDLVKCDGAALYYGKRVWLLGTTPTENQIKEIADWLLEHHNDSTGLSTDSLADANYPGAHLLGDAVCGMAAAKITAKDFLFLFRSHTATEVKWGGAKHDPDEKDDGRKMXPRSSFKAFL

SEQ ID NO: 663 - protein, 255 aa, Pseudomonas fluorescens PfO-1
MSKTQLFDLDGKIAFVSGASRGIGEAIAKLLAQQGAHVIVSSRKLEGCQHVADAIIAAGGKATAIACHIGEMEQISQVFAGIKEQFGRLDILVNNAATNPQFCNVLDTDLGAFQKTVDVNIRGYFFMSVEAGKLMRENGGGSIINVASINGISPGVFQGIYSVTKAAVINMTKVFAKECAQFGIRCNALLPGLTDTKFASALVKNDAILKQALTQIPLKRVADPSEMAGAVLYLASDASSYTTGVSLNVDGGFLS

SEQ ID NO: 664 - protein, 881 aa, Vibrio vulnificus CMCP6
MHGCSKTTCPYCGVGCGVEVKPDELVGDKEHPANHGALCVKGAALAESLNMPSRLLYPKLSGEQVSWELASDWIAQRFHQAMEEYGPDSVAMYVSGQLLTEDYYVANKLMKGYVGSANIDTNSRLCMSSAVAAHVRAFGEDVVPVSYDDLEHAELIVISGANTAWTHPVLFRRIQQIRENNPNVKLVVIDPRKTVTAEQADLHLPIANDSDVSLFHGLLAYLLEQQGSDKGIDTEFIELHTQGFAALQALVSSGAYQLEQVASHCGIDIQALRTFYQWFSRSNATMTLFCQGVNQAQNGVDKANAIINAHLATGQIGKRGAGPFSLTGQPNAMGGREVGGLANQLAAHRGFDPDSIRAVQQFWQSPRIAEQPGLKALDLFKAVERGEIKVLWIMATNPVVSMPDNRWIRQALERCPCVIVSDITADSDVAHYADLLLPAAGWGEKQGMVTNSERRMSRQRRFISPPGEAKPDWQAICEVGARLSLKLQAKNGFAFESEAAIFREFAGLTAINSDSHYKLDLAQYQNLSDEAYEQWRPTQWGGESPYADGRFSHPDGKARFVAMTELANSRDESIGRGLWRLNSGRQRDQWHTMTRTGHIEKLAASELEPSVYLNRLSAGKLELQAGELANITNPDTLQSLLAKVVIDESMAFGELFMSMHWAGRYGGQSQVNAVVSASGDPISGQPAFKSSLVEVEKAPVVSFGVMISDFSPAIATDYCAYQHQDQSGVWRVASLTLPPQQLAEINLPPGSQVRRVSWQHELGWITLQLQSDTDEANQAKLQAIFIASSQPLKADYQQLQKLIGEPINWQALMQAGFATRVSQLVCSCLRVTDRQIEQAIEQKGVTTLTQLQNQLQCGTNCGSCIPQLKQYFAPAIAQPSR

SEQ ID NO: 665 - protein, 195 aa, Zea mays
  unsure (1)..(195): unsure at all Xaa locations
MSRSNYGVLCCSLHLQIIAEIFGTYFLMFAGCGAVTINASKNGQITFPGVAIVWGLAVMVMVYAVGHISGAHFNPAVTLAFATSGRFPWRQLPAYVLAQMLGATLASGTLRLMFGGRHEHFPGTLPTGSEVQSLVIEIITTFYLMFVISGVATDNRAIXGELAGLAVGATILLNVLIAGPVSGASMNPARIVGPA

SEQ ID NO: 666 - protein, 538 aa, Mycobacterium avium subsp. paratuberculosis str. k10
MKVMAQLAMVMNLDKCIGCHTCSVTCKQAWTNRSGTEYVWFNNVETRPGQGYPRTYEDQERWRGGWIRDKRGRLRLRDGGRFQKLLRIFANPKLPVIGDYYEPWTYDYENLTTAPAGDTFPTAAPKSLISGEPMKVSWGPNWDDNLAGSPEILAEDPILKKVSEEVKLSLEQTFMFYLPRICEHCLNPSCVASCPSGAMYKRSEDGIVLVDQDRCRGWRMCVSGCPYKKVYFNHKTGKAEKCTLCYPRMEVGLPTICSETCVGRLRYLGVVLYDMDRVLEAASVENDTDLYRAQCDILLDPNDTDVIAGARAQGIPDEWIEAAQRSPVYALIHTYRVALPLHPEYRTMPMVWYIPPLSPVVDAVSRDGHDGEDLGNLFGALDALRIPMQYLAELFTAGDTAVVEGVLRRLAAMRSYMRDINLGRETQPHIPHSVGMTEEQIYEMYRLLAIAKYEERYVIPTAFAPQARDLEQMGCSLTGDGGPGMYESEPVAVETFHALKQRGGPTEAEPGSTRPRVNLLNWDGGQVPAGMFPEAQRR

SEQ ID NO: 667 - protein, 389 aa, Escherichia coli
TLQNGKLNVPENPIIPYIEGDGIGVDVTPAMLKVVDAAVEKAYKGERKISWMEIYTGEKSTQVYGQDVWLPAETLDLIREYRVAIKGPLTTPVGGGIRSLNVALRQELDLYICLRPVRYYQGTPSPVKHPELTDMVIFRENSEDIYAGIEWKADSADAEKVIKFLREEMGVKKIRFPEHCGIGIKPCSEEGTKRLVRAAIEYAIANDRDSVTLVHKGNIMKFTEGAFKDWGYQLAREEFGGELIDGGPWLKVKNPNTGKEIVIKDVIADAFLPQILLRPAEYDVIACMNLNGDYIYDALAAQVGGIGIGPGANIGEECSLFEATHGAAPKYAGQDKVNPGSIILSAEMMMRHMGWTEAADLIVKGMEGAINAKTVTYDFERLMEGAKLL

SEQ ID NO: 668 - protein, 500 aa, Euphorbia lagascae
MEQKNLSFPSILISFLLVLILVVVMRLWKKQNPPPGPWKFPIIGNLPHLLLTSDLGHERFRALAQIYGPVMSLQIGQVSAVVISSAEAAKEVMKTQADAFAQRPIVLDAQIVFYNRKDVLFASYGDHWRQMKKIWILEFLSAKKVQSSRLIREEEMEDAITFLRSKAGSPVNITKIIYGIIISIMIRTSVGNCKQKERLLSVADAVNEAATSFGTADAFPTWKLLHYIIGAESKPRRLHQEIDDILEEILNEHKANKPFEADNLMDVLLNLQKNGNVPVPVTNESIKASVLQMFTAGSETTSKATEWVMAELMKNPTELRKAQEEVRQVFGEMGKVDESRFHDLKFFKLVVKETLRLHPPVVLIPRECRETTRIDGYEIHPNTRIVVNAWAIGRDPNTWSEPGKFNPERFKDCAIDYKGTTFELVPFGAGKRICPGITSAITNLEYVIINLLYHFNWELADGITPQTLDMTEAIGGALRKKIDLKLIPIPYQVSLGSNIS

SEQ ID NO: 669 - protein, 388 aa, Escherichia coli
TLQNGKLNVPENPIIPYIEGDGIGVDVTPAMLKVVDAAVEKAYKGERKISWMEIYTGEKSTQVYGQDVWLPAETLDLIREYRVAIKGPLTTPVGGGIRSLNVALRQELDLYICLRPVRYYQGTPSPVKHPELTDMVIFRENSEDIYAGIEWKADSADAEKVIKFLREEMGVKKIRFPEHCGIGIKPCSEEGTKRLVRAAIEYAIANDRDSVTLVHKGNIMKFTEGAFKDWGYQLAREEFGGELIDGGPWLKVKNPNTGKEIVIKDVIADAFLQQILLRPAEYDVIACMNLNGDYISDALAAQVGGIGIAPGANIGDECALFEATHGTAPKYAGQDKVNPGSIILSAEMMLRHMGWTEAADLIVKGMEGAINAKTVTYDFERLMEGAKL

SEQ ID NO: 670 - protein, 589 aa, Zea mays
  unsure (1)..(589): unsure at all Xaa locations
MCGILAVLGCSDWSQAKRARILACSRRLKHRGPDWSGLYQHEGNFLAQQRLAVVSPLSGDQPLFNEDRTVVVVANGEIYNHKNVRKQFTGTHNFSTGSGCEVIMPLYEKYGENFVDMLDGVFAFVLYDTRDRTYVAARDAIGVNPLYIGWGSDGSVWIASEMKALNEDCVRFXSSPPGHLYSSAGGGFRRWYTPHWFQEQVPRTPYQPLVLREAFEKAVIKRLMTDVPFGVLLSGGLDSSLVASVTKRHLVETEAAEKFGTELHSFVVGLEGSPDLKAAREVADYLGTIHHEFHFTVQDGIDAIEEVIYHDETYDVTTIRASTPMFLMARKIKSLGVKMVLSGEGSDELLGGYLYFHFAPNKEEFHRETCRKVKALHQYDCLRANKATSAWGLEVRVPFLDKEFINVAMGMDPEWKMYDKNLGRIEKWVMRKAFDDDEHPYLPKHILYRQKEQFSDGVGYNWIDGLKSFTEQQVTDEMMNNAAQMFPYNTPVNKEAYYYRMIFERLFPQDSARETVPWGPSIACSTPAAIEWVEQWKASNDPSGRFISSHDSAATDHTXAVSRRWPTAAATXAANGTVNGKDVAVAIAV

SEQ ID NO: 671 - protein, 158 aa, Triticum aestivum
  unsure (1)..(158): unsure at all Xaa locations
PLWLMLSYTVGAFSLWGGGFLYHWGVIDYSGGYVIHLSSGIAGFTAAYWVXGPRLKSDRERXSPNNILLMIAGGGXLWMGXAGFNGGAPYAANITASXAVLNTNVKRGDSSLTWTCLEVIFXFGKXSXIXAXQSMMTGFFXITPGXRXGNGGHGSPEL

SEQ ID NO: 672 - protein, 194 aa, Oryza sativa
  unsure (1)..(194): unsure at all Xaa locations
MANTKQPELKEPGPSDNQLPDFKKSHKSEQLTTGFGRPLGERTTVVTVGPRGPMLLSDFPYIEDTQRFDRERIPERVVHAKGAGAFGVFEATDDMSDICKAKVFVKGTKTRVLARFSTVAGESXSADTARDPRGFAIXMYTDERLWXDLVGNNTPIFFIRDPFLFLMFIHSQKRYPETHFKDPNMVWDFLARNR

SEQ ID NO: 673 - protein, 255 aa, Zea mays
MFPPGLIHHRPDATAPGDGPPRSGPGGPSLVLTADPKPRLRWTADLHERFVDAVAQLGGPEKATPKTILRTMGVKGLTLFHLKSHLQKYRLGKQSGKEGSEQSKDASYLLDAQSGMSVSPRVAAQDMKESQEVKEALRAQMEVQRRLHEQVEVQKRVQIRMEALEKYIDSILESACKMVTEQFASSGFSISNPDLPEISPGGVMCGSTDTLGSSVLNQLSVSSIDSHSPGGKPSPSGMEGPTLLQKSPELKRRSS

SEQ ID NO: 674 - protein, 155 aa, Triticum aestivum
  unsure (1)..(155): unsure at all Xaa locations
MAPTVMASSATSVAPFQGLKSTAGLPVSRRSNGASLGSVSNGGRIRCMQVWPIEGIKKFETLSYLPPLSTEALLKQVDYLIRSKWVPCLEFNKVGFIFREXHNASPGYYDGRYWTMWKLPKFGCTDATQVXNEVEXVKERXPDXISATSGFNKMR

SEQ ID NO: 675 - protein, 369 aa, Lactobacillus gasseri
MEKGVMNAVNNVNTEINEALKGRSPYNQAAIDNLMIKLDGTPNKARLGANAILGVSMAVARAAAKSKNEPLYRYLGGCDLELPQTFHNVINGGKHADNGIDIQEFMITPVNKTSFRDGFEKIVNTYHTLKKVIEDAGFETGLGDEGGFASNLKSSEEALRMLQEAIKKAGYEPGKDIAIAFDAAASSFYNKEDGKYHFEGHVWDGEEMLAYYDKLLTEFPEIISAEDPFDENDWDNFEKFTAKFGDKIQVVADDNVCTNPKLVRKAIKDKLCNAVLIKVNQIGTITETLETIRLARKNNMTTMVSHRSGETGDTFIADFTVATNAAELKSGAPARSERVEKYNRLLEIEQEIGVENERLAHFPNDVDMD

SEQ ID NO: 676 - protein, 310 aa, Oryza sativa
MDAEMAMGESFAYYWETQRYLESEELDSMYLPTQDDSNYESSSPDGSHSSSAPAPAAVGGDAAAAVAGSGGGMTTMMMGGGGGGGDDAGGANKNILMERDRRRKLNEKLYALRSVVPNITKMDKASIIKDAIEYIQRLQAEEQQMLREVAALESAAAASAAPAAANPFAGLGADEEHEYGHHHPSSSSERTKKVKRALSVSSISDALLAAAAPAPPVEIQELRVSEVGDRVLVVSVTCSKRRDAMARVCRALEELRLRVITANITSVAGCPMHTLFVEVDHMDSVQMKQMVEAALSQLVATGSPLSSMSY

SEQ ID NO: 677 - protein, 389 aa, Escherichia coli
TLQNGKLNVPENPIIPYIEGDGIGVDVTPAMLKVVDAAVEKAYKGERKISWMEIYTGEKSTQVYGQDVWLPAETLDLIREYRVAIKGPLTTPVGGGIRSLNVALRQELDLYICLRPVRYYQGTPSPVKHPELTDMVIFRENSEDIYAGIEWKADSADAEKVIKFLREEMGVKKIRFPEHCGIGIKPCSEEGTKRLVRAAIEYAIANDRDSVTLVHKGNIMKFTEGAFKYWGYQLAREEFGGELIDGGPWLKVKKPNTGKEIVIKDVIADAFLQQILLRPAEYDVIACMNLNGDYISDALAAQVGGIGIAPGANIGDECALFEATHGTAPKYAGQDKVNPGSIILSAEMMLRHMGWTEAADLIVKGMEGAINAKTVTYDFERLMEGAKLL

SEQ ID NO: 678 - protein, 389 aa, Escherichia coli
TLQNGKLNVPENPIIPYIEGDGIGVDVTPAMLKVVDAAVEKAYKGERKISWMEIYTGEKSTQVYGQDVWLPAETLDLIREYRVAIKGPLTTPVGGGIRSLNVALRQELDLYICLRPVRYYQGTPSPVKHPELTDMVIFRENSEDIYAGIEWKADSADAEKVIKFLREEMGVKKIRFPEHCGIGIKPCSEEGTKRLVRAAIEYAIANDRDSVTLVHKGNIMKFTEGAFKDWGYQLAREEFGGELIDGGPWLKVKNPNTGKEIVIKDVIADAFLQQILLRPAEYDVIWCMNMNGGYICDALTAQVGGIGIAPGANIGDECALFEATHGTAPKYAGQDKVNPGSIILSAEMMLRHMGWTEAADLIVKGMEGAINAKTVTYDFERLMEGAKLL

SEQ ID NO: 679 - protein, 449 aa, Acinetobacter sp. ADP1
MAKVAGFRFELKQLFHLMWPILITQFAQAGLGLIDTIMAGHLSANDLAAIAVGVGLWMPVMLLFSAIMIATTPLVAEAKGARTPEHIPVIVRQSLWVAVSLGVIAMLILQLMPFLLPILGVPESLQPKAGLFLHAIGFGMPAVTMYAALRGYSEALGYPRPVTVISLLALVVLVPLNYIFMYGIGPVPHLGSAGCGFATAILQWLMLITLASYIYRAKAYQSTQVFSHWERINLTLVKRILKLGLPIGLAVFFEVSIFSTGAIVLSPLGDTLVAAHQIAMSVTSQLFMIPMSLAIALTIRVGMYYGEKNWVSMRLVQKLGLATATFFAMCTMSLIWFARPQIVAIYTQDPAVFDIALYLLLFAMAYQLMDAWQVGAAGCLRGMQDTKGPMWITLIAYWVVAFPVGTYLARVAKMGPAGVWLGLITGLSIACVLLLMRLYRNNHKLAQQS

SEQ ID NO: 680 - protein, 286 aa, Zea mays
PRVRKLVLKAIPFPYTITTFHFASGTFFITLMWLLNLHPKPRLSLKQYAKLLPLALIHMLGNVFTNMSLGKVSVSFTHTIKAMEPFFSVLLSILFLGETPSLPVLGSLVPIVGGVVLASMTEVSFNWIGFWSAMTSNLMNQSRNVYSKKILADKEDSLDDINLFSIITVMAFLLSAPLMLCVEGIKFSPSYLQNAGVNVKELFIRAALAGTSFYFYQQVSYSLLARVSPVTHSVANSLKRVVVIVSSVLFFRTLISPINALGTGVALAGVFLYSQFKKSKPKATAA

SEQ ID NO: 681 - protein, 280 aa, Streptococcus agalactiae 2603V/R
METYTLSNTLNIPKIGFGTWQLTEGEEAYKAVTHALKVGYTHIDTAQIYGNEHSVGRAIRDSGLARESIFLTTKIWNDKHDYHLAKASIDESLQKLGVDYIDLLLIHWPNPKALRENDAWKAGNAGTWKAMEEAYKEGKVKAIGVSNFMKHHLEALFETAEIKPMVNQIILAPGCAQEDLVRFCKGNDILLEAYSPFGTGAIFENESIKAIAEKYGKSVAQVALRWSLDNGFLPLPKSATPKNIEANLDIFDFQLNEDDIATLIQLDSGIKPKDPDNVSF

SEQ ID NO: 682 - protein, 258 aa, Oryza sativa
KGGYVSDEVLGTFLPIVVYWVYSGLYLMLGNMDNYRLHSKKDEAEKNLVSKKEVVKGVLLQQIVQAAVATVLFVVSYFDHLYLLQRHASIFVLGRQLFVAMLMLDTWQYFMHRYMHQNKFLYKHIHAQHHRLIVPYAFGALYNHPLEGHILDTIGGALAFLVSGMSPRTSILFFSFATIKTVDDHCGLWLPGNLFHIFFKNNSAYHDIHHQLYGTKYNYSQPFFVTWDRILGTYMPYELEKRPEGGFEAKLLKDCKEH

SEQ ID NO: 683 - protein, 268 aa, Neurospora crassa
MDHRPQAWGRPRDDVYGAYDHSYLQNSGPKQATQAPIVTGTSVIAMKYKDGVVMAADNLASYGSLARFPDVKRLRVFLDSSVVGFSGDVSDMQFLDRHLTDLSIDEAYEDPSCTAAPNGKGHLNAANLHKYLQKLLYKRRNDFDPLWNQLLIAGFDGHSKPYLASVDLRGTSFTSPSLATGFGSALAQPIMRRYAETEEDAAKLTREQAVEVIKECMKVLYYRDARSLDRYSIAVVTKDGVELKEDEQLEKQSWAFAERIKGYGTQTV

SEQ ID NO: 684 - protein, 121 aa, Triticum aestivum
MGGGMEVNKNRWIEEWNAGRENLELNFRFTRRSLAVIGLFGLAVPILVYKGIVREFHMQDEDAGRAVQEVPVGRRLRWMSRLRARLQGFGQGEGISIRFVSRTVVVRPEYFVLTCCAICVK

SEQ ID NO: 685 - protein, 216 aa, Lactobacillus plantarum WCFS1
MRKYLAEFLGTFMLVFLGTATVVIAKGDVLAIGLAFGLAITVSAYAFGGISGGHFNPAVTTAMLINRRIDAADAIGYIIAQIIGAIVASAAVKSFVSALGLSATLLGQTDFPKIGSGMAFFVEALVTFLFLMVILNVTSNDHGNADFAGLTIGVTLAFLIIVALNLTGGSLNPARSIGPAIFAGGSALSHLWVYILAPEVGAILAAFCARVMGSED

SEQ ID NO: 686 - protein, 150 aa, Glycine max
  unsure (1)..(150): unsure at all Xaa locations
KSKASFPTRRHNNDIHSIASNVERVQSMQAWPPDGRQKCETLSYLPDIDHAQLATEVEYLFRKGCIPCMEFELEHGFVHREHDRSAGSFDGGSWTTCKMPTFGCTEASQVFKEXLYRVRXACPYGFIRIIGIVNVRRVQGIGFFADKPTG

SEQ ID NO: 687 - protein, 403 aa, Mesorhizobium loti MAFF303099
MEEFHKVRRLPPYVFEQVNRLKASARSRGADIIDLGMGNPDLPTPKAIVDKLCEVVRDPRTHRYSSSRGIPGLRRAQAAYYQRRFGVKLNPDTQVVATLGSKEGFANMAQAITAPGDVILCPNPTYPIHAFGFIMSGGVIRSLQVEPDDGFIPALERGVRHSIPKPLALILNYPSNPTALVASLDFYKDVVAFAKKNDIIILSDLAYSEIYFDGNPPPSVLQVPGAIDVCVEFTSMSKTFSMPGWRMGFAVGNERLISALTRVKSYLDYGAFTPIQVAAAHALNGDEIAEVREVYHKRRDVMVDSFGRAGWNIPAPAASMFAWAPIPEPFKHLGSLEFSKLLIEHADVAVAPGVGFGEHGDDFVRLALVENEHRIRQAARNIKRFLSTSAKQPNNVVPLSAHR

SEQ ID NO: 688 - protein, 250 aa, Crocus sativus
MGRGRVQLKRIENTINRQVTFSKRRAGLLKKANEISVLCDAEVALIIFSTKGKLSEYSTDARMESILERYDRYSSAERAIVAPDPDSQESWRDEYGRLKAKLEALQTSQRHLMGAQLDMLSVKELQQLEQQLENALKNIRTRKNQLMFDSISELQKKEKTLVSQNKDLEKKLIEKEKGKAMAQQGHWDQQGQQYTESSSPPSLLIQDPFPSLTIGINPASGSSEEDYEARPLPPANSNRLPPWMIRSANE

SEQ ID NO: 689 - protein, 611 aa, Nicotiana benthamiana
MPAWWGKKSTKNKETQSKEKERDKYVKPRSFDEVLCRNSPRNSKDLNLGGSGSGFSGSGFSGFDSGSSLDKAHPLPRPSVGNDQGVVLGCGSVSVSSTSSSGSSDGPVNTTDQAQFDILFRGNGDNRLSPLSRSPVRSRGTTTTSSPLHPRFSSMNLDSPTGKLDNDVSSESHQLPLPPGSPPSPSALPNPRTCGVAEGSNVNMSKWKKGKLLGRGTFGHVYLGFNRENGQMCAIKEVRVVSDDQTSKECLKQLNQEIILLSNLSHPNIVRYYGSELDDETLSVYLEYVSGGSIHKLLQEYGAFREPVIQNYTRQILSGLSFLHARNTVHRDIKGANILVDPNGEIKLADFGMAKHITSSSLVLSFKGSPYWMAPEVVMNTSGYGLPVDIWSLGCAILEMASSKPPWSQYEGVAAIFKIGNSKDFPEIPDHLSNDAKNFIKLCLQREPSARPTASQLLEHPFVKNQSTTKVTHVGVTKEAYPRSFDGNRTPPVLDSGGRNISPTKGNYASHPVITISRPLSCPREIVKTITSLPVSPTSSPLRQYEPARRSCYLSPPHPAYGIGGHSGYDENDYLMFQARPTTRNTLEPWLEIPQFKVQTPSRSPKLRPIL

SEQ ID NO: 690 - protein, 658 aa, Rhodospirillum rubrum
MCGLTGYWTRGGDGRGRGEMTALVLRMAGALAHRGPDGDGAWVDEDAGLALGHRRLSIVDLSPAGQQPMVSADGRLALAYNGEIYNAAELRPELEAAGIVFRGHSDTEVLLEGFARWGVVPTLRRAIGMFAFALWDRKERRLTLGRDRLGIKPLYVADHGGTLLFASQPKGMMPHPSWRGEVDREGLAAMLRLSCLPAPRSIFKGVSQLAPGTVVRFEADGRRSEEVFWSLEEVAARGVAQARSQPARPESASLAVEHLESLLLDAVRRRLIADVPVGAFLSGGVDSSTVVALMRKVASGPVKTFSIGFAEEGWDESVHAAAVARHLGTDHRELVVSPDEVPAIVGDLPRWYDEPFADASQIPTLLVSKLARSEVTVSLSGDGGDELFAGYNRHVQGQRLWDLAQRIPTVGRDLGAALIEAPSPGFWQRAVGLLPAGRRPPQAADKPAKIARLLRARSPEALYRTLVGAMPSAEVPLAGVSLAAEERWYAASAEGVDSFVDRMRLLDAKGYLPDDILTKVDRASMAYGLEARVPLLDHRVVEFAWSLPPEMLIREGQGKWLLRRVLHRHVPRALIERPKMGFGVPLAAWLRGPLRGWAEDLLDPQTMAVQGLIDPAPVRRWWLDHLAGRRDTHDRLWPVLSALSWHHHWKSAGAFTAA

SEQ ID NO: 691 - protein, 614 aa, Lycopersicon esculentum
MPAWWGKKSTKNKDLQAKEKEREKYVKPRSFDELLSRNSPRTSKDFSGSGSGFSGFDSGSSLEKAHPLPMPSVSSLGNDHGVVLGCGSVSVSSTSSSGSSDGGGPVNTDQAQLDTFRGLGDNRLSPLSRSPVRSRGTTTTSSPLHPRFSSLNLDSSTGKLDDVRSECHQLPLPPGSPPSPSALPNPRPCVVAEGANVNMSKWKKGRLLGRGTFGHVYLGFNRENGQMCAIKEVKVVSDDQTSKECLKQLNQEIILLSNLTHPNIVRYHGSELDEETLSVYLEYVSGGSIHKLLQEYGPFREPVIQNYTRQILSGLSFLHARNTVHRDIKGANILVDPNGEIKLADFGMAKHITSCASVLSFKGSPYWMAPEVVMNTSGYGLAVDIWSLGCTILEMATSKPPWSQYEGVAAIFKIGNSKDFPEIPEHLSNDAKSFIRSCLQREPSLRPTASKLLEHPFVKNQSTAKVAHVGVTKESYLRSFDGSRTPPVLELHPGGRTISPGRNISPAEGNYASHPVITVSRPLICARENVKAITSLPVSPTSSPLRQYEPARKSCYLSPPHSSYGIGGQSGYEANDYSMFQTRPSTRITLEPWLEIPHFRTQTPSRSPKTRPIL

SEQ ID NO: 692 - protein, 246 aa, Crocus sativus
MGRGRVQLKRIENTINRQVTFSKRRGGLLKKANEISVLCDVDVALIIFSTKGKLSEYSTDARMETILERYERYSFAESAIAVPEAESQGSWLNEYGRLKARIESLQTSQRHLTGVQLDMLNVKEMQELEQKLESAMKNIRSRKSQLLFNSISDLQTKEKALVDRNNDLKKKIAEKERKRTSAQQGHQDQQGQQYVDPTSPLSFPVQDPPSLTMGINPARSTSDEDRPLPQVNSSKLLPWMIRSVNG

SEQ ID NO: 693 - protein, 606 aa, Methylococcus capsulatus str. Bath
MCGIAGLFNCNLPADELRLDQAVAKLTHRGPDDRGIFLDGRFGMGHTRLSIIDLAGGHQPLFSEDRRLALIANGEIYNFIELRSELTAAGFRFQTQSDSEVILHAYLAFGEGFLERIQGMFAFALYDALEGRLILARDRLGIKPLFLARRPDGIAFASEIKALLPLLDQPREIDPQGLAQYFQNQFSTGATTVLRGVERVLPGEAVVVEAGKTTRRFRYWSPLAVRTEELDFDEAAARFDALMERVMVEHMRSDVPFGLFLSGGVDSSLLLALLTRYSGEPIRTFSVGFPGTSLTDELPLAEGLARRFRSRHREIRPGPQDILHSLPLTVWAADDLMRDNASLPTSLLARAAGEELKVVFSGEGGDEVFAGYGRYRTSPLERLFKSLLAPGSGGFRTRGSFRGRWPKTLFGPALLAAAQSARRPVQESWRETPREWSDLQRMQYVDLCHALPDNLLVKADRMLMAWGVEGRVPFLDHRVVEFGLSLPDRLKIEGRQGKLFLKRWGERLVPAEQLYARKRGFHVPLGEWLDEPFLERLNRILPEHPALTPWFKPAGIRALIARCRDERQGSAMLWAIIQFAIWHRLFISGNGERPEALTDPLEILQR

SEQ ID NO: 694 - protein, 274 aa, Oryza sativa
  unsure (1)..(274): unsure at all Xaa locations
MARREVDDSYTNGSVVEVVSIEEGSKMDKEDDHQNPQAPDGGDVVVCGMPMSFTFLQMLLAEFLATFFLMFAGLGAITVEEKKGAVTFPGVAVAWGAAVMAMVYAVGHVSGAHLNPAVTLGFTVAGRFXPWRRAPAYALAQTAAATAASVVLRLMFGGRHAPVPATLPGGAHAQSLVIEFVITFYLMFVIMAVATDDQAVGHMAGVAVGGTIMLNVLFAGPVSGASMNPARSIGPALVGSKYTALWVYILGPFAGAAAGAWAYSLIRLTGDRTD

SEQ ID NO: 695 - protein, 335 aa, Anabaena variabilis ATCC 29413
MTTTPSTTINTKIIPFNSQLNAPLTKQEINVLQINLGKRCNLACTHCHVEASPKRTEELSAEICEQLIEVIHRFPQIKIVDLTGGAPEMNYGFQPLVAAARQHNKQVIVRSNLTIYFVEGFKYLPEYFAANKIRIVASMPCYLADNVDKMRGVGVFDDSIKALQWLNQVGYGIDPSLVLDLVYNPQLPTSEKFSLTPEQSKLEQDYKTFLQKHFRIEFNNLFTITNLPVGRTKLYLERKKLETSYLHFLELHFNPHTVGNLMCRNQLSVDYLGNIYDCDFNQMMNLPAKTHNGETLTVAKLIEAGSLDLINEIQTANYCYGCTAGCGSSCGGALV

SEQ ID NO: 696 - protein, 218 aa, Triticum aestivum
MLRPMLACCKLYVSEGRSAAALRAVEQAARRHHPAVVLVNTFADDAYNRVGYTLVSRLPDPVAPAAPLRRAVFGMVEAALGAIDLGAHAGAHPRLGAVDHVCFHPLAGAALRDVAALAAAVAADIGDGLRVPTYLYGAAHREGRKLAAIRRQLGYFKPQSSAEWHGPLPVAADTTALPVAPDAGPDAASASKGVLVLGATAWVDNYNVPVRTDDVEAV

SEQ ID NO: 697 - protein, 959 aa, Sinorhizobium meliloti 1021
MSLIHEIDYGTPASKSEKLVTLTIDGREITVPEGTSIMRAAMEAGIEVPKLCASDMMDAFGSCRLCLVEIDGRAGMPASCTTPVAAGISVSTQTQRLKDVRRGVMELYISDHPLDCLTCAANGDCELQDMAGAVGLRDVRYGYDGENHVTARNNGEINAKWAPKDESNPYFTYDPAKCIVCSRCVRACEEVQGTFALTISGRGFDSRVSAGMNEDFVSSECVSCGACVQACPTATLTEKSVIEIGQPEHSVVTTCAYCGVGCSFKAEMRGEELVRMVPWKDGQANRGHSCVKGRFAYGYSNHRDRILNPMVREKVTDPWREVTWEEAFAHVASEFRRIQYQYGRDSVGGITSSRCTNEETFLVQKLVRAGFGNNNVDTCARVCHSPTGYGLNQTFGTSAGTQDFDSVEHTDVAVIIGANPTDGHPVFASRLKKRLRQGAKLIVIDPRRIDLVRSAHVEASYHLPLKPGTNVAILTAIAHVIVTEGLANEAFIRERCDWSEFEDWAAFVAEPHHSPEATEAYTGVPPELVRGAARLYATGGNGAIYYGLGVTEHSQGSTTVMAIANLAMLTGNIGRPGVGVNPLRGQNNVQGSCDMGSFPHELPGYRHISDDATREIFEKLWGVTLNHEPGLRIPNMLDAAVEGTFKGLYVQGEDILQSDPDTKHVAAGLAAMECVVVHDLFLNETANYAHVFLPGSTFLEKDGTFTNAERRINRVRRVMRPKNGYADWEVTQKMAQAMGLAWNYRHPSEIMDEIAATTPSFAMVSYDYLDKMGSVQWPCNEKAPLGSPIMHVDGFVRGKGKFIRTEYVATDERTGPRFPLLLTTGRILSQYNVGAQTRRTENVVWHAEDRLEIHPHDAEQRGIRDGDWVRLASRSGDTTLRALITDRVAPGVVYTTFHHPSTQANVITTDFTDWATNCPEYKVTAVQVSPSNGPSDWQRDYDEQARQSRRIAGKLEAAE

SEQ ID NO: 698 - protein, 238 aa, Arabidopsis thaliana
MEITLNSGFKMPIVGLGVWRMEKEGIRDLILNAIKIGYRHLDCAADYRNETEVGDALTEAFKTGLVKREDLFITTKLWNSDHGHVIEACKDSLKKLQLDYLDLFLVHFPVATKHTGVGTTDSALGDDGVLDIDTTISLETTWHDMEKLVSMGLVRSIGISNYDVFLTRDCLAYSKIKPAVNQIETHPYFQRDSLVKFCQKHGICVTAHTPLGGATANAEWFGTVSCLDDPVLKVSPIL

SEQ ID NO: 699 - protein, 347 aa, Comamonas testosteroni
MFIRNCWYVAAWDTEIPAEGLFHRTLLNEPVLLYRDTQGRVVALENRCCHRSAPLHIGRQEGDCVRCLYHGLKFNPSGACVEIPGQEQIPPKTCIKSYPVVERNRLVWIWMGDPARANPDDIVDYFWHDSPEWRMKPGYIHYQANYKLIVDNLLDFTHLAWVHPTTLGTDSAASLKPVIERDTTGTGKLTITRWYLNDDMSNLHKGVAKFEGKADRWQIYQWSPPALLRMDTGSAPTGTGAPEGRRVPEAVQFRHTSIQTPETETTSHYWFCQARNFDLDDEALTEKIYQGVVVAFEEDRTMIEAHEKILSQVPDRPMVPIAADAGLNQGRWLLDRLLKAENGGTAP

SEQ ID NO: 700 - protein, 389 aa, Escherichia coli
TLQNGKLNVPENPIIPYIEGDGIGVDVTPAMLKVVDAAVEKAYKGERKISWMEIYTGEKSTQVYGQDVWLPAETLDLIREYRVAIKGPLTTPVGGGIRSLNVALRQELDLYICLRPVRYYQGTPSPVKHPELTDMVIFRENSEDIYAGIEWKADSADAEKVIKFLREEMGVKKIRFPEHCGIGIKPCSEEGTKRLVRAAIEYAIANDRDSVTLVHKGNIMKFTEGAFKDWGYHLAREEFGGELIDGGPWLKVKNPNTGKEIVIKDVIADAFLQQILLRPAEYDVIACMNLNGDYISDALAAQVGGIGIAPGANIGDECALFEATHGTAPKYAGQDKVNPGSIILSAEMMLRHMGWTEAADLIVKGMEGAINAKTVTYDFERLMEGAKLL

SEQ ID NO: 701 - protein, 455 aa, Pseudomonas fluorescens PfO-1
MIETLNHLPHPQESAAALAGHFTDLAPPLNDRQAHLEASRCLYCYDAPCVNACPSEIDIPSFIRNIHQDNVPGAAQKILSANILGGSCARVCPTEILCQQACVRNNAHECAPVLIGLLQRYAVDNANFTEHPFQRAAATGKRIAVVGAGPAGLSCAHRSAMHGHEVVIFEAREKAGGLNEYGIAKYKLVDDYAQKELDFLLQIGGIEIRHGQKLGENLTLSELHQQFDAVFLGLGLNASKQLGLPHEDAPGLLAATDYIRELRQADDLSQLPLAERCIVLGAGNTAIDMAVQMARLGARDVNLVYRRGAADMGATGHEQDIAKANQVRLLTWAQPDEVLLDAQGKVRGMRFARTHLVDGRLQTTGETFELAADAIFKAIGQAFDGSALADPLARELKRQGERIQVDENLRTSIPGVYAGGDCTSLDQDLTVQAVQHGKRAAEAINAQLMLNVEAA

SEQ ID NO: 702 - protein, 440 aa, Arabidopsis thaliana
MYLDINGVMIKQFSFKASLLPFSSNFRQSSAKIHRPIGATMTTVSTQNESTQKPVQVAKRLEKFKTTIFTQMSILAVKHGAINLGQGFPNFDGPDFVKEAAIQAIKDGKNQYARGYGIPQLNSAIAARFREDTGLVVDPEKEVTVTSGCTEAIAAAMLGLINPGDEVILFAPFYDSYEATLSMAGAKVKGITLRPPDFSIPLEELKAAVTNKTRAILMNTPHNPTGKMFTREELETIASLCIENDVLVFSDEVYDKLAFEMDHISIASLPGMYERTVTMNSLGKTFSLTGWKIGWAIAPPHLTWGVRQAHSYLTFATSTPAQWAAVAALKAPESYFKELKRDYNVKKETLVKGLKEVGFTVFPSSGTYFVVADHTPFGMENDVAFCEYLIEEVGVVAIPTSVFYLNPEEGKNLVRFAFCKDEETLRGAIERMKQKLKRKV

SEQ ID NO: 703 - protein, 389 aa, Escherichia coli
TLQNGKLNVPENPIIPYIEGDGIGVDVTPAMLKVVDAAVEKAYKGERKISWMEIYTGEKSTQVYGQDVWLPAETLDLIREYRVAIKGPLTTPVGGGIRSLNVALRQELDLYICLRPVRYYQGTPSPVKHPELTDMVIFRENSEDIYAGIEWKADSADAEKVIKFLREEMGVKKIRFPEHCGIGIKPCSEEGTKRLVRAAIEYAIANDRDSVTLVHKGNIMKFTEGAFKDWGYQLAREEFGGELIDGGPWMKVKNPNTGKEIVIKDVIADAFLQQILLRPAEYDVIACMNLNGDYISDALAAQVGGIGIAPGANIGDECALFEATHGTAPKYAGQDKVNPGSIILSAEMMLRHMGWTEAADLIVKGMEGAINAKTVTYDFERLMDGAKLL

SEQ ID NO: 704 - protein, 158 aa, Clostridium perfringens str. 13
MEIYDISVKDINGENVSLERYRGKVLLIVNTASKCGFTKQFDGLEELYEKYKDEGFEVLGFPCNQFKEQDPGSNSEIMNFCKLNFGVTFPMFEKIDVNGENESLLYSYLKEQKSGMFGSKIKWNFTKFLVDREGNVIKRFSPQTTPKSIEKDIEELLA

SEQ ID NO: 705 - protein, 389 aa, Escherichia coli
TLQNGKLNVPENPIIPYIEGDGIGVDVTPAMLKVVDAAVEKAYKGERKISWMEIYTGEKSTQVYGQDVWLPAETLDLIREYRVAIKGPLTTPVGGGIRSLNVALRQELDLYICLRPVRYYQGTPSPVKHPELTDMVIFRENSEDIYAGIEWKADSADAEKVIKFLREEMGVKKIRFPEHCGIGIKPCSEEGTKRLVRAAIEYAIANDRDSVTLVHKGNIMKFTEGAFKDWGYQLAREEFGGELIDGGPWMKVKNPNTGKEIVIKDVIADAFLQQILLRPAEYDVIACMNLNGDYISDALAAQVGGIGIAPGANIGDECALFEATHGTAPKYAGQDKVNPGSIILSAEMMLRHMGWTEAADLIVKGMEGAINAKTVTYDFERLMEGAKLL

SEQ ID NO: 706 - protein, 473 aa, Tropheryma whipplei str. Twist
MSLVRRLRVSVKKNHKIVVIGGGPGGYSAALSGALLGADVVLIENQAVGGSATLTDVVPSKTLIASAERAVFVAQGADFGIRFQNCVSADIGHINRRIMDLTRAQSADMFSTLTGAGVRVVYGHAALDGPNRVLVSVSGQEKYEFFANTVVVATGSSPRVLPNAIPDGKRILTWKQLYTLEQVPEHIIVVGSGVTGAEFASAFRNLGSEVTLVSSRDRVLPGGDEDAADLIQEVFINSGMKLLNRARAQAAAACNGGVVVTLTDGTEVRGTHCLMAVGSVPNTSGIGLETANIALNPAGRITVNRVACSSVPGVYAAGDCSDFLPLASVAEMQGQVAVYHAMGENANPIELKNLASTVFTTPEIATVGRSEKAIDKARATALKVDLATNSRAKILGIKTGFVKMIVSRETGTVLGGVVVAPNASDLIFPISVAVQNRLSADQLSQSFAVYPSLTISLWHAARASHVRTDSASP

SEQ ID NO: 707 - protein, 389 aa, Escherichia coli
TLQNGKLNVPENPIIPYFEGDGIGVDVTPAMLKVVDAAVEKAYKGERKISWMEIYTGEKSTQVYGQDVWLPAETLDLIREYRVAIKGPLTTPVGGGIRSLNVALRQELDLYICLRPVRYYQGTPSPVKHPELTDMVIFRENSEDIYAGIEWKADSADAEKVIKFLREEMGVKKIRFPEHCGIGIKPCSEEGTKRLVRAAIEYAIANDRDSVTLVHKGNIMKFTEGAFKDWGYQLAREEFGGELIDGGPWLKVKNPNTGKEIVIKDVIADAFLQQILLRPAEYDVIACMNLNGDYISDALAAQVGGIGIAPGANIGDECALFEATHGTAPKYAGQDKVNPGSIILSAEMMLRHMGWTEAADLIVKGMEGTINAKTVTYDFERLMEGAKVL

SEQ ID NO: 708 - protein, 396 aa, Buchnera aphidicola str. APS (Acyrthosiphon pisum)
MPDIGLEEVEIIEILVSINEKIAPEQGLITVEGDKTSMEIPSPISGIVKHIFIKIGEKIKTDALIMRCEVENIDFHVKKKEEICLDNNVLNKVEKNFKKDIFFHATPLIRRLARNLNINLYDVVGTGPKNRILKEDLDLYQSNIKENLIEEKNKINFGDSKKSKTKELELSDIQKNIGNNLHRNWMNIPHVTQFDEVDITILEKFRQKYNNEKRNQKKTNENITILVFIIKVVAYALEKFPIFNSSLNINNKKIILKKYINIGFAIDVNNDLFVPVLKDVNKKNIKQLSSELILLSEKARTRKLNIEDMTGGCFTISNLGGIGGSWFSPIINSPEVAILGISKSQIKPSWNGKEFIPSLMLPLSLSYDHRVINGAYAARFITFISRVLSDMHFLIM

SEQ ID NO: 709 - protein, 297 aa, Shigella flexneri
MTNLKAVIPVAGLGMHMLPATKAIPKEMLPTADKPMIQYIVDEIVAAGIKEILLVTHASKNAVENHFDTSYELESLLEQRVKRQLLAEVQSICPPGVIIMNVRQGEPLGLGHSILCARPAIGDNPFVVVLPDVVIDDASADPLRYNLAAMIARFNETGRSQVLAKRMPGDLSEYSVIQTKEPLDREGKVSRIVEFIEKPDQPQTLDSDIMAVGRYVLSADIWPELERTQPGAWGRIQLTDAIAELAKKQSVDAMLMTGDSYDCGKKMGYMQAFVKYGLRNLKEGSKFRKGIEKLLSE

SEQ ID NO: 710 - protein, 251 aa, Oryza sativa (japonica cultivar-group)
  unsure (1)..(251): unsure at all Xaa locations
MASRSSALLLLFSAFCFLARRAAADYGSWQSAHATFYGGGDASGTMGGACGYGNLYSTGYGTNTAALSTVLFNDGAACRSCYELRCDNDGQWCLPGSVTVTATNLCPPNYALPNDDGGWCNPPRPHFDMAEPAFLQIGVYRAGIVPVSYRRVPCVKKGGIRFTINGHSYFNLVLVTNVAGPGDVQSVSIKGSSTGWQPMSRNWGQNWQSNSYLDGQSLSFQVAVSDGRTVTSNNVVPAGWQFXQTFEGGQF

SEQ ID NO: 711 - protein, 540 aa, Saccharomyces cerevisiae
MTAQIPYQHSSGYISHFHNNELDAGRGRDYNVTIKYLDDKEENIEGQAAKISHNASLHIPVLLCLVISLGGFIFGWDIGTIGGMTNMVSFQEKFGTTNIIHDDETIFVSTKKLTDLQIGLIISIFNISCGVGALTLSKIGDWIGRKGGIWFALVVYCIGITIQILSYGRWYFLTLGRAVTGIGVGVTTVLVPMFLSENSPLKIRGSMVSTYQLIVTFGILMGNILNFICERCYKDPTQNIAWQLPLFLGYIWAIIIGMSLVYVPESPQYLAKIKNDVPSAKYSFARMNGIPATDSMVIEFIDDLLENNYNNEETNNESKKQSLVKRNTFEFIMGKPKLWLRLIIGMMIMAFQQLSGINYFFYYGTSVFKGVGIKDPYITSIILSSVNFLSTILGIYYVEKWGHKTCLLYGSTNLLFYMMTYATVGTFGRETDFSNIVLIIVTCCFIFWFAITLGPVTFVLVSELFPLRTRAISMAICTFINWMFNFLISLLTPMIVSKIDFKLGYIFAACLLALIIFSWILVPETRKKNEQEINKIFEPE

SEQ ID NO: 712 - protein, 331 aa, Oryza sativa (japonica cultivar-group)
MSTGGNGGGVGVRRRRWNLYWCYVCRRALRVVVPSATSDVYCPRCFGRFLHEIDLPVPRVSPPAEDQFFQPPFLPYDGPRRWVLYTGGGGGGDYGGADVTARRRRLPSPPPAPGTRRQDGAGDGDPPPPAPAIDPGEYFAGPDLNALIDALTQDDRPGPPPAPESAIESLPTVHISPDHLPADGGSECPVCKEEFELGEAARELPCKHAYHSDCIVPWLRLHNSCPVCRQEVPPPPEPDGESPGIDGGCDDGVGGGGEPAEPPRPAMAGWDPIALLAIALRPDLNGWENSHGRSESEADDDEVAGGGVSTTAMIHSFFVVAACFLFISFLV

SEQ ID NO: 713 - protein, 206 aa, Ralstonia metallidurans CH34
MSMQRLVLASNNPGKLREFSALLSPLGFDVVPQGELGVPEAEEPFATFVENALTKARHAARLTGMPALADDSGICVEALDGAPGVYSARYAQTVGKPKSDAANNAHLISQLAGKLNRRAHYYCVLVMVRHADDPRPIIAEGIWAGEVVDAPRGNGGFGYDPHFLLPSVGKTAAELSAEEKNAISHRALALQELVARLQTAGIKSCA

SEQ ID NO: 714 - protein, 370 aa, Arabidopsis thaliana
MSKTLVQPVGQKRLTNVAVVRLKKQGNRFEIACYKNKVLSWRSGVEKDIDEVLQSHTVYSNVSKGVLAKSKDLMKSFGSDDHTKICIDILEKGELQVAGKERESQFSSQFRDIATIVMQKTINPETQRPYTISMVERLMHEIHFAVDPHSNSKKQALDVIRELQKHFPIKRSPMRLRLTVPVQNFPSLLEKLKEWDGSVVSKDESGTQMSTVCEMEPGLFRECDSHVRSIQGRLEILAVSVHAEGDTSMDHYDEHDDMALQTHKPLLPAETETKDLTDPVVELSKKLQKQEISTTDNTKQEGGEEKKGTKCSTCNTFVGEAKQYREHCKSDWHKHNLNRKTRKLPPISADECMSEIDMDDSRADLKDYSF

SEQ ID NO: 715 - protein, 397 aa, Rhodospirillum rubrum
MASFKTIDDLDVNGKRVLVRADLNVPIRDGVVTDTTRIDRSAETILALASRGACVVVCSHFGRPKGKRVPEMSLRPIVEPLSRALGGVPVAFAEDCVGPAAELVVNGLAPGEVALLENLRFHDEEEKNDPAFAQKLADLCDLYVNDAFSSAHRAHASTEYIARLVPAAAGRLMQAELEALGKALDNPERPVAAIVGGAKVSTKLELLGNLVSKVDMIIIGGGMANTFLFAQGIEIGASLCEKDMADTARAILEKAAAAKCEIVLPIDAVVASAFKEGAENHVVAIDAVPADKMILDVGPQTAQAVIAKLGECKTLVWNGPFGAFEIKPFDAATNTVAQAAAQATAEGRLLTVAGGGDTVSALANAGVEDKFSYVSTAGGAFLEWLEGKTLPGVAALL

SEQ ID NO: 716 - protein, 597 aa, Zea mays
  unsure (1)..(597): unsure at all Xaa locations
MCGILAVLGCSDWSQAKRARILACSRRLKHRGPDWXSGLYQHEGNFLAQQRLAVVSPLSGDQPLFNEDRTVVVVANGEIYNHKNVRKQFTGTHNFSTGSDCEVIIPLYEKYGENFVDMLDGVFAFVLYDTRDRTYVAARDAIGVNPLYIGLGAVDGSVWIASEMKALNEDCVRFEIFPAGATSTPAAGGGFRXRWYTPXWFQEQVPXTPYQAXLVLREAFEKAVIKRLMTDVXPFGVLXLSGGLDSSLVASVTKRHLVETEAAEKFGTELHSFVVGLEGSPDLKAAREVADYLGTIHHEFHFTVQDGIDAIEEVIYHDETYDVTTIRASTPMFLMARKIKSLGVKMVLSGEGSDELLGGYLYFHFAPNKEEFHRETCRKVKALHQYDCLRANKATSAWGLEVRVPFLDKEFINVAMGMDPEWKMYDKNLGRIEKWVMRKAFDDDEHPYLPKHILYRQKEQFSDGVGYNWIDGLKSFTEQQVTDEMMNNAAQMFPYNTPVNKEAYYYRMIFERLFPQDSARADGCRGRPSIACSTPAAIEWVEQWKASNDPSGRFISSHDSAATDHTXRVSRRWPTAAATAPXNGTVNGKDVAVAIAV

SEQ ID NO: 717 - protein, 158 aa, Staphylococcus epidermidis ATCC 12228
MESIYDFVVQKNNGESYKLEQYKGDVMLIVNTASECGFTPQFEGLQKLYDEYKDQRFIILGFPCNQFGGQEPGSGEEAAQNCKINYGVTFPIHEKVDVKGDNQHPLFHFLTNAAKGMINEKIKWNFTKFLIDREGNVIKRFSPQKKPEQIKTEIEKLL

SEQ ID NO: 718 - protein, 451 aa, Pseudomonas putida KT2440
MAFDFDLFVIGAGSGGVRAARFAAGFGAKVAVAESRYLGGTCVNVGCVPKKLLVYGAHVADELEQAAGFGWTLEEGHFDWGTLIANKNREIERLNGIYRNLLVNSGVTLLQGHARLTGANEVEVDGQRYTAEHILIATGGWPQVPDIPGKELAITSNEAFYLKDLPRRVLVVGGGYIAVEFAGIFQGLGADTTLLYRGDLFLRGFDGSVRTHLKQELEKRGLDLQFNADIQRIDKLEDGRLKATLKDGRELVADCVFYATGRRPMLDNLGLENTGVELDERGYIRVDEQYQTTAPSILAIGDVIGRVQLTPVALAEGMAVARRLFKPEQYRPVDYQNIPTAVFSQPPIGTVGLTEEQALEAGHKVQVFESRFRAMKLTLTDIQEKTLMKLVVDAETDKVLGCHMVGPDAGEIIQGLGIALKAGATKQQFDETIGVHPTAAEEFVTMRTVTR

SEQ ID NO: 719 - protein, 416 aa, Staphylococcus epidermidis ATCC 12228
MNMNDTIFLFLCTLLVWLMTPGLSLFYGGLVQSKNALNTVMQSMVAIVIVTFIWIMIGFSLSFDGGNQWIGGLKFLGLHHVGFETSKTLSPHIPLSLFMLFQMMFCTIAVSILSGSIAEKMRFIPYLIFVSLWVLLIYSPVAHWVWGGGWISKIGAIDYAGGTVVHITSGVSGLVLGIMIGIGKKKEKHTPHNLLITLIGGILVWLGWYGFNVGSAFTFDHIAMISFVNTVIGASAGAFGWLIFEYILKKTTSLLGLLSGALSGLVAITPAAGYVSYMSAMIIAIMGGIGCYIVINLIKVKLQYNDALDAFGIHGVGGILGAVFTGVFQSHQINSAVENGFIYTGDFKIVVIQLGAAIATVVFSAIVTFLIARFIKIFTPLATTQEEDKTGLDVIVHGEKAYFYGELNKFNRHIKF

SEQ ID NO: 720 - protein, 256 aa, Streptococcus pyogenes M1 GAS
MKIGIIGVGKMASAIIKGLKQTPHELIISGSSLERSKEIAEQLALPYAMSHQDLIDQVDLVILGIKPQLFETVLKPLHFKQPIISMAAGISLQRLATFVGQDLPLLRIMPNMNAQILQSSTALTGNALVSQELQARVRDLTDSFGSTFDISEKDFDTFTALAGSSPAYIYLFIEALAKAGVKNGIPKAKALEIVTQTVLASASNLKTSSQSPHDFIDAICSPGGTTIAGLMELERLGLTATVSSAIDKTIDKAKSL

SEQ ID NO: 721 - protein, 279 aa, Pseudomonas putida KT2440
MIKKCLFPAAGYGTRFLPATKAMPKEMLPVVNKPLIQYGVEEALDAGLNEISIVTGRGKRALEDHFDISYELENQIKGTDKEKYLVGIRRLLNECSFSYTRQTEMKGLGHAILTGRPLIGDEPFAVVLADDLCVNPEGDGVLTQMVKLYKQYRCSIVAIQEVDPQETNKYGVIAGEMIRDDIFRVTNMVEKPAPEDAPSNLAIIGRYILTPDIFDIIANTKPGKGGEIQITDALLQQAKDGCVIAYKFKGKRFDCGGAEGYIDATNFCFENYYKTGKAY

SEQ ID NO: 722 - protein, 275 aa, Agrobacterium tumefaciens str. C58 (U. Washington)
MYDVSANGANIPALGFGTFRIPEDDVRRILPEALKLGFRHVDTAQIYKNEGAVGEVIAQSGISRHDIFLTTKVWVDRYRHDDFLASVDESLAKLKTDYFDLLLLHWPKSDVPLAERMGALNAVRKAGKARNIGISNFNVALTEEAVKLSDTPLATNQIEYHPYLDQTKVISAARKHGMSVTAYYLMADGKVPNDPVLKDIGAKHGKTAAQVTLRWAVQQPDIVALSKTATESRLKENFDIFDFALSEEEMQAIHALAKPNGRIVSPGHLAPDWDD

SEQ ID NO: 723 - protein, 336 aa, Solanum tuberosum
MENVHHHHDHDNIGNFIQRPNFPLQLLEKRDQVDHTTICSSQVHPYNSTSLHMMTTSSSDAPCVDHNQKSKNEDKKQQQPQAKKPTTTKDRHTKVDGRGRRIRMPATCAARVFQLTRELGHKSDGETIEWLLQQAEPAVIAATGTGTIPANFSSLNISLRSSRHHSSATNYLAHNNNFGHVYPDRNYFNGVGLFSSENNSFFPSGNLNMLQAKEELCDDDDNDNDNNNNNTGRIKRRSEDQDLLQNNYHMSNMLQSSPYGSIPASHQVGQIPATTLYMMTNNNNSSHHDPSNCSMWGSSSNNNNNIENSNIRFINQFWGHVAVAAAGRRRKGNGGC

SEQ ID NO: 724 - protein, 441 aa, Phaeodactylum tricornutum
MKFVQAAIFALAASASTTAAFAPAKTFGVRSFAPVSLIELEAKASIEDLSDAELKGKKVLVRCDVNVPLDGKKITDDTRIRSSIPTIEYLKNKGAIVSVCSHLGRPKDGPEDKFSLGPCAERMGELLGQTVTLAPDCIGEEVAKIVNDAKEGDVIMLENTRFYKEETKNDPEFVEKLAAPFDLYVNDAFGTAHRAHASTEGVTKFLKPSVGGFLLAKELEYLDGAISNGKKPMAAIVGGSKVSSKITVLEALLDKCDKVIIGGGMVFTFLKAKGFNVGTSLVEDDFVDTAKEVLAKAEKLGKEILLPIDIVIADKFDAEAETKVVSAEEIPDGWMGLDNGPETTAQQKEALSDCKTIIMNGPMGVFEFEKFAKGTFDLVNILADLSKDKGAITIIGGGDSVAATEQSGRAGDMSHISTGGGASLELLEGKVLPGVAALNDK

SEQ ID NO: 725 - protein, 342 aa, Glycine max
  unsure (1)..(342): unsure at all Xaa locations
QLRRPPPPLKFSIVFFFFRFSIFYSMGIGGSALGPHFVAEALAPDNPPLKIRFVDNTDPAGVDHQIAQLGLELASTLVIVISKSGGTPETRNGLLEVQKAFREAGLDLPKQGVAITQENSLLDNTARIEGWLARLPMFDWVGGRTSEMSAVGLLPAALQGIDIIEMLAGASLMDEANRSTADMAILXPYKDSLLLFSRYLQQLVMESLGLEFDLDGNRVNQGISVYGNKGSTDQHAYIQQLREGVHNFFVTFIEVLRDRPPGHDWELEPGVTCGDYLFGMLQGTRSALYANNRESITVTVQEVTPRTVGALIALYERAVGIYASPLSTINGLIIKQWWEKPG

SEQ ID NO: 726 - protein, 606 aa, Oryza sativa
MGEKKENFCAGKTEQPPTPTSVHDSGPHLDPTGRRHIRRAFSIHVGAPTPQRPRDPTPTSVTEPANAVPTRVPSPLPEPRIPRAAAIRGPLAARPHEFAEPSPSTRRRFNRRSPQRRPPHQRRFLKMVSSEISSVTTTHAQGPKLFRGKILLPMGPPDVVPSENVEFDFSDVFGPTAVQTPTDLSILTPDSPAPLTESSEGIYNDPLVIVKRSHSLVGPSSLVSQSLPLSKLTLHESDSALDLLECTKEKKSNQEALSDEELDDTKNENGVVGLDDFEVLKLVGQGAFGKVFQVRKKGTSEIYAMKVMRKDKILEKNHAEYMKAERDILTKVDHPFVVQLRYSFQTKYRLYLVLDFINGGHLFFQLYQQGLFREELARIYTAEIVSAVAHLHANGIMHRDLKPENILLDADGHAMARDFGLAKEFDENTRSNSMCGTVEYMAPEIVQGRGHDKAADWWSVGILLFEMLTGKPPFVGGNRDKVQQKIVKEKIKLPAYLSSEVHSLLKGLLHKEAGRRLGCGPGGSNEIKNHKWFKSVNWKKLDSRQIQPSFRPNVAGKTCIANFDECWTSMPVLDSPVASPVAADSNFVGFSYVRPAPFLQRPSPLG

SEQ ID NO: 727 - protein, 449 aa, Phaeodactylum tricornutum
MLFRMLTSTALRRSPVTTSLTCCCKANAFAVRIRSFHAAPVIQAKMTVEQLAQQVHMKGTNVLVRVDLNAPLATDDVTVTDDTRLRAIVPTTKFLLEQGANVILCSHFGRPKGEIIETGKNGRLNPVVKPLEVLLGQTITKLDDCMGPDVEAATKNLGEGKVVLLENTRFYSGETKNDPELAAGLGKLADYFVMDAFGTAHRAHSSTAGVTTHMKFNAAGKLMEKELQYLQGAVEEPKRPMMAIVGGAKVSTKIPVIESLLDKCDVILIGGGMIFTFYKALGYDIGASLVEDDIVELASSLMKKAEEKGVKLILPVDVVLADKFDNDANSAVAKVTDISGDWMGLDIGPETIDLFRSEIAEANTIVWNGPMGVFEFSNFAAGTNDVAQMLAQATAERGAVTIIGGGDSVAAVNKAGLGDKVSHISTGGGASLELLEGKVLPGVAALTEV

SEQ ID NO: 728 - protein, 259 aa, Oryza sativa (japonica cultivar-group)
MPQGDHIELHQKRHGRRLDYEERKRKRAAREVHKRSRDARQLLGAKGKRFAKKRYAEKAQMKKTLKMHDESTSRQKVDDVQEGALPPYLLDRDQTQRAKVLSNTIKQKRMEKAGKWEVPLPKVRPVAEEEMFKVLRTGKRKTKQWKRMVTKATFVGPGFTRKPPKYERFIRPTGLRFTKAHVTHPELKCTFNLDIISVKKNPNGQMYSTLGVLTRGTIIEVNVSELGLVTPAGKVVWGKYAQVTNNPENDGCINAVLLV

SEQ ID NO: 729 - protein, 389 aa, Escherichia coli
  unsure (1)..(389): unsure at all Xaa locations
TLQNGKLNVPENPIIPYIEGDGIGVDVTPAMLKVVDAAVEKAYKGERKISWMEIYTGEKSTQVYGQDVWLPAETLDLIREYRVAIKGPLTTPVGGGIRSLNVALRQELDLYICLRPVRYYQGAPSPVKHPELTDMVIFRENSEDIYAGIEWKADSADAEKVIKFLREEMGVKKIRFQEHCGIGIKPCSEEGTXXXVREAIEYAIATDGDSVTLVPKGNIMKFTEGAFKDWGYQLAREEFGGELIDGGPWLKVKNPNTGKEIVIKDVIADAFLQQILLRPAEYDVIACMNLNGDYISDALAAQVGGIGIAPGANIGDECALFEATHGTAPKYAGQDKVNPGSIILSAEMMLRHMGWTESADLIVKGMEGAINAKTVTYDFERLMEGAKLL

SEQ ID NO: 730 - protein, 227 aa, Triticum aestivum
VDTSGSGVKLTVEPAAGGEQTVIEADVVLVSAGRVPYTAGIGLDAIGVETDKGGRVLVDNRFMTNVKGVYAIGDAIPGPMLAHKAEEDGVACVEFIAGKEGHVDYDTVPGVVYTHPEVASVGKTEEQVKASGVAYQVGKFPLLANSRAKAIDDAEGMVKVISEKETDRILGVHIMSPGAGEIIHEAVLALQYGASSEDIARTCHAHPTVSEALKEACMNTYDKAIHM

SEQ ID NO: 731 - protein, 125 aa, Triticum aestivum
MESTQTNSVRNHFILVHGLCHGAWCWYKVVTALEAVGHRVTAVDLAASGAHPARVDEVHSFEEYSRPLLDAVAAAPEGGGERLILVGHSHGGLSLALAMERFPGKVAAAVFAAAAMPSVGKHMGV

SEQ ID NO: 732 - protein, 487 aa, Yersinia pestis biovar Medievalis str. 91001
MKTLNVDVAVIGGGTAGLGAYRAAKLLTPNVVMIEGGEYGTTCARVGCMPSKLLIAAAEAVHQIEKAPGFGIHPQGKPLINGREVMDRVKRERDRFVGFVLEGVETIPAADKIQGYARFIDDNTLQVDDHTQLTSQKIIAQRIVIATGSRPSWPASWNELGDRLIINDDVFNWDDLPESVAVFGPGVIGLELGQALHRLGVQVKMFGVGGAVGPLTDSIVRDYAAKTLGDEFYLDPDVKVELMQREGDKVFIRYLDKSGRPQEIMVDYVLAATGRRPNVDKLGLENTSLILDERGVPQADRLTMQTNVPHIFIAGDASNQLPLLHEASDQARIAGVNAGGFPEVVPGLRRSPISVVFSDPQIAMVGATFRELAQKFSACGCFEIGEVSFENQGRSRVMLKNKGILRIYGEQGTGRFLGAEMMGPSAEHIAHLLAWAHQQQMTIDQMLDMPFYHPVIEEGLRTALRDLQSKLKLGADEAERCLRCPGE

SEQ ID NO: 733 - protein, 561 aa, ASPERGILLUS NIDULANS FGSC A4
MSSVVESPPKTGFSLVLQNPYLCGVASFSTLGGLLFGYDQGVISGVITMESFGARFPHIFTDSGFKGWFVSTLLLAAWFGSLINGPIADRLGRKMSINLAVVIFIVGSAIQCAAVNVGMLFAGRAVAGLAVGMLTMVVPLYISEVSIPEIRGGLVVVQQLSVTIGILVSYWIDYGSNYIGGARCAPNVPYAGSSFDPYTDVPAGGCTGQSEASWRLPLAVQIAPAIILGAGMLFFPDSPRWLLMKERDDEALSALSRLRRQARDAPVLRNEYLEIRASIMLENSFARENFPNLSGIRLHAAQYLSFLTTWARFRRLAIGCCVMFFQQFMGCNAIIYYAPTIFSQLGLDGNTSSLLATGVYGIVNCLSTLPALFFIDKVGRRVLLMAGATGTCISLVIVGAIVGAYGASLVDHKAAGWAGIAFIYIYDVNFSYSFAPIGWVLPSEIFNLSIRSKAISITTSATWMCNFIIGLVTPDMLDSISWGTYIFFAAFCLLALAFTFFFIPETRGKTLEDMDLIFGDTAAHEEKTRIKRIEAELHGTGLDEDEAQKPMKQHAEVVDAV

SEQ ID NO: 734 - protein, 389 aa, Escherichia coli
  unsure (1)..(389): unsure at all Xaa locations
TLQNGKLNVPENPIIPYIEGDGIGVDVTPAMLKVVDAAVEKAYKGERKISWMEIYTGEKSTQVYGQDVWLPAETLDLIREYRVAIKGPLTTPVGGGIRSLNVALRQELDLYICLRPVRYYQGTPSPVKHPELTDMVIFRENSEDIYAGIEWKADSADAEKVIKFLREEMGVKKIRFPEHAGFGIKPCSEKXXXXXXRAAIEYAIATDRDSVTLVHKGNIMKFTEGAFKDWGYQLAREEFGGELIDGGPWLKVKNPNTGKEIVIKDVIADAFLQQILLRPAEYDVIACMNLNGDYISDALAAQVGGIGIAPGANIGDECALFEATHGTAPKYAGQDKVNPGSIILSAEMMLRHMGWTEAADLIVKGMEGAINAKTVTYDFERLMEGAKLL

SEQ ID NO: 735 - protein, 466 aa, Yersinia pestis biovar Medievalis str. 91001
MQQHFHFDAIVIGSGPGGEGAAMGLVKQGARVAVIERYNNVGGGCTHWGTIPSKALRHAVSRIIEFNQNPLYSDNARTIKSSFADILNHADRVINQQTRMRQGFYDRNHCHMFSGDASFIDANTVNVRYADGTSDTLQADNIVIATGSRPYRPVNVDFNHERIYDSDTILQLSHEPQHVIIYGAGVIGCEYASIFRGLSVKVDLINTRDRLLAFLDQEMSDALSYHFWNNGVVIRHNEEFEQIEGTTDGVIVHLKSGKKVKADCLLYANGRTGNTSGLGLENIGLEADSRGLLKVNSMYQTALSHVYAVGDVIGYPSLASAAYDQGRIAAQAMIKGEANVHLIEDIPTGIYTIPEISSVGKTEQELTAMKVPYEVGRAQFKHLARAQIVGMDTGSLKILFHRETKQILGIHCFGERAAEIIHIGQAIMEQKGEGNTLEYFVNTTFNYPTMAEAYRVAALNGLNRLF

SEQ ID NO: 736 - protein, 389 aa, Escherichia coli
  unsure (1)..(389): unsure at all Xaa locations
TLQNGKLNVPENPIIPYIEGDGIGVDVTPAMLKVVDAAVEKAYKGERKISWMEIYTGEKSTQVYGQDVWLPAETLDLIREYRVAIKGPLTTPVGGGIRSLNVALRQELDLYICLRPVRYYQGTPSPVKHPELTDMVIFRENSEDIYAGIEWKADSADAEKVIKFLREEMGVKKIRFPEHXGIGIKPCSEKGTXXXVRAAIEYAIATDRDSVTLVHKGNIMKFTEGAFKDWGYQLAREEFGGELIDGGPWLKVKNPNTGKEIVIKDVIADAFLQQILLRPAEYDVIACMNLNGDYISDALAAQVGGIGIAPGANIGDECALFEATHGTAPKYAGQDKVNPGSIILSAEMMLRHMGWTEAADLIVKGMEGAINAKTVTYDFERLMEGAKLL

SEQ ID NO: 737 - protein, 314 aa, Rickettsia rickettsii
MKTAFIFPGQGLQLIGMGKDFYDNFKPAKETFQIVDEVLNRKLTDIIFNGPSEELTLTTNAQPALMAVSMAIINIIKAETGKSLDSLCDYAAGHSLGEYSALCSTESINLETAAKLLHIRSTSMQEACPEGEGSMAACINIPLQKLEEILEEINKINLCQIANDNIEGQIVISGKTTAIDHAISIIKDLGYKAIKLKVSAPFHCSLMKPAEEKMRVALDKAVINKPLIPIIQNYTAKPTLDPTEIKQNLMLQICGRVRWRETLELFHKLEIAHIVEIGVGSVLTNMLRKINYPYKLSNISNLEELQHCLDNISQ

SEQ ID NO: 738 - protein, 548 aa, Xanthomonas sp. W17
MTEITVNGMTCTSCATHVKDALEKIPGVNAAVVSYPESRAQVMADTAVSHNQLLAAIAALGYQGSIRVGDFKDEPKIRDALEGAGLHIAIIGSGGAAMAAALKAVEQGATVTLIERGTIGGTCVNIGCVPSKIMIRAAHIAHLRRESPFDGGIAATVPAIDRSKLLAQQQARVDELRHAKYEGILDGNPAITVLHGEARFKDDQSLVVRLNEGGEREVTFDRCLVATGASPVVPPIPGLKESPYWTSTEALVSDTIPARLAVIGSSVVALELAQAFARLGSQVTILARSTLFFREDPAIGEAVTAAFRAEGIEVLEHTQASQVAHVNGEFVLTTGHGELRADKLLVATGRAPNTRSLALDAAGVTVNAQGAIVIDQGMRTSNPNIYAAGDCTDQPQFVYVAAAAGTRAAINMTGGDAALNLTAMPAVVFTDPQVATVGYSEAEAHHDGIETDSRTLTLDNVPRALANFDTRGFIKLVIEEGSGRLIGVQAVAPEAGELIQTAVLAIRNRMTVQELADQLFPYLTMVEGLKLAAQTFNKDVKQLSCCAG

SEQ ID NO: 739 - protein, 142 aa, Triticum aestivum
  unsure (1)..(142): unsure at all Xaa locations
HAFMEGAYDRLLSARLTAPHDTYIYFLDLLVETXRDQIAGCSPKGYDYLSINDSPSMPKVSSDQELPQYLAQDHPEWDVTDGRVLFQKANESQSCXEIPAAPGINHTLGYSRELKRIEGFACLFFLHLWTEFPMKRCIIVLP

SEQ ID NO: 740 - protein, 235 aa, Campylobacter jejuni subsp. jejuni NCTC 11168
MQKQEKIIEMFNQIAPTYDKANRILSFGADVAWRKKACQRVMSLYLKKDLKIADIACGTGDMIEIWQESALKMEKNILNIKGIDPSSGMLNVAKEKFPNVEFIKAGAQNLPLESQSLDILSISYGIRNVVERQKALSEFARVLQKDGILVVLEFTKREKGGFIAACRDFYLKNILPSIGGIISKNKSAYEYLPNSIEGFLSKKEFILELKNAGFEMLDYKSFSFGVSSMFIAKKL

SEQ ID NO: 741 - protein, 386 aa, Haemophilus influenzae R2846
MSVIKMTDLDLAGKRVFIRADLNVPVKDGKVTSDARIRATIPTLKLALEKGAKVMVTSHLGRPTEGEFKPEDSLQPVVDYLKNAGFNVRLEQDYLNGVDVKDGEIVVLENVRVNKGEKKNDPELGKKYAALCDVFVMDAFGTAHRAQASTYGVAEFAPIACAGPLLAAELDALGKALKEPARPMVAIVGGSKVSTKLEVLNSLSKIADQIIVGGGIANTFIAAAGHNVGKSLYEADLIPVAKELAANTDIPVPVDVRVGLEFSETAAATEKAVNEVKDDESIFDIGDKSAEQLAEIIKNAKTVLWNGPVGVFEFPHFRKGTEIISHAIANSDAFSIAGGGDTLAAINLFGIADKISYISTGGGAFLEFVEGKVLPAVEILEKRAKN

SEQ ID NO: 742 - protein, 515 aa, Glycine max
  unsure (1)..(515): unsure at all Xaa locations
RQDVHPNSPSCLLFIDGDWKVPVLKNRIPIINPSTQHIIXGDIPAATKEDVDLAVAAAKAALSRNKGADWASASGSVXRARYLRAIAAKITEKKPELAKLEAIDCGKPLDEAAWDIDDVAGCFEFYADLAEKLDAQQKAHVSLPMDTFKSYVLKEPIGXVVALITPWNYXLLMATWXKVAPALAAGCACNIXKPSELASVTXLELAEICKEVGLPPGVLNILTGLGPEAGXAPLAAHXNVDKISFTGSSATGSRIMTAAAQLTKPVSLELGGKSPIIVFEDVDLDKTAEWTIFGCFFTNGQICSATSRLIVHESIATEFVNRLVQWAKNIKXISDPFEEGCRLGPIVSEGQYKKVLNCISTAKSEGATILIGGSRPXEHLKKGYFVEPTIITDVTTSMQIWREEVFGPVLCVKTFSTEEEAIELANDTHYGLGSAVMSKDLERCEXRISKAIQAGIVWINCAQPSFIQAPWGGVKRSGFGRELGEWGLENYLSVKQVTKYISDEPWGWYQSPSKL

SEQ ID NO: 743 - protein, 765 aa, Neurospora crassa
MQRLALHYPPLDPAAEPPTEHILQQSNPTMSNIISQAGQKAKEALTSAPSSKKVDDLKNEFKETDKSARLTTDYGVKQTTADDWLRIVSDDKIGPSLLEDPFARERIMRFDHERIPERVVHARGSGAFGKFKVYESASDLTMAPVLTDTSRETPVFVRFSTVLGSRGSADTVRDVRGFAVKFYTEEGNWDLVGNNIPVFFIQDAIKFPDVIHAGKPEPHNEVPQAQSAHNNFWDFQFNHTEATHMFTWAMSDRAIPRSLRMMQGFGVNTYTLINAQGKRHFVKFHWTPELGVHSLVWDEALKLAGQDPDFHRKDLWEAIENGAYPKWKFGIQAIAEEDEHKFDFDILDATKIWPEDLVPVRYIGEMELNRNPDEFFPQTEQIAFCTSHVVNGIGFSDDPLLQGRNFSYFDTQISRLGVNFQELPINRPVCPVMNFNRDGAMRHTISRGTVNYYPNRFDACPPASLKEGGYLEYAQKVAGIKARARSAKFKEHFSQAQLFYNSMSPIEKQHMINAFGFELDHCEDPVVYGRMVQRLADIDLGLAQTIAEMVGGEAPTTTNHPNHGRKTINLSQTEFPPATPTIKSRRVAIIIADGYDNVAYDAAYAAISANQAIPLVIGPRRSKVTAANGSTVQPHHHLEGFRSTMVDAIFIPGGAKAAETLSKNGRALHWIREAFGHLKAIGATGEAVDLVAKAIALPQVTVSSEAEVHESYGVVTLKKVKPESFTDAVKIAKGAAGFLGEFFYAIAQHRNWDRELDGLHSMIAY

SEQ ID NO: 744 - protein, 256 aa, Solanum tuberosum
MTQSNNVGSSSRSHDREMQVQRLYLMLGNMDNYRLHSKKDEDEKNLVSKKEVVKGVLLQQIVQAAVATVLFAVTGDDGESGGDRHTSIFVLGRQLFIAMLMLDTWQYFMHRYMHQNKFLYKHIHAQHHRLIVPYAFGALYNHPLEGLILDTIGGALAFLVSGMSPRTSIFFFSFATIKTVDDHCGLWLPGNLFHIFFKNNSAYHDIHHQLYGTKYNYSQPFFVTWDMILGTYMPYELERRPEGGFEAKPVKDCKEH

SEQ ID NO: 745 - protein, 150 aa, Glycine max
MEIFPIPAESYTLGFIGAGKMAESIARGAVRSGVLPPSRIRTAVHFNLARRGAFESFGVTVLPSNDDVVRESDVVVLSVDPQLVKDVVSKLTPLLTNNKLLDSVAAGTKLKDLQEWAGNDRFIRVMPNTPAAVGQAASGIIYNFFVFFTF

SEQ ID NO: 746 - protein, 504 aa, Arabidopsis thaliana
MVVINSLRRLARTTQVHLHSKYATCMSGNSTSRRIFTTEAAPEKKNTVGSKGHDMLAPFTAGWQSADLDPLVIAKSEGSYVYDDTGKKYLDSLAGLWCTALGGNEPRLVSAAVEQLNTLPFYHSFWNRTTKPSLDLAKVLLEMFTANKMAKAFFTSGGSDANDTQVKLVWYYNNALGRPEKKKFIARKKSYHGSTLISASLSGLPPLHQNFDLPAPFVLHTDCPHYWRFHLPGETEEEFSTRLAKNLEDLIIKEGPETIGAFIAEPVMGAGGVIPPPATYFEKVQAVVKKYDILFIADEVICAFGRLGTMFGCDKYNIKPDLVTLAKALSSAYMPIGAILMSQEVADVINSHSSKLGVFSHGFTYSGHPVSCAVAIEALKIYKERNIPEYVAKVAPRFQDGVKAFASGSPIIGETRGTGLILGTEFVDNKSPNEPFPPEWGVGAFFGAECQKHGMLVRVAGDGILMSPPLIISPEEIDELISIYGKALKATEEKVKELKAQHKK

SEQ ID NO: 747 - protein, 406 aa, Thermus thermophilus HB27
MQELKVPSVGESIVEVEIGAWLKGEGESFAQDEPLVELITDKATLELPAPFAGTLKQILKKTGETARVGEAIALLEEGRAEAAPKAQAPAEAPKEPSPEPLAMPAAERLMQEKGVSPAEVQGTGLGGRILKEDVMRHLEERTPTKPQEAPPPPPPSRPVPPPSTPTQPPADKPWRVSEAVPMTPLRRRIAERLLMVRQTTAMLTTFNEADMSAVIALRKEFGEAFQKKYGVKLGFMSFFVKAVVQALKEIPELNAEIRDNHIVYHRYYDIGIAVGGGEGLVVPVIRDADRLSFAEIEQKIADFAERARTKKLKPEELMGGTFTITNGGIYGSLNSTPLLNPPQVGILGMHAIQERPVVRDGQVVIRPMMYLALSYDHRIVDGREAVTFLRRVKELIENPARLLLEV

SEQ ID NO: 748 - protein, 467 aa, Thermus thermophilus HB27
MRTRRGSFWRCSVYDLLVIGAGPGGYVAAIRAAQLGMKVGVVEKEKALGGTCLRVGCIPSKALLETTERIYEAKKGLLGAKVKGVELDLPALMAHKDKVVQANTQGVEFLFKKNGIARHQGTARFLSERKVLVEETGEELEARYILIATGSAPLIPPWAQVDYERVVTSTEALSFPEVPKRLIVVGGGVIGLELGVVWHRLGAEVIVLEYMDRILPTMDAEVSRAAERVFKKQGLTIRTGVRVTAVVPEAKGARVELEGGEVLEADRVLVAVGRRPYTEGLSLENAGLSTDERGRIPVDEHLRTRVPHIYAIGDVVRGPMLAHKASEEGIAAVEHMARGFGHVDYQAIPSVVYTHPEIAAVGYTEEELKAQGIPYKVGKFPYSASGRARAMGETEGFIKVLAHAKTDRILGVHGIGARVGDVLAEAALALFFKASAEDLGRAPHAHPSLSEILKEAALAAWERPIHL

SEQ ID NO: 749 - protein, 523 aa, Apium graveolens var. dulce
MAGAFNVSGDDSGGSKDVGSPVIFDAVKKPKRNKYAFGCAILASMTSVLLGYDIGVMSGAAIYIKDQLHVSDVKLEIVVGIINFFSLVGSALAGRTSDWIGRRYTMVLAGAIFFVGAILMGFATNYSFLMFGRFVAGIRSRLCPHDCSGVHGRGFFSIISWISYFIPGSFINIGVLLGYVSNYAFSKLPANLGWRFMLGIGAIPSIGLAIGVLGMPESPRWLVMKGRLGEARQVLDKTSDSKEESRLRLSDIKQAAGIPEECNDDIVVMPKRRNDEAVWKELLLHPTPSVRHAFIAGVGLHFFQQSSGIDAGGLYSPRIFEKAGITSTDLKLLATIAVGISKTLFILVATFLLDRIGRRPLLLTSMGGMIISLTLLGTSLAVIATQITQFIGPGHWQSSEVYHTWAVFFWLGPIAWGYSSEVFPLRLRAQGCSIGVAVNRGTSGIISMTFLSLYKAISIAGAFYLFAAIAGVAWIFIFTLLPETQGRSLEEMGLLFGTYFGWRKTLKGLKNREAEEAKNANVI

SEQ ID NO: 750 - protein, 451 aa, Psychrobacter sp. 273-4
MTKHYDYIAIGGGSGGIASINRAASYGKKCAIIEANQLGGTCVNLGCVPKKVMWYGAQVAEAIHKYAPDYGFDVEFKGFDFQKLVNSRQQYIENIHRSYDNNLAKNGVEVIKGFAKFVDTNTVEVNGELITADHILIATGGHPIRPDIKGTEHGIDSDGFFALNELPKRVAIVGAGYIAVEIAGVLNSLGAEVHQYVRQHSPLRSFDHSIVETLLIEMEQDGIQLHTNTTLTEVVKNDDGSLTLCTESGSLDTVDCLIWAIGRAPSTDNINLQVTGVETTEFGKIKVDKFQNTNVKGIYAVGDIIENSVDLTPVAIAAGRRLSERLFNNKPDEHLNYELIPTVVFTHPAIGTIGLSEIDAVNQFGKDNIKCYSSTFTPMYSAVTQHRQKCMMKLVCLGDDEKVIGLHGIGFGIDEMIQGFAVAIKMGATKADFDNTIAIHPTGAEEFVTMR

SEQ ID NO: 751 - protein, 207 aa, Oryza sativa
  unsure (1)..(207): unsure at all Xaa locations
MANQATFDAKLKEALPLYEKLKNEWNRKPPNVGKTDELLTGLKNLFAEGGFYPSDSSEDTRGLHIARDTLEIAAQCAIEKGDIPAFERALAQLKPFYFDLEGRIPESPYRYLLLGLNLLCLLSQNRLADFHTELELLSPKDIQNNPYIRHPVSLEQYLMEGSYXKVFLAKGNVPSPLFTFFMDILLHTIRDEIAFCMEKSYRKYRRG

SEQ ID NO: 752 - protein, 124 aa, Glycine max
PRVRAASQTPSVSRNHSIASTPYGGPSLRSSYHQSPSLSISRSSVDLRNASQRSLASHLNSPRSMGGPSLSSLNSRYMSPHIPSPSNASVSYMGSSSHQQHPLRYSESAASFSPFASTHSLPEC

SEQ ID NO: 753 - protein, 350 aa, ASPERGILLUS NIDULANS FGSC A4
MQAVVFKGPLKVALEQRPIPTIQDPTDAIVKVRYTALCGSELHVFRGHQPSGTDFIMGHEFTGEIASVGSSVSKFKPGDKVVSPFTVSCGDCFYCSHNTSSRCAKCQLYGSVVLDGAQADYVRVPLADSTLVSAPEKIDEKKLVMMADILPTGFFAAKNAFSGLDESIIKESTVILFGCGPVGIFALISALEYKPKHLIAIDSVPSRLELAKSLGAEPWNFATDSEGLKNRVKELTDGRGADVAIEVVGHSDALRMAFDMIRPWGKISSVGVHNGEIPWTGNEAYGKNLQLQMGRCPVRSIFEDALKLLEKKQDSIEFMVQDIRPLSQALQAYDDFNQMRSQKVIFEAGK

SEQ ID NO: 754 - protein, 294 aa, Pseudomonas aeruginosa UCBPP-PA14
MLAELGAQQALVRDTFAEASEALGYDLWALVQNGPEERLNQTDKTQPAILTVSIALWRLWLAEGGARPAFVAGHSLGEYSALVAAESLAFADAVKLVERRGQLMQQAVPAGQGGMAAILGLEDADVLAACAEAAQGEVVSAVNFNAPGQVVIAGAAAAVERAIEACKARGAKRAVALPVSVPSHCELMRPAAEQFAASVESLQWQAPKIALVQNVSAAVPADLDTLRRDLLAQLYSPVRWVESIQLLAEKGVTELVECGPGKVLAGLNRRCAKGINTHGLDGVEAFAATRAALA

SEQ ID NO: 755 - protein, 276 aa, Zea mays
  unsure (1)..(276): unsure at all Xaa locations
LSVSGGARSVRRRRRRRAAGLSVSAVATETPRTEEQQPSPSGEERFDWLDQWYPLAPVCDLDPRAPHGKTVLGLSVVAWYDRGAGEWRVFDDACPHRLAPLSEGRIDDRGRLQCXXHGWCFDGAGACKFIPQAPALGPPVHTSSRACVASYPCVVQNNILWFYPRADPEHSDVLQRKRPPLIPEIDDPDFVTVYGIRDLPYGYDILVENLMDPAHVPYAHKGIMRGIRKKEDPGRVDYYKEGGGPVKMKIEQANHRKGLCHRKSGANSSSWCPCTF

SEQ ID NO: 756 - protein, 389 aa, Escherichia coli
  unsure (1)..(389): unsure at all Xaa locations
TLQNGKLNVPENPIIPYIEGDGIGVDVTPAMLKVVDAAVEKAYKGERKISWMEIYTGEKSTQVYGQDVWLPAETLDLIREYRVAIKGPLTTPVGGGIRSLNVALRQELDLYICLRPVRYYQGTPSPVKHPELTDMVIFRENSEDIYAGIEWKADSADAEKVIKFLREEMGVKKIRFPEHXGIGIKPCSEEGXXXXVRAAIEYAIANDRDSVTLVHKGNIMKFTEGAFKDWGYQLAREEFGGELIDGGPWLKVKNPNTGKEIVIKDVIADAFLQQILLRPAEYDVIACMNLNGDYISDALAAQVGGIGIAPGANIGDECALFEATHGTAPKYAGQDKVNPGSIILSAEMMLRHMGWTEAADLIVKGMEGAINAKTVTYDFERLMEGAKLL

SEQ ID NO: 757 - protein, 389 aa, Escherichia coli
  unsure (1)..(389): unsure at all Xaa locations
TLQNGKLNVPENPIIPYIEGDGIGVDVTPAMLKVVDAAVEKAYKGERKISWMEIYTGEKSTQVYGQDVWLPAETLDLIREYRVAIKGPLTTPVGGGIRSLNVALRQELDLYICLRPVRYYQGTPSPVKHPELTDMVIFRENSEDIYAGIEWKADSADAEKVIKFLREEMGVKKIRFPEHCGIGIKPCSEEGXXXXXRQAIEYAIANDRDSVTLVHKGNIMKFTEGAFKDWGYELARKEFGGELIDGGPWLKVKNPNTGKEIVIKDVIADAFLQQILLRPAEYDVIACMNLNGDYISDALAAQVGGIGIAPGANIGDECALFEATHGTAPKYAGQDKVNPGSIILSAEMMLRHMGWTEAADLIVKGMEGAINAKTVTYDFERLMEGAKLL

SEQ ID NO: 758 - protein, 389 aa, Escherichia coli
  unsure (1)..(389): unsure at all Xaa locations
TLQNGKLNVPENPIIPYIEGDGIGVDVTPAMLKVVDAAVEKAYKGERKISWMEIYTGEKSTQVYGQDVWLPAETLDLIREYRVAIKGPLTTPVGGGIRSLNVALRQELDLYICLRPVRYYQGTPSPVKHPELTDMVIFRENSEDIYAGIEWKADSADAEKVIKFLREEMGVKKIRFPEHXGIGIXXXXXXXXXXXVRAAIEYAIATDRDSVTLVHKGNIMKFTEGAFKDWGYQLAREEFGGELIDGGPWLKVKNPNTGKEIVIKDVIADAFLQQILLRPAEYDVIACMNLNGDYISDALAAQVGGIGIAPGANIGDECALFEATHGTAPKYAGQDKVNPGSIILSAEMMLRHMGWTEAADLIVKGMEGAINAKTVTYDFERLMEGAKLL

SEQ ID NO: 759 - protein, 389 aa, Escherichia coli
  unsure (1)..(389): unsure at all Xaa locations
TLQNGKLNVPENPIIPYIEGDGIGVDVTPAMLKVVDAAVEKAYKGERKISWMEIYTGEKSTQVYGQDVWLPAETLDLIREYRVAIKGPLTTPVGGGIRSLNVALRQELDLYICLRPVRYYQGTPSPVKHPELTDMVIFRENSEDIYAGIEWKADSADAEKVIKFLREEMGVKKIRFPEHCGIGIKPCSEEAXXXXXXXXIEYAIANDRDSVTLVXKGNIMKFTEGAFKDWGYQLAREEFGGELIDGGPWLKVKNPNTGKEIVIKDVIADAFLQQILLRPAEYDVIACMNLNGDYISDALAAQVGGIGIAPGANIGDECALFEATHGTAPKYAGQDKVNPGSIILSAEMMLRHMGWTEAADLIVKGMEGAINAKTVTYDFERLMEGAKLL

SEQ ID NO: 760 - protein, 508 aa, Haemophilus influenzae
MSSQCPFSHLAATNLTMGNGAPVADNQNSLTAGPRGPLLAQDLWLNEKLADFVREVIPERRMHAKGSGAFGTFTVTHDITKYTRAKIFSEVGKKTEMFARFTTVAGERGAADAERDIRGFALKFYTEEGNWDLVGNNTPVFFLRDPRKFPDLNKAVKRDPRTNMRSATNNWDFWTLLPEALHQVTVVMSDRGIPASYRHMHGFGSHTYSFWNEAGERFWVKFHFRTQQGIKNLTDAEAAEIIANDRESHQRDLYEAIERGDFPKWTLFVQIMPEADAEKVPYHPFDLTKVWSKKDYPLIEVGEFELNRNPENFFADVEQSAFAPSNLVPGIGASPDRMLQARLFNYADAQRYRLGVCYRQIPVNRPRCPVHSNQRDGQGRVDGTYGSLPHYEPNSFSQWQQQPDFAEPPLRISGDAAHWDYRTDDNDYFSQPRALFNLMNAEQKQSLFNNTAAAMGDAPDFIKYRHIRNCHWCDAAYGEGVAKALGLTVEDALKARDTDPALGQGGLL

SEQ ID NO: 761 - protein, 386 aa, Escherichia coli
  unsure (1)..(386): unsure at all Xaa locations
TLHNGKLNVPENPIIPYIEGDGIGVDVTPAMLKVVDAAVEKAYKGERKISWMEIYTGEKSTQVYGQDVWLPAETLDLMREYRVAIKGPLTTPVGGGIRSLNVALRQELDLYICLRPVRYYQGTPSPVKHPELTDMVIFRENSEDIYAGIEWKADSADAEKVIKFLREEMGVKKIRFPEHCGIGIKPCSEEAXXXXXXXAIEYAIANARDSVTLVHKGNIIKFPEGAFKDWGYQLAREEFGGELIDGGPWLKVKNPNTGKEIVIKDVIADAFLQQILLRPAEYDVIACMNLNGDYISDALAAQVGGIGIAPGANIGDECALFEATHGTAPKYAGQDKVNPGSIILSAEMMLRHMGWTEAADLIVKGMEGAIXAKTVTYNFERLIKGD

SEQ ID NO: 762 - protein, 374 aa, Zea mays
TRPTVSASAYRPRRSPLSLSLSLQAHQAMAAPKKTMRALRYDKYGGGAEGLKHVEVPVPSPSKGEVLLKLEAASINPIDWKIQKGMVRPFLPRKFPFIPVGDMSGEVVELGSGVTDFKPGDKVISITFPNGGGLAEYAVAPASLTVARPPEVSAAEGASLPTAASTALQQLKAAGVSSFDGGSGSGSGSGADSDGPKNVLVTAASGGVGHYAVQLAKLAGLRVTATCGARNLGLVAGLGADEVLDYKTPEGARLLSPSGTRYDAVAHCATGTPWSVFAPVLADRATVVDVTPGVAAAAKSFLQKVTFSRKRLVPLVLIPKKEEMEWLVEMTRQGKLRTVVDSRYSLSRAQEAWAKSIDGHATGKIVVEMGGAAE

SEQ ID NO: 763 - protein, 516 aa, Blumeria graminis
MHRTFHPYFLLKMSGSSQRHSHVTGYLILLVAVATLGPLQYGYHLAELNAPQDVITCHSLLGRQNVASKSLSNPSQCIPMTEAEFAALSSIYILGGLAGAITAGPISSSHGRLLTMRITGIFFILGSLIETIAESVPVMSTGRFLAGLGAGAATVVAPMYISEISPAEKRGLFGTMTQAMISVGIFVTQSLGYFFSRGMLWRIILGVGAGFGLLLGAGLCFIPESPSWLASHHNPTLAVKTLQRIRGAGTPIHKETAGWNVQEINGEEERLIRPSDLSSTSQYNQHNLATPNLKLPSVGFFGVLQDPLYRPAIMAVCGIMIAQQLSGINSIMMYSVSLLRGVLPIPSILLTIIMSAMNVITTIVCAPLADRIGRKSCLLLSIAGMGTMSLLLAISLRMEWKLFSAIAVISFVAFFATGLGPVPYIMASELVGQEAVGAAQSWALAANYLASFLVAQFFPLLNSWMNNRWGGAGWVYFIFTAFAGVSWIFVTYYVPETNGKTGPDEVWGRTTGEVAD

SEQ ID NO: 764 - protein, 427 aa, Zea mays
MKGGCLHRLLVHKLCFGLSVLLTVTIIVLLLEGAPVLTIFSPTPGQLKVLSQGFLHQQEQEHLGDDGATLVGSPGPASLSRSRKNLRIDRGKWIEDDKRPLYSGNECKQWLSKMWACRMMRRTHFSYENYRWQPHDCEMPEFTGPKFLKRMRNRTLAFVGDSLGRQQFQSMMCIATGGKYSPEVEDVGWKYGLVKAPGALRPDGWAYRFPSTNTTILFDWSATLSELEPLNTEHAVTRYALHLDRPVTFLKEYLNDFDVLVLNTGHHWNRGKFNGNHWELHADGKPVGNGSRLADLNRAKNLTLHSIARWMDSELARHPKMKVFLRTISPRHFVNGDWNTGGTCGNTVPFTNGSEVLQDHSIDIPAENAVKGTRVKLLDITAISKLRDEGHISNSSFKKASTGINDCLHWCLPGIPDMWNELLFVQI

SEQ ID NO: 765 - protein, 876 aa, Neurospora crassa
MPPKLSSSSSAGKLTSSSSKTPVKSARNKGYITKTPISSKPKPKPNASILTYFKKAADETLFIGEGGVTAEDLQGIDGVGVEGEEGEGEGGFEAEVEGGGVDLKEAEKVEKQLNDVGGPTKKRSLTPDGLEEETKGKRVKADAVQVKKETEQEEVKLQSEEMKGEILAVPHSSGAQSAKLVRNPRRGPFLDDSDEEDEDGAEAVEGSAAPVKSAGLSDYEGREKRDESADKTEVETLKKVTKKPIVPLLRQETSGARADTQTKQEDEPAKDGADQIDKDPQEDKENHHNDLQGEELREKRYVQEQARLEAEERRGFIGQDDDGYGELMLDDAGFIDEIEDDDDLTFPPANPDVITESCPICNASLTGVTSDQATAHVNACLDGNPSPFPPPNQTAADLRVPNVKEEVQESANSMDNMMAGLTEGSKRFASRAAVARPGQANPFTLPGDNDDHNSGPDVKLKGTGSSAFSKLMSSHAESAAWATAAAAESASRGMPAYKRTCPFYKIMPNFSICVDAFRYGAVQGCKAYFLSHFHSDHYMGLSASWVHGPIYCSKVTGSLVKMQLRTAAKYVVELEFGETVPVPETGGAVMVTMIEANHCPGSSLFLFEKKVGKEGRIQRILHCGDFRACPAHVEHPLLKPETLDKVTGKTKQQKIDVCYLDTTYLNPRYSFPPQEDVIQACAEVCAKLDRGLKEGNEAEWDRLLRMRESGGNAKEGQDVSQFFGYNSKRKGDGSITSNPTPPEEEQQAETKPPPNAFTALTSSSTIRKNRLLVVCGTYSIGKERICVAIAQALRSKIFASPSKIRITKQLDDPELSSLMTADPREAQVHMQALGEIRADTLAEYLELHRSNGTSRLRPRHRQSPSIVAANHAPPPR

SEQ ID NO: 766 - protein, 553 aa, Bordetella pertussis Tohama I
MSNIVEIKVPDIGDFKEVEVIEVLVSAGDTIKAEQSLITVESDKASMEIPASAAGVVKSVKVKVGDKIAEGTVILEVEAAGEAAAAPKAEAPKAEAPKAEQAAETPKADAAKAEAPQAQAAQAEAPAAAGPIEVKVPDIGDFKEVEVIEVLVAEGDTIKAEQSLITVESDKASMEIPASAGGVVQSLKVKVGDKVAMGTVIAVVQGQGAAAAPAAAEPAAPASPVAPASAPAQRPAPAAALQDEDLKPGQLPHASPSVRKFARELGVNLSRVTGSAAKGRITADDVRAYVKQALSAGAPAGASGGGDGAALGLLPWPKIDFTKFGPIEAKPLSRIKKISGANLHRNWVMIPHVTNNDEADITDLEALRVALNKENEKSGVKVTMLAFLIKAVVAALKKFPEFNASLDGDNLVLKQYYHIGFAADTPNGLVVPVVRDADKKGILELARETSELARKAREGKASPAEMQGGCFSISSLGGIGGTHFTPIINAPEVAILGVSRSAHKPVWDGKQFVPRLTLPLSLSYDHRVIDGASAARFNAYLGQLLVDFRRIAL

SEQ ID NO: 767 - protein, 214 aa, Geobacter sulfurreducens PCA
MKFFIDTADVKEIRQAHDLGLVDGVTTNPSLIAKSGRKFEDVIKEITEIVDGPISAEVVSLEAAGMIREAGELAKIHKNIVIKLPMTPEGLKACAALTREGIKTNVTLIFTPMQALLAAKAGATYVSPFVGRLDDISQDGMGIIDDIKTIFDNYGYQSEIIVASVRNPVHVLNAALIGADIATIPYSVMLQLAKHPLTDSGIERFLKDWESVPK

SEQ ID NO: 768 - protein, 596 aa, Bordetella pertussis Tohama I
MSNIVEIKVPDIGDFKEVEVIEVLVAAGDTIKAEQSLITVESDKASMEIPASSAGVVKSVKVKVGDKVAEGTVILDVEAAGEAAAAPKAEAPKAEAPKAEAPKADAPKAPAAKASAPAAAAYSGSADLECDMLVLGAGPGGYSAAFRAADLGMDTVMVERYATLGGVCLNVGCIPSKALLHNAAVIDEARALAAHGISFGEPKVDLDKLRGYKDSVVAKLTGGLAGMARARKVRVVTGTGEFADPHHLTVTDGEGKKQTIRFKQAIIAAGSQSVKLPFLPDDERIVDSTGALQLRAIPKKMLIVGGGIIGLEMGTVYSTLGARLDVVEMLDGLMQGADRDLVKVWQKMNAPRFDNIMLKTKTVGAEARKDGIYVSFEGEGAPKEPQRYDLVLQAVGRSPNGKKIGAERAGVAVTERGFIEVDRQMRTNVPHIYAIGDVVGQPMLAHKAVHEGHVAAEAAHGEKSYFDARVIPSVAYTDPEVAWVGLTEDEAKKQGVKVEKGLFPWAASGRAIANGRDEGFTKLLFDAETHRIVGGGIVGTHAGDLISEIALAIEMGADMVDIGKTIHPHPTLGESVGMAAEVAEGVCTDLPPMRKK

SEQ ID NO: 769 - protein, 148 aa, Glycine max
  unsure (1)..(148): unsure at all Xaa locations
MACSMISYAAVTTVNRACAGMVAPFTGLKTMAGWLPRMRAFDITSIASNGGRAQCVQVWPPXWIKKFETLIYLPDXLEDAQLRKEVEYLLRKGWMPSLQFELDHGFVYREHNRSPGYYNGRYWTMVKLPMFGCTEATQVVNELQEAKT

SEQ ID NO: 770 - protein, 299 aa, Magnaporthe grisea 70-15
MAAPKFNSKSPTIRRILREAQELSTSPSPDYTATPIESDLFEWHFTLKGPPDSVYAEGVYHGRIVLPPTYPLRPPSFRFVTPSGRFEANREICLSISGHHEETWQPAWGVRTALVALRSFMETDPKGQLGGLETTDAVRRRLATESRTFRCAICAKSNADIIAEAEAASKDVEGQAADVVVPDELKMGWRDEMAQAGGSAGDGGDVASASAPAATTGHDSETAALAEGFVPTPAPAPAPAPAPAPPQPTRTIPLPEVQQHQQIAQLVQYSDDGVLAWLDRAIFIVGVLLLAMFLKVLVA

SEQ ID NO: 771 - protein, 483 aa, Thermobifida fusca
MSLTERPQLFIGGRWVDSKGGRKVDVHNPATGAYVGSTVLASTADIDAAVASARASFNSGVWANTPPEERAAVLHRAADLLEERAPELAKLITSELGCPIWFSERAHVPNPIRHLRYYGTLAKDFAYDERRSDGTNTSLVTQVPVGVVAAITPWNGPLSTPSLKVAPALAAGCSVILKPPPETPLTAYNLADALSQAGLPDGVLNIVPADREEGAYLVSHPDVDKVAFTGSSAAGKKIMAACAERIARVTLELGGKSAAIILDDADVDTVVPALLPMAFMVNGQACIAQTRLLVPRSRKDEFIDAFAQAVAAQRVGDPIDPATQIGPMVSRRQQERVEGYIATGRQEGARVVVGGERPSLPSELAGGWFVAPTLLAEVHNSMRVAQEEIFGPVLAVIEYDGDDEAVAIANDSVYGLSGSVWSSDEERALAIARRMRTGMVSINGRPQAANSPFGGFKQSGIGREMGPEGFHAYLETMSIAVGS

SEQ ID NO: 772 - protein, 480 aa, Photorhabdus luminescens subsp. laumondii TTO1
MKKRGLTTNAGTPVVDNNNVMTAGQRGPMLLQDVWFLEKLAHFDREVIPERRMHAKGSGAHGVFVVTHDITKYTRAKIFSEIGKKTEMFARFSTVAGERGAADAERDIRGFALKFYTEEGNWDLVGNNTPIFYLRDPLKFPDLNHVVKRDPHTNLRNPAYKWDFFSHQPESLHQLTIDFSDRGVPKSFRHMHGFGSHTFSFINADNERFWVKFHFRCQQGIKNLMDEEAEALVGKDRESSQRDLFAAIEQGDYPRWKLKVQIMPEKEANLLPYNPFDLTKVWPHGDYPMIDVGYFELNRNPDNYFSDVEQAAFNPANVVPGISFSPDKMLQGRLFSYGDAQRYRLGVNHHQIPVNTPRCPFHNYHRDGAMRVDGNSGNTVTYEPNNAGLFQEQPEFKHPSLSLEGDADHWNHRQDEDYFSQPRKLFMLINSKEHQRMFDRIASELSQAHEDTQRRQVELFRKVHPEYGAGVENALKKIKG

SEQ ID NO: 773 - protein, 336 aa, Pseudomonas putida KT2440
MKAAVVAPGRRVDVIEKSLRPLEHGEALLKMQCCGVCHTDLHVKNGDFGDKTGVVLGHEGIGVVQEVGPGVTSLKPGDRASVAWFYQGCGHCEYCNSGNETLCRDVKNSGYTVDGGMAEACIVKADYSVKVPDGLDSAAASSITCAGVTTYKAVKISNVRPGQWIAIYGLGGLGNLALQYAKNVFNAKVIAIDVNEEQLRFASEMGADLVVNPLNEDAAKVIQAKTGGAHAAVVTAVAKGAFNSAVDALRAGGRLVAVGLPSESMDLNIPRLVLDGIEVVGSLVGTRQDLQEAFQFAAEGKVVPKVTLRPIEDINQIFDEMLEGKIKGRMVIQFEG

SEQ ID NO: 774 - protein, 313 aa, Medicago sativa
MATAIKFFQLNTGAKIPSVGLGTWQAEPGVVAKAVTTAVQVGYRHIDCAEAYKNQSEIGSALKKLCEDGVVKREELWITSKLWCSDHHPEDVPKALDKTLNDLQLDYLDLYLIHWPVSMKRGTGEFMGENLDHADIPSTWKALGALYDSGKAKAIGVSNFSTKKLQDLLDVARVPPAVNQVELHPGWQQAKLHAFCESKGIHLSGYSPLGSPGVLKSDILKNPVVKEIAEKLGKTPGQVALRWGLQAGHSVLPKSTNEARIKKNLDVYDWSIPEDLFPKFSEIKQDKLIKGTFFVNDTYGAFRTIEELWDGEV

SEQ ID NO: 775 - protein, 480 aa, Thermus thermophilus HB27
MGQKKGPVAEGLPPGFPGGRRGRGKGLSPRESRTRRTSKGASKRAWARPQSSPPRGVWQGCKLHSMLRLDTRFLSGFPEALSRHGPLLEEARRRLLAKRGEPGSMLGWMDLPEDTETLREVRRYREANPWVEDFVLIGIGGSALGPKALEAAFNESGVRFHYLDHVEPEPTLRLLRTLDPRKTLVNAVSKSGSTAETLAGLAVFLKWLKAHLGEDWRRHLVVTTDPKEGPLRAFAEREGLKAFAIPKEVGGRFSALSPVGLLPLAFAGADLDALLMGARKANETALAPLEESLPLKTALLLHLHRHLPVHVFMVYSERLSHLPSWFVQLHDESLGKVDRQGQRVGTTAVPALGPKDQHAQVQLFREGPLDKLLALVIPEAPLEDVEIPEVGGLEAASYLFGKTLFQLLKAEAEATYEALAEAGQRVYALFLPEVSPYAVGWLMQHLMWQTAFLGELWEVNAFDQPGVELGKVLTRKRLAG

SEQ ID NO: 776 - protein, 509 aa, Zea mays
MIANGLRKSSAASSQVSKLVKYIASAGSLQGGHSLSEPSARHYSSEPSLQATEENGFKGHSMLAPFTAGWQSTDVHPLVIERSEGSYVYDSNGKKYIDALAGLWCTALGGNEPRLVKAATEQLNKLPFYHSFWNRTTKPSLDLANDILSMFTAREMGKVFFTNSGSEANDSQVKLVWYYNNALGRPDKKKFIARSKSYHGSTLIAASLSGLPALHQKFDLPAPFVLHTDCPHYWRFRLPDETEEEFSTRLANNLENLVLKEGPETIAAFIAEPVMGAGGVILPPKTYFEKIQAVLKKYDILLIADEVITAFGRLGTMFGCDMYNIKPDLVSIAKALSSAYMPIGAILVSPEITDVIYSQSNKLGSFAHGFTYSGHPVSCAVAVETLKIYKERNIVEHVNKIAPRFQEGIKAFSGSPIVGEIRGLGLILGTEFVDNKSPNDPFPAEWGVGSIFGAECEKRGMLIRVAGDSIMLSPPLIMTPNEVEEIISKFGDALKATEERIGELKSRKN

SEQ ID NO: 777 - protein, 423 aa, Pseudomonas fluorescens PfO-1
MGTHVIKMPDIGEGIAEVELSQWHVKVGDLVVEDQVLADVMTDKAMVDIPSPVHGKVIALGGQPGEVMAVGSILISIEVEGAGNLKESDKPAPVAAKETPVAPKVEAVVESKPAAPRTAPVCQGPMVARQADERPLASPAVRKHALDLGIQLRLVRGSGPAGRVLHEDLDAYLAQGQSNASAPVAAAYAQRNDEEQIQVIGMRRKIAQRMQDATQRAAHFSYVEEIDVTAIEELRAHLNEKHGASRGKLTLLPFLVRALVVALRDFPQMNARYDDEAQVITRLGAVHVGVATQSDVGLMVPVVRHAEARSLWDSAAEISRLANAARNGKASRDELSGSTITLTSLGALGGIVSTPVLNLPEVAIVGVNKIVERPMVVKGQVVIRKMMNLSSSFDHRVVDGMDAALFIQAIRGLLEQPATLFVE

SEQ ID NO: 778 - protein, 158 aa, Zea mays
  unsure (1)..(158): unsure at all Xaa locations
HGDKQTVGTLEQAFLIGNKVIERADLNILSRPPEYTDNARIRPCFPTXTDVLNKGAXVILATHLGLCKRGHPXFSWKPVGPRLSELLRAELVMAXDCIGEEAEKLSASLTKGGTLLLENVRFYREEEQNEPEFAKKLASAADLYVNDAFGTAHRAHAS

SEQ ID NO: 779 - protein, 457 aa, Pseudomonas fluorescens PfO-1
MQSLNTTLLIIGGGPGGYVTAIRAGQLGISTILVEGESLGGTCLNIGCIPSKALIHVAEQFHQTQHHNQHSALGISVSAPTLDITKSVEWKDGIVDRLTTGVAALLKKNKVQVINGWAKVIDGKTVEVGDTRIQCEHLVLATGSKSVNLPILPIGGPIISSTEALAPKSVPKRLIVVGGGYIGLELGIAYRKLGAEVSVVEAQDRILPAYDAELTQPVHDALKQLGVKLYLKHSVLGFDGTLQVRDPNGDTLNLETDQVLVAVGRKPNTQGWNLEALNLDMNGSAIKIDSRCQTSMRNVYAIGDLSGEPMLAHRAMAQGEMVAELISGKTREFNPTAIAAVCFTDPELVVVGKTPDEAKAAGLDCIVSNFPFAANGRAMTLESKTGFVRVVARRDNHVIVGWQAVGVGVSELSTAFAQSLEMGARLEDIGGTIHAHPTLGEAVQEAALRALGHALHL

SEQ ID NO: 780 - protein, 217 aa, Sinorhizobium meliloti 1021
MKFFVDTADVKDIRELNDLGLLDGVTTNPSLILKAGRDIVEVTKEICSIVEGPVSAEVTATEYSAMMKEAAALSKIADNICIKLPLTLDGLKACKALTSDGHQTNVTLCFSANQALLAAKAGATFVSPFIGRLDDIAVDGMDLIREIRQIFDNYGYETEILAASVRTVNHVKEAALIGADVVTAPPATLKALVKHPLTDKGLEMFLADWAKTGQKIA

SEQ ID NO: 781 - protein, 632 aa, Bacillus subtilis subsp. subtilis str. 168
MCGFVGVFNKHPLAQTADQEELIKQMNQMIVHRGPDSDGYFHDEHVGFGFRRLSIIDVENGGQPLSYEDETYWIIFNGEIYNYIELREELEAKGYTFNTDSDTEVLLATYRHYKEEAASKLRGMFAFLIWNKNDHVLYGARDPFGIKPLYYTTINDQVYFASERKSLMVAQNDIEIDKEALQQYMSFQFVPEPSTLDAHVKKVEPGSQFTIRPDGDITFKTYFKANFKPVQTEEDKLVKEVRDAIYDSVNVHMRSDVPVGSFLSGGIDSSFIVSVAKEFHPSLKTFSVGFEQQGFSEVDVAKETAAALGIENISKVISPEEYMNELPKIVWHFDDPLADPAAIPLYFVAKEAKKHVTVALSGEGADELFGGYNIYREPLSLKPFERIPSGLKKMLLHVAAVMPEGMRGKSLLERGCTPLQDRYIGNAKIFEESVKKQLLKHYNPNLSYRDVTKTYFTESSSYSDINKMQYVDIHTWMRGDILLKADKMTMANSLELRVPFLDKVVFDVASKIPDELKTKNGTTKYLLRKAAEGIVPEHVLNRKKLGFPVPIRHWLKNEMNEWVRNIIQESQTDAYIHKDYVLQLLEDHCADKADNSRKIWTVLIFMIWHSINIEKRYMPEELSHQPKEVIFV

SEQ ID NO: 782 - protein, 389 aa, Escherichia coli
  unsure (1)..(389): unsure at all Xaa locations
TLQNGKLNVPENPIIPYIEGDGIGVDVTPAMLKVVDAAVEKAYKGERKISWMEIYTGEKSTQVYGQDVWLPAETLDLIREYRVAIKGPLTTPVGGGIRSLNVALRQELDLYICLRPVRYYQGTPSPVKHPELTDMVIFRENSEDIYAGIEWKADSADAEKVIKFLREEMGVKKIRFPEHCGIGIKPCSEKGXXXXVGAAIEYAIANDRDSVTLVHKGNIMKFTEGAFKDWGYQLAREEFGGELIDGGPWLKVKNPNTGKEIVIKDVIADAFLQQILLRPAEYDVIACMNLNGDYISDALAAQVGGIGIAPGANIGDECALFEATHGTAPKYAGQDKVNPGSIILSAEMMLRHMGWTEAADLIVKGMEGAINAKTVTYDFERLMEGDKLL

SEQ ID NO: 783 - protein, 389 aa, Escherichia coli
  unsure (1)..(389): unsure at all Xaa locations
TLQNGKLNVPENPIIPYIEGDGIGVDVTPAMLKVVDAAVEKAYKGERKISWMEIYTGEKSTQVYGQDVWLPAETLDLIREYRVAIKGPLTTPVGGGIRSLNVALRQELDLYICLRPVRYYQGTPSPVKHPELTDMVIFRENSEDIYAGIEWKADSADAEKVIKFLREEMGVKKIRFPEHCGIGIKPCSEKAXXXXXRAAIEYAIANDRDSVTLVHKGNIMKFTEGAFKDWGYQLAREEFGGELIDGGPWLKVKNPNTGKEIVIKDVIADAFLQQILLRPAEYDVIACMNLNGDYISDALAAQVGGIGIAPGANIGDECALFEATHGTAPKYAGQDKVNPGSIILSAEMMLRHMGWTEAADLIVKGMEGAINAKTVTYDFERLMEGAKLL

SEQ ID NO: 784 - protein, 389 aa, Escherichia coli
  unsure (1)..(389): unsure at all Xaa locations
TLQNGKLNVPENPIIPYIEGDGIGVDVTPAMLKVVDAAVEKAYKGERKISWMEIYTGEKSTQVYGQDVWLPAETLDLIREYRVAIKGPLTTPVGGGIRSLNVALRQELDLYICLRPVRYYQGTPSPVKHPELTDMVIFRENSEDIYAGIEWKADSADAEKVIKFLREEMGVKKIRFPEHCGIGIXXXXXXXXXXXVRAAIEYAFANDRDSVIXVHKGNIMKFTEGAFKDWGYQLAREEFGGELIDGGPWLKVKNPNTGKEIVIKDVIADAFLQQILLRPAEYDVIACMNLNGDYISDALAAQVGGIGIAPGANIGDECALFEATHGTAPKYAGQDKVNPGSIILSAEMMLRHMGWTEAADLIVKGMEGAINAKTVTYDFERLMEGAKLL

SEQ ID NO: 785 - protein, 237 aa, Griffithsia japonica
MTSPRSQVLLSTCFVSSFTSKVLTPKYLSSTIPCPSSARMSVPAVTFVTGNKNKLREVSQILNADSSQTPFTITSQKVDLPELQGDPDDIVREKCRIAVGERSRALTLVEDTCLCFNALKGLPGPYIKWFWDRLGHDGLNQMLAGFDDKSAYALCTFAYSSGKAGTEPIVFSGATEGKIVPPRHSPNGKAFGWDPIFEPAGFDQTFAEMDKETKNSISHRFKALAKVREHLTKEFSD

SEQ ID NO: 786 - protein, 226 aa, Xylella fastidiosa Dixon
MAWYPRGFDVVAAYDHLYHCDPGLSGWMQRLGPLPALRGWRQPFNVVDALARAILFQQLSGKAASTIVARIEAVIGSTCLYAETLACIDDACLRACGVSSNKILALRDLTRREVAGELPSVRQMGAMHHNTIVEKLIPIRGIGRWTVEMMLMFRLGRPDVLPVDDLGVRKGIQRVDSLAFVPTPKALCTRGECWAPYRTYAGLYLWRIADFHEGEGAMISDRSQDE

SEQ ID NO: 787 - protein, 389 aa, Escherichia coli
  unsure (1)..(389): unsure at all Xaa locations
TLQNGKLNVPENPIIPYIEGDGIGVDVTPAMLKVVDAAVEKAYKGERKISWMEIYTGEKSTQVYGQDVWLPAETLDLIREYRVAIKGPLTTPVGGGIRSLNVALRQELDLYICLRPVRYYQGTPSPVKHPELTDMVIFRENSEDIYAGIEWKADSADAEKVIKFLREEMGVKKIRFPEHXGIGIXXXXXXXXXXXXXXAIEYAIANDRDSVTLVHKGNIMKFTEGAFKDWGYQLAREEFGGELIDGGPWLKVKNPNTGKEIVIKDVIADAFLQQILLRPAEYDVIACMNLNGDYISDALAAQVGGIGIAPGANIGDECALFEATHGTAPKYAGQDKVNPGSIILSAEMMLRHMGWTEAADLIVKGMEGAINAKTVTYDFERLMEGAKLL

SEQ ID NO: 788 - protein, 427 aa, Glycine max
MAIRNSLTGQFLRRSSVAGARLMSSSSSWFRSIEPAPKDPILGVTEAFLADQSPNKVNVGVGAYRDDQRKPVVLECVREAERRVAGSQFMEYLPMGGSIKMIEESLKLAFGDNSEFIKDKRIAAVQALSGTGACRLFAAFQQRFHPNTQIYIPVPTWANHHNIWRDAGVPMKTFRYYHPESRGLDFSGLMDDIKNAPDGSFFLLVLTAHNPTGVDPSEEQWREISSQIKAKGHFPFFDMAYQGFASGDPERDAKAIKIFLEDGHLIGLAQSYAKNMGLYGQRAGSLSVLCEDEKQAVAVKSQLQLIARPMYSNPPLHGALIVSTVLGDPDLKKLWLKEVKVMADRIIGMRTTLRENLEKKGSTLPWQHITNQIGMFCYSGLTPEQVDRMTNEFHIYMTRNGRISMAGLNTGNVGYVLDAIHEVTKSF

SEQ ID NO: 789 - protein, 168 aa, Crocosphaera watsonii WH 8501
MKTLHPFNPEKFLILVVDDMRINRQLLIEILDTAGYGTTFAISGKQALERVKVTEIDLILLDLMMPEINGIEVYKLLKEDENTAHIPVIFLTAVTETNNVLNAFEAGAVDYVTKPFRTPELLARIKIHLDLKRTKDELEKAYEQMKRIAATDELTGIANRRSIFNFGK

SEQ ID NO: 790 - protein, 282 aa, Thermobifida fusca
MTQRLRGRVAAITGGASGIGEATVRRFHTEGASVVIADIQAEAGRRLADELGDRAVFVRTDVSEEADVAALVDTAVDRFGQLDIMVNNAGIMGALGPIDATRMSDADLTIAVNLRGVICGMKHAARVMKPRRSGVIISTSSPAGVLGGIGPHIYSAVKVGIIGLSNSVAAELRQHGIRVNTIIPGSVVSPMTAGIVVDDAHNLAGAQEVLGRTALLGRPIQPADVAAGILYLASDDAAFVTGAVLPVDAGLTGASWPSPYTSGRYAKPVALLEAGRRIGGEE

SEQ ID NO: 791 - protein, 389 aa, Escherichia coli
  unsure (1)..(389): unsure at all Xaa locations
TLQNGKLNVPENPIIPYIEGDGIGVDVTPAMLKVVDAAVEKAYKGERKISWMEIYTGEKSTQVYGQDVWLPAETLDLIREYRVAIKGPLTTPVGGGIRSLNVALRQELDLYICLRPVRYYQGTPSPVKHPELTDMVIFRENSEDIYAGIEWKADSADAEKVIKFLREEMGVKKIRFPEHCGIGIXXXXXXXXXXXVRAAIEYAIANDRDSVTLVHKGNIMKFTEGAFKDWGYQLAREEFGGELIDGGPWLKVKNPNTGKEIVIKDVIADAFLQQILLRPAEYDVIACMNLNGDYISDALAAQVGGIGIAPGANIGDECALFEATHGTAPKYAGQDKVNPGSIILSAEMMLRHMGWTEAADLIVKGMEGAINAKTVTYDFERLMEGAKLL

SEQ ID NO: 792 - protein, 339 aa, Stenotrophomonas maltophilia
MTFVRNAWYVAALPEELSEKPLGRTILDTPLALYRQPDGVVAALLDICPHRFAPLSDGILVNGHLQCPYHGLEFDGGGQCVHNPHGNGARPASLNVRSFPVVERDALIWIWPGDPALADPGAIPDFGCRVDPAYRTVGGYGHVDCNYKLLVDNLMDLGHAQYVHRANAQTDAFDRLEREVIVGDGEIQALMKIPGGTPSVLMAKFLRGANTPVDAWNDIRWNKVSAMLNFIAVAPEGTPKEQSIHSRGTHILTPETEASCHYFFGSSRNFGIDDPEMDGVLRSWQAQALVKEDKVVVEAIERRRAYVEANGIRPAMLSCDEAAVRVSREIEKLEQLEAA

SEQ ID NO: 793 - protein, 397 aa, Bordetella pertussis Tohama I
MSNVNTLSALAKSGALSGKRVFIRADLNVPFDDAGRISEDTRIRASVPGIRLALDAGAAVMVTSHLGRPKEGALTEADSLAPVAQRLSELLGMQVRLVPDWVDGVSVEPGEVVLLENCRGNVGEKKDDEGLSRKMAALCDVYVNDAFGTAHRAEATTHGIARFAPVACAGPLLEAELDALGRALHDPKRPLVAIVGGSKVSTKLSILQSLADKVDQLVVGGGIANTFMLAAGLPIGKSLAEPEQVEQARAVIEIMKRRGAEVPIPTDVVCAKSFGADAAATVKAAADVAEDDMILDIGPQTAQRLADILKTAGTIVWNGPVGVFEFDQFAHGTEVVARAIADSAGFSIAGGGDTLAAIAKYGIADQTGYISTGGGAFLEFLEGKALPAVAVLQARAA

SEQ ID NO: 794 - protein, 504 aa, Staphylococcus epidermidis ATCC 12228
MSKQDGKLTGLFGAPVSDRENSMTAGQRGPLLMQDVYYLEQISHFDREVIPERRMHAKGSGAFGTFTVTNDITQYTNAKIFSEVGKQTEMFARFSTVSGERGAADLERDIRGFALKFYTEDGNWDLVGNNTPVFFFRDPKLFISLNRAVKRDPRTNMRSAQNNWDFWTGLPEALHQVTILMSDRGMPKGFRNMHGFGSHTYSMYNDKGERVWVKYHFRTQQGIENYTDEEAAKIVGMDRDSSQRDLYNAIENGDYPKWKMYIQVMTEEQAKNHPDNPFDLTKVWYKKDYPLIEVGEFELNRNPENYFLDVEQAAFTPTNIVPGLDYSPDKMLQGRLFSYGDAQRYRLGVNHWQIPVNQPKGVGVENLCPFSRDGQMRFLDNNQGGGPHYYPNNQGIYESQPEHKKPPFPTDGDGYEYNYRQDDDNYFEQPGKLFRLQSEDAKERIFTNTANAMDGVSKDVKVRHIRHCYKADPEYGKGVAKALGIDINQIDLETNQDETYENFK

SEQ ID NO: 795 - protein, 677 aa, Bacillus subtilis subsp. subtilis str. 168
MRSFATQQNGIFKSVCSLDCPDQCGLLIHKKDGKIVKVQGDPDHPVTAGNICNKVRNMTERIYDEKRLTTPLKRTGAKGQAIFEPISWKEAIDTITSRWKQLIDEEGAESILPYSFYGNMGKLTAEGMDRRFFYRMGSSQLERTICSKAGSEGYKYTMGISAGIDPEETVHTKLFIFWGINAVSTNMHQITIAQKARKKGAKIVVIDVHKNQTGRLADWFIPIKPGTDSALALGIMHILFKENLHDEAFLSEYTVGYEELREHVKQYDPEKVSTITGVSTEDIYRLAKMYGETSPSFIRIGNGPQHHDNGGMIVRTIACLPAITGQWLHTGGGAIKHNSGILEYNTNALQRPDLLKGRTPRSFNMNQLGRVLLETDPPIRSLFIYGTNPAVVAPEANKVRQGLLREDLFTVVHDLFLTETAAYADIVLPATSAFENTDFYTSYWHHYIQLQQPVIERYGESKSNTEVFRLLAEAMGFTDQELKDSDEVLIRQALDHPDNPHLAEIDYDSLTKHSFMKAKREKPLFPGELPTPSGKIELYSEKMKQDGFPALPTYTPLVTDNEHPFMYVPGPNHNFLNSTFSNNEKHIKLEKTPKLFINTKDAEKHGIVDGAPVRIWNSRGECELTAAVGEQVLPGVVVSQGLWADEQGKKTACKRANPRSLVRYGRRRHLFFRPCTD

SEQ ID NO: 796 - protein, 357 aa, Sinorhizobium meliloti; identical to SEQ ID NO: 310

SEQ ID NO: 797 - protein, 393 aa, Saccharomyces cerevisiae
TLQESDKFATKAIHAGEHVDVHGSVIEPISLSTTFKQSSPANPIGTYEYSRSQNPNRENLERAVAALENAQYGLAFSSGSATTATILQSLPQGSHAVSIGDVYGGTHRYFTKVANAHGVETSFTNDLLNDLPQLIKENTKLVWIETPTNPTLKVTDIQKVADLIKKHAAGQDVILVVDNTFLSPYISNPLNFGADIVVHSATKYINGHSDVVLGVLATNNKPLYERLQFLQNAIGAIPSPFDAWLTHRGLKTLHLRVRQAALSANKIAEFLAADKENVVAVNYPGLKTHPNYDVVLKQHRDALGGGMISFRIKGGAEAASKFASSTRLFTLAESLGGIESLLEVPAVMTHGGIPKEAREASGVFDDLVRISVGIEDTDDLLEDIKQALKQATN

SEQ ID NO: 798 - protein, 484 aa, Burkholderia fungorum LB400
MSEHKLTNAAGAPVADNQNSMTAGARGPVVLQDVWLLEKLAHFDREVIPERRVHAKGSGAFGTLKVTHDISRYTKAKVFAQAGKETPLFMRFSTVAGERGAADAERDVRGFSIKFYTEEGNWDVVGNNTPVFFIRDPLKFPDFIHTQKRDPYTNMRSNVAAWDFWSRHPESLHQVTILMSDRGIPQNFRQMHGFGSHTYSFINANNERFWVKFHFKSMQGVENFTDAEAAQVVAQDRESAQRDLLTNIDQGNFPKWRFAIQVMPEAEAATYRFNPFDITKVWSQKDYPLIDVGTIELNRNAANYFADVEQAAFTPANVVPGIGFSPDRLLQGRLFSYGDTQRYRLGVNHHQIPVNASRVASPHSFHRDGAMRTDGNLGGNVNYEPNRFGDFAQDANASEPPLAAGAVDRYDHRLDDDYYTQPGMLFALFDAAQRERLFGNIARHINGVPQEIVARQIEHFRRADPAYAEGVIAAIARLAEGETK

SEQ ID NO: 799 - protein, 202 aa, Bacillus anthracis str. Ames 0581
MKQVVVATKNMGKVREFAELFERFDLEVKSLHDFPHIEEVEETGETFEENAILKADSLSRQLNAIVIADDSGLIVDALNGKPGVYSARFAGEPKDDQANIDKVLQELNEVAFEKRKARFYCALAVAFPEGDKKPVIVNGTCEGFILEQRRGENGFGYDPIFYVEEYKKAMAELSSDEKNAISHRGRALRKLEEKIPEWFLGE

SEQ ID NO: 800 - protein, 425 aa, Glycine max
  unsure (1)..(425): unsure at all Xaa locations
MEKVGVAVNSKNQESKATSTITIKGFMSLLMKSVDENGDGSKRVISLGMGDPTLTTYFPISNVAEKAVAEALQSHRFRGYAPTAGLPQARIAIAEYLSRDLPYQLSSDDVYITCGCTQAIDVSVAMLARPGANIILPRPGFPLYELSASFRGVEVRHYDLLPEKGWEVDLDAVEALADQNTVALVIINPGNPCGNVYSYHHLEKIAETAKRVGTIVIADEVYGHLAFAGKPFVPMGVFGSIVPVLTLGSFSKRWIVPGWRLGWFVTNDPSGTFRNPKVDERFKKYFDLLGGPATFIQAAVPQIIEHTEKVFFKKTIDNLRHVADICCKELKDIPYIICPYKPEGSMAMMVKLNLSLLEDISDDIDFCFKLAXRQESVIILPGTAVGLNNWLRIIFATDPVALVEGLKRVKSFCERHARKWSMTTE

SEQ ID NO: 801 - protein, 250 aa, Zea mays
MSRRYDSRTTIFSPEGRLYQVEYAMEAIGNAGSALGILAADGVVLVGEKKVTSKLLQTSRSAEKMYKIDSHLACAVAGIMSDANILINTARLHAQRYALSYQEPIPVEQLVQSLCDTKQGYTQFGGLRPFGVSFLFAGWDKHHGFQLYMSDPSGNYGGWKAAAVGANSQAAQSMLKQDYKDALTREEAVGLALKVLSKTMDSTSLTAEKLELAEVFLQPDTGEVQYQVCSPEALGKLLAKSGLTQPTPEA

SEQ ID NO: 802 - protein, 178 aa, Glycine max
  unsure (1)..(178): unsure at all Xaa locations
MASSMISSPAVTTVNRAGAGMVAPFTGLKSMAGFPTRKTNNDITSIASNGGRVQCMQVWPPVGKKKFETLSYLPDLDDAQLAKEVEYLLRKGWIPCLEFELEHGFVYREHNRSPGYYDGRYWTMWKLPMFGCTDASQVLKELQEAKTAYPNGFIRIIGFDNVRQVQCISFIAYKPPGX

SEQ ID NO: 803 - protein, 181 aa, Triticum aestivum
  unsure (1)..(181): unsure at all Xaa locations
LDGVFAFVLYDTRDRTYVAARDAIGVNPLYIGWGSDGSVWMSSEMKALNEDCVRFEIFPPGHLYSSAAGGFRRWYTPHWVPRSRCPGTPXYQAAPSLREASEKAGYQRGHDRLPFRGLLSRRLDPPFVASVNKAPLRPRPTPPESGQTPSFVVRSRGPLTEGRTRVPDTRDTTRFLTKTDH

SEQ ID NO: 804 - protein, 635 aa, Crocosphaera watsonii WH 8501
MVKTPISPAQKVSKLENIKEHSNFLREPLASELLEDTNRFSQDAIQILKFHGSYQQYNRDKRAKGQEKDYRMMLRTRNPGGFISAQLYSTIDGLSDEYGNNTLRVTTRQGLQIHGILKKNLKASISAIVKSMGSTLGACGDINRNVMAPPAPLKNRPDYGYAWEYADKIADLLRPQSNAYYEIWLDGEKAISVEEDPEVTAARQRNINGTNFEEGEEPLYGQHYMPRKFKCSVTVPGDNSIDLYTHDVSLVVITDDSGELLGFNVLTGGGMGRTHNREETFPRLADPLGYVAKEDVFDLMKAILATQRDYGDRVQRRHARMKYLIEDWGIDKFRSQVEEYLGKALEPFKPLPPWEYKDFLGWHEQGDGKLFLGISIENGRIQDQGDFRLKSALQKITKEYSLPMRLTANHNLIFYEINPIDQADIESILLHCGIVSDPEKIDSLTRYSMACPALPTCGLAVTESERALPGILERINNVLARVGLAGEEIVIRMTGCPNGCARPYMAELGFVGSAPESYQVWLGGDANQTQLAQPYIDKLPDKDIESFLEPLFAYFKQDKTKQETFGQFCQRVGFEALRTFSENYTPPKPRRVRKNQHRVSVQDAMFARLKQASQDEKRPMNQIVQQALEAYFAEE

SEQ ID NO: 805 - protein, 111 aa, Glycine max
  unsure (1)..(111): unsure at all Xaa locations
MASSMISSPTVTTANRPGAGLVVQLIGLNSLVXFPTLKTHHDITFIASNGGRVQCMPVWPPVGKKKFETLSYLPDLDDAQLAKEVEYLLMKGWIPCLEFELEHSFLYREHN

SEQ ID NO: 806 - protein, 397 aa, Methanosarcina mazei
MAINEADTVWVLLSSALVLLMVPALALFYGGLVQRKNVLSSMMHSFVAMGVLALEWIIIGYSLAFSEGNWFIGGLENVFLSGIDPYSVTGTIPTYAFVAFQGMFAIITPALISGAIVGRVKFKSYIAFILLWGLIVYAPVCHWVWGGGFLTGEALDFAGGTVVHITAGMSSLAILAYLGKRRGYGVDSLKPHNVTLTLLGAGLLWFGWFGFNAGSALAANEIAALAFMTTLVAPAAAGFVWMALEWAHLGRPTALGFATGILAGLVGITPAAGFVTPVAAIAIGAIASFICYQAVMFKNRLGYDDSLDAFGVHGVGGIVGAILTGVYASVGGEGLLLGNSAQLMIQLQGVVITIVYAMACTLLIGFVLHKTIGLKVSESEEIIGLDKTQHGEAAYNI

SEQ ID NO: 807 - protein, 511 aa, Clostridium thermocellum ATCC 27405
MKDKLVMLIILDGYGINPRKEGNAIEAANKPNIDRFMREYPNTIVRTSGMDVGLPDGQMGNSEVGHTNIGAGRIVYQELTRITKSIQDGDFFEKKEFLDAAENCRKHNSKLHLFGLLSDGGVHSHNTHLYGLLEFAKRQNLKDVYVHCFFDGRDVPPDSAMGYVEELENKIREIGVGEIATVMGRYYAMDRDNRWERVKLAYDAMVLGRGNQAQSAKEAVAESYKRQEFDEFVKPTVIMKNGSPVATVGENDSIIFFNFRPDRAREITRAFTEVNFSGFEREKGYFPVFFVCMTQYDKTFENVVVAFKPESLENTFGEYISKKGLRQLRIAETEKYAHVTFFFNGGVEAVYEGEDRILINSPKVATYDLKPEMSAYEVTDKVLECINKKEYDVIILNYANPDMVGHTGVFEAAKAAIEAIDECLGKVVPAVLEQNGVVLITADHGNSEQMIDYETGGPFTAHTTNPVPLIVIGLGDVKLREGRLADLAPTMLDILGFEKPKEMTGESLIVK

SEQ ID NO: 808 - protein, 539 aa, Chlamydomonas reinhardtii
MSGDFGSEPLGSCSVETVTALLGYGLEQDSITALCQPEGGAGCTSTDNCMFQYLMGATADAQSTASDVGVGLDVSFLLFSGYLVFVMQLGFAVLCAGSIRSKNCMNILLKNMLDACVGAIGFYVFGYAFAYGRKYGQNSNGFIGNWNFALSYTTQTSMSGTEFTTFGWHQFFFQWSFCAATTTIVSGAVAERCTFMAYMIYAFFLSSFVYPVIVHWVWDGQGWLSAFNTFQDGYALILKTGAIDFAGSGVVHMTGGIAALMGAWIMGPRVGRFANDGTVNEMRGHSSTLVVMGTFLLWFGWFGFNPGSNLVVASQAAATVVSRVAVTTALAGGAGGISMLFYKFLTVKAWDVVATCNGILAGLVAVTASCSVIEPWAAIITGAIGAIIFSIADYVTLYKLKVDDPVSAFALHGAVGAWGVLFPGFLAAPHYVVEVYGAYGFGMDAREGKRFGLFYGGHGQVLLVQLIEVLAIFGWTGFMMGSFFFILNKAGLLRVPLQEEMAGLDAANYSKSVGSKDPSVHCTVGVDKLEGGALGEGKA

SEQ ID NO: 809 - protein, 360 aa, Thermobifida fusca
MRAVRYDGTGLYLSDIPAPVAGPGQVVLEVTAAGLCHSDLAVMSRPPEALPYKLPITLGHEAVGVVVDVGAGISGLAEGDTVAVYGPHGCGACRTCRSGAENHCPHARAAGILPPGLGADGALADYLLVPHSRHLVPLRGLDPVRAAPLTDAGLTSYHAVRSALPRLPPDGTALLIGIGGLGHLAVQILRALSSAQIIAVDMAADKRELALRCGADTALPSTDTVPDQVRDLTEGVGADVVFDFVASDATLRMAARSLRPGGEISIVGVGEGRLPVAVNLVPLGAVVRTPYWGTQSDLVDVLALAREGRITVEVEEYALEETPLAYERLARGNVRGRAVVNPARAPGNAPGQACAEEQRG

SEQ ID NO: 810 - protein, 314 aa, Brucella melitensis 16M
MAVAFTFPGQGSQAVGMGKALAEQFAEARAVFDEVDEALGEKLSATMFEGPEDVLTLTANAQPALMAVSMAVQRIMEARGFSLKDKVSYVAGHSLGEYSALCAAGTFSLADTARLLRIRGNAMQKAVPVGEGAMAAIIGLEHGDVEAVCMEAKASGPVQIANDNGGGQLVISGARAAVELAAKLGSEKGAKRAIMLPVSAPFHSTLMAPAADAMREALAAVEKHDSVVPLIANVRAAPVTDANEIAALLVEQVTGQVRWRETIEWFSANGVTTLYEVGCGKVLTGLARRISKDVSGAAVGSAEEIEAALAALNA

SEQ ID NO: 811 - protein, 245 aa, Cicer arietinum
MSLLGFILLGIFLYKVSHVKGHGGHVSWINAHATFYGGSDASGTMGGACGYGNLYSQGYGTNTAALSTALFNNGLSCGACYEIKCVNDPQWCIAGSSIVVTATNFCPPGGWCDPPNHHFDLSQPIFQQIAQYKAGIVPVAYRRVRCRRKGGIRFTINGHSYFNLVLVTNVGGAGDVHSVAIKGSRSRWQAMSRNWGQNWQSNSYLNGQSLSFVVTTSNGHSVVSFNAAPSSWSFGQTYTGRQFNY

SEQ ID NO: 812 - protein, 309 aa, Arabidopsis thaliana
MEITLNSGFKMPIIGLGVWRMEKEELRDLIIDAIKIGYRHLDCAANYKNEAEVGEALTEAFTTGLVKREDLFITTKLWSSDHGHVIEACKDSLKKLQLDYLNLLLVHIPIATKHTGIGTTDSALGDDGVLDIDTTISLETTWHDMEKLVSMGLVRSIGLSNYDVFLTRDCLAYSKIKPAVNQIETHPYFQRDSLVKFCQKHNICVTAHTPLGGATANAEWFGTVSCLDDPVLKDVAEKYKQTVAQIVLRWGIQRKTVVIPKTSKPERLEENFQVFDFQLSKEDMEVIKSMKRNYRTHQTAKFWGIELYA

SEQ ID NO: 813 - protein, 292 aa, Leuconostoc mesenteroides subsp. mesenteroides ATCC 8293
MEYKTLASDIKMPVLGFGVFQVQEKGAAKQAVIDAIKTGYRLIDTAASYGNEREVGEGIAEAIETGLVTREELFVTSKMWVQDVSADKAAAAIQASLDRLKLDYLDLYLLHQPYNDVFGAWRAMEAAYKAGQLKAIGVSNFDIAQLTNLAEFSEIKPMLNQIEANPFQQNKKDAAYFAEYGVQVEAWAPFAEGKNGLFSNELLQGIADKYNKSIAQVVLRWLTQRDIIVVAKSVKPERMAQNLDVLDFKLTDEEMQEIATLDTNISQFFDHADPDMIKWMAGREISYDVTAD

SEQ ID NO: 814 - protein, 313 aa, Rhodospirillum rubrum
MSDALLPVFSPASVLFDHGEGAWLVAANGERYLDFGAGIAVNALGYSHPHLVGALERQGRKLWHLSNVYRISEAERLAERLTAACFADVAFFANSGAEANECAIKIARRHHHAHGRPERWRIITFDGAFHGRTLATMAAGGNRKYLDGFGPPVDGFDQCPLEDIEAVRARVGPRTAALMIEPIQGESGIRPVSHGFLRQLRELCDERGLLLIFDEIQCGMARTGHLFAHQEAGVVPDIMSLAKGLGGGFPIGACLATRGAAFGMRPGAHGSTFGGNPLAGAVANAVLDIVMDDGVLAEIRRKSALLRGLPCRP

SEQ ID NO: 815 - protein, 414 aa, Yersinia pestis CO92
MEQPSPVTRQSFDEWIVPTYAPADFIVVRGEGSTLWDQQGKSYIDFAGGIAVNALGHGHPAVRAALIEQADKVWHLGNGYTNEPVLRLAKQLIDATFAEKVFFCNSGAEANEAALKLARKYALDNFANKAGQQGEKNQIVAFRNAFHGRTLFTVSAGGQPKYSQDFAPLPGGIHHGIFNDLASAEHLITDQTCAVIVEPIQGEGGVLPADKEFLHGLRALCDRHNALLIFDEIQTGVGRTGELYAYMHYGVSPDVLTSAKALGGGFPIGAMLTTTKYASALSVGSHGTTFGGNPLACAVAGTVLSLINQPTLLAGVKARHQWFIDELAEINARHNVFAEIRGRGLLIGCVLNAQYAGKSKEIVQAAAQYGLIALIAGPDVVRFAPSLIISPKEIKEGLARLAMGIEQVCQKVTS

SEQ ID NO: 816 - protein, 509 aa, Vibrio rumoiensis
MSDDTKKCPVTHMTTDFGAPVVTNRDSLTAGPRGPLLAQDVWLNEKLAGFVREVIPERRMHAKGSGAFGTFTVTHDITKYTRAKIFSEVGKKTEMFARFTTVAGERGAADAERDIRGFALKFYTEEGNWDMVGNNTPVFFIRDPRQFPDLNKAVKRDPRTNLRSATNNWDYWTLLPEALHQVTVVMSDRGIPASYRHMHGFSSHTYSLWNQAGERFWVKMHFRTQQGIKNLTDAEAGELVAQDRESHQRDLYEAIERGEYPKWTMFIQVMPEADAEKYALHPFDLTKVWYKGDYPLIEVGEFELNKNSENFFADVEQVAFSPSNLVPGIGVSPDRMLQARLFNYADAQRYRLGVNYHQIPVNQARCPVHSNHRDGQGRVDGNYGALPHYEPNSFGQWQGQPQFSEPPLKLTGNAAHWSYDKDDHNYFEQPGKLFRLMNDGQKEALFGNTGRAMGDAPEFIKFRHIRNCHAADPAYGAGVAKALGINLEKALASKKDDPMYGNPLVALPA

SEQ ID NO: 817 - protein, 568 aa, Glycine max
MAPSFAINGGFPGARVTPPSVTGRFAAVYSEVQNSRIDHELPLPSVLKNPFIIVDGPQSSAAGNPEEIAKLFPKLFGQPSAALVPSDSHAPHANRKLKIGVVLSGGQAPGGHNVISGIFDYLQDLAEGSTLYGFRGGPAGIMKCKYVELTSDYIYPYRNQGGFDMIRSGRDKIETPEQFKQAEETVQKLNLDGLVVIGGDDSNTNACLLAEHFRSKNMKTRVIGCPKTIDGDLKCKEVPTSFGFDTACKIYAEMIGNVMIDARSTGKYYHFVRLMGRAASHITLECALQTHPNITIIGEEVAAKKMTLKDVTDYIVNIISKRAEDNYNYGVILIPEGLIDFIPEVQHLIAELNEILANDAVDEGGLWKKKLTDQSLKLFEFLPKAIQEQLMLERDPHGNVQVAKIETEKMLIQMVETELEKRKQQGTYKGGFRGQSHFFGYEGRCGLPTNFDSTYCYALGYGAAALLQSGKTGLISSVGNLCAPVEEWTVGGTALTSLMDVERRHGKFKPVIKKAMVELEGAPFKKFASLRDEWALKNCYISPGPIQFTGPGSDAINHTLLLELGAQA

SEQ ID NO: 818 - protein, 404 aa, Photorhabdus luminescens subsp. laumondii TTO1
MLAVKKSSKLDNVCYDIRGPVLKEAKRLEEEGNKVLKLNIGNPAPFGFEAPDEILVDVIRNLPTAQGYSDSKGLYSARKAIMQHYQARNMMDVTVEDIYIGNGVSELIVQAMQALLNTGDEMLVPAPDYPLWTAAVSLSSGKAVHYMCDEGSDWFPDLNDIRNKITPRTRGIVIINPNNPTGAVYSKELLLEVVEIARQHNLIIFADEIYDKILYDDAEHHSIAALAPDLLTVTFNGLSKTYRVAGFRQGWMVLNGPKKHAKSYIEGLEMLASMRLCANVPMQHAIQTALGGYQSISEFILPGGRLYEQRNRAWELINQIPGVSCVKPKGALYMFPKIDAKRFNVHDDQKMVLDLLLQEKVLLVQGTAFNWPEPDHLRIVTLPRLDELEMAIQKFARFIGKYHQ

SEQ ID NO: 819 - protein, 261 aa, Burkholderia fungorum LB400
MAAALIGGLIKRGVAAADLYAIDPNEEARKRNEQQFGIRTGAAADAALAAYDAVVLAVKPQILKSVAEAVAPHLNASQLVVSIVAGIRMGDMSRWLNGHSRIVRVMPNTPALIGMGVTGLVATGSVDEAGRALASQLLGAVGETVWFDDEAKIDAVTAISGSGPAYVFYFIEALQEAARQLGMDEAQGRALAVATFTGAAQLAANSDEPPGVLRERVTSKGGTTAAALASFDASGIKDAIVRGALAANARAREMGDEFGKQ

SEQ ID NO: 820 - protein, 72 aa, Glycine max
  unsure (1)..(72): unsure at all Xaa locations
PWYETTVXGXXXXXPFXGLKSMAXXPTRKTNNDITSIASNGGKSXNAWQVWPPVGQEEIEILSYLPDLMMHG

SEQ ID NO: 821 - protein, 379 aa, Streptococcus pyogenes M1 GAS
MRENTTLLHGYTVIDEFTGAASVPIYQTSTFHNSELYCPSQKHLYTRFSNPTTEALEDGLACLEKATYAVAYASGMAAISTVLMLLKAGDHVIFPLEVYGGTCQFATAILPNYQIETSFVDMADLATVKASIRPNTRMIYLETPSNPLLKICDISELVQLAKAYGVLTVADNTFMTSLYQEPLAMGVDIVVESVTKFINGHSDVVAGLAATNNEAIYNQLKLFQKNFGAIVGVEDAWLILRGMKTMGIRMEQAVKNAQQLANYLAKHPKVLKVHYPGLDSHPNHDTHLQQAKNGGAVLSFELASKEELMTFTHRIQLPILAVSLGGVESILSHPATMSHACLSPQARLEQGVVDGLLRLSCGVENIEDLLADFEQALAF

SEQ ID NO: 822 - protein, 404 aa, Rickettsia rickettsii
MKDLLPDDYKVHDYIINKARDVGVLYGYKQMSTPIVEYTKVFNRSMGESSDVISKEIYSFLDKSNDCVALRPEFTACIIRSLISNRLQHKLPLKFFSTGPVFRYDRPQAGRQRQFHQLNYEYIGAKGAITDADTLKLAVDILKALEIEQDTTLELNSLGCNESRRVYQQKLVEYLNDFKEQLSEESKIRLSKNPMRILDSKSETDQKIIANAPVLSEYYTDESKEYFEELIQYLDILGVKYSINPRLVRGLDYYCHTAFEFTTKKLGSQSTILAGGRYDGLAKIMGNNDDVPAIGFAAGIERIALMREYDVSEVKPVFVLPIGKNNICYALEIVDKLRTENIAIIIESLGKIAKRMQRIFNENAQFIIFIGDEEQANNNLKIKDLKKEEEYIVDFAKALELLKK

SEQ ID NO: 823 - protein, 347 aa, Sulfolobus sp. RC3
MRAVRLVEIGKPLVLKDIDIPKPKGAQVLIKVEAAGVCHSDVHMRQGRFGNLRIVEDLGVKLPVTLGHEIAGKIEEMGDEVVGYSKGDLVAVNPWQGEGNCYYCRIGEEHLCDSPRWLGINFDGAYAEYVLNPHYKYMYKLRRLNAVEASPLTCSGITTYRAVRKASLDPTKTLVVVGAGGGLGTMAVQIAKAVGGATIIGVDVREEAVETAKRAGADYVINASVQDPLAEIRRITEGKGVDAVIDLNNSEKTLSVYPKALAKQGKYIMVGLFGADLHFHAPLITLSEIQFVGSLVGNQSDFLGIMRLAEAGKVKPMITKTMKLEEANEAIDNLENFKAVGRQVLIP

SEQ ID NO: 824 - protein, 397 aa, Clostridium thermocellum ATCC 27405
MAMMNKKTIEDIDVKGKKVIVRVDFNVPLDENRKITDDKRIVGALPTIKYLVEHGAKTILVSHLGRPKEGFEEKYSMAPTAVRLGELLGKEVIMAKDVIGPDAKAKAAALKEGEVLMLENVRFHKEETKNDPAFAKELASMAEIYVNDAFGTAHRAHASTAGLADYLPAVCGYLIQKEIEVMGKALSNPERPFVAILGGAKVSDKIGVIENLIDKVDTLIIGGGMAYTFFKAKGYSIGTSLCEDDKVELAKSLMDKAEKKGVKLLLPVDNVVGKEFSNDTERKTVPSDQIPDGWMGMDIGEETIKLYSEAIKNAKTVVWNGPMGVFEFSNFANGTREVARAVAESGAISIIGGGDSAAAIEQLGFADKITHISTGGGASLEFLEGKVLPGIDVLMDK

SEQ ID NO: 825 - protein, 381 aa, Vibrio vulnificus CMCP6
MKTFILPDLGEGLAESEIIKWHVSVGDKVEVDQVILTVETAKATVDVPAPWAGTIITRHGNEGDVVNIGALLLEIEDGDVTENSDQKVQQREDAATVVGHVSNQMHQVKVDDFWIGGNQNHTTEKRVTALPSARLLAQKLGVNLEMVSGTGPSGLIMDHDVYDEAGKQRPGTEVLKGARRTMMTTMTESHLQVAAVTITEEALLEHWSSQEDITVRLVQAVVYACQQEPALNAWFDADTVTRCVHHTVNIGMAVDSAHGLYVPVMRHADEFSPDDIRSWINQTVSGIRERKIGREQLQHATITLSNFGAIAGIYATPVVSPPQVAIVGAGRIIEKVVLREGKAVAVKAMPLSITFDHRACTGGEAARFTKALAEHLRKPSV

SEQ ID NO: 826 - protein, 148 aa, Oryza sativa (japonica cultivar-group)
MEQGSERQDERPPLPCANGCGFFGSADTRGLCSKCYRQTVMSQASAPSAAAQSAEHDQVVLPAPEGVPVDEGAMPPPPPRHGAKTKSRCAACGRSVGLMGFECRCGAVFCGAHRYSDRHDCGYDYRGAGRDAIARANPVVRPDKVEKL

SEQ ID NO: 827 - protein, 393 aa, Bacteroides thetaiotaomicron VPI-5482
MQKESQTYKIAPAERLASVSEYYFSKKLKEVAQMNAEGKDVISLGIGSPDMPPSKVTIETLCNNAHDPNGHGYQPYVGIPELRKGFAAWYQRWYGVELNPNTEIQPLIGSKEGILHVTLAFVNPGEQVLVPNPGYPTYTSLSKILGAEVISYDLKEEDGWMPDFEALEKMDLNRVKLMWTNYPNMPTGANATPELYERLVDFARRKNIVIVNDNPYSFILNEKPISILSVPGAKECCIEFNSMSKSHNMPGWRIGMLASNAEFVQWILKVKSNIDSGMFRAMQLAAATALEAEADWYEGNNHNYRGRRHLAGEIMKTLGCTYDENQVGMFLWGKIPASCKDVEELTEKVLHQARVFITPGFIFGSNGARFIRISLCCKDAKLAEALERIKKLS

SEQ ID NO: 828 - protein, 364 aa, Neurospora crassa
MGYPETFEGFVVDSPKTWNQFHRHELKPKPFGDDDIDVQIECCGVCGSDIHTVTGGWGDFEGPLCVGHEVVGKAIKVGKNVTEIKQGDRVGVGAQVWSCLKCDVCKSKNEQYCPHMVDTYNANYEDGSTAHGGWASHIRAHQYFTFKIPDAIPSHLAAPLLCAGITTYSPLVRANVGPGKTVGIIGVGGLGHLGIQWARALGAEVHVLTHSAYKADDAKALGAQNVIVTSDDEKWAEPYKFKFDFLLNCADATHKFDMKTYLSVLKVGGEFHMCGIPDKPLPPLEVLAFMQNGAKLSANHLGNHQEMKAMLQLAAEKGIVPKVETVQLGEDGCKEAVERVKEGNKVHYRLTLTGFDKVFGKVEY

SEQ ID NO: 829 - protein, 285 aa, Pseudomonas syringae pv. tomato str. DC3000
MTIALKQPTLTGQCVAEFLGTALMIFFGTGCVAALKVAGATFGLWEICIIWGMAVSMGIYLSAGISGAHLNPAVSIALSLFAGFEKRKLPFYISAQIAGAFCGAGLVYLLYISLFFDFEHAHHIIRGSEQSLELASVFSTYPNPAISVGQAFLVEVVITTILMGVIMALGDDNNGLPRGALAPLLIGLLVAVIGSAMGPLTGFAMNPARDFGPKLMTFFAGWGEIAFTGGRDIPYFLVPIFAPILGACLGAAGYRALIARHLPSTVTVENEKEAPVVRGKVQASS

SEQ ID NO: 830 - protein, 363 aa, Bordetella bronchiseptica RB50
MSSPRTYRIAAIAGDGIGREVMPEGLRVVRAAARRFGLDLDIVTFDWAHCDYYREHGQMMPDDWKAQLAGMDAIYFGAVGWPATVPDHVSLWGSLLKFRREFDQYINLRPVRLFEGVPCPLAGRQPGDIDYLVVRENTEGEYTSAGGVIYEGTEREIVIQESVYSRYGADRVLHYAYALADSRPRRRLTVATKSNGIAISMPWWDKRADAVGQQYPGVAVDKQHIDILSARFVLQPDRFDVVVASNLFGDILSDLGPATTGTIGLAPSANLNPEREFPSLFEPVHGSAPDIYGQNIANPVAMIWSGALMLDFLTEGAGAGRAAHDAIVAAIEQVLAHGPRTRDLGGTASTDAMGEAIAARLAA

SEQ ID NO: 831 - protein, 364 aa, Lycopersicon esculentum
MAIENNDQSFFLDVLYCEEEEEKWGDLLEDEEGVIINPLLLSSEGTTKTNSLLLLPLLLLEQDLFWEDEELLSLFVKEKETRCCFESFGSDPFLCSARVDVVEWILKVNAHYDFSALTAILAINYLDRFLSSLQFQKDKPWMTQLAAVTCLSLAAKVEETQVPLLLDFQVEDAKYVFEAKTIQRMELLVLSSLKWRMNPVTPLSFLDHIIRRLGLKNNVHWEFLRRCESLLLSVMIDCRFVRYMPSVLATAIMLHVIHQIEPCNAIDYQNQLLGVLKISKENVNNCYELISEVSSKPITSHKRKYDENPSSPSGVIDPIYTSESSNDSWDLDLPSFKKSKVQEQQMKMSSSLSRVFVEAVGSPH

SEQ ID NO: 832 - protein, 319 aa, Herpetosiphon aurantiacus
MDYGFATRAIHAGQDPESVTGAVIVPIYQTSTYAQRGVGDHTGYEYSRTDNPTRTALQTCLAALEEAKHALVFASGLGASTTLMLMLKAGDHVICGDDVYGGTYRLFQRVMTEHGLSFDFIDMADPEAVRAAIKPNTRLIWLETPTNPLLKLAPIAAITRVAREHGIWTIVDNTFASPYNQRPITLGADMVLHSTTKYIGGHSDVVGGAIMTSNDELYEKLKFLQNAAGAVPGPFDCWLVLRGVKTLSIRMRDDERNALAIAQFLTEHPGVEKVIYPGLPSHPQHNLAREQMRGFGGMISILLKGGAEAANAMVSKTKL

SEQ ID NO: 833 - protein, 539 aa, GIBBERELLA ZEAE PH-1
MAVMSKLLNFPSLTLAACIEGFFAIKLFPNYYSTQSHLAAVVTILLINYAFGVVFWAVLYPRLFSPLRRIPGPKAYLSAAHHSLVVKGRPSGDLFLDLAKEYPGKDVIMLNSFRNQLCIMNPQLLADLLVHNCYDFAKPKRISGFLRHVLGDGLIIVEGEQHKFLRKNSTPAFHFRHIKELYPMMWTKSETLTKAIAQDITASRSPVVELNGWASKVTLDIIGIAGLGRKFDAVEKKIDPLADIYEQLLEPDREKLIFAMLSLAIGLPIIRMIPWKMNDLFNYLTGSLNDLCYPMIKEKKAAIIEKGDDHFDVLSLLIKSNNFSDEALKDQLLTFLAAGHETTASALTWACYLLTQYPDIQSKLRDEVRDSLPADVDCNTPDLASILEQMPYLNGVMHETLRLYPTVPLTMRSALRDTRIGDQYIPEGTDVIVSIWYINRAPEIWGPDAAEFRPERWMTEDGKPNQNGGASSNYNFLTFLHGPRSCIGQGFAKAEMRCLLANMVKSFEWTLAMDNKLVLPRGVITIKPENGMYLNMKAI

SEQ ID NO: 834 - protein, 555 aa, Borrelia burgdorferi
  unsure (1)..(555): unsure at all Xaa locations
MNTSLFKQERQKYIPKLPNILKKDFNNISLVYGENTEAIQDRQALKEFFKNTYGLPIISFTEGESSLSFSKALNIGIILSGGPAPGGHNVISGVFDAIKKFNPNSKLFGFKGGPLGLLENDKIELTESLINSYRNTGGFDIVSSGRTKIETEEHYNKALFVAKENNLNAIIIIGGDDSNTNAAILAEYFKKNGENIQVIGVPKTIDADLRNDHIEISFGFDSATKIYSELIGNLCRDAMSTKKYWHFVKLMGRSASHVALECALKTHPNICIVSEEVLAKKKTLSEIIDEMVSVILKRSLNGDNFGVVIVPEGLIEFIPEVKSLMLELCDIFDKNEGEFKGLNIEKMKEIFVAKLSDYMKGVYLSLPLFIQFELIKSILERDPHGNFNVSRVPTEKLFIEMIQSRLNDMKKRGEYKGSFTPVDHFFGYEGRSAFPSNFDSDYCYSLGYNAVVLILNGLTGYMSCIKNLNLKPTDWIAGGVPLTMLMNMEERYGEKKPVIKKAXVDLEGRPFKEFVKNRDKWALNNLYLYPGPVQYFGSSEIVDEITETLKLELFK

SEQ ID NO: 835 - protein, 465 aa, Corynebacterium glutamicum ATCC 13032
MSEQPASIKHYDLIIIGTGSGNSIPGPEFDDKSIAIVEKGAFGGTCLNVGCIPTKMYVYAADIAQEIQESARLGIDATVNSVDWPSIVSRVFDKRIDLIAQGGEAYRRGPETPNIDVYDMHASFVDSKTISTGIAGQEQLISGTDIVIATGSRPYIPEAIAESGARYYTNEDIMRLAQQPESLVIVGGGFIALEFAHVFEALGTKVTILNRSDVLLREADADISAKILELSKKRFDVRLSTAVTAVHNKADGGVKISTDTGDDIEADILLVATGRTPNGNQMNLDAAGIEMNGRSIKVDEFGRTSVEGVWALGDVSSPYKLKHVANAEMRAIKHNLANPNDLQKMPHDFVPSAVFTNPQISQVGMTEQEAREAGLDITVKIQNYSDVAYGWAMEDKDGFVKLIADKDTGKLVGAHIIGAQASTLIQQLITVMAFGIDAREAATKQYWIHPALPEVIENALLGLEF

SEQ ID NO: 836 - protein, 363 aa, Glycine max
MGGKRKKSDDDDDVEAEAEASGWKKKTRTTTEREKEKKEPLRPSMIKNKEKRSELHAKLKHQKKLEKRAKAKARDAALKKALELGEEPPEKKVPRTIENTRELDETVCKPDDEELFAGNDADEFGPILNQQQTPKILITTCRFHSTRGPAFISELLSVIPNAHYFKRGTYDLKKIVEYAKKKDFTSIIVVHTNRREPDALLIIGVPDGPTAHFKLSKLVLRKDIKNHGNPTGHKPELVLNNFTTRLGHRVGRLIQSLFPQDPEFKGRRVVTFHNQRDFIFFRHHRYIFETKEVKKAESKGKKDKDGESENVPEQKTIARLQECGPRFTLKLISLQHGTFDTKGGEYEWVHKPEMDTSRRRFFL

SEQ ID NO: 837 - protein, 390 aa, Gloeobacter violaceus PCC 7421
MKAVCWHGAGDVRVETVPDPAILYPRDAIIKVTSTAICGSDLHLYDGVIPTMQKGDILGHEFMGEVVEVGAAVKNLRKGDRVVVPFTIACGHCHFCERTLWSLCDNSNPNAWMAEKVYGSTSGSGLFGYSHLFGGYAGGQAEYVRVPFADTGPMKVPESLTDEQVLFLTDIFPTGYMAAENCNIQPGDTVAVWGCGPVGQFAIKSAYMLGADRVIGIDRHPKRLKMAKEQGGAEVLNLDEVEVGEALKEMTGGWGPSHCIDAVGLEAHGSGIEGIYDNVMNALKLETDKPAALRQAIVACRKGGTVSIPGVYGGLLDKMPMGAAFAKGLTFKMGQTHVHRYLQPLLERIVQGELDPTFVITHRLKLDDAPEGYRTFRDQKDDCIKVVLKP

SEQ ID NO: 838 - protein, 405 aa, Azotobacter vinelandii
MTISLSRRVRRVSLSANAAAKLKTTTLREAGRDILDLTTGEPDFDTPEHIKRAACAAIAAGATKYTPTAGVRALREAVRRKLAAENRLDYPLAGIVVANGAKQIVFNAFAATLDEGDEVLVPVPYWPSFPDIVRFNDGTPVFLECPLEQGYKLTPEQLEAHIGPRTRWLILNSPGNPSGALYDEAELAALAAVLRRHPQVLILLDELYEHIRFDGRPPLGLLNVAPDLQARSLLVGGVSKTYAMTGWRVGFGAAPEALATAMTVVQSQAASGASSVGQAAALAAFAGGLEFLPAQVAAYRERRDLLVEALAAVDGLEVLAPQGGFFVFVRCVGLLGRRRPDGRRLDGEADVLDYLLESGVSGVAGSAYGLSPYFRLSIATATDSVVEAGRRIALACAALREELPA

SEQ ID NO: 839 - protein, 358 aa, Brassica napus
MEFRGDAYKRIAMISAHLQPSFTPQMEAKNSVMGLESCRAKGGNPGFKVAILGAAGGIGQSLSLLMKMNPLVSLLHLYDVVNAPGVTADVSHMDTGAVVRGFLGAKQLEDALTGMDLVIIPAGVPRKPGMTRDDLFKINAGIVRTLCEGVAKCCPNAIVNLISNPVNSTVAIAAEVFKKAGTYDPKKLLGVTTLDVARANTFVAEVLGLDPREVDVPVVGGHAGVTILPLLSQVKPPSSFTPSEIEYLTNRIQNGGTEVVEAKAGAGSATLSMAYAAAKFADACLRGLRGDANVIECSFVASQVTELAFFATKVRLGRTGAEEVFQLGPLNEYERVGLEKAKEELAGSIQKGVDFIRK

SEQ ID NO: 840 - protein, 366 aa, Oryza sativa
NLRGRGSHGRQCRARRPSGSSGHAAPPPPPPRSSSATRDVAVAATAAAAGEAGAEEGGGLAKTLQLGALFGLWYLFNIYFNIYNKQVLKVFPYPINITNVQFAVGTVIALFMWITGILKRPKISGAQLAAILPLAMVHTMGNLFTNMSLGKVAVSFTHTIKAMEPFFSVLLSALFLGEMPTPFVVLSLVPIVGGVALASLTEASFNWAGFWSAMASNVTFQSRNVLSKKLMVKKEESLDNITLFSIITVMSFFLLAPVTLLTEGVKVTPTVLQSAGLNLKQIYTRSLIAAFCFHAYQQVSYMILARVSPVTHSVGNCVKRVVVIVTSVLFFRTPVSPINSLGTGVALAGVFLYSQLKRLKPKPKTA

SEQ ID NO: 841 - protein, 428 aa, Lactobacillus johnsonii NCC 533
MTVYVEKVRALEIFDSRGNPTVEVHAYLSDGTVAKAEVPSGASTGEKEAVELRDGGNRLQGKGVTQAVTNVNGPINDALKGLSPYNQAEIDRTMIKLDGTLNKAKLGANAILGTSMAIARAAARSKDEPLYRYLGGCELEMPQTFHNVINGGKHADNGIDIQEFMITPVAKNSFRDGFEKIVNTYHALKAVIEEAGFETGLGDEGGFAPNLNSSEEALKMLRKAIIKAGYKPRKDIAIAFDAAASSFYNTEDGKYHFEGHIWNGEEMLQYYDKLLKEFPEIISCEDPFDENDWENFEKFTAKFGSTHQVVADDNVCTNPKLVRKAIKDKLCNSILIKLNQIGTITETLETIRLARKNNMTTMVSHRSGETGDTFIADFTVATNAGQLKSGAPARSERVEKYNRLLEIENQIGVENERLNHFPNNVDFD

SEQ ID NO: 842 - protein, 446 aa, Zea mays
MAVTITWVKARQIFDSRGNPTVEVDVGLSDGSYARGAVPSGASTGIYEALELRDGGSDYLGKGVLKAVSNVNNIIGPAIVGKDPTEQVEIDNFMVQQLDGTSNEWGWCKQKLGANAILAVSLAVCKAGAMVKKIPLYQHIANLAGNKTLVLPVPAFNVINGGSHAGNKLAMQEFMILPTGASSFKEAMKMGVEVYHNLKSIIKKKYGQDATNVGDEGGFAPNIQENKEGLELLKAAIEKAGYTGKVVIGMDVAASEFFGEKDKTYDLNFKEENNDGSNKISGDSLKDLYKSFVSEYPIESIEDPFDQDDWSTYAKLTDEIGRKVQIVGDDLLVTNPTRVAKAINEKTCNALLLKVNQIGSVTESIEAVRMSKRAGWGVMASHRSGETEDTFIADLSVGLSTGQIKTGAPCRSERLAKYNQLLRIEEELGDAAVYAGAKFRAPVEPY

SEQ ID NO: 843 - protein, 388 aa, Staphylococcus aureus
MTIGIDKINFYVPKYYVDMAKLAEARQVDPNKFLIGIGQTEMAVSPVNQDIVSMGANAAKDIITDEDKKKIGMVIVATESAVDAAKAAAVQIHNLLGIQPFARCFEMKEACYAATPAIQLAKDYLATRPNEKVLVIATDTARYGLNSGGEPTQGAGAVAMVIAHNPSILALNEDAVAYTEDVYDFWRPTGHKYPLVDGALSKDAYIRSFQQSWNEYAKRQGKSLADFASLCFHVPFTKMGKKALESIIDNADETTQERLRSGYEDAVDYNRYVGNIYTGSLYLSLISLLENRDLQAGETIGLFSYGSGSVVEFYSATLVVGYKDHLDQAAHKALLNNRTEVSVDAYETFFKRFDDVEFDEEQDAVHEDRHIFYLSNIENNVREYHRPE

SEQ ID NO: 844 - protein, 272 aa, Bacillus subtilis subsp. subtilis str. 168; identical to SEQ ID NO: 307

SEQ ID NO: 845 - protein, 521 aa, Solanum tuberosum
MAASIGALKSSPSSNNCINERRNDSTRAVSSRNLSFSSSHLAGDKLMPVSSLRSQGVRFNVRRSPMIVSPKAVSDSQNSQTCLDPDASRSVLGIILGGGAGTRLYPLTKKRAKPAVPLGANYRLIDIPVSNCLNSNISKIYVLTQFNSASLNRHLSRAYASNMGGYKNEGFVEVLAAQQSPENPDWFQGTADAVRQYLWLFEEHTVLEYLILAGDHLYRMDYEKFIQAHRETDADITVAALPMDEKRATAFGLMKIDEEGRIIEFAEKPQGEQLQAMKVDTTILGLDDKRAKEMPFIASMGIYVISKDVMLNLLRDKFPGANDFGSEVIPGATSLGMRVQAYLYDGYWEDIGTIEAFYNANLGITKKPVPDFSFYDRSAPIYTQPRYLPPSKMLDADVTDSVIGEGCVIKNCKIHHSVVGLRSCISEGAIIEDSLLMGADYYETDADRKLLAAKGSVPIGIGKNCHIKRAIIDKNARIGDNVKIINKDNVQEAARETDGYFIKSGIVTVIKDALIPSGIVI

SEQ ID NO: 846 - protein, 1134 aa, Selaginella martensii
MSTTKLTYSSGSSAKSKHSVRVAQTTADAKLHAVYEESGESGDSFDYSKSINATKSTGETIPAQAVTAYLQRMQRGGLVQPFGCMLAVEEGSFRVIAFSDNAGEMLDLMPQSVPSLGSGQQDVLTIGTDARTLFTAAASALEKAAGAVDLSMLNPIWVQSKTSAKPFYAIVHRIDVGLVMDLEPVKASDTRVGSAAGALQSHKLAAKAISRLQSLPGGDIGLLCDTVVEEVRDVTGYDLVMAYKFHEDEHGEVVAEIRRSDLEPYLGLHYPATDIPQASRFLFMKNRVRMICDCSAPPVKITQDKELRQPISLAGSTLRAPHGCHAQYMGNMGSVASLVMAMIINDNDEPSGGGGGGGQHKGRRLWGLVVCHHTSPRSVPFLRSACEFLMQVFGLQLNMEAAVAAHVREKHILRTQTLLCDMLLRDAPIGIVSQSPNIMDLVKCDGAALYYGKRFWLLGITPSEAQIKDIAEWLLEHHKDSTGLSTDSLADAGYPGAASLGDEVCGMAAAKITAKDFLFWFRSHTAKEVKWGGAKHDPDDKDDGRKMHPRSSFKAFLEVVKRRSLPWEDVEMDAIHSLQLILRGSFQDIDDSDTKTMIHARLNDLKLQGMDELSTVANEMVRLIETATAPILAVDSSGFINGWNAKVADVTGLPVTEAMGRSLAKELVLHESADMVERLLYLALQGDEEQNVELKLKTFGGQKDKEAVILVVNACASRDVSDNVVGVCFVGQDVTGQKVVMDKFTRIQGDYKAIVQNPNPLIPPIFGADEFGYCSEWNPAMEKLSGWRREEVLGKMLVGEIFGIQMMYCRLKGQDAVTKFMIVLNSAADGQDTEKFPFAFFDRQGKYVEALLTATKRADAEGSITGVFCFLHIASAELQQALTVQRATEKVALSKLKELAYIRQEIKNPLYGIMFTRTLMETTDLSEDQKQYVETGAVCEKQIRKILDDMDLESIEDGYLELDTTEFMMGTVMDAVISQGMITSKEKNLQLIRETPKEIKAMFLYGDQVRLQQVLADFLLNAIRFTPSSENWVGIKVATSRKRLGGVVHVMHLEFRITHPGVGLPEELVQEMFDRGRGMTQEGLGLSMCRKLVKLMNGEVEYIREAGKNYFLVSLELPLAQRDDAGSVKFQASS

SEQ ID NO: 847 - protein, 236 aa, Glycine max
  unsure (1)..(236): unsure at all Xaa locations
SSRFGSSFAPNIQENKEGLELLKTAIAKAGYTGEVVIGMDVAAFXNSTRRDKTYDLNFKEDNNDGSQKISGDALKDLYKSFVTEDPXIVSIEDPFDQDDWEHYAKLTAEVGTNVQIVGDDLLVTNPKRVQKAIDTKACNALLLKVNQIGSVTESIEAVRMSKKAGWGVMASHKSGETEDTFIADLSVGLATGQIKTGAPCRFERLAKYNQLLRIEEELGAEAVYAGANFGTPVEPY

SEQ ID NO: 848 - protein, 502 aa, Xanthomonas campestris pv. campestris str. ATCC 33913
MSEAKNFHLPDLGEGLPDATIVEWFVKEGDPVRLDDPLVSMETAKAVVEVPSPFSGTVVKLAGAAGDVITTGAVLAQFALDASQPQRADGQDTGHSHGPAPTHAPTPSTGDSAAGHTTRVVASDNGGEIADADAGDGSSDRDDAGTVVGAMQSSNAVQSEQAITVGGVRAMPVVRALARKLRVDLAQVRATGPDGTVTLADVKQAAAAGTAQPSPGAQGAPTSPARGRGGPIDDGGRAAGSAADGRDRPATAPLLPPAGEGARRADEGNARSTLSASGKPMRTQSPGISAKGQPEQLKGVRRNMARVMADAHSKVVPTTLNDDADLHAWQPGNDVTVRLVRGIVRACEAVPALNAWFDGEALSRTLHPQVDIGIAVDTEEGLLVPALRNADMLDAHGIREGVNRLRQQVESRSIAASELSGYTISLSNFGMFAGRYATPVVVPPCVAIVAAGRARYQLTPVMGGVETHKVMPLSLTFDHRAATGGEAARFLRALLDDLALAN

SEQ ID NO: 849 - protein, 388 aa, Staphylococcus haemolyticus
MSIGIDKINFYVPKYYVDMAKLAEARQVDPNKFLIGIGQTQMAVSPVSQDIVSMGANAAKDIITDDDKKHIGMVIVATESAIDNAKAAAVQIHNLLGVQPFARCFEMKEACYAATPAIQLAKDYIEKRPNEKVLVIASDTARYGIQSGGEPTQGAGAVAMLISNNPSILELNDDAVAYTEDVYDFWRPTGHKYPLVAGALSKDAYIKSFQESWNEYARREDKTLSDFESLCFHVPFTKMGKKALDSIINDADETTQERLTSGYEDAVYYNRYVGNIYTGSLYLSLISLLENRSLKGGQTIGLFSYGSGSVGEFFSATLVEGYEKQLDIEGHKALLNERQEVSVEDYESFFKRFDDLEFDHATEQTDDDKSIYYLENIQDDIRQYHIPK

SEQ ID NO: 850 - protein, 380 aa, Lactococcus lactis subsp. cremoris
MTSLKTKVIHGGISTDRTTGAVSVPIYQTSTYKQNGLGQPKEYEYSRSGNPTRHALEELIADLEGGVQGFAFSSGLAGIHAVLSLFSAGDHIILADDVYGGTFRLVDKVLTKTGIIYDLVDLSNLEDLKAAFKAETKAVYFETPSNPLLKVLDIKEISSIAKAHNALTLVDNTFATPYLQQPIALGADIVLHSATKYLGGHSDVVAGLVTTNSNELAIEIGFLQNSIGAVLGPQDSWLVQRGIKTLAPRMEAHSANAQKIAEFLEASQAVSKVYYPGLVNHEGHEIAKKQMTAFGGMISFELTDENAVKNFVENLRYFTLAESLGGVESLIEVPAVMTHASIPKELREEIGIKDGLIRLSVGVEALEDLLTDLKEALEKE

SEQ ID NO: 851 - protein, 477 aa, Synechocystis sp. WH 8501
MSESGFDYDLIIIGAGVGGHGAALHAVKCGLKTAIIEAKDMGGTCVNRGCIPSKALLAASGKVRELQDTKHLHNLGIEIDGVDFQREAIADHATNLVNKIRGDLTNSLKRLKVDTIHGWGKIVDTQKVSVLGDDGEKIITAKDIMLCPGSVPFVPRGIEVDHKTVFTSDEAVKLEVLPQWIAIIGSGYIGLEFSDIYTALGCEVTMIEALDTLMPGFDPEISKLAERSLIKARDIETYSGVFATKITPGAPVTIELTDAQSKEVIDVLEVDACLVATGRVPATKNLGLENIGVETNRGFIPVNDKMEVLRDGEPVPHLWAVGDANGKMMLAHAASGQGEIAVENMCGREKTIDYRSIPAAAFTHPEISYVGLTEPAARELGEKEGFEVSSVKTYFKGNSKALAEGETDGIAKVVYRKDNGELLGVHIMGIHASDLIQEAANAIAQRQSVKNLSFNIHTHPTLSEVLDEAFKRAEATV

SEQ ID NO: 852 - protein, 397 aa, GIBBERELLA ZEAE PH-1
MTSTPKTSFMRAVQWEGELRHMSVNIIPRPKLIDPEDAVVRITTSAICGSDLHIYHGLFGTDEKFGVGHEAVGIVEEVGPAVDFLKPGDRVLVTGFSEDGNLLPKAALVPTDLDMVGVGFGSSFHSEGGLQAEYVRMPWADSSLAKIPHGLDDKEWLPLTDIFPTGWTALTRSGFQPGDTVAVFGAGGVGLMCAYSAIIRGASLVYVIDHIPARLALAASIGAQPINFTRGGKASEQILALRPAGVNRAIDCVGQFCLNENLKPQPDFILREAVKITTNGGGIGIAGVYQAGGPEGYKPEINFAIPELWFKSLQVGSGLVDIEGNIRALVDLVKNGRARPGFVFSNEYSLEEAPLAYRRFEQHQETKVMLKGSRKLEDDSSLDMIIGRNGVSDANGA

SEQ ID NO: 853 - protein, 358 aa, Brassica napus
MEFRGDANKRIAMISAHLQPSFTPQMEAKNSVMGRENCRAKGGNPGFKVAILGAAGGIGQSLSLLMKMNPLVSLLHLYDVVNAPGVTADVSHMDTGAVVRGFLGAKQLEDALTGMDLVIIPAGVPRKPGMTRDDLFKINAGIVKTLCEGVAKCCPNAIVNLISNPVNSTVAIAAEVFKKAGTYDPKKLLGVTTLDVARANTFVAEVLGLDPREVDVPVVGGHAGVTILPLLSQVKPPSSFTPSEIEYLTNRIQNGGTEVVEAKAGAGSATLSMAYAAAKFADACLRGLRGDANVIECSFVASQVTELAFFATKVRLGRTGAEEVFQLGPLNEYERVGLEKAKEELAGSIQKGVDFIRK

SEQ ID NO: 854 - protein, 426 aa, Thermosynechococcus elongatus BP-1 [sequence omitted]

SEQ ID NO: 855 - protein, 207 aa, Zea mays
WRSSHPSVVLCADIVMHSATKFIAGHSDLMAGILAVKGESLAKEVGFLQNAEGSGLAPFDCWLCLRGIKTMALRVEKQQANAQKIAEFLASHPRVKQVNYAGLPDHPGRALHYSQAKGAGSVLSFLTGSLALSKHVVETTKYFSVTVSFGSVKSLISLPCFMSHASIPASVREERGLTDDLVRISVGIEDVEDLIADLDRALRTGPV

SEQ ID NO: 856 - protein, 461 aa, Thermus thermophilus HB27
MKTYDLIVIGTGPGGYHAAIRAAQLGLKVLAVEASEVGGVCLNVGCIPTKALLHAAETLHHLKVAEGFGLKAKPELDLRKLGGWRDQVVKKLTGGVGTLLKGNGVELLRGFARLVGPKEVEVGGERYGAKSLILATGSEPLELKGFPFGEDVWDSTRALKVEEGLPKRLLVIGGGAVGLELGQVYRRLGAEVTLIEYMPEILPQGDPETAALLRRALEKEGIRVRTKTKAVGYEKKKDGLHVRLEPAEGGEGEEVVVDKVLVAVGRKPRTEGLGLEKAGVKVDERGFIRVNARMETSVPGVYAIGDAARPPLLAHKAMREGLIAAENAAGKDSAFDYQVPSVVYTSPEWAGVGLTEEEAKRAGYRVKVGKFPLAASGRALTLGGAEGMVKVVGDEETDLLLGVFIVGPQAGELIAEAALALEMGATLTDLALTIHPHPTLSESLMEAAEAFHKQAIHILNR

SEQ ID NO: 857 - protein, 216 aa, Saccharomyces cerevisiae
MKVELQQLKKQELEKIRKERRLRRGSKKRGKRSKGRSGSKNASSKGRRDKKNKLKTVVTYDMKRIITERINDLPTSKLERAIDIIKKSMPNISEDDEVELDLDTLDNHTILTLYNTFFRQYESSSGASNGLDGTSGVTRDASSLSPTSAGSRKRRSKALSQEEQSRQIEKIKNKLAILDSASPLSQNGSPGQIQSAAHNGFSSSSDDDVSSESEEE

SEQ ID NO: 858 - protein, 451 aa, Thermus thermophilus HB27
MPKEILMPELAESVVEGEILKWLVEEGDYLKKDQPFVEVMTDKVTVELPSPYEGVLLKKLAKEGEVVKVHAPIALIAEPGEAVEGVKEPPPVQAVEERSIVEPGLPAKEEKEDLSLFKPDPTQVAVKNPFLSGEKPQEGARPGRVLAVPAARKLARELGIPIEEVPGSGPLGRVRVEDVRAYAERRKAPPERPEEGPQVLPAGFPPPPKYAPPKGYEHLEERVPLRGIRRTIAQGLWQSHLYTVRTLNVDEADLTELVRLRERLKPQAEAQGVKLTYLPFIVKAVVRALKKFPMLNTSLDEERQEIVYKRYYHIGLAVATERGLIVPVVRDADRKSVLELAQEIAELSQKAREGRLAPEEVTGSTFTITNIGSVGATLSFPIIHLPDAAILGVHSIRKRPWVMPDGSIRPRDIMFLSLSFDHRLVDGAEAAMFTREVIRLLENPDLLLLEM

SEQ ID NO: 859 - protein, 256 aa, Triticum aestivum
PKPKVAPTPAAAPVAAASPVRAVPQAAVLPPVPGATVVPFTAMQAAVSKNMVESLSVPAFRVGYPILTDKLDALYEKVKPKGVTMTVLLAKAAAMALAQHPVVNASCRDGSSFTYNSSINIAVAVSIDGGLITPVLEQADKLDIYLLSQKWKELVKKARAKQLQPNEYNSGTFTLSNLGMFGVDRFDAILPPGQGAIMAVGASKPTVAADKDGFFSVKSKMMVNVTADHRIVYGADLAAFLQTFAKIIEDPESLTL

SEQ ID NO: 860 - protein, 402 aa, Pseudomonas aeruginosa UCBPP-PA14
MDNLNSAVQVLIHGSNTLFILLGAVMVLAMHAGFAFLEVGTVRLKNQVNALSKILSDFAISALAYFFVGYWIAYGVTFFHPAAALTVDSGYALVKFFFLLTFAAAIPAIISGGIAERARFGPQLCATALIVAFVYPFFEGLVWNGNFGLQEWLKLEFGAPFHDFAGSVVVHALGGWLALAAVLLLGSRNGRYRDGKLVAMAPSSIPFLALGSWILIIGWFGFNVMSAQTLAGVSGLVAVNSLLAMVGGTMASLLIGRNDPGFLHNGPLAGLVAVCAGSDLMHPIGALATGLVAGALFVWAFTATQVRWKIDDVLGVWPLHGLCGVWGGIACGIFGQQALGGLGGVSLASQALGSLLGVTVAFAGGLLVYGLMKALLGIRLSQEEEYYGADLSIHKIGAISHE

SEQ ID NO: 861 - protein, 358 aa, Nostoc punctiforme PCC 73102
MKALILSGGKGTRLRPLTYSGAKQLVPVANKPVLWYGIEEMVAAGITDIGIIISPETGAEVQGKTGNGEYFGANITYIVQEQPLGLAHAVQIARPFLENSPFVMYLGDNLIQLGELRYFLQQFSQQQPDALILLRSVANPSAFGVAEVDDTGRVLQLIEKPKVPPSNLALVGVYFFSHLIFDAIANIQPSARGELEITDAIQYLINQEKQVLAYNLKGWWLDTGKKDDLLEANRLILDTYLIASVLGEIDAQSQIIGRVQIGAKSQVINCTIRGPVVIGSNCHLENCFIGPYSSIANNATLIDTDLEHSVILEGAKIAGIHQRIIDSVIGQRAQLTLAPRRPKALRFLIGDDCQIELT

SEQ ID NO: 862 - protein, 147 aa, Magnaporthe grisea
MALKRINKELTDLGRDPPSSCSAGPVGEDLFHWQATIMGPSDSPYAGGVFFLAIHFPTDYPFKPPKVNFTTRIYHPNINSNGSICLDILRDQWSPALTISKVLLSICSMLTDPNPDDPLVPEIAHVYRTARAQYEATAREWTPKYAI

SEQ ID NO: 863 - protein, 388 aa, Staphylococcus epidermidis
MNIGIDKISFYVPKYYVDMAKLAEARQVDPNKFLIGIGQTEMTVSPVNQDIVSMGANAAKDIITEEDKKNIGMVIVATESAIDNAKAAAVQIHHLLGIQPFARCFEMKEACYAATPAIQLAKDYLAQRPNEKVLVIASDTARYGIHSGGEPTQGAGAVAMMISHDPSILKLNDDAVAYTEDVYDFWRPTGHQYPLVAGALSKDAYIKSFQESWNEYARRHNKTLADFASLCFHVPFTKMGQKALDSIINHADETTQDRLNSSYQDAVDYNRYVGNIYTGSLYLSLISLLETRDLKGGQTIGLFSYGSGSVGEFFSGTLVDGFKEQLDVERHKSLLNNRIEVSVDEYEHFFKRFDQLELNHELEKSNADRDIFYLKSIDNNIREYHIAE

SEQ ID NO: 864 - protein, 159 aa, Arabidopsis thaliana
MEKTDEERKKAQMLDARARNISHNVRCTECGSQSIEDSQADIAILLRQLIRNEIGAGKTDKEIYSKLEDEFGETVLYAPKFDLQTAALWLTPVIIAGGTAAGIVYQKHRLRKNVDIMALNLIRGVPLTPKERVTILDVLIPPSPPPQGVVSRLRRWLNR

SEQ ID NO: 865 - protein, 397 aa, Rickettsia rickettsii
MLSKLNKPALFALIFYPIFIISLVVKYSFDYGIGLTEVIFIIASYYINNITVGIGLHRLWSHNAYKINKYAEFVLIMLSAGTLQGPALSWASNHYKHHRYTDQDQDPHTPLKFDNKFLGFMWSHIGWMLVGSGSYKSIDRITWAKHGKNNLLKWQLKYYWQIAAFMNIVVPLFIGYLVGGTMQSAYAGFLFMGLGRFLQQQATFCVNSLCHFAGSKKYYKGTAGDIWWMALFLLGENWHNYHHAFPSDYRNGAKWYHLDVHKWIIFLMSKIGLASELERTTKVRIQAKMQETLSYLSEKQKQKLTLMQTKIDHLLENLCLKIKELEESSITIKEQFKKSFVEIQESLKNLAEQVSAAKQITEKSSEKLLKIVNKKIIDAEQSIYKLYNQLNTLKVSN

SEQ ID NO: 866 - protein, 366 aa, Corynebacterium glutamicum ATCC 13032
MATPVPLVFNAPKRGMPPTHFADLNDEARIEALKELGLPKFRLNQIARHYYGRLEADPLTMTDLPEGARQEVKDALFPTLMSPLRVVETDDDTTQKTLWKLHDGTLLESVLMRYSDRSTLCISSQAGCGMACPFCATGQGGLDRNLSIGEIVDQVRNAAATMQSEGGRLSNIVFMGMGEPLANYKRVVSAVRQITQPSPAGFGISQRSVTVSTVGLAPAIRKLADEEMSVTLAVSLHTPDDELRDTLVPVNNRWPVAEVLDAARYYADKSGRRVSIEYALIRDVNDQDWRADMLGEKLHKALGSRVHVNLIPLNPTPGSKWDAAPKARQDEFVRRVIAKGVPCTVRDTKGQEIAAACGQLAAEESA

SEQ ID NO: 867 - protein, 262 aa, Oryza sativa
MPITVWPKVRIRSPRAPIPLVLISASEPTTAPPPRIRPQISSRPRNPSLLRPPSPATGSTWVFDCPLMDDLAAAAGFDAAPAGGFYWTTPAPPQAALQPPPPQQQPVAPATAAPNAWFLELGAVLEPGKTPKMDKSSILNDAIRVMAELRSEAQKLKESNESLQEKIKELKAEKNELRDEKQKLKAEKESLEQQIKFLNARPSFVPHPPVIPASAFTAPQGQAAGQKLMMPVIGYPGFPMWQFMPPSDVDTTDDTKSCPPVA

SEQ ID NO: 868 - protein, 1034 aa, Sinorhizobium meliloti 1021
  unsure (1)..(1034): unsure at all Xaa locations
MEAVPMNVDLSRRSFLKLAGAGAAATSLGAMGFGEAEAAVVAHVRPHKLTTTTETRNTCPYCSVACGVIIYSKGDLRKGEAADIIHIEGDADHPTNRGTLCPKGAALKDFVKSPTRLQYPMHRKPGSDKFERISWEDAFDRIARLMKDDRDANFIAANAAGVPVNRWTTVGMLAASATTNETAWATFKFAKALGIVGFDNQARVXHGPTVSSLGPTFGRGAMTNSWTDIKNTDLVVVMGGNAAEAHPCGFKWVTEAKATRGAKLIVVDPRYTRTASVSDYYAPIRQGTDIAFLNGVMKYCIDNDKVQWDYMKAFTNASYLVKDGFGYQDGLFTGYDAEKRDYDKSTWDYVLGDDGFVVTDPALQHPRCVWNLLKAHLAPYTPEMVERICGTPKDKFLKVAEMISECSSPTKTMTSMYALGWTQHSSGSQNIRAMAMLQLILGNIGVRGGGMNALRGHSNIQGLTDLGLMSHLLTGYLTMPTEKDVDFTTYMSTRQFKPLRPGQTSYWQNYRKFMVSFQKAMWGDAARIDNDWAFNYLSKLDVPAYDVLRVFELMYAGKVNGYICQGFNPLLAFPNRDKNTKALSNLKWLVTMDPLDTETARFWENHGDFNPVDTASIQTEVFQLPTTCFAEEEGSLTNSGRWLQWHWAGGTPPGEAKHDTYIVAQIFLRMKEMYRNEGGAFPDPILNLSWDYADPNEPTPEELAKEINGRALTDLMDPANPMKVQVAAGKQILNFSQLRDDGSTMCGCWIYSGNFNEQGNNMARRDNHDPDDTGAYLGWSFAWPLNRRTLYNRASADLQGKPWDPSRKLLEWDGTKWAGYDVPDIAPTAKPDEIGPFIMNQEGTARLFSRGLMRDGPFPAHMEPFESPVANVFNPKMRGNPVSRVFQTDVAQMGLSDEFPYAATSYRLTEHFHYWTKHNRVNSALQPEFFVEISEELAEEKNIENGGWVRVWSKRGSVKAKAVVTKRIRPLMCDGKPVHVVGIPLHWGFTGSAKKGLGPNSLAPFVGDANIETPEYKAFLVNIEPSTAPEEATV

SEQ ID NO: 869 - protein, 215 aa, Moorella thermoacetica ATCC 39073
MRIFIDTANVEEIKAANDLGIIAGVTTNPSLIAREGRNFREIVEEIAAIVDGPISAEVVSTTAPEMVAEGVELAAIHPNIVIKIPMIAEGLKAVKELSARGIKTNVTLVFSANQALLAALAGATYVSPFVGRLDDISHDGLQVIADIVPIFAQYGFKTQIIAASIRHPLHVLEAARLGADIATVPFKVLMQMLKHPLTDTGLARFLADWEKVKNK

SEQ ID NO: 870 - protein, 305 aa, Zea mays
  unsure (1)..(305): unsure at all Xaa locations
MMRETYMDVLPPVDHIAASRSGGWFPGAARLWTAAENKQFERALAGLDLCRPDWEKVARAIPGRTVREVVSHFKSLQVDVQQIESGLVPMPVXYGAGAGSFTLQWDGCYGPADSRHNGYRFGSGGCGRRHHGRTPEQDRKKGVPWTEEEHRLFLLGLKKYGKGDWRNISRNYVQTRTPTQVASHAQKYFIRLNSGGKDKRRSSIHDITTVNLTDDERAPSPSRSSLITTTSQPNAPAPAAAVIGGPFSSAAAARGQAAXHGAGNLPPNRTSVVPAVYRMDDSQDHGLQCGPLRHQLVASHHSVLF

SEQ ID NO: 871 - protein, 536 aa, Gloeobacter violaceus PCC 7421
MAFMGTSSAVHPAILVILDGWGYREQTDGNAVAAAKTPIFDALKASYPFTLIHTSGKAVGLPRGQMGNSEVGHLNLGAGRMVPQELVRISDAVEEGTLLSNPELLRLCRTVRERGGKLHGVGLVSDGGVHSHIEHLFGLLDLAKREGFETLFIHGMSDGRDTPPTSGVAYFEKLEARIAETGFGTIATLGGRYFGMDRDRRWDRTEAMYRVMTETGPGTGKRASETLRESHAAGKTDEFVLPVRLAAGAVEPGDGVIYFNFRPDRARQLTRAFVQADFDGFVRPYLDPLAFLTFTQYDATLPVAVAFAPQSLDNLLGQVIAHHGLRQFRIAETEKYAHVTYFFNGGIETPLPGEERSMIQSPLVPTYDLKPEMAAREVTDHAVAAIETRQYSLIVINYANPDMVGHTGNFDATVKAVETVDACIGRLVEACVRAGGTMLLTADHGNAELMWDEQGNPWTAHTTNPVPFILIESEGLKIPGWGTDVQLRAGGSLGDIAPTILEILGLPQPAEMTGRSLLGESEIEIRTPRSPLRVGL

SEQ ID NO: 872 - protein, 348 aa, Thermus thermophilus HB27
MKGLILAAGRGTRLRPLTHTRPKPAIRVAGRPIIHYAVENLLEAGVREIGVVVSPETERDLKVALEGYPVRYVLQEEPQGLAHAVDVARDFLGESPFVLYLGDNLFQKGIRRFLEAFKPGVSAVIALVRVEDPRQFGVAVLEGNRVVRLLEKPKDPPSDLAVAGVYVFSPEVLEVVRGLKPSARGEYEITDAIQGLIDRGKTVVGVEVEGWWKDTGRHQDLLDANRLLLEELTPKVEGDVVESQLTGRVVVEKGAKVVRSTVIGPAHIGAGAVVEEAFVGPFTSVGPRARVVRSEVEYSLLEEEAVVEEVRLRLQECILGVRAEVKSRDGLPRAHRLILGDLSQVELA

SEQ ID NO: 873 - protein, 162 aa, Olea europaea
GDASGTMGGACGYGNLYSQGYGTNTAALSTALFNNGLTCGACYELTCNSDPKWCLSGTIKVTATNFCPPNPSLPNDNGGWCNPPQQHFDLAQPAFLQIAQYRAGIVPISFRRVPCVKKGGIRFTINGHSYFNLVLITNVGGAGDVHSVSIKGSRAGWQQMSR

SEQ ID NO: 874 - protein, 181 aa, Thermus thermophilus HB27
MKGMFTPGNGPVQISAEAIKKRVEELGREIARDYQGKTPHLICVLNGAFIFMADLVRAIPLPLTMDFIAISSYGNAFKSSGEVELLKDLRLPIHGRDVIVVEDIVDTGLTLSYLLDYLEARKPASVRVAALLSKPSRRQVEVPIHYLGFEIEDAYVYGYGLDRAQFDRNLPFITSIRPEEE

SEQ ID NO: 875 - protein, 427 aa, Oceanobacillus iheyensis HTE831
MSVEKINMPQLGESVTEGTINTWLVAVGDKVNKYDPIAEVMTDKVNAEVPSSFSGVIKELIAEEGETVEVGQLMCYIDTEESSSASKPKSSEDSTKTNDNIENDTNSKEDVNKSMKKRYSPAVLRLAQENDIDLTMIDGSGRAGRITRKDVEKFMKEGTKNDPKEEQKEPSHQTIPKVNQSGTPSVRSNSIASEKGDKEIPVKGVRKAIADNMVRSKQEIPHAWMQVEVDVTNMMKYRNSIKDKFKSDEGYSLTPFAFFIKAVSQALREYPELNSAWAGDKIIQKKDIHLSIAVAKENELFVPVIRHADEKTIKAVARDIYELANKARNGKLSSEDMQGGTFTVNNTGTFGSVSSMGVINHPQAAILQVESIVRKPVIIDDMFAARDMANLSLSLDHRILDGLVCGRFLARVKEILEGMNVDTVSLY

SEQ ID NO: 876 - protein, 363 aa, Geobacter sulfurreducens PCA
MARKVGILTGGGDCPGLNAVIRGVVKSSIIRRGWEVVGIRDGFDGLLYNNRIVPLGLNEVRGILPRGGTILGTSNRGNPFSYPVEADGKTVLTDVSDEVVANIKKQGIDALVAVGGDGSLKIALELMNKGIPVVGVPKTIDNDLMETDVTFGYNTALETATDALDKLHSTAESHHRVMIMEVMGRYAGWIALESGISGGADVILIPEIPYDISAVCRAVDERRRRGSSFSIIVVAEGAFPRGGNRVVQKRADETNTIERLGGIGQYVARQLGDCLDMDVRVMVLGHLQRGGSPSTFDRCLGSRFGVAAIDLIEQEQYGRMVCLRGRDIKSVSIERAVRKLKLVNPGGQMVTAAEELGIVVGRR

SEQ ID NO: 877 - protein, 383 aa, Enterococcus faecalis
MTIGIDKISFFVPPYYIDMTALAEARNVDPGKFHIGIGQDQMAVNPISQDIVTFAANAAEAILTKEDKEAIDMVIVGTESSIDESKAAAVVLHRLMGIQPFARSFEIKEACYGATAGLQLAKNHVALHPDKKVLVVAADIAKYGLNSGGEPTQGAGAVAMLVASEPRILALKEDNVMLTQDIYDFWRPTGHPYPMVDGPLSNETYIQSFAQVWDEHKKRTGLDFADYDALAFHIPYTKMGKKALLAKISDQTEAEQERILARYEESIIYSRRVGNLYTGSLYLGLISLLENATTLTAGNQIGLFSYGSGAVAEFFTGELVAGYQNHLQKETHLALLDNRTELSIAEYEAMFAETLDTDIDQTLEDELKYSISAINNTVRSYRN

SEQ ID NO: 878 - protein, 490 aa, Bacillus subtilis subsp. subtilis str. 168; identical to SEQ ID NO: 312

SEQ ID NO: 879 - protein, 157 aa, Griffithsia japonica
MSATKLSDLQGLKDIEGGAIDPSRFAGKVVFAMNVASACGYTKPGYELLKRLTDKFAPADFVAVAIPCNSFLWQESGSAEDVKTFALARADKLLVTEKAAVNGNHPHPIVALAKQAFPGRVMWNFDGRFVFDRNGVPVARFGNSAKPEEIEAAIANA

SEQ ID NO: 880 - protein, 539 aa, Neurospora crassa
MEHDHSASDIEKEAVTVARPQGDVTRVEAPVTLKAYMMCVFAAFGGIFFGYDSGYISGVMGMKYFIETINGPGATFLPSKEKSLITSILSAGTFFGALMGGDLADWVGRRPTIIFGCLVFIVGVVLQTASQSLGLIVAGRLVAGFGVGFVSAIIILYMSEIAPRKVRGAMVSGYQFCICLGLLLASCVDYGTQNRTDSGSYRIPIGLQMAWALILATGIFFLPESPRFFVKKGKLDKAAGVLSRLRDQPLDSDYVRDELAEIVANHEFEMTVVPYGNYFQQWANCFRGSIWQGGSYLRRTILGTSMQMMQQWTGINFIFYFGTTFFQQLGTIDNPFLMSLVTTLVNVCSTPISFYTMEKLGRRTLLIWGALGMLICEFIVAIVGTCRPDDTMAIKAMLAFICIYIFFFATTWGPASWVVIGEVFPLPIRAKGVALSTASNWLWNCIIAVITPYMVDEDKGNLGPKVFYIWGGLCTCCFIYAYLLVPETKGLTLEQVDQMLSESTPRTSTKWKPHTTYAAEMGMTEKTVAGHAENRSDSE

SEQ ID NO: 881 - protein, 98 aa, Allium cepa
RITGCPNGCARPYMAELGFVGDGPNSYQIWLGGTPNQSTLAKCFMNKVKIQKFESVLEPLFNDWKVNRKTEESFGEFTNRIGFEKLLEVVEQWDSSKN

SEQ ID NO: 882 - protein, 686 aa, Saccharomyces cerevisiae
MTDITPVQNDVDVNGNNVNDDVSSNLKRPIDQGDPSNGLAEEENPANNQLHLKKARLDGDALTSSPAGLAENGIEGATLAANGENGYNATGSGAEDEQQGLKKEEGGQGTKQEDLDENSKQELPMEVPKEPAPAPPPEPDMNNLPQNPIPKHQQKHALLAIKAVKRLKDARPFLQPVDPVKLDIPFYFNYIKRPMDLSTIERKLNVGAYEVPEQITEDFNLMVNNSIKFNGPNAGISQMARNIQASFEKHMLNMPAKDAPPVIAKGRRSSAQEDAPIVIRRAQTHNGRPKRTIHPPKSKDIYPYESKKPKSKRLQQAMKFCQSVLKELMAKKHASYNYPFLEPVDPVSMNLPTYFDYVKEPMDLGTIAKKLNDWQYQTMEDFERDVRLVFKNCYTFNPDGTIVNMMGHRLEEVFNSKWADRPNLDDYDSDEDSRTQGDYDDYESEYSESDIDETIITNPAIQYLEEQLARMKVELQQLKKQELEKIRKERRLARGSKKRGKRSKGRSGSKNASSKGRRDKKNKLKTVVTYDMKRIITERINDLPTSKLERAIDIIKKSMPNISEDDEVELDLDTLDNHTILTLYNTFFRQYESSSGASNGLDGTSGVTRDASSLSPTSAGSRKRRSKALSQEEQSRQIEKIKNKLAILDSASPLSQNGSPGQIQSAAHNGFSSSSDDDVSSESEEE

SEQ ID NO: 883 - protein, 633 aa, Bacillus cereus ATCC 14579
MCGFVGCLCENPREFSETEKHQFENMNTMIFHRGPDDEGYFRDEHVQFGFRRLSIIDLEAGHQPLTYENDRYVIIFNGEIYNYVELREMLLEKGATFATQSDTEVIIALYAHMKEKCVDYLRGMFAFMIWDREEKKLFGARDHFGIKPLYIAQQGDTTFFASEKKSIMHVMEDKGVNPTSLQHYFTYQYGPEPETLTIDVNKIEPGHYFVKEIGKEMEIHRYWKPYFNASSATKEEHIQAIRDVLYDSVKVHMRSDVPVGSFLSGGIDSSIIASIAREMNPNLLTFSVGFEQRGYSEVDVAKETAEKLGVKNHNVFISAKEFMDEFPKNHWHMDDPLADPAAVPLYFVAKEARKHVTVVLSGEGADELFGGYNIYREPNSLKMFSYIPSPGKSVLKALSGALKEGFKGKSFLERGCTPIEERYYGNAKIFREEEKAELMKYYNESVNYMDITKPLYNEIKDYDDVSKMQYIDMFTWLRGDILLKADKMTMANSLELRVPFLDKEVFDVASKIPTEFKIANGTTKAILREAARGIVPDHVLDRKKLGFPVPIRHWLKDEMHDWAINIINESKTEHLIDKQYVLNLLEAHCADKGDYSRKIWTVLAFMVWHQIYVEHKYDTNKFHEETKRAYSLV

SEQ ID NO: 884 - protein, 508 aa, Bifidobacterium longum NCC2705
MKNKVQLITYADRLGDGTLSSMTDILRTRFDGVYDGVHILPFFTPFDGADAGFDPIDHTKVDERLGSWDDVAELSKTHNIMVDAIVNHMSWESKQFQDVLEKGEESEYYPMFLTMSSVFPNGATEEDLAGIYRPRPGLPFTHYKFAGKTRLVWVSFTPQQVDIDTDSDEGWEYLMSIFDQMAASHVSYIRLDAVGYGAKEASTSCFMTPKTFKLISRLREEGVKRGLEILIEVHSYYKKQVEIASKVDRVYDFALPPLLLHSLFTGHVEPVAHWTEIRPNNAVTVLDTHDGIGVIDIGSDQLDRSLKGLVPDEDVDNLVNTIHANTHGESQAATGAAASNLDLYQVNSTYYSALGCNDQHYLAARAVQFFLPGVPQVYYVGALAGRNDMELLRRTNNGRDINRHYYSTAEIDENLERPVVKALNALAKFRNELSAFDGEFSYEVDGDTSITFRWTAADGASTAALTFEPGRGLGTDNATPVASLAWSDAAGDHETHDLLANPPIADID

SEQ ID NO: 885 - protein, 180 aa, Bacteroides thetaiotaomicron VPI-5482
MKSFILMVITMVCAISLEAQNKSFYDFNVTTIDGKEFPLSSLKGKKVLVVNVASKCGLTPQYAKLQELYDKYKDKNFVIIGFPANNFMGQEPGSNEEIAQFCSLKYDVTFPMMAKISVKGKNMSPLYQWLTEKKLNGKEDAPVQWNFQKFMIDENGNWVGFVAPKESPLSEKIVTWIEQE

SEQ ID NO: 886 - protein, 397 aa, Aquifex aeolicus VF5
MLRKKTLRDVDVKGKRVLVRVDYNVPLDEQGNIVDDTRIRASLPTVEYLLDANAKVILMSHLGRPKNRDPKYSLAPVAKRLSRYINKEVKLAPDCVGEEVKRIVNSMKEGDVVLLENLRFHKEETECDENFARELASLGEVYVADAFGTCHRKHASVYLVPKFLKPAVMGFLLEKEITYFEKAMVAPQRPVVAILGGAKVSSKLEVIKNLIRRVDKLFIGGAMAFTFLKAMGYKVGNSLVEDDLQDVARDLIDVAKKLEIKLYLPVDFVIGQEVSENTPTKVVPWQEIPDGWMGLDIGPVSVELVKEIISDAQTIVWNGPMGVFEIDKFKHGTIEVAKLLAQSSALTIAGGGDTDHAIHKAGVYHAFDFVSTGGGAFLELLAGKELPCLVNLDDKEA

SEQ ID NO: 887 - protein, 217 aa, Aquifex aeolicus VF5
MKFFLDTANVEEIKKAMEWGILDGVTTNPTLISKTGRPFKEVVKEILELVDGPVSLETVSLDAEGMIREGRMLAELGENVVVKIPMTPEGLKAVIALESEGIPTNVTLVFSPTQALLAAKAGASYVSPFVGRLDDISGEGMKLIEEIKTIFSNYEFDTEIIVASVRHPMHVLESALIGADICTMPFKVMEQLFKHPLTDIGLERFLKDWEKVPEKPF

SEQ ID NO: 888 - protein, 278 aa, Candida albicans SC5314
MNHDPYSWGRPSNDTYGPYNYKIAHANNNQVEQTTHNFPKMNTQQPIITGTSVIASKFKNGVIMAADHVGSYGSLLRFNNIERLIKVGKETVVGISGDISDLQYIVRLLDELEIDEEVYDNDGGEYLRAPNVHEYLSRVLYNRRSKMNPLWNAIIVGGFNKDRTPFLKYVDLLGVTYHASTMATGFGSHLAIPLLRNLIPEDKDYVKVDEQQVSKAIEDSMRVLFYRDARSGENYSVVIIKIDENTGELSFQFIKDAKVQNQSWKFAGDIRGYGSSQQ

SEQ ID NO: 889 - protein, 403 aa, Aquifex aeolicus VF5
MNIQSVRGFHDILGKDAKKFRKISDTARKILKLYNFEEIILPVVEYAELFQRSVGETTDIVQKEMFVFEDRKGRKLALRPEGTAGTVRAFIQHKLYALRPYVKLFYEGPMFRYERPQAGRYRQFHQIGAEVFGVAEPHADAEIIKIVYDILQALGIKGVVVEINSLGCKKDREAYREALLNYLTGVKEELCSDCISRMDRNPLRVLDCKVETCKVAVREAPKMIDFLCDECREHYEKLKNYLKALDIPFRENYNLVRGLDYYTRTVFEAVSDELGLTLIAGGRYDYLVEELGGPPTPALGFALGVERLMLLLPDEEEKEEVYFVIPFGDVHEYALRVADILRKKGKVVEYSYRKGGLKKQLEFADKLGVKYAVIIGEDEVKNQEVTIKDMETGEQRRVKLSEL

SEQ ID NO: 890 - protein, 554 aa, GIBBERELLA ZEAE PH-1
MSNSSSRDEPYTMEPSTKKTIWQCIRENPKIIFIAFFASLGGFEYGYQQGVLGQSLVMTRFTQNFPSVVESSSATGWLTSILQLGGILGSLSAGVSSEIISRKYTMFIACCWVVLGSYLYVGATAGNPSLLYAGRFFTGLGVGLFSGVGPLYNAELSAPEMRGFLVSFYQLATILGIMLSFWVGYGCNYIGGTGDGQSDLAWRLPSIIQGIPAAILAVGIWFMPFSPRWLVKVGRDEEAKSTLAWMRKLPIDSDRVQVEYLEIKAEAVFEQKVFARDFPHLAEKGKSKFRQEIAQYVTCFRSMDNFKRVCTAWLIMFFQQWSGIDAIIYYASNVFISLGLTGGTIALLATGVTGVVFLISTIPAMFIIDRVGRKPMLQVGSIVMGASMITVGIIVAKFRHDWPSHVAAGWTAVALIWVYIAGFGATWGPVSWTLISEIFPLSIRAKGASIGASSNWLNNFAIAFFVPPMLEAWEWGTYIFFAVFLFAGILWVWFFLPETKNASLEEMDRVFKSRAGEQDAELLREAQAEVGLLGSVSGRKASMEKQGEKHVEEL

SEQ ID NO: 891 - protein, 573 aa, Saccharomyces mikatae IFO 1815
MAFEENNKPVASEQPQAAEDLVSSFSKDSHLSAQSQKYSNDELKAGEANPEGSESVPMEIPKKPMSEYVTVSLLCLCVAFGGFMFGWDTGTISGFVAQTDFLRRFGMKHKDGTHYLSNVRTGLIVAIFNIGCAFGGIILSKAGDMYGRKKGLSIVVSVYIVGIIIQIASINKWYQYFIGRIISGLGVGGIAVLSPMLISEIAPKHLRGTLVSCYQLMITAGIFLGYCTNYGTKNYSNSVQWRVPLGLCFAWSLFMIGALTLVPESPRYLCEMNRVEDAKHSIAKSNKVSPEDPAVQAELDLIMAGVEAEKLAGNASWGELFSTKTKVFQRLLMGVLVQMFQQLTGNNYFFYYGTIVFKSVGLNDSFQTSIVIGVVNFASTFFSLWTVENLGRRKCLLLGAATMMACMVIFASVGVTRLYPHGKSQPSSKGAGNCMIVFTCFYIFCYATTWAPVAWVITAESFPLRVKSKCMAMASASNWVWGFLIAFFTPFITSAINFYYGYVFMGCLVAMFFYVFFFVPETKGLSLEEIQELWEEGVLPWKSEGWIPSSRRGNDYNLEDLQHDNKPWYKAML

SEQ ID NO: 892 - protein, 555 aa, Borrelia burgdorferi B31
MNTSLFKQERQKYIPKLPNILKKDFNNISLVYGENTEAIQDRQALKEFFKNTYGLPIISFTEGESSLSFSKALNIGIILSGGPAPGGHNVISGVFDAIKKFNPNSKLFGFKGGPLGLLENDKIELTESLINSYRNTGGFDIVSSGRTKIETEEHYNKALFVAKENNLNAIIIIGGDDSNTNAAILAEYFKKNGENIQVIGVPKTIDADLRNDHIEISFGFDSATKIYSELIGNLCRDAMSTKKYWHFVKLMGRSASHVALECALKTHPNICIVSEEVLAKKKTLSEIIDEMVSVILKRSLNGDNFGVVIVPEGLIEFIPEVKSLMLELCDIFDKNEGEFKGLNIEKMKEIFVAKLSDYMKGVYLSLPLFIQFELIKSILERDPHGNFNVSRVPTEKLFIEMIQSRLNDMKKRGEYKGSFTPVDHFFGYEGRSAFPSNFDSDYCYSLGYNAVVLILNGLTGYMSCIKNLNLKPTDWIAGGVPLTMLMNMEERYGEKKPVIKKALVDLEGRPFKEFVKNRDKWALNNLYLYPGPVQYFGSSEIVDEITETLKLELFK

SEQ ID NO: 893 - protein, 401 aa, Zea mays
  unsure (1)..(401): unsure at all Xaa locations
MATKRSVGTLGEADLKGKKVFVRADLNVPLDDAQKITDDTRIRASVPTIKFLLEKGAKVILASHLGRPKGVTPKYSLKPLVPRLSELLGVEVVMANDCIGEEVEKLAAALPEGGVLLLENVRFYKEEEKNEPEFAKKLASVADLYVNDAFGTAHRAHASTEGVTKYLKPAVAGFLMQKELDYLVGAVANPKKPFAAIVGGSKVSTKIGVIESLLAKVDILILGGGMIYTFYKAQGYSVGKSLVEEDKLELATSLIEKAKAKGVSLLLPTDIVVADKFAADAESKIVPATAIPDDWMGLDVGPDATKTFDEALDTTKTVIWNGPMGXVFEFQKFAAGTEAIAKKLAELTTTKGVTTIIGGGDSVAAVEKAGLADKMSHISTGGGASLELLEGKTLPGVPCPR

SEQ ID NO: 894 - protein, 299 aa, Lycopersicon esculentum
MIIMSTEQPNCSESTESSCNSSSSSSPSSPSSVLLQPLPQINSKNRLKRCRGEEEVEEEEDVVVNNPNPKKMNKNNNNGSSTSVVSYVGVRMRAWGKWVSEIREPKKKSRIWLGTFATPEMAARAHDVAAMSIKGTSAILNFPQFSHLLPRPVTCSPRDIQNAAVKAAHMDHLNPKFSILPETSAATMTSSSSSLSLVSGVTSSSSSFQDDEESRPSPPELIPEATGQLSEIVELPKLGSSYELVESTQSLFESDEWWDNNYGNCEYFFGQDNYISSNMEFTGLENVVSTSFESFLWQH

SEQ ID NO: 895 - protein, 473 aa, Oceanobacillus iheyensis HTE831
MATEYDLVILGGGTGGYVAAIRASQLKMKVAIVEKAELGGTCLHRGCIPSKALLRSAEVYQQTTRADEFGIQVAKPVLDFSKVQQRKQKIIDQLHQGVQGLMKKGKIDVYQGFGRILGPSIFSPMPGTISVEYSDGKENDMLLPKNVLIATGSRPNQLPGFEFDHNYILSSDDALALETLPDSIVIIGGGVIGIEWASMLNDFEVDVTILENQDRILSTEDAEISKEMSKLLSQKGINIITNANVKADSVKKDQGVSLQVDVDGEIQTHQAEKVLMSVGRKGNIENIGLENTDIVTDRNLIMTNEFYQTKESHIYAIGDVIGGLQLAHVASHEGIKAVEHMAGHTVEKIKANAIPSCIYSSPEAASIGLTEAQAKEKDYEVKVGKFPFKAVGKALVYGESEGFVKIVSDKNTNDLLGVHMIGPHVTDMIAEASLAKFLDATPWEISESIHPHPTLSEVIGEAALAVEGNQIHG

SEQ ID NO: 896 - protein, 142 aa, Triticum aestivum
  unsure (1)..(142): unsure at all Xaa locations
MAPAVMASSATTVAPFQGLKSTAGLPVGRRSSGSLSSVSNGGRIRCMQVWPIEGIKNSETLSYLPPLSTGGLPGNRSDYLDSAQKWXPCLRXNKFGFLFPLXNXPPGYYDGXRYWDMLXLPXFRXTGPTQVLNXVEESKKXT

SEQ ID NO: 897 - protein, 463 aa, Arabidopsis thaliana
MMMRAVIRRAASNGSSPSLFAKSLQSSRVAASSPSLLSGSETGAYLHRGNHAHSFHNLALPGNSGISRSASLVSSTLQRWVRPFSAETGDTVEAVVPHMGESITDGTLATFLKKPGERVQADEAIAQIETDKVTIDIASPASGVIQEFLVNEGDTVEPGTKVAIISKSEDTASQVTPSQKIPETTDTKPSPPAEDKQKPRVESAPVAEKPKAPSSPPPPKQSAKEPQLPPKERERRVPMTRLRKRVATRLKDSQNTFALLTTFNEVDMTNLMKLRSQYKDAFYEKHGVKLGLMSGFIKAAVSALQHQPVVNAVIDGDDIIYRDYVDISIAVGTSKGLVVPVIRGADKMNFAEIEKTINSLAKKANEGTISIDEMAGGSFTVSNGGVYGSLISTPIINPPQSAILGMHSIVSRPMVVGGSVVPRPMMYVALTYDHRLIDGREAVYFLRRVKDVVEDPQRLLLDI

SEQ ID NO: 898 - protein, 246 aa, Triticum aestivum
VIKKKYGQDATNVGDEGGFAPNIQENKEGLELLKTAIEKAGYTGKVVIGMDVAASEFYNDKDKTYDLNFKEENNDGSQKISGDSLKNVYKSFVSEYPIVSIEDPFDQDDWVHYAKMTEECGVEVQIVGDDLLVTNPTRVAKAIQEKSCNALLLKVNQIGSVTESIEAVKMSKHAGWGVMTSHRSGETEDTFIADLAVGLSTGQIKTGAPCRSERLAKYNQLLRIEEELGAAAVYAGLKFRAPVEPY

SEQ ID NO: 899 - protein, 384 aa, Enterococcus faecium
MKIGIDRLSFFIPNLYLDMTELAESRGDDPAKYHIGIGQDQMAVNRANEDIITLGANAASKIVTEKDRELIDMVIVGTESGIDHSKASAVIIHHLLKIQSFARSFEVKEACYGGTAALHMAKEYVKNHPERKVLVIASDIARYGLASGGEVTQGVGAVAMMITQNPRILSIEDDSVFLTEDIYDFWRPDYSEFPVVDGPLSNSTYIESFQKVWNRHKELSGRGLEDYQAIAFHIPYTKMGKKALQSVLDQTDEDNQERLMARYEESIRYSRRIGNLYTGSLYLGLTSLLENSKSLQPGDRIGLFSYGSGAVSEFFTGYLEENYQEYLFAQSHQEMLDSRTRITVDEYETIFSETLPEHGECAEYTSDVPFSITKIENDIRYYKI

SEQ ID NO: 900 - protein, 506 aa, Crocus sativus
MVSTGCSGNGAKGTNGGIVVPEIKFTKLFINGEFVDSVSGSTFETRDPRNGDVIANIAEGDKEDVDLAVKAAREAFDHGKWPRMSGYERGRIMMKFADLIEAFIEELAALDTLDAGKLLSMGKAVDIPAAVHIIRYYAGAADKIHGYTLKLSSELQGYTLKEPIGVVGVIIPWNFPTTMFFLKVSPALAAGCTMVVKPAEQTPLSALYYAHLAKLAGVPDGVINVVPGFGPTAGAALSSHMDVDSVAFTGSAEIGRAIMESAAKSNLKNVSPELGGKSPMIVFDDADVDMAVSLNSLAVFFNKGEVCVAGSRVYVQEGIYDEFVKRAVEAARSWKVGDPFDQSRNMGPQVDKDQFESVLKYIEHGKSEGATLLTGGKPAADKGYYIEPTIFVDVTEDMKIAQEEIFGPVMSLMKFKTVEEGIDCANNTKYGLAAGILSQDLDLINTVSRSIKAGIIWVNCYFGFDLDCPYGGYKMSGNCRESGMDALDNYLQTKSVVMPLHNSPWL

SEQ ID NO: 901 - protein, 213 aa, Zea mays
MGFPVGYSELVLPKQLLHLLLLLGYIRRFLLWAFDAVGLGDLLDLGDDHQALLQDHQQQQHGAAAQGRDLPQQAAMLQHRRPEFRAVPAMVIEEVLPVVRFDELELEPEPGDCAVCLSGIGGRDEVRRLSNCRHVFHRACLDRWMEHDQRTCPLCRAPLIPDEMAGALWAAAAGVPDASDFDFSYLGAPLAPVPSPTLLRPHELLLTGLGGYQ

SEQ ID NO: 902 - protein, 376 aa, Shewanella oneidensis MR-1
MTAQILKSKAAVAWAVGEPLSIEIVDVMPPQKGEVRVKMIATGVCHTDAFTLSGDDPEGIFPCILGHEGGGIVESIGEGVTSVQVGDHVIPLYTPECGECKFCKSGKTNLCQKIRETQGKGLMPDGTSRFSKDGQIIYHYMGTSTFSEYTVLPEISLAKVNPDAPLEEVCLLGCGVTTGMGAVMNTAKVEEGATVAIFGMGGIGLSAVIGATMAKASRIIVIDINESKFELAGKLGATDFINPKDYDKPIQDVIVELTDGGVDYSFECIGNVNVMRSALECCHKGWGESVVIGVAGAGQEISTRPFQLVTGRVWKGSAFGGVKGRSELPEYVERYLAGEFKLSDFITHTMSLEQVNDAFDLMHQGKSIRTVIHFDK

SEQ ID NO: 903 - protein, 264 aa, Thermobifida fusca
MIAIIGAGRMGEALLAGILHTGRDAAEVLISEAREDRAAELCQRYGVAAASPAEAAARADTLLLAVKPQDMVAALNEIAPALPPGRLVISVAAGITTAVLEKHLPAETAVVRAMPNTPALVGQGMTAIAAGTHTLEEHLDRAETLLRSVGEVVRVPEKHLDAVTALSGSGPAYFYLVAEAMIEAGVLLGLPRPTAERLVTQTAVGSAAMLRDSGDHPTLLREAVTSPGGTTAAALRELERHGLRSAFADAVEAACRRSAELAEG

SEQ ID NO: 904 - protein, 590 aa, Asparagus officinalis
MCGILAVLGCSDDSQAKRVRVLELSRRLKHRGPDWSGLCQHGDCFLSHQRLAIIDPASGDQPLYNEDKSIVVTVNGEIYNHEELRRRLPDHKYRTGSDCEVIAHLYEEHGEDFVDMLDGMFSFVLLDTRNNCFVAARDAVGITPLYIGWGLDGSVWLSSEMKGLNDDCEHFEVFPPGNLYSSRSGSFRRWYNPQWYNETIPSAPYDPLVLRKAFEDAVIKRLMTDVPFGVLLSGGLDSSLVAAVTARHLAGSKAAEQWGTQLHSFCVGLEGSPDLKAAKEVAEYLGTVHHEFHFTVQDGIDAIEDVIFHIETYDVTTIRASTPMFLMARKIKSLGVKMVISGEGSDEIFGGYLYFHKAPNKEEFHHETCRKIKALHQYDCLRANKATSAWGLEARVPFLDKEFMDVAMSIDPESKMIKPDLGRIEKWVLRKAFDDEENPYLPKHILYRQKEQFSDGVGYSWIDGLKAHAAKHVTDRMMLNAARIYPHNTPTTKEAYYYRMIFERFFPQNSARFTVPGGPSIACSTAKAIEWDARWSNNLDPSGRAALGVHDSAYDPPLPSSISAGKGAAMITNKKPRIVDVATPGVVIST

SEQ ID NO: 905 - protein, 421 aa, Physcomitrella patens
MGRKPCCEKVGLRRGPWTSEEDQKLVSHITNNGLSCWRAIPKLAGLLRCGKSCRLRWTNYLRPDLKRGIFSEAEENLILDLHATLGNRWSRIAAQLPGRTDNEIKNYWNTRLKKRLRSQGLDPNTHLPLEDSKLDDTEDDTDDEGGDSSDVTMSDASKSEKRSKKKSKPKETVKVRQPKGPKPAPQLKMCQSDEGPVLLKVPKAPKSPISVNPGPGCNYDDDSEHSSSSTVTTKSHEDHRDSSDFIKALTSVSSFPEAELWSCIKPITNSFSSTALLSEWDSYRAFDSSLFPSSYPQLNSGLPKLEDVNSKSSAVASPVQGMLPAYNPMGMEMQTRMQFSSQLTHEIGQNYGGIFQETCYPQPDMGMSWSMHAELSHCGTESLFATPNPANAPSNFEEVPQPSPCTTSQELQRLAALLDLI

SEQ ID NO: 906 - protein, 273 aa, Oryza sativa (japonica cultivar-group)
MARREVDDSYTNGSVVEVVSIEEGSKMDKEDDHQNPQAPDGGDVVVCGMPMSFTFLQMLLAEFLATFFLMFAGLGAITVEEKKGAVTFPGVAVAWGAAVMAMVYAVGHVSGAHLNPAVTLGFAVAGRFPWRRAPAYALAQTAAATAASVVLRLMFGGRHAPVPATLPGGAHAQSLVIEFVITFYLMFVIMAVATDDQAVGHMAGVAVGGTIMLNVLFAGPVSGASMNPARSIGPALVGSKYTALWVYILGPFAGAAAGAWAYSLIRLTGDRTD

SEQ ID NO: 907 - protein, 244 aa, Xanthobacter flavus
MKRVQDKVALVTGGAMGMGRTHAETLAAEGAYVFVGDRDAAAGKAVADGIVAKGGKAEFLSLDVTKESDWAAAVDTVKAKSGKLNVLVNNAGILVLKPAHETTNDEWDSTFNVNVRGVWLGIRSFVPLMKGNNGSIINISSIYGIVGAPMAGAYIASKGAVRLLTKSCAVDLIQFGIRVNSVHPGVIDTPMTKDLLHGDPAARKAIMGATLFDRPCQPVEVSKAVLFLASDESSFVHGAEMVVD

SEQ ID NO: 908 - protein, 290 aa, Methylococcus capsulatus str. Bath
MALQSLDIVRRSATTTPSPQQRQTTEVAKLIDVTKCIGCKACQSACQEWNDLREEVGINEGSYQNPHDLTANSWTLMRFTETEENGTLEWLIRKDGCMHCADPGCLKACPSPGAIIQYSNGIVDFHEENCIGCGYCIAGCPFDIPRLSPKDGKAYKCTLCSDRVSVGLEPACIKSCPTQALVFGSKEDMIEHANERIADLKERGFENAGLYDPPGVGGTHVMYVLHHADKPQLYDGLPQSPRISGLVGLWKGIFKPLATAALALTALAGFFHYVTVGPNETGEDEEEEKA

SEQ ID NO: 909 - protein, 374 aa, Zea mays
  unsure (1)..(374): unsure at all Xaa locations
MASALVPASFSLAHPAARRPVNSTGPAAMLMLRRAGLATVCPPERSLGSDCLRAGADPRLAIHVALRCRSASSTGRGTRAAATMTKKSVGDLTAADLEGKRVLVRADLNVPLDDSQNITDDTRVRAAIPTIKHLISNGARVILTSHLQELDYLVGAVSNPKRPFAAVIGGSKVSSKIGVIESLLEKCDILLLSGGMIFTFYKAQGHSIGSSLVEDDKLELATSLLRKAKEKGVSLMLPFDLVVADKFAPDASSQLSXVVPASAIPDAWMGLDIGPDSISAFSSALETTQTVIWNGPMGVFEFDKFAVGTKAIAKKLAELSGKGVTTIVGGGDSIAAVEKVGVADSLSHISTGGGASLELLEGKELPGVAALDEA

SEQ ID NO: 910 - protein, 582 aa, Arabidopsis thaliana
MVEGGIAKADKTEFTECWRTTWKTPYIMRLALSAGIGGLLFGYDTGVISGALLFIKEDFDEVDKKTWLQSTIVSMAVAGAIVGAAVGGWINDKFGRRMSILIADVLFLIGAIVMAFAPAPWVIIVGRIFVGFGVGMASMTSPLYISEASPARIRGALVSTNGLLITGGQFFSYLINLAFVHTPGTWRWMLGVAGVPAIVQFVLMLSLPESPRWLYRKDRIAESRAILERIYPADEVEAEMEALKLSVEAEKADEAIIGDSFSAKLKGAFGNPVVRRGLAAGITVQVAQQFVGINTVMYYSPSIVQFAGYASNKTAMALSLITSGLNALGSIVSMMFVDRYGRRKLMIISMFGIIACLIILATVFSQAAIHAPKIDAFESRTFAPNATCSAYAPLAAENAPPSRWNCMKCLRSECGFCASGVQPYAPGACVVLSDDMKATCSSRGRTFFKDGCPSKFGFLAIVFLGLYIVVYAPGMGTVPWIVNSEIYPLRYRGLGGGIAAVSNWVSNLIVSESFLSLTHALGSSGTFLLFAGFSTIGLFFIWLLVPETKGLQFEEVEKLLEVGFKPSLLRRREKKGKEVDAA

SEQ ID NO: 911 - protein, 428 aa, Nitrosomonas europaea ATCC 19718 [sequence omitted]

SEQ ID NO: 912 - protein, 334 aa, Rhodopseudomonas palustris CGA009
MNMEDLYRLLRTSHVQAQGIVDTVVDPMLVLDASLTVQNASRSFFETFKVDRYETIGQPLFELGNGQWDIPDLRRLLLEVIPKAAAVINYQVDHVFPGLGPRTMLLTARTLVHPDNASHSMLLSIVDATDRFRRDAARDLLLGEMRHRMKNLFGVVQSLARQTTTEGRTAEQYRDDFLGRFGALMEAEDLAFVTQDETALLKLLQRILAPYKGGPAAIAIESGPAVVLAPRSLGSLSLILHELATNAAKYGALSVAGGRLRATWAVDASGRELRLTWVESGGPAVAPPTSTGYGTELIRSVTSYSLGGRSELDYAVGGLRAEIIIPLRSEALPS

SEQ ID NO: 913 - protein, 396 aa, Ralstonia eutropha JMP134
MFDTILDWAANGLANWSWWEIVIYTLVVTHITIAGVTIFLHRCMAHRSLDLHPIAQHFFRFWLWLTTGMVTREWTAIHRKHHAKCETEDDPHSPQTRGIRKVLLEGAELYRAEAKNKETIAKFGHGCPNDWVERNVYSRFGWQGVGLMLIIDLALFGVIGMTVWAVQMLWIPINAAGVINGLGHWWGYRNYDCEDASTNVSPWGLVIGGEELHNNHHTYPTSAKFSIKWYEFDVGWGYIRAMQAVGLAKVKKTPPKARLVEARPVDENTLEAIIANRYDVMARYAKAVKSAFRQELEQLKEGRVAEYRTFKPASKWFHREEAKLAAPQRQQLASIVEQSKSLHTFVEMRRELAAIWGRSNLTREQLLQQLQAWCHRAEASGIQALHDFSLRLRRYA

SEQ ID NO: 914 - protein, 79 aa, Glycine max
  unsure (1)..(79): unsure at all Xaa locations
LKSMAGFCTMQNMNDIISIASNGGRVQCLXVWPPVGKKKFETLSYLLDLDDAQFANXVEYLLRNGWILVRYHWSTFVYV

SEQ ID NO: 915 - protein, 129 aa, Shigella flexneri
GDLSEYSVIQTKEPLDREGKVSRIVEFIEKPDQPQTLDSDIMAVGRYVLSADIWPELERTQPGAWGRIQLTDAIAELAKKQSVDAMLMTGDSYDCGKKMGYMQAFVKYGLRNLKEGAKFRKGIEKLLSE

SEQ ID NO: 916 - protein, 581 aa, Mesembryanthemum crystallinum
MVEGGVVKVDKTEFTECFRTVGKTPYIMRLAFSAGIGGLLFGYDTGVISGALLYIKEDFKEVAQKTWLQETIVAMAVAGAIVGAGLGGFLNDKFGRKPAMIVADILFLTGAIIMSVAPAPWVIIIGRIVVGLGVGMASMTAPLYISETSPAKIRGALGATNGLLITGGQFVSYLVNLGFTRVKGTWRWMLGVAAVPAAIQVVLMLTLPESPRWLYRQNKISEAEEILGRIYPPEQVKEEMDSLKTSIENEMADRKAVGEGNAFVRAKRAWDNKVVRRGLIAGISVLVAQQFVGINTVMYYSPTIIQLAGFASNSTALALSLVTSGLNAVGSIVSMMFVDRFGRRRLMIISMFAIITCLVVLSGLFYGAAQAAPKISQLESSHFGANSTCPAFASATSPDRWNCMTCLKASDCAFCSNSASEFHPGACVAQTSTMKNACLGEKRIYFTEGCPSKFGFMAIIVLGLYIITYSPGMGTVPWILNSEIYPLRYRGICGGIGAVTLWCANLIVSETFLTLTEALGSSGTFLLYAGFSLIGLIVIFLLVPETKGLPIEDIEKMLEKGFWPSLCGGNKDKDNKEEQQA

SEQ ID NO: 917 - protein, 368 aa, Glycine max
  unsure (1)..(368): unsure at all Xaa locations
STSKAIAQYTEDARLHAVFEQSGESGRSFDYSQSIRVTSESVPEQQITAYLLKIQRGGFIQPFGSMIAVDEPSFRILAYSDNARDMLGITPQSVPSLDDKNDAAFALGTDIRTLFTHSSAVLLEKAFSAREISLMNPIWIHSRTSGKPFYGILHRIDVGIVIDLEPARTEDPALSIAGAVQSQKLAVRAISQLQSLPGGDVKLLCDTVVESVRELTGYDRVMVYRFHEDEHGEVVAETKRPDLEPYIGLHYPATDIPQASRXXFKQNRVRMIVDCHASAVRVVQDEALVQPLCLVGSTLRAPHGCHAQYMANMGSTASLVMAVIINGNDEEGVGGRTSMRLXXLVICHHTSARCIXXPLRYACDFLMQ

SEQ ID NO: 918 - protein, 581 aa, Mesembryanthemum crystallinum
MVEGGIVKADKTEFTECFRTIGKTPYILRLAFSAGIGGLLFGYDTGVISGALLYIKEDFKEVERKTWLQETIVAMAVAGAIIGAGVGGYLNDKFGRKPAIIIADILFFIGAIIMSLAPAPWMIILGRIFVGLGVGMASMTSPLYISETSPTRIRSALVSTNGLLITGSQFLSYLINLGFTRVKGTWRWMLGVAAVPAFVQLLLMLSLPESPRWLYRKNKVVEAEAILARIYPPEEVEEEMRALKASIEYEMAEEGEIGGGSMLSKVRKAWGNKIVRRGLYAGITVQVAQQFVGINTVMYYSPTIVQLAGFASNSTALALSLVTSGLNAIGSIVSMMFVDRHGRRRLMIISMFGIITCLIVLAIGFFQAAAHAPKISHAESTHFGLNSTCPAYTTTRNPATWNCMTCLQAASECAFCTNKGNQLLPGGCVSRTDAMKVACHGEKRVYFTEGCPSKFGFLAVILLGAYIISYSPGMGTVPWIVNSEIYPLRYRGVGGGIAAVSNWTSNLIVSETFLTLTEALGAAGTFLLFAGFSAIGLVFIYLLVPETKGLPIEEVEHMLENGFKPSIFRGNKDKETKASGT

SEQ ID NO: 919 - protein, 112 aa, Zea mays
LDYNLKACTLAPGNYAISGGVKGIEVVEAKAKFFKARMTVRLALAGALHTSFMQPAVSRLEPALAATEIRTPRIPVISNVDAQPHSDPDTIKKKTDFSAANKLYAKLELLLQ

SEQ ID NO: 920 - protein, 154 aa, Zea mays
MLMGFPVGYSETPKLLLHLLFLLDHLRRLSSWLLRLAGAADADADTDAGHPRHPCAAAQRLEEHSPAVRFDSLSCGSGGGVTAPRPLPEGCCVCLGDFHAAAEVRRARGCRHVFHRACLDRWAAHGHRTCPLCRTPLLPPLPLPLPLPLPLPPS

SEQ ID NO: 921 - protein, 345 aa, Bacillus cereus ATCC 14579
MKAVVVNKNSKANIEVIEKELRPLHSGEALVDVEYCGVCHTDLHVANHDFGNTDGRILGHEGVGIVTKIADDVTSLKIGDRVSIAWMFQSCGRCEYCVTGRETFCREVKNAGYSVDGGMAEQCIVTADYAVKVPEGLDPAQASSITCAGVTTYKAIKVSDIKPSQPIVIYGCGGLGNLAIQYAKNVFGAKVIAVDINDDKLALAKEVGADMTINPISQGPADKIVQEKFGGAYAAVVTAVSKVAFNSAVDAVRACGKVVAVGLPVETMDLNIPRLVLDGIEVVGSLVGTRKDLEEAFMFGAEGKVVPVVQTCSLDKVQNVFEEMEQGRIQGRMVIDFKKHNCDCK

SEQ ID NO: 922 - protein, 401 aa, Rickettsia rickettsii
MSIISTRLSSIKPSPTLAVVKKTLELKKAGVDIITLGAGEPDFDTPYNIKEAAIKAIKDGFTKYTNVEGMPLLKQAIKDKFKRENNINYELDEIIVSTGGKQVIYNLFMASLNQGDEVIIPAPYWVSYPDMVALSTGTPVFVNCGIENNFKLSAEALERSITDKTKWLIINSPSNPTGASYNFEELENIAKVLRKYSHVNVMSDDIYEHITFDDFKFYTLAQIAPDLKKRIFTVNGVSKAYSMTGWRIGYGAGSKALIKAMTIIQSQSTSNPCSISQMAAIEALNGPQDYIKPNALNCQKKRDLALSILKRVKYFECYKPEGAFYLFVKCDKIFGHKTKSGTIIANSNDFAEYLLEEAKVAVVPGIAFGLEGYFRISYATSMEELEKACIRIERTIDVIPA

SEQ ID NO: 923 - protein, 440 aa, Cladosporium herbarum
MPISKIHSRYVYDSRGNPTVEVDIVTETGLHRAIVPSGASTGSHEACELRDGDKSKWAGKGVTKAVANVNEIIAPALIKENLDVKDQAAVDAFLNKLDGTTNKTKIGANAILGVSMAVAKAAAAEKRVPLYAHISDLSGTKKPFVLPVPFMNVVNGGSHAGGRLAFQEFMIVPSAAPSFTEAMRQGAEVYQKLKSLTKKRYGQSAGNVGDEGGVAPDIQTAEEALDLITDAIEEAGYTGQIKIAMDVASSEFYKADEKKYDLDFKNPDSDKSKWITYEQLADQYKQLAAKYPIVSIEDPFAEDDWEAWSYFYKTSGSDFQIVGDDLTVTNPEFIKKAIETKACNALLLKVNQIGTITEAINAAKDSFAAGWGVMVSHRSGETEDVTIADIVVGLRAGQIKTGAPARSERLAKLNQILRIEEELGDKRLYAGDNFRTAINL

SEQ ID NO: 924 - protein, 176 aa, Crocosphaera watsonii WH 8501
MKLLDSKGRLWGKISILDLGAALAIFLVIVGIFVVPGKSGTSTIAQVANKPIEVDVIVRGLGVSNPEALINEFSETKKTNIVIRNQPSGEFEIKEIRPLPRTTVVPQPDGSVKALPDPRPEVVYFKDMILTLRGNAQITDTGAVVGQQKVKIGTLIELEGKDYNFNTSTIAVRIMK

SEQ ID NO: 925 - protein, 425 aa, Methanopyrus kandleri AV19
MIGIVLAAGEGTRMRPLTKTRPKVLLPVADRRLIDFSIEAMKRIGVEHLVVVVEYLAEKVERYVKDRWGDSFELEFVRQGKPLGTAHAVYVAWREIEPDETVVITNGDLVFDSELLERAVREHEGVASMVLVEVEDPSEFGVARLQDGYVVELVEKPKPEEAPSNLANAGVYVAEPEFERFLERVKPSPRGEFEITDALLDAAIDEGVLGISYDGFWSDVGRPWDLLDANAWALRNAMSRPEVEGVIEENVELRGPVWVAEDAILRSGAVVEGPAYIGPGCEIGPNCYIRPATTLVRDVRIGQAVEIKNSIIMEGTNVSHLSYVGDSVIGAKCNLGAGTIIANLRHDERNVKVVVKGELEDTGRRKFGAVLGDGVKTGINTSILPGRKLGPYSATAPSTVVRKNVPEGKMLVQGDQILVDWEGRG

SEQ ID NO: 926 - protein, 354 aa, Triticum aestivum
  unsure (1)..(354): unsure at all Xaa locations
MARRPPIPPPRRDHRDVMSNKATHWCFPCRRPIRCPGQDIFQPQCWHDIIQEVXTRIGGALXNNYGMFGPRFDDRLDGRFGMMDAMSALMRRRMAXEMSSNPVFDPNAAWASTTQGRPSPIGPRLIFGSNMPXRGAKDSGVNVLVRGGRRIGADRPNFSGFLVGGPSLXEALFEQLLLRAIAXGNRQGPAPAPQSAIDSMPVVKITRRHLSDDPVCPVCTDRFEVGSEAREMPCKHLYHASCIIPWLVQHNSCPVCRHPLPPQRGSDSNAARPQPLAHAGEAVSRGVAGAGADPAPVTRNGDDDGGSPFSFLWPFGSSSPGPSSYQYGGGGGGRPAVYDDDPGQITYSEWHYDP

SEQ ID NO: 927 - protein, 457 aa, Vibrio cholerae non-O1
MHRYKKEASNLIKLATPVLIASVAQTGMGFVDTIMAGGVSAIDMAAVSIAASIWLPSILFGVGLLMALVPVVAQLNGAGRQHKIPFEVHQGLILALLVSIPIIAVLFQTQFIIRFMDVEEAMATKTVGYMHAVIFAVPAYLLFQALRSFTDGMSLTKPAMVIGFIGLLLNIPLNWIFVYGKFGAPELGGVGCGVATAIVYWIMLLLLLFYIVTSKRLAHVKVFETFHKPQPKELIRLFRLGFPVAAALFFEVTLFAVVALLVAPLGSTVVAAHQVALNFSSLVFMFPMSIGAAVSIRVGHKLGEQDTKGAAIAANVGLMTGLATACITALLTVLFREQIALLYTENQVVVALAMQLLLFAAIYQCMDAVQVVAAGSLRGYKDMTAIFHRTFISYWVLGLPTGYILGMTNWLTEQPLGAKGFWLGFIIGLSAAALMLGQRLYWLQKQSDDVQLHLAAK

SEQ ID NO: 928 - protein, 532 aa, Adiantum capillus-veneris
MSEQGCYTDCWGAIWWIWESGIKAMAGLEGEIQTRRLRGREIPVLPPVTRSAAASAANVGYNENTRKTKVSTKRAAADDTSSRVASNVPVQHAKKRAALANLTNQSNSAITRNSSLPSKSHASAVNGKTRAAAGQVKEVQQVAQQVVEPLQEVGREPNTGRSSLANSSITFDNDENACPERATSSVGMKSRTLDVLQLVGNENKTVASLERKTQHSLYISKDTKPRARQGGLFEDCKDDNEEGGWSSKNYMDIDNHKDPQMCSAYAAEIYHHLRMAELKRRPSLNFMDTVQQDINASMRGILVDWLVEVAEEYKLVPDTLYLTISYIDRFLSGNLVTRQRLQLLGVASMLIASKYEEICAPQVDEFCYITDNTYNREEVLEMERSVLNHLHFELTGPTTKSFLRRFVRAAQAGQKSPTLQLEFLGNYLAELTLLEYGFLHFLPSMIAGAAVLVARVTLNPTWRPWNSTLQHYSGYKASELKECAKAILELQKNTKNCTLPAIREKYRQHKFKCVATLHPPASIPAEYFDDIE

SEQ ID NO: 929 - protein, 416 aa, Ralstonia eutropha JMP134
MYQHIKVPAGEKITVNQDFSLNVPDTPIIPYIEGDGTGLDITPVMIKVVDAAVEKAYAGKRKISWMEIYAGEKSTKVYGPDVWLPDETLDVLKEYVVSIKGPLTTPVGGGIRSLNVALRQQLDLYVCLRPVRYFKGVPSPVREPEKTDMVIFRENSEDIYAGIEWEAESPQAQKLIAFLQNEMGVKKIRFPETSGIGVKPVSKQGTQRLVRKAIQYAIDNDKPSVTLVHKGNIMKFTEGGFRDWGYELAQKEFGAELVDGGPWCKFKNSKTGRDIVIKDAIADAFLQQILLRPAEYSVIATLNLNGDYISDALAAQVGGIGIAPGANLSDSVAMFEATHGTAPKYAGKDYVNPGSEILSAEMMLRHMGWTEAADLIIASMEKSILSKKVTYDFARLLEGATQVSCSGFGQVMIENM

SEQ ID NO: 930 - protein, 202 aa, Zea mays
MELDADNLSATELRLGLPGTSSSSSDDWQKKPSPSVGAKRALDDGTKSEASGTSPAARDLDFDHDHDTAAPPKAQVVGWPPVRAYRKNTFQAAAAAKKVEQKQKQQQQGGLYVKVSMDGAPYLRKVDLRMYKGYRELREALDALFTNSFSAAAEGGGDHHQHAIAYEDKDGDLMLAGDVPWDMFISSCKKLRIMKGSASEAR

SEQ ID NO: 931 - protein, 181 aa, Treponema denticola ATCC 35405
MDLRFVTKNKFKVDEVQKLLTSINVIHCPIEIKEIQTESIDEIVNDKVLKAFNKIGRPLFIEHTSLYLGGMNGFPGGLTQIFWDKLQADKFSEIVSKMSDQTVEAKTVIGYCTGKKIYKFEGVIKGKISDLPKGSKDFQWDCVFIPDGHSQTFAEMGEQKNIISMRKIAFDKFYDFLKDKR

SEQ ID NO: 932 - protein, 1131 aa, Sorghum bicolor
MSSSRPAHSSSSSSRTRQSSQARILAQTTLDAELNAEYEESGDSFDYSKLVEAQRSTPSEQQGRSGKVIAYLQHIQRGKLIQPFGCLLALDEKSFRVIAFSENAPEMLTTVSHAVPNVDDPPKLGIGTNVRSLFTDPGATALQKALGFADVSLLNPILVQCKTSGKPFYAIVHRATGCLVVDFEPVKPTEFPATAAGALQSYKLAAKAISKIQSLPGGSMEALCNTVVKEVFELTGYDRVMAYKFHEDEHGEVFAEITKPGIEPYLGLHYPATDIPQAARFLFMKNKVRMICDCRAKSVKIIEDEALSIDISLCGSTLRAPHSCHLQYMENMNSIASLVMAVVVNENEEDDEPGPEQPPQQQKKKRLWGLIVCHHESPRYVPFPLRYACEFLAQVFAVHVNKEFELEKQIREKSILRMQTMLSDMLFKEASPLSIVSGSPNIMDLVKCDGAALLYGDKVWRLQTAPTESQIRDIAFWLSEVHGDSTGLSTDSLQDAGYPGAASLGDMICGMAVAKITSKDILFWFRSHTAAEIKWGGAKHDPSDKDDNRRMHPRLSFKAFLEVVKMKSLPWSDYEMDAIHSLQLILRGTLNDALKPVQASGLDNQIGDLKLDGLAELQAVTSEMVRLMETATVPILAVDGNGLVNGWNQKVAELSGLRVDEAIGRHILTLVEDSSVSIVQRMLYLALQGKEEKEVRFELKTHGSKRDDGPVILVVNACASRDLHDHVVGVCFVAQDMTVHKLVMDKFTRVEGDYKAIIHNPNPLIPPIFGADQFGWCSEWNVAMTKLTGWHRDEVIDKMLLGEVFDSSNASCLLKSKDDFVRLCIIINSALAGEEAEKAPFGLFDRNGKYIECLLSVNRKVNADGVVTGVFCFIHVPSDDLQHALHVQQASEQTAQRRLKAFSYMRHAINKPLSGMLYSRETLKSTGLNEEQMRQVHVADSCHRQLNKILADLDQDNITDKSSCLDLDMAEFVLEDVVVSAVSQVLIGCQGKGIRVACNLPERFMKQKVYGDGIRLQQILSDFLFVSVKFSPVGGSVDISSKLTKNSIGENLHLIDFELRIKHQGAGVPAEILSQMYEEDNKEPSEEGLSLLVSRNLLRLMNGNIRHIREAGMSTFILTAELAAAPSAVGQ

SEQ ID NO: 933 - protein, 85 aa, Zea mays
  unsure (1)..(85): unsure at all Xaa locations
PFMLLDVGKLTQGCGXQCTADGMHYDGGVYDAVMHIMLNALVIESQQRISVAGGFFNRFAPNPLFFLVSHGTQVTRDCCELGKVL

SEQ ID NO: 934 - protein, 77 aa, Glycine max
ISSPAVATVNRAGACMVAPFTGLKSMDGFPTINTNDDVASIAIYGVTVQCIQVWTPVGRRKFDTLSYLPDLDDAAIG

SEQ ID NO: 935 - protein, 100 aa, Oryza sativa
  unsure (1)..(100): unsure at all Xaa locations
SDPQNIIDDTCMRASVPTVKLVIXNGAKVILASHVGRPKGDTRKNSLKPMVPRLTELLGVDVEKANDCIAEEVDKLAAAVPDGGGLLLENVRFYKEEEND

SEQ ID NO: 936 - protein, 517 aa, ASPERGILLUS NIDULANS FGSC A4
MNSREDTELSAAHAPLLAQEPVLRQHDEDQSKHSSGRFIWYLTFSAGISGLLFGYDTGVISSTLVSIDSDLSNRPLTTLDKSLITSCTSLFALIASPLAGILADRLGRKRVILVADVLFTVGSFIQAATGEVWGMIIGRSIVGFAVGSASLVTPLYISELAPSDARGRLVTILSLFITGGQVVAYIIGWLFSYVGGGWRWMVGLGMLPAVFQLIIVVALPKTPRWLVQAGYEDKAQRILSEVHQDDQTAKQTLRDIQQEVAEENSSNKSAGFKQRSHDLFKIAGNRRALTIAVMLQALQQLCGFNSLMYFSATIFSLLSFSSPTLTSLSVALTNFLFTLLAFVYIDRIGRRRILLYSIPVMIISLFVCAVTFSFVELPKDTSEAQARQAATDSSVIPLLILLCLTVYTAAYAFGLGNVPWQQSELFPLNVRSLGSALATATNWGSNFVVGLTFLPMMELLSPSLVFALYGVVCIAGWFGVRTFYPEMSGLNLEDVKALLADSWGVRASLIGVRNRSA

SEQ ID NO: 937 - protein, 95 aa, Oryza sativa
  unsure (1)..(95): unsure at all Xaa locations
IGRVRCHTVTMXVLALYFGSLLNALRRRIGEEERELKKAAAKRGLIPLLIXKLRGKKVDPPPQGSSPTSLLSTXLLLQVVFVAVVXVSLXYLXNS

SEQ ID NO: 938 - protein, 265 aa, Aquifex aeolicus VF5
MHAIILTMRVGIVGFGNMGQAFALCFSKKLGKENIIVTDKVQEKRNLATEMGIAFASDVKFLADNSDVVLVAVKPKDSQEVLQKLKDYKGIILSIMAGVSIEKMEKILGKDKKIVRVMPNVNVAVGSGVMAITDNGNLSEEERSKVEELLLSCGTLYRIEERLFDAFTALAGSGPAFVFSFIDALALAGVHQGFSYEQALRIALDTVMGSAKLLKEFQVNPNELIAKVTSPGGTTIEGIKYLEEKGFKGTVMECINRTSQKAKKL

SEQ ID NO: 939 - protein, 430 aa, Xanthomonas campestris pv. campestris str. ATCC 33913
MTTIAKILAREILDSRGNPTLEAEVTLADGSFGRAAVPSGASTGTKEAVELRDGDKTRYLGKGVRKAVENVNGTIAETLKDFDAADQQGLDRRLIDLDGTENKGRLGANALLGVSLAAAHAVAASRKQPLWQYLSTITESDVALPVPMMNIINGGAHADNNVDFQEFMVLPVGCSSFSEALRAGTEIFHSLKSVLKGHGLSTAVGDEGGFAPDFRSNVEALDTILEAIGKAGYTAGEDILLGLDVASSEFYDNGKYNLVGENKRLTSEQFVDFLADWVAQYPIISIEDGLAEDDWAGWKLLTDRVGKKVQLVGDDLFVTNPKIFKEGIDSGTANAILIKVNQIGTLTETLEAIAMAHAANYASIVSHRSGETEDTTIADIAVATTATQIKTGSLCRSDRVAKYNQLLRIEQALGSGARYAGRDAFVSLKR

SEQ ID NO: 940 - protein, 348 aa, GIBBERELLA ZEAE PH-1
MESHHRAAVVTRSDTGFKFDIQNVPIPKPQPWEILVKLSATGVCGTDMTLAGGYLGPCRDILGHEGVGRVVQIGSGVDPSTIKVGDRIGIAWVRDACGQCSCCREPGGEVRCLEQQNSGRKWDGTFADHCIVPSRYVLTLPDDPKLPDEIVAPILCGGVTAYKALKACEATPGDWVAIVGAGGGVGGLGIQYAKAMGYRVAAVDVGPAEDFCLKMGADAYFDGSSPDTPAKLKKLTPNGAGAKTVIVTAGSGRAYQNALDLVAVFGTLVCVGIPPPDQAMNLHPLTLIDRGIKLLGTLVGTRTETLEALEFVRRGVVEPIVQTVNFNEIEDLAARFLTLPVSRYYVDY

SEQ ID NO: 941 - protein, 417 aa, Bacillus subtilis subsp. subtilis str. 168
MAEIKVPELAESISEGTIAQWLKQPGDYVEQGEYLLELETDKVNVELTAEESGVLQEVLKDSGDTVQVGEIIGTISEGAGESSAPAPTEKTESKESVKEEKQAEPAAQEVSEEAQSEAKSRTIASPSARKLAREKGIDLSQVPTGDPLGRVRKQDVEAYEKPASKPAPQQKQQPQAQKAQQSFDKPVEVQKMSRRRQTIAKRLVEVQQTSAMLTTFNEVDMTAVMNLRKRRKDQFFEQNEVKLGFMSFFTKAVVAALKKYPLLNAEIQGDELIVKKFYDIGIAVAAVEGLVVPVVRDADRLTFAGIEKEIGELAKKARNNKLTLSELEGGSFTITNGGTFGSLMSTPILNSPQVGILGMHKIQLRPVAIDEERFENRPMMYIALSYDHRIVDGKEAVGFLVTIKNLLEDPEQLLLEG

SEQ ID NO: 942 - protein, 123 aa, Escherichia coli
MSKIVKIIGREIIDSRGNPTVEAEVHLEGGFVGMAAAPSGASTGSREALELRDGDKSRFLGKGVTKAVAAVNGPIAQALIGKDAKDQAGIDKIMIDLDGTEKKSKFGANAILAVSLANAKAAA

SEQ ID NO: 943 - protein, 1131 aa, Sorghum bicolor
MSSSRPAHSSSSSSRTRQSSQARILAQTTLDAELNAEYEESGDSFDYSKLVEAQRSTPSEQQGRSGKVIAYLQHIQRGKLIQPFGCLLALDEKSFRVIAFSENAPEMLTTVSHAVPNVDDPPKLGIGTNVRSLFTDPGATALQKALGFADVSLLNPILVQCKTSGKPFYAIVHRATGCLVVDFEPVKPTEFPATAAGALQSYKLAAKAISKIQSLPGGSMEALCNTVVKEVFELTGYDRVMAYKFHEDEHGEVFAEITKPGIEPYLGLHYPATDIPQAARFLFMKNKVRMICDCRAKSVKIIEDEALSIDISLCGSTLRAPHSCHLQYMENMNSIASLVMAVVVNENEEDDEPGPEQPPQQQKKKRLWGLIVCHHESPRYVPFPLRYACEFLAQVFAVHVNKEFELEKQIREKSILRMQTMLSDMLFKEASPLSIVSGSPNIMDLVKCDGAALLYGDKVWRLQTAPTESQIRDIAFWLSEVHGDSTGLSTDSLQDAGYPGAASLGDMICGMAVAKITSKDILFWFRSHTAAEIKWGGAKHDPSDKDDNRRMHPRLSFKAFLEVVKMKSLPWSDYEMDAIHSLQLILRGTLNDALKPVQASGLDNQIGDLKLDGLAELQAVTSEMVRLMETATVPILAVDGNGLVNGWNQKVAELSGLRVDEAIGRHILTLVEDSSVSIVQRMLYLALQGKEEKEVRFELKTHGSKRDDGPVILVVNACASRDLHDHVVGVCFVAQDMTVHKLVMDKFTRVEGDYKAIIHNPNPLIPPIFGADQFGWCSEWNVAMTKLTGWHRDEVIDKMLLGEVFDSSNASCLLKSKDDFVRLCIIINSALAGEEAENAPFGLFDRNGKYIECLLSVNRKVNADGVVTGVFCFIHVPSDDLQHALHVQQASEQTAQRRLKAFSYMRHAINKPLSGMLYSRETLKSTGLNEEQMRQVHVADSCHRQLNKILADLDQDNITDKSSCLDLDMAEFVLEDVVVSAVSQVLIGCQGKGIRVACNLPERFMKQKVYGDGIRLQQILSDFLFVSVKFSPVGGSVDISSKLTKNSIGENLHLIDFELRIKHQGAGVPAEILSQMYEEDNKEPSEEGLSLLVSRNLLRLMNGNIRHLREAGMSTFILTAELAAAPSAVGQ

SEQ ID NO: 944 - protein, 280 aa, Triticum aestivum
  unsure (1)..(280): unsure at all Xaa locations
LKHRKTVTKPHLCTWRLVRAKLAARHIVLVHGACVGGWAWFKVATRRXDAGHRVSTPDLAASGVDPRPLREVPTFRDYTKPLLDLLESLPPGEKVVLVGHSLGGVNIALACELFPEEIAAAVFVAAFMPDHRSPPSYVLEKFVEGRTLDWMDTEFKPQDPEGKLPTSMLFGPLVTRAKFFQLCSPEDLTLGRSLMRVSSMFVDDLRLQPPYTEARYGSVRKAYVVFKDDHAIVEGFQRWMLHNYPVDEVMEIDGADHMALLSTPTELARCLADIAVKYAA

SEQ ID NO: 945 - protein, 529 aa, Thermosynechococcus elongatus BP-1
MDALALWQHYQDWLYYHPELEFYVDVSRMGLTPEVVHRLEPAFERAFEQMKELEAGAIANPDEGRMVGHYWLRDPDLAPSPELRSQIRDAIAQVKQFSQQVHSGAIAPPQGGHFTEILSIGIGGSALGPQFVAAALAPVHPPLNIHFLDNTDPAGFERVFAELGDRLRTTLVLVISKSGGTPETRNGMLEAQARFQRAGLAFADHAVAVTLPGSGLAQVAESNGWLAIFPMFDWVGGRTSELSTVGLLPAALQGIDIDDLLMGAKLMDQATRVPNIRQNPAALLALAWHHAGKGRGEKDMVILPYKDSLLLFSRYLQQLVMESLGKETDLNGNIVHQGIAVYGNKGTTDQHAYVQQLRDGLPNFFVTFIEVLRDGQEPSIEVEPGITAGDYLSGLLLGTRQALYEKNRPSLTVTIPEVTPKTVGALIALYERAVGLYGFLVNINAYHQPGVEAGKKAAAANLALQRQIVKVLEQSDEPLDLGAIAGAINAPDQLERIYLILRHLAANDRGIEQLGDPAQPSQLQFRWQR

SEQ ID NO: 946 - protein, 1131 aa, Sorghum bicolor
MSSSRPAHSSSSSSRTRQSSRARILAQTTLDAELNAEYEESGDSFDYSKLVEAQRSTPSEQQGRSGKVIAYLQHIQRGKLIQPFGCLLALDEKSFRVIAFSENAPEMLTTVSHAVPNVDDPPKLGIGTNVRSLFTDPGATALQKALGFADVSLLNPILVQCKTSGKPFYAIVHRATGCLVVDFEPVKPTEFPATAAGALQSYKLAAKAISKIQSLPGGSMEALCNTVVKEVFELTGYDRVMAYKFHEDEHGEVFAEITKPGIEPYLGLHYPATDIPQAARFLFMKNKVRMICDCRAKSVKIIEDEALSIDISLCGSTLRAPHSCHLQYMENMNSIASLVMAVVVNENEEDDEPGPEQPPQQQKKKRLWGLIVCHHESPRYVPFPLRYACEFLAQVFAVHVNKEFELEKQIREKSILRMQTMLSDMLFKEASPLSIVSGSPNIMDLVKCDGAALLYGDKVWRLQTAPTESQIRDIAFWLSEVHGDSTGLSTDSLQDAGYPGAASLGDMICGMAVAKITSKDILFWFRSHTAAEIKWGGAKHDPSDKDDNRRMHPRLSFKAFLEVVKMKSLPWSDYEMDAIHSLQLILRGTLNDALKPVQASGLDNQIGDLKLDGLAELQAVTSEMVRLMETATVPILAVDGNGLVNGWNQKVAELSGLRVDEAIGRHILTLVEDSSVSIVQRMLYLALQGKEEKEVRFELKTHGSKRDDGPVILVVNACASRDLHDHVVGVCFVAQDMTVHKLVMDKFTRVEGDYKAIIHNPNPLIPPIFGADQFGWCSEWNVAMTKLTGWHRDEVIDKMLLGEVFDSSNASCLLKSKDDFVRLCIIINSALAGEEAEKAPFGLFDRNGKYIECLLSVNRKVNADGVVTGVFCFIHVPSDDLQHALHVQQASEQTAQRRLKAFSYMRHAINKPLSGMLYSRETLKSTGLNEEQMRQVHVADSCHRQLNKILADLDQDNITDKSSCLDLDMAEFVLEDVVVSAVSQVLIGCQGKGIRVACNLPERFMKQKVYGDGIRLQQILSDFLFVSVKFSPVGGSVDISSKLTKNSIGENLHLIDFELRIKHQGAGVPAEILSQMYEEDNKEPSEEGLSLLVSRNLLRLMNGNIRHLREAGMSTFILTAELAAAPSAVGQ

SEQ ID NO: 947 - protein, 378 aa, Vibrio vulnificus YJ016
MRSILQQQKPPFIWLNIVIFVTSLILALVVTPWYGIKEGFGFEHLIWLLVTFSFTNLSITAGYHRLWSHKTYEAHPLLRVVFAIGGAFSLQNSALHWSSDHRMHHKFVDHHDKDPYSASRGFWFSHIGWMLRDYNQSTYNDYTNCRDLRKDPVIMWQHKYYVPLAIATNLGIPLLLGWYYQDIIGMLLVVGALRLTLSHHSTFFINSLAHIWGKQTFTDKNSARDNGFLAVLTFGEGYHNFHHIFENDYRNGIYWWQYDPTKWLIKSCSWLGLTRNLRLTPQMKIDKARAATRLKNALNQLAQRGEQESLKQQLQLEFDGLVATMKDYYDAKKQLLECKKQTALKKYEVALVKIRYQQAKEDLLSRYKRWHALTAHYA

SEQ ID NO: 948 - protein, 391 aa, Corynebacterium glutamicum ATCC 13032
MSTLETWPQVIINTYGTPPVELVSGKGATVTDDQGNVYIDLLAGIAVNALGHAHPAIIEAVTNQIGQLGHVSNLFASRPVVEVAEELIKRFSLDDATLAAQTRVFFCNSGAEANEAAFKIARLTGRSRILAAVHGFHGRTMGSLALTGQPDKREAFLPMPSGVEFYPYGDTDYLRKMVETNPTDVAAIFLEPIQGETGVVPAPEGFLKAVRELCDEYGILMITDEVQTGVGRTGDFFAHQHDGVVPDVVTMAKGLGGGLPIGACLATGRAAELMTPGKHGTTFGGNPVACAAAKAVLSVVDDAFCAEVARKGELFKELLAKVDGVVDVRGRGLMLGVVLERDVAKQAVLDGFKHGVILNAPADNIIRLTPPLVITDEEIADAVKAIAETIA

SEQ ID NO: 949 - protein, 424 aa, Saccharomyces cerevisiae
MSEATLSSKQTIEWENKYSAHNYHPLPVVFHKAKGAHVWDPEGKLYLDFLSAYSAVNQGHCHPHIIKALTEQAQTLTLSSRAFHNDVYAQFAKFVTEFFGFETVLPMNTGAEAVETALKLARRWGYMKKNIPQDKAIILGAEGNFHGRTFGAISLSTDYEDSKLHFGPFVPNVASGHSVHKIRYGHAEDFVPILESPEGKNVAAIILEPIQGEAGIVVPPADYFPKVSALCRKHNVLLIVDEIQTGIGRTGELLCYDHYKAEAKPDIVLLGKALSGGVLPVSCVLSSHDIMSCFTPGSHGSTFGGNPLASRVAIAALEVIRDEKLCQRAAQLGSSFIAQLKALQAKSNGIISEVRGMGLLTAIVIDPSKANGKTAWDLCLLMKDHGLLAKPTHDHIIRLAPPLVISEEDLQTGVETIAKCIDLL

SEQ ID NO: 950 - protein, 718 aa, Blumeria graminis
MRLSLWNLLGLSGLVVASCPYMSGEDQEYHISHIQARGTDSEFLDQFKVEDSNSYLTTDAGGPIQDDASLKAGERGPTLLEDFIFRQKIQHFDHERVPERAVHARGAGAYGTFTSYADWTNITAASFLNSKGKETPVFVRFSTVAGSRGSADTVRDVHGFATRFYTDEGNFDIVGNNIPVFFIQDAILFPDLVHAVKPSPDSEIPQAATGHDSAWDFFSQQPSTLHTLFWAMSGHGIPRSYRHMDGFGVHTMRLVTDDGKSKLVKWHWKTKQGKASLVWEEAQILAGKNPDFHRQDLWDDINAGNGPEWELGVQIVDEEDVQAFGFDLLDPTKFLPEELVPVTILGKMKLTDNPTNYFAETEQVMFQPGHIVRGVDFSDDPLLQGRIYSYLDTQLNRNGGPNFEQLPVNRPRTKVHNNNRDGAGQMFIHTNKAPYSPNSLSGGNPKQANQTKGRGFFTAPSRKVVGSLHRGTASSFADVWSQPRMFYNSLIPSEQQFLVNAIRFEISQLKSDLIKKNTLMQLNRVSNDLATRVAAVIGYKPLDPSPEFYTNATTDYVTIFGKPLPSVVGFTVGILASTSSSTSISQAAQLATSFSSRGIRAVIVGESLLSGTDQTYSSADATAFDAVVVTMGAETLFGPVAKPNTLFPSGRPSQILHDAYRWGKPVGAVSKASVVLEPLPGTKNQGGVYRVESVNELATSIAKGLETFRFVDRFPLDS

SEQ ID NO: 951 - protein, 453 aa, Aquifex aeolicus VF5
MWELDPKTLEKWDKEYFWHPFTQMKVYREEENLIFERGEGVYLWDIYGRKYIDAISSLWCNVHGHNHPKLNNAVMKQLCKVAHTTTLGSSNVPAILLAKKLVEISPEGLNKVFYSEDGAEAVEIAIKMAYHYWKNKGVKGKNVFITLSEAYHGDTVGAVSVGGIELFHGTYKDLLFKTIKLPSPYLYCKEKYGELCPECTADLLKQLEDILKSREDIVAVIMEAGIQAAAGMLPFPPGFLKGVRELTKKYDTLMIVDEVATGFGRTGTMFYCEQEGVSPDFMCLGKGITGGYLPLAATLTTDEVFNAFLGEFGEAKHFYHGHTYTGNNLACSVALANLEVFEEERTLEKLQPKIKLLKERLQEFWELKHVGDVRQLGFMAGIELVKDKEKGEPFPYGERTGFKVAYKCREKGVFLRPLGDVMVLMMPLVIEEDEMNYVIDTLKWAIKELEKEV

SEQ ID NO: 952 - protein, 167 aa, Blumeria graminis
MGPTTTLYDFMPKDKNGEPVPLEKYKGQVVLIVNTASKCGFTPQFEGLEKLYKSVSSTHPGKFTILGFPCNQFGGHDPGSNDEIQNFCRINYGVTFPMLGKVNVNGDTADPLFEWLKVEKPGIMGMKRVKWNFEKWLVSKDGKPIKRYSSTAGPEGFQSLIIEEIEK

SEQ ID NO: 953 - protein, 78 aa, Glycine max
MGLWMLLEGFLLLANSLAILNEDRFLGPRGWSMSEVSGNGQTKSLKGQIVGLIYATQFLRMPLIALNVLIIVVKMVSG

SEQ ID NO: 954 - protein, 486 aa, Bordetella pertussis Tohama I
MEDLRNHEFKNYIGGQWVACAAGKTYPNVNPADTDDIVGRFQASQAEDAAAAVAAAQAAFDGWRNLAVSKRAALMQRAADYLEAHAEQFGRELTREEGKALNLAKDEVLRSAQTIRFYAAEGQSFSGETFVNDDPDMVVYSQREPLGVVTVISPWNFPVSIPARKIAPALITGNTVVFKPSSDAPLSGLRLVEAFEQAGLPPGVLNLVTGSASAIGAAITQASQVRAVSFTGSTAAGEQIHRSVDMTTRTQMELGGKNPLIVMADADLDRAVDLVVKGGFSLSGQACTGTSRVLVDAPVKAAFTEKLLAKVKALKVGNSLEGSFDLGPLATARQLESVMRYIEVGKQEARLLCGGERLEGPGYERGYYLTPAVFADVTQQMRIAREEIFGPVIALIEVNGYEDAIAKANDTEYGLAAAIATTNAQYAHRFARDIQAGTVKINRTTTGNLINAPFGGLKRSSTSTFRESGRIGLEFYTQIKTVYRAG

SEQ ID NO: 955 - protein, 270 aa, Nitrosomonas europaea ATCC 19718
MKITFIGGGNMAGAMIGGLIHHGSTPSHICAVETDAMRRQQLAEACGVTVTASIPDGIHGSEIVILAVKPQQLRAVANQAAQFLQNKLVISIAAGVRASDLSQWLNRHEFVIRAMPNTPALIGEGITGLYALPLVDSRQKEQATTILEAIGTVIWVNEEAQLDAVTALSGSGPAYVFYFLEAMQEAGTQLGLTADTAKQLAMQTFLGATHLAAQSNDTLATLRMKVTSQGGTTEQALLSMEQADIRGAFIRAMHAACDRSRQMGEIFGRT

SEQ ID NO: 956 - protein, 1131 aa, Sorghum arundinaceum
MSSSRPAHSSSSSSRTRQSSRARILAQTTLDAELNAEYEESGDSFDYSKLVEAQRSTPSEQQGRSGKVIAYLQHIQRGKLIQPFGCLLALDEKSFRVIAFSENAPEMLTTVSHAVPNVDDPPKLGIGTNVRSLFTDPGATALQKALGFADVSLLNPILVQCKTSGKPFYAIVHRATGCLVVDFEPVKPTEFPATAAGALQSYKLAAKAISKIQSLPGGSMEALCNTVVKEVFELTGYDRVMAYKFHEDEHGEVFAEITKPGIEPYLGLHYPATDIPQAARFLFMKNKVRMICDCRAKSVKIIEDEALSIDISLCGSTLRAPHSCHLQYMENMNSIASLVMAVVVNENEEDDEPGPEQPPQQQKKKRLWGLIVCHHESPRYVPFPLRYACEFLAQVFAVHVNKEFELEKQIREKSILRMQTMLSDMLFKEASPLSIVSGSPNIMDLVKCDGAALLYGDKVWRLQTAPTESQIRDIAFWLSEVHGDSTGLSTDSLQDAGYPGAASLGDMICGMAVAKITSKDILFWFRSHTAAEIKWGGAKHDPSDKDDNRRMHPRLSFKAFLEVVKMKSLPWSDYEMDAIHSLQLILRGTLNDALKPVQASGLDNQIGDLKLDGLAELQAVTSEMVRLMETATVPILAVDGNGLVNGWNQKVAELSGLRVDEAIGRHILTLVEDSSVSIVQRMLYLALQGKEEKEVRFELKTHGSKRDDGPVILVVNACASRDLHDHVVGVCFVAQDMTVHKLVMDKFTRVEGDYKAIIHNPNPLIPPIFGADQFGWCSEWNVAMTKLTGWHRDEVIDKMLLGEVFDSSNASCLLKSKDDFVRLCIIINSALAGEEAEKAPFGLFDRNGKYIECLLSVNRKVNADGVVTGVFCFIHVPSDDLQHALHVQQASEQTAQRRLKAFSYMRHAINKPLSGMLYSRETLKSTGLNEEQMRQVHVADSCHRQLNKILADLDQDNITDKSSCLDLDMAEFVLEDVVVSAVSQVLIGCQGKGIRVACNLPERFMKQKVYGDGIRLQQILSDFLFVSVKFSPVGGSVDISSKLTKNSIGENLHLIDFELRIKHQGAGVPAEILSQMYEEDNKEQSEEGLSLLVSRNLLRLMNGNIRHIREAGMSTFILTAELAAAPSAVGQ

SEQ ID NO: 957 - protein, 182 aa, Ferroplasma acidarmanus
MIKFVTSNSHKYEEAKALFKSKNIELSWVKMEYEEIQAEDNELICRDSCMKLTEKIDSPFFIDDTGLYIKSLNGFPGPYASYVQSTLGNSRIMEIGAGSEAHFKTVIGFSMESEIYTFTGILNGHIAKKESGTNKFGYDPIFIPEGYDKTLAELSTEEKNIISHRGRALDKFMDFLSSRGIK

SEQ ID NO: 958 - protein, 201 aa, Glycine max
MAAARGLVLSRPVTFVTGNAKKLEEVRAILGNSIPFQSLKLDLPELQGEPEDISKEKARMAAVQVNGPVLVEDTCLCFNALKGLPGPYIKWFLQKLGHEGLNNLLMAYDDKSAYALCVFSFAAGSNSEPITFSGKTPGKIVPPRGPNDFGWDPIFEPDGYDQTYAQMPKEEKNKISHRSKSLALVKSHFAEAGYTFDIKNV

SEQ ID NO: 959 - protein, 1131 aa, Sorghum arundinaceum
MSSSRPAHSSSSSSRTRQSSQARILAQTTLDAELNAEYEESGDSFDYSKLVEAQRSTPSEQQGRSGKVIAYLQHIQRGKLIQPFGCLLALDEKSFRVIAFSENAPEMLTTVSHAVPNVDDPPKLGIGTNVRSLFTDPGATALQKALGFADVSLLNPILVQCKTSGKPFYAIVHRATGCLVVDFEPVKPTEFPATAAGALQSYKLAAKAISKIQSLPGGSMEALCNTVVKEVFELTGYDRVMAYKFHEDEHGEVFAEITKPGIEPYLGLHYPATDIPQAARFLFMKNKVRMICDCRAKSVKIIEDEALSIDISLCGSTLRAPHSCHLQYMENMNSIASLVMAVVVNENEEDDEPGPEQPPQQQKKKRLWGLIVCHHESPRYVPFPLRYACEFLAQVFAVHVNKEFELEKQIREKSILRMQTMLSDMLFKEASPLSIVSGSPNIMDLVKCDGAALLYGDKVWRLQTAPTESQIRDIAFWLSEVHGDSTGLSTDSLQDAGYPGAASLGDMICGMAVAKITSKDILFWFRSHTAAEIKWGGAKHDPSDKDDNRRMHPRLSFKAFLEVVKMKSLPWSDYEMDAIHSLQLILRGTLNDALKPVQASGLDNQIGDLKLDGLAELQAVTSEMVRLMETATVPILAVDGNGLVNGWNQKVAELSGLRVDEAIGRHILTLVEDSSVSIVQRMLYLALQGKEEKEVRFELKTHGSKRDDGPVILVVNACASRDLHDHVVGVCFVAQDMTVHKLVMDKFTRVEGDYKAIIHNPNPLIPPIFGADQFGWCSEWNVAMTKLTGWHRDEVIDKMLLGEVFDSSNASCLLKSKDDFVRLCIIINSALAGEEAEKAPFGLFDRNGKYIECLLSVNRKVNADGVVTGVFCFIHVPSDDLQHALHVQQASEQTAQRRLKAFSYMRHAINKPLSGMLYSRETLKSTGLNEEQMRQVHVADSCHRQLNKILADLDQDNITDKSSCLDLDMAEFVLEDVVVSAVSQVLIGCQGKGIRVACNLPERFMKQKVYGDGIRLQQILSDFLFVSVKFSPVGGSVDISSKLTKNSIGENLHLIDFELRIKHQGAGVPAEILSQMYEEDNKEQSEEGLSLLVSRNLLRLMNGNIRHIREAGMSTFILTAELAAAPSAVGQ

SEQ ID NO: 960 - protein, 362 aa, Penicillium citrinum
MGVAMTEGSFIPPVKQTILTVNDKDEVVIWDDAPTPKLPADQVYVRIHAVAVNPSDTKMRGDFATPFACLGTDYAGTVVAVGSEITHVKVGDRVFGAQNEMCPRTPEQGAFSQYTITRGRIWAKIPDSMTWEAAASLPAGISTTGLAMKLLGMPLPYSETKPSKKTYVLIYGGSTATATIAMQFMRLSGYTPIATCSHKNFDLAKKNGAEEVFDYRDADCAQKIRDYTRNNLAYALDCIINVESTSTCYKAIGRAGGRYVALNPFPEHAATRKMVTSDWTLGPTIFGEGSTWPAPYGCEASEEVRLFGTELWQVASRLVEEDKLYHHPLRVIDGGLEQVKQGMETVRNGELSGEKIVVRFSV

SEQ ID NO: 961 - protein, 418 aa, Clostridium thermocellum ATCC 27405
MAEWKIYTPEGVQDILQNECFFKKNLEDRIRKVFRASGYYEVETPIVEFYDVFSTEENIIPQETMFKFFDQQGRILVLRPDLTIPIARVAATKLKDAAYPLRISYIGNAFKYNELGGGKQKEFTQAGVEIIGVNTPEADAEVIATAIDAVKATGLENFQIDIGQVEFFKGLMEETGLSEEETEKMRVLIDRKDFLGIEELVEEHNIRDDLKELILDFPKLFGSTDVIDRVEKYPINERSIKALNNLRSIINILDDYGLSKYVSVDLGMVQSLNYYSGTIFRGFTYGVGFPILSGGRYDRLVEKFGKSSPATGFSMGINMVMMALDRQKVEFEKPRVDTLVCYREEGRKTAFQICETLRKQGLAVEVDINGGDFETARNYAALKGIGGILKVLDDENIEIHNLEKGEVSKVTISELLKA

SEQ ID NO: 962 - protein, 1131 aa, Sorghum arundinaceum
MSSSRPAHSSSSSSRTRQSSQARILAQTTLDAELNAEYEESGDSFDYSKLVEAQRSTPSEQQGRSGKVIAYLQHIQRGKLIQPFGCLLALDEKSFRVIAFSENAPEMLTTVSHAVPNVDDPPKLGIGTNVRSLFTDPGATALQKALGFADVSLLNPILVQCKTSGKPFYAIVHRATGCLVVDFEPVKPTEFPATAAGALQSYKLAAKAISKIQSLPGGSMEALCNTVVKEVFELTGYDRVMAYKFHEDEHGEVFAEITKPGIEPYLGLHYPATDIPQAARFLFMKNKVRMICDCRAKSVKIIEDEALSIDISLCGSTLRAPHSCHLQYMENMNSIASLVMAVVVNENEEDDEPGPEQPPQQQKKKRLWGLIVCHHESPRYVPFPLRYACEFLAQVFAVHVNKEFELEKQIREKSILRMQTMLSDMLFKEASPLSIVSGSPNIMDLVKCDGAALLYGDKVWRLQTAPTESQIRDIAFWLSEVHGDSTGLSTDSLQDAGYPGAASLGDMICGMAVAKITSKDILFWFRSHTAAEIKWGGAKHDPSDKDDNRRMHPRLSFKAFLEVVKMKSLPWSDYEMDAIHSLQLILRGTLNDALKPVQASGLDNQIGDLKLDGLAELQAVTSEMVRLMETATVPILAVDGNGLVNGWNQKVAELSGLRVDEAIGRHILTLVEDSSVSIVQRMLYLALQGKEEKEVRFELKTHGSKRDDGPVILVVNACASRDLHDHVVGVCFVAQDMTVHKLVMDKFTRVEGDYKAIIHNPNPLIPPIFGADQFGWCSEWNVAMTKLTGWHRDEVIDKMLLGEVFDSSNASCLLKSKDDFVRLCIIINSALAGEEAEKAPFGLFDRNGKYIECLLSVNRKVNADGVVTGVFCFIHVPSDDLQHALHVQQASEQTAQRRLKAFSYMRHAINKPLSGMLYSRETLKSTGLNEEQMRQVHVADSCHRQLNKILADLDQDNITDKSSCLDLDMAEFVLEDVVVSAVSQVLIGCQGKGIRVACNLPERFMKQKVYGDGIRLQQILSDFLFVSVKFSPVGGSVDISSKLTKNSIGENLHLIDFELRIKHQGAGVPAEILSQMYEEDNKEQSEEGLSLLVSRNLLRLMNGNIRHLREAGMSTFILTAELAAAPSAVGQ

SEQ ID NO: 963 - protein, 488 aa, Lycopersicon esculentum
MACSVDTLAPFLGPNTTNAVAAASYICNQFSGVSDRFVDTGYAIDSTYLLFSAYLVFSMQLGFAMLLAGSVRNTMNIMLTNVLDAAAGGLFYYLFGFAFALGGPSNGFIGRHFFGLKEIPSNSFDYMNFLYQWAFAIAAAGITSGSIAERTQFVAYLIYSSFLTGFVYPVVSHWFWTPDGWASPTNSNLLFGSGVIDFAGSGVVHMVGGIAGFYGALIEGPRIGRYDHTGRSVALRGHSASLVVLGTFLLWFGWYGFNPGSFNKILVTYGASGGYYGQWSAVGRTAVTTTLAGCTAALTTLFGKRILSGHWNVTDVCNGLLGGFAAITAGCSVVEPWAAIICGFVAALVLIGFNMLAEKFKYDDPLEAAQLHGGCGAWGIIFTGLFAKGEFVDQVYPGKPGRPHGLFMGGGGKLLGAHIIQILVIIGWVSATMGPLFYILHKFKLLRISSEDEMAGMDLTRHGGFAYYHEEDPKLGMQMRRIEPTTST

SEQ ID NO: 964 - protein, 460 aa, Lycopersicon esculentum
MDSSWEASVTDSINAIYLLFSAYLVFVMQLGFAMLCAGSVRAKNAMNIMLTNVVDAVVGSLSYYLFGFAFAFGDSNPFIGASYFALKDIPSSSYDYSFFLYQWAFAIAVAGITSGSIAERTQFTAYLVFSFFLTGFVYPVVAHWLWSSNGWLSPNSTYLLFGSGAIDFAGSGVVHLVGGIAGFWGSIVEGPRVGRFDAFGNPVKMRGHNATLVVLGTLLLWFGWFGFNPGSFNKILVAYPHMADQGNWTSVGRTAVTTTLAGSTAGIVTLFGRRLLVGHWDAMDVCNGVLGGFVAITSGCSVVEPWAAILCGFCAAWVLIGLNILALKFKFDDPLEAAQLHGGCGAWGLIFTGLFAKEEFVLQAYNSGKTQIIRPSGLILGGGWGLFGAQIVELLSIVVWVSLTMGPLFYLLQKLGILRISSDEEVAGLDISSHGGYAYDASQEESNARFYGEYLRMQQQ

SEQ ID NO: 965 - protein, 59 aa, Zea mays
GMTPRTAIFFFSFATIKTVDDHCGLWLPGNILQALFNNNCAYHDIHHQLYGNKGVQQDT

SEQ ID NO: 966 - protein, 455 aa, Staphylococcus aureus
MSQQDKKLTGVFGHPVSDRENSMTAGPRGPLLMQDIYFLEQMSQFDREVIPERRMHAKGSGAFGTFTVTKDITKYTNAKIFSEIGKQTEMFARFSTVAGERGAADAESDIRGFALKFYTEEGNWDLVGNNTPVFFFRDPKLFVSLNRAVKRDPRTNMRDAQNNWDFWTGLPEALHQVTILMSDRGIPKDLRHMHGFGSHTYSMYNDSGERVWVKLHFRTQQGIENLTDEEAAEIIATGRDSSQRDLFEAIEKGDYPKWTMYIQVMTEEQAKNHKDNPFDLTKVWYHDEYPLIEVGEFELNRNPDNYFMDVEQVAFASTNIIPGLDFSPDKMLQGRLFSYGDAQRYRLGVNHWQIPVNQPKGVGIENICPFSRDGQMRVVDNNQGGGTHYYPNNHGKFDSQPEYKKPPFPTDGYGYEYNQRQDDDNYFEQPGKLFRLQSEGAKERILQIQQMQWKA

SEQ ID NO: 967 - protein, 346 aa, Pirellula sp.
MKALLLTEYKNMQVTDVDEPEVGPDDVLVQVEACGICGSDIHGYDGSTGRRIPPLVMGHEAAGVVVQVGENVRDLELGARVTFDSMVSCGNCEFCREGHGNLCDNRMVLGVSCGDYRRHGAFAERISVPRRIVYRLPDTLPFEHAALVEAVSVAVHAAEVTPIKLGDTAVVVGAGMIGLLAVQAVRAAGATQVIAVDLNDKRLETAGTLGADVLLRADQVDVPEKVRELTGGRGADVALEVVGATPTVKTAIESVRKGGAVTLVGNVSPTIELPLQSVVTREIRLQGTCGCNGEYPQCIDLMNRGVINVEPLITAKISLADGPKWFDRLHAGDAEQMKVLVCPRSE

SEQ ID NO: 968 - protein, 197 aa, Glycine max
MSASRFIKCVTVGDGAVGKTCMLISYTSNTFPTDYVPTVFDNFSANVVVDGSTVNLGLWDTAGQEDYNRLRPLSYRGADVFLLAFSLISRASYENVAKKWIPELRHYAPGVPIILVGTKLDLRDDKQFFQDHPGAVPITTAQGEELRKLIGAPIYIECSSKTQQNVKAVFDAAIKVVLQPPKQKKKKRKGQKACSIL

SEQ ID NO: 969 - protein, 336 aa, Bacteroides thetaiotaomicron VPI-5482
MRIGILTSGGDCPGINATIRGVCKTAINHYGMEVIGIHSGFQGLLTKDIESFTDKSLSGLLNQGGTMLGTSREKPFKKGGVVSDVDKPALILQNIQEMGLDCVVCIGGNGTQKTAAKFAAMGVNIVSVPKTIDNDIWGTDISFGFDSAVSIATDAIDRLHSTASSHKRVMVIEVMGHKAGWIALYSGMAGGGDVILVPEIPYNIKNIGNTILERLKKGKPYSIVVVAEGILTDGRKRAAEYIAQEIEYETGIETRETVLGYIQRGGSPTPFDRNLSTRMGGHATELIANGQFGRMIALKGDDISSIPLEEVAGKLKLVTEDHDLVIQGRRMGICFG

SEQ ID NO: 970 - protein, 505 aa, Staphylococcus aureus
MSQQDKKLTGVFGHPVSDRENSMTAGPRGPLLMQDIYFLEQMSQFDREVIPERRMHAKGSGAFGTFTVTKDITKYTNAKIFSEIGKQTEMFARFSTVAGERGAADAERDIRGFALKFYTEEGNWDLVGNNTPVFFFRDPKLFVSLNRAVKRDPRTNMRDAQNNWDFWTGLPEALHQVTILMSDRGIPKDLRHMHGFGSHTYSMYNDSGERVWVKFHFRTQQGIENLTDEEAAEIIATDRDSSQRDLFEAIEKGDYPKWTMYIQVMTEEQAKNHKDNPFDLTKVWYHDEYPLIEVGEFELNRNPDNYFTDVEQAAFAPTNIIPGLDFSPDKMLQGRLFSYGDAQRYRLGVNHWQIPVNQPKGVGIENICPFSRDGQMRVVDNNQGGGTHHYPNNHGKFDSQPEYKKPPFPTDGYGYEYNQRQDDDNYFEQPGKLFRLQSEDAKERIFTNTANAMEGVTDDVKRRHIRHCYKADPEYGKGVAKALGIDINSIDLETENDETYENFEK

SEQ ID NO: 971 - protein, 207 aa, Oryza sativa
MSRRYDSRMTIFSPEGRLYQVQYAMEAIGNAGSALCVLAADGVVLVGEKKVTSKLLQTSCSAEKMYKIDSHLACAVAGIMSDANILFNTGRLHAQRYILSYQEPIPVEQLIQSLCHTKQGYTQFGGLRPFGVSFLFGSGWKAAAVGANSQATKSMLKQLLPLPSPRHPSPAADALLPPAKSEKGERDEEGRKEGKGKRERELADVAA

SEQ ID NO: 972 - protein, 205 aa, Zea mays
  unsure (1)..(205): unsure at all Xaa locations
MMAEAWTPVLLPATAPCFWQQDTHSVLWRRGDAWTVEENKLFEKALAQIDRNAPDRWEKVAAVLPWKTVDDVRSQYHALEKDVGVIEAGGLVPFPRYSGSVPPPSGFALXGLGAVATAGSGARAARRRXQERKKGVPWTEEEHKLFLQGLKKYGRGDWRNISRFSVRTRTPXTQVASHAQKYFNRQFNPASRNSKRKSIHDITTP

SEQ ID NO: 973 - protein, 167 aa, Saccharomyces cerevisiae
MQEFYSFSPIDENGNPFPFNSLRNKVVLIVNVASHCAFTPQYKELEYLYEKYKSHGLVIVAFPCGQFGNQEFEKDKEINKFCQDKYGVTFPILHKIRCNGQKQDPVYKFLKNSVSGKSGIKMIKWNFEKFVVDRNGKVVKRFSCMTRPLELCPIIEELLNQPPEEQI

SEQ ID NO: 974 - protein, 179 aa, Malus domestica x Pyrus communis
MASSMISSGTVATVSAPAQARMVAPFTGLKSSSAFPVTRKSNDITSIASNGGRVQCMQVWPPLGLKKFETLSYLPPLSTESLAKEVDYLLRKNWVPCLEFELEHGFVYRENNRSPGYYDGRYWTMWKLPMFGCTDSSQVLKELEEAKKAYPQSFIRIIGFDNVRQVQCISFIAYKPPGV

SEQ ID NO: 975 - protein, 174 aa, Thermosynechococcus elongatus BP-1
MPMKLIDRYGRLFGKVSLLDLGAGLILLCVLAGLFLLPGRSGTSLAQMTAAQPIEVDVLVLGLSTPTPQDLIPKGSTANFIIRNQPYGQITVKNVQVLPRTVTVSQPDGSVKALPDPRPEMAFSSNLLLTLEGRGQITNNGPVLGNTAIKVGTPVELEGKEYNFRASVIAVRPL

SEQ ID NO: 976 - protein, 252 aa, Exiguobacterium sp. 255-15
MVGAGSMSESLVKGWLDSGISPQMITMTNRADRSRLFALAEQYGVRTTAEEQVDQFDVVVLAMQPDGVLDYIKQQTWRTDQLVVSVAAHITPAEIEAHISCGAVCAMPNTPVAFRTGMTGLWFGDLVSDEKRQQATALFGRVGETVETNAATMPYLMAAAGCSPAFFYEIVGAMTPVLTKAGFDASSARRIIAQAMKGSAELLLHEERPTEELIKDVAAPGGPTDRGVRVLREHDLAQAMYEALMESAREKN

SEQ ID NO: 977 - protein, 434 aa, Oceanobacillus iheyensis HTE831
MNKSDQHWQELVNSIGNFLAPSMAKDHPNLPVVKAEGCYYYGTDGKEYLDFTSGIAVENVGHRHPKVVQAIKDSADHLVHGPSGVIIYESILKLAQELQEIMPPKLDNFFFANSGTEAIEGGLKLAKHVTKRPYVISFTGNFHGRSIGSLSVSTSKSKYRKYQQPSWLTYQLPYALPEYLPEGQDPEVFFAEKLEKDAESLFKHQVDPEEVACMILEPIMGEGGYIIPPKSWLQKVREICDRHGILLIFDEVQTGFGRTGDWFAAQTFGVTPDIMAIAKGIAAGMPLSATVASKELMDQWPLGSHGTTFGGNPIACAAARASLSIMKEEKLLNNAKTMGDYALTKLSGLKDKYEIVHEVRGIGLMLGIELRDPETGEPDGEAVMKALNGCLDEGVLFYLCGNAGEVIRMIPPLTINKEQIDQGIDVLDKVLAQM

SEQ ID NO: 978 - protein, 158 aa, Streptococcus intermedius
MTKIYDFSIFDQNNRSISLEIYKGNVLLIVNTATGCGLTPQYKGLQHLYTRYQNQGFEILDFPCNQFMGQAPGTAEEINRFCSLHYQTTFPRFAKVKVNGKEADPLYIWLKEQQAGPLGKRIEWNFTKFLINREGQVVKRFSSKAEPKEIEESLQKLL

SEQ ID NO: 979 - protein, 1131 aa, Sorghum arundinaceum
MSSSRPAHSSSSSSRTRQSSRARILAQTTLDAELNAEYEESGDSFDYSKLVEAQRSTPSEQQGRSGKVIAYLQHIQRGKLIQPFGCLLALDEKSFRVIAFSENAPEMLTTVSHAVPNVDDPPKLGIGTNVRSLFTDPGATALQKALGFADVSLLNPILVQCKTSGKPFYAIVHRATGCLVVDFEPVKPTEFPATAAGALQSYKLAAKAISKIQSLPGGSMEALCNTVVKEVFELTGYDRVMAYKFHEDEHGEVFAEITKPGIEPYLGLHYPATDIPQAARFLFMKNKVRMICDCRAKSVKIIEDEALSIDISLCGSTLRAPHSCHLQYMENMNSIASLVMAVVVNENEEDDEPGPEQPPQQQKKKRLWGLIVCHHESPRYVPFPLRYACEFLAQVFAVHVNKEFELEKQIREKSILRMQTMLSDMLFKEASPLSIVSGSPNIMDLVKCDGAALLYGDKVWRLQTAPTESQIRDIAFWLSEVHGDSTGLSTDSLQDAGYPGAASLGDMICGMAVAKITSKDILFWFRSHTAAEIKWGGAKHDPSDKDDNRRMHPRLSFKAFLEVVKMKSLPWSDYEMDAIHSLQLILRGTLNDALKPVQASGLDNQIGDLKLDGLAELQAVTSEMVRLMETATVPILAVDGNGLVNGWNQKVAELSGLRVDEAIGRHILTLVEDSSVSIVQRMLYLALQGKEEKEVRFELKTHGSKRDDGPVILVVNACASRDLHDHVVGVCFVAQDMTVHKLVMDKFTRVEGDYKAIIHNPNPLIPPIFGADQFGWCSEWNVAMTKLTGWHRDEVIDKMLLGEVFDSSNASCLLKSKDDFVRLCIIINSALAGEEAEKAPFGLFDRNGKYIECLLSVNRKVNADGVVTGVFCFIHVPSDDLQHALHVQQASEQTAQRRLKAFSYMRHAINKPLSGMLYSRETLKSTGLNEEQMRQVHVADSCHRQLNKILADLDQDNITDKSSCLDLDMAEFVLEDVVVSAVSQVLIGCQGKGIRVACNLPERFMKQKVYGDGIRLQQILSDFLFVSVKFSPVGGSVDISSKLTKNSIGENLHLIDFELRIKHQGAGVPAEILSQMYEEDNKEQSEEGLSLLVSRNLLRLMNGDIRHIREAGMSTFILTAELAAAPSAVGQ

SEQ ID NO: 980 - protein, 219 aa, Leymus triticoides
  unsure (1)..(219): unsure at all Xaa locations
GRRRVEMEDRHVAKLALGGDPEVALFAVFDGHGGAAEFAAENMPKFMAEXVRKVDGGGSEEIEGAVKKCYLKTDEEFLKREESGGACCVAALLQKGGLTVSNTGDCRAVLSRAGTAEALASDHRASCEDERERIENLGGFIVNNRGTWRVQDSLAVSRGIGDAHLKQWVVADPDTRTLLVDPQCEFLVLASDGLWDKVDNQEAIDIARPLCIGNDKASR

SEQ ID NO: 981 - protein, 1131 aa, Sorghum arundinaceum
MSSSRPAHSSSSSSRTRQSSRARILAQTTLDAELNAEYEESGDSFDYSKLVEAQRSTPSEQQGRSGKVIAYLQHIQRGKLIQPFGCLLALDEKSFRVIAFSENAPEMLTTVSHAVPNVDDPPKLGIGTNVRSLFTDPGATALQKALGFADVSLLNPILVQCKTSGKPFYAIVHRATGCLVVDFEPVKPTEFPATAAGALQSYKLAAKAISKIQSLPGGSMEALCNTVVKEVFELTGYDRVMAYKFHEDEHGEVFAEITKPGIEPYLGLHYPATDIPQAARFLFMKNKVRMICDCRAKSVKIIEDEALSIDISLCGSTLRAPHSCHLQYMENMNSIASLVMAVVVNENEEDDEPGPEQPPQQQKKKRLWGLIVCHHESPRYVPFPLRYACEFLAQVFAVHVNKEFELEKQIREKSILRMQTMLSDMLFKEASPLSIVSGSPNIMDLVKCDGAALLYGDKVWRLQTAPTESQIRDIAFWLSEVHGDSTGLSTDSLQDAGYPGAASLGDMICGMAVAKITSKDILFWFRSHTAAEIKWGGAKHDPSDKDDNRRMHPRLSFKAFLEVVKMKSLPWSDYEMDAIHSLQLILRGTLNDALKPVQASGLDNQIGDLKLDGLAELQAVTSEMVRLMETATVPILAVDGNGLVNGWNQKVAELSGLRVDEAIGRHILTLVEDSSVSIVQRMLYLALQGKEEKEVRFELKTHGSKRDDGPVILVVNACASRDLHDHVVGVCFVAQDMTVHKLVMDKFTRVEGDYKAIIHNPNPLIPPIFGADQFGWCSEWNVAMTKLTGWHRDEVIDKMLLGEVFDSSNASCLLKSKDDFVRLCIIINSALAGEEAEKAPFGLFDRNGKYIECLLSVNRKVNADGVVTGVFCFIHVPSDDLQHALHVQQASEQTAQRRLKAFSYMRHAINKPLSGMLYSRETLKSTGLNEEQMRQVHVADSCHRQLNKILADLDQDNITDKSSCLDLDMAEFVLEDVVVSAVSQVLIGCQGKGIRVACNLPERFMKQKVYGDGIRLQQILSDFLFVSVKFSPVGGSVDISSKLTKNSIGENLHLIDFELRIKHQGAGVPAEILSQMYEEDNKEQSEEGLSLLVSRNLLRLMNGNIRHLREAGMSTFILTAELAAAPSAVGQ

SEQ ID NO: 982 - protein, 221 aa, Leymus cinereus
GRRRVEMEDRHVAKLALGGDPEVALFAVFDGHGGKNAAEFAAQNMPKFMAEEVRKVDGGDSDEIEGAVKKCYLKTDEEFLKREESGGACCVTALLQKGGLTVSNTGDCRAVLSRSGTAATLTSDHRASREDERERIENLGGFVVNNRGTWRVQGSLAVSRGIGDAHLKQWVVADPDTRTLLVDPQCEFLVLASDGLWDKVDNQEAIDIARPLCIGNDKASR

SEQ ID NO: 983 - protein, 1131 aa, Sorghum x drummondii
MSSSRPAHSSSSSSRTRQSSRARILAQTTLDAELNAEYEESGDSFDYSKLVEAQRSTPSEQQGRSGKVIAYLQHIQRGKLIQPFGCLLALDEKSFRVIAFSENAPEMLTTVSHAVPNVDDPPKLGIGTNVRSLFTDPGATALQKALGFADVSLLNPILVQCKTSGKPFYAIVHRATGCLVVDFEPVKPTEFPATAAGALQSYKLAAKAISKIQSLPGGSMEALCNTVVKEVFELTGYDRVMAYKFHEDEHGEVFAEITKPGIEPYLGLHYPATDIPQAARFLFMKNKVRMICDCRAKSVKIIEDEALSIDISLCGSTLRAPHSCHLQYMENMNSIASLVMAVVVNENEEDDEPGPEQPPQQQKKKRLWGLIVCHHESPRYVPFPLRYACEFLAQVFAVHVNKEFELEKQIREKSILRMQTMLSDMLFKEASPLSIVSGSPNIMDLVKCDGAALLYGDKVWRLQTAPTESQIRDIAFWLSEVHGDSTGLSTDSLQDAGYPGAASLGDMICGMAVAKITSKDILFWFRSHTAAEIKWGGAKHDPSDKDDNRRMHPRLSFKAFLEVVKMKSLPWSDYEMDAIHSLQLILRGTLNDALKPVQASGLDNQIGDLKLDGLAELQAVTSEMVRLMETATVPILAVDGNGLVNGWNQKVAELSGLRVDEAIGRHILTLVEDSSVSIVQRMLYLALQGKEEKEVRFELKTHGSKRDDGPVILVVNACASRDLHDHVVGVCFVAQDMTVHKLVMDKFTRVEGDYKAIIHNPNPLIPPIFGADQFGWCSEWNVAMTKLTGWHRDEVIDKMLLGEVFDSSNASCLLKSKDDFVRLCIIINSALAGEEAEKAPFGLFDRNGKYIECLLSVNRKVNADGVVTGVFCFIHVPSDDLQHALHVQQASEQTAQRRLKAFSYMRHAINKPLSGMLYSRETLKSTGLNEEQMRQVHVADSCHRQLNKILADLDQDNITDKSSCLDLDMAEFVLEDVVVSAVSQVLIGCQGKGIRVACNLPERFMKQKVYGDGIRLQQILSDFLFVSVKFSPVGGSVDISSKLTKNSIGENLHLIDFELRIKHQGAGVPAEILSQMYEEDNKEQSEEGLSLLVSRNLLRLMNGDIRHLREAGMSTFILTAELAAAPSAVGQ

SEQ ID NO: 984 - protein, 1131 aa, Sorghum propinquum
MSSSRPAHSSSSSSRTRQSSRARILAQTTLDAELNAEYEESGDSFDYSKLVEAQRSTPSEQQGRSGKVIAYLQHIQRGKLIQPFGCLLAFDEKSFRVIAFSENAPEMLTTVSHAVPNVDDPPKLGIGTNVRSLFTDPGATALQKALGFADVSLLNPILVQCKTSGKPFYAIVHRATGCLVVDFEPVKPTEFPATAAGALQSYKLAAKAISKIQSLPGGSMEALCNTVVKEVFELTGYDRVMAYKFHEDEHGEVFAEITKPGIEPYLGLHYPATDIPQAARFLFMKNKVRMICDCRAKSVKIIEDEALSIDISLCGSTLRAPHSCHLQYMENMNSIASLVMAVVVNENEEDDEPGPEQPPQQQKKKRLWGLIVCHHESPRYVPFPLRYACEFLAQVFAVHVNKEFELEKQIREKSILRMQTMLSDMLFKEASPLSIVSGSPNIMDLVKCDGAALLYGDKVWRLQTAPTESQIRDIAFWLSEVHGDSTGLSTDSLQDARYPGAASLGDMICGMAVAKITSKDILFWFRSHTAAEIKWGGAKHDPSDKDDNRRMHPRLSFKAFLEVVKMKSLPWSDYEMDAIHSLQLILRGTLNDALKPVQASGLDNQIGDLKLDGLAELQAVTSEMVRLMETATVPILAVDGNGLVNGWNQKVAELSGLRVDEAIGRHILTLVEDSSVSIVQRMLYLALQGREEKEVRFELKTHGSKRDDGPVILVVNACASRDLHDHVVGVCFVAQDMTVHKLVMDKFTRVEGDYKAIIHNPNPLIPPIFGADQFGWCSEWNVAMTKLTGWHRDEVIDKMLLGEVFDSSNASCLLKSKDDFVRLCIIINSALAGEEAEKAQFGLFDRNGKYIECLLSVNRKVNADGVVTGVFCFIHVPSDDLQHALHVQQASEQTAQRRLKAFSYMRHAINKPLSGMLYSRETLKSTGLNEEQMRQVHVADSCHRQLNKILADLDQDNITDKSSCLDLDMAEFVLEDVVVSAVSQVLIGCQGKGIRVACNLPERFMKQKVYGDGIRLQQILSDFLFVSVKFSPVGGSVDISSKLTKNSIGENLHLIDFELRIKHQGAGVPAEILSQMYEEDNKEQSEEGLSLLVSRNLLRLMNGDIRHLREAGMSTFILTAELAAAPSAVGQ

SEQ ID NO: 985 - protein, 466 aa, Pseudomonas syringae pv. tomato str. DC3000
MLGYFAKSGNLFQSFPYDFDLYVIGAGSGGVRAARFSAGFGAKVAVAESRYLGGTCVNVGCVPKKLLVYGAHFADDFENSRGFGWTPGEAKFDWATLIVNKDSEINRLNDIYRNLLVNSGVTLHEGHAKIIDPHTVEVNGERHTAQNILIATGGWPQIPDIPGHEHAISSNQAFFLKELPKRVLVVGGGYIAVEFAGIFHGLGAKTTLLYRGDLFLRGFDGAVREHLQVELTRRGMDLQFNSDIERIDKQADGSLKATLKDGRQLEADCVFYATGRRPMLDNLGLENTGVKLNKKGFIEVDELYQTAEPSVLALGDVIGRVQLTPVALAEGMAIARRLFKPEQYRPVDYRMIPTAVFSQPNIGTVGMTEEDSREAGHEVVIFETRFRPMKLSLTECQERTLMKLVVDAKTDKVLGCHMVGPDAGEIVQGLAIALKSGATKRDFDETIAVHPTSAEEFVTMRTPVGS

SEQ ID NO: 986 - protein, 75 aa, Zea mays
MLAKGRKVAGRREEMSANYAFGPQDDDAIIKHRLLTRTTTTRGEPPLKKLQKKFMSFATEIEKDADNISDCERLY

SEQ ID NO: 987 - protein, 416 aa, ASPERGILLUS NIDULANS FGSC A4
MAYDRSYNPEFPCCFGSWWNTVSGPERCWGRDNGGPDHPVITSRYEGIVKKLHFQADDTVPTGRALCDIEVDDAQYPEDHPPTESNAETSPPARTTIDSQPVPRPTTPLPASPAAEIPSNGAKGRYATLATPAVRGLLKQLNVNIEDVKGTGKDGRVLKEDIHRFVAMRDAPSATPSLSQDADTAVNLTHIQTQMFKTMTRSLTIPHFGYADELNINNITALRKKIANDKSDPRKITFLSFVVKAVSLALNDYPILNAKLDTSNADKPQLIMRPRHNIGIAMDTPQGLIVPNIKDVGSRSILDVAQEISRLSALGKEGKLTPADLSGGTITVSNIGNIGGTYVSPVLVPNELAILGIGRARTIPVFDDAGQVTKGEVVNFSWSADHRVVDGATMARMASKVKELIESPERMLLSLR

SEQ ID NO: 988 - protein, 618 aa, Spinacia oleracea
MASSLSNLYSSTSLKPKISHLPTITKNPISGPKSLSFKPISSVARDTPADLSTSSSSSTNNLPSLQKKKADGSLEKDPRALWARYVEWLYQHKDLGLYLDVSRIGFSDEFVKEMEPRFEKAFKHMEGIEKGAIANPDEGRMVGHYWLRNSSLAPTTFLKNQIDVTLDRVWQFANDVISGKIKAPTGERFTHILSVGIGGSALGPQFVAEALAPDNPPLKIRFIDNTDPAGIDHQIAQLGPELATTLVMVISKSGGTPETRNGLLEVQKAFRDAGLVFAKQGVAITQENSLLDNTARIEGWIDRFPMFDWVGGRTSEMSAVGLLPAALQGIDIKEMLAGAALMDEATKIPVLRSNPAALLAMSWYWASDGVGSKDMVVLPYKDSLLLFSRYLQQLVMESLGKEFDLDGNKVNQGLTVYGNKGSTDQHAYIQQLRDGVHNFFATFIEVLRDRPPGHDWELEPGVTCGDYLFGMLQGTRSALYANNRESISVTVQEVTPRSVGAMVALYERAVGLYASLVNINAYHQPGVEAGKKAAAEVLALQKRVLAVLNEASCKDPVEPLTIEEVADHCHCPDDIEMIYKIIAHMAANDRVILAEGDCGSPRSIKAFLGECNVDELYA

SEQ ID NO: 989 - protein, 566 aa, Spinacia oleracea
MAPSTLICDTDSWQNLKTHVAEIKKTHLRDLMSDADRCKSMMVEFDGLLLDYSRQNATHDTMSKLFQLAEASHLKDKINQMFNGEHINSTENRSVLHVALRASRDAVINGDGKNVVPDVWQVLDKIRDFSEKIRSGSWVGVTGKPLTNVVAVGIGGSFLGPLFVHTALQTESEAAECAKGRQLRFLANVDPIDVAKNISGLNPETTLVVVVSKTFTTAETMLNARTLREWISSALGPAAVAKHMVAVSTNLTLVEKFGIDPKNAFAFWDWVGGRYSVCSAVGVLPLSLQYGFPIVEKFLKGASSIDQHFHSAPLEKNLPVLLGLLSLWNVSFLGHPARAILPYCQALEKFAPHIQQVSMESNGKGVSIDGVVLPFEAGEIDFGEPGTNGQHSFYQLIHQGRVIPCDFIGIAKSQQPVYLKGEVVSNHDELMSNFFAQPDALAYGKTQEELQKENISPHLVPHKTFTGNRPSLSLLLPSLTAYNVGQLLAIYEHRVAVEGFVWGINSFDQWGVELGKSLANQVRKQLHASRTNGEAVKGFNFSTTTVMAKYLQETSDVPAELPTKLP

SEQ ID NO: 990 - protein, 395 aa, Rickettsia rickettsii
MRVNIIVPSLGESITEATIAKWYKKEGDSVKTDELLLEIETEKVTLEVHAPCNGTIGKISKTDGANVAVGEEIGEINEGASVNTAGTNNESAKAQPVTQPTSEKPAVANNTLAPSVQKLVTENKLDPNNIKGTGRDGRITKGDVLATINTTTTSAPAISKSNEERVQRVRMSRLRKTIAQRLKDSQNTAAILTTFNEIDMSKVIALRNQYKEEFEKKHTVKLGFMSFFVKATIEALKLIPSVNAEIDGDDLVYKNYYDIGVAVGTEQGLVVPVVRDADKMGFAEVEKTIGILAKQAREGKLSMADLSGGTFSISNGGVYGSLLSTPIINPPQSGILGLHKTEERAVVIDGKIEIRPMMYIALSYDHRIIDGKEGVSFLVKIKQLIENPEKLLLNL

SEQ ID NO: 991 - protein, 536 aa, Glycine max
MDSNSSSPSPNNHASTTKINGFFHPKLGSQPATSSRSRLAMASPVNSDPKVVTGTAGYILEDVPHFTDYIPNLPTYPNPLQDNPAYSVVKQYFVHVDDSVPQKVVVHKDGARGVHFRRAGPRQKVYFEADEVQAAIVTCGGLCPGLNTVIRELVCGLHHMYGVKRVLGINGGYRGFYARNTITLTPKSVNDIHKRGGTVLGTSRGGHDTKKIVDSIQDRGINQVYIIGGDGTQKGASAIFEEVRRRGLKVSVVGIPKTIDNDIPVIDKSFGFDTAVEEAQRAINAAHVEAESVENGIGVVKLMGRNSGFIAMYATLASRDVDCCLIPESPFYLEGPGGLYEYIEKRLKENGHMVIVIAEGAGQELVSESVQSMSKQDASGNKLFQDVGLWISQKIRDHFAAQKTLPITLKYIDPTYMIRAIPSNASDNVYCTLLAQSAVHGAMAGYTGYTSGLVNGRQTYIPFYRITERQNHVVITDRMWARPLSSTNQPSFLDSKGDNEEKKEEEAALNQLPDGHCSKDTSLANKEINSIYPTTC

SEQ ID NO: 992 - protein, 1002 aa, Aquifex aeolicus VF5
MKVVIVGNGIAGTALVEEILRLSSGKDIRIQVFGDEKFIGYNRVLITEVLAGRKTLSEIYIKRWQWYEEKGVRLEIGKKVERLFPNKKILVTKDGEFYRYDKAIIATGSKPFIPPSIKGVNKKGVFTYRTAKDVFEILDYARVSKRAVVIGGGLLGIEVTKALRDIGLEVFLVHILDTLMEQQLDKTASELLRKDLEDMGIKVLLKKVTEEILGEKKAEGVRFSDGDELLADFVIIATGIRPNVEVGVNSGLKVNKGIVVNDYLETSASDIYAVGECIEHRGKTYGLVAPIMEQVKVCAHNVVHGNEKKYTGSLTYAMLKVAGVNLFSAGEINEKDGDEVVAFLDNGRSLYRKAVIRNNKIVGTILYGDVRGNNYLLDLIKSGKDISEERPYFLIKHILPKGTTGVEELKDNDIVCNCNAVTKGEIVKCIKEGCKTLEEIQERTKASTSCGSCIELVEEILKHYVKEKPKRVNKIEVIKKELHPFDLEFKKRLEKYFSEGELENIPEEDRDVRLKWYGIFYRKATPGYFMVRIRVPNGRLSYEQAKVVSHISEKFCRGEVEITSRQQLQIRWIKLKDLPEILEALNRVGLSTLQTGMDNVRNVTGDPLTGLAEDSLIDTLRLSQEITNIFLGKKKYADLPRKLNVAVLGSQTDCINALFNDVCFYLSEKDGKLGFNLYLGGKIGSGGPKKAIDMDMFVEPYEVPEVFKATLDIYSTFGNRENRSKNRLYFLLQEWGVERFREELEKRLYKAIPSKGKDLVNKTGEREGIINLRNGTYAVCVVVPAGKIKAKDFRQIAELARKYGSRELRLSVYQNIYIPNIPEENLNPLLGEEIFEKFSTVSSPFTMHLIACAGSDTCSFGVIPNKSDAVRVAKYLSERLKLDIPVRMHWSACAKGCGQHGSGDIGFVGTKTKLNGKAVLAVDVFVGGSPTKEGFKVIQGLPLDKVEEASYLLLNYYLENRLEGESFADFAHRVGVDKLKVVLTSLLQEGECKLLKPESISK

SEQ ID NO: 993 - protein, 190 aa, Triticum aestivum
  unsure (1)..(190): unsure at all Xaa locations
MAPTVMASSATSVAPFQGLKSTAGLPVSRRSNGASLGSVSNGGRIRCMQVWPIEGIKKFETLSYLPPLSTEALLKQVDYLIRSKWVPCLEFSKVGFIFREHNASPGYYDGRYWTMWKLPMFGCTDATXXNKVEEVKKEYLTLCPHIGSTHAQVHASLASSNCKIRKAKHSRRHLMHAPECLVPPLLLFPK

SEQ ID NO: 994 - protein, 389 aa, Oryza sativa (japonica cultivar-group)
MVAEAEVMHQPVPVLEVPYHRCVAKGVEEVAAAAAVAPPPVVEVEVAVQVPHMGLESAAGAPSISVDALQFVPSIRSGSFADIGPRRYMEDEHIRIDDLSAHLGSLLVCPLPSAFYGVFDGHGGLDAAAYMKRHAMRFLFEDSEFPQASQVDETYVQSVENSVRRAFLQADLALADDLDISRSSGTTALTALVFGRQLLVANAGDCRAVLCRRGVAMEMSRDHRANYAEECERVAASGGYIEDGYLNGVLSVTRALGDWDMKMPDGSISPLIAEPEFRQTMLTEDDEFLIMGCDGIWDVMTSQHAVSIVRRGLRQHDDPERCARELVMEAKRLETADNLTVIVVCFVSELGSPRQEQVGGQAGVARPRSCKSLSAEALCNLRSWLETDR

SEQ ID NO: 995 - protein, 214 aa, Ipomoea nil
IRHEGKSDSKCKTVGIQGIAWAFGGMIFALVYCTAGISGGHINPAVTFGLFLARKVSLTRLVYYIVMQCLGAICGAGVVKGFGKTLYNSKGGGANVVNPGYTKGDGLGAEIVGTFVLVYTVFSATDAKRNARDSHVPVLAPLPIGFAVFLVHLATIPITGTGINPARSLGAAIIYNNEHAWNDHWIFWVGPFVGAALAALYHQVVIRAIPFKSS

SEQ ID NO: 996 - protein, 1178 aa, Sorghum bicolor
MASGSRATPTRSPSSARPEAPRHAHHHHHHHSQSSGGSTSRAGGGGGGGGGGGGTAATATATATESVSKAVAQYTLDARLHAVFEQSGASGRSFDYSQSLRAPPTPSSEQQIAAYLSRIQRGGHIQPFGCTLAVADDSSFRLLAFSENAADLLDLSPHHSVPSLDSAAPPPVSLGADARLLFSPSSAVLLERAFAAREISLLNPLWIHSRVSSKPFYAILHRIDVGVVIDLEPARTEDPALSIAGAVQSQKLAVRAISRLQALPGGDIKLLCDTVVEHVRELTGYDRVMVYRFHEDEHGEVVAESRRDNLEPYLGLHYPATDIPQASRFLFRQNRVRMIADCHATPVRVIQDPGMSQPLCLVGSTLRAPHGCHAQYMANMGSIASLVMAVIISSGGDDEQTGRGGISSAMKLWGLVVCHHTSPRCIPFPLRYACEFLMQAFGLQLNMELQLAHQLSEKHILRTQTLLCDMLLRDSPTGIVTQSPSIMDLVKCDGAALYYHGKYYPLGVTPTESQIKDIIEWLTVCHGDSTGLSTDSLADAGYLGAAALGDAVCGMAVAYITPSDYLFWFRSHTAKEIKWGGAKHHPEDKDDGQRMHPRSSFKAFLEVVKSRSLPWENAEMDAIHSLQLILRDSFRDAAEGTSNSKAIVNGQVQLGELELRGINELSSVAREMVRLIETATVPIFAVDTDGCINGWNAKIAELTGLSVEEAMGKSLVNDLIFKESEEIVEKLLSRALRGEEDKNVEIKLKTFGSEQSNGAIFVIVNACSSRDYTQNIVGVCFVGQDVTGQKVVMDKFINIQGDYKAIVHNPNPLIPPIFASDENTSCSEWNTAMEKLTGWSRGEVVGKFLIGEVFGSFCRLKGPDALTKFMVVIHNAIGGQDYEKFPFSFFDKNGKYVQALLTANTRSKMDGKSIGAFCFLQIASAEIQQAFEIQRQQEKKCYARMKELAYICQEIKNPLSGIRFTNSLLQMTDLNDDQRQFLETCSACEKQMSKIVKDTTLQSIEDGSLVLEKSEFSFGDVMNAVVSQAMLLLRERDLQLIRDIPDEIKDASAYGDQFRIQQVLADFLLSMVRSAPSENGWVEIQVRPNVKQNSDGTDTELFIFRFACPGEGLPADIVQDMFSNSQWSTQEGVGLSTCRKILKLMGGEVQYIRESERSFFLIVLELPQPRPAADREIS

SEQ ID NO: 997 - protein, 510 aa, Pseudomonas syringae pv. tomato str. DC3000
MPLLNWSRHMVHLTAIGLISIPAAYAADTLTRDNGAAVGDNQNSQTAGAQGPVLLQDVQLLQKLQRFDRERIPERVVHARGTGVKGEFTASADISDLSKATVFKSGEKTPVFVRFSSVVHGNHSPETLRDPHGFATKFYTADGNWDLVGNNFPTFFIRDAIKFPDMVHAFKPDPRTNLDNDSRRFDFFSHVPEATRTLTLLYSNEGTPTGYRFMDGNGVHAYKLVNAKGEVHYVKFHWKTLQGIKNLDPKEVAQVQSKDYSHLTNDLVGAIKKGDFPKWDLYIQVLKPEDLAKFDFDPLDATKIWPDVPEKKIGQMVLNKNVDNFFQETEQVAMAPANLVPGIEPSEDRLLQGRVFSYADTQMYRLGANGLSLPVNQPKVAVNNGNQDGAMNSGKTTSGVNYEPSRLEPRPADEKARYSELPISGTTQQAKITREQNFKQAGDLYRSYNAKEQTDLVQSFGESLADTDTESKNIMLSFLYKADPTYGTRVTEAAKGDLAKVKSLAASLKD

SEQ ID NO: 998 - protein, 475 aa, Zea mays
MDMALASKASPPPWNATAAEQPIPKRDKAAANDSTYLNPQAHDSVLGIILGGGAGTRLYPLTKKRAKPAVPLGANYRLIDIPVSNCLNSNISKIYVLTQFNSASLNRHLSRAYGSNIGGYKNEGFVEVLAAQQSPDNPNWFQGTADAVRQYLWLFEEHNVMEFLILAGDHLYRMDYEKFIQAHRETNADITVAALPMDEKRATAFGLMKIDEEGRIIEFAEKPKGEQLKAMMVDTTILGLDDVRAKEMPYIASMGIYVFSKDVMLQLLREQFPEANDFGSEVIPGATSIGKRVQAYLYDGYWEDIGTIAAFYNANLGITKKPIPDFSFYDRFAPIYTQPRHLPPSKVLDADVTDSVIGEGCVIKNCKINHSVVGLRSCISEGAIIEDSLLMGADYYETEADKKLLAEKGGIPIGIGKNSCIRRAIIDKNARIGDNVKILNADNVQEAAMETDGYFIKGGIVTVIKDALLPSGTVI

SEQ ID NO: 999 - protein, 250 aa, Oryza sativa
MSRRYDSRTTIFSPEGRLYQVEYAMEAIGNAGSALGVLAADGVVLVGEKKVTSKLLQTSRSAEKMYKIDSHLACAVAGIMSDANILLNTARLHAQRYALSYQEPIPVEQLVQSLCDTKQGYTQFGGLRPFGVSFLFAGWDKHHGFQLYMSDPSGNYSGWKAAAVGANSQAAQSMLKQDYRDGLTREEAVALALKVLSKTMDSTSLTAEKLELAEVFLQPGTGEVQYQVCSPEAMGKLLAKAGLSQPAPEA

SEQ ID NO: 1000 - protein, 666 aa, Aquifex aeolicus VF5
MKRFQCPYCGVGCGLYINEKGKVKGDFEHPANLGDICKKPLYLPKVLNRGRIAKPMYRENKSHSFREISWEEAYEILKEKLISFSPDETYFYLSGQLLTEDIYVANKFVKGFLRTNNVDANSRLCMASAVTAYKLAFGSDGVPCTYEDVDDADAFLFIGSNAAVAHPVLFKRVLKRRKEEEKVIIVTVDPLETETAKRSDVFIQIKAGTDTVFLNSVLYVLHKEGWIDYRFIYNYTEGFEEALEVAMKFPPDVAASICSVKPEDVYLVAELFAHSKKLISFWCQGLNQSLNGTMKNLALINLHLATGRLNEKGCPFSLTGQPNAMGGREVGYLTNGLPGYRDVRNKADRAFMEKFWGVKGIKKEPGPTITEAIDMILKDRIKFLWVVCTNPAVSLPNLEKVKRALEKVFLVVQDAYWNDTCEFANLILPAAQLGEKEGVMTGSDRTVTFCERFSEPFGESKPDWLIFTELARKMGAEELFPYSSPKEIFEEFKASTKGRLCDMSNLSYENLPARWGKRWLYEDLKFPTESGKARFHPARVDVAAEEGMFILLTGRLKNNWHTMTRTGKSPELLKGEIPPFVIMNPRDAEELGIEEGEEVILSAKGKEITRVVRFGNVKRGHIFAPFGYPSEYGEPTNLLTSDRTDPYSKEPDLKYSGVDVFVKVNR

SEQ ID NO: 1001 - protein, 421 aa, Mesorhizobium loti
MADLKRTQPLARDAMAYVLAGGRGSRLKELTDRRAKPAVYFGGKTRIIDFALSNALNSGIRRLGVATQYKAHSLIRHLQRGWNFLRPERNESFDILPASQRVSETQWYEGTADAVYQNIDIIEAYGPEYMVILAGDHIYKMDYELMLRQHVDAGADVTVGCLEVPRMEATGFGVMHVDAKDNIIAFVEKPADPPGIPGNPEFALASMGIYVFKTKFLMEQLRRDAADPGSSRDFGKDIIPYIVQHGKAIAHRFTKSCVRSTMENEAYWRDVGTVDAYWEANIDLTDVTPELDLYDRDWPIWTYAELKPPAKFVHDEDGRRGSAVSSLVSGDCIVSGASLKKSLIFTGARINSYSALEEVVMLPDVHVGRNAKLKRVVIDHGVRIPEGLVVGEDPVLDAKRFRVSEKGICLVTQDMINKLGL

SEQ ID NO: 1002 - protein, 346 aa, Streptomyces coelicolor A3(2)
MTTVAAYAAPAAKAPLERTTIERREVREHDVLIDIKFAGICHSDIHQAREGWGEAIFPMVPGHEIAGIVSEVGPGVTRFKVGDRVGVGCMVDSCRECENCKAGREQYCTSGNTGTYNAVGRDGEVTYGGYSEKVVVDENFVLGIPEGIALDEAAPLLCAGITTYSPLKRWNAGPGKKVAVVGLGGLGHMAVKLAHALGAEVTVLSQSLRKKDDGLKLGADHYYATSDPATFEELSGTFDLIVSTVSAPLDLGAYLGLLKTEGTLANVGAPEEPVSLNLFALLGGGKSLSGSMIGGIAETQEMLDFCAEHGIGAEIELIAASEINEAYERVLSSDVRYRFVIDTATI

SEQ ID NO: 1003 - protein, 178 aa, Zea mays
  unsure (1)..(178): unsure at all Xaa locations
EWKMVRPDLGRIEKWVLRKAFDDEEQPFLPKHILYRQKEQFSDGVGYSWIDGLKAHATSNVTDKMLSNVKFIFPHNTPTTKEAYYYRMIFERFFPQKSAILTVPGGPSVACSTTKAIEWDAQWSGNLDPSGRAALGVHLAGYEHQHDPEHVPAAIAAGSGKKPRTIRVXASPGVAIEG

SEQ ID NO: 1004 - protein, 119 aa, Triticum aestivum
  unsure (1)..(119): unsure at all Xaa locations
ARVRLSPLLAFSALRSIRFDLFRVRVQAAAVGVTIQSVKARQIFDSRGNPTVXVDVCCSDGTFARAAVSSGASTGVYEALELRDGGSGYLGKGVSKAGDNENWSMAPALIGEDPTGNTG

SEQ ID NO: 1005 - protein, 288 aa, Staphylococcus aureus subsp. aureus MW2
MKKIKKAIIPAAGLGTRFLPATKAMPKEMLPILDKPTIQYIVEEAARAGIEDIIIVTGRHKRAIEDHFDSQKELEMVLKEKGKSELLEKVQYSTELANIFYVRQKEQKGLGHAISSARQFIGNEPFAVLLGDDIVESEVPAVKQLIDVYEETGHSVIGVQEVPEADTHRYGIIDPLTKNGRQYEVKKFVEKPAQGTAPSNLAIMGRYVLTPEIFDYLKTQKEGAGNEIQLTDAIERMNNDNQVYAYDFEGERYDVGEKLGFVKTTIEYALKDDSMREELTRFIKELGL

SEQ ID NO: 1006 - protein, 267 aa, Citrus sinensis
MEEVVGMEEKHFVLVHGVNHGAWCWYKLKARLVAGGHRVTAVDLAASGINMKRIEDVHTFHAYSEPLMEVLASLPAEEKVILVGHSLGGVTLALAGDKFPHKISVAVFVTAFMPDTTHRPSFVLEQYSEKMGKEDDSWLDTQFSQCDASNPSHISMLFGREFLTIKIYQLCPPEDLELAKMLVRPGSMFIDNLSKESKFSDEGYGSVKRVYLVCEEDIGLPKQFQHWMIQNYPVNEVMEIKGGDHMAMLSDPQKLCDCLSQISLKYA

SEQ ID NO: 1007 - protein, 369 aa, Bradyrhizobium japonicum USDA 110
MKTRAAVAFEAKKPLEIVEVDLEGPKAGEVLVEIKATGICHTDAYTLDGFDSEGIFPSILGHEGAGIIREIGPGVTSVKPGDHVIPLYTPECRQCKSCLSQKTNLCTAIRATQGKGVMPDGTSRFSYKGKPIYHYMGCSTFSNFTVLPEIAVAKIREDAPFDKSCYIGCGVTTGVGAVVNTAKVEPGANVVVFGLGGIGLNVIQGAKMAGADKIIGVDVNDSKEDWGRRFGMTHFVNPKKITGDIVPHLVNLTDGGADYTFDCTGNTTVMRQALEACHRGWGTSIIIGVAEAGKEIATRPFQLVTGRNWRGTAFGGARGRTDVPKIVDWYMNGKIQIDPMITHVLKLEEINKGFDLMHEGKSIRSVVVY

SEQ ID NO: 1008 - protein, 167 aa, Mesembryanthemum crystallinum
QSIDIDGKKVKAQIWDTAGQERFRAVTSAYYRGAVGALVVYDITRRTTFDSISRWLDELKTHSDTTVARMLVGNKCDLDDIRAVSTDEGKSLAEEHGLFFIETSAKDSTNVKTSFEIVIKEIYCSVSRKVLNSDSYKAELSVNRVSLVNDDKQKQNQGYISSSCCSG

SEQ ID NO: 1009 - protein, 162 aa, Zea mays
  unsure (1)..(162): unsure at all Xaa locations
SSFVADYKDDCVGKHGVRLSVMSXCDKGAVSALXNDPIVNGVSYGDDIIYRDRVGISDAVGTWKAVVVPVMSXVHTMNSNDIYKGIINLSKKRTKRALSIYDMAGDTFTIXNGGVYGSFLSSPIINHPQVSIMGRLSSVHHPVVVNGVIRARAIMYLGRDHA

SEQ ID NO: 1010 - protein, 582 aa, Oryza sativa (japonica cultivar-group)
MVLFSVTKKATTPFDGQKPGTSGLRKKVTVFQQPHYLQNFVQSTFNALPADKVKGATIVVSGDGRYFSKDAVQIITKMAAANGVRRVWVGQNSLMSTPAVSAVIRERVGADGSKATGAFILTASHNPGGPTEDFGIKYNMENGGPAPESVTDKIFSNTTTITEYLIAEDLPDVDISVVGVTTFSGPEGPFDVDVFDSTIDYIKLMKTIFDFESIKKLLASPKFTFCYDALHGVAGTYATRIFVEELGAAESSLLNCVPKEDFGGGHPDPNLTYAKELVDRMGLGKSSNAEPPEFGAAADGDADRNMILGKRFFVTPSDSVAIIAANAVQSIPYFSSGLKGVARSMPTSAALDVVAKNLNLKFFEVPTGWKFFGNLMDAGMCSICGEESFGTGSDHIREKDGIWAVLAWLSILAFKNKDNLGGDKLVTVEDIVRQHWGTYGRHYYTRYDYENVDAGAAKELMANLVSMQSSLSDVNKLIKEIRSDVSDVVAADEFEYKDPVDGSVSKHQGVRYLFGDGSRLVFRLSGTGSVGATIRVYIEQYEKDSSKTGRDSQDALAPLVDVALKLSKMQEYTGRSAPTVIT

SEQ ID NO: 1011 - protein, 1178 aa, Sorghum bicolor
MASGSRATPTRSPSSARPEAPRHAHHHHHHHSQSSGGSTSRAGGGGGGGGGGGGTAATATATATESVSKAVAQYTLDARLHAVFEQSGASGRSFDYSQSLRAPPTPSSEQQIAAYLSRIQRGGHIQPFGCTLAVADDSSFRLLAFSENAADLLDLSPHHSVPSLDSAAPPPVSLGADARLLFSPSSAVLLERAFAAREISLLNPLWIHSRVSSKPFYAILHRIDVGVVIDLEPARTEDPALSIAGAVQSQKLAVRAISRLQALPGGDIKLLCDTVVEHVRELTGYDRVMVYRFHEDEHGEVVAESRRDNLEPYLGLHYPATDIPQASRFLFRQNRVRMIADCHATPVRVIQDPGMSQPLCLVGSTLRAPHGCHAQYMANMGSIASLVMAVIISSGGDDEQTGRGGISSAMKLWGLVVCHHTSPRCIPFPLRYACEFLMQAFGLQLNMELQLAHQLSEKHILRTQTLLCDMLLRDSPTGIVTQSPSIMDLVKCDGAALYYHGKYYPLGVTPTESQIKDIIEWLTVCHGDSTGLSTDSLADAGYLGAAALGDAVCGMAVAYITPSDYLFWFRSHTAKEIKWGGAKHHPEDKDDGQRMHPRSSFKAFLEVVKSRSLPWENAEMDAIHSLQLILRDSFRDAAEGTSNSKAIVNGQAQLGELELRGINELSSVPREMVRLIETATVPIFAVDTDGCINGWNAKIAELTGLSVEEAMGKSLVNDLIFKESEEIVEKLLSRALRGEEDKNVEIKLKTFGSEQSNGAIFVIVNACSSRDYTQNIVGVCFVGQDVTGQKVVMDKFINIQGDYKAIVHNPNPLIPPIFASDENTSCSEWNTAMEKLTGWSRGEVVGKFLIGEVFGSFCRLKGPDALTKFMVVIHNAIGGQDYEKFPFSFFDKNGKYVQALLTANTRSKMDGKSIGAFCFLQIASAEIQQAFEIQRQQEKKCYARMKELAYICQEIKNPLSGIRFTNSLLQMTDLNDDQRQFLETCSACEKQMSKIVKDATLQSIEDGSLVLEKSEFSFGDVMNAVVSQAMLLLRERDLQLIRDIPDEIKDASAYGDQFRIQQVLADFLLSMVRSAPSENGWVEIQVRPNVKQNSDGTDTELFIFRFACPGEGLPADIVQDMFSNSQWSTQEGVGLSTCRKILKLMGGEVQYIRESERSFFLIVLELPQPRPAADREIS

SEQ ID NO: 1012 - protein, 613 aa, Arabidopsis thaliana
MASLSGLYSSSPSLKPAKNHSFKALPAQSRDSFSFPHTSKPTNLPLTLSSARSVARDISHADSKKELLKDPDALWKRYLDWFYQQKELGLYLDISRVGFTDEFVAEMEPRFQAAFKAMEDLEKGSIANPDEGRMVGHYWLRNSKLAPKPTLKTLIENTLDSICAFSDDIISGKIKPPSSPEGRFTQILSVGIGGSALGPQFVAEALAPDNPPLKIRFIDNTDPAGIDHQIAQLGPELASTLVVVISKSGGTPETRNGLLEVQKAFREAGLNFAKQGVAITQENSLLDNTARIEGWLARFPMYDWVGGRTSIMSAVGLLPAALQGINVREMLTGAALMDEATRTTSIKNNPAALLAMCWYWASNGVGSKDMVVLPYKDSLLLFSRYLQQLVMESLGKEFDLDGNTVNQGLTVYGNKGSTDQHAYIQQLRDGVHNFFATFIEVLRDRPPGHDWELEPGVTCGDYLFGMLQGTRSALYANGRESISVTIQEVTPTSVGAIIALYERAVGLYASIVNINAYHQPGVEAGKKAAAEVLALQKRVLSVLNEATCKDPVEPLTLEEIADRCHAPEEIEMIYKIIAHMSANDRVLIAEGNCGSPRSIKVYLGECNVDDLYA

SEQ ID NO: 1013 - protein, 205 aa, Triticum aestivum
  unsure (1)..(205): unsure at all Xaa locations
MPTKRSVGTLGEKDLSGKKVLLRADLNVPLDDGQRIADDNRIRASVPTINFLMGKGAKVILASHLGRPKGVTPKYSLKPLVPRLSELLGVDVVMANDCIGEEVEKLATALPDGGVLLPGVSGVSCMGGSARNDPXSAQETTSVADLXMLNDPFXTAHXRHMLQTEGXTNYFXPAVPGSLMQEGLDXLLTVSNPTTICGFKCQLIG

SEQ ID NO: 1014 - protein, 397 aa, Thermococcus litoralis
MVKASKRAMSIEYAIRDVVLPARELEKQGIKIIKLNIGDPVKFDFQPPEHMKKAYCEAIMEGHNYYGDSEGDRELREAIVEREKKKNGVDITPEDVQVTAAVTEALQFIFGALIDGGEEILIPGPSYPPYVGLVKFYGGVPKAYRTVEEEGWQPDIDDMRKKITEKTKAIAVINPNNPTGALYEKKTLQEIIDLAGEYDLPIISDEIYDLMTYEGKHVSPGSLTKDVPVIVMNGLSKVYFATGWRLGYMYFVDPENKLAEVREAIGKLARIRLCPNTPAQKAAIAGLRGPMDYLEEYMAKLKERRDYIYKRLNEMPGISTQKPQGAFYIFPKIEEGPWKSDKEFVLDVLHNAHVLFVHGSGFGEGGEMHFRSIFLAPVPVLEEAMDNLEKFMKERLG

SEQ ID NO: 1015 - protein, 237 aa, Abies beshanzuensis
YTYNLRNKGPEDVILRVIYCGICHSDLVQMRNEMGMSHYPMVPGHEVVGIVTEIGSEVKKFKVGEQVGVGCIVGSCRKCGNCNESMEQYCSKRIWTYNDVNHDGTPTQGGFASTMVVDQMFVVRIPDNLPLEQAAPLLCAGVTVYSPLKHFGMTESGKRCGILGLGGVGHMGVKIAKAFGLHVTVISSSDKKKEEALEVLGADAYLVSKDAEKMQEAAESLDFIMDTIPVAHPLEPY

SEQ ID NO: 1016 - protein, 221 aa, Abies holophylla
YTYNLRNKGPEDVILRVIYCGICHSDLVQMRNEMGMSNYPMVPGHEVVGIVTEIGSEVKKFKVGEQVGVGCIVGSCRKCGNCNESMEQYCSKRIWTYNDVNHDGTPTQGGFASTMVVDQMFVVRIPDNLPLEQAAPLLCAGVTVYSPLKHFGMTESGKRCGILGLGGVGHMGVKIAKAFGLHVTVISSSDKKKEEALEVLGADAYLVSKDAEKMQEAAESL

SEQ ID NO: 1017 - protein, 231 aa, Abies holophylla
RNKGPEDVILRVIYCGICHTNLVEMRNKMGTSHYPMVPGHEVVGIVTEMGSEVKKFKVGEHVGVGRIVGSCGKCCNCNESMEQYCSKRIWTYNDVYHDGSRTQGGFASTMVVDQRFVVRIPENLPLEQAAPLLCAGVTVYSPMKHFGMTEAGKRCGILGLGGLGHMGVKFAKAFGLHVTVISSSDKKKEEALEILGADAYLVTEDAEKMQEAAESLDFIIDTIPVTHPLEP

SEQ ID NO: 1018 - protein, 773 aa, Mycobacterium bovis AF2122/97
MIGNGGAGGSGAPGAIGGAGGPAGLIGVGGAGGAGGDSAVAGVIGGAGGAGGAALLFGAGGAGGAGGSGGSGAAGGAGGAGGAGGLFASGGSGGFGGFASTGTGGAGGTGGAGGLFASGGVGGTGGGAGSGGTGGVGGTGGAGGLFASGGAGGAGGSGGTGGAGGTGGAGGLFGAGGAGGLGGQGNHTGGHGGAGGSAGLLALGDGGAGGAGGAATTGTGGAGGAGGKAGLLFGSGGAGGSGGAAGTFGDTGNSGGAGGAGGKAGLLFGSGGAGGSGGAGGFANGSTGGAGGAGGGAGLIGNGGNGGSGGTSVATGGAGNGGAGGAGGGAGLIGNGGNGGSGGMGDAPGGTGVGGIGGLLLGLDGANAPASTNPLHTAQQQALAAVNAPIQAVTGRPLIGNGANGAPGSGAPGGHGGWLFGGGGTGGSGVSGGAGGDGGAGGILFGAGGAGGAGGAVTGTGATGGSGGAGGGALLFGAGGAGGAGGSSGIGGFAAGGAGGPGGAGGLFNGGGAGGAGGSGVSGGAGGEGGAGGAGGLFAGGGIGGAGGFGGFRGGEGGAGGAGGLFAGGGAGGAGGSGNNVGGAGGAGGVGGLFGAGGAGGSGGGGSVAGDGGAGGNAGLLAPGLAGGAGGGGGQGFDTGGAGGPGGDAGLLVGSGGVGGAGGFGLTTGGPGAAGGDAGLLFGSGGAGGAGGSGRTDLGGAGGAGGKAGLIGNGGNGGAGGAGGAGGPGGAAFGLGNGGNGGNGGTGTSAGSPGAGGAGGSLIGAEGLPGLLP

SEQ ID NO: 1019 - protein, 831 aa, Mycobacterium bovis AF2122/97
MSFVIAAPDLVAMATEDLAGIGASLTAANAAAAVPTSGLLAAAGDEVSAAIAALFSSHGQQYQAMSAQAAAFHARFVQALAGAMGAYAAAEAANASPLQTLEQGLLGAINAPAAALSGRPFIGNGTNGAPGTGEAGGPGGWLLGNGGNGGSGAPGQTGGAGGAAGLLGHGGTGGAGGTGASGGKGGTGGWLWGSGGAGGAGGSGGGSGGAGGNALMFGIGGNGGAGGAASGVGNGGVGGAGGAGGALVAIGGAGGAGGAATTGTGGAGGAGSNALGLFLGLGGSGGQGGDSAMGSGGAGGAGGSGGAASPFGIDIGIGGAGGHGGAGTNGGAGGAGGAGGSSGTVFALDLSWGGAGGNGGAATTGTGGAGGTGGFAVAPDFIGFGAAYGGAGGLGGAATGAGGTGGTGGVGAGGFAALGVGVGGAGGAGGAATETGGIGGAGGLGVGLLGGAGGAGGPGGAASAGSGGHGGTGGDALGLIGAGIGGVGGVGGAATDTGGNGGAGGSGTGLLGGVGGAGGHGGGASVGTGGSGGAGGDGFGFVGAGGNGGNAGTGVGVNGANGGNGGSATGALAAVGGAGAAGGDATSGTGGFGGAGGSARGLIFALGGAGAAGGDASTGVGGPGGPGGTGTASSPFGIAIAIGGAGAQGGAGTSGATGGAGGDGVFEGIAVLGLGFGGAAGAGGAATGDGATGGAGGFGGAGAGIANFLGFSVLHGGAGGAGGTATGTGGNGGAGGGGGLSSPVILGIGIGGAGGNGGDALGLVGVGGNGGNAGTGFGANTGGNGGDTTIVVNGMLAPSTLGYGGNGVNGGAGGTGGKAGVFGAPGQNGLP

SEQ ID NO: 1020 - protein, 245 aa, Metasequoia glyptostroboides
YTYNLRNKGPEDVIVRVIYCGICHSDLIQMRNEMGMSHYPMVPGHEVVGIVTELGSEVKKFKVGEHVGVGCIVGSCRKCGNCNESMEQYCSKRIWTYNDVNHGGTPTQGGFASSMVVDQMFVVRIPENLPLEQAAPLLCAGVTVYSPMKHFGMTEAGKRCGILGLGGVGHMGVKIAKAFGLHVTVISSSDKKKEEALEVLHADAYLVSKDAEKMQEAAESLDYILDTIPVAHPLEPYLSLLKTNG

SEQ ID NO: 1021 - protein, 548 aa, Streptomyces coelicolor A3(2)
MAQVAMVMNLDKCIGCHTCSVTCKQTWTNRTGTEYVWFNNVETRPGQGYPRGHEDQEKWKGGWHLKGGRLVPRTGGRARRLARLFANPELPTLDDYYQPWTYDYENLTTAPLGDDIPTAPPRSAIDGRPTEITWGPNWDDDLGGGPAQLAADPLLARMSEQVRLDYERAFMFYLPRICEHCLNPSCVAVCPSGALYKRVEDGIVLVDQDRCRGWRMCVSGCPYKKVYFNHSTGKAEKCTFCYPRIEAGDPTVCSETCVGRLRYLGVMLYDPDKVGAAASVTDEKDLYEAQLGCFLDPDDPEVARAAQASGIPHDWVEAARRSPVHALITRYRVALPLHPEYRTMPMVWYVPPLSPVVDALTGTGHDGEDPAALFGAIDTLRIPLGYLAELFTAGDPGPVEAALCRLAAMRSHMRRVNLGEEQDPRIAEAVGLDEPGILELYRLLALAKYDERYVIPTAYTGSVPDPGGTGAGCSLDGVGGPGMMPEGAGGGPGFGEFDPEAFHAPPTAGSGTSSALRGRVNLLNWNGKGRPNGLFPRARGAVRTEPEL

SEQ ID NO: 1022 - protein, 265 aa, Zea mays
MEFISDEALAIFVPILVYWVYSGMYMALGQSMDRYRLHPRKEEDSKNLVSKREVIKGVLLQQLVQAGVAAVVFTVTGDSSRVSSSYDNKEAAHQASYYLLLTVARQFGVAMVVLDGWQYAWHRYMHLNRFLYRHIHSWHHRLVVPYAFGSQYNHPVEGLLLDTLGGALAFVVSGMSPRASIFFFSLCTVKGVDDHCGLWLPGNLFHLFFWNNTAYHDVHHQLRGSRFNFSQPFFVTWDKLFGTHMPYVLEERPGGGLQARPCLLC

SEQ ID NO: 1023 - protein, 133 aa, Triticum aestivum
  unsure (1)..(133): unsure at all Xaa locations
APYHACRFLMGSGNERGSFAMSFLSTGLDKRLVDSSNDCSIKAVVFQVVPWSVKVYYHSLEVFIGGNSMAISEAVVLIHVAXSDDXLLPGXVXVLVMFPCRLRLATLALGFRGGFLPVDDFPRAAAGGFDVAS

SEQ ID NO: 1024 - protein, 428 aa, Arabidopsis thaliana
MSSRICAMAKPNDAETLSSSVDMSLSPRVQSLKPSKTMVITDLAATLVQSGVPVIRLAAGEPDFDTPKVVAEAGINAIREGFTRYTLNAGITELREAICRKLKEENGLSYAPDQILVSNGAKQSLLQAVLAVCSPGDEVIIPAPYWVSYTEQARLADATPVVIPTKISNNFLLDPKDLESKLTEKSRLLILCSPSNPTGSVYPKSLLEEIARIIAKHPRLLVLSDEIYEHIIYAPATHTSFASLPDMYERTLTVNGFSKAFAMTGWRLGYLAGPKHIVAACSKLQGQVSSGASSIAQKAGVAALGLGKAGGETVAEMVKAYRERRDFLVKSLGDIKGVKISEPQGAFYLFIDFSAYYGSEAEGFGLINDSSSLALYFLDKFQVAMVPGDAFGDDSCIRISYATSLDVLQAAVEKIRKALEPLRATVSV

SEQ ID NO: 1025 - protein, 163 aa, Glycine max
VATQNCCCFQVVSIGLGSRPFSLHLLLNLLNFLFPFLPSKFSLDSSSMLSSAAVVTSPAQATMVAPFTGLKSSSAFPVTRKANNDITSIVSNGGKVSCMKVWPPVGKKKFETLSYLPDLTEVELGKEVDYLLRNKWIPCVEFLLPRGSACPGPAATPGCSGGR

SEQ ID NO: 1026 - protein, 231 aa, Fusobacterium nucleatum subsp. nucleatum ATCC 25586
MNKEQKSKFVHEVFENIHTQYDRANNKISFGLQKNWKQELVDKIVEETPKNSDFLDVCCGTGDISIWLAKKREDLNIIGVDFSSAMLNEAVKKSKNLNIVWKEADALCLPFKDSSFSAVAISFGLRNTVDYEKVLKEMIRVVKKDGFIYCLDSFVPDCLWIQPFYKMYFKYIMPLFGGGKKYYKEYVWLYESTQQFLKKKELILLYEKLGLKEIKHCSKMFGVCVMIQGKK

SEQ ID NO: 1027 - protein, 227 aa, Nicotiana tabacum
RFLQVLHNPTGIDPTIEQWEKIADVIQEKNHIPFFDVAYQGFASGGLDEDASSVRLFAARGMELLVAQSYSKNLGLYGERIGAINVPCSSADAATRVKSQLKRLARPMYSNPPIHGARIVANVVGIPEFFDEWKQEMEMMAGRIKSVRQKLYDSLSAKDKSGKDWPYILKQIGMFSFTGLNKAQSENMTNKWHVYMTKDGRISLAGLSAAKCEYLADAIIDSYYNVS

SEQ ID NO: 1028 - protein, 199 aa, Penicillium marneffei
MASGPATQSLKCVVTGDGAVGKTCLLISYTTNAFPGEYIPTVFDNYSASVMVDGRPISLGLWDTAGQEDYDRLRPLSYPQTDVFLICFSIVSPPSFDNVKAKWFPEIEHHAPGVPIILVGTKLDLREDRATAEALRAKKMEPVSYEQALAVAKEIRAHKYLECSALTQRNLKSVFDEAIRAVLNPRPQPKNKAKRCTIL

SEQ ID NO: 1029 - protein, 492 aa, Nicotiana tabacum
MDPYKYRPSSAFNSPFCTTNSGAPVFNNNSSLTVGARGPVLLEDYHLVEKLANFDRERVPERVVHARGASAKGFFEVTHDITHLTCADFLRAPGVQTPVIVRFSTVIHERGSPETLRDPRGFAVKFYTREGNFDLVGNNFPVFFIRDGMKFPDMVHALKPNPKSHIQENWRVLDFFSHVPESLHMFTFLFDDIGIPQDYRHMDGSGVHTFTLINKAGKSTYVKFHWKPTCGVKSLLEEEAARIGGANHSHATQDLYDSIAAGNYPEWKLFIQTMDPDHEDRFDFDPLDVTKTWPEDILPLQPVGRLVLNKNIDNFFNENEQLAFCPSIVVPGVYYSDDKMLQTRIFSYSDTQRYRLGPNYLQLPANAPKCAHHNNHYDGSMNFMHRDEEIDYFPSRYDPVRHAEKYPIPSTMCTGKREKCVIQKENNFKQPGDRYRSFTPDRQERFIRRWVEALSDPRITYEIRTIWISYWSQADKSLGQKLASRLNVRPSI

SEQ ID NO: 1030 - protein, 1178 aa, Sorghum arundinaceum
MASGSRATPTRSPSSARPEAPRHAHHHHHHHSQSSGGSTSRAGGGGGGGGGGGGTAATATATATESVSKAVAQYTLDARLHAVFEQSGASGRSFDYSQSLRAPPTPSSEQQIAAYLSRIQRGGHIQPFGCTLAVADDSSFRLLAFSENAADLLDLSPHHSVPSLDSAAPPPVSLGADARLLFSPSSAVLLERAFAAREISLLNPLWIHSRVSSKPFYAILHRIDVGVVIDLEPARTEDPALSIAGAVQSQKLAVRAISRLQALPGGDIKLLCDTVVEHVRELTGYDRVMVYRFHEDEHGEVVAESRRDNLEPYLGLHYPATDIPQASRFLFRQNRVRMIADCHATPVRVIQDPGMSQPLCLVGSTLRAPHGCHAQYMANMGSIASLVMAVIISSGGDDEQTGRGGISSAMKLWGLVVCHHTSPRCIPFPLRYACEFLMQAFGLQLNMELQLAHQLSEKHILRTQTLLCDMLLRDSPTGIVTQSPSIMDLVKCDGAALYYHGKYYPLGVTPTESQIKDIIEWLTVCHGDSTGLSTDSLADAGYLGAAALGDAVCGMAVAYITPSDYLFWFRSHTAKEIKWGGAKHHPEDKDDGQRMHPRSSFKAFLEVVKSRSLPWENAEMDAIHSLQLILRDSFRDAAEGTSNSKAIVNGQVQLGELELRGINELSSVAREMVRLIETATVPIFAVDTDGCINGWNAKIAELTGLSVEEAMGKSLVNDLIFKESEEIVEKLLSRALRGEEDKNVEIKLKTFGSEQSNGAIFVIVNACSSRDYTQNIVGVCFVGQDVTGQKVVMDKFINIQGDYKAIVHNPNPLIPPIFASDENTSCSEWNTAMEKLTGWSRGEVVGKFLIGEVFGSFCRLKGPDALTKFMVVIHNAIGGQDYEKFPFSFFDKNGKYVQALLTANTRSKMDGKSIGAFCFLQIASAEIQQAFEIQRQQEKKCYARMKELAYICQEIKNPLSGIRFTNSLLQMTDLNDDQRQFLETCSACEKQMSKIVKDATLQSIEDGSLVLEKSEFSFGDVMNAVVSQAMLLLRERDLQLIRDIPDEIKDASAYGDQFRIQQVLADFLLSMVRSAPSENGWVEIQVRPNVKQNSDGTDTELFIFRFACPGEGLPADIVQDMFSNSQWSTQEGVGLSTCRKILKLMGGEVQYIRESERSFFLIVLELPQPRPAADREIS

SEQ ID NO: 1031 - protein, 199 aa, Geobacter sulfurreducens PCA
MTRLVVATRNKGKLREIAAILDGLPFTLLSLEDFPDFPEVEEDGKTFEENALKKASVAANITGLPALADDSGLVVDALDGKPGVYSARYSGENASDEANNAKLLSELESVPYEERTAAFRCTIALCSPGGKRYTFSGELHGVILDSPRGTGGFGYDPLFFVSEKGATMAELPLEAKNAVSHRGRALALLKDHLGWQGIE

SEQ ID NO: 1032 - protein, 1178 aa, Sorghum arundinaceum
MASGSRATPTRSPSSARPEAPRHAHHHHHNHSQSSGGSTSRAGGGGGGGGGGGGTAATATATATESVSKAVAQYTLDARLHAVFEQSGASGRSFDYSQSLRAPPTPSSEQQIAAYLSRIQRGGHIQPFGCTLAVADDSSFRLLAFSENAADLLDLSPHHSVPSLDSAAPPPVSLGADARLLFSPSSAVLLERAFAAREISLLNPLWIHSRVSSKPFYAILHRIDVGVVIDLEPARTEDPALSIAGAVQSQKLAVRAISRLQALPGGDIKLLCDTVVEHVRELTGYDRVMVYRFHEDEHGEVVAESRRDNLEPYLGLHYPATDIPQASRFLFRQNRVRMIADCHATPVRVIQDPGMSQPLCLVGSTLRAPHGCHAQYMANMGSIASLVMAVIISSGGDDEQTGRGGISSAMKLWGLVVCHHTSPRCIPFPLRYACEFLMQAFGLQLNMELQLAHQLSEKHILRTQTLLCDMLLRDSPTGIVTQSPSIMDLVKCDGAALYYHGKYYPLGVTPTESQIKDIIEWLTVCHGDSTGLSTDSLADAGYLGAAALGDAVCGMAVAYITPSDYLFWFRSHTAKEIKWGGAKHHPEDKDDGQRMHPRSSFKAFLEVVKSRSLPWENAEMDAIHSLQLILRDSFRDAAEGTSNSKAIVNGQVQLGELELRGINELSSVAREMVRLIETATVPIFAVDTDGCINGWNAKIAELTGLSVEEAMGKSLVNDLIFKESEEIVEKLLSRALRGEEDKNVEIKLKTFGSEQSNGAIFVIVNACSSRDYTQNIVGVCFVGQDVTGQKVVMDKFINIQGDYKAIVHNPNPLIPPIFASDENTSCSEWNTAMEKLTGWSRGEVVGKFLIGEVFGSFCRLKGPDALTKFMVVIHNAIGGQDYEKFPFSFFDKNGKYVQALLTANTRSKMDGKSIGAFCFLQIASAEIQQAFEIQRQQEKKCYARMKELAYICQEIKNPLSGIRFTNSLLQMTDLNDDQRQFLETCSACEKQMSKIVKDATLQSIEDGSLVLEKSEFSFGDVMNAVVSQAMLLLRERDLQLIRDIPDEIKDASAYGDQFRIQQVLADFLLSMVRSAPSENGWVEIQVRPNVKQNSDGTDTELFIFRFACPGEGLPADIVQDMFSNSQWSTQEGVGLSTCRKILKLMGGEVQYIRESERSFFLIVLELPQPRPAADREIS

SEQ ID NO: 1033 - protein, 178 aa, Glycine soja
MASSMISSPAVTTVNRAGAGMVAPFTGLKSMAGFPTRKTNNDITSIASNGGRVQCMQVWPPVGKKKFETLSYLPDLDDAQLAKEVEYLLRKGWIPCLEFELEHGFVYREHNRSPGYYDGRCWTMWKLPMFGCTDASQVLKELQEAKTAYPNGFIRIIGFDNVRQVQCISFIAYKPPSF

SEQ ID NO: 1034 - protein, 147 aa, Mirabilis jalapa
MASLFKDATKISAYRDRRFPGNQEEFEEALKKSTTLYIGNMSFYTTEEQVYELFSRVGEIKKITMGLDKNSKTPCGFCFVLYYSREDTEDAVKYISGTILDDRPIRVDFDWGFQEGRQWGRGRSGGQVRDEYRTDYDPGRGGYGKLV

SEQ ID NO: 1035 - protein, 386 aa, Streptomyces coelicolor A3(2)
MPMSDRHISQHFETLAIHAGNTADPLTGAVVPPIYQVSTYKQDGVGGLRGGYEYSRSANPTRTALEENLAALEGGRRGLAFASGLAAEDCLLRTLLRPGDHVVIPNDAYGGTFRLFAKVATRWGVEWSVADTSDAAAVRAALTPKTKAVWVETPSNPLLGITDIAQVAQVARDAGARLVVDNTFATPYLQQPLALGADVVVHSLTKYMGGHSDVVGGALIVGDQELGEELAFHQNAMGAVAGPFDSWLVLRGTKTLAVRMDRHSENATKVADMLSRHARVTSVLYPGLPEHPGHEVAAKQMKAFGGMVSFRVEGGEQAAVEVCNRAKVFTLGESLGGVESLIEHPGRMTHASAAGSALEVPADLVRLSVGIENADDLLADLQQALG

SEQ ID NO: 1036 - protein, 167 aa, Lycopersicon esculentum
MAEGSPKSIYDFTVKDIQGNEVPLSNYRGKVLLIVNVASKCGLTDSNYKELNILYEKYKDQGFEILAFPCNQFLWQEPGTNEEIQQTVCTRFKAEFPVFEKIDVNGDNAAPLYKFLKSEKGGFLGSAVKWNFTKFLVDKEGKVVERYAPKTPPLQFEKDIKNLLGVA

SEQ ID NO: 1037 - protein, 210 aa, Gerbera hybrid cv. 'Terra Regina'
MGRGKVQLKRIENKINRQVTFSKRRGGLLKKAHEISVLCDAEVALIVFSAKGKLFEYSTDSCMENILDRYEQYSNIDRQHVAVDTDSPIRWTQECNKLKSRAELLQRNLRHYMGEDIESLGLREIQNLEQQLDTALKRIHSKKNQLLHQSISELQKKEKAIQEQNNTLIKNIKEKEKTITQKAQWEPHNYGPNTTPLLFSLPPHSSLNIG

SEQ ID NO: 1038 - protein, 622 aa, Oryza sativa
MDDYRGHTTCVRVTLSPWLAAGRHQRRGTTSRQTNNVFFFFSMAETRRWELAAHRRLEKGKVVGVVVLDGWGEAAPDTFNCIHVADTPTLDALKKVVTTLTRRLFDASHDDQLRARLGGPERWRVIKAHGTAVGLPTDDDMGNSEVGHNALGAGQIYAQGAKLVDMALASGKIYEGEGFKYIQQSFENGTLHLIGLLSDGGVHSRIDQLQLLLKGASEHGAKRIRVHILTDGRDVLDGSSVKFVELIENDLAKLRDKGVDARIASGGGRMYVTMDRYENDWQVVKRGWDAQVLGEAPHKFQNALEAVKKLREDPKANDQYLPPFVIVDERGRPIGPIMDGDAVVTFNFRADRMVMLAKALEYESFDKFDRVRFPKIRYAGMLQYDGELKLPSHFLVAPPEIERTSGEYLARNGIRTYACSETVKFGHVTFFWNGNRSGYFHPNLEKYEEIPSDIGIPFNEQPKMKAVEIAKKTRDAILSRKFDQVRVNIANGDMVGHTGDIEATIVGCKAADEAVKIVLDAIEQVGGIFVVTADHGNAEDMVKRDKSGKPLRDKDGNVQPLTSHTLNPVPIAIGGPGLQPGVRFRSDLPSAGLANVAATVMNLHGFEAPDHYEPTLIEVVDK

SEQ ID NO: 1039 - protein, 831 aa, Wautersia eutropha
MKISRRDFIKQTAITATASVAGVTLPAGAANFVTDSEVTKLKWSKAPCRFCGTGCGVTVAVKDNKVVATQGDPQAEVNKGLNCVKGYFLSKIMYGQDRLTRPLMRMKNGKYDKNGDFAPVTWDQAFDEMERQFKRVLKEKGPTAVACSAPAQWTVWEGYAAAKLYKAGFRSNNIDPNARHCMASAAAGFMRTFGMDEPMGCYDDFEAADAFVLWGSNMAEMHPILWTRVTDRRLSHPKTRVVVLSTFTHRCFDLADIGIIFKPQTDLAMLNYIANYIIRNNKVNKDFVNKHTVFKEGVTDIGYGLRPDHPLQKAAKNASDPGAAKVITFDEFAKFVSKYDADYVSKLSAVPKAKLDQLAELYADPNIKVMSLWTMGFNQHTRGTWANNMVYNLHLLTGKIATPGNSPFSLTGQPSACGTAREVGTFSHRLPADMVVTNPKHREEAERIWKLPPGTIPDKPGYDAVLQNRMLKDGKLNAYWVQVNNNMQAAANLMEEGLPGYRNPANFIVVSDAYPTVTALAADLVLPSAMWVEKEGAYGNAERRTQFWHQLVDAPGEARSDLWQLVEFAKRFKVEEVWPPELIAKKPEYKGKTLYDVLYRNGQVDKFPLKDVNAEYHNAEAKAFGFYLQKGLFEEYATFGRGHGHDLAPFDAYHEARGLRWPVVNGKETRWRYREGSDPYVKAGTGFQFYGNPDGKAVIFALPYEPPAESPDKEYPYWLVTGRVLEHWHSGSMTRRVPELYRSFPNAVVFMHPEDAKALGLRRGVEVEVVSRRGRMRSRIETRGRDAPPRGLVFVPWFDASQLINKVTLDATCPISLQTDFKKCAVKIVKV

SEQ ID NO: 1040 - protein, 345 aa, Triticum aestivum
WIPRAAGIRHEQGTADAVRQYLWLFEEHNVMEFLILAGDHLYRMDYQKFIQAHRETDADITVAALPMDEERATAFGLMKIDDEGRIVEFSEKPKGEKLKAMMVDTTILGLDSERAKELPYIASMGIYVFSKDAMLRLLRDNFPSANDFGSEVIPGATEIGMRVQAYLYDGYWEDIGTIEAFYNANLGITKKPVPDFSFYDRSAPIYTQSRYLPPSKVLNADVTDSVIGEGCVINHCTINHSVVGLRSCISEGAVIEDSLLMGADYYETENDKKVLSESGGIPIGIGKNAHIRKAIIDKNARIGENVKIINVDDIQEASRESDGYFIKSGIVTVIKDALIPSGTVI

SEQ ID NO: 1041 - protein, 166 aa, Nicotiana tabacum
MASMIESAWTYLITNFSDFQLTCLGGFVLHESVFFLSGLPFLLFERAGWFGKYKIQKENNSPAAQEKCITRLLLYHFCVNLPILIGSYPVFKFMGTRSSLPLPSWKVISTQIIFYFILEDFAFYWGHRILHTKWLYKHVHSVHHEYATPFGLTSEYAHPAEILFLV

SEQ ID NO: 1042 - protein, 191 aa, Eremothecium gossypii
MQTLKCVVVGDGAVGKTCLLISYTTNQFPADYVPTVFDNYAVTVMIGDEPYTLGLFDTAGQEDYDRLRPLSYPSTDVFLVCFSVVSPPSFENVKEKWFPEVHHHCPGVPCLIVGTQIDLRENKMVIEKLQRQRLRPITPEQGEKFARELRAVKYVECSALTQRGLKNVFDEAIVAALEPPVIKKSKKCTIL

SEQ ID NO: 1043 - protein, 240 aa, Zea mays
  unsure (1)..(240): unsure at all Xaa locations
MSLPPTDGGDDWFLDCGILEDLPAAACGAFPWDASVSSSNPSAEVGSHVNKLDLPKDSGSNKRLRSEPCGRPTSKACREKVRRDKLNDRFLELGTTLDPGKPVKADKAAILSDATRMVTQLRAEAQQLKDTNGSLEDKIKELKAEKDELRDEKQKLKLEKETLEHQMKLLTATPAYMPHPTMMPSPFAQAPMAPFHAQGQALGQKLMMPFVGYPGYPMWQLMPASEVDTSKDSEACPPXA

SEQ ID NO: 1044 - protein, 1177 aa, Sorghum x drummondii
MASGSRATPTRSPSSARPEAPRHAHHHHHHSQSSGGSTSRAGGGGGGGGGGGGTAATATATATESVSKAVAQYTLDARLHAVFEQSGASGRSFDYSQSLRAPPTPSSEQQIAAYLSRIQRGGHIQPFGCTLAVADDSSFRLLAFSENAADLLDLSPHHSVPSLDSAAPPPVSLGADARLLFSPSSAVLLERAFAAREISLLNPLWIHSRVSSKPFYAILHRIDVGVVIDLEPARTEDPALSIAGAVQSQKLAVRAISRLQALPGGDIKLLCDTVVEHVRELTGYDRVMVYRFHEDEHGEVVAESRRDNLEPYLGLHYPATDIPQASRFLFRQNRVRMIADCHATPVRVIQDPGMSQPLCLVGSTLRAPHGCHAQYMANMGSIASLVMAVIISSGGDDEQTGRGGISSAMKLWGLVVCHHTSPRCIPFPLRYACEFLMQAFGLQLNMELQLAHQLSEKHILRTQTLLCDMLLRDSPTGIVTQSPSIMDLVKCDGAALYYHGKYYPLGVTPTESQIKDIIEWLTVCHGDSTGLSTDSLADAGYLGAAALGDAVCGMAVAYITPSDYLFWFRSHTAKEIKWGGAKHHPEDKDDGQRMHPRSSFKAFLEVVKSRSLPWENAEMDAIHSLQLILRDSFRDAAEGTSNSKAIVNGQVQLGELELRGINELSSVAREMVRLIETATVPIFAVDTDGCINGWNAKIAELTGLSVEEAMGKSLVNDLIFKESEEIVEKLLSRALRGEEDKNVEIKLKTFGSEQSNGAIFVIVNACSSRDYTQNIVGVCFVGQDVTGQKVVMDKFINIQGDYKAIVHNPNPLIPPIFASDENTSCSEWNTAMEKLTGWSRGEVVGKFLIGEVFGSFCRLKGPDALTKFMVVIHNAIGGQDYEKFPFSFFDKNGKYVQALLTANTRSKMDGKSIGAFCFLQIASAEIQQAFEIQRQQEKKCYARMKELAYICQEIKNPLSGIRFTNSLLQMTDLNDDQRQFLETCSACEKQMSKIVKDATLQSIEDGSLVLEKSEFSFGDVMNAVVSQAMLLLRERDLQLIRDIPDEIKDASAYGDQFRIQQVLADFLLSMVRSAPSENGWVEIQVRPNVKQNSDGTDTELFIFRFACPGEGLPADIVQDMFSNSQWSTQEGVGLSTCRKILKLMGGEVQYIRESERSFFLIVLELPQPRPAADREIS

SEQ ID NO: 1045 - protein, 392 aa, Barnebya dispar
DLEPVNPADVPVTAAGALKSYKFAAKAISRLQSLPSGNIFLLCDVLVKEVRDLTGYDRVMVYKFHEDEHGEVVSECRRSDLESYLGLHYPATDIPQASRFLFMKNKLRMICDCLAPPVKVIQDENLPQPLSLCGSTLRSPHGCHAQYMTNMGTIASLVMSVTINEDDDMKDCEQPQMPRKLWGLVVCHHTSPRFIPFPLRYACEFLIQVFGVQINKEVELAAQVREKHILRIQTLLCDMLLRDAPVAIITQSPNVMDLVRCDGAALYYKNKFWLLGVTPTEAQIRDIAEWLLECHSGNTGLSTDSLMEAGYPGASVLGDAVCGMAAISITSRDFLFWFRSHTAKEIKWGGAKHDPDDKDDGRKMHPRSSFKAFLEVVKWRSLPWEDVEMDAI

SEQ ID NO: 1046 - protein, 442 aa, Streptomyces carzinostaticus
MTDTAGRLLEFRMPDVGEGLTEAELLTWYVRPGDTVVDGQTVCEIETAKAVVELPIPFDGVVRELRCAEGETVPVGTVVITVAQARAPDPSPAPPAREPVLVGYGVASGPTSRRRRTAVPPPIRPAEPGSGPVLAKPPVRKLAKDLGVDLTRVVPSGPQGVILRADVHAAAHTAGTVVAPAPAPAAPSVPQESAPGPDGEPMETRGTGQPRETRVPVRGVRRATAAAVTASAFSAPHVTEFVTVDVTRTMKLVRDLRREPRFADRRVGPLLLVAKALLVAVERNPEINASWDDGAQEIVRKHYVDLGIAAATPRGLIVPAVKDAHTLSLAELAGALDDLVDAARAGRTSPAALSGGTVTLTNIGVFGVDSGTPILNPGEAAILAVGAITPRPWVHKGKVVPRQVVSLSLSFDHRLVDGELGSKVLADVAAVLERPHRLIAWS

SEQ ID NO: 1047 - protein, 162 aa, Daucus carota
MAKLYVVLVLSLVLVHAMAARDIPTEKHDTETVVVATTTNGGGKAVKDKKCAVGFVGVGGAVGGVAGVVPLGGIGGVGGAGGVGGAGGLGGAGGLGGLGGLGGASGLGGLGGASGLGGLGGASGLGGLGGAGAGGLGGLGGVGGGVGGGAGGAGGVGGGVLP

SEQ ID NO: 1048 - protein, 192 aa, Triticum aestivum
  unsure (1)..(192): unsure at all Xaa locations
MAPTVMASSATSVAPFQGLKSTAGLPVSRRSNGASLGSVSNGGRIRCMQVWPIEGIKKFETLSYLPPLSTEALLKXVDYLIRSKWVPXCLEFNKVXGFIFREAQTQSLGYYDGXYWTMWKLLCSVQPTQKKLINEXXEVXKEYPDPLSAIIGFXKMRKXKWVNLTXXKPPGXKDXGXAKSPKGNKGIDFLNN

SEQ ID NO: 1049 - protein, 392 aa, Blepharandra heteropetala
DLEPVNPADVPVTAAGALKSYKLAARAISRLQSLPSGNISLLCDVLVKEVRDLTGYDRVMVYKFHEDEHGEVISECRRPDLEAYLGLHYPATDIPQASRFLFMKNKVRMICDCLAPAVKVIQDERLPQALSLCGSTLRSPHGCHAQYMANMGTIASLVMSVIINEDNDMMDGDQQHIARKLWGLVVCHHTSPRFVPFPLRYACEFLIQVFGVQINKEVELAAQVREKHILRTQTLLCDMLLRDAPVAIITQSPNVMDLVKCDGAALYYRKKFWLLGVTPTEVQIRDIAEWLLEYHGGNAGLSTDSLMEAGYPGASDLGNAVCGMAAVRITSRDFLFWFRSHTAKEIKWGGAKHHPNDKDDVRKMHPRSSFKAFLEVVKWRSLPWEDIEMDAI

SEQ ID NO: 1050 - protein, 1177 aa, Sorghum propinquum
MASGSRATPTRSPSSARPEAPRHAHHHHHHSQSSGGSTSRAGGGGGGGGGGGGTAATATATATESVSKAVAQYTLDARLHAVFEQSGASGRSFDYSQSLRAPPTPSSEQQIAAYLSRIQRGGHIQPFGCTLAVADDSSFRLLAFSENAADLLDLSPHHSVPSLDSAAPPHVSLGADARLLFSPSSAVLLERAFAAREISLLNPLWIHSRVSSNPFYAILHRIDVGVVIDLEPARTEDPALSIAGAVQSQKLAVRAISRLQALPGGDIKLLCDTVVEHVRELTGYDRVMVYRFHEDEHGEVVAESRRDNLEPYLGLHYPATDIPQASRFLFRQNRVRMIADCHATPVRVIQDPGMSQPLCLVGSTLRAPHGCHAQYMANMGSIASLVMAVIISSGGDDEQTGRGGISSAMKLWGLVVCHHTSPRCIPFPLRYACEFLMQAFGLQLNMELQLAHQLSEKHILRTQTLLCDMLLRDSPTGIVTQSPSIMDLVKCDGAALYYHGKYYPLGVTPTESQIKDIIEWLTVCHGDSTGLSTDSLADAGYLGAAALGDAVCGMAVAYITPSDYLFWFRSHTAKEIKWGGAKHHPEDKDDGQRMHPRSSFKAFLEVVKSRSLPWENAEMDAIHSLQLILRDSFRDAAEGTSNSKAIVNGQVQLGELELRGINELSSVAREMVRLIETATVPIFAVDTDGCINGWNAKIAELTGLSVEEAMGKSLVNDLIFKESEEIVEKLLSRALRGEEDKNVEIKLKTFGSEQSNGAIFVIVNACSSRDYTQNIVGVCFVGQDVTGQKVVMDKFINIQGDYKAIVHNPNPLIPPIFASDENTSCSEWNTAMEKLTGWSRGEVVGKFLIGEVFGSFCRLKGPDALTKFMVVIHNAIGGQDYEKFPFSFFDKNGKYVQALLTANTRSKMDGKSIGAFCFLQIASAEIQQAFEIQRQQEKKCYARMKELAYICQEIKNPLSGIRFTNSLLQMTDLNDDQRQFLETCSACEKQMSKIVKDATLQSIEDGSLVLEKSEFSFGDVMNAVVSQAMLLLRERDLQLIRDIPDEIKDASAYGDQFRIQQVLADFLLSMVRSAPSENGWVEIQVRPNVKQNSDGTDTELFIFRFACPGEGLPADIVQDMFSNSQWSTQEGVGLSTCRKILKLMGGEVQYIRESERSFFLIVLELPQPRPAADREIS

SEQ ID NO: 1051 - protein, 978 aa, Ferroplasma acidarmanus
MSSGKIFIDGIPLNIKGEETILQAMMDNNIDIPHVCYNPALGAIESCDTCIVNADGKYVRACTTQAKNNMKVLFNSPDVKARETEAVNRILHNHDLYCTVCENNNGDCALHSAVDTLQVTRQKYPFTSKGYEPDYSNPFYRYDPDQCILCGRCVEACQDVEVNETLHIDWSLERPRVVWDDNKAINDSSCVSCGHCVTVCPVNALMEKSMLEEAGYFTSLTRKAKYNLIEFGKDLEKPVGNGMIMKISNIEAKMREEQIKKTKTVCTYCGVGCSFTMWTKGRKILKVQPEVESPANGISTCIKGKFGWGFVNSEERLKYPLIRKNGKFVQASWDEAIDFAAKGLKKVGEKYGNESLMFIASSKGTNEESYLLQKMARQIFHNNNVDNSSRFCQAPATTGLWRTVGYGGDAGSIQDIYKSELVMIVGANTAESHPVLATRVKRAHKLNHQKLIVSDLRKNEMAERADIYLHPSPGTDIVLLSALSKYIIDQGWHDREFIEKRVNGFDEYYKSLEPFTLENASSITGIPEKQIIETAEMIHSVKSMCILWAMGITQHSAGSDESTAISNLLVLTGNYGRPGTGAYPLRGHNNVQGASDFGAMPTYLPGYQPIKDKEVIKKFEKAWHTELPTKPGIDNVSCIENIDNDKIKAMYVVGQEIASTGPDSNMIRDSLEKLDFLIVEDVFFSETAKYADVVLPATVSLEKEGTFTNTERRIQRIYQVMEPYEQTKPDWEIIQGIAKSLGYDWNYKHPSEIMDEAASLSPMFHGVSYERLEGFKSLQWPMKENGEGSEYLYEDRFNFPDGKARLYPLSYRPPLTVSEEYPLHLNNGRMLEHFHEGNETFKTEGIKEKVPDTFLEISEKLAAEYKIQTGDFVRVTSKWGSIKARALITERVSGNELYMPMNAASDDATVNLLTSYTRDPDSDTPAYKELPVKIEKLKKNGGSPLPANNSRYGKPEPQIGILVSEKWKRKDYSKLTDD

SEQ ID NO: 1052 - protein, 392 aa, Blepharandra heteropetala
DLEPVNPADVPVTAAGALKSYKLAARAISRLQSLPSGNISLLCDVLVKEVRDLTGYDRVMVYKFHEDEHGEVISECCRPDLEAYLGLHYPATDIPQASRFLFMKNKVRMICDCLAPAVKVIQDERLPQALSLCGSTLRSPHGCHAQYMANMGTIASLVMSVIINEDNDMMDGDQQHIARKLWGLVVCHHTSPRFVPFPLRYACEFLIQVFGVQINKEVELAAQVREKHILRTQTLLCDMLLRDAPVAIITQSPNVMDLVKCDGAALYYRKKFWLLGVTPTEVQIRDIAEWLLEYHGGNAGLSTDSLMEAGYPGASDLGNAVCGMAAVRITSRDFLFWFRSHTAKEIKWGGAKHHPNDKDDVRKMHPRSSFKAFLEEVKWRSLPWEDIEMDAI

SEQ ID NO: 1053 - protein, 392 aa, Blepharandra heteropetala
DLEPVNPADVPVTAAGALKSYKLAARAISRLQSLPSGNISLLCDVLVKEVRDLTGYDRVMVYKFHEDEHGEVISECCRPDLEAYLGLHYPATDIPQASRFLFMKNKVRMICDCLAPAVKVIQDERLPQALSLCGPTLRSPHGCHAQYMANMGTIASLVMSVIINEDNDMMDGDQQHIARKLWGLVVCHHTSPRFVPFPLRYACEFLIQVFGVQINKEVELAAQVREKHILRTQTLLCDMLLSDAPVAIITQSPNVMDLVKCDGAALYYRKKFWLLGVTPTEVQIRDIAEWLLEYHGGNAGLSTDSLMEAGYPGASDLGNAVCGMAAVRITSRDFLFWFRSHTAKEIKWGGAKHHPNDKDDVRKMHPRSSFKAFLEVVKWRSLPWKDVEMDAI

SEQ ID NO: 1054 - protein, 392 aa, Caucanthus auriculatus
DLEPVNPADVPVTAAGALKSYKLAAKAISRLQSLPSGNISLLCDVLVKEVRDLTGYDRVMVYKFHEDEHGEVVSECHRSDLESYLGLHYPATDIPQASRFLFMKNKVRMICDCVAPPVKVIQEERLPQPLSPCGSTLRSPHGCHAQYMTNMGIIASLVMSVTVNEEDDMVDGDQPQMARKLWGLVVCHHTSTRFVPFPLRYACEFLIQVFGVQINKEVELAAQVREKHILQIQTMLCDMLLRDAPVAIITQSPNVMDLVKCDGAALYFKNKTWLLGVTPTEEQIRDIAEWLPEYHSGNTGLSTDSLMEAGYPGASALGDAVCGMAAVSITSRDFLLWFRSHTAKEIKWGGAKHDPDDKDDGRKMHPRSSFKAFLEVVKWRSMPWEDVEMDAI

SEQ ID NO: 1055 - protein, 358 aa, Candida albicans SC5314
MKAAVVPESVTETKLAEVKEIPKPTIGDDQILIKAEAAAVNPTDWKHIVFQMSKPGDVIGSDVSGTVEEVGSKVTNFKKGDTVSSFIIGNISPDSGAFGEYVIAYPQATIKYDHSLSHSSATNSSTIKSYEGAASVTLGLSTIGISFSHYLNIGKHKKEGDSILIWGGATATGILAIQVAKLVYNLNVITTASPKNHAFLKELGADHTLDYNDPNVIENLKALGPIKFGLDTIANTTTFQGLYDATAGTPEVYLDSLLGLDGKSIKTDPSRENSVHWGYTLAYLYVIKEKSLGPTKFVQTPELVDDYLKWWNEVLPTFIGKIKHANLKILGDGLASANEALQLSRDSKVSAQKIVFTV

SEQ ID NO: 1056 - protein, 468 aa, Mycobacterium tuberculosis CDC1551
MREYDIVVIGSGPGGQKAAIASAKLGKSVAIVERGRMLGGVCVNTGTIPSKTLREAVLYLTGMNQRELYGASYRVKDRITPADLLARTQHVIGKEVDVVRNQLMRNRVDLIVGHGRFIDPHTILVEDQARREKTTVTGDYIIIATGTRPARPSGVEFDEERVLDSDGILDLKSLPSSMVVVGAGVIGIEYASMFAALGTKVTVVEKRDNMLDFCDPEVVEALKFHLRDLAVTFRFGEEVTAVDVGSAGTVTTLASGKQIPAETVMYSAGRQGQTDHLDLHNAGLEVQGRGRIFVDDRFQTKVDHIYAVGDVIGFPALAATSMEQGRLAAYHAFGEPTDGITELQPIGIYSIPEVSYVGATEVELTKSSIPYEVGVARYRELARGQIAGDSYGMLKLLVSTEDLKLLGVHIFGTSATEMVHIGQAVMGCGGSVEYLVDAVFNYPTFSEAYKNAALDVMNKMRALNQFRR

SEQ ID NO: 1057 - protein, 701 aa, Xanthomonas campestris pv. campestris str. ATCC 33913
MAKSPSKPAQIPSVGSSASAHELRGTGDELHQKAGGSHPQLTTNQGIPVGDNQNSLRATPRGPTLLEDFILREKITHFDHERIPERIVHARGSAAHGYFELTKSLSQYTTAKLLTEVGEKTPLFTRFSTVAGGAGSVDTPRDVRGFAVKFYTKEGNWDLVGNNIPVFFIQDAMKFPDLIHAVKMEPDRGFPQAASAHDTFWDFISLTPESMHMIMWAMSDRTIPRSLRMIEGFGIHSFRLLNENGDSTFVKFHWRPKLGLQSTIWDEAVKLAGADPDFQRRDLFEAIQKGDFPEWELGVQLFTEAEAEAFPFDHLDSTKVIPEELVPLQIVGRMVLDRWPDNFFAETEQVAYCPANIVPGIDFSNDPLLQGRLFSYLDTQLSRLGGPNFHQIPINAPKCPFANNQRDGHMQMGVPKGRVAYEPSSLQADAPREALRGFPSHATPAEDGAKGRVRAESFADHYSQARMFFRSQTAPEQAHLASALVFELSKVETAHVREAIVGHLRHIDEALAKRVADGMGMTSLPPAPPAAVAPTDMQLSPALQLIGKMKDTLQGRTVGILIHDGSDAAAIKAVRKAAEAAGATVKIVAPKLGGAKLSDGKQLAADGQLAGTPSIVFDAVAVLLSSEAAKALTRESAALDFVSNAWAHLKAIAFDDGAQLLLKAGNVGKDPGVVDAADTKAFITAAKTRQWAREPKVRMLA

SEQ ID NO: 1058 - protein, 392 aa, Caucanthus auriculatus
DLEPVNPADVPVTAAGALKSYKLAAKAISRLQSLPSGNISLLCDVLVKEVRDLTGYDRVMVYKFHEDEHGEVVSECHRSDLESYLGLHYPATDIPQASRFLFMKNKVRMICDCVAPPVKVIQEERLPQPLSLCGSTLRSPHGCHAQYMTNMGIIASLVMSVTVNEEDDMVDGDQPQMARKLWGLVVCHHTSTRFVPFPLRYACEFLIQVFGVQINKEVELAAQVREKHILQIQTMLCDMLLRDAPVAIITQSPNVMDLVKCDGAALYFKNKTWLLGVTPTEEQIRDITEWLLEYHSGNTGLSTDSLMEAGYPGASALGDAVCGMAAVSITSRDFLLWFRSHTAKEIKWGGAKHDPDDKDDGRKMHPRSSFKAFLEVVKWRSMPWEDMEMDAI

SEQ ID NO: 1059 - protein, 392 aa, Caucanthus auriculatus
DLEPVNPADVPVTAAGALKSYKLAAKAISRLQSLPSGNISLLCDVLVKEVRDLTGYDRVMVYKFHEDEHGEVVSECHRSDLESYLGLHYPATDIPQASRFLFMKNKVRMICDCVAPPVKVIQEERLPQPLSLCGSTLRSPHGCHAQYMTNMGIIASLVMSVTVNEEDDMVDGDQPQMARKLWGLVVCHHTSTRFVPFPLRYACEFLIQVFGVQINKEVELAAQVREKHILQIQTMLCDMLLRDAPVAIITQSPNVMDLVKCDGAALYFKNKTWLLGVTPTEEQIRDIAEWLLEYHSGNTGLSTDSLMEAGYPGASALGDAVCGMAAVSITSRDFLLWFRSHTAKEIKWGGAKHDPDDKDDGRKMHPRSSFKAFLEVVKWRSMPWEDVEMDAI

SEQ ID NO: 1060 - protein, 548 aa, Photorhabdus luminescens subsp. laumondii TTO1
MKNINPSQTSAWKALEQHFAQIKDIHLRELFEQDPDRFAKFSATFDDQILVDFSKNRITTETLKKLQALAKETDVAGAMRSLFSGEKINCTENRAVLHIALRNRSNTPMMVDGEDVMQQVNAVLAKMKDFSERVIHGEWKGYTGKGITDVVNIGIGGSDLGPYMVTEALKPYKNHLNMHFVSNVDGTHIAETLKALNPETTLFLIASKTFTTQETMTNAHSARDWFLKSAGDEGHIAKHFAALSTNGQEVKQFGIDTKNMFEFWDWVGGRYSLWSAIGLSIALSIGFENFEQLLSGAHAMDQHVANTPFEQNIPVLLALIGIWYNNFFGAETEAILPYDQYMHRFAAYFQQGNMESNGKYIDRNGHPVDYQTGPIIWGEPGTNGQHAFYQLIHQGTKLIPCDFIAPAISHNPLSDHHSKLLSNFFAQTEALAFGKSREQVDAEFATSGKTVVEVEHVAPFKVFEGNRPTNSILLREITPFSLGALIAMYEHKIFVQGAILNIFTFDQWGVELGKQLANRILPELKDDNRVVSHDSSTNGLINRFKAWR

SEQ ID NO: 1061 - protein, 392 aa, Diacidia ferruginea
DLEPVNPADVPVTAAGALKSYKLAARAISRLQSLPSGNISLLCDVLVKEVRDLTDYDRVMVYKFHEDEHGEVISECCRPDMEAYLGLHYPATDIPQASRFLFMKNKVRMICDCLATPVKVIQDERLPQPLSLCGSTLRSPHGCHAQYMANMGAIASLVMSVTINEDDDMMDGDRQHRARKLWGLVVCHHTSPRFLPFPLRYACEFLIQVFGVQINKEVELAAQVREKHILRTQTLLCDMLLRDAPVAIITQSPNVMDLVKCNGAALYYKKKFWLVGLTPTEAQIRDIAEWLLEYHNGNTGLSTDSLMEAGYPGASELGDTVCGMAVVKITSRDFLFWFRSHTAKEIKWGGAKHDPDDKDDGRKMHPRSSFKAFLEVVKWRSLPWEDIEMDAI

SEQ ID NO: 1062 - protein, 392 aa, Dinemandra ericoides
DLEPVNPADVPVTAAGALKSYKLAAKAISRLQSLPSGNIPLLCDVLVKEVRDLTGYDRVMVYKFHEDEHGEVVSECRRSDMESYLGLHYPATDIPQASRFLFMKNKVRMICDCLSPPVEVIQDERLPQPLSLCGSTLRSPHGCHAQYMANMGTIASLVMSVTVNEDDDMMDGDQQRMARKLWGLVVCHHTSPRFVPFPLRYACEFLIQVFGVQINKEVDLAAQVREKHILRIQTMLCDMLLRDAPVAIITQSPNVMDLVKCDGAALYYKNKFWLLGVTPTEAQIRDIAEWLLEYHRGNTGLSTDSLMEAGYPGASVLGDAVCGMAAVSITSRDFLFWFRSHTAKEIKWGGAKHDPGDKDDGRKMHPRSSFKAFLEVVKWRSLPWKDVEMDAI

SEQ ID NO: 1063 - protein, 166 aa, Zea mays
  unsure (1)..(166): unsure at all Xaa locations
MLKIVNKVIINVAGKHDVMNNVMSLGIHPTWEDECISSMALGLDIKSLDVAGRTGSIALQLLDYCKNVHRDNTAFAKLVYINPHMLREGXKKFKETPYIHIGFLVQKAVNLADIPDGSADFYTIAFGIRNCTHVDKVIKETYRVXKQGVRFMCLEFSKLDSLLIGK

SEQ ID NO: 1064 - protein, 392 aa, Dinemandra ericoides
DLEPVNPADVPVTAAGALKSYKLAAKAISRLQSLPSGNIPLPCDVLVKEVRDLTGYDRVMVYKFHEDEHGEVVSECRRSDMESYLGLHYPATDIPQASRFLFMKNKVRMICDCLSPPVEVIQDERLPQPLSLCGSTLRSPHGLHAQYMANMGTIASLVMSVTVNEDDDMMDGDQQRMARKLWGLVVCHHTSPRFVPFPLRYACEFLIQVFGVQIHKEVDLAAQVREKHILRIQTMLCDMLLRDAPVAIITQSPNVMDLVKCDGAALYYKNKFWLLGVTPTEAQIRDIAEWLLEYHRGNTGLSTDSLMEAGYPGASVLGDAVCGMAAVSITSRDFLFWFRSHTAKEIKWGGAKHDPGDKDDGRKMHPRSSFKAFLEVVKWRSLPWEDVEMDAI

SEQ ID NO: 1065 - protein, 159 aa, Chromobacterium violaceum ATCC 12472
MTTLYDFSAQRADGAEQALSAYEGRVALLVNTASECGYTRQYAGLQELQDYFAGQAFVVLGFPCNQFGGQEPGGEDEIVDFCRSRFGVSFPLFAKLQVNGDGAHPLWRWLTQADSDRPHPIKWNFTKFLVDGRGRVVKRYEPAVEPHELVDDIKALLAR

SEQ ID NO: 1066 - protein, 133 aa, Mangifera indica
  unsure (1)..(133): unsure at all Xaa locations
MAMVGLSMACILSLRCLMWMVEARIPGVYTGGAWQSAHATFYGGSDASGTMGGACGYGNLYSQGYGVNTAALSTALFNNGFSCGACFEIKCASDPKWCHXGSPSIFITATNFCPPKYALPSDNGGWCNPPHTH

SEQ ID NO: 1067 - protein, 502 aa, Mentha x piperita
MYSIAFMLVLRKMDEIISHTLAFQALVSLILLISITKWLSNSPKNKNSSPPSPRKLPILGNLLQLGSLPHHNLRSMARKHGPIMLLHLGSVRPVSSRRRPRGNHENSRSRLRRPRGSRSAALQLQGRVGGYGEYWRQLKTICVVQLLSNKRVQSFRSVREEETELLMKKIGDSSGNVNLSHMFTQLTNDVVCRSAIGRKYGAGDENGEKFLEILREFLELLGAISIGDFVPSLWWINRINGFDRRVDRIAKEMDEFLEKVIHERLENPAAKAEENFVDILLEIYRNNSAGVSIDRDSIKAIILDVFAAGTDTTAVVLEWAMTELLRHPEIMKKLQSEVRQVVKDKHNITDDDIEKMHYLKAVMKETMRFHTPIPLLVPRVARNDVEVMGYDVPVGTMVMINAWAIGRDPTSWDEPEKFRPERFLNSSVDFKGLDFELIPFGAGRRGCPGTTFPMATLEFTLANLMQKFDWELPHECRELDMSERPGVAIRRVIPLLAIGTKM

SEQ ID NO: 1068 - protein, 396 aa, Yersinia pestis CO92
MFEKITAAPADPILGLTDIFRADDRAHKINLGIGVYKDETGKTPVLTSVKKAEQYLLENEATKNYLGIDGLPVFASCTQELLFGANSAIIADKRARTAQTPGGTGGLRIAADFIAHQTSAKRVWVSNPSWPNHKNVFEAAGLEVVEYAYYDAANHALDFDGLLNSLSEAQAGDVVLFHGCCHNPTGIDPTETQWSQLAELSVAKGWLPLFDFAYQGFANGLEEDAQGLRIFAATHQELIVCSSYSKNFGLYNERVGACTLVAADSNVADTAFSQVKAVIRANYSNPPAHGASVVATILSNAALRAIWEQELTDMRQRIQRMRQLFVNTLQEKGAQQDFSFIINQNGMFSFSGLTKEQVLRLRDEFAVYAVNSGRVNVAGMTPDNMAPLCEAIVAVL

SEQ ID NO: 1069 - protein, 685 aa, Methanopyrus kandleri AV19
  unsure (1)..(685): unsure at all Xaa locations
MARMRFVPQVCPFCGCGCGILVGTDGEEIKLLEPWRRHPVNEGRQCVKLWELPEAVQKDRLERPVRMTESGEPRELSWNRALEEVAEVLSTHEPEEVYFVTSAKATNEDNYVAQKLARTLGTNNVDHCARLXHAPTVVALSELLGSGAMTNSIPDLVEADCYLVAGSNTAEQHPIVYRRILQGLEENDADLIVLDPRRTQIAELADIHLQVRPRTDLIVFLYMAKVIVEEGLHDGTFIEERTTGFESFEEYVREAVSEGDVRRIAGVDPEDVRKAAVRYAEAERGCILYCMGLTHHDIATRTVRALCALALLTGNVGRPGTGVNPLRGQNNVQGACDVGALATHFPGYRPINTETANEMSKIWSFEVPDEPGLKLTEAFDADEITVMYVVGENPAVSEPNTRHAVEKLESLEFLVVQDLYLTETGELADLVLPAAGWAERTGTFTATDRRVQLAEKAVEPPGEARPDWWILEAVARRLGLKGFGHRSPREVFEEIRRVVPQYRGITYERLRRRPGGIHWPCPSEDHPGTPILHTEEFATEDGKARFPKPEDVEYREPERDVDEEYPLILTTGRVYAHYHTRTITRRSRLLSEEVPESFVEIHPKDAERYGVRDGELVVVETPYGEWRCRARVTDRVREGTIFTPFHFGENVLTPHDVRDPESGIPEYKYVPARVRPDSRGSASRG

SEQ ID NO: 1070 - protein, 403 aa, Streptomyces coelicolor A3(2)
MQVIQSTKLANVCYEIRGPVLEEAMRLEAAGHRILKLNTGNPAAFGFECPPEILEDILRNVSTAHGYGDAKGLLAARRAVVMHNQTLGIETDVEHVFIGNGVSELIVMAMQGLLDDGDEVLVPAPDYPLWTAAVSLSGGTAVHYRCDEQSDWMPDLADVERKITDRTKALVIINPNNPTGAVYDDAMLRGLTDIARRHNLLVCSDEIYDKILYDDATHTPTAAIAPDLLTLTFNGMSKAYRVAGYRVGWMSISGPRAHAESYIEGLTILANMRLCANMPGQHGVVAALSGRQTINELVLPGGRLREQRDAAHEALTSIPGVTCVKPKGALYLFPRLDPKVFKIKDDRRMVLDLLRQEKIMVVQGTGFNWPEPDHFRVVTLPTAADLREAVDRIGNFLDGYSQP

SEQ ID NO: 1071 - protein, 471 aa, Solanum tuberosum
MACSLSLKQPFSSLPTNTTTQGKLPVNFPVTFGCMNGKGTLIEQKFQLNCSRDKEMDLTASALIDSAAAECMDEMGTMELPPQVEAREAKEPSVSTMLMNFSNDFDPYGALSTPLYQTSTFKQPSATENGQYDYTRSGNPTRDALEKLLAELEKADRAFCFTSGMAALAAVTRLVKAGEEIVAGDDIYGGSDRLLSQVVPKAGIVVKRVDTTNLDEVASVIKPWTKLIWLESPTNPRQQICDIRKIAKIAHAHGALVLVDNSIMSPVLSHPLELGADIVMHSATKFISGHSDLMAGVLAVRGESLAKEVYFLQNAEGAGLAPFDCWLCLRGIKTMALRVEKQQENAQKIAEFLSSHPRVKKVNYPGLLDHPGRSLHFSQATGAGSVLSFLTGSLALSKHVAEATKYFSITVSFGSVKSLISLPCFMSHASIPVEVREARGLTEDLVRISVGIEDVNDLIDDLDYALKTGPA

SEQ ID NO: 1072 - protein, 91 aa, Zea mays
  unsure (1)..(91): unsure at all Xaa locations
KIVETIHSAKASQIFDSRXLPRVQVDAYLSHGPLVRAVCPRGASTGIYEAMXFRDGGSHYXGKGVFQAVNTENTDIGPAMIGWDPTAQTEM

SEQ ID NO: 1073 - protein, 496 aa, Zea mays
ITMDPTKFRPSSSHDTTVTTTNAGAPVWNDNEALTVGPRGPILLEDYHLIEKVAHFARERIPERVVHARGASAKGFFECTHDVTSLTCADFLRAPGVRTPVIVRFSTVIHERGSPETIRDPRGFAVKFYTREGNWDLLGNNFPVFFIRDGIKFPDVIHAFKPNPRSHVQEYWRVFDFLSHLPESLHTFFFLFDDVGVPSDYRHMEGFGVNTYTFVSAAGKAQYVKFHWKPTCGVRCILTDEEAALVGGRNHSHATQDLYDSIAAGSFPEWTLYVQVMDPDTEEQYDFDPLDDTKTWPEDLLPLRPVGRLVLDRNVDNFFNENEQLAFGPGLVVPGIYYSDDKMLQCRVFAYADTQRYRLGPNYLMLPVNAPRCAHHNNHYDGAMNFMHRDEEVDYYPSRHAPLRQAAPPTPLPPRPVAGRREKATIRKPNDFKQPGERYRSWDADRQDRFVRRFADSLGHPKVSQELRSIWIDLLAKCDASLGMKIATRLNMKPNM

SEQ ID NO: 1074 - protein, 312 aa, Bradyrhizobium japonicum USDA 110
MTTSDSLRDTRIPTHESVTIPAVGFGTLIPDPLVTRQAIRAALEAGFRHLDCAERYRNEAAVGDAMQDAFKAGKLRREELFVTTKLWNTNHRPERVKPAFDASRRRLQLDEIDCYIIHTPFAFQPGDEQDPRDASGRVIYDSGVTLVETWHALERLVDEGHCKSIGLSDITLEKLREIVAVARIRPAMVQVESHPYLPEWDLLDFCREHGIVLQAFAALGHAMEPRVLEDPVITAIARRVQKTPAQVCLAWAVQRGTAFLTTSTNPARIRENFDISALPEDAMREIRDGITTNVRFNAVVETGVPGFIPRAR

SEQ ID NO: 1075 - protein, 392 aa, Dinemandra ericoides
DLEPVNPADVPVTAAGALKSYKLAAKAISRLQSLPSGNIPLLCDVLVKEVRDLTGYDRVMVYKFHEDEHGEVVSECRRSDMESYLGLHYPATDIPQASRFLFMKNKVRMICDCLSPPVEVIQDERLPQPLSLCGSTLRSPHGCHAQYMANMGTIASLVMSVTVNEDDDMMDGDQQRMARKLWGLVVCHHTSPRFVPFPLRYACEFLIQVFGVQINKEVDLAAQVREKHILRIQTMLCDMLLRDAPVAIITQSPNVMDLVKCDGAALYYKNKFWLLGVTPTEAQIRDIAEWLLEYHRGNTGLSTDSLMEAGYPGASVLGDAVCGMAAVSITSRDFLFWFRSHTAKEIKWGGAKHDPGDKDDGRKMHPRSSFKAFLEVVKWRSLPWKDMEMDAI

SEQ ID NO: 1076 - protein, 294 aa, Ralstonia metallidurans CH34
MTLAKLDDPVPGDDEVLIDVAAAAVNPIDWKIVSGAMKAFIPLPLPFTPGVDAAGTVLAVGRNVSTLAPGDEVMGFIGIVGAYANRIVVDPARLARKPARLSFTDAAATPAATLTAWQALHEHGELRKGQSVLIHAAAGGVGSAAVQLAKLAGAHVIGTASPGNREYVQSLGAAEVIDYHATDFAKQVSDVDLVLDLVGGTTQARSWSVLKRGGILVSTVSKPDTGRGNKAQVTGKHFATRSDGPQLAALGALHASGDLRIHIDSVFSLPEASHALARSMGGHVRGKVVLDMAA

SEQ ID NO: 1077 - protein, 392 aa, Dinemandra ericoides
DLEPVNPADVPVTAAGALKSYKLAAKAISRLQSLPSGNIPLLCDVLVKEVRDLTGYDRVMVYKFHEDEHGEVVSECRRSDMESYLGLHYPATDIPQASRFLFMKNKVRMICDCLSPPVEVIQDERLPQPLSLCGSTLRSPHGCHAQYMANMGTIASLVMSVTVNEDDDMMDGDQQRMARKLWGLVVCHHTSPRFVPFPLRNACEFLIQVFGVQINKEVDLAAQVREKHILRIQTMLCDMLLRDAPVAIITQSPNVMDLVKCDGAALYYKNKFWLLGVTPTEAQIRDIAEWLPEYHRGNTGLSTDSLMEAGYPGASVLGDAVCGMAAVSITSRDFLFWFRSHTAKEIKWGGAKHDPGDKDDGRKMHPRSSFKAFLEVVKWRSLPWEDIEMDAI

SEQ ID NO: 1078 - protein, 392 aa, Hiraea fagifolia
DLEPVNPADVPVTAAGALKSYKLAAKAISRLQSLPSGNISLLCDVLVKEVRDLTGYDRVMVYKFHEDEHGEVVSECRRPDLESYLGLHYPATDIPQASRFLFMKNKVRMICDCLAPPVKVIQDKRLPQPLSLCGSTLRSPHGCHAQYMTNMRTIASLVMSVTINEDDDTMDGDQQQMTRKLWGLVVCHHTSPRFVPFPLRYACEFLIQVFGVQINKEVELAAQVREKHILQIQTMLCDMLLRDAPVAIITQSPNVMDLVKCDGAALYFKNKIWLLGVTPKEEQIRDIAEWLLEYHSGNTGLSTDSLMEAGYPGASVLGDAICGMAAASITSRDFLFWFRSHTAKEIKWGGAKHEPGDKDDGRKMHPRSSFKAFLEVVKWGSMPWEDIEMDAI

SEQ ID NO: 1079 - protein, 419 aa, Corynebacterium glutamicum ATCC 13032
MGADQAARPTRRTTRRIFDQSEKMKDVLYEIRGPVAAEAERMELDGHNILKLNTGNPAVFGFDAPDVIMRDMIANLPTSQGYSTSKGIIPARRAVVTRYEVVPGFPHFDVDDVFLGNGVSELITMTTQALLNDGDEVLIPAPDYPLWTAATSLAGGKPVHYLCDEEDDWNPSIEDIKSKISEKTKAIVVINPNNPTGAVYPRRVLEQIVEIAREHDLLILADEIYDRILYDDAEHISLATLAPDLLCITYNGLSKAYRVAGYRAGWMVLTGPKQYARGFIEGLELLAGTRLCPNVPAQHAIQVALGGRQSIYDLTGEHGRLLEQRNMAWTKLNEIPGVSCVKPMGALYAFPKLDPNVYEIHDDTQLMLDLLRAEKILMVQGTGFNWPHHDHFRVVTLPWASQLENAIERLGNFLSTYKQ

SEQ ID NO: 1080 - protein, 325 aa, Aspergillus oryzae
MSNGKTFTLSNGVKIPGVGFGTFASEGSKGETYQAVTKALETGYRHLDCAWFYLNEDEVGDGIHDFLKKNPSVKREDIFVCTKVWNHLHRPEDVQWSVDNSLKRLRLDYVDLFLVHWPIASEKEDQEKPKIGPDGKYVILKELTENPEPTWRAMEKIYRDGKAKAIGVSNWTIPGLEKLFKFAEIKPHVNQIEIHPFLPNNELVQFCFKNDILPEAYSPLGSQNQVPTTGERVSENKTLNEIAQKGGNTLAQVLIAWGLRRGYVVLPKSSNPARIESNFKSIELTDEDFEAVNKVAEGRHFRFVNMKDTFGYDVWPEETAKNLSA

SEQ ID NO: 1081 - protein, 505 aa, Oryza sativa (japonica cultivar-group)
MAAPSAIPRRGLFIGGGWREPSLGRRLPVVNPATEATIGDIPAATAEDVELAVSAARDAFGRDGGRHWSRAPGAVRAKYLKAIAAKIKDKKSYLALLETLDSGKPLDEAAGDMEDVAACFEYYADLAEALDGKQRAPISLPMENFESYVLKEPIGVVGLITPWNYPLLMATWKVAPALAAGCTAVLKPSELASLTCLELGGICAEIGLPPGVLNIITGLGTEAGAPLASHPHVDKIAFTGSTETGKRIMITASQMVKPVSLELGGKSPLIVFDDVDIDKAVEWAMFGCFANAGQVCSATSRLLLHEKIAKRFLDRLVAWAKSIKISDPLEEGCRLGSVVSEGQYQKIMKFISTARCEGATILYGGARPQHLKRGFFIEPTIITNVSTSMQIWREEVFGPVICVKEFRTEREAVELANDTHYGLAGAVISNDLERCERISKAIQSGIVWINCSQPCFVQAPWGGNKRSGFGRELGQWGLDNYLSVKQVTKYCSDEPYGWYRPPSKL

SEQ ID NO: 1082 - protein, 392 aa, Hiraea fagifolia
DLEPVNPADVPVTAAGALKSYKLAAKAISRLQSLPSGNISLLCDVLVKEVRDLTGYDRVMVYKFHEDEHGEVVSECRRPDLEPYLGLHYPATDIPQASRFLFMKNKVRMICDCLAPPVKVIQDKRLPQPLSLCGSTLRSPHGCHAQYMTNMRTIASLVMSVTINEDDDTMDGDQQQMTRKLWGLGCCHHTSPRFVPFPLRYACEFLIQVFGVQINKEVELAAQVREKHILQIQTMLCDMLLRDAPVAIITQSPNVMDLVKCDGAALYFKNKIWLLGVTPKEEQIRDIAEWLLEYHSGNTGLSTDSLMEAGYPGASVLGDAVCGMAAASITSGDFLFWFRSHTAKEIKWGGAKHEPGDKDDGRKMHPRSSFKAFLEVVKWRSMPWEDVEMDAI

SEQ ID NO: 1083 - protein, 392 aa, Hiraea fagifolia
DLEPVNPADVPVTAVGALKSYKLAAKAISRLQSLPSGNISLLCDVLVKEVRDLTGYDRVMVYKFHEDEHGEVVSECRRPDLESYLGLHYPATDIPQASRFLFMKNKVRMICDCLAPPVKVIQDKRLPQPLSLCGSTLRSPHGCHAQYMTNMRTIASLVMSVTINEDDDTMDGDRQQMTRKLWGLVVCHHASPRFVPFPLRYACEFLIQVFGVQINKEVELAAQVREKHILQIQTMLCDMLLRDAPVAIITQSPNVMDLVKCDGAALYFKNKIWLLGVTPKEEQIRDIAEWLLEYHSGNTGLSTDSLMEAGYPGASVLGDAVCGMAAVSITSRDFLFWFRSHTAKEIKWGGAKHDPGDKDDGRKMHPRSSFKAFLEVVKWRSMPWEDIEMDAI

SEQ ID NO: 1084 - protein, 502 aa, Xylella fastidiosa Temecula1
MHNGFDALQLHANRLRGVTIPDLLAAELKRPEQYARQVGPLYFNFARQKYDCVALEALFALARNHNVTGAFQRMFCGEQVNVTEGRAVLHTALRGDLSGTSVAVAAYTAAAKVRERMYALIAGLDASEVTDIVSVGIGGSDLGPRLVVDALRPISQGRFRVHFVSNVDGAAMRRTLDMLDPSRTAGILISKTFGTQETLLNGRILYDWLGGSERLYAVTANPERAANAFDIVPTQVLPIWDWVGGRYSLWSAVGFPIALAIGSQRFEELLAGAAEFDAYALRVPLEENVAVLHGLTAVWNRNFLGCATYAVMAYDQRLALLPTYLQQLVMESLGKRVKCDGTPVDRDTVPVWWGGVGTDVQHSFFQALHQGTNIVPADFIGTIRNDDLYTENHFALNANLLAQIEVLANGQLSDNPHRVYPGGNPSTLILLDALTPQALGGLIAMYEHSVYVQSVIWGINAFDQFGVELGKHLAVQLLPALKGESVEVADPVTRAVLLRLRG

SEQ ID NO: 1085 - protein, 608 aa, Mycobacterium bovis AF2122/97
MSYVLATPEMVAAAANNLAQIGSTLSAANAAALAPTTGVLAAGADEVSAAVASLFSGHAQAYQTLGTQAAAFHERFIQALSTAAGAYGSAEAANASPLQQALNVINAPTQTLLGRPLIGNGTNGAPGTGQAGGPGGLLYGNGGNGGSGGVGQAGGAGGSAGLIGIGGTGGAGGAGAVGGVGGNGGWLYGNGGAGGLGGTGVAGVNGGMGAAGGAGGNAYLFGSGGAGGQGGMGAAGADGVNPTPTGTADAGSTGTDQTLGGNAIGGNGGPGDAGDAMTSGGAGGSGGNAVSTVNGDAVGGEGGKGGEGAYGGAGGAGGSAASIGNAAIGGNGGAGGNAQAPGGVGGAGGEGGDAQVGTNSPSNAEAGNGGSGGNGFDSFASGGTGGAGGTGGAGGRGGLLIGDGGAGGAGGVGGTGGSGAPGGGGAGGDGGAANTDSAGSSRKAFGGDGGVGGDGASALGTGGEGGIGGQGGNGGAGGLLIGNGGAGGVGGTAGAGGTGGSGGAGGAGGAGGGGTNSGPGAAFGGNGNTGGNGGNGGAPGALGGKGGSGGLIGRAGSDGGVGAGGAGGAGGAGGTGGEGGTGGDGKTTDGNPGMGGSPGSAGQPGQPG

SEQ ID NO: 1086 - protein, 489 aa, Nostoc sp. PCC 7120
MTIDYDVVIIGGSLAGRYAALTATQMGAKVALVESQLNNSLIVHQAIGEIANLTQNLHNLAGCGIDAVHPDTSEKCQISLKWAAALFSAQGIAANVQEQMSLAHLSAQGVDVIVDSGQFQRSPHLAFVVGQRLLRGRTYLLASGSLPAIPKIEGLQATDYLTPANIWQYLYKQHSPSSELPQNWVIIGGTPQSIEISQTLARLGCSITLVVKSLHLLPQLDPEIAQLLQAQLEIDGVRILTQKMVTQVKRIDDKKWVQAGEKAIEADEILVAIGQKPNIESLNLPEVGVKWQQHRLLVNEKLQTTNHRIYACGDVICGYDLPNVANYEARIALNNALFLPRLQVNYQNTPWAILSHPTLAQVGVTENQAKRQFSQQEVIVLRHYYKSIAAAQLKNEITGICKLVVLGNGKILGATIFSTQARELINLIALAMSRNISVKHLGNLSAVYPSFSELLEQTARDFSQHRFNNNTAWQDWLENLFYLRRNWNL

SEQ ID NO: 1087 - protein, 388 aa, Staphylococcus aureus subsp. aureus MW2
MTIGIDKINFYVPKYYVDMAKLAEARQVDPNKFLIGIGQTEMAVSPVNQDIVSMGANAAKDIITDEDKKKIGMVIVATESAVDAAKAAAVQIHNLLGIQPFARCFEMKEACYAATPAIQLAKDYLATRPNEKVLVIATDTARYGLNSGGEPTQGAGAVAMVIAHNPSILALNEDAVAYTEDVYDFWRPTGHKYPLVDGALSKDAYIRSFQQSWNEYAKRQGKSLADFASLCFHVPFTKMGKKALESIIDNADETTQERLRSGYEDAVDYNRYVGNIYTGSLYLSLISLLENRDLQAGETIGLFSYGSGSVGEFYSATLVEGYKDHLDQAAHKALLNNRTEVSVDAYETFFKRFDDVEFDEEQDAVHEDRHIFYLSNIENNVREYHRPE

SEQ ID NO: 1088 - protein, 235 aa, Exiguobacterium sp. 255-15
MQTQEKEKKVYEVFQSISSNYDQMNSIISFRLHKLWRKETMRRMNVFPGAKCLDLCCGTADWTIQLAKAAGPTGVIKGLDFSENMLKVGVEKVEALEMKNVELIHGNAMELPFGDHSFDFVTIGFGLRNVPDYLQVIKEMHRVLKPGGTVVCLETSQPTAPLFKEAYSLYFGKIMPQVGRLFAKSYDQYNWLQESTEVFLDRVELKQLFEQAGFMQVEVKAFAGGAAAMHLGKKW

SEQ ID NO: 1089 - protein, 213 aa, Xanthomonas campestris pv. campestris str. ATCC 33913
MAFTHLARSDRALGAWMRRIGPIAPQPGWRKPFDPVDALARAILFQQLSGKAAATIVGRVEVAIGASRLHADTLGRVDDAALRACGVSGNKALALRDLARREALGEIPSLRKLAFMEDDAIVEALVPVRGIGRWTVEMMLMFRLGRPDLLPIDDLGVRKGAQRVDKQAQMPTPKELAERGERWGPYRTYAAFYLWKIADFSIAAKVPTPRSQE

SEQ ID NO: 1090 - protein, 127 aa, Glycine max
CGVEVQIVGDDLLVTNPTRVAKAIQEKSCNALLLKVNQIGSVTESIEAVKMSKHAGWGVMTSHRSGETEDTFIADLAVGLSTGQIKTGAPCRSERLAKYNQLLRIEEELGDAAVYAGLKFRAPVEPY

SEQ ID NO: 1091 - protein, 377 aa, Ferroplasma acidarmanus
MLVSMVNLMYIEFTDSGMVVPDILTIGYIDGDGIGPEITGAMIGVVNSAIELAYQGSRSIEWHKILIGTEAYEKFGTYVPEDSIKEIQKMYIAMKSTLNFMPDKRDLNTILRKRLGLYSNIRILKYIEGMDIPVNTFNRLNLTIIRDSTPNSHIFYHSSESTDDLIRFISDNYGLNITPDSGIYMMPQSKFRTRKIAKQAVRYSRRNGKKKITILESQQNHEFANWCIEEASAQEDVGYEVLKTREFMKRLISSPEDFEVILVDNVLSQTLVDYLAGTINIEYGSSIGDECAVFEAVQSSLPSEAGYDAADPLSFILSGCEMLMHIGWVEAAQIIENAISAAFRDNKIPKDINTRPDISPIKCSEFSSEIIKRMNGV

SEQ ID NO: 1092 - protein, 392 aa, Hiraea fagifolia
DLEPVNPADVPVTAAGALKSYKLAVKAISRLQSLPSGNISLLCDVLVKEVRDLTGYDRVMVYKFHEDEHGEVVSECRRPDLESYLGLHYPATDIPQASRFLFMKNKVRMICDCLAPPVKVIQDKRLPQPLSLCGSTLRSPHGCHAQYMTNMRTIASLVMSVAINEDDDTMDGDQQQMTRKLWGLVVCHHASPRFVPFPLRYACEFLIQVFGVQINKEVELAAQVREKHILQIQTMLCDMLLRDAPVAIITQSPNVMDLVKCDGAALYFKNKIWLLGVTPKEEQIRDIAEWLLEYHSGNTGLSTDSLMEAGYPGASVLGDAVCGMAAVSITSRDFLFWFRSHTAKEIKWGGAKHDPGDKDDGRKMHPRSSFKAFLEVVKWRSMPWEDVEMDAI

SEQ ID NO: 1093 - protein, 339 aa, Ralstonia metallidurans CH34
MMKAAVVRAFGAPLTIDEVPVPQPGPGQIQVKIEASGVCHTDLHAAQGDWPVKPSLPFIPGHEGVGFVSAVGANVKRVKEGDRVGVPWLYSACGYCEHCLQGWETLCEKQQNTGYSVNGGYGEFVVADPNYVGLLPKNVDFIEIAPILCAGVTVYKGLKVTDTRPGQWVVISGIGGLGHVAVQYARAMGLRVAAVDIDDAKLAFARKLGAEVAINARTTDPAAFLQKEIGGAHGVLVTAVSPQAFSQAIGMVRRGGTISLNGLPPGDFPTPIFDVVLKAITIRGSIVGTRSDLQEALEFAASGVVKATVSTEKLDSINSIFDRMKAGQIEGRIVLDFSR

SEQ ID NO: 1094 - protein, 392 aa, Janusia californica
DLEPVNPADVPVTAAGALKSYKLASKAISRLQSLPSGNISLLCDVLVKEVRDLTGYDRVMVYKFHEDEHGEVVSECRRSDLESYLGLHYPATDIPQASRFLFMKNKVRMICDCLAPPVKVIQDERLPQPLSLCGSTLRSPHGCHAQYMTNMGTIASLVMSVTVNEGDDTMDGDQQRMTRKLWGLVVCHHTSPQFVPFPLRYACEFLIQVFGVQINKEVELAAQVREKHILQIQTMLCDMLLRDAPVAIITQSPNVMDLVKCDGAALYFKNKTWLLGVTPTEEQIRGIAEWLLKYHSGNTGLSTDSLMEAGYPGASGLGDAVCGMAAVSITSRDFLFWFRSHTAKEIKWGGAKHDPDDKDDLRKMHPRSSFKAFLEVVKWRSMPWEDVEMDAI

SEQ ID NO: 1095 - protein, 392 aa, Janusia californica
DLEPVNPADVPVTAAGALKSYKLASKAISRLQSLPSGNISLLCDVLVKEVRDLTGYDRVMVYKFHEDEHGEVVSECRRSDLESYLGLHYPATDIPQASRFLFMKNKVRMICDCLAPPVKVIQDERLPQPLSLCGSTLRSPHGCHAQYMTNMGTIASLVMSVTVNEDDDTMDGDQQQMTRKLWGLVVCHHTSPQFVPFPLRYACEFLIQVFGVQINKEVELAAQVREKHILQIQTMLCDMLLRDAPVAIITQSPNVMDLVKCDGAALYFKNKTWLLGVTPTEEQIRGIAEWLLKYHSGNTGLSTDSLMEAGYPGASGLGDAVCGMAAVSITSRDFLFWFRSHTAKEIKWGGAKHDPDDKDDLRKMHPRSSFKAFLEVVKWRSMPWEDVEMDAI

SEQ ID NO: 1096 - protein, 367 aa, Rubrobacter xylanophilus DSM 9941
MQAVILVGGLGTRLRPITYDIPKALVPLRNKPFMGYTLDFLRGGGIEGAVLSLGYLPDPIQRYIDERGDLDGFSVEYAVEERPLGTAGGIKNAARFLQDGPVVVLNGDVLTGMDLRKAIELHRSTGALATITLTSVEDPTAYGLVEVDHDMMVRRFIEKPSPDEVTTNLVNAGVYVLEPEVLEMIPPGREVSIEREIFPRLQERRQLYAHVSSSYWKDIGTPRSYLAASHDVLSGAVGAGEGFDYMDVHRSTLIEKNVRILPPVSVAEGCEISAGATVGGRSSLGRGCRVGEGAVVEGSILLDGAVVEAGAVVRGSIVGPGARIGEGAIVRGLSVLGARCVVGEGNVLDQGIRINPGVVLQPRSVSF

SEQ ID NO: 1097 - protein, 392 aa, Janusia californica
DLEPVNLADVPVTAAGALKSYKLASKAISRLQSLPSGNISLLCDVLVKEVRDLTGYDRVMVYKFHEDEHGEVVFECRRSDLESYLGLHYPATDIPQASRFLFMKNKVRMICDCLAPPVKVIQDERLPQPLSLCGSTLRSPHGCHAQYMTNMGTIASLVMSVTVNEDDDTMDGDQQQMTRKLWGLVVCHHTSPQFVPFPLRYACEFLIQVFGVQINKEVELAAQVREKHILQIQTMLCDMLLRDAPVAIITQSPNVMDLVKCDGAALYFKNKTWLLGVTPTEEQIRGIAEWLLKYHSGNTGLSTDSLMEAGYPGASGLGDAVCGMAAVSITSRDFLFWFRSHTAKEIKWGGAKHDPDDKDDLRKMHPRSSFKAFLEVVKWRKMPWEDIEMDAI

SEQ ID NO: 1098 - protein, 211 aa, Carica papaya
MSYDYLFKYIIIGDTGVGKSCLLLQFTDKRFQPVHDLTIGVEFGARMVAIDGRPIKLQIRDTAGQESFRSITRSYYRGAAGALLVYDITRRETFNHLASWLEDARQHANPNMSIMLIGNKSDLSHRRAVSKEEGEQFAKEHGLLFLEASARTAQNVEEAFIRTAAKILQNIQEGVIDVSNESSGIKFGYGRPQGTAGARDGAVAQRSGCCG

SEQ ID NO: 1099 - protein, 413 aa, Rubrobacter xylanophilus DSM 9941
MRSRAARKFSTTPGTRDVLPPESTRLLDVQRRVLGRFRLHGFREVITPALEYAEVVEEARLRDSAFKLFDPDNQMLLLRPEMTTPIARLVSQRLRNAPPPFKLSYSLPVYRRSEVGRGQSAEFHQAGVEVVGSASPGEDAGTIALLVEALEAAGLGPGEDFMVVLGQAAFYRGFLERSCPEVAPALLSALAGKDLVRVEELSRRLPDAVAAGARGIPRLVGPASDGAVLEEAERYASGGGGAALENLRAILELLGAHGRLEAVMLDLGLIGRHDYYTGAVYEVYAAGLGFTVANGGRYDNLLRRFGEPLPATGFAISLERLVSVLPPERPAPLLVLVGEDAEAVRAARALRGEGVPVLHVSGGLAPEEAERYARSVDARWVGYPAPGGVKLREVGEGGFWLLAVEEAARRVLG

SEQ ID NO: 1100 - protein, 392 aa, Mascagnia chasei
DLEPVNPADVPVTAAGALKSYKLASKAISRLQSLPSGNISLLCDVLVKEVRDLTGYDRVMVYKFHEDEHGEVVSECRRSDLESYLGLHYPATDIPQASRFLFMKNKVRMICDCLAPPVEVIQDERLAQPLSLCGSTLRSPHGCHAQYMTNMGTIASLVMAVTINEDDDMMDGDQQQMTRKLWGLVVCHHTSPRFVPFPLRYACEFLIQVFGVQINKEVELAAQVREKHILQIQTMLCDMLLRDAPVAIIMQSPNVMDLVKCDGAALYFKNKTWLLGVTPTEEQIRDIAEWLLEYHSGNTGLSTDSLMEAGYPGASALGDAVCGMAAVSITSRDFLFWFRSHTAKEIKWGGAKHDPDVKDDGRKMHPRSSFKAFLEVVKWRKMPWENIEMDAI

SEQ ID NO: 1101 - protein, 392 aa, Ferroplasma acidarmanus
MAKITFENGKWKVPDNPTILYTDGDGIGPEIMDVTRKVVDAAVKKAYKNKKIEWKEILVGDKALKEKNDRFPEESQEAIKQYRVLLKSPLGTPIGTGFKSINVRIRVMLDLYSNIRPVSFMKGLESPLKHPENVNLTIFRENTDDLYTGIEYKYDSKEAAEIRKFFKDKLHVEISDDSGIGIKPMSKYKTQRITRAAAKFAIENNKKKITIMHKGNVMKYTEGAFREWAYETLKNEFGNYTSTDDSSKILVNDMIADNMFQQIITRPENYEVILAPNIDGDYISDAAGALIGNIGTLGGANVGDDAGMFEAVHGTAPKYAGQNVADPLGLIRGAQLMIKYLNWHEAFDVIEKAIGEAIETKKVTKDLAKFFDVPAMGTKEFGDSLVKIIDGL

SEQ ID NO: 1102 - protein, 161 aa, Zea mays
MAMQAARRLASLKLQRRLLLPSQAESPSISIPTAAAAAAFLHSHATSFGYKQVREEDKSKLVGNVFSSVASSYDLMNDLMSVGLHRLWKDRLISKLNPFPGMKHLDVAGGTGDVAFRVLERVKSVGHRAVQGTLTETEEGTHIYVCDINPNMLNVGKKRAA

SEQ ID NO: 1103 - protein, 454 aa, Mycobacterium tuberculosis CDC1551
MSFVIAAPEFLTAAAMDLASIGSTVSAASAAASAPTVAILAAGADEVSIAVAALFGMHGQAYQALSVQASAFHQQFVQALTAGAYSYASAEAAAVTPLQQLVDVINAPFRSALGRPLIGNGANGKPGTGQDGGAGGLLYGSGGNGGSGLAGSGQKGGNGGAAGLFGNGGAGGAGASNQAGNGGAGGNGGAGGLIWGTAGTGGNGGFTTFLDAAGGAGGAGGAGGLFGAGGAGGVGGAALGGGAQAAGGNGGAGGVGGLFGAGGAGGAGGTVFGSGGAGGAGGVATVAGHGGHGGNAGLLYGTGGAGGAGGFGGFGGDGGDGGIGGLVGSGGAGGSGGTGTLSGGRGGAGGNAGTFYGSGGAGGAGGESDNGDGGNGGVGGKAGLVGEGGNGGDGGATIAGKGGSGGNGGNAWLTGQGGNGGNAAFGKAGTGSVGVGGAGGLLEGQNGENGLLPS

SEQ ID NO: 1104 - protein, 99 aa, Bacillus subtilis
EFIEKTGEEAGLDKQLSRSIGAQTLLGAAKMLMETGEHPEILRDNITSPNGTTAAGLQALKKSGGGEAISQAIKHAAKRSKEISEDIEKTAAPLSGVIK

SEQ ID NO: 1105 - protein, 126 aa, Triticum aestivum
MASSSSPRTMRAVQYDRYGGGAEGLKHVEVPIPSPKKGELLLRMEAASINRVDWKFQNGKARPFLPSKFPFTPVCELAGEVVELGAGVSGFSQGDKVIAVNFPGGGGLAEYAVVPASQAALRPPEV

SEQ ID NO: 1106 - protein, 396 aa, Chlamydophila caviae GPIC
MSFFNQLPTFSPDSILGLQKLFLEDEREEKVNLVIGVYEDPSKAYGGFSSVRKAQFLFLEDEMNKGYLPISGLSSFNQEMEKLVFGDVNSSFVVGAQALGGTGALHLGAKIFSMAYTSGKVYIPEQTWGNHVRIFAQQGLEVLKYPYYSSESKSLLFDEMLSVLKAAPKNSLVLLQCCCHNPTGMDLNEDMWTRLAEVMKEHQLLPFFDTAYLGFGRGIKEDRRPIEIFIEVGNPVFVAACASKNFSLYGERVGYFAVHSKITEDLDKISSCLEEKARGEYSSPPRHGAKIVSTILSDASLKKEWLSELDTIRSSLGKTRARLVQAMRNHVGHSFDFILSQKGFFGYPGFSVEQVLFLRSEKGIYTTSGARFNLNGITDKNIDHVSQSFAEAYQLS

SEQ ID NO: 1107 - protein, 531 aa, Thermosynechococcus elongatus BP-1
MASSPVAPVVLVILDGWGYREETYGNAIASAYTPVIDSLWQAYPHTLIHTSGKAVGLPKGQMGNSEVGHLNIGAGRIVPQELVRISDAVEEGSLFSNPVLVRLCQTVKERNGKLHFIGLCSAGGVHSHIDHLYGLVELAKRHGLPACIHVITDGRDTPPRDAAGVLEELEQRLKTSGCGRIVTVSGRYYAMDRDRRWERTEAAYRVMTSNEHIQPLRAVDVARQSYAQDIGDEFIVPTRIAAGAVEPGDGVVFFNFRPDRARQLTQAFIDPNFSGFERALITPLDFVTFTQYDASFNCGVAFPPQNLSHILGEVIAEHGLKQLRAAETEKYAHVTYFFNGGLEEPFPGEDRILIPSPMVTTYDQAPAMSALAVTQAVKKAIEKQEYALVVVNFANSDMVGHTGKLAATIQAIETVDRCVGVLVEAATKVGGTLLITADHGNAEYMIDEDGNPWTAHTTNPVPFILVEGEKRKVPGHGGHVILRKDGCLADIAPTILEILELPQPLEMTGRSLIVSAPYEMRLNRTPVSLKI

SEQ ID NO: 1108 - protein, 392 aa, Peixotoa glabra
DLEPVNPSDVPVTAAGALKSYKLAAKAISRLQSLPSGNISLLCDVLVKEVRDLTGYDRVMVYKFHEDEHGEVVSECRRSDLESYLGLHYPATDIPQASRFLFMKNKVRMICDCLAPPVQVIQDERLPQPLSLCGSTLRSPHGCHAQYMTNMGTIASLVKSVTVNEDDDTMDGDQQQMTRKLWGLVVCHHTSPRFVPFPLRYACEFLIQVFGVQINKEVELAAQVREKHILQIQTMLCDMLLRDAPVAIITQSPNVMDLVKCDGAALYFKNKTWLLGVTPTEEQIRDIAEWLLKYHSGNTGLSTDSLMEAGYPGASTLGDAVCGMAAVSITSRDFLFWFRSHTAKEIKWGGAKHDPDDKDDLRKMHPRSSFKAFLEVVKWRSMPWEDVEMDAI

SEQ ID NO: 1109 - protein, 489 aa, Brucella melitensis 16M
MAIDLRPFIPFGRGALSQATDPFRAAVEFTLMPMLITNPHLPDNPIVFANPAFLKLTGYEADEVMGRNCRFLQGHGTDPAHVRAIKSAIAAEKPIDIDIINYKKSGEAFWNRLHISPVHNANGRLQHFVSSQLDVTLELSRLVELEKERKTLSIETARSKDQLDYIVEVANIGFWTREFYSGKMTCSAECRRIYGFTPDEPVHFDTILDLVVLEDRMTVVQKAHQAVTGEPYSIEYRIVTRLGETRWLETRAKALTGENPLVLGIVQDVTERKKAEANKALVSREIAHRFKNSMAMVQSIANQTLRNTYDPEQANRLFSERLRALSQAHDMLLKENWAGATIQQICATALAPFNSTFANRIHMSGPHLLVSDRVTVALSLAFYELATNAVKYGALSNEKGVINITWAIMEDKGEKKFHMRWAESRGPEVMQPARRGFGQRLLHSVLAEELKAKCDVEFAASGLLIDVLAPITPEVFPGMGHNVPEQRIA

SEQ ID NO: 1110 - protein, 392 aa, Tetrapterys discolor
DLEPVNPADVPVTAAGALKSYKLAAKAISRLQSLPSGNISLLCDVLVKEVRDLTGYDRVMVYKFHEDEHGEVVSECRRSDLESYLGLHYPATDIPQASRFLFMKNKVRMICDCLAPPVKVIQDERLPQPLSLCGSTLRSPHGCHAQYMTNMGTIASLVMSVTVNDDDDMMDGDQQQMTRKLWGLVVCHHTSPRFVPFPLRYACEFLIQVFGVQINKEVELTAQVREKHILQIQTMLCDMLLRDAPVAIITQSPNVMDLVKCDGAALYFKKKTWLLGVTPMEEQVRDIAEWLLEYHSGSTGLSTDSLMEAGYPGASDLGDAVCGMAAVSITSRDFLFWFRSHTAKEIKWGGAKHDPDDKDDGRKMHPRSSFKAFLEVVKWRSVPWEDIEMDAI

SEQ ID NO: 1111 - protein, 392 aa, Tristellateia madagascariensis
DLEPVNPADVPVTAAGALKSYKLAAKAISRLQSLPSGNISLLCDVLVKEVRDLTGYDRVMVYKFHEDEHGEVVSECRRSDLESYLGLHYPATDIPQASRFLFMKNKVRMICDCLAPPVKVIQDERLPQPLSLCGSTLRSPHGCHAQYMANMGTIASLVMSVTINEDDDTMDGDQQQMARKLWGLVVCHHTSPRFVPFPLRYACEFLIQVFGVQINKELELAAQVREKHILRIQTMLCDMLLRDAPVGIITQSPNVMDLVKCDGAALFYKNKFWLLGITPTEAQIRDIAEWLLEYHSGNTGLSTDSLMEAGYPGASVLGDAVCGMASVSITSRDFLFWFRSHTAKEIKWGGAKHDPDDKDDGRKMHPRSSFKAFLEVVKWRSLPWKDMEMDAI

SEQ ID NO: 1112 - protein, 85 aa, Streptococcus intermedius
AKTVVWNGPMGVFENPDFQAGTIGVMDAIVKQPGVKSIIGGGDSAAAAINLGRADKFSWISTGGGASMELLEGKVLPGLAALTEK

SEQ ID NO: 1113 - protein, 392 aa, Tristellateia madagascariensis
DLEPVNPADVPLTAAGALKSYKLAAKAISRLQSLPSGNISLLCDVLVKEVRDLTGYDRVMVYKFHEDEHGEVVSECRRSDLESYLGLHYPATDIPQASRFLFMKNKVRMICDCLAPPVKVIQDERLPQPLSLCGSTLRSPHGCHAQYMANMGTIASLVMSVTINEDDDTMDGDQQQMARKLWGLIVCHHTSPRFVPFPLRYACEFLIQVFGVQINKELELAAQVREKHILRIQTMLCDMLLRDAPVGIITQSPNVMDLVKCDGAALFYKNKFWLLGITPTEAQIRDIAEWLLEYHSGNTGLSTDSLMEAGYPGASVLGDAVCGMASVSITSRDFLFWFRSHTAKEIKWGGAKHDPDDKDDGRKMHPRSSFKAFLEVVKWRSLPWEDVEMDAI

SEQ ID NO: 1114 - protein, 392 aa, Tristellateia madagascariensis
DLEPVNPADVPLTAAGALKSYKLAAKAISRLQSLPSGNISLLCDVLVKEVRDLTGYDRVMVYKFHEDEHGEVVSECRRSDLESYLGLHYPATDIPQASRFLFMKNKVRMICDCLAPPVKVIQDERLPQPLSLCGSTLRSPHGCHAQYMANMGTIASLVMSVTINEDDDTMDGDQQQMARKLWGLVVCHHTSPRFVPFPLRYACEFLIQVFGVQITKELELAAQVREKHILRIQTMLCDMLLRDAPVGIITQSPNVMDLVKCDGAALFYKNKFWLLGITPTEAQIRDIAEWLLEYHSGNTGLSTDSLMEAGYPGASVLGDAVCGMASVSITSRDFLFWFRSHTAKEIKWGGAKRDPDDKDDGRKMHPRSSFKAFLEVVKWRSLPWEDVEMDAI

SEQ ID NO: 1115 - protein, 295 aa, Xylella fastidiosa Temecula1
MTQRKGIILAGGAGTRLYPITQGIGKQLLPVYDKPMIYYPLSVLMLAGIRQVLVITMLHEQALFQRLLGDGTQWGMEICYAVQASPDGVAQSYLIGRAFIDDKPSCLILGDNIFYGHGLTDTLCHADARTVGATVFGYWVSDPERYGVAEFDGDGRVINIEEKPAQPRSNYAVTGLYFYDGRAPAFAAELTPSARGELEITDLNRRYLAEGALHLEALGRGYAWLDTGTHQSLHDASNFIGTIQTRQGLQVCCPEEVAFWKGWIDATHLERLAAPLAKNAYGQYLLNLAQRGRSL

SEQ ID NO: 1116 - protein, 478 aa, Zea mays
MSKSPVASHPTTTHLVVRRFDPVLPTQGESPDPSPSGIRVLSSPSPSPPSDCPPRLPRRRVSGAAAAAAAAACRAVMATKRSVGTLGEADLKGKKVFVRADLNVPLDDAQKITDDTRIRASVPTIKFLLEKGAKVILASHLGRPKGVTPKYSLKPLVPRLSELLGVEVVMANDCIGEEVEKLAAALPEGGVLLLENVRFYKEEEKNEPEFAKKLASVADLYVNDAFGTAHRAHASTEGVTKYLKPAVAGFLMQKELDYLVGAVANPKKPFAAIVGGSKVSSKIGVIESLLAKVDILILGGGMIYTFYKAQGYSVGKSLVEEDKLELATSLIEKAKAKGVSLLLPTDIVVADKFAADAESKIVPATAIPDDWMGLDVGPDATKTFNEALDTTKTVIWNGPMGVFEFEKFAAGTEAIAKKLAELTTTKGVTTIIGGGDSVAAVEKAGLADKMSHISTGGGASLELLEGKTLPGVLALDDA

SEQ ID NO: 1117 - protein, 101 aa, Nicotiana tabacum
MASSVLSSAAVATRSNVAQANMVAPFTGLKSAASFPVSRKQNLDITSIASNGGRVQCMQVWPPINKKKYETLSYLPDLSQEQLLSEVEYLLKNGWVPCLEF

SEQ ID NO: 1118 - protein, 424 aa, Bradyrhizobium japonicum USDA 110
MRRETLAVHGGFESDPATKAVAVPIYQTASYAFDSADHGAALFNLEVDGFRYTRIGNPTNAVLEKRVAALEGGIEALSVACGQAAVNYAVVNLAEMGSNVVSVPQLYGTTHTLFAHILPRQGIAVRFSDDDRPESVERLIDDDTRAVFCESVGNPAGNVCDIQAMADAAHRHGVPLIVDNTVPTPILLRPIEYGADIVVESLTKFMGGHGTTLGGIIVDGGRFPWAEHRRRFPMMNEPEKSYHGLVFTERYGAAAYIARCRAVSQRTTGAVLAPMNAFLLLQGIETVALRIERHVENGAKVAQFLRNNRRVEWVNYAGFHDSPYFVLTQKYLGGRACSLLTFGVAGGFEAGKRFYDALKLCKRLVNIGDAKTLACHPASTTHRQMSAEEQDKAGVRPEMIRLSVGIEHIDDIVADLDQALCAAN

SEQ ID NO: 1119 - protein, 181 aa, Paenibacillus polymyxa
MSIYDYSAIAMNGKEIVLSDYKDKVVLIVNTASQCGFTFQYQDLQRLYDQFKDRGLVILGFPCNQFADQEPDSNESVQTFCTLNYGVAFPMFQKVNVRDEQAHPLFTYLASSLPFEGFDETHSVAKILIPLIHERHPEYLPGDSIKWNFTKFLIDRNGKVIKRFEATTDPLDMEEYIEALL

SEQ ID NO: 1120 - protein, 251 aa, Photorhabdus luminescens subsp. laumondii TTO1
MVDQTKQTTHFGFRTVAKDEKAGMVAEVFHSVAAKYDLMNDLMSFGIHRIWKRVAIDASGVRRGQRILDLAGGTGDLTAKFSRIVGEKGEVVLADINESMLKVGREKLRDVGIVGNVSYVQANAEALPFPDNYFNCITISFGLRNVTEKEKALRSMFRVLKPGGRLLVLEFSKPLFAPLSKAYDAYSFHVLPKIGQVFVQDAGSYRYLAESIRMHPDQDTLKTMMEEAGFEQVTYTNMTGGIVALHRGFKF

SEQ ID NO: 1121 - protein, 381 aa, Rhodospirillum rubrum
MLFDHGEGAWLVAANGERYLDFGAGIAVNALGYSHPHLVGALERQGRKLWHLSNVYRISEAERLAERLTAACFADVAFFANSGAEANECAIKIARRHHDAHGRPERWRIITFDGAFHGRTLATMAAGGNRKYLDGFGPAVDGFDQCPLEDIEAVRARVGPRTAALMIEPIQGESGIRPVSHGFLRQLRELCDERGLLLIFDEIQCGMARTGHLFAHQEAGVVPDIMSLAKGLGGGFPIGACLATRGAAFGMRPGAHGSTFGGNPLAGAVANAVLDIVMDDGVLAEIRRKSALLRGLLEELAGRYPDLLVEVRGRGLMLGLKTTRPSPEIVEALRARAKVLTIAAGDTVTRVLPPLIVTDKDIRLFAERCDETFAGLSRPAA

SEQ ID NO: 1122 - protein, 391 aa, Androstachys johnsonii
DLEPVNPADVPVTAAGALKSYKLAAKAISRLQSLPSGNISLLCDVLVKEVSDLTGYDRVMVYKFHEDEHGEVVAECRRPDLEPYLGLHYPATDIPQASRFLFMKNKVRMICDCLAPPVEVVQDGKLSQPLGLCGSTLRSPHGCHSQYMRNMGTIASLVMSVTINENDDEMEGDQQKGRKLWGLVVCHHTSPRFVPFPLRYACEFLIQVFGVQINKEVELAAQMREKHILRTQTLLCDMLLRNAPVAIITQSPNVMDLVKCDGAALYYRKKFWLLGITPTEAQIRDIAEWLLEYHSGTTGLSTDSLMEAGYPGASILGDAVCGMAAVRITSKDFLFWFRSHTAKEIKWGGAKHDPNDKEDGRKMHPRSSFKAFLEVVKRRSLPWEDMEMDAI

SEQ ID NO: 1123 - protein, 689 aa, Oryza sativa
MRRRGDQCDDDEIDAAALGVAHRVVGRQQTFLGRPFSLAYLLSIFFPSAGAATARGDGMSVLSFALQGSSTARHGWYNIVCGVAIARYSGLVLVGSHVANVALDQSESYPLTRRSGHKRECHQVAVMASSALICDTEQWKGLQAHYDFVFRHACGGEQAHVGAIQKTHLRDLMDDAERCKAMTAEYEGIFLDYSRQRATGETMEKLFKLAEAAKLKEKIEKMFSGDKINSTENRSVLHVALRAPRDEVIKSDGVNVVPEVWGVKDKIKQFSETFRSGSWVGATGKALTNVVSVGIGGSFLGPLFVHAALQTDPEAAESAKGRQLRFLANVDPVDVARSIKDLDPETTLVVVVSKTFTTAETMLNARTLKEWIVSSLGPDAVAKHMIAVSTNLELVEKFGIDPKNAFAFWDWVGGRYSVCSAVGVLPLSLQYGFPIVQKFLEGAASIDKHFRSSSFEKNIPAILPYSQALEKFAPHIQQLSMESNGKGVSIDGVQLSFETGEIDFGEPGTNGQHSFYQLIHQGRVIPCDFIGVVKSQQPVYLKGEIVSNHDELMSNFFAQPDALAYGKTPEQLHSEKVPEHLISHKTFQGNRPSLSLLLPSLSAYEIGQLLSIYEHRIAVQGFLWGINSFDQWGVELGKSLASQVRKSLHASRMEGKPVQGFNSSTASLLTRYLAVEPSTPYNTTTMPKV

SEQ ID NO: 1124 - protein, 392 aa, Blepharandra heteropetala
DLEPVNPADVPVTAAGALKSYKLAARAISRLQSLPSGNISLLCDVLVKEVRDLTGYDRVMVYKFHEDEHGEVISECCRPDLEAYLGLHYPATDIPQASRFLFMKNKVRMICDCLAPAVKVIQDERLPQALSLCGSTLRSPHGCHAQYMANMGTIASLVMSVIINEDNDMMDGDQQHIARKLWGLVVCHHTSPRFVPFPLRYACEFLIQVFGVQINKEVELAAQVREKHILRTQTLLCDMLLRDAPVAIITQSPNVMDLVKCDGAALYYRKKFWLLGVTPTEVQIRDTAEWLLEYHGGNAGLSTDSLMEAGYPGASDLGNAVCGMAAVRITSRDFLFWFRSHTAKEIKWGGAKHHPNDKDDVRKMHPRSSFKAFLEVVKWRSLPWEDIEMDAI

SEQ ID NO: 1125 - protein, 420 aa, Psychrobacter sp. 273-4
MQNQIFELQYALDTFYLLMCGALVMWMTAGFTMLEAGLVRSKNTVEILTKNIALFATACTMYMICGYAIMYDGNLFLSGIAGTESLVADALATSAENGFDGDAVYSSASDFFFQVVFVATCMSIVSGAVAERMKLWSFLLFAVVMTGVIYPLEGSWTWGGKAVFGLYSLGDLGFSDFAGSGIVHMAGAAAALAGVLLLGARLGKYGSKGEIRAIPGANLPLAALGTLILWMGWFGFNGGSVLKLGDIASANSVAVVFLNTNAAAAGGAIGALLIARLIFGKADLTMLLNGALAGLVAITAEPLTPSALQATLFGMTAGIIVVLSILLLDKIKIDDPVGAISVHGVVGLFGLLIVPLTNPAASLIGQLAGAATIFAWVFVSSLIIWSIIKFVIGLRISEEEEYQGADIAECGMEAYPEFIR

SEQ ID NO: 1126 - protein, 392 aa, Lophanthera lactescens
DLEPVNPADVPVTAAGALKSYKLAARAISRLQSLPSGNISLPSDVLVKEVRDLTGYDRVMVYKFHEDEHGEVVSECCRPDLEAYLGLHYPATDIPQASRFLFMKNKVRMICDCLAPPVKVIQDERLPQPLSLCGSTLRSPHGCHAQYMANMGSIASLVMSVTVNEDDDMVDGDQQQMARKLWGLVVCHHTSPRFVPFPLRYACEFLIQVFGVQINKKVELAAQVREKHILRTQTLLCDMLLRDAPVAIVIQSPNVMDLVKCDGAALYYRKKFWLLGVTPTEAQIRDIAEWLLEYHSGNTGLSTDSLMEAGYPGTSVLGNAVCGMAAVKITSRDFLFWFRSHTAKEIKWGGAKHDPGDKDDIRKMHPRSSFKAFLEVVKWRSLPWEDIEMDAI

SEQ ID NO: 1127 - protein, 380 aa, Diacidia ferruginea
ETPAGALKSYKLAARAISRLQSLPSGIISLLCDVLVKEVRDLTDYDRVMVYKFHEDEHGEVISECCRPDMEAYLGLHYPATDIPQASRFLFMKNKVRMICDCLATPVKVIQDERLPQPLSLCGSTLRSPHGCHAQYMANMGAIASLVMSVTINEDDDVMDGDRQHRARKLWGLVVCHHTSPRFLPFPLRYACEFLIQVFGVQINKEVELAAQVREKHILRTQTLLCDMLLRDAPVAIITQSPNVMDLVKCNGAALYYKKKFWLVGLTPTEAQIRDIAEWLLEYHNGNTGLSTDSLMEAGYPGASELGDTVCGMAVVKITSRDFLFWFRSHTAKEIKWGGAKHDPDDKDDGRKMHPRSSFKAFLEVVKWRSLPWEDVEMDA

SEQ ID NO: 1128 - protein, 138 aa, Triticum aestivum
  unsure (1)..(138): unsure at all Xaa locations
MAPTVMASSATSVAPFQGLKSTAGLPVSRRSNGASLGSVSNGGRIRCMQVWPIEGIKXFETLSYLPPLSTEALLKQVDYLIRFKWVLASSQQVGSXSVEHNATXGYYXWXFWTMWKLPILGALTHXVLTKXEEXKKTL

SEQ ID NO: 1129 - protein, 300 aa, Klebsiella pneumoniae
MKILFTFPGQGGQRPGMLAMIPDREAILTQARAVLGDEVDTLDSADALQHTRAVQLCLLIAGVAWARELQRQGVDPQMVSGLSIGAFPAAVIAGALDFASALRLVALRGDLMEQAYPEGYGLTAIMGLTRPRVEALMQGNEVYLANLNAETQFVIAGRDEAMAEVAQLALRAGASKAQRLAVSVPSHCALLDKPAAELAKAFAGASLRRPRCAYLSGSTARVLWDPQRIADDLAMNMARPVHWQEAMVAADERDARLAIEMPPGGVLTCLTRQAGWRGETIALERSGLDVARHLAQRLSD

SEQ ID NO: 1130 - protein, 392 aa, Byrsonima crassifolia
DLEPVNPADVPVTAAGALKSYKLAARAISRLQSLPSGNISLLCDVLVKEVRDLTGYDRVMVYKFHEDEHGEVISECRRPDLEAYLGLHYPATDIPQASRFLFMKNKVRMICDCLAPPVKVIQDERLLQPLSLCGSTLRSPHGCHAQYMANMGTIASLVMSVTINEDDDMMDMDQQHMAGKLWGLVVCHHTSPRFVPFPLRYACEFLIQVFGVQINKEVELAAQVREKHILRTQTLLCDMLLRDAPVAIITQSPNVMDLVKCNGAALYYRKKFWLLGVTPTEAQIRDIAEWLLEYHSGNTGLSTDSLMEAGYPGASDLGHAVCGMAAVKITSRDFLFWFRSHTAKEIKWGGAKHDPDDKDDGRKMHPRSSFKAFLEVVKWRSLPWEDMEMDAI

SEQ ID NO: 1131 - protein, 258 aa, Zea mays
MVPWEGYVSDETMGTFSPIVLYWLYAGGYQLILHRRPLERYRLHTRDEEEEKNLVSLSTVVRGVLLQQLVQAIVAMILFMVTSDSSITVVQPPIVVQIFQFLVAMLVMDSWQYFVHRYMHQNKFLYRHIHSQHHRLIVPYAIGALYNHPLEGLLLDTLGGAISFLVSGMTPRTAVFFFCFAVLKTVDDHCGLWLPYNIFQHLFQNNTAYHDIHHQLQGTKYNYSQPFFSIWDRMLGTHMPYDLVSRKEGGFEARPSRD

SEQ ID NO: 1132 - protein, 87 aa, Glycine max
  unsure (1)..(87): unsure at all Xaa locations
MAALMISFPAVTTVNRAGAGMDVPFTGLKYMDGFPSMMSNIDITFIVSNGGXVQCMLDRSPYGKKKFETLFHLPDLDDAQLVKEVLF

SEQ ID NO: 1133 - protein, 371 aa, Acinetobacter calcoaceticus
MSELKDIIAAVTPCKGADFELQALKIRQPQGDEVLVKVVATGMCHTDLIVRDQYYPVPLPAVLGHEGSGIIEAIGPNVTELQVGDHVVLSYGYCGKCTQCNTGNPAYCSEFFGRNFSGADSEGNHALCTHDQGVVNDHFFAQSSFATYALSRENNTVKVTKDVPIELLGPLGCGIQTGAGACINALKVTPASSLVTWGAGAVGLSALLAAKVCGASIIIAVDIVESRLELAKQLGATHVINSKTQDPVAAIKEITDGGVNFALESTGRPEILKQGVDALGILGKIAVVGAPQLGTTAQFDVNDLLLGGKTILGVVEGSGSPKKFIPELVRLYQQGKFPFDQLVKFYAFDEINQAAIDSHKGITLKPIIKIA

SEQ ID NO: 1134 - protein, 475 aa, Nostoc sp. PCC 7120
MSASSNSSKIKFGTDGWRGIIADDFTFPNVRKVTRAIASYLETAYTKDRPVLIAYDTRFLADQFAQTAAQVLADLGWNVKVTDRDCPTPVIAYNARHLNSAGALMFTASHNPAPYCGIKYIPDYAGPATPEITDTIVANIESASDELPSGKPSGTISTFDPKPDYLQFIYTLLDIERIKSAQLKVKYDALYSTSRGYLDEVLLESGVQLESFHTWRDVLFGGGMPEPKGEQLVELVEAVRRDHADLGLATDGDSDRFGIVDELGNVLTPNTVLLVLARHLIKNKGKTGAIVRTVATTHLLDNFAAKYGLTIYETAVGFKYIGEKMRETAVLIGGEESGGLSIIGHIPEKDGVLADMLIAEAIAYEGKPLSQLVKEAIAEADGPLYNNRLDLHLTEAHKVAVIDSFTKNPPSEVAGIKVKEVGRKDGIKLYLEEGSWVLLRPSGTEPLVRVYLETNSPEKLSKLEQELESAIAKLG

SEQ ID NO: 1135 - protein, 558 aa, Arabidopsis thaliana
MAFAVSVQSHFAIRALKRDHFKNPSPRTFCSCFKSRPDSSYLSLKERTCFVSKPGLVTTRYRHIFQVGAETGGEFADSGEVADSLASDAPESFSWSSVILPFIFPALGGLLFGYDIGATSGATLSLQSPALSGTTWFNFSPVQLGLVVSGSLYGALLGSISVYGVADFLGRRRELIIAAVLYLLGSLITGCAPDLNILLVGRLLYGFGIGLAMHGAPLYIAETCPSQIRGTLISLKELFIVLGILLGFSVGSFQIDVVGGWRYMYGFGTPVALLMGLGMWSLPASPRWLLLRAVQGKGQLQEYKEKAMLALSKLRGRPPGDKISEKLVDDAYLSVKTAYEDEKSGGNFLEVFQGPNLKALTIGGGLVLFQQITGQPSVLYYAGSILQTAGFSAAADATRVSVIIGVFKLLMTWVAVAKVDDLGRRPLLIGGVSGIALSLFLLSAYYKFLGGFPLVAVGALLLYVGCYQISFGPISWLMVSEIFPLRTRGRGISLAVLTNFGSNAIVTFAFSPLKEFLGAENLFLLFGGIALVSLLFVILVVPETKGLSLEEIESKILK

SEQ ID NO: 1136 - protein, 294 aa, Zea mays
  unsure (1)..(294): unsure at all Xaa locations
YNRSNPAVKRILQEVKEMQSNPSPDFMSLPLEEDIFEWQFAILGPRDSEFEGGIYHGRIQLPSDYPFKPPSFMLLTPSGRFEIQKKICLSISNYHPEHWQPSWSVRTALVXALIAFMPTNPGGALGSLDYKKEDRRALGIKSREAPPKFGSPERQKLIDEIHEQMLSKAPVPQTLPNVPNEESNELPASDPSGEHADKVDEGDNTSGSVSDSSSGLPVPESESGVTENTGETSAVEVANHQVPEASRRESIPRVPSSLQNAAIATHKPKHDRLLTLAAFGLTLAIMALVIKKFL

SEQ ID NO: 1137 - protein, 468 aa, Escherichia coli CFT073
MEGIMPDAKKQGRSNKAMTFFVCFLAALAGLLFGLDIGVIAGALPFIADEFQITSHTQEWVVSSMMFGAAVGAVGSGWLSFKLGRKKSLMIGAILFVAGSLFSAAAPNVEVLILSRVLLGLAVGVASYTAPLYLSEIAPEKIRGSMISMYQLMITIGILGAYLSDTAFSYTGAWRWMLGVIIIPAILLLIGVFFLPDSPRWFAAKRRFVDAERVLLRLRDTSAEAKRELDEIRESLQVKQSGWALFKENSNFRRAVFLGVLLQVMQQFTGMNVIMYYAPKIFELAGYTNTTEQMWGTVIVGLTNVLATFIAIGLVDRWGRKPTLTLGFLVMAAGMGVLGTMMHIGIHSPSAQYFAIAMLLMFIVGFAMSAGPLIWVLCSEIQPLKGRDFGITCSTATNWIANMIVGATFLTMLNTLGNANTFWVYAALNVLFILLTLWLVPETKHVSLEHIERNLMKGRKLREIGAHD

SEQ ID NO: 1138 - protein, 466 aa, Escherichia coli O157:H7
MPHSYDYDAIVIGSGPGGEGAAMGLVKQGARVAVIERYQNVGGGCTHWGTIPSKALRHAVSRIIEFNQNPLYSDHSRLLRSSFADILNHADNVINQQTRMRQGFYERNHCEILQGNARFVDEHTLALDCPDGSVETLTAEKFVIACGSRPYHPTDVDFTHPRIYDSDSILSMHHEPRHVLIYGAGVIGCEYASIFRGMDVKVDLINTRDRLLAFLDQEMSDSLSYHFWNSGVVIRHNEEYEKIEGCDDGVIMHLKSGKKLKADCLLYANGRTGNTDSLALQNIGLETDSRGQLKVNSMYQTAQPHVYAVGDVIGYPSLASAAYDQGRIAAQALVKGEATAHLIEDIPTGIYTIPEISSVGKTEQLLTAMKVPYEVGRAQFKHLARAQIVGMNVGTLKILFHRETKEILGIHCFGERAAEIIHIGQAIMEQKGGGNTIEYFVNTTFNYPTMAEAYRVAALNGLNRLF

SEQ ID NO: 1139 - protein, 197 aa, Nicotiana tabacum
MSASRFIKCVTVGDGAVGKTCLLISYTSNTFPTDYVPTVFDNFSANVVVNGSTVNLGLWDTAGQEDYNRLRPLSYRGADVFILAFSLISKASYENVSKKWIPELKHYAPGVPIVLVGTKLDLRDDKQFFIDHPGAVPITTAQGEELRKTIGAPAYIECSSKTQQNVKAVFDAAIKVVLQPPKQKKKKGKAQKACSIL

SEQ ID NO: 1140 - protein, 258 aa, Actinobacillus pleuropneumoniae serovar 1 str. 4074
MTDLQHTTETAENETTHFGFKTVAKEEKQQLVANVFHSVAGKYDLMNDLLSFGIHRVWKRFTIDCSGVRKGQKVLDLAGGTGDFTAKFSRIVGENGEVVLADINSSMLEVGREKLRNLGVVGNVNYVQANAECLPFADNTFDCVVISFGLRNVTDKDKALRSMFRVLKPGGRLLVLEFSKPIIDPISQLYNFYSFNILPKVGEVVVNDAESYRYLAESIRMHPKQDELKAMMENAGFESVNYYNLSAGIVALHRGYKF

SEQ ID NO: 1141 - protein, 181 aa, Coffea arabica
MASSMISSAAVATTTRASPAQASMVAPFNGLKAASSFPISKKSVDITSLATNGGRVQCMQVWPPRGLKKYETLSYLPDLTDEQLLKEIDYLIRSGWVPCLEFELEKGFVYREYHRSPGYYDGRYWTMWKLPMYGCTDATQVLNEVGECLKEYPNCWVRIIGFDNVRQVQCISFIAAKPKGF

SEQ ID NO: 1142 - protein, 392 aa, Coleostachys genipifolia
DLEPVNPADVPVTAAGALKSYKLAARAISRLQSLPSGNISLLCDVLVKEVRDLTGYDRVMVYKFHEDEHGEVVSECRRPDLEAYLGLHYPATDIPQASRFLFMKNKVRMICDCLAPPVKVIQDKRLVQPLSLCGSTLRSPHGCHAQYMANMGAIASLVMSVTINEGDDTMDGDQQQMARKLWGLVVCHHTSPRFVPFPLRYACEFLIQVFGVQINKEVELAAQVREKHILRTQTLLCDMLLRDAPVAIITQSPNVMDLVKCDGAALYYRKKFWLLGVTPTEAQIKEIAQWLIEYHSGDTGLSTDSLMEAGYPSASVLGDAVCGMAAVKITSRDFLFWFRSHTAKEIKWGGAKHDPDDKDDGRKMHPRSSFKAFLEVVKWRSLPWEDVEMDAI

SEQ ID NO: 1143 - protein, 400 aa, Rhodospirillum rubrum
MSIVAERLSAIKPSPTLAVTTKAAELKAAGRDIIGLGAGEPDFDTPDHIKQAAIAAIERGETKYTAVPGTAALRKAICAKLKRENDLEYTIEEISVGCGGKQTIYNALMATLNPGEEVIIPAPYWVSYPDIALLAGGVPVFVPSGPEVGFKLQPADLERAITPKTKWLILNSPSNPTGVAYSAADLKALAEVLLKHPHVWVMTDDMYEHLVYDGFKFATIAQVEPKLKDRTLTLNGVSKSFAMTGWRVGYAAGPVAVIKAINKIQSQSTTHTSSISQAAALAALEGPMDFLIERNAIFKERRDLVVRMINDCPGLSVGTPEGAFYVYPSCAGVIGKTTPEGKLLETDSDFVAALLESEGVAAVQGVAFGLSPYFRISYATATATLEDACQRIRRFCESLR

SEQ ID NO: 1144 - protein, 392 aa, Acmanthera latifolia
DLEPVNPADVPVTAAGALKSYKLAARAISRLQSLPSGNISLLCDVLVKEVRDLTGYDRVMVYKFHEDEHGEVVSECRRPDLEAYLGLHYPATDIPQASRFLFMKNKVRMICDCLAPPVKVFQDKRLAQPLGLCGSTLRSPHGCHAQYMANMGAIASLVMSVTINEGDDMIDGDQQQMARKLWGLVVCHHTSPRFVPFPLRYACEFLIQVFGVQINKEVELAAQVREKHILRTQTLLCDMLLRDAPVAIVTQSPNVMDLVKCDGAALYYRKKFWLLGVTPTEVQIKEIAEWLIEYHSGNTGLSTDSLMEAGYPGASVLGDAVCGMAAVKITSKDFLFWFRSHTAKEIKWGGAKHDPDDKDDGRKMHPRSSFKAFLEVVKWRSLPWEDMEMDAI

SEQ ID NO: 1145 - protein, 392 aa, Pterandra arborea
DLEPVNPADVPVTAAGALKSYKLAARAISRLQSLPSGDISLLCDVLVKEVRDLTGYDRVMVYKFHEDEHGEVVSECRRPDLEAYFGLHYPATDIPQASRFLFMKNKVRMICDCLAPPVQVIQDKRLAQPLSLCGSTLRSPHGCHAQYMANMGAIASLVISVTINEGDDMMDGDQQQMARKLWGLVVCHHTSPRFVPFPLRYACEFLIQVFGVQITKEVELAAQVREKHILRTQTLLCDMLLRDAPVAIITQSPNVMDLVKCDGAALYYRKKFWLLGVTPTEAQIKEIAEWLLEYHSGNMGLSTDSLMEAGYPGASVLGNAVCGMAAVKITSRDLLFWFRSHTAKEIKWGGAKHDPDDKDDGRKMHPRSSFKAFLEVVKWRSLPWEDVEMDAI

SEQ ID NO: 1146 - protein, 272 aa, Agrobacterium tumefaciens str. C58
MVYKASGPLVLVGAGNMGGAMLSGWLKKGVPGSKVIVIDPRPSDAMRTTIAEAGATHSESVPEGVKAGILFVAVKPQMMDAILPSLKPLLGPETVVVSIAAGTTIATFVSHFGAVAAVRAMPNTPAMVGRGVTGAYANDLVTAELKTVVDGLLKVSGPVEWVEAESDIDAVTAVSGSGPAYVFYLVECMAEAGRKAGLPADVAMRLARETVAGAGELLHQSPEEAARLRQNVTSPGGTTAAALSVLMAEDGMQPLFDRAVAAAKTRAEELAG

SEQ ID NO: 1147 - protein, 392 aa, Galphimia gracilis
DLEPVNPADVPVTAAGALKSYKLAARAISRLQSLPSGNISLLCDVLVKEVRDLTGYDRVMVYRFHDDEHGEVVSECCGPDLEAYLGLHYPATDIPQASRFLFMKNKVRMICDCLAPPVKVLQDERLPQPLSLCGSTLRSPHGCHAQYMANMGTMASLVMSVTINEDDNMLDGDQQHMARKLWGLVVCHHTSPRFVPFPLRYACEFLIQVFGVQINKEVELAAQMTEEHILRTQTLLCDMLLRDAPVAIITQSPNVMDLVKCDGAALYYRKKFWLLGVTPTEAQIRGIAEWLLEYHGGNTGLSTDSLMEAGYPGASVLGDAVCGMAAVKITSRDFLFWFRSNTAKEIKWSGAKHDPGDKDDIKKMHPRSSFKAFLEVVKWRSLPWEDVEMDAI

SEQ ID NO: 1148 - protein, 392 aa, Acridocarpus natalitius
DLEPVNPADVPVTAAGALKSYKLAAKAISRLQSLPSGNISLLCDVLVKEVRDLTGYDRVMVYKFHEDEHGEVVSECRRSDLEAYLGLHYPATDIPQASRFLFMKNKVRMICDCLAPPIKVIQDERLPQPLSLGGSTLRSPHGCHAQYMANMGTIASLVMSVTINEDDDMMDGDQQQMARKLWGLVVCHHTSPRFVPFPLRYACEFLIQVFGVQINKEVELAAQVREKHILQIQTLLCDMLLRDAPVAIITQSPNVMDLVKCDGAALYYKKKFWLLGITPTEAQIRDIVEWLLEFHSGNTGLSTDSLMEAGYPGASVLGDAVCGMAAVSITSKDFLFWFRSHTAKEIKWGGAKHDPDVKDDGRKMHPRSSFKAFLEVVKWRSLPWEDVEMDAI

SEQ ID NO: 1149 - protein, 487 aa, Staphylococcus epidermidis ATCC 12228
MGEFKGFMKYDKQSLSELSLVDRLSNHEAFQQRFTKEDASIQGARCMDCGTPFCQTGQSYGRETIGCPIGNYIPEWNDLVYHQDFKAAYERLRETNNFPEFTGRVCPAPCEQSCVMKINRESVAIKGIERTIIDEAYENEWVHPAYPEDHKDQRVAIVGSGPAGLTAAEELNFKGYKVTVYEKAHEPGGLLMYGIPNMKLDKDVIRRRVSLMKDAGVLFKTGVEIGVDVSRETLEENYDAIILCTGAQNARDLPLEGRMGSGIHFAMDYLTEQTQYLNGEIESLSITAKDKNVIIIGAGDTGADCVATALRENCKSIVQFNKYTKQPEEITFESNTSWPLAMPVFKMDYAHKEYEAKFGQEPRAYGVQTMRYDVDELGNVKGLYTQILKETPDGMVMEDGPERFWPADLVLLSIGFVGTETTVPHAFDIHTERNKIVANDTNYQTNHAKIFAAGDARRGQSLVVWAIKEGREVAHSVDQYLSKEVLV

SEQ ID NO: 1150 - protein, 299 aa, Zea mays
MMRETYMDVLPPVDHIAARSNWFPAAARLWTAAENKQFERALAGLDLCRPDWEEVARAIPGRTVREVVSHFKHLEVDVQQIESGQVPLPAYGGGASSFTLQWDGYGPGPGDFRHGYRFAGGCGRRHHGRTPEQERKKGVPWTEEEHRLFLLGLKKYGKGDWRNISRNFVQTRTPTQVASHAQKYFIRLNSGGKDKRRSSIHDITTVNLTDDQPPSPSQSSLITSQSNAPAPAPAPAPAAGICQVPLAADAKRHGAGTLPFSSPNRTSAAPAYRMEFHDQQGLQCGPLHDQLLASQSVLF

SEQ ID NO: 1151 - protein, 272 aa, Staphylococcus aureus subsp. aureus MW2
MNVYLAEFLGTAILILFGGGVCANVNLKRSAANGADWIVITAGWGLAVTMGVFAVGQFSGAHLNPAVSLALALDGSFDWSLVPGYIVAQMLGAIVGATIVWLMYLPHWKATEEAGAKLGVFSTAPAIKNYFANFLSEIIGTMALTLGILFIGVNKIADGLNPLIVGALIVAIGLSLGGATGYAINPARDLGPRIAHAILPIAGKGGSNWSYAIVPILGPIAGGLLGAVVYAVFYKHTFNIGCAIAIVVVIITLILGYILNKSSKKGDIESIY

SEQ ID NO: 1152 - protein, 290 aa, Shigella flexneri
MKTRKGIILAGGSGTRLYPVTMAVSKQLLPIYDKPMIYYPLSTLMLAGIRDILIISTPQDTPRFQQLLGDGSQWGLNLQYKVQPSPDGLAQAFIIGEEFIGGDDCALVLGDNIFYGHDLPKLMDTAVNRESGATVFAYHVNDPERYGVVEFDDNGTPISLEEKPQQPKSNYAVTGLYFYDNDVVEMAKNLKPSARGELEITDINRIYMDQGRLSAMMGRGYACLDTDTSKPIEASNFIATNEDRQGLKVSCPEEIAHRKGFIDAEQVKVLAEPLKKNAYGQYLLKMIKGY

SEQ ID NO: 1153 - protein, 506 aa, Acinetobacter sp. ADP1
MSDDKLKCPVTHLTTDAGAPVVDNQNSMTAGARGPLLTQDLWLNEKMANFAREVIPERRMHAKGSGAFGTFTVTHDITQYSRAKIFSEIGKKTEMFARFSTVAGERGAADAERDIRGFALKFYTEEGNWDMVGNNTPVFFMRDPRKFPDLNKAVKRDPKTNLRSATYNWDFWTLLPEALHQVTIVMSDRGIPDGYRHMHGFGSHTYSFINASNERFWVKFHFRTQQGIKNLTDAEAEAIVAKDRESSQSDLFNAIEQGNYPKWTMFVQIMPETDAEKVPYHPFDLTKVWPHGDYPLIEVGEFELNRNAENYFQDVEQATFAPSNLVPGISYSPDRMLQARLVNYADAHRYRVGVNHTQIPVNAPRCPVHSNRRDGQGRMDGNYGGLPHYEPNSFHQWQEQPEFREPPLKITGDADFWDFRQDDSDYFSQPRALFNLMNDEQKQALFGNTARAMGDALDFIKYRHIRNCYACDPAYGEGVAQALGMTVADAQAARDSDPAKGHPGFL

SEQ ID NO: 1154 - protein, 532 aa, Mycobacterium tuberculosis CDC1551
MSFVIAAPEVMAAAATDLANIGSSISAASAAAAGPTMGILAAGADEVSVAISALFGSHAQGYQTLSAQLAAYHNQFVRALNAGAGSYASAEAANVQQTLLNAINAPTQTLLGRPLIGNGADGGPGQNGGPGGLLYGNGGNGGAGDTANPNGGNGGSAGLIGNGGAGGAGAATGAGGAGGNGGWLYGNGGPGGAAGLGTAGGVSPAGGAGGAAGLWGHGGAGGAGGSASGAPGAGGAGGDGGRGGLLYGDGGAGGAGGNGSNGVTGVHGGNGGAGGAAGLIGNGGAGGDGGNGGLSNTGASGGAGGAGGAALIGNGGDGGHGGNGGHGNSGGAGGAGGAGGAGGAGGHVGLIGNGGNGGAGGNGGNDNSSTLADAGSGGAGAAGGNGGLFYGNGGVGGRGGNGGFSSAGTSGGDGGIGGAGGIGGLIGSGGGGGDGGNGGQAPTPGNAGDGGAGGNARLIGDGGRGGNGGEGGDGPPGVKGDGGNGGNGGNAVVIGNGGNGGAGGFGIPVGSGGAGGSRGVLFGTPGANGADG

SEQ ID NO: 1155 - protein, 553 aa, Chlamydia muridarum
MSSSKHSSLCQKTPPLCRELQKAPALLLTEDTRFSALLNDRVETVAQLFPCTYESPYRKFIPKSDLPLDIAPLKVGVMLSGGPAPGGHNVILGLLHSIKKLHPHSKLLGFIRNGHGLLNNNTVEITEEFMKEFRNSGGFNCIGTGRTNIITEENKARCLQTANQLDLDGLVIIGGDGSNTATAILAEYFAKHRAKTVLIGVPKTIDGDLQHLFLDLTFGFDTATKFYSSIISNISRDALSCKGHYHFIKLMGRSSSHITLECALQTHPNMALIGEEIAEKGTSLSALIQGICEMISDRAAMGKYHGVILIPEGVIEFIPEIQTLVKEIESFPEQTDLSQALSPSSQQLLHQFPEDIRHQLLYNRDAHGNVYVSQISVDKLLIHLVQNHLETHFKHVPFNAISHFLGYEGRSGTPTHFDNVYSYNLGYGAGILVFNRCNGYLTTIEGLTNPIEKWRLRALPIVRMLTTKTNKDGTLYPLIKKGLVDISSPVFNKFSLYRKIWALEDSYRFVGPLQIHSPEDSHSDDFPPLILFLNHNEWQKRCSICLEIPDQDY

SEQ ID NO: 1156 - protein, 484 aa, Enterococcus faecalis
MKNQHLTTSQGSPVGDNQNSLTAGEFGPVLIQDVHLLEKLAHFNRERVPERVVHAKGAGAHGIFKVSQSMAQYTKADFLSEVGKETPLFARFSTVAGELGSSDTLRDPRGFALKFYTDEGNYDLVGNNTPIFFIRDAIKFPDFIHSQKRNPRTHLKSPEAVWDFWSHSPESLHQVTILMSDRGIPLSFRHMHGFGSHTFKWVNAAGEVFFVKYHFKTNQGIKNLESQLAEEIAGKNPDFHIEDLHNAIENQEFPSWTLSVQIIPYADALTMKETLFDVTKTVSQKEYPLIEVGTMTLNRNPENYFAEVEQVTFSPGNFVPGIEASPDKLLQGRLFAYGDAHRHRVGANSHQLPINQAKAPVNNYQKDGNMRFNNGNSEINYEPNSYTETPKEDPTAKISSFEVEGNVGNYSYNQDHFTQANALYNLLPSEEKENLINNIAASLGQVKNQEIIARQIDLFTRVNPEYGARVAQAIKQQAHHHHHH

SEQ ID NO: 1157 - protein, 279 aa, Zea mays
  unsure (1)..(279): unsure at all Xaa locations
SRPAGPGNNLAMQEFMILPVGATTFAEALRMGSEVYHVLKSIIKSKYGQDACNVGDEGGFAPNVQDNREGLILLMDAIEKAGYTGKIKIGMDVAASEFLTKDGNYDLNFKNQPNDGAHILSAQHLGDLYGDFVKDFPIVSIEDPFDQDDWSSWASLQSSVDIQIVGDDLLVTNPKRIADAIDKKACNALLLKVNQIGTVTESIEAALDSKLLVXGVMVSHRSGETEDNFIADLAIGLASGQIKTGAPCRSERLAKYNQLLRIEEELGNVRYAGEAFRSP

SEQ ID NO: 1158 - protein, 351 aa, Acinetobacter sp. ADP1
MNAIPVVNLVNKPCYSQFEDQDWEILSQHWYPVARIEEVSMQPQQVTLLDVKMALYKTASGDIHLVRDICPHRGVPLTKGWVEGEEIVCPYHGLRYNAEGKCTKIPAQPELTKISDRFSLTKFPVIQKYGLIWTSIQNRNVASANLPELDTWDMPEHQAILPPFVDIAGSSGRQLEGFIDVAHFAWVHHEAFASRENPVVPKYSTVKTDYGLRTEYMSDVSNYPHELQHLAPKDFLWKRTFDVYPPFSAVLTVDFPNDGVLKILNACCPISPNKTRLFVPLTRNFDTTGDLQAVYDFNAQIFAEDQEMVEAQKPEELPLDLTMEAHFEADRSSTMYRRILADLGLSKRYIV

SEQ ID NO: 1159 - protein, 548 aa, Chlamydia muridarum
MELLSVNKSYFELQRLHYRPVTLALLDNLCSLHIKESASSEPNPGLLAKHIPHLCALPNLTIQKGDRSSSEPLRIGVLLSGGQAPGGHNVVIGLFEGLRAFNKETKLFGFIKGPLGLIRGLYKDLDISVIYDYYNAGGFDMLSSSKEKIKTKEQKSAILSTVKKMKLHGLLIVGGDNSNTDTAMLAEYFIEHNCPTAVIGVPKTIDGDLKNSWIETPLGFHTSCRTYSEMIGNLEKDILSTRKYHHFVKLMGEQASHSTLECGLQALPNITLIGEEVAIHHTSLRSLSHHIARGLIKRFRKDKNYSTILIPEGLIKQIPDTKLLIHELNALIAEGQFSVNHFDQQLSPMALQTFSSLPENIREQLLLDRDSYGNVRVSKIAIEELLASLVSDEIAKLEPTMPFAPVTHFLGYESRASFPSNFDSNYGLALGIAASLFLVRGKTGYMVTIGNLAEEYAHWTIAATPLYKMMHLEKRFNEETPVIKTDSVSPHSPMVQYLHKIKEACLLEDLYRFPGPLQYFEEQALIDQRPLTLLWEKGALSENNANRL

SEQ ID NO: 1160 - protein, 158 aa, Staphylococcus aureus subsp. aureus MW2
METIYDFVVETNKGVTYKLDAYKGDVMLIVNTASECGFTSQFEGLQSLYEKYKDQGFVILGFPCNQFGGQEPGSGEEAAQNCKLNYGVTFPMHQKIDVKGEHQLPLFRYLTAAQHGFFNEKIKWNFTKFLVDREGNVVKRFAPQKKPVQIEREIEKLL

SEQ ID NO: 1161 - protein, 234 aa, Clostridium perfringens str. 13
MASLLAELIGTMLLIILGDGVVANVVLKKTKGNSSGWIVITTGWALAVAIPAAIFTSVSGALFNPALTIALAIVGQFTWSQVIPYIIAQLLGAFLGAVVVYITYYNHFEETEDQNSKLGVFCTIPEIEDHKINFLTEFIGTFVLTFAVLGIGAQNIDYGVKVIIIGCLIWAIGLSLGGPTGYAINPARDFGPRLAHFLLPIPRKGSSKWEYAWIPIVAPIIGAICGALVYVNIF

SEQ ID NO: 1162 - protein, 190 aa, Triticum aestivum
MEEAKKKPRGVLDLEAQFAFFRSQHRHPVNAAAHALLAGPILFGNLLILYFLPLPSPLDPALALSLAYAAAYLAVDRRAGALAALLLLGAWAASRALAARLGFALAWKLVLATELFCWTWQFLGHGHFEKKGPTVSELPAVFLMEPFLILLQILNKLFGYEPYPGFSKNVDKKMEADLRESRELEQRKIN

SEQ ID NO: 1163 - protein, 513 aa, Nitrobacter hamburgensis
MDIRAQVSMVFHLDKCIGCHTCSIACKNIWTDRKGTEYMYWNNVETKPGTGYPTRWEDQTKYRGGWVVDGTRQKSLRLRLQGKWGTLSNIFYNPYLPTLDDYFEPWTYDYQNLINAPLADEQPTARAISMVTGKYMDTIEAGPNWDDDLGGSQVYANNDPNFDGASDEEMRQINEINSTVFFYLPRICNHCLNPGCVAACPQGAIYKRGEDGVVLVSQERCRAWRMCVSGCPYKKTYFNWSTGKAEKCILCYPRLESGHAPACFHSCVGRIRYIGLVLYDADAIEETAKAPQDQLVMAQRNIIKDPFDPDIIAAARANGIPDSKIEAAQKSPVYQFVKKWGIALPLHPEFRTLPMLFYVPPLGPVLAKVENGVYDNIASESRLGPLMSSLERSRIRLRYMASLLSGGNEDIIRDVYKKLVAVRVYMRSKKVKDIPEEEVQRALAEGKTTAAEVEAVWRLTSLPTFEERFVVPPMERETAVDSLFPQLDPVSRNYPVRKGEVGVGFHTDPARGP

SEQ ID NO: 1164 - protein, 1122 aa, Stellaria longipes
MASRAQSQSSTNSGRSKHSARIIAQTIQDAKFHAEFEESSNEFDYSSSVRGSTSGVNQLPKSDKVTSSYLLQIQKGKFIQPFGCLLALDDKTFRVIAFSENAPEMLTMVSHAVPSVGDLPVIGIGTDIRTIFTGPSASALQKALGFTDVSLLNPILVHCKNSGKPFYAIVHRVTRSLVIDFEPVKPYEVPMTAAGALQSYKLAAKAITRLQSLPSGNMVRLVDTMVQEVFELTGYDRVMAYKFHDDDHGEVVSEVTKPNLDSYLGLHYPATDIPQAARFLFMKNKVRLICDCRAKNVRVVQDEKLSVDLTLCGSTLRAPHGCHAQYMENMNSIGSLVMAVVVNDEDDEDGGSAPAQPHKRKRLWGLVVCHHTSPRFVPFPLRYACEFLAQVFAIHVNKELELENQFLEKKILRTQTLLCDMLIRDAPLGIVTHSPNIMDLVKCDGAALLYNNKVWRLGSTPTDYQLQEIGGWLSRDHMDSTGLSTDSLYDAGYPAALELGDSVCGMAAVSITVNDMLFWFTSHTAAEIKWGGAKHEAGEKDDGSKMHPRSSFKAFLEVVKRRSVPWKDYEMDAIHSLQLILRNAFKDGEAADLNTSVIHSKISDLQISGLKELEAVTSEMVRLIETATVPIFAVDSDGLVNGWNTKIYELTGIPVEEAVGKHIAALVEDSSIDNVKQMLQSALQGEEKKNVQFEVKRHHSIPDSGPISLIVNACASKDVNGNVVGVCLIAQDITGQKTVMDKFLRIEGDYKAIIQSPNPLIPPIFGTDEFGWCSEWNPAMAKLTGWTREEVIDKMLLGEVFGMHKSCCRLKNQEAFVNLGVLLNGAMSGQNIEKLSIGFFTRSGKYIECLLCVNKKLNGEGDVTGVFCFLQLASHDLQHALHIQRLAEQAATKRANVLAYMKRQIKNPLAGIIFSGKILDGTNVDEKQRLVLQTSARCQGQLNKILDDSDLDSIIDGYCELEMVEFAVQDILVASISQVMAKSSEKGIQMSNNCTEHGFKETLYGDSLRLQQILADFLSISVNFTSPGGHIGVTVRLTKDKIGESVQLANLEFRIMHTGGGISEELLSEMFESRGNASEDGISLLISRKLVKLMNGDIQYLRSAGTSTFIISVELAVAGNSS

SEQ ID NO: 1165 - protein, 1128 aa, Stellaria longipes
MESRNEGSRTNNNNNSNNPSDTMSRAIAQYTIDARLHAVFEQSGESGKSFDYSQSVKTYTSAESVPEQQITAYLSKIQRGGLIQPFGCMLAIDDLTYRIIAYSQNSVELLGFITTTTTTAVPSLEAVQQRIIAVGTDIRSLFMSSSCVLLEKAFSAREITLLNPVWIHSKANGKPFYAILHRIDVGIVIDLEPARTEDPALSIAGAVQSQKLAVRAISQLQSLPGGDVKLLCDTVVESVRQLAAYDRVMVYKFHEDEHGEVVAESKRADLEPYLGLHYPATDIPQASRFLFKQNRVRMIVDCHADSVSVVQDERLRQPLCLVGSTLRAPHGCHSQYMANMGSIASLVMAVIINGNDDEGSTRNAMRLWGLVVCHHTSPRSIPFPLRYACEFLMQAFGLQLNMELQLSAQVLEKRVLRTQTLLCDMILRESPTGIVTQSPSIMDLVKCDGAALLFCGKYYPLGVTPTELQLKDIVQWLLSNHGDSTGLSTDSLADAGYPGALALADAVCGMAVAFITRSDFLFWFRSHPAKEIKWGGAKHHPEDKDDVQRMNPRSSFKAFLEVVKSRSLPWENAEMDAIHSLQLILRDSFKDEETTHSKAIVHDQAGDVAMQGIDELSSVAKEMVRLIETAMAPIFAVDADGCINGWNAKASELIGLSVEEAMGKSLVHDLVCEDSKNVTQELLLHALQGDEDKNVEIKLKAFGSQQHKKAVYVVVNACCSKDYTNKIVGVCFVGHDVTGQKNVMDKFVNIQGDYKAIVHSPSPLIPPIFASDENSCCTEWNTAMEILTGYGKEDVIGKTLVGEIFGSICRLKGHDSLTKFMVVLHNAIGGQDSDKFPFSFYNRGGRYVQGLLTANKRTNIDGHITGAFCFLQIASSDLQQALEIQRQQENVCFERMKELAYLCQEIKNPLNGIRFANSLLEATSLGEDQKQFIETSNACEKQIKKILGDIHLESVDESPFELVKTEFMLGNIINAVVSQVMIPLRERELQLIRDIPEEIKTLAVCGDQIRIQQILAEFLVNMVRYAPSPDGWVEIHVLPRLKQVADGATVAYIEYRLVSPGEGLPPDLVQDMFHNSRWTTQEGLGLSMCRKILKLMNGEVQYIRESERSYFFVILELRMPPKQLMNVE

SEQ ID NO: 1166 - protein, 141 aa, Zea mays
  unsure (1)..(141): unsure at all Xaa locations
HDATHPVAHCSGYSEEHCLSWIQGDAEALSFEDGSMDGYTIAFGIRNVTHIEKALSEAYIMWMSLFLNRCYDAYSFPMIPTIGELVAGDRRIEDGQXLTRPVNLEPWQEKFAQMIQEAGIQRVEYENLVGGVVAIHSGLKL

SEQ ID NO: 1167 - protein, 358 aa, Acidithiobacillus ferrooxidans
MKKIAIFAGDGIGPEIVAAARQVLDAVDQAAHLGLRCTEGLVGGAALDASDDPLPAASLQLAMAADAVILGAVGGPRWDAYPPAKRPEQGLLRLRKGLDLYANLRPAQIFPQLLDASPLRPELVRDVDILVVRELTGDIYFGQPRGLEVIDGKRRGFNTMVYDEDEIRRIAHVAFRAAQGRRKQLCSVDKANVLETTRLWREVVTEVARDYPDVRLSHMYVDNAAMQLIRAPAQFDVLLTGNMFGDILSDEASQLTGSIGMLPSASLGEGRAMYEPIHGSAPDIAGQDKANPLATILSVAMMLRHSLNAEPWAQRVEAAVQRVLDQGLRTADIAAPGTPVIGTKAMGAAVVNALNLKD

SEQ ID NO: 1168 - protein, 431 aa, Rhodospirillum rubrum
MMRAFTFLPAALVALLAPALAYAQDAAPTLDSGNTAWMLTSTALVLLMTIPGLALFYAGMVRKKNVLATMMQSFIITALVSVVWMVAGYSIAFGTGNAYFGDFSKFLLSDISIDSLNGTFPETVFVVFQMTFAIITPALITGAFAERMKFSAMLWFIGLWVLIVYAPICHWVWSSSGFLFNAGVLDYAGGTVVHINAGVAGLVCALVLRRRAGFGSENMAPYNLSLAVIGAALLWVGWFGFNAGSAVAADGRAGMAMLATQLGAAGATLSWIAAEWLVRGKPSVLGAVSGAVAGLVAITPASGFVLPGGALVIGLVAGVVCFWGATWLKKTLGYDDSLDAFGVHGIGGLVGALLTGVFAAQSVGGEAAVGLLEGNPGQVLTQAWGCLATIVWTAVASYVILKVIDLAIGLRVSPEQESEGLDISLHGERLQ

SEQ ID NO: 1169 - protein, 374 aa, Rhodococcus ruber
MKTKAAVLRGVGQDWRIEEIELGDPVPGEVQVRLVASGMCHSDHHLRTGGSPIPFPVIGGHEGSGIVTKVGPGVTSLVEGDHVVTAFIPACGTCGPCSRGLQNLCDEGAGLLTGRSISDGTYRASAKGEPLVPMCLLGTFSPYITVNEASLVKIEKDIPLEAAALLGCGVATGWGSATAIGGTKVGDTVVVVGVGGVGINAVQGAAAAGARHVIAVDPVEFKRHMALALGATHVYASLEEAMEPVRDLTWGLMADVTVLTVGDIEGDIIQPALTITAKAGQVVVTAMGDATKNEVTLNLFELTLLQKRVQGAIFGGVGPRTQIPALLHHYRSGALKLEELATTVYRLEDVNQGYDDMLAGKNLRGIIRYTDADF

SEQ ID NO: 1170 - protein, 242 aa, Populus tremuloides
MGRGRVQLKRIENKINRQVTFAKRRNGLLKKAYELSVLCEAEVALIIFSNRGKLYEFCSGSSMLKTLERYQKCNYGAPEPNVSAREALELSSQQEYLKLKARYEGLQRTQRNLLGEELGPLSSKDLESLERQLDMSLKQIRSTRTQYMLDQLNDLQHKEHMLTAANKSLKERLMEGYQLNSLQLNPSAEDVEYARQQAQPQGDGFFHALECEPTLQIGYQPENITMVTAGPSMTTYMPGWLA

SEQ ID NO: 1171 - protein, 474 aa, Rhodococcus ruber
MTAGHFTELYINGSWVASTSKTVIEVLNPATEEVIGTVPDGTAADVDAAVAAARAAFDGWASTPVDKRAQYLRAIAAGIADRSDELARTISAEMGAPLSFAQAMQVPLPINSFSHAAAVAESFPFERTEGSSVIVREPIGVVGAITPWNYPLHQIAAKVAYALAAGNTIVVKPSEVAPLNAWMLAEIIDAAGVPAGVFNLVSGTGPVVGEALASHHEVDMISFTGSTNAGKRVSELAAQTVKRVALELGGKSANIVLDDADIDELMPNAVQWAMINSGQTCSALTRLLVPRAILTEAETAAKTIAEAYTVGAPDDPDTTLGPLVSATQLKRVRGYIDRGVQEGATLITGGSEPVEGLAVGYYVKPTIFSEVTPDMTIHREEIFGPVLSIAPYDTEEDAVRIANDSEYGLRGGVWSRDVDRARAVAARMRTGQVMINGGEFNPNAPFGGYKQSGTGREFGTHGLEEFLEIKSLQF

SEQ ID NO: 1172 - protein, 392 aa, Acridocarpus macrocalyx
DLEPVNPADVPVTAAGALKSYKLAAKAISRLQSLPSGNISLLCDVLVKEVRDLTGYDRVMVYKFHEDEHGEVVSECRRSDLEAYLGLHYPATDIPQASRFLFMKNKVRMICDCLAPPVKVIQDERLPQPLSLCGSTLRSPHGCHAQYMANMGTIASLVMSVTVNEDDDMMDGDQQQMARKLWGLVVCHHTSPRFVPFPLRYACEFLIQVFGVQINKEVELAAQVREKHILQIQTLLCDMLLRDAPVAIITQSPNVMDLVKCDGAALYYKKKFWLLGITPTEAQIRDIVEWLLEYHSGNTGLSTDSLMEAGYPGVSVLGDAVCGMAAVSITSKDFLFWFRSHTAKEIKWGGAKHDPDDKDDGRKMHPRSSFKAFLEVVKWRSLPWEDMEMDAI

SEQ ID NO: 1173 - protein, 652 aa, Ipomoea trifida
MAPAGKVTSFYRQGNDWFCNASLPSDISLIVDGVNFHLHKFYSGVIYDTLNSNLTTKKMLTVQFPLISKCGRIFKALEEAEGTNGQTSTTRLEDFPGGADIFLVTVKYCYGCRVEFTPRNIVMVYCAADYLEMTDEYGENNLLSKSDDYFHKNVLTNWKDCILALQSCNSMIPRAIKLQIIGKCLNALSVMVCTDPSLFGWPMLMYGSLQSPGGSILWNGINTGARIQSTASDWWFEDISYLSVPLFERLIQTMETKGIKPESLAGAIMHYCRKYLPGLGRWQSGQIVTSRTVASFSMTPATVDQKDLLESIVKLLPTKKGKSFCRFLLGLLRVALILGINHSCQETLERRIGMQLHLATLDSLLIPSYSDSDTLYNTDCVERMIHHFISEPAVTTVSPSSFDLGTSPSSEPLCRVAKLMDSYIAEIASDVNLKPERIRALAEALPDSSRSLHDGLYRAVDIYFKAHPWLPDRDKEQLCNIIDFQKLSIDACAHASQNERLPLRIILQVLFFEQLQLRTALAGCLHVLDTESANAAPAAGPSDMAGHIVQRDGWVTVVRENQVLRVDLERMRSRVRELEEEFSKIKQEMRKVSKSHSHLSSPRFLARRMGCKLLPRSSDAQPDVIGSTGPTPRASVEHPRTSGGHRKSFSLF

SEQ ID NO: 1174 - protein, 325 aa, Arabidopsis thaliana
MAVDLMRFPKIDDQTAIQEAASQGLQSMEHLIRVLSNRPEQQHNVDCSEITDFTVSKFKTVISLLNRTGHARFRRGPVHSTSSAASQKLQSQIVKNTQPEAPIVRTTTNHPQIVPPPSSVTLDFSKPSIFGTKAKSAELEFSKENFSVSLNSSFMSSAITGDGSVSNGKIFLASAPLQPVNSSGKPPLAGHPYRKRCLEHEHSESFSGKVSGSAYGKCHCKKSRKNRMKRTVRVPAISAKIADIPPDEYSWRKYGQKPIKGSPHPRGYYKCSTFRGCPARKHVERALDDPAMLIVTYEGEHRHNQSAMQENISSSGINDLVFASA

SEQ ID NO: 1175 - protein, 392 aa, Triaspis hypericoides
DLEPVNPADVPVTAAGALKSYKLAAKAISRLQSLPSGNISLLCDVLVKEVRDLTGYDRVMVYKFHEDEHGEVVSECRRSDLESYLGLHYPATDIPQASRFLFMKNKVRMICDCVAPPVKVIQDKRLPQPLSLCGSTLRSPHGCHAQYMTNMGIIASLVMSVTVNEEDDMVDGDQLQMARKLWGLVVCHHTSTRFVPFPLRYACEFLIQVFGVQINKEVELAAQVREKHILQIQTMLCDMLLRDAPVAIITQSPNVMDLVKCDGAALYFKNKTWLLGVTPTEEQIRDIAEWLLEYHSGNTGLSTDSLMEAGYPGASALGDAVCGMAAVSITSTDFLLWFRSHTAKEIKWGGAKHDPDDKDDGRKMHPRSSFKAFLEVVKWRSMPWEDVEMDAI

SEQ ID NO: 1176 - protein, 293 aa, Shigella flexneri 2a str. 2457T
MKGIILAGGSGTRLHPITRGVSKQLLPIYDKPMIYYPLSVLMLAGIREILIITTPEDKGYFQRLLGDGSEFGIQLEYAEQPSPDGLAQAFIIGETFLNGEPSCLVLGDNIFFGQGFSPKLRHVAARTEGATVFGYQVMDPERFGVVEFDDNFRAISLEEKPKQPKSNWAVTGLYFYDSKVVEYAKQVKPSERGELEITSINQMYLEAGNLTVELLGRGFAWLDTGTHDSLIEASTFVQTVEKRQGFKIACLEEIAWRNGWLDDEGVKRAASSLAKTGYGQYLLELLRARPRQY

SEQ ID NO: 1177 - protein, 392 aa, Triopterys rigida
DLEPVNPADVPVTAAGALKSYKLAAKAISRLQSLPSGNISLLCDVLVKEVRDLTGYDRVMVYKFHEDEHGEVVSESRRSDLESYLGLHYPATDIPQASRFLFMKNKVRMICDCLAPPVKVIQDERLSQPLSLCGSTLRSPHGCHAQHMTNMGTIASLVMSVTVNEDDDMVDGDQPQMTRKLWGLVVCHHTSPRFVPFPLRYACEFLIQVFGLQINKEVELAAQVREKHILQIQTMLCDMLLRDAPVAIITQSPNVMDLVKCDGAALYFKNKTWLLGVTPTEEQIRDIAEWLLEYHSGNTGLSTDSLMEAGYPGASAVGDAVCGMAAVSITSRDFLFWFRSHTAKEIKWGGAKHDPDDKDDGRKMHPRSSFKAFLEVVKWRSMPWEDVEMDAI

SEQ ID NO: 1178 - protein, 364 aa, Pichia ofunaensis
MMKALCYLGSKTIKWQTVAKPTLKSPTDVIGKLSALTLCGSDLHIIAGHVKESTDIAESQPGRGLILGHEGIIKVEEVGDAVKNFKRGDVCIVSCITSCGECYYCKRDLQSHCNRTEGTSGWILGHEIDGTQAEYVRIPYADQSLYKAPENVPIESLLMLSDILPTAYEVGVVSGNVKKGDTVAIVGLGPVGLSALLSAKALDPAKIIAIDMDDSRLEVARRLGAHETINPGKQDAAKLVHELTASEGKSSGVDVAIECVGVPATFEMCEDLLCPGGHLSNVGVHGSSVELKLQELWIKNISISTGLVSAYSTETLLQKVIDKKLDPTPLATHHFKLSEIEKAYDVFSHAADNQAIKMVITCDE

SEQ ID NO: 1179 - protein, 465 aa, Ferroplasma acidarmanus
MLLNSMILYYTTIPDSTSWLNTGNNGWMLTASTLVGLMSIPGLAIYYAGLTKRKYMVNAMMMALYAFAAVLIIWILAGYNFGFGTSSLLKIDGYYIFGIPSPAGAGSFISGQAIVGPLKDALTIPNSTVMFFQFVFAAITPILLLGGILERMNFKAWMIFVPIWSLIVYSPVAYWLFAGGWLNQLGAVDFSGGYVIHLDAGIGALAAAFVIGPRLKDEMKMKANNLGLVMLGLGLIWLGWDGFNGGDPYGATIDAGIAIINTNVATAVSMMTWMFMDLKFFKKPSLIGASVGAIAGLVGITPAAGYVNIYGAMVIGIATGIIPWIFLYKIEPKFKVDDSLGVFSSHAVAGVVGGLLTGVLADPVVTQYIDPGLRGALYGNFYELGIQAFAAVIVILYVFALTYGLLRLIGVFIPLRETNARLKIGDMAIHGEAGLDITGYPPSPPMHAIEHNNIHMEGNEKIDKD

SEQ ID NO: 1180 - protein, 188 aa, Zea mays
MMRETYMDVLPPVDHIAASRSGGWFPGAARLWTAAENKQFERALAGLDLCRPDWEKVARAIPGRTVREVVSHFKSLQVDVQQIESGLVPMPVYGAGAGAGSFTLQWDGCYGPADSRHNGYRFGSGGCGMRHHGRTPEQDRKKGVPWTEEEHRLFLLGLKKYGKGDWRNISRNYVHTRTPTQVASHAQK

SEQ ID NO: 1181 - protein, 392 aa, Peregrina linearifolia
DLEPVNPADVPVTAAGALKSYKLAAKAISRLQSLPSGNISLLCDVLVREVRDLTGYDRVMVYKFHEDEHGEVVSECRRSDLESYLGLHYPATDIPQASRFLFMKNKVRMICDCLAPPVKVIQHERLPQPLSLCGSTLRSPHGCHAQYMTNMATIASLVMSVTVNEDDETMDGDQQQMTRKLWGLVVCHHTSPRFVPFPLRYACEFLIQVFGVQINKEVELAAQVREKHILQIQTMLCDMLLRDAPVAIITQSPNVMDLVKCDGAALYFKNKTWLLGVTPTEEQIRGIAEWLLEYHSGNTGLSTDSLMEAGYPGASGLGDAVCGMAAVSITSRDFLFWFRSHTAKEIKWGGAKHDPDDKDDLRKMHPRSSFKAFLEVVKWRSMPWEDMEMDAI

SEQ ID NO: 1182 - protein, 392 aa, Janusia anisandra
DLEPVNPADVPVTAAGALKSYKLAAKAISRLQSLPSGNISLLCDVLVKEVRDLTGYDRVMVYKFHEDEHGEVVSECRRSDLESYLGLHYPATDIPQASRFLFMKNKVRMICDCLAPPVKVIQDERLPQPLSLCGSTLRSPHGCHAQYMTNMGTIASLVMSVTVNEDDDTMDGDQQQMARKLWGLVVCHHSSPQFVPFPLRYACEFLIQVFGVQINKEVELAAQVREKHILQIQTMLCDMLLRDAPVAIITQSPNVMDLVKCDGAALYFKNKTWFLGVTPTEEQIRGIAEWLLKYHSGNTGLSTDSLMEAGYPGASGLGDAVCGMAAVSITSRDFLFWFRSHTAKEIKWGGAKHDPDDKDDLRKMHPRSSFKAFLEVVKWRSVPWEDVEMDAI

SEQ ID NO: 1183 - protein, 595 aa, Oryza sativa
  unsure (1)..(595): unsure at all Xaa locations
MASSASLQRFLPPSSHVAASRRRPPAVRTRPVQSLTVSAPSSSTPVADDAVSAERLEPRVEQREGRYXVLKEKYRAGLNPXEKVKLGKEPISLFMEGGIKELAKMPMEEIEADKLSKEDIDVRLKWLGLFHCHKHQYGRFMMRLKLPNGVTTSEQTRYLASVIEAYGKDGCADVTTRQNWQIRGVTLPDVPAILDGLNAVGLTSLQSGMDNVRNPVGNPLAGIDPDEIVDTRSYTNLLSYITSNFQGNPTITNLPRKWNVCVIGSHDLYEHPHINDLAYMPAVKDGKFGFNLLVGGFISPKRWEEALPLDAWVPGDDIIPVCKAVLEAYCDLGTRGNRQKTRMMWLIDELGMEVFWSEVEKRMPNGVLERAAPKDLIDKKWQRRDYLGVHPQKQEGLSYVGLHVPVGRVQAADMFELARLADEYGSGELRLTVEQNIVIPNVKDEKVEALLAEPLLQKFSPQPSLLLKGLVACTGNQFCGQAIIETKQRALLVTSQVEKLVSVPRAVRMHWTGCPNSCGQVQVADIGFMGCLTKDSAGKIVEAADIFVGGRVGSDSHLAGVYKKSVPCDELAPIVADILVERFGAVRREREENEE

SEQ ID NO: 1184 - protein, 486 aa, Oryza sativa
  unsure (1)..(486): unsure at all Xaa locations
MSVQEYLEKHLLSRKIEEAVNAAVRAKAPDPVLFISNHMRRAAPAVITIVRARQILDGRGEPAVEVXLHTNKAVHRASAAAADAPEGAAADAVRDAEKRKLLARAVADAVRVINDKVSEALVGMDPQQQSQIDQAIMDLDKAHHKVNPXKPQIGVNSMLAVSIAACKAGAAEKDVPLYKHIAELVGKSATTLPIPAITVINGGTHAGNSLPIQEIMILPVGAKNFEEAMQMGSETYHHLKDIILEKYGSNSCNIGDDGGFAPNISSITEGLDLVIEAINRAGYNGRIKLAIDVAATDFCMGNKYDMEFKFAEKSGQGFKTADDLIEIYSQLCSEYPLVSIEQPFDKDDWEHSKKFTTLELCQVQVVGDDLLMSDPERIKRAVNEYTCNALVLKANQVGTVTEAIEVVRQAKDAHWGVMVSHRSGDTDDSFIADLAVGAAAGQIKXAGAPCRGECLSKYNQLLRIEEELGSDGVYAGENWRTTASTS

SEQ ID NO: 1185 - protein, 1114 aa, Stellaria longipes
MSSSTSRNSSVRSRHDAHVVIQTPVDAQLASDFEQSERVFNYTSSVDLNLLASSSDVPSSTVKSYLQKVQRGGLIQSFGCLIAIDEKNFKVIAYSENAPEMLDLTPHTVPNIEQLEALTFGTDVATLFTSSGVSALQKAVNYSELNLLNPILVHSKNSGKPFYAILHRIKVGLVLDLETVNLAETLVGVSGALMSYKLAAKAISKLQSLPSQNIPLLCDVLVKEVRELTGYDRVMVYKFHDDQHGEVIGESHSPSLDSYLGLHYPATDIPQASRFLFLKNKVRMICDCRSPSVKVIQDEALTQPLSLGGSTLRAPHGCHAQYMANMGSIASLVMAVTINNEEDEVSDRHRTRKLWGLVVCHHTSSRFVPYPLRYACEFLVQVFGIHINKEVELAAQVREKHILKIQSMLCDMLMRDSPITIITQSPNVMDLVKCDGAALLYQSKLWVLGITPKSNQIKDISQWLFEYHGNTKGLITDSLKEAGYPGALELGDAVCGMAAVRISSEEMLFWFRSHTAKEIKWGGAKHEPGQNDERGIMHPRSSFNAFLDVVKWRSVPWEDMEMDSIYSLQLIFIKCLVKNKTMSDTSKMIVNVPGVGVGGPLSSALKVEPLTGEVIRLIETAAVPIFSVDVTGAINGWNFKVAELTGVPMEQVIGSQLVDVVVEGTVEVLKNILSSALQGTEEKNVEIRLRTLGSHGKTSYVVLVVNACCSRDVDENVTGICFVGQDVTEEKRIVDQITELQGDYSGIMRNPCHLIPPIFLIDDQGVGLEWNDAMAKISGLSKEYTVGRMLIGEVFTNGNDGCQVKDYETLLRLKIFLSKMIDGEESDKVLFGFFDHRKKCIDALLCATPRFNADRNITGVLCFLHLPSPELQYSIHMQKVSEKAATSTLKKLTYFREQVRSPIKGMAFTRNLLESSELNIEQKQILTTISLCESQLMKIIEDTDIPSIEEGYLETSSDDFNLLEALDAVVSQVMPLSQESQVHIKHDFPSDLSPVCLFGDNVRLQQILSNFLTIAVRFTPPSTGSSVKFAVSSRTEHVGSKMQMFHVEFRITHPLPGVPENLIREMFQRSPGMSRGGLSLYISHKLVKIMNGTLQYLRGEDYSSFIVFLEFPVA

SEQ ID NO: 1186 - protein, 868 aa, Mycobacterium bovis AF2122/97
MSFVIAAPEVIAAAATDLASLESSIAAANAAAAANTTALLAAGADEVSTAVAALFGAHGQAYQALSAQAQAFHAQFTQALTSGGGAYAAAEAAATSPLLAPINEFFLANTGRPLIGNGANGAPGTGADGAPGGWLIGNGGAGGSGAANNAVGGTGGTGGAGGASGLLGSGGAGGAGGVATNTGGIGGAGGTGGNAVLFGAGGAGGASTNTTGGAGGAGGDGGNAGLLFGAAGVGGAGGFALATTASGGAGGAGGAGGMFTDGGVGGVGGKGGFGGAGGAGGNGGLFGAGGTGGAGGTIGAGVAGMGGAGGAGGAGGLFGAGGTGGSGGGGATTGGDGGAGGAGGFGRTTGGIGGTGGNAGLLNGSGGAGGAGGAAITGPGGTGGAGGIPGLIGNGGNGGDGGASVTGTGGNGGAGGNGVQIGNGGNGGSGGTGAAAGKAGLGGLGGQLIGLDGSNAPVSTSVHTLQQAALNVVNEPFQTLTGRPLIGNGANGTPGTGAAGGAGGWLFGNGGNGGHGATNTAATATGGAGGAGGILFGTGGNGGTGGIATGAGGIGGAGGAGGVSLLIGSGGTGGNGGNSIGVAGIGGAGGRGGDAGLLFGAAGTGGHGAAGGVPAGVGGAGGNGGLFANGGAGGAGGFNAAGGNGGNGGLFGTGGTGGAGTNFGAGGNGGNGGLFGAGGTGGAAGSGGSGITTGGGGHGGNAGLLSLGASGGAGGSGGASSLAGGAGGTGGNGALLFGFGGAGGAGGHGGAALTSIQQGGAGGAGGNGGLLFGSAGAGGAGGSGANALGAGTGGTGGDGGHAGVFGNGGDGGAGGFGAGTGGSGGVGGNAVLIGNGGNGGNAGKAGATPGAGGTGGLLLGENGLNGLP

SEQ ID NO: 1187 - protein, 877 aa, Mycobacterium bovis AF2122/97
MSFVIAAPEVIAAAATDLASLGSSISAANAAAAANTTALMAAGADEVSTAIAALFGAHGQAYQALSAQAQAFHAQFVQALTSGGGAYAAAEAAAVSPLLDPINEFFLANTGRPLIGNGANGAPGTGANGGDGGWLIGNGGAGGSGAAGVNGGAGGNGGAGGLIGNGGAGGAGGVASSGIGGSGGAGGNAMLFGAGGAGGAGGGVVALTGGAGGFTNGSALGGAGGAGGAGGLFATGGVGGSGGAGSSGGAGGAGGAGGLFGAGGTGGHGGFADSSFGGVGGAGGAGGLFGAGGEGGSGGHSLVAGGDGGAGGNAGMLALGAAGGAGGIGGDGGTLTAGGIGGAGGAGGNAGLLFGSGGSGGAGGFGFADGGQGGPGGNAGTVFGSGGAGGNGGVGQGFAGGIGGAGGTPGLIGNGGNGGNGGASAVTGGNGGIGGTGVLIGNGGNGGSGGIGAGKAGVGGVSGLLLGLDGFNAPASTSPLHTLQQNVLNVVNEPFQTLTGRPLIGNGANGTPGTGADGGAGGWLFGNGGNGGSGATGTNGGDGGDGGAGGIFFGTGGTGGAGGVGTTGTGGDGGAGGAAFLVGSGGNGGSGGAGLTAGGDGGDGGNAGSFFGAAGTGGAGASTKAGGTGGTGGNGGLFANGGAGGSGGLGGDAGTGGAGGNGGLFGAGGTGGAGGSLGPGAGGAGGNGGLFGAGGTGGSGGHGTPAAVPGGAGGAGGNAGLFSLGASGGAGGSGGSSLTDSGGIGGVGGAGGLLFGYGGAGGAGGYSNIGAGGAGGAGGNAGMLSGSGGSGGTGGASGAAKGGVGGNGGTAGVFGNGGDGGAGGFGAGTGGNGGVGGNAVLIGNGGNGGNGGKAGGTPGAGGTSGLLIGENGLNGLP

SEQ ID NO: 1188 - protein, 454 aa, Stellaria longipes
ALGFTDVFLLNPILVHCKNSGKPFYAIVHRVTRSLVIDFEPVKPYEVPMTAAGALQSYKLAAKAITRLQSLPSGNMDRLVDTMVQEVFELTGYDRVMAYKFHDDDHGEVVSEVTKPNLDSYLGLHYPATDIPQAAKFLFMKNKVRLICDCRAKNVRVVQDEKLSVDLTLCGSTLRAPHGCHAQYMENMNSIGSLVMAVVVNDEDDEDGGSAPAQPHKRKRLWGLVVCHHTSPRFVPFPLRYACEFLAQVFAIHVNKELELENQFLEKKILRTQTLLCDMLMRDAPLGIVTQSPNIMDLVKCDGAALLYNNKVWRLGSTPTDYQLQEIGRWLSRDHMDSTGLSTDSLYDAGYPAALELGDSVCGMAAVRITVNDMLFWFRSHTAAEIKWGGAKHEAGEKDDGSKMHPRSSFKAFLEVVKRRSVPWKDYEMDAIHSLQLILRNAFKDGEAADLNTS

SEQ ID NO: 1189 - protein, 831 aa, Mycobacterium bovis AF2122/97
MSFVIAAPEVIAAAATDLASLESSIAAANAAAAANTTALLAAGADEVSTAVAALFGAHGQAYQALSAQAQAFHAQFVQALTSGGGAYAAAEAAATSPLLAPINEFFLANTGRPLIGNGANGAPGTGADGAPGGWLIGNGGAGGSGAAGVNGGAGGNGGAGGLIGNGGAGGAGGRASTGTGGAGGAAGMLFGAAGVGGPGGFAAAFGATGGAGGAGGNGGLFADGGVGGAGGATDAGTGGAGGSGGNGGLFGAGGTGGPGGFGIFGGGAGGDGGSGGLFGAGGTGGSGGTSIINVGGNGGAGGDAGMLSLGAAGGAGGSGGSSPDGGGGAGGIGGDGGTLFGSGGAGGVGGLGFDAGGAGGAGGKAGLLSGAGGAGGAGGGSFAGAGGTGGAGGAPGLVGNAGNGGNGGASANGAGAAGGAGGSGVLIGNGGNGGSGGTGAPAGTAGAGGLGGQLLGRDGFNAPASTPLHTLQQQILNAINEPTQALTGRPLIGNGANGTPGTGADGGAGGWLFGNGGNGGHGATGADGGDGGSGGAGGILSGIGGTGGSGGIGTTGQGGTGGTGGAALLIGSGGTGGSGGFGLDTGGAGGRGGDAGLFLGAAGTGGQAALSQNFIGAGGTAGAGGTGGLFANGGAGGFGANGGTGGNGLLFGAGGTGGAGTLGADGGAGGHGGLFGAGGTGGAGGSSGGTFGGNGGSGGNAGLLALGASGGAGGSGGSALNVGGTGGVGGNGGSGGSLFGFGGAGGTGGSSGIGSSGGTGGDGGTAGVFGNGGDGGAGGFGTGAGGTGGTGGNAVLIGNGGNGGNGGKAGGTPGAGGTSGLIIGENGLNGL

SEQ ID NO: 1190 - protein, 424 aa, Stellaria longipes
VWIHSKANEKPFYAILHRIDVGIVIDLEPARIEDPALSIAGAVQSQKLAVRAISQLQSLPGGDVKLLCDTVVESVRQLTAYDRVMVYKFHEDEHGEVVAESKRADLEPYLGLHYPSTDIPQASRFLFKQNRVRMIVDCHADSVSVVQDERLRQPLCLVGSTLRAPHGCHSQYMANMGSIASLVMAVIINGNDDEGSTRNAMRLWGLVVCHHTSPRSIPFPLRYACEFLMQAFGLQLNMELQLSAQVLEKRVLRTQTLLCDMILRESPTGIVTQSPSIMDLVKCDGAALLFRGKYYPLGVTPTELQLKDIVQWLLSNHGDSTGLSTDSLADAGYPGALALADAVCGMAVAFITRSDFLFWFRSHTAKEVKWGGAKHHPEDKDDVQRMHPRSSFKAFLEVVKSRSLPWENAEMDAIHSLQLILRDS

SEQ ID NO: 1191 - protein, 272 aa, Magnaporthe grisea 70-15
MTGRLANKVAIITGASSGIGRATALLMAREGAAVVCSDIRQGPPTDSNSSSSISTHEEIQRLGGRATFVSCDTSDSAQVQALVKSAVAEFGRLDIMFNNAGVGKEGDNYPDTMIWQYDEDDFDLTMAVNVKGVFLGCKYAAAQMKDQEPLVPGGDRGWIVNTGSILGVNAIKGVTAYAASKHAVLGITKAAALDCAPFNIHVNAVNPGFVKTVMTKNMLEDSVGSEALAARHPFKGIGNVEDIAKTVLFLVSDDASWITGTSLCVDGGYTTM

SEQ ID NO: 1192 - protein, 452 aa, Stellaria longipes
AVNYSELNLLNPILVHSKNSGKPFYAILHRIEVGLVVDLETVNLAETLVGASGALMSYKLAAKAISKLQSLPSQNIPLLCDVLVKEVRELTGYDRVMVYKFHDDEHGGVIAESHSPSLDSYLGLHYPATDIPQASRFLFLKNKVRMICDCRSPSVKVIQDETLTQPLSLGSSTLRAPHGCHAQYMANMGSIASLVMAVTITNEEDEVSDRHRTRKLWGLVVCHHTSSRFVPYPLRYACEFLVQVFGIHINKEVELAAQVREKHILKIQSMLCDMLMRDSPITIMTQSPNVMDLVKCDGAALLYQSKLWVLGITPKSNQIKDISQWLFEYHGNAKGLITDSLKEAGYPGALELGDAVCGMAAVRISSEEMLFWFRSHTAKEIKWGGAKHEPGQNDEQGIMHPRSSFNAFLDVVKWRSVPWEDMEMDSIYSLQLIFIKCLVKNKTMSDTSKMIV

SEQ ID NO: 1193 - protein, 454 aa, Stellaria longipes
ALGFTDVSLLNPILVHCKNSGKPFYAIVHRVTRSLVIDFEPVKPYEVPMTAAGALQSYKLAAKAITRLQSLPSGNMDRLVDTMVQEVFELTGYDRVMAYKFHDDDHGEVVSEVTKPNLDSYLGLHYPATDIPQAARFLFMKNKVRLICDCRAKNVQVVQDEKLSVDLTLCGSTLRAPHGCHAQYMENMNSIGSLVMAVVVNDEDDEDGGSAPAQPHKRKRLWGLVVCHHTSPRFVPFPLRYACEFLAQVFAIHVNKELELENQFLEKKILRTQTLLCDMLMRDAPLGTVTQSPNIMDLVKCDGAALLYNNKVWRLGSTPTDYQLQEIGRWLSRDHMDSTGLSTDSLYDAGYPAALELGDSVCGMAAVRITVNDMLFWFRSHTAAEIKWGGAKHEAGEKDDGSKMHPRSSFKAFLEVVKRRSVPWKDYEMDAIHSLQLILRNAFKDGEAADLNTS

SEQ ID NO: 1194 - protein, 569 aa, Rhodospirillum rubrum
MTAKLAPRGPDDGGILVHGPVALGHRRLSIIDLSPKAAQPMVDSDLGLSIVFNGCIYNYPALRSELEALGYRFFSGGDTEVILKAYHAWGTACVKRFNGMFAFAIHERDSGKVVLARDRFGIKPLYLAEVDGGLLFASSLPALLATGRVDKAIDPLALRFYISFHAVVPAPRTILKGVRKLPPATLRVVSADGSSFDEVYWRLDFRALPGEDGRSAKDWEDGLFEAVRAAVARRIIADVPVGVLLSGGLDSSLIVGLLAEAGQRDVETFSIGFEEANGEKGDEFFYSDLIAERYATRHHKIFIPEADMIAALPGAIAAMSEPMVSYDNVAFYLLAREVSKRVKVVLSGQGADEIFGGYHWYRPLVGSTDPVADYAAHFFDRTPERLARHLSPAWLGTTDEARAFVAAHFAEDGAPDPVDKALRLDSTVMLVEDPVKRVDNMTMAFGLEARVPFLDHQLAEFAGRIPSSLKLAQNGKGILKEVARRVVPAAVIDREKGYFPVPGLKYIEGSRLDYVRDGLSSRAARQRGLFREDYLASLYENPRDAITPLRGSELWQVGLLELWLQEHGI

SEQ ID NO: 1195 - protein, 436 aa, Acinetobacter sp. ADP1
MSFVAYIYSPVTKGSTCTMGYQKIVVPVDGDRIKVNADLSLNVPNHPIIPFIEGDGIGVDITPAMKAVVDAAIVKAYGGKRSIEWMEVYCGEKANTIYGSYMPEETFEALREFVISIKGPLTTPVGGGIRSLNVALRQELDLYVCVRPVRWFEGVPSPVQHPELTDMVIFRENSEDIYAGIEWKADSPEAKKVIQFLQEEMGVQKIRFPEHCGIGIKPVSKEGTQRLVRKAIQFAIDNDKPSVTLVHKGNIMKYTEGAFKEWGYELAIERFGGELIDGGPWVQIKNPKTGKDIVIKDVIADAFLQQILMRPADYSVIATLNLNGDYISDALAAEVGGIGIAPGANIGGAIAVYEATHGTAPKYAGQDKVNPGSIILSAEMMLRDMGWTEAADLIIKGISGAIEAKTVTYDFERLMPGATLLTCSEFGQAIIKHMDD

SEQ ID NO: 1196 - protein, 279 aa, Lactobacillus plantarum WCFS1
MNNNWLGLTDKVVAITGAVGGMGTKFCEEFAKQGAKIVLIDMIADKTEAYAKKLTEKYGVETLAVKCNTTNEEEVDAAVKAVTDKFGEVDVLVNTAAILRFSPLEDLRLDEWQAALNVNLTGYFLMSQRFGRVMIQQKHGAMVHISTVASRYPETYSGAYSTTKAAVNMMSKQMAAEWGQYGVRSNCVLPCLVKTPLSENFYSDPKVEEGRERLVASRRIGTLDDIANTVLFMASDRSDYTNGGEVTVDGGLNMMISDMIPKPGGRRQYAIDHHQPAKK

SEQ ID NO: 1197 - protein, 341 aa, Bradyrhizobium japonicum USDA 110
MPTMKAAIVRQFGKPLVIEDVPVPQPGPGEVLVKVKACGVCHTDLHAASGDWPVKPVPPFIPGHEVAGIVAALGSGVKNLKVGDAVGVAWLHDACMSCEYCETGWETLCEHQHNTGYSVNGGFAEYVIASAAFAAKLPATIDFAGIAPILCAGVTTYKGLKETEAKPGEWVVISGVGGLGHVAIQYAKAMGLKVAAVDIADDKLELARETGADLAVNALAADAVDKVLAVTGGGAHGVLVTAVSTAAFAQALKMVRRKGTVSLVGLPPGEFPTPIFDVVLKRITVRGSIVGTRRDLDEAIAFAADGKVKAEVTKVPLAEINDVFDRMKAGKIEGRMVLDFG

SEQ ID NO: 1198 - protein, 651 aa, Pseudomonas syringae pv. syringae B728a
MGRELFQRFRRQTEIASDILGYSIEQLCLEDPQKQLNKTQYTQPALYTVCALQYLAYREDNEVVIKFLAGHSLGEYAALFAADVFDFEAGLRIVKHRGELMSSANAGSMAVILNYKAQDLQQLLNDNGITSIDVANINSPDQLVIAGPHQALEAFEGIINSLAGTYIPIPVGAPFHSRYMQPIAQDFERFLEPFTFRPMNKTVISNVTGLPHQNETLKSQLVKQLYSPVQWLDSVRYLMGLEVDEYVEIGPGDVLTKLTTKIRNKCSPLVLGEKVIRQVPGSTESVESKVARQPAKDGLGKAFKSRWSRGDEFSSYFGLAYPHVLTLSEDNLDYSFIERAQACGHLAFQAVPWTAEAIDSGSLDSILSRLGAKRSNDSGCVGVAITHSENDKVLFSKILAHQLNAVALTGVYGMTTELVYYRVISAYQGRFSSTPQKNKLFISVDDPRCVQGFYQKLPQGVLERLHLQGRIDAAQFEFAKNIAACDAIILNNEEHDLEALMGINRLRVEHPELDIKIGIEGALSAPNDFTQGTLSQIDFFVSSELNVLIGESFLPGLIRQTLFSASDAFIVDLPDPKTIHFGGRAKTYITNDPAIRQRAGNAHGWLSDDQRPTLCRLLPSNYLAISEWLKVQFVNKQPSLAELSSALLNGV

SEQ ID NO: 1199 - protein, 743 aa, Streptomyces avermitilis MA-4680
MSRTALRICPLCEATCGLTLTIEGTRVTKARGDRDDVFSKGFICPKGASFGAADGDPDRLRTPLVREDGELREATWEEAFDAVAAGLRPVVEEHGPHAVGVVLGNPNVHTMAGALYPPVLLAGLRTHSLFTASTVDQMPKHVSSGLLYGDAVAIPVPDLDRTDHLLLLGANPLESNGSLCTAPDFPGKLKALKARGGTLTVVDPRRTRTAKLADRHVAIRPGTDALLLAAMAYVLFEERLVDLGELAPHVQGVDELADALRDFTPEAASPSCDVPADVIRELARELAAAPTAAVYGRIGSCTVPHGTLASWLVDVLNILTGNLDRPGGALFPLSATDKAPRPAGPGRGFALGRWHSRVSGHPEAKGELPLSALAEEIDTATGEGSPVRALIAVATNPVLSAPDGDRLDKALGSLDFMVSVDPYLNETSRHAHVVLPPPPPSQAPHFDFAFNAFAVHNQVRYTRAAVPLEPGRMAETEILARLVLAATGMHGAAPDAVDALVIDQTLGKAVTDPHAPVHGRDPGELAAVLTGDSGPERRLDMMLRLGPYGDGFGARPDGLTLEKVLAHPHGIDLGPLTPRLPQPLKTRSGKVELLPGPIAGDLPRLREALRERSEGLVLIGRRHLRSNNSWLHNVPALTGGTNRCTLHIHPEDAERLGLTDGAPVRVRGAGGAVTAPVEVTDGIRRGVVSLPHGWGHDRPGTRMSHAALDPGVNVNQLLDGSLLDPLSGNAVLNGVPVELTRTS

SEQ ID NO: 1200 - protein, 484 aa, Erwinia carotovora subsp. atroseptica SCRI1043
MSGNHLQDHELFKTGYFVAGKWQQGAATFEVVNPATGESIARVAKAGKKETQAAIDAAHAAFPAWKRKTAKERSEILYRWYELILENKRYLAELMTAEQGKPVQEAEGEVVYAANFIQWFAEQGKRVNGEIIPPAKPGSKIYATREPVGVVVAITPWNFPLAMLTRKLGPALAAGCTGVIKPANNTPLSAFALLALAQQAGVPDGVLNGVAGDTQAISDTVMASDKVRKISFTGSTAVGKTLVRNAADTMKKVSMELGGNAPYIVFDDADIQAAVKGAIANRFRNAGQVCVSANRFYIQDGVYDEFVSLLAEEVKKLKVGNGMDDGVVLGPLIDEAAVEKVEKHVNDAVEKGGKALVGGKRHKLGHSFFEPTVIVDANEAMLLAQEETFGPVAPCFRFKTEEEVIQRANNTPFGLAAYFYSQNLQRVFRVAEALESGMIGINECAVSTELAPFGGVKESGLGREGSVLGLDEFLEVKTWHVGGL

SEQ ID NO: 1201 - protein, 243 aa, Oryza sativa
MGGGGGAEEELTAQETALYDRQIRVWGVDAQKRLSKAHVLVCGMNGTTTEFCKNIVLAGVGSLSLMDDHLVTEDDLNANFLIPHDESIYGGRSRAEKVGGEPKPKELAYPSLQEAISVPWKNLPRKTTKLYFAMRVLENYESSEGRNACEASLSDRPAVLALRKDMCDKMSLSESQIPTALLERLLAAGKKQHPPVCAILGGILGQEVIKSISGKGDPIKNFFYYDAADGKGIAEDIPPLSSD

SEQ ID NO: 1202 - protein, 421 aa, Brucella melitensis 16M
MPVEVVLPALSAGMEDAVIARWLKAEGDAVSKGDLIAEVETDKATMELEAEVDGRIGQLLVKDGARANVNQVIALLLKEGEDASAMAGFAVGSSPVAVAEAETPVAASPVPAAPAVSAPASGEVRHKASPLARRLAAELGVSLDGLAGSGARGRIVRIDVERAAASKPVPVAAAAAPVAAPAEVSSKAIPVGIGEYEAVPHTSMRRTIARRLLEAKTTVPHFYLNVDCEIDALLALRSQINEKREGSARISVNDFVIKASAAALRRVPDANVIWTDEALLKLKDVDIAVAVATEGGLITPIIRSADQMSLGAISAQMKSLAARARENRLKPEEFQGGGFSISNLSMYGVKSFSAIINPPQSAILAVGAGERRPIERNGELAFATMMSVTLSVDHRAVDGALGAQLLAAFKAGIEDPMSLLV

SEQ ID NO: 1203 - protein, 381 aa, Staphylococcus epidermidis ATCC 12228
MNKKTQMIHGGHTTDNYTGAVTTPIYQTSTYLQDDIGDLRQGYEYSRTANPTRASLESVIANLEHGKHGFAFGSGMAAISAVIMLLDKGDHLVLNSDVYGGTYRALTKVFTRFGIDVDFVDTTKIENIEQYIKPETKMLYVETPSNPLLRVTDIKASAKIAKKYDLISVVDNTFMTPYYQNPLDFGIDIVLHSATKYIGGHSDVVAGLVATADDDLAERLGFISNSTGGVLGPQDSYLLIRGIKTLGLRMEQINRNVEGIVQMLQKHPKVQQVFHPSIKEHMNYTIHQNQATGHTGVVSFEVKDTEAAKQVIHATNYFTLAESLGAVESLISVPALMTHASIPSDVRAKEGITDGLIRLSIGIEDTEDLVNDLEQALNTLR

SEQ ID NO: 1204 - protein, 359 aa, Streptomyces avermitilis MA-4680
MVRAAVLPAVGAPLEITGIELPEPGPGQVRVRLAAAGVCHSDLSLSDGTMRVPVPAVLGHEGAGTVVSVGEGVTQVSPGAGVVLNWAPSCGRCHACSLGEVWLCADALTGAGTVYARRTDGSDLYPGLNVAAFAEETVVPAACVLPVPDGVPLTDAALLGCAVLTGYGAVHHSAKVQPGETVAVFGVGGVGLATLQAARIAGASKIVAVDVSPEKESLARRAGATDYLVASENTAREIRGLTDKQGVDVAVECVGRAVTIRTAWDSTRRGGRTTVVGIGGKDQQVVFNALEIFHWGRTLSGCVYGNSDPAKDLPVLAEHVRAGRLDLGALVTERIALDGIPAAFDNMLAGKGGRALVVF

SEQ ID NO: 1205 - protein, 328 aa, Anabaena variabilis ATCC 29413
MRAMILDAPRQPLRLTELPIPRPNSEQVLIRVHACAVCRTDLHIVDGELTHPKLPLILGHQIVGTIEALGEKVDQFHLGQRVGVPWLGHTCAHCPYCLSGRENLCDYAEFTGYNIDGGYADYTVADHHFCFPLDPTYPDLQAAPLLCGGLIGYRAYNMTGDAEKLGFYGFGSSAHILIQLARYQGRKVFAFTRPGDIDGQEFARQLGANWAGDSDVLPPESLDAAIIFAPVGKLVPTALRAVAKGGVVVCAGIHMSDIPSFPYSILWEERVLRSVANLTRQDGEEFLTIAPQIPIRTKINSFPLTQANEALDALRSGKIEGSAVLVMK

SEQ ID NO: 1206 - protein, 355 aa, Agrobacterium tumefaciens str. C58
MFTTSAYACDDGSSPMKLATIRRRDPGPRDVEIEIEFCGVCHSDIHTARSEWPGSLYPCVPGHEIVGRVGRVGAQVTRFKTGDRVGVGCIVDSCRECASCAEGLEQYCENGMTGTYNSPDKAMGGGAHTLGGYSAHVVVDDRYVLNIPEGLDPAAAAPLLCAGITTYSPLRHWNAGPGKRVGVVGLGGLGHMAVKLANAMGATVVMITTSPGKAEDAKKLGAHEVIISRDAEQMKKATSSLDLIIDAVAADHDIDAYLALLKRDGALVQVGAPEKPLSVMAFSLIPGRKTFAGSMIGGIPETQEMLDFCAEKGIAGEIEMIDIDQINDAYERMIKSDVRYRFVIDMKSLPRQKAA

SEQ ID NO: 1207 - protein, 262 aa, Oryza sativa (japonica cultivar-group)
MEAKLSAASRRVAPSPIQQLSHLAQRAGAVNLAEGFPDFPAPAHVKAAAAAAIAADLNQYRHVQGICDALAETMKRDHGLRVDPLTDFAVCCGQSEAFAAAIFAIIDQGDEVLLFDPAFETYQTCIELARGVPVYVPLDPPSWTLNEDKFLKSFTNRTKAVVLNSPHNPTGKVFSREELLIIAQACQKMDCFAITDEVYEYITYDENKHISLASLPGMQERTIITSSLSKTYSVTGEQNSSLHTAMQSTTCETFGTYEDSVV

SEQ ID NO: 1208 - protein, 492 aa, Vitis vinifera
MDPYKYRPSSAYNSPYFTTNAGAPVYNNDSSLTVGSRGPVLLEDYHLVEKLANFQRERIPERVVHARGASAKGFFEVTHDVSDLTCADFLRAPGVQTPVIVRFSTVIHERGSPETIRDPRGFAVKFYTREGNFDMVGNNFPVFFIRDAMKFPDVIHAFKPNPKSHIQEYWRVVDFLSYHPESLSTFAFLFDDVGIPQDYRHMEGFGVHTFTLLNKAGKANYVKFHWKPTCGVKCLLEDEAIRVGGTNHSHATQDLYDSIKAGNYPEWKLFIQTMDPEHEDKFDFDPLDVTKTWPEDILPLQPVGRLVLNKNIDNFFAENEMLAFNPALVVPGIYYTNDKMLQGRIFAYSDTQRHRLGPNYLQLPVNAPKCAFHNNHHDGSMNFMHRDEEVDYFPSRFDPVRHAETFPIPSTICHGKREKVVIEKENNFKQPGERYRSFAPDRQERFINRWVETLSDPRVTYEIRSIWISYWSQADRSLGQKLASRLNVKPKY

SEQ ID NO: 1209 - protein, 424 aa, Stellaria longipes
VWIHSKANEKPFYAILHRIDVGIVIDLEPARTEDPALSIAGAVQSQKLAVRAISQLQSLPGGDVKLLCDTVVESVRQLAAYDRVMVYKFHEDEHGEVVAESKRADLEPYLGLHYPSTDIPQASRFLFKQNRVRMIVDCHADSVSVVQDERLRQPLCLVGSTLRAPHGCHSQYMANMGSIASLVMAVIINGNDDEGSTRNAMRLWGLVVCHHTSPRSIPFPLRYACEFLMQAFGLQLNMELQLSAQVLEKRVLRTQTLLCDMILRESPTGIVTQSPSIMDLVKCDGAALLFRGKYYPLGVTPTELQLKDIVQWLLSNHGDSTGLSTDSLADAGYPGALALADAVCGMAVAFITRSDFLFWFRSHTAKEVKWGGAKHHPEDKDDVQRMHPRSSFKAFLEVVKSRSLPWENAEMDAIHSLQLILRDS

SEQ ID NO: 1210 - protein, 147 aa, Pectobacterium carotovorum subsp. carotovorum
KPGMDRSDLFNVNAGIVRNLVEQIAVTCPKACIGIITNPVNTTVAIAAEVLKKAGVYDKNKLFGVTTLDIIRSNTFVAELKGKQPQDINVPVIGGHSGVTILPLLSQVPGISFSEQEVADLTKRIQNAGTEVVEAKAGGGSATLSMG

SEQ ID NO: 1211 - protein, 452 aa, Stellaria longipes
AVNYSELNLLNPILVHSKNSGKPFYAILHRIEVGLVVDLEIVNLAETLVGASGALMSYKLAAKAISKLQSLPSQNIPLLCDVLVKEVRELTGYDRVMVYKFHDDEHGEVIAESHSPSLDSYLGLHYPATDIPQASRFLFLKNKVRMICDCRSPSVKVIQDETLTQPLSLGGSTLRAPHGCHAQYMANMGSIASLVMAVTINNEEDEVSDRHRTRKLWGLVVCHHTSSRFVPYPLRYACEFLVQVFGIHINKEVELAAQVREKHILKIQSMLCDMLMRDSPITIMTQSPNVMDLVKCDGAALLYQSKLWVLGITPKSNQIKDISQWLFEYHGNTKGLITDSLKEAGYPGALELGDAVCGMAAVRISSEEMLFWFRSHTAKEIKWGGAKHEPGQNDEQGIMHPRSSFNAFLDVVRWRSVPWEDMEMDSIYSLQLIFIKCLVKNKTMSDTSKMIV

SEQ ID NO: 1212 - protein, 154 aa, Pectobacterium carotovorum subsp. carotovorum
LRRKPGMDRSDLFNVNAGIVRNLVEQIAVTCPKACIGIITNPVNTTVAIAAEVLKKAGVYDKNKLFGVTTLDIIRSNTFVAELKGKQPQDINVPVIGGHSGVTILPLLSQVPGISFSEQEVADLTKRIQNAGTEVVEAKAGGGSATLSMGQVPG

SEQ ID NO: 1213 - protein, 502 aa, Solanum tuberosum
MQFLSLASIFLFLSFLFLLRKWKNSNSQSKKLPPGPWKLPLLGSMLHMAGGLPHHVLRDLAKKYGPLMHLQLGEVSAVVVTSPDMAKEVLKTHDIAFASRPKLLAPEIVCYNRSDIAFCPYGDYWRQMRKICVLELLSAKNVRSYGSIRRDEVDRLVNFIRSSSGEPVNFTERLFLFTSSMTCRSAFGKVFKEQDKFIQLIKEVIGLAGGFDVADIFPSLKFLHVLSGMKGKIMNAHHKVDAIVEDVINEHKKKFAIGKTNGALGGEDLIDVLIRLMNDGGLQFPITNDNIKAIIFDMFAAGTETSSSTLVWAMVQMMKNPSVIAKAQAEVREAFKDKETFDENDVEELKYLKLVIKETLRLHPPVPLLVPRECREETDINGYTIPVKTKVMVNVWALGRDPKYWDDAESFKPERFEQRSVDFVGNNFEYLPFGGGRRICPGISFGLANVYLPLAHLLYHFDWKLPIGMEPKDLNLTELVGVTAARKDDLILVATPYEPPRQ

SEQ ID NO: 1214 - protein, 124 aa, Pectobacterium carotovorum subsp. carotovorum
LPFGIVRNWHEQIAVTCRKACIGIITNPVNTTVAIAAEVLKKAGVYDKNKLFGVTTLDIIRSNTFVAELKGKQPQDINVPVIGGHSGVTILPLLSQVPGISFNEQEVADLTKRIQNAGAQVVKA

SEQ ID NO: 1215 - protein, 308 aa, Prochlorococcus marinus str. MIT 9313
MARKGIILAGGSGTRLNPITQAVSKQLLPVYDKPMIYYPLSTLMLAGIREVLIITTPQDQAAFDRLLGDGSQWGMSIQYAVQPSPDGLAQAFLIGADFLDGAPAALVLGDNLFHGHELVPQLQACNRQGSGATVFVYPVRDPERYGVAEFDASGRVLSLEEKPTQPKSRYAVTGLYFYDASVVAKAHQVQPSHRGELEITDVNRMYLEEGLLRVQQMGRGMAWLDTGTCDSLHDACSYIRTLEHRQGLKVGCPEEVAWRQGWINLQELEQLSMPLRKSGYGHYLMQLVEESVSDHGALQRTVEVADAG

SEQ ID NO: 1216 - protein, 708 aa, Magnaporthe grisea 70-15
MLPQITDRWHCSGPYFKEYFNNPTRAQVGAMVAILEVGAFISSLMVGRIGDIIGRRRTILYGSMIFFVGGAMQTLATGFEMMLVGRVIAGLGVGMLSTIVPVYQSEISPPHNRGKLACIEFTGNIFGYATSVWVDYFCGFITSNMSWRLPLMMQCIMGALLGLGSLIIVESPRWLLDNDHDEEGIVVIANLYGGGDIHNSKAREEFRDIKMDVLIQRQEGERSYSEMFRRYRTRVFIAMSAQALAQLNGINVISYYAPYVFESAGWVGHDAVLMTGINGITYLLSTVPPWYIVDSWGRRPILLSGAAMMTGSLAMISYFLYLDIKQTPMLVVIFVMIYNAAFGYSWGPIPWLYPPEILPLSIRSKGASLSTATNWAFNWLVGMMTPILQDIIHWRLYLVHAFFCASSFVIVYFIYPETCGVRLEDMGSLFGDSTTAMGTPATMGTPAQDPETGALLRPSSPIPPLDIRNGSGGPFGAAGAIPGLNIDPPDQAAVDAKNSRDAEQGGGGIGAWFSRLMGREWRQANRPWPSDEPNLMVEVEILDFCDGLDKRGHGVRTFTCPCQIVNVPRYLLEGLCPSIAVFRLPQITWGVLKVGLGDDVHAEIIKAYRAMYRAGLQAVMYSKPARFVVRDQLREAFRDRSGQFDMETIQRTVLFLRSASRERGLAHRIVKNLLTDVWMGEVRSAEMEELASQAKLPIGRWNSSRIRN

SEQ ID NO: 1217 - protein, 170 aa, Fusarium oxysporum f. sp. lycopersici
MSESTSTQKVWLASNDSATIEVDRVVAERSMLIKNMLEDIGDEGINAENPIPIPNVNEAVLRKVIEWCDHHRNDPLQAQDDDSDARKKTTDIEEWDQKFMQVDQEMLFEIILASNYLDIKPLLDVGCKTVANMIKGKSPEEIRKTFNITNDFTPEEEEQIRRENEWAEDR

SEQ ID NO: 1218 - protein, 516 aa, Magnaporthe grisea 70-15
MADSDGEFVVDDGSDDELVAQSGGARGAAGGGRSGKGGDEGGKRRKKASKAAWEDLQRSWDVVHELDDGNLSLEGFLEAEKRRRVLRDTTPIQRGIIRHLVLVIDMSFAMAEKDLMPTRHRLTISYAIEFVREYFDQNPISQLAIVGMRDSIAVRISDLSGNPAEHIEKLRALPDLDPSGSPSLQNALEMCRGALFNTPSHGTREVVIIFGALLSLDPGDIHETIDGLMQDRIRVSVIGLAAQVYICEEICRRTNSGKAAADLGIVTDTDGSAYNVALHEVHFRELLMSATRPPVTRQSQLQQATGETASLLMMGFPSRKTDKDPALCSCHNRPVRNGFLCTRCGSRVCRLPSECPACGLTLILSTHLARSYHHLFPLKIWSEVPWNDAVRSVSCFACHAPFPDAKNKDADKGKDAEKDPGDKHLKVPSKDTNGKKKKPAAPVPKGVSESGRYMCQVCRHHFCIDCDVFSHEVLHNCPGCQSDTRGDLATTNGKGAANGSVSNGVAHDSNGAMAID

SEQ ID NO: 1219 - protein, 516 aa, Chromobacterium violaceum ATCC 12472
MKIRAQIGMVLNLDKCIGCHTCSVTCKNVWTSRDGIEYAWFNNVETKPGIGYPKDWENQDKWQGGWKRRADGKLEPRQGGRLKILANIFANPNLPAIDDYYEPFTYDYEHLQNAPQMQTPPTARPVSVLTGKKMDKIEWGPNWEDDLGGEFSKRAKDALFEGIQKEMYSAFENTFMMYLPRLCEHCLNPACVASCPSGSIYKREDDGIVLIDQDKCRGWRMCVSGCPYKKIYYNWTSGKAEKCIFCYPRIESGQPTVCSETCVGRIRYLGVLLYDADKIEQAAAVEDPQDLYQSQLDLFLDPNDPAIAAEALKQGIPQSWLDAAKRSPVYKMAMEWKVAFPLHPEYRTLPMVWYIPPLSPIQSAMENGLIGEGGIIPDVQSLRIPIKYLANLLTAGKEEPVVKALETMVAMRRYMRKKSVEKVCDAATLAGTHLTASQVEEMYQVMAIANYEDRFVIPSSHKEMVEEAFEDKASCGFSFGNGCSGGESEASLFGKKKATPIVFHDMRRDRKSNAGN

SEQ ID NO: 1220 - protein, 412 aa, Ferroplasma acidarmanus
MDRSPFYTMDDFDFNGKRVYLRIDINSPINPITGEVVDDTRFIHYLRTINELKNSKVVIIAHQGRPGDSDFVSLRQHAGHLGRLLGRDVLFVDSLIGSAVETAIRNMKNGDIIMLENSRFYSEEILIKDDGAAQKNTFIVRNLSKLFDYFIIDAFPAIHRDQTTLTGFKDIKPNIAGRLMETEINSIDRFMNSKSHPKLAIMGGAKIRDAIKVTGPFLEKGIVDNIIFGGVAANIFLWASGIDIGKRNMEFIEKQDKNYKKLLEECKSLLSRFSDRIYLPEDFMLNPLQTEIKTGEKVPDGQLLADIGFESIKTFSSIIEKAKNIFLNGPMGMYEINEYSLGTREIFNAVSQSPASKIVGGGHTINAINEFGLSDSMGYISTGGGALINYLSGEPIPVIDSLVYNRKKFGGN

SEQ ID NO: 1221 - protein, 551 aa, Chlamydophila caviae GPIC
MHPNSSDLNGVIIPGTPPLPRELQKFPSLVATSDQRFSPKFDADVAKLFPNTYDSPYLKFTSGTLPTLQPLKVGVMLSGGPAPGGHNVIWGLLHSLKKIHPDSSLIGFLDNGQGILNNNTVEITEEFMECFRNSGGFNCIGTGRTNIITEENKAACLKTVKALNLDGLVIIGGDGSNTATAILAEYFSQHHPKTCVVGVPKTIDGDLQHLFLDLTFGFDSATKFYSSIISNISRDTLSCKAHYHFIKLMGRSASHIALECTLQTHPNITLIGEEIAEKNVPLKTIIHKVCSIIADRAAMGKYYGIILIPEGIIEFIPEINNLVKEIERLPENADKFSSLSRESQKLLNSFPEAIANQLLNDRDAHGNVYVSKISVDKLLIHLVDNHLKKHFKNVPFNAISHFLGYEGRSCLPTKFDNTYSYALGYGAGVLTLNRCNGYLTVIESLINIVDKWRLRAMPIVKMFTTKKNSDGTIRPLIKKSLIDISSPAFVKFKLYRKIWALEDSYRFLGPLQIDTPPNAHSDHFPPLTLLLNHNEWQKRCSICMEIPDCDY

SEQ ID NO: 1222 - protein, 512 aa, Brucella suis 1330
MKIRAQIGMVLNLDKCIGCHTCSITCKNVWTNREGVEYAWFNNVETKPGVGFPKEWENQKKWNGGWVRKKNGKIEPKMGAKWRILAKIFANPDLPEIDDYYEPFDFDYGHLQTAGESRTMPTARPRSLISGERMEKIEWGPNWEEILGGEFAKRSKDYNFEGVEKEIYGQFENTFMMYLPRLCEHCLNPTCVAACPSGAIYKREDDGIVLIDQEKCRGWRMCVSGCPYKKIYYNWSSGKSEKCIFCYPRIESGQPTVCSETCVGRIRYLGVMLYDADRISEAASTANEQDLYQEQLNIFLDPNDPAVIEQARKDGVPDAWLEAAKHSPVYKMAMDWKIAFPLHPEYRTLPMVWYVPPLSPLQSAAQAGKLGMDGPLPDVRSMRIPVRYLANLLTAGKEKPVISALERMLAMRAYMRAKTIDGVIDEAIADRVGMSGAMIEEMYNIMAIANYEDRFVIPTSHREITEDAYDVRGSCGFTFGNGCSGGTSTEDLFGAKRQKVVQTPTDIFREQV

SEQ ID NO: 1223 - protein, 398 aa, Agrobacterium tumefaciens str. C58
MDMSRNRGVVYLKPGQVEVRDIDDPKLEAPDGRRIEHGVILKVISTNICGSDQHMVRGRTTAMPGLVLGHEITGEVIEKGIDVEMLQVGDIVSVPFNVACGRCRCCKSQDTGVCLTVNPSRAGGAYGYVDMGGWIGGQARYVTIPYADFNLLKFPDRDKAMSKIRDLTMLSDILPTGFHGAVKAGVGVGSTVYVAGAGPVGLAAAASARILGAAVVMVGDFNKDRLAHAARVGFEPVDLSKGDRLGDMIAEIVGTNEVDSAIDAVGFEARGHSGGEQPAIVLNQMMEITRAAGSIGIPGLYVTEDPGAVDNAAKQGALSLRFGLGWAKAQSFHTGQTPVLKYNRQLMQAILHDRLPIADIVNAKIIALDDAVQGYESFDQGAATKFVLDPHGDLLKAA

SEQ ID NO: 1224 - protein, 279 aa, Azotobacter vinelandii
MIKKCLFPAAGYGTRFLPATKAMPKEMLPIVNKPLIQYGVEEALDAGLTQVAMVTGRGKRALEDHFDISYELEHQIRDTDKEKYLIGIRRLIDSCTFSYTRQVEMKGLGHAILCGRPLIGDEPFAVVLADDLCINLEGDGVLTQMVKLYNQFRCSIVAIQEVPPEETSKYGVIAGEMIRDDIYRVSSMVEKPKPEDAPSNLAIIGRYILTPDIFELIEQTEPGKGGEIQITDALMKQAKDGCVMAYKFKGKRFDCGGAEGYIEATNFCFENLYKLGKAY

SEQ ID NO: 1225 - protein, 488 aa, Shigella flexneri 2a str. 2457T
MKKVNHWINGKNVAGNDYFQTTNPATGEVLADVASGGEAEINQAVAAAKEAFPKWADLPMKERARLMRRLGDLIDQNVPEIAAMETADTGLPIHQTKNVLIPRASHNFEFFAEVCQQMNGKTYPVDDKMLNYTLVQPVGVCALASPWNVPFMTATWKVAPCLALGNTAVLKMSELSPLTADRLGELALEAGIPAGVLNVVQGYGATAGDALVRHHDVRAVSFTGGTATGRNIMKNAGLKKYSMELGGKSPVLIFEDADIERALDAALFTIFSINGERCTAGSRIFIQQSIYPEFVKRFAERANRLRVGDPNDPNTQVRALISQQHWEKVSGYIRLGIEEGATLLAGGPDKPSDLPAHLKGGNFLRPTVLADVDNRMRVAQEEIFGPVACLLPFKDEAEGLRLANDVEYGLASYIWTQDVSKVLRLARGIEAGMVFVNTQNVRDLRQPFGGVKASGTGREGGEYSFEVFAEMKNVCISMGDHPIPKWGV

SEQ ID NO: 1226 - protein, 468 aa, Sinorhizobium meliloti 1021
MAYDLIVIGSGPGGYVCAIKAAQLGMKVAVVEKRSTYGGTCLNVGCIPSKALLHASEMFHQAQHGLEALGVEVANPKLNLQKMMAHKDATVKSNVDGVSFLFKKNKIDGFQGTGKVLGQGKVSVTNEKGEEQVLEAKNVVIATGSDVAGIPGVEVAFDEKTIVSSTGALALEKVPASMIVVGGGVIGLELGSVWARLGAKVTVVEFLDTILGGMDGEVAKQLQRMLTKQGIDFKLGAKVTGAVKSGDGAKVTFEPVKGGEATTLDAEVVLIATGRKPSTDGLGLAKAGVVLDSRGRVEIDRHFQTSIAGVYAIGDVVRGPMLAHKAEDEGVAVAEIIAGQAGHVNYDVIPGVVYTQPEVASVGKTEEELKAAGVAYKIGKFPFTANGRARAMLQTDGFVKILADKETDRVLGGHIIGFGAGEMIHEIAVLMEFGGSSEDLGRTCHAHPTMSEAVKEAALSTFFKPIHM

SEQ ID NO: 1227 - protein, 539 aa, Chlamydophila caviae GPIC
MELLSVNKSYFELQRLHYRPETLSFLNGITSLHIVDSTEPPAIPKNLQEHIPNLCSIPEVTIEKGEATPSQPLKIGVLLSGGQAPGGHNVVIGLFEGLRAFNPKTKLYGFIQGPLGLTRGLYKDLDISVIYDYYNVGGFDMLSSSKEKIKTKEQKSTILTTVKKLKLDGLLIIGGNNSNTDTAMLAEYFLKHNCTIPIVGVPKTIDGDLKNFWIETPLGFHTSCRIYSEMIGNLEKDTLSIKKYHHFVRLMGQKASYTTLECGLQTLPNVTLISEHIAMRKISLQKLSEHIAMGLVNRYRSGKNYSTILIPEGLIEHVFDTRKLVNELNVLLLDNNLNLDNVQSKLSPESLKTLSSLPIEIAHQLLIARDSYGNVRVSKIATEELLAALIKKEIQKIEPKMEFQPVNHFFGYESRAGFPSNFDANYGLALGIVSALFLVRQRTGYMVTINNLARSYSEWIGGATPLYKMMQLEHRLGEDTPVIKTDSVNPHAPEVQYLLNQSDACLMKDLYCFPGPLQYFGEERLLDQRPLTLLWGNRE

SEQ ID NO: 1228 - protein, 469 aa, Streptococcus pyogenes M1 GAS
MAFEIIMPKLGVDMQEGEIIEWKKQEGDTVNEGDILLEIMSDKTNMELEAEDSGVLLKITRQAGDTVPVTEVIGYIGAEGESVDTIASSEKTTEIPVPASADAGPAVAPKENVASPAPQVAATAIPQGNGGKVRATPAARKAAAEMGIDLGQVPGTGPKGRVHKEDVENFKGAQPKASPLARKIAADKGIDLATVSGTGFNGKVMKEDIMAILEAAKPAEAKAPAAKEEKVVDLPEGVEHKPMSAMRKAISKGMTNSYLTAPTFTLNYDIDMTEMIALRKKLIDPIMAKTGLKVSFTDLIGMAVVKTLMKPEHEYMNASLINDANDIELHRFVNLGIAVGLDDGLIVPVIHGANKMCLSDFVLASKDVIKKAQTGKLKAAEMSGSTFSITNLGMFGTKTFNPIINQPNSAILGVGATIPTPTVVDGEIVSRPIMAMCLTIDHRLVDGMNGAKFMVDLKKLMENPFELLI

SEQ ID NO: 1229 - protein, 381 aa, Oryza sativa (japonica cultivar-group)
MAAASSPAAAITCRAAVAWAPGQALVMEEVEVAPPEAMEIRVKVVSTSICRSDVTQWQSTAQTDLFPRIFGHEASGVVESVGEGVTEFEVGDHVLTVFIGECMSCKHCVSGKSNMCQKLGLERRGVMHSDQKTRFSLRGKPVYHYCAVSSFSEYTVVHSGCAVKVGPTVPMDRICLLSCGVSAGLGAAWKVADISKGSSVVIFGLGTVGLSVAQGAKLRGASIIIGVDTNPEKQEKGKAFGVTDFINPEELNEPVQQVVKRLTNGGADYSFECVGDTGVVSTALQSCSDGWGLTVTLGVPKAKPEVSAHYALLLSGRTLKGSLFGGWRPKSDLPLLVDKYANKEIQVDDLVTHDLSFDYINKALELMLENKCLRCVIHMPQ

SEQ ID NO: 1230 - protein, 587 aa, Streptococcus pyogenes M1 GAS
MAVEIIMPKLGVDMQEGEIIEWKKQEGDTVNEGDILLEIMSDKTNMELEAEDSGVLLKITRQAGETVPVTEVIGYIGAEGESVEVSSPAASDVNVARTTEDLEAAGLEVPKAPAQAASAAPKAALADDEYDIIVVGGGPAGYYAAIRGAQLGGKIAIVEKSEFGGTCLNVGCIPTKTYLKNAEILDGIKIAAGRGINLASTNYTIDMDKTVDFKNTVVKTLTGGVQGLLKANKVTIFNGLGQVNPDKTVTIGSQTIKGRNVILATGSKVSRINIPGIDSKLVLTSDDILDLREMPKSLAVMGGGVVGIELGLVWASYGVDVTVIEMADRIIPAMDKEVSLELQKILSKKGMKIKTSVGVSEIVEANNQLTLKLNNGEEVVAEKALLSIGRVSQMNGLENLNLEMDRNRIKVNDYQETSIPGIYAPGDVNGTKMLAHAAYRMGEVAAENAMHGNTTRKANLKYTPAAVYTHPEVAMVGLTEEQAREQYGDVLIGKNSFTGNGRAIASNEAHGFVKVIADAKYHEILGVHIIGPAAAEMINEAATIMESELTVDELLLSIHGHPTFSEVMYEAFADVLGEAIHNPPKRK

SEQ ID NO: 1231 - protein, 255 aa, Oryza sativa (japonica cultivar-group)
MHSDQKTRFSLRGKPVYHYCAVSSFSEYTVVHSGCAVKVGPTVPMDRICLLSCGVSAGLGAAWKVADISKGSSVVIFGLGTVGLSVAQGAKLRGASIIIGVDTNPEKQEKGKAFGVTDFINPEELNEPVQQVVKRLTNGGADYSFECVGDTGVVSTALQSCSDGWGLTVTLGVPKAKPEVSAHYALLLSGRTLKGSLFGGWRPKSDLPLLVDKYANKEIQVDDLVTHDLSFDYINKALELMLENKCLRCVIHMPQ

SEQ ID NO: 1232 - protein, 417 aa, Sinorhizobium meliloti 1021
MATEIRVPTLGESVSEATVGTWFKKVGDAIKADEPILELETDKVTIEVPAPAAGTLSEIVAQAGETVGLGALLGQIAEGAGAAAAAPAAAEKKPEPAAATAAPAAAAQPAAAAATQTSTSMPPAPAAAKLIAENNLSADQIDGSGKRGQVLKGDVLAAVAKGISAPAAAEPAKVQARAPAPAEDAAREERVKMTRLRQTIARRLKDAQNTAAMLTTYNEVDMSAVMSLRSKYKDIFEKKHGVKLGFMGFFTKAVTHALKELPAVNAEVDGTEIIYKNFCHVGVAVGTDKGLVVPVVRDADQMSIAEIEKEIGRLGKAARDGTLSMADMQGGTFTISNGGVYGSLMSSPILNAPQSGILGMHKIQDRPVAIGGQVVIRPMMYLALSYDHRIVDGKEAVTFLVRVKESLEDPERLVLDL

SEQ ID NO: 1233 - protein, 389 aa, Escherichia coli
  unsure (1)..(389): unsure at all Xaa locations
TLQNGKLNVPENPIIPYIEGDGIGVDVTPAMLKVVDAAVEKAYKGERKISWMEIYTGEKSTQVYGQDVWLPAETLDLIREYRVAIKGPLTTPVGGGIRSLNVALRQELDLYICLRPVRYYQGTPSPVKHPELTDMVIFRENSEDIYAGIEWKADSADAEKVIKFLREEMGVKKIRFPEHCGIGIXXXXXXXXXXXVRAAIEYAIANDRDSVTLVHKGNIMKFTKGAFKDWGYQLAREEFGGELIDGGPWLKVKNPNTGKEIVIKDVIADAFLQQILLRPAEYDVIACMNLNGDYISDALAAQVGGIGIAPGANIGDECALFEATHGTAPKYAGQDKVNPGSIILSAEMMLRHMGWTEAADLIVKGMEGAINAKTVTYDFERLMEGAKLL

SEQ ID NO: 1234 - protein, 432 aa, Zea mays
MESMAQERDALDSPALSIDKRLRSDAVESPLVDDATQPKEGADGYPVKVRKPYTITKQREKWTEEEHGKFLEALKLYGRSWRQIQEHIGTKTAVQIRSHAQKFFSKVVREPGASNSIEIPPPRPKRKPLHPYPRKCADSTVTNAPMGEPKNAPVSSPSGSDQENGSPVSVLSAMQSDAFGSSISNPSTGGTSPASSDDGNNVPEIVNGEENLLTQQIEDRSHQESKQDNSDGELSEEDSSRVQETSLKLFGKTVIIPDPKKVCSSDGGAGDDTQEVMQTSWVGGGVAAYPAHNGWFLPFHSFPAHMYESGDARISPLHMWWPYYGFPAGHPRGFGTGLLNEGAIESDADNSPSVETNSDRTGNVHVQTTTPTIHNNAVKESVGPVEMPESGPSIELKPSANSAFVRVKPSSSVSGDQSLVRGFVPYKRCKVE

SEQ ID NO: 1235 - protein, 467 aa, Zea mays
AEPSTSAPESGEKFSWRDHWYPVSLVEDLDPSRPTPFQLLNRDLVIWKEPKSGEWVALDDRCPHRLAPLSEGRIDETGCLQCSYHGWSFDGSGACTKIPQAMPEGPEARAVRSPKACAIKFPTLVSQGLLFVWPDENGWEKAAATKPPMLPKEFEDPAFSTVTIQRDLFYGYDTLMENVSDPSHIEFAHHKVTGRRDRARPLTFRMESSGAWGYSGANSGNPRITATFEAPCYALNKIEIDTKLPIFGDQKWVIWICSFNIPMAPGKTRSIVCSARNFFQFTMPGKAWWQLVPRWYEHWTSNLVYDGDMIVLQGQEKIFLAATKESSTDINQQYTKITFTPTQADRFVLAFRTWLRKFGNSQPEWFGNPTQEALPSTVLSKREMLDRYEQHTLKCSSCKGAYNAFQNLQKVFMGATVVCCAAAGIPPDVQLRLLIGAAALVSAAVAYAFHELQKNFVFVDYVHADID

SEQ ID NO: 1236 - protein, 150 aa, Pectobacterium carotovorum subsp. carotovorum
  unsure (1)..(150): unsure at all Xaa locations
PGMDRSDLFNVNAGIVRNLVEQIAVTCPKACIGIITNPVNTTVAIAAEVLKKAGVYDKNKLFGVTTLDIIRSNTFVAELKGKQPQDINVPVIGGHSGVTILPLLSQVPGISFSEQEVADLTKRIQNAGTEVVEAKAGGGSATLSMGQXAG

SEQ ID NO: 1237 - protein, 396 aa, Zea mays
MGAGAEVMHQVVPLLEPPLHRCVVKSVDVMEEVVAVAPGQVQPATSPKALLEVAVEVPDLELKRSSNAGSSVSAEQLQFVPIIRSGSFADIGPRRFMEDEHIRIDDLSGHLGSLLMVSAPSAFYGVFDGHGGSDAAAYMKTHAMRLFFEDADFPQASQEDKIFAESVEDSVRRAFLRADLALADDSVINRSSGTTALTALVLGRQLLVANAGDCRAVLCRKGTAVEVSKDHRPTYDAERQRVIECGGYIEDGYLNGVLSVTRALGDWDMKLPQGSPSPLIAEPEIHWTTLTEDDEFLIIGCDGIWDVMSSQHAVSTVRKGLRRHDDPGRSAQELAMEAKRLETFDNLTVIVVCFVPDLAGGSATPSEQVPAGRIRCRKSLSPEALCKLRRWLESDQ

SEQ ID NO: 1238 - protein, 389 aa, Escherichia coli
  unsure (1)..(389): unsure at all Xaa locations
TLQNGKLNVPENPIIPYIEGDGIGVDVTPAMLKVVDAAVEKAYKGERKISWMEIYTGEKSTQVYGQDVWLPAETLDLIREYRVAIKGPLTTPVGGGIRSLNVALRQELDLYICLRPVRYYQGTPSPVKHPELTDMVIFRENSEDIYAGIEWKADSADAEKVIKFLREEMGVKKIRFPEHXGIGIXXXXXXXXXXXXXXXXXYAIANDRDSVTLVPKGNIMKFTEGAFKDWGYQLAREEFGGELIDGGPWLKVKNPNTGKEIVIKDVIADAFLQQILLRPAEYDVIACMNLNGDYISDALAAQVGGIGIAPGANIGDECALFEATHGTAPKYAGQDKVNPGSIILSAEMMLRHMGWTEAADLIVKGMEGAINAKTVTYDFERLMEGAKLL

SEQ ID NO: 1239 - protein, 397 aa, Bordetella parapertussis 12822
MTDESRHIDTLLQHLGTAPFDPDTGAAPVNLPSMRASTVRFRDLAALEQAQRRKAGGDRAVTYGRMGMDTHAALEHVFKELEAGTHCYLASSGMGAVTMAFLSLLSAGEHALVADCVYGPVYELDNAVLKRMGIELTFFAPGDDLQALVRPNTRLLYVESPGSLLFQMLDLLALAEFARRNQLVLATDNTWGSGYIYRPLELGAQVSVIAGTKYVGGHSDLMLGAVVTNDEAVAQRLNRTQYAMGYSVSADDAWLALRGVRTLPIRMAQHARHAQRVCEFLQGRPEVARIYHPAWPQDPGHALWLRDCSGSNGMLAVELRLSQPAARVFVESLQLFGIGFSWGGFESLVQLVTPGELARHYYWQGGGNALVRLHIGLESPEDVIADLTQALARAASA

SEQ ID NO: 1240 - protein, 149 aa, Pectobacterium carotovorum subsp. carotovorum
GMDRSDLFNVNAGIVRNLVEQIAVTCPKACIGIITNPVNTTVAIAAEVLKKAGVYDKNKLFGVTTLDIIRSNTFVAELKGKQPQDINVPVIGGHSGVTILPLLSQVPGISFSEQEVADLTKRIQNAGTEVVEAKAGGGSATLSMGQAGR

SEQ ID NO: 1241 - protein, 606 aa, Mycobacterium bovis AF2122/97
MSFVIAQPEMIAAAAGELASIRSAINAANAAAAAQTTGVMSAAADEVSTAVAALFSSHAQAYQAASAQAAAFHAQVVRTLTVDAGAYASAEAANAGPNMLAAVNAPAQALLGRPLIGNGANGAPGTGQAGGDGGLLFGNGGNGGSGAPGQAGGAGGAAGFFGNGGNGGDGGAGANGGAGGTAGWFFGFGGNGGAGGIGVAGINGGLGGAGGDGGNAGFFGNGGNGGMGGAGAAGVNAVNPGLATPVTPAANGGNGLNLVGVPGTAGGGADGANGSAIGQAGGAGGDGGNASTSGGIGIAQTGGAGGAGGAGGDGAPGGNGGNGGSVEHTGATGSSASGGNGATGGNGGVGAPGGAGGNGGHVSGGSVNTAGAGGKGGNGGTGGAGGPGGHGGSVLSGPVGDSGNGGAGGDGGAGVSATDIAGTGGRGGNGGHGGLWIGNGGDGGAGGVGGVGGAGAAGAIGGHGGDGGSVNTPIGGSEAGDGGKGGLGGDGGDGAAGGDGGAGGDGGGRGIFGQFGAGGAGGAGGVGGAGGAGGTGGGGGNGGAIFNAGTPGAAGTGGDGGVGGTGAAGGKGGAGGSGGVNGATGADGAKGLDGATGGKGNNGNPG

SEQ ID NO: 1242 - protein, 147 aa, Pectobacterium carotovorum subsp. carotovorum
GMDRSDLFNVNAGIVRNLVEQIAVTCPKACIGIITNPVNTTVAIAAEVLKKAGVYDKNKLFGVTTLDIIRSNTFVAELKGKQPQDINVPVIGGHSGVTILPLLSQVPGISFSEQEVADLTKRIQNAGTEVVEAKAGGGSATLSMGQV

SEQ ID NO: 1243 - protein, 389 aa, Escherichia coli
TLQNGKLNVPENPIIPYIEGDGIGVDVTPAMLKVVDAAVEKAYKGERKISWMEIYTGEKSTQVYGQDVWLPAETLDLIREYRVAIKGPLTTPVGGGIRSLNVALRQELDLYICLRPVRYYQGTPSPVKHPELTDMVIFRENSEDIYAGIEWKADSADAEKVIKFLREEMGVKKIRFPEHCGIGIKPCSEEGTKRLVRAAIEYPIANDRDSVTLVHKGNIMKFTEGAFKDWGYQLAREEFGGELIDGGPWLKVKNPNTGKEIVIKDVIADAFLQQILLRPAEYDVIACMNLNGDYISDALAAQVGGIGIAPGANIGDECALFEATHGTAPKYAGQDKVNPGSIILSAEMMLRHMGWTEAADLIVKGMEGAINAKTVTYDFERLMEGAKLL

SEQ ID NO: 1244 - protein, 128 aa, Pectobacterium carotovorum subsp. carotovorum
AVTCPKACIGIITNPVNTTVAMAAEVLKKAGVYDKNKLFGVTTLDIIRSNTFVAELKGKQPQDINVPVIGGHSGVTILPLLSQVPGISFSEQEVADLTKRIQNAGTEVVEAKAGGGSATLSMGQAARG

SEQ ID NO: 1245 - protein, 178 aa, Clostridium perfringens str. 13
MLYDFKVKDIEGNEVSLGEYKGKVLLIVNTATGCGFTPQYEGLEVLYKKYHDKGFEILDFPCNQFFEQAPGSNEEIVGFCKLNYGTTFKTFAKVEVNGENACELYKFLKKEAPMAKEDETSLGFYDKLKGLGFTTEGEEIKWNFTKFLIDKNGEVVARFAPTFEPEKLDELIEELLEE

SEQ ID NO: 1246 - protein, 1178 aa, Sorghum bicolor
MASGSRATPTRSPSSARPEAPRHAHHHHHHHSQSSGGSTSRAGGGGGGGGGGGGTAATATATATESVSKAVAQYTLDARLHAVFEQSGASGRSFDYSQSLRAPPTPSSEQQIAAYLSRIQRGGHIQPFGCTLAVADDSSFRLLAFSENAADLLDLSPHHSVPSLDSAAPPPVSLGADARLLFSPSSAVLLERAFAAREISLLNPLWIHSRVSSKPFYAILHRIDVGVVIDLEPARTEDPALSIAGAVQSQKLAVRAISRLQALPGGDIKLLCDTVVEHVRELTGYDRVMVYRFHEDEHGEVVAESRRDNLEPYLGLHYPATDIPQASRFLFRQNRVRMIADCHATPVRVIQDPGMSQPLCLVGSTLRAPHGCHAQYMANMGSIASLVMAVIISSGGDDEQTGRGGISSAMKLWGLVVCHHTSPRCIPFPLRYACEFLMQAFGLQLNMELQLAHQLSEKHILRTQTLLCDMLLRDSPTGIVTQSPSIMDLVKCDGAALYYHGKYYPLGVTPTESQIKDIIEWLTVCHGDSTGLSTDSLADAGYLGAAALGDAVCGMAVAYITPSDYLFWFRSHTAKEIKWGGAKHHPEDKDDGQRMHPRSSFKAFLEVVKSRSLPWENAEMDAIHSLQLILRDSFRDAAEGTSNSKAIVNGQVQLGELELRGINELSSVAREMVRLIETATVPIFAVDTDGCINGWNAKIAELTGLSVEEAMGKSLVNDLIFKESEEIVEKLLSRALRGEEDKNVEIKLKTFGSEQSNGAIFVIVNACSSRDYTQNIVGVCFVGQDVTGQKVVMDKFINIQGDYKAIVHNPNPLIPPIFASDENTSCSEWNTAMEKLTGWSRGEVVGKFLIGEVFGSFCRLKGPDALTKFMVVIHNAIGGQDYEKFPFSFFDKNGKYVQALLTANTRSKMDGKSIGAFCFLQIASAEIQQAFEIQRQQEKKCYARMKELAYICQEIKNPLSGIRFTNSLLQMTDLNDDQRQFLETCSACEEQMSKIVKDATLQSIEDGSLVLEKSEFSFGDVMNAVVSQAMLLLRERDLQLIRDIPDEIKDASAYGDQFRIQQVLADFLLSMVRSAPSENGWVEIQVRPNVKQNSDGTDTELFIFRFTYPGEGLPADIVQDMFSNSQWSTQEGVGLSTCRKILKLMGGEVQYIRESERSFFLIVLELPQPRPAADREIS

SEQ ID NO: 1247 - protein, 119 aa, Pectobacterium carotovorum subsp. carotovorum
GIVRNLVEQIAVTCPKACIGIITNPVNTTVAIAAEVLKKAGVYDKNKLFGVTTLDIIRSNTFVAELKGKQPQDINVPVIGGHSGVTILPLLSQVPGISFNEQEVADLTKRIQNAGTEVV

SEQ ID NO: 1248 - protein, 501 aa, Amaranthus hypochondriacus
MAIRVPSRQLFIDGEWREPIKKNRIPIINPSTEEIIGDIPAATAEDVELAVAAARRALKRNKGEDWASASGAHRAKYLRAIAAKITEKKDYFAKLEAMDCGKPLDEAARDIDDVAGCFEYYADQAEALDAKQKAPIALPMDTFKCHVLKQPIGVVGLISPWNYPLLMATWKVAPALAAGCSAVLKPSELASVTCLELAEVCREVGLPPGVLNILTGLGPEAGGPLACHPDVDKVAFTGSTATGSKVMSSAAQLVKPVTLELGGKSPIVIFEDVDLDKAAEWTAFGCFWTNGQICSATSRLLVHESIAAEFLDRLVKWCKNIKISDPFEEGCRLGPVVSKSQYEKVLKFISTAKSEGATILCGGSRPEHLKKGYYVEPTIISDVSTSMQIWREEVFGPVLCQKTFGSEDEAIELANDTQYGLGAAVLSKDLDRCERITKALEVGAVWVNCSQPCFTQAPWGGTKRSGFGRELGEWGIENYLNIKQVTRDTSTDEPWGWYKSP

SEQ ID NO: 1249 - protein, 808 aa, Escherichia coli K12
MSKNERMVGISRRTLVKSTAIGSLALAAGGFSLPFTLRNAAAAVQQAREKVVWGACSVNCGSRCALRLHVKDNEVTWVETDNTGSDEYGNHQVRACLRGRSIRRRINHPDRLNYPMKRVGKRGEGKFERISWDEALDTIASSLKKTVEQYGNEAVYIQYSSGIVGGNMTRSSPSASAVKRLMNCYGGSLNQYGSYSTAQISCAMPYTYGSNDGNSTTDIENSKLVVMFGNNPAETRMSGGGITYLLEKAREKSNAKMIVIDPRYTDTAAGREDEWLPIRPGTDAALVAGIAWVLINENLVDQPFLDKYCVGYDEKTLPADAPKNGHYKAYILGEGDDKTAKTPQWASQITGIPEDRIIKLAREIGTAKPAYICQGWGPQRQANGELTARAIAMLPILTGNVGISGGNSGARESTYTITIERLPVLDNPVKTSISCFSWTDAIDHGPQMTAIRDGVRGKDKLDVPIKFIWNYAGNTLVNQHSDINKTHEILQDESKCEMIVVIENFMTSSAKYADILLPDLMTVEQEDIIPNDYAGNMGYLIFLQPVTSEKFERKPIYWILSEVAKRLGPDVYQKFTEGRTQEQWLQHLYAKMLAKDPALPSYDELKKMGIYKRKDPNGHFVAYKAFRDDPEANPLKTPSGKIEIYSSRLAEIARTWELEKDEVISPLPVYASTFEGWNSPERRTFPLQLFGFHYKSRTHSTYGNIDLLKAACRQEVWINPIDAQKRGIANGDMVRVFNHRGEVRLPAKVTPRILPGVSAMGQGAWHEANMSGDKIDHGGCVNTLTTLRPSPLAKGNPQHTNLVEIEKI

SEQ ID NO: 1250 - protein, 556 aa, Oryza sativa
MGSSDFSWTLPDHPKLPKGKPVAVVVLDGWGEADADQYNCIHVAETPTMDSLNKGAPEKWKLVKAHGTAVGLPSDDDMGNSEVGHNALGAGRIFAQGAKLVDTALASGKIFEGEGFKYIKESFDQGTLHLIGLLSDGGVHSRLDQLQLLLNGASANGAKKIRVHILTDGRDVLDGTSVGFVETLENDLSQLRAKGIDACIASGGGRMYVTMDRYENDWDVVKRGWDAQVLGEAPHKFQNAVEAVKTLRSETKANDQYLPPFVIVDDSDKAVGPIVDGDAVVTFNFRADRMVMIAKALEYEDFDKFDRVRVPKIRYAGMLQYDGELKLPSHYLVSPPEIERTSGEYLVKNGIRTFACRQFGHVTFFWNGNRSGYFDETKEEYVEIPSDSGITFNVKPKMKALEIAEKARDAILSGKFDQVRVNLPNGDMVGHTGDIEATVVACKAADEAVKMILDAIEQVGGIYLVTADHGNAEDMVKRNKSGQPQLDKKGEIQILTSHTLQPVPVAIGGPGLHSGVRFRNDVQTPGLANVAATVMNLHGFEAPADYEPTLIEVVDK

SEQ ID NO: 1251 - protein, 293 aa, Escherichia coli O157:H7 EDL933
MKGIILAGGSGTRLHPITRGVSKQLLPIYDKPMIYYPLSVLMLAGIREILIITTPEDKGYFQRLLGDGSEFGIQLEYAEQPSPDGLAQAFIIGETFLNGEPSCLVLGDNIFFGQGFSPKLRHVAARTEVATVFGYQVMDPERFGVVEFDDNFRAISLEEKPKQPKSNWAVTGLYFYDSKVVEYAKQVKPSERGELEITSINQMYLEAGNLTVELLGRGFAWLDTGTHDSLIEASTFVQTVEKRQGFKIACLEEIAWRNGWLDDEGVKRAASSLAKTGYGQYLLELLRARPRQY

SEQ ID NO: 1252 - protein, 161 aa, Prochlorococcus marinus str. MIT 9313
MSMAINISQIVVRTPEGAEKSLSEYSGTVLLIVNVASRCGFTKQYKGLQALQNTYGPQGLKVLGFPCNDFGAQEPGTLEEIKSFCSTTYGASFELFDKVHAMGKTTEPYTTLNQTEPAGDVAWNFEKFLVGKDGTVLKRFKSGVEPESTELKAAIDQALMA

SEQ ID NO: 1253 - protein, 469 aa, Corynebacterium efficiens YS-314
MIAMSAAPTGYTNFNGDFIEFGSPEALAEEARTTALDRDHVFHSWSAQDKITPKAWATADGAILYDYEGRAFIDMGSQLVSANLGHNHPALVEAIRTQAGRITNLNPAFANDIRSELAGQIIACAQGEFSHVFFTNGGADAIEHAIRMARLHTGRNKILSAYRSYHGATGSAMMLTGEHRRLGNPTTDGDIYHFWAPFLYRSSFFAENEEQECERALTHLAETIAFEGPGMIAAIVIEPVVGSSGIIVPPAGYLAGVRELCDQHGILLIADEVMVGLGRTGKFFAYEHAGADVEPDMITFAKGINAGYAPLGGVVMTRAIRDTFDAQAYSGGLTYSGHPLAVAPALAALKVYEDEKIFERVASLGENLIGPRLAEIGQKYAAVGDVRGIGFFWALEFVSDAQAKTPAGADAMAAGAAALKEHGVWPMVSGHRFHIAPPLITTETQLEQLLEAIDVAAAAVDAEIFALAR

SEQ ID NO: 1254 - protein, 256 aa, Oryza sativa
MAWQQPMDGSHASGSKAAAAVADGPGTQRTQYPYVTGSSIIALKYKDGVIMASDTGASYGSTLRYKSVERIKAVGKHSLIGASGEFSDFQEILRYLDELTLSDHMWDDGNSLGPKEVHSYLTRVMYNRRNKFDPLWNSLVIGGVKKGPKGEEKYLGMVNMIGTHFEENHIATGFGNHMAIPILRTEWREDMTFEEAVKLVEKCLLVLLYRDRSSINKFQIAKITTEGATIYPPYSLKTYWGFAAFENPAQGAVGSW

SEQ ID NO: 1255 - protein, 151 aa, Zea mays
MLFAPSRLPLPRLPTRRLRLAPGSPMASMLAILRPSAPAPLAGRRARAAAPATARVALSTRSRYSSARVSLGSEVAVGADALFADYKPTTAFLFPGQGAQTVGMGAEAQSVPAATKLFNQANEILGYDLLDLCTNGPKEKLDSTMISQPAI

SEQ ID NO: 1256 - protein, 197 aa, Triticum aestivum
  unsure (1)..(197): unsure at all Xaa locations
MRGWCAPGSACCGALPPRQVPPRRGPGRKTCYLHDLAHKYASAILSDYNIVAMHDHSXAAILTMVAGIGGWRVHMFMIFSLARPDVIPSVDSGISWSVALLYLLEAVAPFVIAGHVLLTAGRIDRPXAAWCMWRLVDSNAAHTAGAMSVVPPAMPAPSEEFMVQHHQQQPPQRQHQQQQQQAAIQMLDPVQMLPGLG

SEQ ID NO: 1257 - protein, 409 aa, Corynebacterium efficiens YS-314
MDSLVYYCPQPRSIFLQELIQLSHKPTDQGFSTASIHAGYEPDEYYGSINVPIYASTTFAQNGPNELRRGYEYTRVGNPTITVLEQTVAALEGAEYGRAFSSGMAATDILFRILLKPGDHIILGNDAYGGTFRLIDTVFVAWGVEYTVVDTSNVDEVKAAIRDNTKLIWVETPTNPALAITDIEAVAKAAEGTDAKLVVDNTFASPYLQQPLKLGAYAVLHSTTKYIGGHSDVVGGLVVTNDQQLDEELLFMQGSIGPIPSVFDAYLTGRGVKTLAVRMDRHCDNAEKIAEFLDSRPEVSTVLYPGLESHPGHEVAKRQMKRFGGMISVRFAGGEEAAKKFCTSTKLICLAESLGGVESLLEHPATMTHQSAAGSQLEVPRDLVRISIGIEDIEDLLADVEQALDQLPQ

SEQ ID NO: 1258 - protein, 505 aa, Zea mays
MRATIPALSLLVTPRLPSLAVPLAGGRLREGGRSRTRLRVAAPTSVPGEAAEQAEPSTSAPESGEKFSWRDHWYPVSLVEDLDPSRPTPFQLLNRDLVIWKEPKSGEWVALDDRCPHRLAPLSEGRIDETGCLQCSYHGWSFDGSGACTKIPQAMPEGPEARAVRSPKACAIKFPTLVSQGLLFVWPDENGWEKAAATKPPMLPKEFEDPAFSTVTIQRDLFYGYDTLMENVSDPSHIEFAHHKVTGRRDRARPLTFRMESSGAWGYSGANSGNPRITATFEAPCYALNKIEIDTKLPIFGDQKWVIWICSFNIPMAPGKTRSIVCSARNFFQFTMPGKAWWQLVPRWYEHWTSNLVYDGDMIVLQGQEKIFLAATKESSTDINQQYTKITFTPTQADRFVLACRTWLRKFGNSQPEWFGNPTQEALPSTVLSKREMLDRYEQLSLKCSSCKGAYNAFQNLQKVFMGATVVCCAAAGIPPDVQLRLLIGAAALVSAAIAYAFHEL

SEQ ID NO: 1259 - protein, 389 aa, Escherichia coli
TLQNGKLNVPENPIIPYIEGDGIGVDVTPAMLKVVDAAVEKAYKGERKISWMEIYTGEKSTQVYGQDVWLPAETLDLIREYRVAIKGPLTTPVGGGIRSLNVALRQELDLYICLRPVRYYQGTPSPVKHPELTDMVIFRENSEDIYAGIEWKADSADAEKVIKFLREEMGVKKIRFPEHCGIGIKPCSEEGTKRLVRAAIEYAIANDRDSVTLVHKGNIMKFTEGAFKDWGYQLAREEFGGELIDGGPWLKVKNPNTGKEIVIKDVIADAFLQQILLRPAEYDVIACMNLNGDYISDALAAQVGGIGIAPGANIGDECALFEATHGTAPKYAGQDKVNPGSIILSAEMMLRHMGWTEAADLIVKGMEGAINAKTVTYDFERLMKGAKLL

SEQ ID NO: 1260 - protein, 505 aa, Staphylococcus aureus subsp. aureus MW2
MSQQDKKLTGVFGHPVSDRENSMTAGPRGPLLMQDIYFLEQMSQFDREVIPERRMHAKGSGAFGTFTVTKDITKYTNAKIFSEIGKQTEMFARFSTVAGERGAADAERDIRGFALKFYTEEGNWDLVGNNTPVFFFRDPKLFVSLNRAVKRDPRTNMRDAQNNWDFWTGLPEALHQVTILMSDRGIPKDLRHMHGFGSHTYSMYNDSGERVWVKFHFRTQQGIENLTDEEAAEIIATDRDSSQRDLFEAIEKGDYPKWTMYIQVMTEEQAKNHKDNPFDLTKVWYHDEYPLIEVGEFELNRNPDNYFMDVEQAAFAPTNIIPGLDFSPDKMLQGRLFSYGDAQRYRLGVNHWQIPVNQPKGVGIENICPFSRDGQMRVVDNNQGGGTHYYPNNHGKFDSQPEYKKPPFPTDGYGYEYNQRQDDDNYFEQPGKLFRLQSEDAKERIFTNTANAMEGVTDDVKRRHIRHCYKADPEYGKGVAKALGIDINSIDLETENDETYENFEK

SEQ ID NO: 1261 - protein, 107 aa, Pectobacterium carotovorum subsp. carotovorum
IGIITNPVNTTVAIAAEVLKKAGVYDKNKLFGVTTLDIIRSNTFVAELKGKQPQDINVPVIGGHSGVTILPLLSQVPGISFSEQEVADLTKRIQNAGTEVVEAKAGA

SEQ ID NO: 1262 - protein, 652 aa, Mycobacterium tuberculosis CDC1551
MCGLLAFVAAPAGAAGPEGADAASAIARASHLMRHRGPDESGTWHAVDGASGGVVFGFNRLSIIDIAHSHQPLRWGPPEAPDRYVLVFNGEIYNYLELRDELRTQHGAVFATDGDGEAILAGYHHWGTEVLQRLRGMFAFALWDTVTRELFCARDPFGIKPLFIATGAGGTAVASEKKCLLDLVELVGFDTEIDHRALQHYTVLQYVPEPETLHRGVRRLESGCFARIRADQLAPVITRYFVPRFAASPITNDNDQARYDEITAVLEDSVAKHMRADVTVGAFLSGGIDSTAIAALAIRHNPRLITFTTGFEREGFSEIDVAVASAEAIGARHIAKVVSADEFVAALPEIVWYLDEPVADPALVPLFFVAREARKHVKVVLSGEGADELFGGYTIYREPLSLRPFDYLPKPLRRSMGKVSKPLPEGMRGKSLLHRGSLTLEERYYGNARSFSGAQLREVLPGFRPDWTHTDVTAPVYAESAGWDPVARMQHIDLFTWLRGDILVKADKITMANSLELRVPFLDPEVFAVASRLPAGAKITRTTTKYALRRALEPIVPAHVLHRPKLGFPVPIRHWLRAGELLEWAYATVGSSQAGHLVDIAAVYRMLDEHRCGSSDHSRRLWTMLIFMLWHAIFVEHSVVPQISEPQYPVQL

SEQ ID NO: 1263 - protein, 657 aa, Oryza sativa
  unsure (1)..(657): unsure at all Xaa locations
MEGVGGGKRRGDDGAEATPRWRFSRPSSQGGPLAAAGLTSIRAVLNRVNSSVDAAAAGGPRPVLRLGNGDPTASACYRTAPAAEDAVVDALRSGAHNGYSLTVGVLSARRAIAEYLSRDLPYELSANDIXLTSGCVQAIEVMISVLAQPGSNILLPKPGFPLYESRTTFSNLEVRHFDLIPERGWEVDLEGVQAIADENTVAIVVINPSNPCGSVYSYDHLAKIAETARKLGLLIIADEVYDHLAFGNNPFIPIGVFGKTVPVITLGSISKRWLVPGWRLGWIATCDPNGILKEAKVNSRFENYINISTDPATFVQGAIPQIIANTKEDYFNKILDQLRNAADLCYDKIKDIKGITCPHKPEGSMFVMVKLDLSYLDGFHDDMDFCCRLAKEESVIVLPGTNSINVQPLADEGVCPWEHGRRHERARAVEPLELVGVTERAEMHRSKVKLSGVLHMGFKPDKCKTALRMALARIKLLRNRKEVQVRSPVSAEKTATPPSRLPGLSRAATKSARRHSSITRFYTRTAPPSDAARTAISSPAALPATDAASRSPHVGHVGRAAPAAAERLQHLPPRGVPGPRGGKDVPRERQAEGALRRGQLLPTATPLLPLLSLAAAPRAATLRRRARHRAGRLSPSPATAAPASMPAASRRVCRRAC

SEQ ID NO: 1264 - protein, 110 aa, Pectobacterium carotovorum subsp. carotovorum
KACIGIITNPVNTTVAIAAEVLKKAGVYDKNKLFGVTTLDIIRSNTFVAELKGKQPQDINVPVIGGHSGVTILPLLSQVPGISFSEQEVADLTKRIQNAGTEVVEAKAGA

SEQ ID NO: 1265 - protein, 389 aa, Escherichia coli
TLQNGKLNVPENPIIPYIEGDGIGVDVTPAMLKVVDAAVEKAYKGERKISWMEIYTGEKSTQVYGQDVWLPAETLDLIREYRVAIKGPLTTPVGGGIRSLNVALRQELDLYICLRPVRYYQGTPSPVKHPELTDMVIFRENSEDIYAGIEWKADSADAEKVINFLREEMGVKKIRFPEHCGIGIKPCSEEGTKRLVRAAIEYAIANDRDSVTLVHKGNIMKFTEGAFKDWGYQLAREEFGGELIDGGPWLKVKNPNTGKEIVIKDVIADAFLQQILLRPAEYDVIACMNLNGDYISDALAAQVGGIGIAPGANIGDECALFEATHGTAPKYAGQDKVNPGSIILSAEMMLRHMGWTEAADLIVKGMEGAINAKTVTYDFERLMEGAKLL

SEQ ID NO: 1266 - protein, 241 aa, Streptomyces coelicolor A3(2)
MSTFLLIHGAWHSGRCWERVVPLLEAAGHRVFAPSLTGYGDKAHLLGPEVGLDTHVDDVVGLIAGENLSDVVLVGHSYAGLVISSAAHRIPERIAHLVYLDAMVPEDGESAVDVHPVTQRLIELAEKSESGWRVPPMPEQPAPLGLFGVTDPADVAWLHGMLSDQPVRCLRQPVRLGNPAADAIPRTHIHNVGAMPTGITRRPVPPIQPNGTAAQVWELPTGHDCMITMPTELSELLLKLP

SEQ ID NO: 1267 - protein, 116 aa, Pectobacterium carotovorum subsp. carotovorum
AGIVRNLVEQIAVTCPKACIGIITNPVNTTVAIAAEVLKKAGVYDKNKLFGVTTLDIIRSNTFVAELKGKQPQDINVPVIGGHSGVTILPLLSQVPGISFSEQEVADLTKRIQNAG

SEQ ID NO: 1268 - protein, 389 aa, Escherichia coli
TLQNGKLNVPENPIIPYIEGDGIGVDVTPAMLKVVDAAVEKAYKGERKISWMEIYTGEKSTQVYGQDVWLPAETLDLIREYRVAIKGPLTTPVGGGIRSLNVALRQELDLYICLRPVRYYQGTPSPVKHPELTDMVIFRENSEDIYAGIEWKADSADAEKVINFLREEMGVKKIRFPEHCGIGIKPCSEEGTKRLVRAAIEYPIANDRDSVTLVHKGNIMKFTEGAFKDWGYQLAREEFGGELIDGGPWLKVKNPNTGKEIVIKDVIADAFLQQILLRPAEYDVIACMNLNGDYISDALAAQVGGIGIAPGANIGDECALFEATHGTAPKYAGQDKVNPGSIILSAEMMLRHMGWTEAADLIVKGMEGAINAKTVTYDFERLMEGAKLL

SEQ ID NO: 1269 - protein, 131 aa, Pectobacterium carotovorum subsp. carotovorum
LVEQIAVTCPKACIGIITNPVNTTVAIAAEVLKKAGVYDKNKLFGVTTLDIIRSNTFVAELKGKQPQDINVPVIGGHSGVTILPLLSQVPGISFSEQEVADLTKRIQNAGTEVVEAKAGGGSATLSMGQAA

SEQ ID NO: 1270 - protein, 463 aa, Ralstonia eutropha JMP134
MERVPRSRGKGGKPMRTRKADFVVIGGGSAGVACARRAASHGASVVLIERDEIGGTCVNRGCVPKKMLSYGATWAAILSGCLSHTGGHEDWRDAIVRVNAEVARLNVVYAQRLLEAGVDILRGDAVVTAPDEVRVGDEVIRAKRILIATGARPKTLDIPGGELASNSDDVFTWQTVPGSIAVIGGGYIGVEQASILSRYGVKVDLLVAGDRLLPHFDAEIAEALAGALETKGVRLHLNASVNLISQANGALEVCYRPGNKPGQTESIRAQAALVAVGRVSNVDGLGLDAIGVKLGDKGGIKVDRQFRSSVRSIHAIGDAIEGLHLTPVATSQGRWLADRLFGRRGERADFDFVPTAVFCEPAIGAVGLTEAQAIEEAGKPERIRTVVKRFVSLENRFGGNGMQSVFKLVLNARTGRVLGVHLMDNAAPEIVQAMAVALRLGVRESHLETTLQLHPTVAEELFG

SEQ ID NO: 1271 - protein, 412 aa, Escherichia coli CFT073
MADTRPERRFTRIDRLPPYVFNITAELKMAARRRGENIIDFSMGNPDGATPPHIVEKLCTVAQRPDTHGYSTSRGIPRLRRAISRWYQDRYDVEIDPESEAIVTIGSKEGLAHLMLATLDHGDTVLVPNPSYPIHIYGAVIAGAQVRSVPLVEGVDFFNELERAIRESYPKPKMMILGFPSNPTAQCVELEFFEKVVALAKRYDVLVVHDLAYADIVYDGWKAPSIMQVPGARDMAVEFFTLSKSYNMAGWRIGFMVGNKTLVSALARIKSYHDYGTFTPLQVAAIAALEGDQQCVRDIAEQYKRRRDVLVKGLHEAGWMVEMPKASMYVWAKIPEPYAAMGSLEFAKKLLNEAKVCVSPGIGFGDYGDTHVRFALIENRDRIRQAIRGIKAMFRADGLLPASSKHIHENAE

SEQ ID NO: 1272 - protein, 122 aa, Pectobacterium carotovorum subsp. carotovorum
AGIVRNLVEQIAVTCPKACIGIITNPVNTTVAIAAEVLKKAGVYDKNKLFGVTTLDIIRSNTFVAELKGKQPQDINVPVIGGHSGVTILPLLSQVPGISFSEQEVADLTKRIQNAGTEVVEA

SEQ ID NO: 1273 - protein, 736 aa, Neurospora crassa
MSNIISQAGQKAKEALTSAPSSKKVDDLKNEFKETDKSARLTTDYGVKQTTADDWLRIVSDDKIGPSLLEDPFARERIMRFDHERIPERVVHARGSGAFGKFKVYESASDLTMAPVLTDTSRETPVFVRFSTVLGSRGSADTVRDVRGFAVKFYTEEGNWDLVGNNIPVFFIQDAIKFPDVIHAGKPEPHNEVPQAQSAHNNFWDFQFNHTEATHMFTWAMSDRAIPRSLRMMQGFGVNTYTLINAQGKRHFVKFHWTPELGVHSLVWDEALKLAGQDPDFHRKDLWEAIENGAYPKWKFGIQAIAEEDEHKFDFDILDATKIWPEDLVPVRYIGEMELNRNPDEFFPQTEQIAFCTSHVVNGIGFSDDPLLQGRNFSYFDTQISRLGVNFQELPINRPVCPVMNFNRDGAMRHTISRGTVNYYPNRFDACPPASLKEGGYLEYAQKVAGIKARARSAKFKEHFSQAQLFYNSMSPIEKQHMINAFGFELDHCEDPVVYGRMVQRLADIDLGLAQTIAEMVGGEAPTTTNHPNHGRKTINLSQTEFPPATPTIKSRRVAIIIADGYDNVAYDAAYAAISANQAIPLVIGPRRSKVTAANGSTVQPHHHLEGFRSTMVDAIFIPGGAKAAETLSKNGRALHWIREAFGHLKAIGATGEAVDLVAKAIALPQVTVSSEAEVHESYGVVTLKKVKPESFTDAVKIAKGAAGFLGEFFYAIAQHRNWDRELDGLHSMIAY

SEQ ID NO: 1274 - protein, 433 aa, Staphylococcus epidermidis
MAFEFRLPDIGEGIHEGEIVKWFIKAGDTIEEDDVLAEVQNDKSVVEIPSPVSGTVEEVLVDEGTVAVVGDVIVKIDAPDAEEMQFKGHGDDEDSKKEEKEQESPVQEEASSTQSQEKTEVDESKTVKAMPSVRKYARENGVNIKAVNGSGKNGRITKEDIDAYLNGGSSEEGSNTSAASESTSSDVVNASATQALPEGDFPETTEKIPAMRKAIAKAMVNSKHTAPHVTLMDEIDVQELWDHRKKFKEIAAEQGTKLTFLPYVVKALVSALKKYPALNTSFNEEAGEVVHKHYWNIGIAADTDKGLLVPVVKHADRKSIFEISDEINELAVKARDGKLTSEEMKGATCTISNIGSAGGQWFTPVINHPEVAILGIGRIAQKPIVKDGEIVAAPVLALSLSFDHRQIDGATGQNAMNHIKRLLNNPELLLMEG

SEQ ID NO: 1275 - protein, 254 aa, Ralstonia metallidurans CH34
MSLFDLSGKVAIITGSSRGIGRAIAEQLAIQGAKVVVSSRKIEACQEVVDAINAKHGAGTALAVAANISSKDALQHLVDETNRVYGKVDVLVCNAASNPYYGPMSGVSDEQFRKVLDNNVISNHWLIQMVAPQMIERREGSIIIVSSIGGLRGSPTIGVYNVSKAADFQLARNLAVEFGPHNVRVNCIAPGLIKTDFARALWEDPVRYKQSTENAPLRRIGEPVEIAGAACYLASAASTFMTGQALVVDGGVTI

SEQ ID NO: 1276 - protein, 384 aa, Brachylophon curtisii
DLEPVNPADVPVTAAGALKSYKLAAKAISRLQSLPSGNISMLCDVLVKEVRDLTGYDRVMVYKFHEDEHGEVVSECRRPDLEAYLGLHYPATDIPQASRFLFMKNKVRMICDCLAPPVKVIQDERLPQPLSLCGSTLRSPHGCHAQYMANMGTIASLVMSVTINEDDDMMDGDQRQMARKLWGLVVCHHTSARFVPFPLRYACEFLIQVFGVQINKEVELAAQVREKHILRIQTLLCDMLLRDAPVAIITQSPNVMDLVKCDGAALYYKKKFWLLGITPTEAQIRDIAEWLLEYHNGNTGLSTDSLMEAGYPGASVLGDAVCGMAAVSITSRDFLFWFRSHTAKEIKWGGAKHDPDDKDDGRKMHPRSSFKAFLEVVKWRSLPW

SEQ ID NO: 1277 - protein, 472 aa, Erwinia carotovora subsp. atroseptica SCRI1043
MSQNVYQFIDLQRVDPPKKPLKIRKIEFVEIYEPFSESQSKAQADRCLSCGNPYCEWKCPVHNYIPNWLKLANEGRIIEAAELSHQTNSLPEVCGRVCPQDRLCEGSCTLNDEFGAVTIGNIERYINDKAIEMGWKPSVANVIPTGKRVAIIGAGPAGLACADVLARSGVQAVVFDRHPEIGGLLTFGIPSFKLEKEVMVKRREIFTEMGIEFRLNTEVGKDVQMKALLDEYDAVFLGVGTYQSMRGGLDNEDAQGVYDALPFLIANTKQLMGFEAATDEPYISMQGRRVVVLGGGDTAMDCVRTSIRQAATHVTCAYRRDEENMPGSKREVKNAREEGVEFKFNLQPLSVEVNGAGKVCGVKMARTALGVPDANGRRRPEIVEGSEHVLEADAVIMAFGFRPHKMAWLAEHDVKLDDQGRIVAPESCDNAFQTSNPKIFAGGDAVRGSDLVVTAIAEGRKAADGIMNYLEV

SEQ ID NO: 1278 - protein, 495 aa, Mesorhizobium loti
MAVRNDVSTRSYQQFIGGRFVDGSGSGSIERRSPATGDLVARYADGTPEDVDLAVEAARIAFEDGPWPRMSGMERAEVLNRLADLIRTNRDRLVRIEVEEVGKPVRFARGDIDGAAGLTRYAASLAMQMAGLTYTNIGDGKTALISREAVGVVALVTPWNFPALILSQKVPFALAAGCTVVLKPSEFTPGSAFEIAALAAEAGVPAGAFNVVSGYGATAGDHLTGHMGIDFVSFTGSTRTGSRVVGNTSRHLVKSSVELGGKSANIVFADADLEAAADGALMGVFFNNGECCVSGSRLFVQSSIADDFIAKVIARSRKMKVGDPFDDDTDVGALIDRNHLAKVTGFVKSGIEEGAQLVLGGNVAAGAVGHFHEATIFDRVEPHMTIFREEIFGPVLSITRFDTVDDAVRLANDTAYGLSNYIWSKNIDTVLTVAKRLKSGWVQANTIIDGAPQLPLTGVKGSGFGYEMGQAGFEEFTQLKTLLIQTGPRAPVFPV

SEQ ID NO: 1279 - protein, 308 aa, Brucella melitensis 16M
MLVEKTRLGGTCLNVGCIPSKALIHAADEFHRLTTFAAKSPLGITTQNPAIDFARTLEWKDGIVHRLNSGVAGLLKRSRVRMFQGQARFQDGKTVLVDTDTGRQTIHAENIVIATGSVPVEIQALPFGGNIISSTEALSLEKIPERLAVVGGGYIGLEIGTAFAKLGSRVMVVEATDRILPQYDAELTRPVMARLKTLGVEVLTGTSAKGLSADGKALEIRTQDGAVKAIEADKILVTVGRKPQTDGWGLSEIRLDMDGRFIRIDDRCRTSMRGIYAIGDVTGEPMLAHRAMAQGEMVAEIIAGGKHA

SEQ ID NO: 1280 - protein, 823 aa, Pneumocystis carinii
MDYLKKVRLWSEEEVGEWLESNNFGDYMDIFKENNINGDILLECNAAVLKELGVKKLGDRIRLSVCIKGLREKCIESARKSKMSFLMIDNQIQGFSFTLQSPTDPLIPVKSSELASPTSNFQLDNSYSDACCFDSLNNFHSVLSNISCSTKSISRNSSISTQKVFEKSPIFLETNVMQSDSIKKNCLKFIGEKGQTRIVNISLCYTADAILSKALKKFNITENPSEWRVFITNEDGSFECISNDTLLTISRQLSRPERERLILKRKSDPLTQEEFKKSQTIAREQRDAIYHTAVMAKTSGNLRKLETFFGEKLAPTLTSSFTTPLPSPLPKDNKYGNITHIRNFFGQRPPSELINSNLAEYFPGHEKKVLEQTIKNSIKSNHLNSFKGSNFDTPSSTLTYDLSSIPAVGEERIQYEGRRLSGVSHTLSLSRFISTRFPTLLESSILRENSSHHTLSSSSKLNSEGNTQDSKPSFRKKLEEKASSDETFKSESPNMLMEPSILSDFYDASLETDRDLLDDNIFENNEAKDFNTEKEIENNNSGPTRWIKGALIGSGSFGSVFLGMNALSGELMAVKQVEIPSIDIQGCKRKRAMLDALQREISLLKELHHENIVQYLGSSMDETHLTFFLEYVPGGSVTALLNNYGAFEEPLIRNFVRQILKGLNYLHNKKIIHRDIKGANILVDNKGGIKISDFGISKKVEANLLSMTRNQRPSLQGSVYWMAPEVVKQTLYTRKADIWSLGCLIVEMFTGKHPFPKMNQLQAIFKIGQYVSPDIPEHCTSEARHFLEKIFEPDYHARPTAADLLKYSFLGPMVSSPLTDAKK

SEQ ID NO: 1281 - protein, 431 aa, Brucella melitensis 16M
MAHFAIKLPDVGEGVAEAELVEWHVKVGDIVREDDLLAAVMTDKATVEIPSSRAGKVIAINGEVGEKIAVGSELVRLEIEGGATEKAEEPQPQAAEPTAPAAAVPEAPVLLQTPVPEKPAAPKRENAGRPFTGAGPLRPEGEKPLATPSVRLRARDAGIDLRRVRGTGPAGRITHEDLDAFFQMESGAAPALSGYAADTSINEIKVIGLRRKIAERMAEAKRHIPHITIVEEVDVTQLEELRNGLNHEKKEGHPRLTLLPFIIRTIVKAVKEQPGLNAHFDDEADIIRQFGGVHVGIATQTPNGLIVPVVRHAESMSVFAAATELSRVTEAARNGTAKREELTGSTITITSLGPLGAIATTPIINRPEVAIVGINKMAVRPMWDGTQFVPRKMMNLSCSFDHRVIDGWDAAVFVQKLKSLLETPAMIFVEG

SEQ ID NO: 1282 - protein, 390 aa, Ralstonia metallidurans CH34
MFILLGAIMVLAMHAGFAFLELGTVRKKNQVNALVKILVDFAVSTISYFFIGYTVAYGVQFMSGADVLAQKSGYELVKFFFLATFAAAIPAIISGGIAERSRFNPQLAATFVLVGFVYPFFEGIAWNNRFGIQDWIASVTGAPFHDFAGSVVVHAVGGWIALPAVLLLGARRGRYQKDGRISAHPPSNIPFLALGAWVLAVGWFGFNVMSAQTVDKISGLVAINSLMAMAGGTLAAWWAGRNDPGFAYNGPLAGLVAVCAGSDLMHPLGALITGAVAGVLFVHLFTLAQNKWHIDDVLGVWPLHGLCGAWGGIAAGIFGSHALGGIGGVSIVAQLIGTAMGIVIALVGGTVVYGTLKKVVGIRLDAEEEYNGADLTLHRISATPERETSW

SEQ ID NO: 1283 - protein, 161 aa, Schizosaccharomyces pombe
MSKIKLISSDNEEFVVDQLIAERSMLIKNMLEDVGEINVPIPLPNVSSNVLRKVLEWCEHHKNDLYSGTEEESDIRLKKSTDIDEWDRKFMAVDQEMLFEIVLASNYLDIKPLLDTGCKTVANMIRGKSPEDIRKTFNIPNDFTPEEEEQIRKENEWAEDR

SEQ ID NO: 1284 - protein, 216 aa, Oryza sativa
MGLGDRQLFAFTSTSTSCLDGFCELELSCFVMDGADAPLPPLPYEDEPPEPEIEEGAEEEPENNNEDAVDDVVGAEDDKEQEKTARPRKTSKYMTKYERARILGTRALQIRYLTVAFRSGVRCIGLHVHKLQHQFCISNCSAIVTNYSLNLGQVSFENKNVDYLHLMMKFQIAMKELRARKIPFTIRRYLPDGSYEDWGVDELIVEDSWKRQVGGG

SEQ ID NO: 1285 - protein, 89 aa, Triticum aestivum
  unsure (1)..(89): unsure at all Xaa locations
APTVMAFSATSVAPFHGLKSTAGLPISRRSSSAGLSSATNGGRITCMQVWPIEGIKXFFTLSYLPPLSTEALLKQVHYLIRSKWVPCLE

SEQ ID NO: 1286 - protein, 207 aa, Brassica rapa subsp. pekinensis
WFQGTADAVRQYLWLFEEHNVLEFLVLAGDHLYRMDYEKFIQAHRETDADITVAALPMDEKRSTAFGLMKIDDEGRIIEFAEKPKGEQLKAMKVDTTILGLDDERAKEIPFIASMGIYVVSKNVMLDLLRDQFPGANDFGSEVIPGATDLGLRVQAYLYDGYWEDIGTIEAFYNANLGITKKPVPDFSFYGRSAPIYTQPRYLPPSK

SEQ ID NO: 1287 - protein, 280 aa, Propionibacterium freudenreichii subsp. shermanii
MIIPTTPTPTVELSGGTRMPMLGMGTWPLKGEECRAAVASAIEQGYRLVDTAEAYGNEEAVGKAVREAGPDRAEIFVTTKFSKQWHSRKGVHEALEHSLERLGLDYVDLFLMHWPMPGEGSYVDAYRGMVELKEQGLAKAIGVSNFKVHHLDDLITEGMTPEVNQIQLDPSRPRLEVRDFLDNHDIVTEAWSPLGRGADGVLNAPAVLDAAKKHGITPAAAVLAWELNQGIVTIPKSANPEHQRTNLEAIGVELSAQEMKAIDALADPNAKIDDSDKTGN

SEQ ID NO: 1288 - protein, 389 aa, Escherichia coli
TLQNGKLNVPENPIIPYIEGDGIGVDVTPAMLKVVDAAVEKAYKGERKISWMEIYTGEKSTQVYGQDVWLPAETLDLIREYRVAIKGPLTTPVGGGIRSLNVALRQELDLYICLRPVRYYQGTPSPVKHPELTDMVIFRENSEDIYAGIEWKADSADAEKVIKFLREEMGVKKIRFPEHCGIGIKPCSEEGTKRLVRAAIEYAIANDRDSVTLVHKGNIMKFTEGAFKDWGYELAREEFGGELIDGGPWLKVKNPNTGKEIVIKDVIADAFLQQILLRPAEYDVIACMNLNGDYISDALAAQVGGIGIAPGANIGDECALFEATHGTAPKYAGQDKVNPGSIILSAEMMLRHMGWTEAADLIVKGMEGAINAKTVTYDFERLMEGAKLL

SEQ ID NO: 1289 - protein, 446 aa, Oryza sativa (japonica cultivar-group)
MAATIVSVKARQIFDSRGNPTVEVDVCCSDGTFARAAVPSGASTGVYEALELRDGGSDYLGKGVSKAVDNVNSVIAPALIGKDPTSQAELDNFMVQQLDGTKNEWGWCKQKLGANAILAVSLAICKAGAIIKKIPLYQHIANLAGNKQLVLPVPAFNVINGGSHAGNKLAMQEFMILPTGAASFKEAMKMGVEVYHNLKSVIKKKYGQDATNVGDEGGFAPNIQENKEGLELLKTAIEKAGYTGKVVIGMDVAASEFYNDKDKTYDLNFKEENNDGSQKISGDSLKNVYKSFVSEYPIVSIEDPFDQDDWEHYAKMTAEIGEQVQIVGDDLLVTNPTRVAKAIQEKSCNALLLKVNQIGSVTESIEAVKMSKRAGWGVMTSHRSGETEDTFIADLAVGLATGQIKTGAPCRSERLAKYNQLLRIEEELGAAAVYAGAKFRAPVEPY

SEQ ID NO: 1290 - protein, 363 aa, Yersinia pestis biovar Medievalis str. 91001
MLAAFLHLEIYSVYRWATYERHQSRLIIGMASSSRLHDVLPVYSLCLMVSGDGMYQEIVCIRRLHVSGERMKGIILAGGSGSRLHPITRGVSKQLLPIYDKPMIYYPLSVLMLAGIRDVLIISTPEDLPSFQRLLGNGDEFGINLSYAAQPSPDGLAQAFIIGEAFIDNEPCCLVLGDNIYFGQGFSPKLKAVAARQQGATVFGYQVMDPERFGVVEFDDNFRALSIEEKPSQPKSNWAVTGLYFYDNQVVDFAKQVKPSARGELEITSINQMYLDRGELTVELLGRGFAWLDTGTHDSLIEASTFVQTVEKRQGFKIACLEEIAWRNGWLDDDGVKRAATALAKTGYGKYLLDLLHARPRQY

SEQ ID NO: 1291 - protein, 398 aa, Desulfovibrio desulfuricans G20
MDMSLISAEIAGYLEKSSWIRKMFEAGIALKKQYGEQAVCDFSLGNPDLPAPPAVGDALRTMAENAGKPFAFGYMPNGGFQWAREALAGQVSAEQGMPVDAGDLLLSCGAAGALNAFFRAVLEPGDEVLAVAPYFVEYGFYVSNHQGVFKTAMSRPETFELDIEAVEARITPKTRALIINSPNNPTGVVYSREELEALAALLERKSRENGRPVYLIADEPYRFLSFDGVKVPSVLPLYPFSVVVNSFSKNLSLAGERLGYICLSPLMENRAELMAALTLTNRILGFVNPPVIGQHVMAHALGSQVDVGVYAQRRDAMAEVLSGAGYQFSMPKGAFYFFPKAPGGDDVEFCRVLMEEKVLAVPGSGFGGPGYFRLTFCVDEEVIRRSAGGFARAMAHFA

SEQ ID NO: 1292 - protein, 252 aa, Bordetella parapertussis 12822
MRLNGKTAIVTGAGSGFGEGIAATFAREGAKVVVADINEAGGQRVAAAINAAGGQAVFVRADVSDNAAVANLLAATLKAFGGLDIVVNNAGTTHRNRPMLEVEEDEFDRIYAINVKSIYLTARHMVPHFRAHGGGSFINIASTAAIRPRPGLTWYNGSKGAVVTTSKSMAAELGPDNIRVNCVNPVIGATGLLADFMGVPDTPENRKRFLATIPLGRFSTPQDIANACLYLASDEAAFITGACLEVDGGRCV

SEQ ID NO: 1293 - protein, 581 aa, Glycine max
  unsure (1)..(581): unsure at all Xaa locations
MCGILAVXLGCSDSSQAKRVRVLELSRRLKHRGPDWSGLHQYGDNYLAHQRLAIVDPASGDQPLFNEDKTVVVTVNGEIYNHEELRKQLPNHTFRTGSDCDVIAHLYEEHGENFMDMLDGIFSFVLLDTRDNSFIVARDAIGVTSLYIGWGLDGSVWISSELKGLNDDCEHFESFPPGHLYSSKERAFRRWYNPPWFSEAIPSAPYDPLALRHAFEKAVVKRLMTDVPFGVLLSGGLDSSLVAAVTARYLAGTKAAKQWGTKLHSFCVGLEGAPDLKAAKEVAEYIGTVHHEFHYTVQDGIDAIEDVIYHIETYDVTTIRASIPMFLMSRKIKSLGVKMVISGEGSDEIFGGYLYFHKAPNKEEFHQETCRKIKALHKYDCXRANKSTFAWGLEARVPFLDKEFIRVAMNIDPECKMIKKEEGRIEKWALRRAFDDEEHPYLPKHILYRQKEQFSDGVGYGWIDGLKAHAEKHVTDRMMLNAANIFPFNTPTTKEAYHYRMIFERFFPQNSARXLTVPGGPSVACSTAKAVEWDAAWSNNLDPSGRAALGVHASAYGNQVKAVEPEKIIPKMEVSPLGVAI

SEQ ID NO: 1294 - protein, 344 aa, Nitrobacter hamburgensis
IGCHTCSIACKNIWTDRKGTEYMYWNNVETKPGTGYPTRWEDQTKYRGGWVVDGTRQKSLRLRLQGKWGTLTNIFYNPYLPTLDDYFEPWTYDYQNLINAPLADEQPTARAISMVTGKYMDTIEAGPNWDDDLGGSQVYANNDPNYDGASDEEMRQINEINSTVFFYLPRICNHCLNPGCVAACPQGAIYKRGEDGVVLVSQERCRAWRMCVSGCPYKKTYFNWSTGKAEKCILCYPRLESGQPPACFHSCVGRIRYIGLVLYDADAIEETAEAPQDQLVAAQRNIIKDPFDPKIIEAARANGIPDSKIEAAQKSPVYQFVKKWGIALPLHPEFRTLPMLFYVP

SEQ ID NO: 1295 - protein, 169 aa, Bordetella parapertussis
MHPMTEIIKPWHSVRRSRLHGNGVFATRKIPAGTRIIEYGGKRISAAEADRRHPTNPDDPFHTFFFSLSSGRVIDGGDEGNDARWINHSCDPNCEAQEDRHGKRVYIVALRDIARGEELFYDYGLVLDGRITRKLKEGYRCLCGTTPCRGTMLALPEKKKTKARSAEKA

SEQ ID NO: 1296 - protein, 217 aa, Lactobacillus plantarum WCFS1
MKFFLDTANTEDIKHFAELGLVDGVTTNPTLVSREGRDFETVIKEITQIVSGPVSAEVTATKAEEMIAQARNEIKWASNIVVKIPMTEEGLKAVKVLSGEGIKTNVTLVFSVSQGLLAAKAGATYISPFLGRLDDIGGNGIQLVKDLRQVLDTYGFKTEIIAASVRGPQHVQEAALAGADIATIPATVFGKLWSHPLTDKGLASFASDWKAFQATQK

SEQ ID NO: 1297 - protein, 405 aa, Arabidopsis thaliana
MNSILSSVLPAPEDPVLSVIFACRDDPSPVKLNLSAGTYRTEEGKPLVLDVVRRAEQQLANDLSRDKEYLPLNGLPEFNKLSTKLILGDDSPALKENRVVTTQCLSGTGSLRVGAEFLATHNKESVIFVPNPTWGNHPRIFTLAGLSVQYFRYYDPKSRGLDFKGMLEDLGAAPPGAIVVLQACAHNPTGVDPTFEQWEKIRRLVRSKSLLPFFDSAYQGFASGSLDADAQAVRMFVADGGECLIAQSYAKNMGLYGERIGSLTIVCTSEDVAKKVENQVLLVVRPMYLTPPIHGASIVATILKNSDMYNDWTIELKGMADRIISMRQQLYAALEARGTPGDWSHIIKHIGMFTFTGLSEEQVRLMAKEYHIYMTYDGRISMASLSSKTVPQLADAIHAVVTRIA

SEQ ID NO: 1298 - protein, 321 aa, Malus x domestica
ILPFKLPAIGPNDVRIRIKAVGICGSDVHYLRTMKCADFEVKEPMVIGHECAGIVDKVGSEVKHLVPGDRVAVEPGISCSRRQQCKGGQYNLCPDMKFFATPPVHGSLANQIVHPADLCFKLPENVSLEEGAMCEPLSVGVHACRRANVGPETTVLIVGAGPIGLVSVLAARAFGAPRIVIVDMDDRRLAMAKSLGADGTVKVSIKMEDLDDEVAKIKEAMGSEVDVTFDCVGFNKTMSTGLNATRPGGKVCLVGMGHGVMTVPLTPAAAREVDVVGVFRYKNTWPLCLEFLRSGKIDVKPLITHRFGFTEKEVEEASLEF

SEQ ID NO: 1299 - protein, 344 aa, Nitrobacter hamburgensis
IGCHTCSIACKNIWTDRKGTEYMYWNNVETKPGTGYPTRWEDQTKYRGGWVVDGTRQKSLRLRLQGKWGTLSNIFYNPYLPTLDDYFEPWTYDYQNLINAPLADEQPTARAISMVTGKYMDTIEAGPNWDDDLGGSQVYANNDPNFDGASDEEMRQINEINSTVFFYLPRICNHCLNPGCVAACPQGAIYKRGEDGVVLVSQERCRAWRMCVSGCPYKKTYFNWSTGKAEKCILCYPRLESGQPPACFHSCVGRIRYIGLVLYDADAIEETAKAPQDQLVMAQRNIIKDPFDPDIIAAARANGIPDSKIEAAQKSPVYQFVKKWGIALPLHPEFRTLPMLFYVP

SEQ ID NO: 1300 - protein, 560 aa, Treponema denticola ATCC 35405
MNESTMQRLRYNYEPKIPKVFAEPLSLIKPEIGEATHAQSNQAELKEIFPHTYGMPIIRFVKGKSEVEHKPLKFGVILSGGQAPGGHNVISGLFDALKKGNANSKLYGFLRGPEGLVKGRYVEIKKALIDKYRNTGGFDIIGSGRTKIETEEQIESSIQNVKKLKLDALIIIGGDDSNTNAAFLAKYFIQAKLDTKVIGVPKTIDGDLKNQYIETSFGFDTATKLYSELIGNICRDVNSARKYWHFIKLMGRSASHIALECALKTQPNVCLIGEELAEKKVTLQQVTDYIVDIIVKRSQKGENFGVVLVPEGIIEFIPEMDELIEEINDIMAEKTSAFSKLKTFAGKKSWLQKHLSKKAFALFDNLPENISLQLLMDRDPHGNVQVSRIETEKLLIDLVTRKITEMKKEGTYNGKFSTYAHFFGYEGRSAFPSNFDSDYCYTLGFTAFLLALNGFSGYIASVKNLTDEVEHWLPCGVPLSMMMNMERRKGKMTPVIKKSVVDLNGKPFKTYEKNRDKWAVETLYRFPGAIQYFGDLEVCDIPTKTLLLEKGNLKEKRKKK

SEQ ID NO: 1301 - protein, 319 aa, Malus x domestica
ILPFKLPAIGPNDVRIRIKAVGICGSDVHYLRTMKCADFEVKEPMVIGHECAGIVDKVGSEVKHLVPGDRVAVEPGISCSRCQQCKGGQYNLCPDMKFFATPPVHGSLANQIVHPADLCFKLPENVSLEEGAMCEPLSVGVHACRRANVGPETTVLIIGAGPIGLVSVLAALAFGAPRIVIVDMDDKRLAMAKSLGADGTVKVSTKMEDLDDEVAKIKEAMESEVDVTFDCVGFNKTMSTGLNATRPGGKVCLVGMGHGMMTVPLTPAAAREVDVVGVFRCKNTWPLCLEFLRSGKIDVKPLITHRFGFTEKEVEEASL

SEQ ID NO: 1302 - protein, 352 aa, Lactobacillus plantarum WCFS1
MEAVVKTESGYDNMELKQIPIPEVTGDKVLLKVAYTGICGTDIHTFKGQYANAVTPLVLGHEFSGEVVEVGPDVKTLKPGDRVTSETTFATDGTCVYCQDKEYNLCPNRVGIGTKANGSMANYVLTREESAHILPDNVSYKMAAMSEPLASCVHAMYQKTPFTLHDTLLIMGPGPMGLLSLQIAKEIGAFVIVSGITKDADRLQIAKELGADIIVDTQKEDLAKVVMDATDGVGVTKVYDCSGATPAVNSALPLIRKGGTFQQVGLFAKPMNELDERSIIQHEITYRGSRSQNPYDWAIALHLESKGAINQDAMITKVFDLEHWRDAFDAMMAGKELKVMIASNPDDPDLAD

SEQ ID NO: 1303 - protein, 526 aa, Triticum aestivum
MPPPPPPTTALPRPSLLLAVSSAALKISAAAATSPARGVRWKGVGVDGRRGRSRAVGRCWAAAVEEEAGAQEDGVLLPQEGEGSEAAGRYDWREEWYPLYLSKEVPDDAALPLTVFDRQLVLYRDADGVLRCHEDRCPHRLAKLSEGQLVDGKLECLYHGWQFDGEGKCVKIPQLPEGAKIPRNACARNYEVRDSQGVVWVWMSPATPPDAKKLPWFEPYARAGFTDLSTVHELPYDHSILLENLMDPAHVPISHDRTDWTAKREDAQPLAFEVAERTARGFAGHWWRERAPHLRNLLRFEAPCVLTNTLEFVDKDGREQCFSAQFLCRPAGQGKSMLLVRFGSTARSPLLRVLPKWYFHQNACKVFEQDMGFLSSQNEVLLREKVPTKELYLNLRSSETWVAEYLRHITMSPHGMPYYFGHSTISPPPVPAVVEQAPAGAAAGISASFPAKGGLGTQHAPNPTNRYFRHVVHCKGCRDSVNRYTALKKALVVLAAVAAAAGGLAATRQWKAVLRCGGVLLPAAPH

SEQ ID NO: 1304 - protein, 472 aa, Thermobifida fusca
MITTDRIYIDGQWIAPQTSDRMAVENPYTCQDIATIPLCGTEEVDHAVHAARRAFPAWSTTDLEERLAHLDALRRELAVRATEMSALITSEMGAPKVIADRIQVGLPLTVLGDTVATARDFAWTEKIGNSLILREPIGVVGAITPWNYPLHQIVAKIAPALAAGCTVVLKPSEIAPLSALLLAEIIDSVGFPPGVFNLVTGTGPVVGEALAAHPDVDMISFTGSTRAGSRVSEVASATVKKVALELGGKSAGVVLDDADLPTAVKAVVSDCLLNSGQTCTALTRLLVPHDRYEEAVALAVDAARSKPMGDPADPATRIGPLASADAHRRVLGHLEQARKDGAVFATGGPDADVPEQGYFVAPTVLAGLDRDAAAAREEIFGPVLTVLGYRDVDDAVELANATDYGLSGAVWSADTDRALAVARRMRTGQVAINGGRFNPSAPFGGYRKSGNGRELGRFGLEEFCEVKAVQLP

SEQ ID NO: 1305 - protein, 361 aa, Thermobifida fusca
MPTTLAAVVRAPGEPVRIEEVALPELGPGLVRVRMAAAGVCHSDLSLASGKLAHPMPAVLGHEGVGHVVDVGAGVSDLSVGDTVLLNWNPPCRSCWHCTHGEPYLCANAADASRRVWGTLADGTDVHPCLGVAAFAQETVVPASACVAIPADIPPTEAALLGCAVLTGVGAVRNAAQVRPGQSVAVIGLGGVGLAAVQGARLAGAAMVIAVDPVEEKEELARSLGATHFLTPSDDLSRRIRALADGRGVDHAIECVGRAATIRAAWSCTRRGGTATVVGFGAATDTLTLNALEIPHFARTLQGCLYGSSDPATDVPELLKLYRDGELDLSSLVSRTIGLDDVPDALAELHAGRGARSLVEF

SEQ ID NO: 1306 - protein, 312 aa, Haemophilus influenzae R2866
MKKFAMVFPGQGSQTVGMLADLATEYPIVIETFKQASDALGYDLWYLVQQGPAEELNKTWQTQPALLAASVAIYRVWQEKFPQLKPEVMAGHSLGEYSALVCAGVLDFQDAIKLVELRGKLMQQAVPEGTGAMYAIIGLDNEAIINACKQAEEGEVVSAVNFNSPGQVVIAGAKAAVERAAALCKEAGAKRALPLAVSVPSHCALMKPAAEQLAVTLENIQINTPTTSVLNNVDVKAETEGAEIRTALVRQLYSPVRWTETVEKMAQDGVLVLVEVGPGKVLNGLTKRIVGDLQAISVNDVASFNAVEEFLA

SEQ ID NO: 1307 - protein, 118 aa, Glycine max
  unsure (1)..(118): unsure at all Xaa locations
QSSRSESEVDLTCSDGTFARAAAPRKTSNAISVVPAMRDGGSDYLGKGVSKAVDNVNTIIAPALDGKDLTEKTPIHNSLLAYAFTPVYXSTLNPVKLGANAILAVSLAVCKAGATVLK

SEQ ID NO: 1308 - protein, 456 aa, Haemophilus influenzae R2866
MTKHYDYIAIGGGSGGIASLNRAASYGKKCAIIEAKHLGGTCVNVGCVPKKVMFYGTHIAEAINNYAPDYGFDVEVKKFDFSKLIESRQAYISRIHTSYNNVLAKNNIDVINGFGKFVDAHTVEVTLADGTKEQVTADHILIATGGRPYRPNIKGQEYGIDSDGFFALTELPKRAAVIGAGYIAVELSGVLNSLGVETHLLVRRHAPMRNQDPLIVETLVEVLAQDGIQLHTNSTPSEIVKNADGSLTVRCDGQSDITVDCVIWAAGRVPATDKIGLENAGVETNEHGYVKVDKYQNTNVKGIYAVGDIIENGIELTPVAVAAGRRLSERLFNNKPTEYLDYSLVPTVVFSHPPIGTVGLTEPQAIEQYGAENVKVYKSSFTAMYTAVTQHRQPCKMKLVCVGKDEKVVGLHGIGFGVDEMIQGFAVAIKMGATKADFDNTVAIHPTGSEEFVTMR

SEQ ID NO: 1309 - protein, 243 aa, Oryza sativa (japonica cultivar-group)
MASLFKDPTKLSAYRDRRFTGTQEEYEAALQASVTVYVGNMSFYTTEEQAYELFSRAGEIRKIIMGLDKNSKTPCGFCFILYYSREDAEDAVKYISGTMLDDRPIRVDFDWGFEEGRQWGRGRSGGQVRDEYRTDYDPGRGGYGKMVQKELEAQRELVDYGGAFQPNAPPQYDRGDRKRGYGDSYRNDRDYQRKRYRNDERSSQRAPDSEFKRDAIDSEKNPRFREKGDSDEEDDDYDKRRRR

SEQ ID NO: 1310 - protein, 364 aa, Streptococcus anginosus
MDKKLQLDTILAHAGIKTDEATGALTTPLHFSTTYQHPEFGKSTGYDYTRTKNPTRSSLEKTLAAIEHADYALATSSGMSAIVLAFSVFPIGSRVIAVRDLYGGSFRWFHQVEQEGRFHFTYANTEEELLAALTEDIDVVYLETPTNPLMLEFDVAFIAEKAHAKGAKVIVDNTFYTPIYQRPLENGADLVLHSATKYLGGHNDVLAGALMTSDKELYENLFYNLNTTGAVLSPFDSYLLLRGLKTLSLRMERSTKNAQAVAAFLKDSPAVKEVLYPGKGGMISFKVKDEAVIPHLLNTLKVFTFAESLGGVESLITYPATQTHADIPAEVRKSYGLTDDLLRLSIGIEDSQDLITDLKFALEV

SEQ ID NO: 1311 - protein, 409 aa, Glycine max
MNAIATAAVLSLPFSFSKSSKLDTKKGLKGRFRVFAVYGEEIDKKNAWSALFDVEDPRSKVPQYKGKFLDVYQALEVARYDIQYCDWRARQDLLTIMLLHEKVVEVLNPLARDYKSIGTMKKELAELQEELAQAHQQVHISEARVSSALDKLAYMEELVNDKLLQERSTTEVSQTSSSPSTSFKPVDIEKRRSPRKSLDISGPVQSYHPHLKNFWYPVAFSTDLKDDTMIPIECFEEPWVIFRGKDGKPGCVQNTCAHRACPLHLGSVNEGRIQCPYHGWEYTTDGKCEKMPSTRLLNVKIKSLPCFETEGMIWVWPGNDPPTATLPSLLPPSGFEVHAEIVMELPIEHGLLLDNLLDLAHAPFTHTSTFAKGWSVPRFCVFFNTQRTESHLCCTLETENHAILKRFKK

SEQ ID NO: 1312 - protein, 157 aa, Glycine max
  unsure (1)..(157): unsure at all Xaa locations
MSTSIEDQALSSTGSDLKCDGYGISLVVSSVLFVLYLAVHAKKNLNSLCRRGSYVVVSYFAXLWLVTLLNLAWSFLQAWQCSPGKEVAWNLLSLFTASGMLCLEISLMAFLLKDNYMNGMEALAHSFLATGIIVFVDTLLKVRLIFIHISYIHACAM

SEQ ID NO: 1313 - protein, 389 aa, Escherichia coli
TLQNGKLNVPENPIIPYIEGDGIGVDVTPAMLKVVDAAVEKAYKGERKISWMEIYTGEKSTQVYGQDVWLPAETLDLIREYRVAIKGPLTTPVGGGIRSLNVALRQELDLYICLRPVRYYQGTPSPVKHPELTDMVIFRENSEDIYAGIEWKADSADAEKVIKFLREEMGVKKIRFPEHCGIGIKPCSEEGTKRLVRAAIEYAIANDRDSVTLVHKGNIMKFTEGAFKDWGYQLAREEFGGELIDGGPWLKVKNPNTGKEIVIKDVIADAFLQQILLRPAEYDVIACMNLNGDYISDALAAQVGGIGIAPGANIGDECALFEATHGTAPKYAGQDKVNPGSIILSAEMMLRHMGWTEAADLIVKGMEGAINAKTVTYDFERLMEGAKLV

SEQ ID NO: 1314 - protein, 344 aa, Nitrobacter sp.
IGCHTCSIACKNIWTDRKGTEYMYWNNVETKPGTGYPTRWEDQTKYRGGWVVDGQRQKSLRLRLQGKWGTLTNIFYNPYLPTLDDYFEPWTYDYQNLINAPLADEQPTARAISMVTGKYMDTIEAGPNWDDDLGGSQVYANNDPNFDGASDEEMRQINEVNSTVFFYLPRICNHCLNPGCVAACPQGALYKRGEDGVVLVSQERCRAWRMCVSGCPYKKTYFNWSTGKAEKCILCYPRLESGQPPACFHSCVGRIRYIGLVLYDADAIEETAKSPQDQLVMAQRNIIKDPFDPEIIAAARANGIPSAKITAAQQSPVYQFVKKWGIALPLHPEFRTLPMLFYVP

SEQ ID NO: 1315 - protein, 495 aa, Pseudomonas aeruginosa UCBPP-PA14
MSIAIDPSVSAFLRSPHGLLIEGESGPARSGADMPLYDPATGAELARVARAGAEDVDRAVAAARRAFEGNWAGQRPADRERLLLRLAERIEAHGEQLAQLETLNNGKSINLSRALEVGASVEFIRYMAGWATKIEGRSLDLSIAAVPGARYRAYTVPEPVGVVGAIVPWNFPLLMAIWKIVPALACGCTVVLKPADETPLTALRLGQLCLEAGIPPGVVNIVTGTGAEAGAALAAHPGIDKLAFTGSTPVGKLIGHAAVENMTRFSLELGGKSPVIILDDTSLDMAAAGSAGAIFFNQGQVCTAGSRLYVQRKRFDQVLERLAAIAGDLSIGPGLDPTTQINPLVSARQQERVLGMIESGVAEGASVVCGGARQGETGFYVQPTILADVTPGMQVVREEIFGPVLVATPFDDLDEAVRLANDSIYGLGASIWSNDLRQVMDLVPRIKAGTVWVNAHNLLDPSMPFGGFKQSGIGREMGHAAIEAYTENKSVCIAY

SEQ ID NO: 1316 - protein, 236 aa, Gossypium hirsutum
MGRGRVELKRIENKINRQVTFAKRRNGLLKKAYELSVLCDAEVALIIFSNRGKLYEFCSSSSMIKILERYQKCNYGAPEPNVSSREAALELSSRQEYLKLKARYDALQRSQRNLLGEDLGPLSSKELESLEKQLDSSLKLIRSTRTQYMLDQLNDLQRKEHLLNEANRTLKQRLVEGYQVNSLQLNPNATEDVGYGRQQVHHQPHGDAFFHPLDCEPTLQIGYQHDPMSVVTAGPV

SEQ ID NO: 1317 - protein, 389 aa, Escherichia coli
TLQNGKLNVPENPIIPYIEGDGIGVDVTPAMLKVVDAAVEKAYKGERKISWMEIYTGEKSTQVYGQDVWLPAETLDLIREYRVAIKGPLTTPVGGGIRSLNVALRQELDLYICLRPVRYYQGTPSPVKHPELTDMVIFRENSEDIYAGIEWKADSADAEKVIKFLREEMGVKKIRFPEHCGIGIKPCSEEGTKRLVPAAIEYAIANDRDSVTLVHKGNIMKFTEGAFKDWGYQLAREEFGGELIDGGPWLKVKNPNTGKEIVIKDVIADAFLQQILLRPAEYDVIACMNLNGDYISDALAAQVGGIGIAPGANIGDECALFEATHGTAPKYAGQDKVNPGSIILSAEMMLRHMGWTEAADLIVKGMEGAINAKTVTYDFERLMEGAKLL

SEQ ID NO: 1318 - protein, 344 aa, Nitrobacter winogradskyi
IGCHTCSIACKNIWTDRKGTEYMYWNNVETKPGTGYPTRWEDQTKYRGGWVVDGQRQKNLRLRLQGKWGTLTNIFYNPYLPTLDDYFEPWTYDYQNLITAPLADEQPTARAISMVTGEYMDTIEAGPNWDDDLGGSQVYANNDPNFDGASDEEMRQINEINSTVFFYLPRICNHCLNPGCVAACPQGALYKRGEDGVVLVSQERCRAWRMCVSGCPYKKTYFNWSTGKAEKCILCYPRLESGQPPACFHSCVGRIRYIGLVLYDADAIEETAKSPQDQLVMAQRNIIKDPFDPEIIAAARANGIPDSKIEAAQKSPVFQFVKRWGIALPLHPEFRTLPMLFYVP

SEQ ID NO: 1319 - protein, 223 aa, Acinetobacter sp. ADP1
MFFSFSLFTRVLIMSAPHWLSQGTLVLASNNKGKITEFEKLFAELQLPVDVIPQGQLNIPDAIEDGLSFVENAIIKARHASKISGKPAIADDSGICVPVLGGAPGIYSARYAGDHGNDAANNEKLLHDLKPFRNAEQAIQGMFVCVLALVEHAEDPLPQIFQGFWHGEILEQARGEHGFGYDPLFWLSELKMSSAEMSKEEKNKISHRGQAMQRFRESLMTRE

SEQ ID NO: 1320 - protein, 344 aa, Nitrobacter winogradskyi
IGCHTCSIACKNIWTDRKGTEYMYWNNVETKPGTGYPTRWEDQTKYRGGWVVDGQRQKSLRLRLQGKWGTLTNIFYNPYLPTPDDYFEPWTYDYQNLINAPLADEQPTARAISMVTGKYMDTIEAGPNWDDDLGGSQVYANNDPNFDGASDEEMRQINEINSTVFFYLPRICNHCLNPGCVAACPQGALYKRGEDGVVLVSQERCRAWRMCVSGCPYKKTYFNWSTGKAEKCILCYPRLESGQPPACFHSCVGRIRYIGLVLYDADAIEETAKSPQDQLVMAQRNIIKDPFDPEIIAAARANGIPAAKIQAAQQSPVYQFVKKWGIALPLHPEFRTLPMLFYVP

SEQ ID NO: 1321 - protein, 565 aa, Triticum aestivum
  unsure (1)..(565): unsure at all Xaa locations
AARISDTDPGMAVEAHDDAIHQTPLHALMKHADRGEAIKAEYKADILVXWRKQDTTETVEELLKLAEAANLKVKIDKMFKGVKINTTEXNRSVLHVALRAPRDAVINSDGVNVVPEVWAVKEEISLVSATYRRGSCIGASEKTPTKASTPAMHVCFIRFLVVKPSTPYDPDTASXSSKLXRFSSPTKKCNLRLRLIIDKPRLSLWHNKFSSFFLATCYNQSGCTSILKFLLLQLGERQVNYRVIINXFFSLSRQFGIDPNNAFAFWDWVGGRYSVCSAVGVLPLSLQYGFPIVQKFLEGASSIDNHFHTSSFEKNIPVLLGLLSVWNVSFLGYPARAILPYSQALEKLAPHIQQLSMESNGKGVSIDGVRLPYEAGEIDFGEPGTNGQHSFYQLIHQGRVIPCDFIGVIKSQQPVYLKGETVSNHDELMSNFFAQPDALAYGKTPEQLRSEKVPENLISHKTFQGNRPSLSFLLSSLSAYEIGQLLSIYEHRIAVQGFIWGINSFDQWGVELGKSLASTVRKQLHASRMEGKPVEGFNPSSASLLTRFLAVKPSTPYDTTVLPKV

SEQ ID NO: 1322 - protein, 388 aa, Escherichia coli
TLQNGKLNVPENPIIPYIEGDGIGVDVTPAMLKVVDAAVEKAYKGERKISWMEIYTGEKSTQVYGQDVWLPAETLDLIREYRVAIKGPLTTPVGGGIRSLNVALRQELDLYICLRPVRYYQGTPSPVKHPELTDMVIFRENSEDIYAGIEWKADSADAEKVIKFLREEMGVKKIRFPEHCGIGIKPCSEEGTKRLVRAAIEYAIANERDSVTLVHKGNIMKFTEGAFKDWGYQLAREEFGGELIDGGPWLKVKNPNTGKEIVIKDVIADAFLQQILLRPAEYDVIACMNLNGDYISDALAAQVGGIGIAPGANIGDECALFEATHGTAPKYAGQDKVNPGSIILSAEMMLRHMGWTEAADLIVKGMEGAINAKTVTYDFERLMEGAKL

SEQ ID NO: 1323 - protein, 344 aa, Nitrobacter winogradskyi
IGCHTCSIACKNIWTDRKGTEYMYWNNVETKPGTGYPTRWEDQTKYRGGWVVDGQRQKSLRLRLQGKWGTLTNIFYNPYLPTLDDYFEPWTYDYQNLINAPLADEQPTARAISMVTGKYMDTIEAGPNWDDDLGGSQVYANNDPNFDGASDEEMRQINEINSTVFFHLPRICNHCLNPGCVAACPQGALYKRGEDGVVLVSQERCRAWRMCVSGCPYKKTYFNWSTGKAEKCILCYPRLESGQPPACFHSCVGRIRYIGLVLYDADAIEETAKSPQDQLVMAQRNIIKDPFDPEIIAAARANGIPDSKIEAAQKSPVFQFVKKWGIALPLHPEFRTLPMLFYVP

SEQ ID NO: 1324 - protein, 387 aa, Geobacillus stearothermophilus
MKKKCIAMLLAGGQGSRLRSLTTNIAKPAVPFGGKYRIIDFTLSNCTNSGIDTVGVLTQYQPLLLHSYIGIGSAWDLDRRNGGVTVLPPYSVSSGVKWYEGTANAVYQNINYIEQYNPDYVLVLSGDHIYKMDYQHMLDYHIAKQADVTISVIEVPWEEASRFGIMNTNEEMEIVEFAEKPAEPKSNLASMGIYIFNWPLLKQYLQIDNANPHSSHDFGKDVIPMLLREKKRPFAYPFEGYWKDVGTVKSLWEANMDLLDENNELDLFDRSWRIYSVNPNQPPQYISPEAEVSDSLVNEGCVVEGTVERSVLFQGVRIGKGAVVKESVIMPGAAVSEGAYVERAIVTPDSIIPPHSSVCPEDADDVVLVTAEWLKQSNEETARKDEA

SEQ ID NO: 1325 - protein, 1536 aa, Neurospora crassa
METGMDHTQDTTPTAEGHGQLGNSYQTPDQLAANNIKVQDYIDNTALATDLHANDASNSSATADGGSSAITSPTNLSSWSASSDRQLGHGSVQDPEDRVFPIRSVISVDLAATPPVNDDIRARRRISLSEGYATSAGAGNTATPTRPHASTVPTAKSGAIDVESRPTVSQSQSSVSQPDGSSVFSSSSAGTMRHKRRMNAMTGSLSSVQADADRYGKGRPIELVLGDSSEEESDGGADGSGDGGDLGTIGASSSSGRESLDALPETHFAPRFKHIVTNEGHAVITGRDGQLQRCEDEPIHTPGAVQGFGLMVVIQEERDGRFIVRFVSENSKRIIGYTPQELFRMNNFLDIFTDEQSENLLDHIDFIRDEDSDPAINGPEVFSLSIRLPKAKTSVRLWCAIHVHPSRPELTICEFELDDDHDYPLRPPEEDLPDIPEDTLQSNPTTEELTESTAISSKPLRVLRSARRRRGEAGAMQVFDIMSQVQEQLANAPNLEKFLKILVGIVKELTGFHRVMIYQFDSSFNGKVVTELVDPMQTRDLYKGLHFPATDIPSQARELYKLNKVRLLYDRDVESARIVCRTPEDLETPLDMTHSYLRAMSPIHLKYLANMAVRSSMSISINAFGDLWGLVSCHSYGPKGMRVSFPIRKMCRLIGDTASRNIERLSYASRLQARKLINTVPTDKNPSGYIIASSDDLLKLFNADFGMLSIREETKILGKIEQSQEALAMLEYLRLRKFSSVVTSQDIKIDFPDLRYPPGFQVIAGLLYVPLSVGGNDFIVLFRKGQVREVKWAGNPHEKTIQAGSAAYLEPRKSFKVWYETVIGKSREWSEEEVETAAVLCLVYGKFIEVWRQKEAALRSSRLTRLLLANSAHEVRTPLNAIINYLEIALEGSLDQETRDNLARSHSASKSLIYVINDLLDLTKTEEGKDLVKDEVFDLLACIREATEPFRHDAKRKGITYEVIEHPGLPRFVHGDQRRVRQAVANVTANAVKHTSEGSVRVELYVAEVQDNRARIDIVVQDSGQGMSNAQLDALFRELEQVDTDIGSESSDDDNSQSGKALGLGLAVVARILRNMDGQLRLKSEVGKGSRFVIQLPFDLPEEETSRDTVGASSGNTAQLSLGSGTASASAASVTQMQDGEVMLVDRNNGSSWSVNNATGSLASKKSYDDNLSITSKGSGRSALSDADRLIDAIQNPLTLGEPEPESVARQRRNSRGPYYNPSSSLLGSSKGRSVSPGSRKRPDVPTRSVSSPNTKKDLPFEKPTTEVAPGPSEPAPAAQGVQYVTDSRVPIKPVKLPDEMFDKPVVPPQSTSKVLFEIKDAVADKAKAASSAVKEQQSVSSQQPAPPPAPAKEASTTNNKLQVLVAEDDPINVKVLRKRLEKAGYKVTHALNGEDCAAVYEDKPVVFDVVLMDMQMPIVDGLTSTKMIRAFEKTNRDGSGQQLSDIASDHGRVPIFAVSASLVEQEKDTYVDAGFDGWILKPIDFKRLETLLQGITDDKARNDALYVQGQWERGGWFEKKGVGNMGQEQEENHEQ

SEQ ID NO: 1326 - protein, 393 aa, Pirellula sp. 1
MPEVSSASNHRFQPSSNRQRVNMHPWIADRTASFDSSGIRKVFDLAAKLKDPINLSIGQPDFDVPEEIQDATVDAIRSGKNAYSPTQGIAPLREKLLAEINAKYPGQNRDVFVSSGTSGGLVLSLLSMINPGDEVIFLDPYFVMYPALVSLCGGIPVTVDSYPDFRLDPAKIEAAITPKTKMILVNSPANPTGVTASEQDLRDVGDLAAKHNIALLSDEIYSRFFYDGDFASPAATNPDTIVIDGFSKSHAMTGWRVGYVHGPPEIIATMLKIQQYSFVCSPQPAQWGALRAMEISLDGHIDDYRRKRDFMVEQLSPHFELTSPGGAFYLFPKAPGTEGGTAFVERAIADGLLIIPGKIFSSRDSHFRVSFAASDDTLRRGAERLIKLAGDNR

SEQ ID NO: 1327 - protein, 141 aa, Triticum aestivum
VKLVFPIDFVTADKFAPDAKTGYATDADGIPDEWEGLDCGEQSSKLFREEILKSKTIVWNGPSGVFEFDAFAKGTKSVLEAVIEATKEGATTIIGGGDTATAALNWDAADKVSHISTGGGASLELLEGKELPGVTALSSKN

SEQ ID NO: 1328 - protein, 745 aa, Pseudomonas syringae pv. syringae B728a
MSQLDKDAFEVLLANCADEPIQFPGAIQPHGLLFTLAEPELTILQVSANVQTVLGHVPEQLLGKGLDCVLGAGWAEVIRSASAHDSFIDAQRLLMSINGIEFEALLHRHQGVLVLELEIQGKDAQSVSYSERTGNMGRMLRQLHAASDLQTLYEVSVREIQKMTGYDRVLIYRFEEEGHGQVIAEASAPSMELFNGLFFPASDIPEQARELYRRNWLRIIPDADYIPVPLVPQLRPDTQQQLDLSFSTLRSVSPIHCQYMKNMGVLSSMSVSLIQSGKLWGLISCGNRTPLYVSHELRSACQAIGQVLSLQISAMEALEISRQREAKVRALEQLNLAMAGSEENVFDGLAQQPQLLMDLVGATGVAIIEDRQTHCFGICPEPSDIRALHAWMIAGGEPVYASHHLSSVYAPAEAYQPVASGVLAMSLPKPVDNGVIWFRPEVKETVQWSGDPKKPLNMESSAGGMRLRPRTSFEIWKVEMTGIATKWSYGDVFAANDLRRSALENDLARQVRREQQAVRARDELVAVVSHDLRNPMTVISMLCGMMQKSFSSDGPHTSRRISTAIDTMQQAASRMNVLLEDLLDTSKIEAGRYTITPQPLEVSQIFEEAYTLLAPLAMDKSIEISFNAEPDLKVQADPERLFQVLSNLIGNAIKFTPKMGTIGVAAMSNGTEIVFTVRDSGEGIPPEQLPHIFERYWTVKEGNPTGTGLGLYISQGIIKAHGGELAAQSQVGEGSEFRFTVPMAV

SEQ ID NO: 1329 - protein, 455 aa, Rhodospirillum rubrum
MVSNALRDADLSYTIHPYTNLVAHETKGPLIAVRGEGVRVFDDKGKDYIEGMAGLWCASLGFSEPRLAAAAARQMAELPFFHMFSHKSHEPGIRLSEELVKRAPVPMARAFFCNSGSEANDTAIKMIWYINNALGRPQKKKIIARKRAYHGVTVASASLTGLPANHRDFDLPIANILHTSSPDYYREGKPGESEEAFAKRCADELEAMILAEDPNTVAAFFAEPIMGAGGVVLPPKGYFEHIQAVLKKYDILLVADEVICGFGRTGQYWGSQTFGLKPDILTCAKALSSAYMPISAVLVTEEVYKPLRDNSGKIGTFGHGYTYSAHPVAAAVALETLAIYDERDILGNVAVSGARLQERLRSFADHPLVGNVRGIGLIGAIELVADKATHGAFPASDAVGPRVVTKAEEAGVILRAMAGDVVAFSPPLIITPEEVDQMMDRFTVALEAVTAEVLG

SEQ ID NO: 1330 - protein, 287 aa, Zea mays
MAAPPVQPVPTAAAAAAAVNGDAFRLGFVGAGNLAESIARGVAASGVLPASAIRTAPHRRPERGEAFASFGACLLQTNAHVVDDSDVIVISVKPQIVKQVLLQLRPRLSEKKLLVSIAAGIKMQDLQDWSGQRRIIRVMANTPSAVGQAASVMCLGEMATQDDENRVRKLFSAIGKVWTAEEKYFDAVTGLSGSGPAYIFLAIEAMADGGVAAGLSRDLALGLASQTVLGAATMVSQTGKHPGQLKDQVTSPAGTTIAGIQELEKGAFRGTLISAVVAAANRCRELS

SEQ ID NO: 1331 - protein, 706 aa, Azotobacter vinelandii
MKIIVVDPRRTDTCELADLHLAILPGTDVALFHGILHILLWEGWIDRAWIEAHTEGFDELKKLVRDYSPAAVADICGISVGSLQTCAELIGKAPSFLSLWCMGLNQSTSGSAKNSALINLHLATGQIGKPGAGPFSLTGQPNAMGGRETGSLANLLPGHREAGNAGHRAEVADYWRIDALPESTGLTAIELFEAVRIGRIKALWIACTNPAQSLPDQQKIHEALAACPFVVVQEAYATTETCRYADLLLPAAGWGEKEGMVTNSERRLSHVRRAVPAPGEARADWAIVCDFARRLEKHLRPGRPSLFEFADPAALFDEYKQLTAGRDLDLSGLSHALIDELGPQQWPFPTGASRGTPRLYADGVFPTASGRAHLHADPYRAPQERREARYPLILNTGRLRDQWHGMSRTGTVARLFGHVEEAVLGLHPDELRRRRLAGGDLARLRSRRGSLILPVQADESIRPGQAFLPMHWGDRFLKGLGTNVLTLPACDPLSKQPELKHAGVEVEKVELPWQLFALVEGDVQQRFAELRPLLDGFAYASLTLAGRERPALLVKAASAVPPESGLLARIDVLLGLDEGPILAYDDPGRSVGKRVRIENGRITALRLAGETAARDWLKALWNEGRTDAELRRWMLAPLGGPLGSDGAIKDRTVCSCMNVGEAAIRAGIERGLDLDGLKQELGCGTGCGSCVPEIRRLLARPMTANS

SEQ ID NO: 1332 - protein, 395 aa, Pseudomonas syringae pv. syringae B728a
MPDPVIEQADDIILRVTATAICGSDLHLYRGKIPTVEHGDIFGHEFMGVVEETGSAVTAVAKGDRVVIPFVIACGSCFFCNLDQFAACETTNTGRGAILNKKSIPPGAALFGFSHLYGGVPGGQAEYVRVPKANVGPFKVPGTLADEKVLFLSDILPTAWQAVLNAGIGQGSTVAIYGAGPVGLMSAACAKMLGAEKIFMVDHHPYRLAYAQKTYGVIPINFDEDDDPADTIIRQTAGMRGVDGVIDAVGFEAKGSTTETILATLKLEGSSGKALRQCIAAVRRGGVVSVPGVYAGFIHGFMFGDAFDKGLTFKMGQTHVHRFMPELLEHIEAGRLEPEAIITHRMSLEDAAKGYKLFDKKEEDCRKVILTPGNNTIVVPDDTTEALVGGGVPAM

SEQ ID NO: 1333 - protein, 209 aa, Azotobacter vinelandii
MAHQTTASTCCYCGVGCGVLIEHDGEQITGVAGDPAHPANHGRLCSKGSTLHLTGDLAARALHPELRSGKALPRDRTDWDNALDHAAAVFAETIREHGPDSVAFYISGQLLTEDYYAFNKLARALVGTNNIDSNSRLCMSSAVVGYKRSLGADAPPCAYEDVEQSHCLLIAGSNMAYAHPVLFRRLEAAQGPPSRDEDHRGRSATHRYL

SEQ ID NO: 1334 - protein, 273 aa, Bacillus subtilis subsp. subtilis str. 168
MKIGFIGTGNMGTILIESFIESKAADPSNMTITNRTIEKALHIKNRYNSINVTESLEKLVSENEMIFICVKPLDIYPLLARALPYLRKDHILISITSPVQTEQLEQYVPCQVARVIPSITNRALAGVSLVTFGTSCGESAKAKINELMQHISHPLQIESDITRVASDIVSCGPAFMSYLIQRFIDAAVSETSVSKQDAILMCKEMLVGMGKLLETELYTLPALQEKVCVKGGVTGEGIKALESGVQDMFHRVFQNTHMKYEEDISAVKKQFHV

SEQ ID NO: 1335 - protein, 167 aa, Zea mays
  unsure (1)..(167): unsure at all Xaa locations
MRGILTALGCSDWPQAKRARILACSRRMKHRGPDWTALYQXHEGNFLAQQRLTVISPLSGDQTLFSEDRTVVAAASGEIYNHKNVRKKVTGTPNFSTGSDCEVIIPLYYKYEENFVDTLDGEFAVVVYDTRDRTYTTDRDAIGVKPLYIGCGSDRSGCIAAEKNALN

SEQ ID NO: 1336 - protein, 979 aa, Oryza sativa
MWPVRPCYSATARKLAVVVLSEGPIGLAGQTEVEWPVRPALARSDRHRLGLTDYGSVGFVSAIPSSTIPASTGPTAVVCSVRPARTRQSDRHYVAGLTAPDQAEPSEYKGSPRLDLVGWFYLGLMNDIVDERERGLDTDRLRCSWRKKRRTSSLSSQLDVDGGDGVLDGGGCRCSGGRGQSRRGRGAAVAFPVTSCAPSIGLEFVGRSWRRRRISYLVPCRPPPLFYMAQCDGDPPAIRLGAPDQGAVKVRCAVGPDGMTSSSRVSVFASGKKNRGRMNVWGKEFLENDEGLEPPLEDDLVDLNNRGMDNQGQSTQHTPPSYACRDVRRDRDDDRVYGGNVPHPPPPSGRSRSTWTGRLSRFAPAHALDEAADLSTRANPRAAALQNGSLDRSPVPRRVRTRATVTRYGSSPIGRLDSRDRQTIDACTLSVKPTAACVLPSHARHEVRKSNPRADARPTRNTWTARIPRPRPVTDAKTPSRLVHSNPSKPKPPNSDRANRDSRHHQTRRHDTLRPKSYTARRDLVQQTQRKHSLDRHMPTPRPRHRHHALPLALALAAPLLLLAAADGQPNESRDKNNGGGGGGFMAPSGGGGGMGSQSPSFSAPMVVLLVALIAAFFFIGFFSIYIRRCGGEASTGPTIPAAALAALSRQEQRSRRQRGLDPAVVESFPTMKYAEARELRDGGKDAVLECAVCLSEFDDDEELRLLPKCSHAFHPDCIGEWLAGHVTCPVCRCNLAPDAAAAEANVVSGEVDGEQQEEEVVVAIDVDREGEEEDEERRREAMELERIGSQRRAVRSRSGRPLPLPRSHSTGHSLATTRLGDAGDLERFTLRLPEHVRREMVAAAGEESLRRTAVREGRVGGGARSARIGRSDRWPSFIARTFSSRIPFWSASRRVLDAAEAGADAAATTTTTTPTSTARTKRDKTAAAADGSVSSAKGSVRFDCLGGGGGGGGPSNRVVAFANDDEEDDDEKPIARQV

SEQ ID NO: 1337 - protein, 372 aa, Triticum aestivum
  unsure (1)..(372): unsure at all Xaa locations
MAAIISRRGAARALALAMARRGMCSAPAPAAALSSEELIRMEQDCSAHNYHPIPMVFSKGEGSHILDPEGNKYIDFLSAYSAVNQGHCHPKVLRALIEQAERLTLSSRAFYNDKFPVFAQYLTSMFGYDMMLPMNTGAEGVETAIKLARKWGYEKKNIPKNEALIVSCCGCFHGRTLGVISMSCDNDATRGFGPLVPGHLKVDFGDIDGLEKIFKEHGDRICGFLFEPIQGEAGVIIPPDGYLKAVRDLCSRHNILMIDDEIQTGIARTGKMLACDWEDVRPDMVILGKALGAGVVPVXSAVLADKEVXLCIKPGEHGSTFGXGNPLASAVAVPSLRVVKDEGLVERAAVGRQAFTFQSQQIPQITRNTGKL

SEQ ID NO: 1338 - protein, 195 aa, Zea mays
MGFPAGYSELVLPKQLLHLLLLLGYVRRFLLWAFDAVGLGDLLDLGDDHQAPQPQPQHRRAEFRAAMPAMVIEEALPVARFDELEARVVVGGDCAVCLGGIGGGDEVRRLGNCRHAFHRACLDRWMEHDQRTCPLCRAPLIPGAALWPADASDLDFSYPGAPLTPVVPSPTLTPVPSPTLLRPHELLLLAGLGGY

SEQ ID NO: 1339 - protein, 367 aa, Staphylococcus epidermidis ATCC 12228
MKDTDLAQIALTQDHTGAIVNPIYLSTAYQHPHLGESTGYDYTRTKNPTRTAFEEAFAQLEKGIASFATSSGMAAIQLICNIFKPGDEILVAFDLYGGTFRLFDFYEKQYGLKFKYVDFLNYEEVEKNITPQTRALFIEPISNPQMIEIDVEPYYILSKKHQLLTIIDNTFLTPYLSTPLEEGADIVLHSATKYIGGHNDVLAGVVTVKDAQLAEQLNQFHNMIGATLSPLDSYLLQRGLKTLHLRIERSQENAQKLAQRCRQSDSIDEVLYSGRTGMLSLRLNQAYSVAKFLENLEICIFAESLGGTETFITFPYTQTHVDMPDEEKDKRGIDEYLIRLSVGIEDYNDIEADIIQALENSKVGVIS

SEQ ID NO: 1340 - protein, 391 aa, Staphylococcus epidermidis ATCC 12228
MSLSKETEVIFDVRRGKDYDSANPPLYDSSTFHQKVLGGETQYDYARSGNPNRTLLEEKLARLEGGKYAFAYASGIAAISAVLLTLNAGDHVILPDDVYGGTFRLTEQILNRFNIEFTTVNATHIDHITEAIQSNTKLIYVETPSNPLFKITDIHAVATLAKEHKILLAVDNTFMTPLGQSPLALGADIVIHSATKFLGGHSDLIAGAAITNNREVANALYLLQNGTGTALSAYDSWALAKHLKTLPVRFKQSVHNAERLVQFLSQREEISEVYYPGNNPTHLKQASTGGAVIGFRLKDESKAQKFVDSLTLPLVSVSLGGVETILSHPATMSHAAVPEDVRRERGITFGLFRLSVGLENPEELIADFNYALKEAFNESFTEPIKEQRFSS

SEQ ID NO: 1341 - protein, 459 aa, Brassica rapa
MTSINVKLLYHYVITNLFNLCFFPLTAIVAGKAYRLTIDDLHHLYYSYLQHNLITIAPLFAFTVFGSVLYIATRPKPVYLVEYSCYLPPTHCRSSISKVMDIFYQVKKSCPSRNGTCDDSSWLDFLRKIQERSGLGDETHGPEGLLQVPPRKTFAAAREETEQVIIGALENLFKNTNVNPKDIGILVVKSSMFNPTPSLSAMVKNNFKLRSNVRSFNLGGMGCSAGVIAIDLAKDLLHVHKNTYAFVVSTENITYNIYAGDNRSMMVSNCLFRVGGAAILLSNKPGDRRRSKYELVHTVRTHTGADDKSFRCVQQGDDENGKIGVSLSKDITDVAGRTVKKNIATLGPLILPLSEKLLFFVTFMGKKLFKDKIKHYYVPDFKLAIDHFCIHAGGRAVIDVLEKNLALAPIDVEASRSTLHRFGNTSSSSIWYELAYIEAKGRMKKGNKVWQIALGSGFK

SEQ ID NO: 1342 - protein, 275 aa, Desulfovibrio desulfuricans G20
MASISVRQAGCYYYPHRHAKSHTTSDHADIRGAACYAGSNIRHNSCPFHHAVRSVSKETYMEFFLDTADLDEIRLAGKQGLIDGVTTNPTLLSRQGGDWKKRMQQICDEVDGPVSLEVISPDAEGMLREAEELVRYGDNVVIKVPMTAEGLIATRTLTGKGIKTNVTLVFSAMQALLAAKAGATYVSPFLGRLDGIGHEGMEIVSQIRTIFDNYGYETKILAASIRHAQHVLDSALVGADVVTVPYSVLRQLMHHPLTDSGLDAFLADWNKLTQS

SEQ ID NO: 1343 - protein, 182 aa, Dechloromonas aromatica RCB
MDLQKAQAMLANAELIHDEAIVQAAVAEVAQAIRERLADKYPLVLCVMTGGVVFCGQLLTKLDFPLDFDYLHATRYGPETQGGKISWRSAPWTSVKGRSVLVVDDILDEGVTLAAVKESLRRMGAEEVLTAVFADKLNGKEKPVAADFIGLTVPDRFVFGYGMDAGGVWRNLPAIYAMKDDA

SEQ ID NO: 1344 - protein, 458 aa, Brassica rapa
MTSINVKLLYHYVITNLFNLCFFPLTAIVAGKAYRLTIDDLHHLYYAYLQHNLITIAPLFAFTVFGSVLYIATRPKPVYLVEYSCYLPPTHCRSSISKVMDIFYQVRKADPSRIGTCDDSSWLDFLRKIQERSGLGDENHGPEGLLQVPPRKTFAAAREETEQVIIGALENLFKNTNVSPKDIGILVVHSSMFNPTPSLSAMVNNFKLRSNVRSFNLGGMGCSAGVIAIDLAKDLLHVHKNTYALVVSTENITYNIYAGDNRSMMVSNCLFRVGGAAILLSNKPGDRRRSKYELVHTVRTHTGADDYSFRCVQQGDDENGKTGVSLSKDITDVAGRTVKKNIATLGPLILPLSEKLLFFVTFMGKKLFKDKIKHYYVPDFKLAIDHFCIHAGGRAVIDVLEKNLALAPIDVEASRSTLHRFGNTSSSSIWYELAYIEAKGRMKKGNKVWQIALGSGFK

SEQ ID NO: 1345 - protein, 459 aa, Brassica oleracea
MTSINVKLLYHYVITNLFNLCFFPLTAIVAGKAYRLTIDDLHHLYYSYLQHNLITIAPLFAFTVFGSVLYIATRPKPVYLVEYSCYLPPTHCRSSISKVMDIFYQVRKADPSRNGTCDDSSWLDFLRKIQERSGLGDETHGPEGLLQVPPRKTFAAAREETEQVIIGALGNLFKNTNVSPKDIGILVVNSSMFNPIPSLSAMVVNTFKLRSNVRSFNLGGMGCSAGVIAIDLAKDLLHVHKNTYALVVSTENITYNIYAGDNRSMMVSNCLFRVGGAAILLSIKPGDRRRSKYELVHTVRTHTGADDFSFRCVQQGDDENGKTGVSLSKDITDVAGRTVKKNIATWGPLILPLSEKLLFFVTFMGKKLFKDKIKHYYVPDFKLAIDHFCIHAGGRAVIDVLEKNLALAPIDVEASRSTLHRFGNTSSSSIWYELAYIEAKGRMKKGNKVWQIALGSGFK

SEQ ID NO: 1346 - protein, 358 aa, Mycobacterium avium subsp. paratuberculosis str. k10
MGTPEVDVVILVGGKGTRLRPLTLSAPKPMLPTAGLPFLTHLLSRIAAAGIEHVILSTSYQAAVFEAEFGDGSKLGLQIEYVTEERPLGTGGGIANVAGQLRHDTVMVFNGDVLSGADLGQMLDFHAAQQADVTLHLVRVSDPRAFGCVTTEDGRVTAFLEKTQDPPTDQINAGCYVFARRVIDRIPRGREVSVEREVFPALLSDPDVKVCGYVDATYWRDMGTPEDFVRGSADLVRGIAPSPALHGHRGEQLVHDGAAVSPGAVLIGGTVVGRGAEIGPGVRLDGAVIFDGVKVEAGSVIERSIVGFGARIGPRALIRDGVIGDGADIGARCELLRGARVWPGVSIPDGGIRYSSDV

SEQ ID NO: 1347 - protein, 391 aa, Thermobifida fusca
MRALTWQGPRDVRVETVPDPTIEEPTDAIIRITSSGLCGSDLHLYEVMAPFMREGDILGHEPMGVVEAVGDAVTTLRPGDRVVVPFNIACGHCFMCVQGLQAQCETTQVRETGMGGRLFGYSSLYGSVPGAQAEYLRVPHADYGPIKVPKGPPDDRFVYLSDVLATAWQAVRYAAVPPGGSLAVLGLGPIGDMCCRVAQHLGAGQVFGVDVVPERLSRAARRGVTTFHFDEDTVDAIRDLTDGRGPDAVIDAVGMEAHGSPITRTAQRLTALLPSKAGAALITTAGVDRLTALHTAITLVRRGGTISLSGVYGGIADPLPMLTLFDKQVQIRMGQANVRRWVDEILPLLTDDDPLGVDSFATHRLPLAEAPYAYAAFQHKDNGMVKTLFHP

SEQ ID NO: 1348 - protein, 482 aa, Bordetella parapertussis 12822
MNAMTNKTLTTAAGAPVADNNNTMTAGPRGPALLQDVWFLEKLAHFDRERIPERVVHAKGSGAYGTFTVTHDISRYTRARIFAEVGKQTPLFLRFSTVAGERGAADAERDVRGFAIKFYTDEGNWDLVGNNTPVFFIRDPLKFPDFIHTQKRDPKTNLRNATAAWDFWSLNPESLHQVTILMSDRGLPQNYRQQHGFGSHTYSFVNDAGERFYVKFHFKSQQGIACYTDGEAAELVGRDRESAQRDLFQNIEQGQFPRWTLKVQVMPEAEAATYHINPFDLTKVWPHADYPLIEVGVLELNKNPENYFAEVEQAAFTPANVVPGIGFSPDKMLQGRLFSYGDTHRYRLGINHHQIPVNAPRCPFHSFHRDGMGRVDGNGGATLNYEPNSFGEWREAKHAAEPPLALDGQAADRWNHRVDEDYYSQPGALFRLMNDDQKQQLFGNIGRHMAGVPEEIQRRQLEHFRRADPAYAAGVAKALGLK

SEQ ID NO: 1349 - protein, 180 aa, Oryza sativa
  unsure (1)..(180): unsure at all Xaa locations
ISVLAGGDDPELFCARFSDSPRNPTVEVDVRCSHGTFARAAVPSGASTGVYEALELRDGGSDYLGKGVSKAADNVNPVIAPALIGKDXLRHSAELDHSMVQQLDGTQNEWGWCKQKLGANAILAVSLAICKAGAIIKKIPLYQHIANLAGNKQLVLPVPAFNVINGGSHAGNMLAMQAVI

SEQ ID NO: 1350 - protein, 378 aa, Haemophilus influenzae R2866
MEIKQINSTIKSRAAVAFAPNQPLQIVEIDVEMPRKGEVLIRNTHTGVCHTDAFTLSGSDPEGVFPVVLGHEGAGVVVAVGEGVLSVKPGDHVIPLYTAECGECEFCRSGKTNLCVSVRDTQGKGFMPDCTTRFSYQGQPIYHYMGCSTFSEYSVVAEVSLAKINPEANHEQVCLLGCGVTTGIGAVHNTAKVQEGDSVAVFGLGAIGLAVVQGARQAKAGRIIAIDTNPAKFDLAKQFGATDYLNPNDYDKPIKDVLLDINKWGIDHTFECIGNVNVMRQALESAHRGWGQSIIIGVAGAGQEISTRPFQLVTGRVWKGSAFGGVKGRSELPQMVEDSMKGDIQLEPFVTHTMPLDQINEAFELMHEGKSIRTVIHY

SEQ ID NO: 1351 - protein, 405 aa, Buchnera aphidicola str. APS (Acyrthosiphon pisum)
MKTVDIEVKMPDIGLEEVEIIEILVSINEKIAPEQGLITVEGDKTSMEIPSPISGIVKHIFIKIGEKIKTDALIMRCEVENIDFHVKKKEEICLDNNVLNKVEKNFKKDIFFHATPLIRRLARNLNINLYDVVGTGPKNRILKEDLDLYQSNIKENLIEEKNKINFGDSKKSKTKELELSDIQKNIGNNLHRNWMNIPHVTQFDEVDITILEKFRQKYNNEKRNQKKTNENITILVFIIKVVAYALEKFPIFNSSLNINNKKIILKKYINIGFAIDVNNDLFVPVLKDVNKKNIKQLSSELILLSEKARTRKLNIEDMTGGCFTISNLGGIGGSWFSPIINSPEVAILGISKSQIKPSWNGKEFIPSLMLPLSLSYDHRVINGAYAARFITFISRVLSDMHFLIM

SEQ ID NO: 1352 - protein, 383 aa, Triticum aestivum
  unsure (1)..(383): unsure at all Xaa locations
SRVRTNFPDSPEPIYGTQYLPRKFKIAVTVAGDNCVDILTNDIGVVVVSDSAGEPVGFNLYVGGGMGRTHRIETTFPRLADPLGYVPKEDILYAMKAIVVTQRENGRRDDRRYSRMKYLLDSWGIDKFRAEVEKYYGKKFEDFHPLPEWQFNSYLGWQEQGXDGKLFYGVHVDNGRLGGQAKKTLREIIEKYSLDVSITPNQNLILCGVDQAWREPITAALAQAGLLEPKDVDLLNITSMACPALPLCPLAQTEAERGILPILKRIRAVFDKVGIKDEESVVVRITGCPNGCARPYMAEVGFVGDGPNSYQIWLGGTPNQTTLAETFMNKVKLQDIEKVLEPLFSYWNSTRQEGESFGSFTNRMGFEQLKEVVNKWEGSASAA

SEQ ID NO: 1353 - protein, 437 aa, Schizosaccharomyces pombe
MLARNLRCLHPNTFASLKTNVSYHGVKCLASQSKRGFKVWADVPMGPPDPIFGITEAYKKDGDVKKMNLGAGTYRDDAGKPYVLPSVRQAETELLSQKLDKEYAPITGIPSFRVQATKLAYGDVYESIKDRLVSAQSISGTGALCIAANFLASFYPSKTIYVSDPTWGNHKNVFSRAGLTVKSYKYYDPATRGLDIKGMLSDLTSAPDGSIILLHACAHNPTGVDPTKAQWDDILKTMQKKNHFALLDMAYQGFASGDFARDAYATRLFASSNVPMLLCQSFAKNMGLYGERAGCFSILANDAEEAARIESQTKILIRALYSNPPVNGARIANHILSNPALREQWAGEVVGMSERLKSMRKALRNILEKDLKNKHSWKHITDQIGMFCYTGLNPQQVDVLAKQYHIYLTKNGRISISGLNTSNVRYFAEAINAVTSN

SEQ ID NO: 1354 - protein, 295 aa, Schizosaccharomyces pombe
MSVYRDNMYMKYDRNFENRVARRNGQARNASLAKTLHDSGIAERARSPSGSAIPHAYRVMNGSGANDTSLPLTSNPAYVALTSRISSSKSENNQQLAANETAGAPEGTEETVDISNSISDDHANAKNLPAASVKALVGAGVLSDELSVIAYDMSFEDELIQDKQLIDHSVFDQLLEMDDDDEHEFSKSIVWNYFEQAETTIADLQKALEAKDLKKLSSLGHFLKGSSAVLGLTKMRKVCERIQNYGSLRSRDGVMKLPSEEIALDLISKSLSVVNDFYKDARAYLLDFYEKNSST

SEQ ID NO: 1355 - protein, 299 aa, Streptococcus pyogenes M1 GAS
MTKVRKAIIPAAGLGTRFLPATKALAKEMLPIVDKPTIQFIVEEALKSGIEEILIVTGKSKRSIEDHFDSNFELEYNLQAKGKIELLKLVDETTSINLHFIRQSHPRGLGDAVLQAKTFVGNEPFVVMLGDDLMDITNPNVKPLTKQLIDDYEETHAATIAVMRVPHEDVSNYGIIAPQAKAVKGLYSVDTFVEKPQPQDAPSDLAIIGRYLLTPEIFSILEKQEPGAGNEVQLTDAIDTLNKTQRVFAREFKGKRYDVGDKFGFMKTSLDYALKHPQVKDDLKAYIIQLGKALEKTKP

SEQ ID NO: 1356 - protein, 834 aa, Sinorhizobium meliloti 1021
MTGELTRREMLKAHAAGIAAATAGIALPAAAQPVPGGVEALQITWSKAPCRFCGTGCGVMVGVKEGQVVATHGDMQAEVNRGLNCIKGYFLSKIMYGTDRLKTPLLRKRNGAFAKDGEFEPVSWDEAFDVMAEQAKKVLKDKGPTAVGMFGSGQWTIFEGYAATKLMRAGFRSNNLDPNARHCMASAAYAFMRTFGMDEPMGCYDDFEHADAFVLWGSNMAEMHPILWTRLADRRLGHEHVKVAVLSTFTHRSMDLADIPIVFKPGTDLAILNYIANHIIQTGRVNEDFVRKHTTFMVGATDIGYGLRPDNPLEVKAVNAKDAAKMTPSDFESFKSFVSEYTLDKVVELTGVEAGFLEQLADLYADPKRKVMSLWTMGFNQHVRGVWVNQMVYNLHLLTGKISEPGNSPFSLTGQPSACGTAREVGTFAHRLPADMTVTNPEHRKHAEEIWRIPHGIIPEKPGYHAVEQDRMLKDGKLNFYWVQVNNNVQAAPNTQNETYQGYRNPDNFIVVSDVYPTITAMSADLILPAAMWVEKEGAYGNAERRTHVWHQLVDAPGEARSDLWQMVEFSKRFTTDEVWSTDILDANPGYRGKTLYDVLFKNGNVDSFPASEINKEYANREAEAFGFYIQKGLFEEYASFGRGHGHDLAPYDRYHDERGLRWPVVDGKETLWRYREGYDPYVKPGEGVKFYGRPDGKAVILAVPYEPPAESPDDEYNVWLVTGRVLEHWHSGSMTMRVPELYKAFPGAVCFMNAGDARDRGINQGAEVRIVSRRGEIRARVETRGRNRMPPGVIFVPWFDASRLINKVTLDATDPISKQTDFKKCAVKIVSVA

SEQ ID NO: 1357 - protein, 368 aa, Ralstonia metallidurans CH34
MKTKAAIAWKAGAPLTIEEVDLDGPRAGEVLVEIKATGICHTDYYTLSGADPEGIFPAILGHEGAGIVTDVGPGVTSLKPGDHVIPLYTPECRQCKFCLSRKTNLCQAIRATQGKGLMPDGTSRFSIDGKPIFHYMGTSTFANHIVVPEIALAKIRPDAPFDKVCYIGCGVTTGVGAVIFTAKVEAGANVVVFGLGGIGLNVIQGAKMVGADKIIGVDLNPAREAMARKFGMTHFVNPKDVDNVVDHIVQLTDGGADYSFECIGNTQVMRQALECCHKGWGKSIIIGVAEAGAEISTRPFQLVTGREWKGSAFGGARGRTDVPKIVDWYMDGKLNIDDLITHTLPLDRINEGFDLMKRGESIRSVVLY

SEQ ID NO: 1358 - protein, 407 aa, Borrelia burgdorferi B31
MRIGISDIRIFLPLNYLDFSVLLENPLYFSNEVFFKKINRAIDATLQKGFRFTSPNEDSVTMASSAVKLIFDNNNLDLSKIRILLGGTETGVDHSKAISSYVFGALKQSGICLGNNFLTFQVQHACAGAAMSLHTVASVLSHSNNSEYGIVFSSDIAHYSNLTTAEITQGAGATAILIEKNPKLLSINLSEFGVYTDDVDDFFRPFGSVEAKVRGQYSVECYNNANENALRDFAFKKQLSMKDLFSNYRFVLHVPFAKMPIDSMHYILKKYYSDDESVRNAYLESIDFYDGVEAAMEVGNLYTGSIFLSLAFYLKRVFSKKDITGEKILFCSYGSGNIMIIYELTIEKSAFDVIKLWDLEGLIKNRNNANFEEYKDFFQNKIIPGESRGFYLKELRNDGYRVYGYRA

SEQ ID NO: 1359 - protein, 249 aa, Chrysanthemum x morifolium
MGRGRVELKRIENKINRQVTFAKRRNGLLKKAYELSVLCDAEVALIIFSNRGKLYEFCSSSSMLKTLERYQKCNYGAPETNVSAREALELSSQQEYLKLKARYEALQRSQRNLLGEDLGPLNCKELESLERQLDTSLKQIRSARTQFMLDTLTDLQKKEHALNDANRTLKQRLMEGHQVTSLHWNPHVQQEMGYDQQHEPQHQNGEAFFHPLDCGPTLQMGYPSDSLTAEAAASVAGPSCSNYMPGWYQ

SEQ ID NO: 1360 - protein, 246 aa, Chrysanthemum x morifolium
MGKGRLELKRIENKINRQVTFAKRRNGLLKKAYELSVLCDAEVALIIFSTRGKLYEFSSTSSMLKTLERYEKSSFGPPEQRRPAKEDLQEQSSYQEYMRLKERYDALKQLERNYYGEEIDNLSTNELESLERQLHCSLKQIRTIRTQSLVDRLYEQQKMEHHLYESNKTLRLKFEEESQAEALQWEAHARANGMVYGHPQHQLSQTTHDAFYHPTGCETTLQIGYQTDMSAVTSTSMNHQMQGWPA

SEQ ID NO: 1361 - protein, 559 aa, Solanum tuberosum
MGSSGDAWKLKDHPKLPKGKTVAVIVLDGWGEAKPNEYNAISVAETPVMDSLKQGAPEHWRLIKAHGNAVGLPTEDDMGNSEVGHNALGAGRIFAQGAKLVDLALASGKIYDGEGFKYVQECFEKGTLHLIGLVSDGGVHSRLDQLLLLLKGAAERGAKRIRVHALTDGRDVLDGSSVGFMETLENDLAKLREQGVDARVASGGGRMYVTMDRYENDWDVVKRGWDAQVLGEAPHHFKDPVEAIKKLRQEPNTSDQYLAPFVIVDDNGKPVGPILDGDAVVTFNFRADRMVMLAKALEYEDFDKFDRVRVPKIHYAGMLQYDGELKLPNKYLVSPPEIDRTSGEYLVRNGVRTFACSETVKFGHVTFFWNGNRSGYFDEKLEEYVEIPSDSGITFNVKPKMKALEIAERTRDAILSHKFDQVRVNIPNSDMVGHTGDIKATIEACKAADDGVKMILEAIEQVGGIFLVTADHGNAEDMVKRNKKGEPLLDKNGNIQILTSHTLEPVPIAIGGPGLLPGVRFRTDLPTGGLANVAATFMNLHGFEAPSDYEPTLIEVVDN

SEQ ID NO: 1362 - protein, 294 aa, Picea abies
MEQYEKVEKIGEGTYGVVYKARDRLTNETIALKKIRLEQEDEGVPSTAIREISLLKEMQHGNIVRLQDVVHSEKRLYLVFEYLDLDLKKHMDSCPELAKDPRLIKTFLYQILRGIAYCHSHRVLHRDLKPQNLLIDRKTNALKLADFGLARAFGIPVRTFTHEVVTLWYRAPEILLGSRHYSTPVDVWSVGCIFAEMVNQRPLFPGDSEIDELFKIFRVLGTPNEETWPGVTSLPDFKSAFPKWPAKDLATVVPGLEPAGIDLLSKMLCLEPSKRITARSALEHEYFKDLGFVP

SEQ ID NO: 1363 - protein, 466 aa, Xylella fastidiosa Dixon
MIKPRTPPGVLELLPREQIAFQRMLDVIRRNYERFGFLPVETPVFELSDVLLTKSGGETERQVYFVQSTGTLANAAESGATRLPELALRFDLTVPLARYVAEYEHVLAFPFRRYQIQRVYRGERAQRGRFREFYQCDIDVIGKQTLSIRYDAEVLAVIHAVFSELGIGDFQVQLNNRKVLRGFLESQGVRDGELQLAVLREVDKLDKRGVLDVRDTLIGQGFGIPAAQVENILTFVATRSTSHADALARLDALIEDSGPGSHDMLRQGVAELREVLTLVNVLGVPEHAYRLNFSIARGLDYYTGTVYETSLINHPQIGSICSGGRYENLANHYTQSKLPGVGISIGLTRLFWQLRDAGLMDGIAESSVQAMVVLMDEATLDDALDIARCLRIGGINTEVQMEAKKVSKQFQYASRAGIRFVVLAGDDERARGVVAVKDLTREQQFEIPREELASTLQVELEQAKVM

SEQ ID NO: 1364 - protein, 312 aa, Escherichia coli O157:H7 EDL933
MKVAVLGAAGGIGQALALLLKTQLPSGSELSLYDIAPVTPGVAVDLSHIPTAVKIKGFSGEDATPALEGADVVLISAGVARKPGMDRSDLFNVNAGIVKNLVQQVAKTCPKACIGIITNPVNTTVAIAAEVLKKAGVYDKNKLFGVTTLDIIRSNTFVAELKGKQPGEVEVPVIGGHSGVTILPLLSQVPGVSFTEQEVADLTKRIQNAGTEVVEAKAGGGSATLSMGQAAARFGLSLVRALQGEQGVVECAYVEGDGQYARFFSQPLLLGKNGVEERKSIGTLSAFEQNALEGMLDTLKKDIALGEEFVNK

SEQ ID NO: 1365 - protein, 429 aa, Methylobacillus flagellatus
MQEISKSSKLSNVCYDIRGPVLDRARQMEEDGHRIIKLNIGNPAPFGFAAPEEILQDVIRNMDSASGYTDSKGLFAARKAIMHYTQQKNIQGVTIDDIIIGNGVSELIVMAMQALLNNGDQVLVPMPDYPLWTAAVNLAGGTARHYVCDEQTGWLPDLRDIENKITANTRGIVIINPNNPTGALYPRETLEGIIEIARHHGLVIFADEIYDKVLFDGNTHTSIASLADDVLFVTFNGLSKNYRTCGYRAGWLVISGEKRHAGDYIEGLNMLASMRLSRQCARAVGDPDRAGRYQSIDDLVAPTGRLCKQRDLAYKMLTDIPGVSCVKPKAGLYLFPRLDPKIYPIQDDQQFILDLLLEEKVLLVQGTGFNWRAPDHFRVVFLPNVDDLTEAFTRIARFLENYRKQHSTITIVEAKPRKRAQTTSQSASA

SEQ ID NO: 1366 - protein, 484 aa, Lactobacillus plantarum WCFS1
MTEKLTTETGQPWANNEHSQTAGARGPVLMQDYNLLEKLAHFDRERIPERVVHAKGAGAKGFFELENDMGEYTKADLFNGVGKKTPVILRFSQVAGEKGYPDTVRDVRGFALKFYTQQGNYDLVGNNTPVFFVNDPLKFPDFIHSQKRDPKTNRRTQNMQWDFWAHSPESLHQVTYLMGDRGLPASYRTMNGYGSHTFKWVNQNGEQFWVKYHFISDQGVKNMTAQAAEKAMSQDLDYLQDDLYDAIQEKNYPSWTMYVQILPYEEGLNYKWDIFDVTKVISHKDYPLIKVGKLTLNENPTNNFTDIEEAAMSPANFVPGIEPSPDKLLQGRLFSYKDAQRYRLGANFEDLPVNKPVVPVHNYERDGYMKINNQGAEVNYEPNALHGPEEVPDAAFSPDSVRGETRAQPYRYQVDYTTQAGDLYRLMSEPEQERLINTIKDALGQVTLPGVKELEIKQFYEADKNYGTRVANALGMNIADIISD

SEQ ID NO: 1367 - protein, 527 aa, Neurospora crassa
MFGGGSSSAASKSVSGSASDSGSSGKDRSSSKSPSPEKEAPGNGGASPKSIKSADQSTAGDTQIGNGSPPSAGSSSDSKKKRSSGVSGRASSLIAQAKNTLFTQVANRNSGDMSTDSKNSNQTSLQKLGKQDQALAVPQGQHNNAAGESLPGPRSTFKVGVWEDRNKKCRRTMEDTHAFLYNFLHTPAPTDNGYFAIFDGHAGTFAADWCGKKLHIILEDIIKKNPNAPIPELLDQTFTTVDTELEALPLKNSGCTAAVASATRQRVLYTANVGDARIVLCRSGKALRLSYDHKGSDENEGKRIANAGGLILNNRVNGVLAVTRALGDTYIKDLVTGHPYTTETVIQPDWDEFMIIACDGLWDVCSDQEAVDLVRDIQEPVIAAKKLVDHALSRFSTDNLSCMIVRFDKQALLENQNNKDSAIGVEGDATTAAGTVTESEKIVTATKQKIAEGSTPAVGISASNFGRGHDPTPLEDGEKKPFVPTTIEGSVEEEPVVLSDSPEATPDGSVTAMKLDSLPEAKKSLDA

SEQ ID NO: 1368 - protein, 295 aa, Glycine max
MVEQSVLALEKQQGSNPVLSEGIHDWVFECHGFLHNAGLIIASFLFLLYLALQAKKSFLKLSHGRSYIIISYYASLWLVSILNLLWCFSQAWECSPGKEFAWNLLSLFTTSGMLFLEVSLLAFLLQGNSTTGLEALTRTFGISGIIVGFDILLKAIYLFAFGIPIFINSGYPTPHVKWNLWVIHKLLLTLVYGFILFMYHSRWRERLPARPAYYKYVTIMFILNAIALFACGITGNGAAFGFWLYHFTVVCYHAAYLPLLYITFLADFFQEEDLHLENVYYSEMKDAGFFEADWN

SEQ ID NO: 1369 - protein, 452 aa, Brucella melitensis 16M
MRDSNFLIENNARHLWHPMAHPAEMQANPPRIVNGGEGVEVIDIHGKKVLDAVGGLWNVNLGYSCEPVKKAIRDQLDSLPYYSTFRGTTNSPLIELSYELAEFFKEDGLTRAFFTSGGSDSVETALRLARQFHKINGQPERTKFVSLKKGYHGTHFGGASVNGNANFRRNYEPLLPGVFHLAAPYPYRNPFNMDDPAAIAAAIARQFEDEIAFQGADTIAAFIMEPVLGAGGVIVPHESFMPLMREICDRHGILLIADEVITAFGRTGAWTGSRGWGVKPDMMTTAKAITNGYFPFGAVMISDKVASVFEANKNSLGAIGHGYTYSGHPVGAAAALATLKETARANTAANAGARGVELMAGLNQLKEKHELVGDVRGKGLMAALELVSDREKKSAAAKTVVQKVYDVAYEEGVMVRTSGANVIISPPLVITPADVNRIVSALDAGLSAAKGQ

SEQ ID NO: 1370 - protein, 557 aa, Chlamydomonas reinhardtii
  unsure (1)..(557): unsure at all Xaa locations
MAHDYKLKAHPAIPAPEGPLLVCILDGFGENEYKDEFNAVHVAKTPTVDALRAVPHRFRSIKAHGKAVGLPSDADMGNSEVGHNALGSGQVVDQGARLVDLALETGRMFSDPGWKLISEAFPSHTVHFIGLLSDGGVHSRADQLHGCLRGAVERGAKRVRVHILTDGRDVPDGSSIRFVEELEAVLAELRGKGCDIAIASGGGRMQVTMDRYEADWSMVKRGWDAHVLGKAPHYFKDAKTAVTTLRGSEDAPVSDQYVAPFVIVDEADKPVGTIEDGDAVVLFNFRADRMVEISKAFEYEDGFTAFERERFPKGLRFVGMMQYDGDLKLPANFLVPPPLIEHVSGEYLCKNGLSTFACSETQKFGHVTFFWNGNRSGYLDAKQEQYLEIPSDKIEFNKAPDMKAREITAAGIEALKSGKYKVVRINYANPDMVGHTGDMAATVRACETVDGCVKELLEVVDSLNGRWIVTSDHGNADDMVQRDKKGKPLLGEDGKPLPLTSHTLAPVPFFIGGKGLPDGVVLRDDLPDAGLANVAAXXFNLLGFEAPGIYKPSMVKA

SEQ ID NO: 1371 - protein, 443 aa, Brucella melitensis 16M
MFLRSMLAFPPRRDNDMSGNQELIARRERLLGRNMSLFYQDPVHLVKGEGVWLWDADGRKYLDCYNNVPHVGHCHPRVVEAICRQASTLNTHTRYLHEGILDYVERLTATFDKSLDAAILTCTGSEANDVALRMAQAVTGKTGIIATDFTYHGNTTAVSQLSTRMPPVGGYGGHVRHVPAPDSYRPLGGKGGEAFAQAWAAEVEKAIASLQESPFGFSGLIIDPFFANEGFPDLPENFLAPAVAAVRKAGGVVIADEVQPGFGRTGGHMWGHQKAGIVPDIVTLGKPMGNGHPVGAVVAGADTLNAFRKAFRYFNTFGGNPVSCAAAMAVLDVLEEEKLQANALEVGAYARQGLEKLAQKHGMIGNVRGSGLFFGAELVLDRAEKTPAAEMATRVVNEMRERGVLMNKLGIHQNATKIRPPMPFSRENADLMLSTLDDVLGGL

SEQ ID NO: 1372 - protein, 392 aa, Rubrobacter xylanophilus DSM 9941
MDKRSVRDLELRGKKVLVRVDFNVPVKGGEVTDDTRIRRALPTIRYLLQRGARVALISHLGRPKGEPDPRYRMDPVARRLEELLGEPVRKLDTATGPEVGRALEELERGVILLENSRFYPGETKNDPAFAAELAGPFDLYVNDAFGAAHRAHATTVGVAERLPAAAGFLLEQELDYLDGVLRSPERPFVAILGGAKVSDKLGVIESLLGVADRLLVGGAMCFTFLKARGLGVGASLVEDDYLGEARRLMEGAADRLVLPVDVVVAERMEEGARTRTVPVEEIPEGWMGLDIGPRTVELFRRHILQARTIFWNGPMGVFEIDAFARGTEGVARAVAESGATSVVGGGDSVAAVRKLGLEDRMSHISTGGGASLEYVEGRELPGVAVLPEREEV

SEQ ID NO: 1373 - protein, 504 aa, Brucella melitensis 16M
MSKLDDNVAKAKTYLARFEKGVLNRIGGEDVAAADGATFETISPVDLKPLATVALGKAADIDRAARAAKAAFPEWAAMSGDARKKLLHKIADAIVARAEEIAFVEFMDTGQSLKFMAKAALRGAENFRFFADRAPEARDGKTLRGPGQVNMTTRVPIGPVGVITPWNTPFMLSTWKIAPALAAGCTVVHKPAEFSPLTARLLVEIAEEAGLPKGVWNLVNGFGEDAGKALTEHPDIKAIGFVGESRTGSLIMKQGADTLKRVHFELGGKNPVVVFADADLERAVDAAVFMIYSLNGERCTSSSRLLVEASIYEKFTALVAEKAKRIKVGHPLDPETVVGPLIHPVHEKKVLEYIEIGRSEGATVAAGGAKFAGPGGGCYVSPTLFTAAHNGMRIAQEEIFGPVLTAIPFKDEAEALALANDVKYGLTGYLWTNDVTRAFRFTDALEAGMIWVNSENVRHLPTPFGGVKNSGIGRDGGDWSFDFYMETKNIAFANAAHAIAKLGG

SEQ ID NO: 1374 - protein, 393 aa, Pseudomonas putida KT2440
MGLTMSDKPRNFATRTIHAGEQFSVADNAIFPAIVTASSFTKRSLDDKPEYSYSRVGNPTRHAYETCVAALEEGVGAVACASGVNATATVLELLPKDAHVVVMNGVYGGTFRIMEDYRSRTSGLTTTYVDLNDIEAVAAAIKPETQLIWIESPTNPLLHLVDIKAVCDLAKAKGILTCIDNTFCSPWNQRPITLGVDLVMHSASKYIGGHSDLTGGVVVAANDALLARLRRISMAIGAVQGPFDCYLALRGLKTLDVRMERQCANALQVARFLEGHAQVEQVYYPGLESHPQHELCKRQMRSGGAVVAMKVKGDRAALNRLVEALQIFVLADSLGGVESMINHSWSMSHCSLSPEQKGVMGISENLLRLSVGIEDYRDLVEDLDGALKALVAV

SEQ ID NO: 1375 - protein, 389 aa, Nostoc sp. PCC 7120
MKAMILAAGKGTRVRPITYTIPKPMIPILQKPVMEFLLELLRQHGFDQIMVNVSHLAEEIENYFRDGQRFGVQIAYSFEGKIDDEGKLVGEAIGSAGGMRRIQDFSPFFDDTFVVLCGDALIDLDLTAAVKWHKSKGSIATIITKTVPEEEVSSYGVVVTDENSRVKAFQEKPSIEEALSTNINTGIYIFEPEVFNYIPSGVEYDIGGQLFPKLVEIGAPFYAIAMDFEWVDIGKVPDYWRAIRGVLQGDIKNVQIPGHEVAPGIYTGLNVAVNWDKVDITGPVYIGGMTRIEDGAKIVGPAMIGPNCWICGEATVDNSVIFEWSRLGHGARLVDKLVFGRYCVDKTGAAIDVQAAALDWLITDARQTPPEHTPVERQAIAELLGTNAT

SEQ ID NO: 1376 - protein, 567 aa, Streptococcus pneumoniae
MALEVIMPKAGVDMTEGQIVQWNKKVGEFVKEGEILLEIMTDKVSMELEAEEDGYLIAILKGDGETVPVTEVIGYLGEERENIPTAGAASPEASSVPVASTSNDDDKSDDAFDIVVIGGGPAGYVAAIKAAQFGGKVALVEKSELGGTCLNRGCIPTKTYLHNAEIIENIGHAANRGIVIENPNFTVDMEKLLETKSKVVNTLVGGVAGLLRSYGVTVHKGIGTITKDKNVLVNGSELLETKKIILAGGSKVSKINVPGMESPLVMTSDDILEMNEVPESLVIIGGGVVGIELGQAFMTFGSKVTVIEMMDRIVPAMDAEVSKNLRLILERKGMTILTGTKLQEIIEENGQLRIKVEGKDDIIASKALLSIGRMPDLEGIGEVEFELDRGCIKVNEYMETSVPGIYAPGDINGTKMLAHAAFRMGEVSAENALKGNHAVAKLNLTPAAIYTLPEVAAVGLTEEQAREKYDVAIGKFNFAANGRAIASDAAQGFVKVIADKKYGEILGVHIIGPAAAELINEASSIIEMEITVEEMLKTIHGHPTYSEVMYEAFADVLGMAIHSPKKK

SEQ ID NO: 1377 - protein, 526 aa, Triticum aestivum
  unsure (1)..(526): unsure at all Xaa locations
MSSMQFSSVLPLEGKACVSPVRREGSGSERLKVGDSSSIRHDRVXRRMCNGGTGPSXTGARCLLTSDASPADTLVRRTSFRRNYGDPNELAAVILGGGTGTQLFPLTSTRAAPAVPIGGWYRLIDMPMSXCFNSGINKIFVMTKGPSLAFNWASLKRHIHRTXLGXGGINFTDGSVEVLAATQMPGEAAGWFRGTADAVRKFIWVLEDYYKNKSIEHILILSGDQLYRMDYMELVQKHVDDNADITLSCAPVGESRASEYGLVKFDSSGRVVQFSEKPKGDDLEAMKVDTSFLNFAIDDPAKYPYIASMGVYVFKRDVLLNLLKSRYAELHDFGSEILPRALHDHNVQAYVFTDYWEDIGTIRSFFDANMALCEQPPKFEFYDPKTPFFTSPRYLPPTKSDKCRIKEAIISHGCFLRECKIEHSIIGVRSRLNSGSELKNAMMMGADSYETEDEISRLMSEGKVPIGVGENTKISNCIIDMNARIGRXNVVISNKEGKTPPGEGYYIRSGIVVIQKNATIKDGTVV

SEQ ID NO: 1378 - protein, 328 aa, Kineococcus radiotolerans SRS30216
MRFHDFGGPEVLRHEDVEPPVPGVGQVRIRVAATSFNGLDVTLRAGDLRDRSPLRLPHTPGLDVAGTVDALGPGVDEISIGDRVVGLLPMTAPGAAAQHVLAPAQVLAGVPRRLPLTDLAALPLVGLTAWQALFDHGGLMAGQRVLINGVGGAVGGYAVQLAVETGAQVLVTARPSSTVRVKAAGSDEGTVHTLDHALDHALDHTLDPALVDVAHAVVEPVDLVLNLAPTGAKQLAAMVPLIRDGGRLVSTTAWIPTPCDEERGVQGVNLSVRSDADQLADLVARVSTGELLVNVAERVALADLPALHARAHAGELPPGKVVVLIPPA

SEQ ID NO: 1379 - protein, 567 aa, Streptococcus pneumoniae
MALEVIMPKAGVDMTEGQIVQWNKKVGEFVKEGEILLEIMTDKVSMELEAEEDGYLIAILKGDGETVPVTEVIGYLGEERENIPTAGAASPEASPVPVASTSNDDGKSDDAFDIVVIGGGPAGYVAAIKAAQFGGKVALVEKSELGGTCLNRGCIPTKTYLHNAEIIENIGHAANRGIVIENPNFTVDMEKLLETKSKVVNTLVGGVAGLLRSYGVTVHKGIGTITKDKNVLVNGSELLETKKIILAGGSKVNKINVPGMESPLVMTSDDILEMNEVPESLVIIGGGVVGIELGQAFMTFGSKVTVIEMMDRIVPAMDVEVSKNLRLILERKGMTILTGTKLQEIIEENGQLRIKVEGKDDIIASKALLSIGRMPDLEGIGEVEFELDRGCIKVTEYMETSVPGIYAPGDINGTKMLAHAAFRMGEVSAENALKGNHAVAKLNLTPAAIYTLPEVAAVGLTEEQAREKYDVAIGKFNFAANGRAIASDAAQGFVKVIADKKYGEILGVHIIGPAAAELINEASSIIEMEITVEEMLKTIHGHPTYSEVMYEAFADVLGMAIHSPKKK

SEQ ID NO: 1380 - protein, 398 aa, Streptococcus pneumoniae
MNDKTEVNMTIGIDKIGFATSQYVLKLQDLAEARGIDPEKLSKGLLLKELSIAPLTEDIVTLAASASDSILTEQERQEVDMVIVATESGIDQSKAAAVFVHGLLGIQPFARSFEIKEACYGATAALHYAKLHVENSPESKVLVIASDIAKYGIETPGEPTQGAGSVAMLITQNPRMMAFNNDNVAQTRDIMDFWRPNYSTTPYVNGVYSTQQYLDSLKTTWLEYQKRYQLTLDDFAAVCFHLPYPKLALKGLKKIMDKNLPQEKKDLLQKHFDQSILYSQKVGNIYTGSLFLGLLSLLENTDSLKAGDKIALYSYGSGAVAEFFSGELVEGYEAYLDKDRLNKLNQRTALSVADYEKVFFEEVNLDETNSAQFAGYENQDFALVEILDHQRRYSKVEK

SEQ ID NO: 1381 - protein, 348 aa, Mycobacterium leprae
MQDEGMRIGILTGGGDCPGLNAVIRAIVRTCDARYGSSVVGFQDGWRGLLENRRMQLCNDDRNDRLLAKGGTMLGTAHVHPDKLRAGLHQIKQTLDDNGIDVLIPIGGEGTLTAAHWLSQEDVPVVGVPKTIDNDIDCTDVTFGHDTALTVATEAIDRLHSTAESHQRVMLVEVMGRHAGWIALSSGLASGAHMTLIPEQPFDVEEVCCLVKRRFQRGDSHFICVVAEGAKPVPGSITLRQGGMDEFGHERFTGVAAQLGAEVEKRINKDVRVTVLGHVQRGGTPTAFDRVLATRFGVNAADASHAGEYGQMVSLRGQDIGRVPLEDAVRQLKLVPESRYDDAAAFFG

SEQ ID NO: 1382 - protein, 432 aa, Oryza sativa
  unsure (1)..(432): unsure at all Xaa locations
MLLLICLCATFCLMTQLGAANVVLMGTNLTLSFDDVEASFAPGVKGSGFEGVVYTAEPLDACSPLTSKAEKGPPSPFALIIRGGCTFDEKVKNAQDAGFKAAIVYDNENSGVLISTSGEVLKKFSGHTDVEVWILPAFENSAWSIMAISFISLLAMSAVLATCFFVRRHHIRRDRPRIPEAREFHGMSSQLVKAMPSLIFTKVQEDNCTSSMCAICLEDYNVGEKLRVLPCRHKFHAACVDLWLTTWRTFCPVCKRDASTGIPDPPASETTPLLSSAVRLPSQSSSFRSSVAASPPRPISRRPSSQSISRXYAASGTPNSPNPIRSFTNSTAMSISRSNVDLSNMSSRPRASHLASAHSLVGSHLSPPINIRYASPHMSHSGYASPSPHVSSXVNLAGASSGQSFRQSYLRHCADSDASLSAMASAQSLPGC

SEQ ID NO: 1383 - protein, 624 aa, Synechococcus elongatus PCC 7942
MSPTAAPQKLSKVEDLKARSQYLLEPILSQLQEESTHFNEDGIQILKFHGSYQQDNRDNRVKGQEKDFQFMLRLRSPGGYIPPQLYLTLDQLADDYGNGTLRATTRQAFQLHGILKRDLKTVIRRIVENLGSTISACGDVNRNVMAPPAPFRDRPEYEWARTYANNIADLLTPESGAYYELWLDGEKVLSGEPDPAVLAARRNPKGRVADSVEPLYSDRYLPRKFKIAVTVPGDNSIDLFTQDIGLVVIGNDRGELEGFNVYVGGGMGRTHNKEETFARLADPLGFVPAADIYAAVQAIVATQRDYGDRSNRRHARMKYLIHDWGIAKFKEAVESVFGKAIAPVRELPPFRYRDYLGWHEQGDGKWFLGLPITSGRIKDDGNWQLRSALREIVSRWQLPLLLTGSQDVLIYDVQPGDRAAIDKLLRDRGVHTVEAIDSLQRYAMACPALPTCGLAITESERALPGLLVRIRRLLEEQGLPDEHFVVRMTGCPNGCARPYMAELAFVGSAPNTYQLWLGGSPDQTRLARPFIDRLADGDVETQLRPLFVFFKQSRQAGESFGDFCDRVGFDALRQFSESYQHEAAKPRYRVGLRADVHGRLKAEADKRGVSLTDLACEAIAAYLR

SEQ ID NO: 1384 - protein, 429 aa, Nostoc punctiforme
MKKVLSIILGGGAGTRLYPLTKLRAKPAVPVAGKYRLIDIPVSNCINSEIFKIYVLTQFNSASLNRHIARTYNFTGFNEGFVEVLAAQQTPENPNWFQGTADAVRQYLWLMEEWDVEEYLILSGDHLYRMDYRQFIQRHRDTGADITLSVIPIDERRASDFGLMKIDDSGRIIDFSEKPKGEALTQMQVDTSVLGLTKEQAQKQPYIASMGIYVFKKEVLFKLLRESVERTDFGKEIIPDASKDYNVQAYLFDDYWEDIGTIEAFYHANLALTQQPQPPFSFYDEHAPIYTRARYLPPTKLLDCQITESIIGEGCILKNCRIQHSVLGVRSRIESGCVIEESLLMGADFYQASVERQCSLIENDIPVGIGTDTIIRGAIIDKNARIGHDVKIVNKDNVQEAERENQGFYIRSGIVVVLKNAVIPDGTII

SEQ ID NO: 1385 - protein, 260 aa, Glycine max
  unsure (1)..(260): unsure at all Xaa locations
ENFDKFDRVRYPKIRYAGMLEYDGELKLPSHYLVSPPEIDRTSGEYLVYNGIRTFACSETVKFGHVTFFWNGNRSGYFNAELEEYVEIPSDSGITFNEQPLMKALQIAEKARDAILSGKFDQVRVNLPNGDMVGHTGDIEATVVACKAADAAVKMILDAIEQVGGIYVVTPDHGNAEDMVNMGLSGKPTSGNGWRLHILCLPSLGPWAIAIGGPGLXPGVRFRNNVPPGGLATVTATVMNLHGFEAPSDYESTLIEVVDN

SEQ ID NO: 1386 - protein, 400 aa, Bacillus cereus ATCC 14579
MMTYTLATRMKAFQSSIFSELGAYKKEKIAAGHNMIDLSIGNPDMPPADFVRETMVHTASEKESYGYTLSGIQEFHEAVTEYYNNTHNVLLNADKEVLLLMGSQDGLVHLPMVYANPGDIILVPDPGYTAYETGIQMAGAISYYMPLKKENDFLPDLEVIPEEIADLAKMMILNFPGNPVPAMAHEDFFKEVIAFAKKHNIIVVHDFAYAEFYFDGNKPISFLSVPGAKEVGVEINSLSKSYSLAGSRIGYMIGNEEIVRALTQFKSNTDYGVFLPIQKAACAALRNGATFCEKNREIYQERRDTLIDGFRTFGWNVDKPAGSMFVWAEIPQGWTSLDFAYALMDRANVVVTPGHAFGPHGEGFVRIALVQDKEVLQQVVENIRNSGIFVLEKVNELVKN

SEQ ID NO: 1387 - protein, 430 aa, Acinetobacter sp. ADP1
MSSIVAIKGFNDVLPTQTAAWRRLEQHLASLMDAYGYQQIRLPIVEQTGLFKRAIGDATDIVEKEMYTFFDKGTPPESLTLRPEGTAGCVRAMLEHNLLRGATPRVWYVGPMFRYEKPQKGRYRQFHQFGVETFGVATPDIDAELILMTARLWKRMGVSEKVQLELNTLGEIDERAAYRTALVEFLTQHKEALDEDSQRRLGTNPLRILDSKVESTQKILENAPKLHDFLQEDSLAHFNQLQEYLTHAGVSFVINQKLVRGLDYYNKTVFEWTTTALGSQGTVCAGGRYDGLVGQLKGKADQSVPAVGFAMGMERLLLLLEQVEQAEVVRDCDVFLVAESAFQGHALVLAEQIRDQFEGLASTIRVKTGSQGSMKSQMKKADQSGAHYAVILGEREWTTQELTVKELATSEQSQVAISELVPFLVKKFEK

SEQ ID NO: 1388 - protein, 662 aa, Clostridium perfringens str. 13
MEVLSHGCTLDCFDCCKFNVYKEGSEILKIEGDKEHPFTKGLICKKGVAHLNRLNHKDRIYTPLLKNNGVWEEISFEDALEIMKEKLEYTKEKYSSKSILYYSQYGSGGVLKGIEDIFFNFYGGVSKATGGPCWSAGMRAQKYDFGDSVSNSLEDMINSKNIFLWGKNPANTTIHTMAILNKAKKNGSRIIVIDPINTQSAKLGDIHVKIKPGTDGALAMAMAKIIISKGLQDKDFINKYVLGFQEYKDHLENFDLDYLSDECGIEIEDIEKLTKYYCEKNSSIYLGYGMQKYKNGGNTIRAIDALGALTGQIGVKGGGVNYANKVLSRILDSDPFKSGEVGENREFYVSNINEFIEEPKKYSLSVEDSNAPIKIMVIANSNLMNQLPNLNRLNNSIDKVEFKVCFDMFMTDTASKCDLFIPCTNTLESEDMVFSSMTNPYLIYNEKIIEPREKLMDEYYFFRELAKRMNLKGYPSLSKKDYLSKVIEPLMSYNKDITLDYLKNNPFTVYDDVAWENKKFKTPSGKFELASKRALKECGSLTPTYLSPRIKENCFRLLTNHSKDSLSSQHYIDVDEKAKVYLNENMIRKFSLICGEKVKLKSRTGEITAICSLDNGVQDYVALMYVGWWKKHGNPNFLTESGISDMGGQITYNETFIEIENI

SEQ ID NO: 1389 - protein, 437 aa, Corynebacterium glutamicum
MTTDKRKTSKTTDTANKAVGADQAARPTRRTTRRIFDQSEKMKDVLYEIRGPVAAEAERMELDGHNILKLNTGNPAVFGFDAPDVIMRDMIANLPTSQGYSTSKGIIPARRAVVTRYEVVPGFPHFDVDDVFLGNGVSELITMTTQALLNDGDEVLIPAPDYPLWTAATSLAGGKPVHYLCDEEDDWNPSIEDIKSKISEKTKAIVVINPNNPTGAVYPRRVLEQIVEIAREHDLLILADEIYDRILYDDAEHISLATLAPDLLCITYNGLSKAYRVAGYRAGWMVLTGPKQYARGFIEGLELLAGTRLCPNVPAQHAIQVALGGRQSIYDLTGEHGRLLEQRNMAWTKLNEIPGVSCVKPMGALYAFPKLDPNVYEIHDDTQLMLDLLRAEKILMVQGTGFNWPHHDHFRVVTLPWASQLENAIERLGNFLSTYKQ

SEQ ID NO: 1390 - protein, 319 aa, Oryza sativa (japonica cultivar-group)
MAASSHYALLHHHLPNPLHPRHLSSSSSPSPPPPLHLHLHLHRHRLALSTARFFRLAERRASAGPLVFETEEERSGWSGAEAAESNYDDEEDEEEEQGWAGGNAAGWRGESHEDDQEEGSGSGEGRRPRRSRPRELFVCNLPRRCDVDDLYELFKPYGTVLSVEISRDPETGLSRGCGFVTMRSLPEARTAMNALDGFDLDGREMLVKLSSDVVSKRRNINMTHTPPVKDHIFESPHKIYVGNIAWSVEPQELREYFSQCGTVVSTRLLTDRKGGRGRVYGFLSFASAEELEAALKLDNTHFHGRNILVRQAHEERQAH

SEQ ID NO: 1391 - protein, 702 aa, Xanthomonas campestris pv. phaseoli
MAKSPSKSAQVPALAPVSATVDGARGTGDELHQKAGGTHPQLTTNQGIPVGDNQNSLRATPRGPTLLEDFILREKITHFDHERIPERIVHARGSAAHGYFELTKSLSQYTTAKIFTEVGEKTPLFTRFSTVAGGAGSVDTPRDVRGFAVKFYTKEGNWDLVGNNIPVFFIQDAMKFPDLIHAVKMEPDRGFPQAASAHDTFWDFISLTPESMHMVMWAMSDRTIPRSLRMIEGFGIHSFRFLNDKGESTFVKFHWRPKLGLQSTIWDEAVKIAGADQDFHRRDLFEAIQNGDFPEWELGVQLFTEAQAATFPFDHLDSTKVIPEELVPLQIVGRMVLDRWPDNFFAETEQVAYCPANIVPGIDFSNDPLLQGRLFSYLDTQLSRLGGPNFHQIPVNAPKCPFANNQRDGHMQMGVPKGRVAYEPSSLQADAPREALRGFPSHATPAEEGAKGRVRAESFADHYSQARLFFRSQTAPEQAHIASALVFELSKVETAHVREAIVGHLRHIDQELAQRVADGMGMTALPPAPPAAVAPIDMPLSPALQVIGKMKDTLKGRTVGILIHDGSDAAAIKAVRKAAEAAGATVKIVAPKLGGAKLSDGKQLAADGQLAGTPSVVFDAVAVLLSSEAAKLLTRESAALNFVSFAWAHLKAIAFDEGAQVLLKAGNVGKDAGVVPAADTKAFITAAKTRQWAREPKVRMLA

SEQ ID NO: 1392 - protein, 387 aa, Corynebacterium glutamicum
MSNDFVVSRLRPFGETIFATMTQRAVEAGAINLGQGFPDEDGPRRMLEIASEQILGGNNQYSAGRGDASLRAAVARDHLERFDLEYNPDSEVLITVGATEAITATVLGLVEPGDEVIVLEPYYDAYAAAIALAGATRVAVPLQEVENSWDVDVDKLHAAVTKKTRMIIVNSPHNPTGSVFSKKALKQLAGVARAYDLLVLSDEVYEHLVFDDQKHVSVAKLPGMWDRTVTVSSAAKTFNVTGWKTGWALAPEPLLEAVLKAKQFMSYVGATPFQPAVAHAIEHEQKWVSKMSKGLELKRDILRTALDKAGLKTHDSMGTYFIVADIGDRDGAEFCFELIEKVGVAAIPVQAFVDHPKKWSSKVRFAFCKKEETLREAAERLKGIKKL

SEQ ID NO: 1393 - protein, 828 aa, Escherichia coli K12
MKLSRRSFMKANAVAAAAAAAGLSVPGVARAVVGQQEAIKWDKAPCRFCGTGCGVLVGTQQGRVVACQGDPDAPVNRGLNCIKGYFLPKIMYGKDRLTQPLLRMKNGKYDKEGEFTPITWDQAFDVMEEKFKTALKEKGPESIGMFGSGQWTIWEGYAASKLFKAGFRSNNIDPNARHCMASAVVGFMRTFGMDEPMGCYDDIEQADAFVLWGANMAEMHPILWSRITNRRLSNQNVTVAVLSTYQHRSFELADNGIIFTPQSDLVILNYIANYIIQNNAINQDFFSKHVNLRKGATDIGYGLRPTHPLEKAAKNPGSDASEPMSFEDYKAFVAEYTLEKTAEMTGVPKDQLEQLAQLYADPNKKVISYWTMGFNQHTRGVWANNLVYNLHLLTGKISQPGCGPFSLTGQPSACGTAREVGTFAHRLPADMVVTNEKHRDICEKKWNIPSGTIPAKIGLHAVAQDRALKDGKLNVYWTMCTNNMQAGPNINEERMPGWRDPRNFIIVSDPYPTVSALAADLILPTAMWVEKEGAYGNAERRTQFWRQQVQAPGEAKSDLWQLVQFSRRFKTEEVWPEDLLAKKPELRGKTLYEVLYATPEVSKFPVSELAEDQLNDESRELGFYLQKGLFEEYAWFGRGHGHDLAPFDDYHKARGLRWPVVNGKETQWRYSEGNDPYVKAGEGYKFYGKPDGKAVIFALPFEPAAEAPDEEYDLWLSTGRVLEHWHTGSMTRRVPELHRAFPEAVLFIHPLDAKARDLRRGDKVKVVSRRGEVISIVETRGRNRPPQGLVYMPFFDAAQLVNKLTLDATDPLSKETDFKKCAVKLEKV

SEQ ID NO: 1394 - protein, 454 aa, Leuconostoc mesenteroides subsp. mesenteroides ATCC 8293
MVANEFKEEFRMAEQYDVVVIGGGPAGNAMASGLKAQGKTVLIVEADLWGGTCPNRGCDPKKILLSAVEARQAAQHLQGQGLIGAPKIDWPALMALKRGYTDGINDGTLNGLKGQDIATLHGQAHFQSDNQLAVGDRVVSATDYVIATGQRPAILPITGHEYFKTSTDFLDLDQMPKRVTFVGGGYVGFELATIANAAGADVHVIHHNDRPLKAFDADLVKDLMAAMTADGITFDLNTDVQAITKTATGLQLTADNFELTTDLVISSAGRIPNADQLGLANVGVTFDRHGIQVNDHLQTANPHIYAIGDVSDTPVPKLTPVAGFEARYLVGELTHPGAAIKYPVVPTQVFAAPKLAQVGISAAAATEHPDEYRVNTLDMTKWFTYYRFGAQQAQAKVVVAKASGQVVGATLLSDVADEMINYFTLLIEKHVTLPDLQRLVLAYPTPASDLQYLY

SEQ ID NO: 1395 - protein, 481 aa, Arabidopsis thaliana
MRKLTAVNSLLKRNNYLLPRHGSSQTAAQRTSSVRETETETKLPKMPPFNYSPPPYDGPSTAEIIAKRREFLSPALFHFYNTPLNIVEAKMQYVFDENGRRYLDAFGGIATVSCGHCHPEVVNSVVKQLKLINHSTILYLNHTISDFAEALVSTLPGDLKVVFFTNSGTEANELAMMMARLYTGCNDIVSLRNSYHGNAAATMGATAQSNWKFNVVQSGVHHAINPDPYRGIFGSDGEKYASDVHDLIQFGTSGQVAGFIGESIQGVGGIVELAPGYLPAAYDIVRKAGGVCIADEVQSGFARTGTHFWGFQSHGVIPDIVTMAKGIGNGIPLGAVVTTPEIAGVLSRRSYFNTFGGNPMCTAAGHAVLRVLHEEKLQENANLVGSHLKRRLTLLKNKYELIGDVRGRGLMLGVEFVKDRDLKTPAKAETLHLMDQMKEMGVLVGKGGFYGNVFRITPPLCFTLSDADFLVDVMDHAMSKM

SEQ ID NO: 1396 - protein, 469 aa, Zea mays
  unsure (1)..(469): unsure at all Xaa locations
MESRRGGSSAAAAEDAGGAMPSFGPTQHAIRADVNSMQPSRVTDFGALAQSAGFRIEDLANLNANALFNLKPNSHTIDNSPLQFGNYGKSISSHINTTEATTAATRIDPQLSAQQTGAQPILVALPTGNMENWGESAMADSPMTDTSTDPDTDERNQMFEQGLVAVPTASDSSDKSRDKLDQKTLRRLAQNREAARKSRLRKKAYIQNLESSRLKLTQLEQELQRARQQGIFISTSGDQPQXSTSGNGALAFDMEYARWLEEHNKHVNELRLAVNAHAGDNDLRGIVGSVMAHYDEFFRLKGVAAKADVFHVLSGMWKTPAERCFMWLGGFRSSEVLKLLAGHLEPLTDQQLVGISNLQQSSQQAEDALSQGMEALQQSLAETLASGSLGPAGPSGNVANYMGQMAMAMGKLGTLENFLRQADNLRLQTLQQMQRILTTRQSARALLAISDYFSRLRALSSLWLARPRE

SEQ ID NO: 1397 - protein, 162 aa, Glycine max
  unsure (1)..(162): unsure at all Xaa locations
ASSMISSPAITTINHTNTNIITPFTNLKSITNFPTKKTNNNITSITSNNKRIQYIPIXPPINKKKFKTLSYLPDLDNTQLAEKIXYLLRKEXNSLLXFHLNHNFIYHNHNRSPKYYNERYXTIYKLPIFGYTNTSQVLKXLEQAKTTYPNNCIHIMIFNNTQ

SEQ ID NO: 1398 - protein, 349 aa, Streptococcus pyogenes M1 GAS
MKAATYLSTGNLQLIDKPKPVIIKPTDAIVQLVKTTICGTDLHILGGDVPACKEGTILGHEGIGIVKEVGDAVTNFKIGDKVIISCVTSCHTCYYCKRGLSSHCQDGGWILGHLINGTQAEYVHIPHADGSLYHAPDTIDDEALVMLSDILPTSYEIGVLPSHVKPGDNVCIVGAGPVGLAALLTVQFFSPANIIMVDLSQNRLEAAKTFGATHTICSGSSEEVKAIIDDITNGRGVDISMECVGYPATFDICQKIISVGGHIANVGVHGKPVDFNLDELWIKNITLNTGLVNANTTEMLLNVLKTGKIDATRLITHHFKLSEVEKAYETFKHAGANNALKVIIDNDIS

SEQ ID NO: 1399 - protein, 494 aa, Sphingomonas sp.
MTSVSSSPITDTILNFIDGSYREGSEGKSFSNVNPATGAEIGVVHEASQADVADAVAAAKAALTGPWGKMTTAERVKLITAVATEIERRADDFLAAEVADTGKPRHVASHIDIPRGAANFRMFADVVSTMPGESFNTPTPDGGQAFNYTVRKPKGVVAVVCPWNFPLLLMTWKVGPALACGNTVVVKPSEETPRTAALLGEVMNAVGMPKGVYNVVHGFGPGSAGEFLTSNPDVDAITFTGETGTGQAIMQKAATGVRDISFELGGKNPAIVFADADLDKAVEGLSRSVFLNTGQVCLGTERVYVERPIFDAFVARMAAAAQDFKPGVTGDRAYLGPLISAEHREKVLGYYRRAVEDGATVVTGGGVPEISGAEAGGFFVEPTLWIDVAHGDTVMREEIFGPCCGILPFDSEDEVIALANDTVYGLCASVWTENLSRGHRVAAAMEVGVCWVNSWFLRDLRTAFGGSGHSGIGREGGVHSLEFYTEITNICVKL

SEQ ID NO: 1400 - protein, 274 aa, Zea mays
MFPRYSPHSCSARRFLYRPAPRLSRTVLHARTRPPPRPRARACHGRPPRPAASLLATTTMGFPVGYSESEMLLPRVLLQELLLLGHFHRFLLWAFHAVGLGDLIDSGCNYPPPSASTAQEMMEHQGRDDVASPLQHQRTEFRPVAAALIEEALPVVRFDELGGAACGSGDCAVCLGGIGGGDEVRRLGNCRHAFHRACLDRWMAHGQRTCPLCRAPLVPGAAAAGDPWAEAPWLDAADYDVLPYPSTPLLMVPTPTLLRPHELLLVAGLGGGFQ

SEQ ID NO: 1401 - protein, 313 aa, Mycobacterium avium subsp. paratuberculosis str. k10
MSGGLTPDQAIDAIRGTGGAQPGCRALHAKGTLYRGTFTATRDAVMLSAAPHLDGSTVPALIRFSNGSGNPKQRDGAPGVRGMAVKFTLPDGSTTDVSAQTARLLVSSTPEGFIDLLKAMRPGLTTPLRLATHLLTHPRLLGALPLLREANRIPASYATTEYHGLHAFRWIAADGSARFVRYHLVPTAAEEYLSASDARGKDPDFLTDELAARLQDGPVRFDFRVQIAGPTDSTVDPSSAWQSTQIVTVGTVTITGPDTEREHGGDIVVFDPMRVTDGIEPSDDPVLRFRTLVYSASVKLRTGVDRGAQAPPV

SEQ ID NO: 1402 - protein, 389 aa, Burkholderia fungorum LB400
MRALRWHGKHDIRCDTVPDPIIEEGRDAIIKVSTCAICGSDLHLFDGFMPTMESGDIMGHEFMGEVVEVGKDNKALSVGDRVVIPFTIFCGECDQCKRGNFSVCERSNRNKEKADKVFGHATAGLFGYSHLTGGYAGGQAEYVRVPMADTTHVKIPDGLTDEQVLFLGDIFPTGWQAAVNCDIQPEDTVAIWGAGPVGQMAIRSAVLLGARQVVVIDRVPERLVMARAGGAITINFDEESVLDRLKELTNGKGPEKCIDAVGMESHATRSFDAMYDRVKQAVMLETDRPHVLREMIYVCRPAGILSVPGVYGGLIDKIPFGASMNKGLTWKMGQTHVNRWTDDLLHRIQEGQIDPSFVITHTVSLEQGPDMYKTFRDKEDGCIKVVMKP

SEQ ID NO: 1403 - protein, 380 aa, Triticum aestivum
  unsure (1)..(380): unsure at all Xaa locations
LPKPSQLLPSSSSSRPTASLHESPQPPARLPPLPSRGLGSRRGLGDGALRAAEEAALTEQELTAQETALYDRQIRVWGVDAQKRLSKAHVLVCGVNGTTIEFCKNIVLAGVGSVXLMDDHMVTEDDLNLNFLIPHDESVYGGKSRAEVWCXSLKDFYLMVRVAVAKGKPSLIEGTLVLSLDTILFRSTITEASILPIKPNTIKINMVDFENSXASVPIFWSRYGCIKRSIVTRSIEEKPNSXELKYPSRQDAISLPWKAMSIXTTKLYYAMRVLESYESSEGRDPGETSLSDLPAVLARRKDMCDRMSVDESKIPTSLLERLLAAGKKEHPPVCAILGGILGQEVIKSISCKGDPIKNFFYFDDADGKGAMEDIPPTPED

SEQ ID NO: 1404 - protein, 448 aa, Treponema denticola ATCC 35405
MKNLTQGDELKQITLFSLPMLLGNIFQQLYNVVDSIVVGKSIGDHALAAVGISFPVWFIFISLVIGFTMACNILIAQFVGAKKEEEISKVIQTSILILFWAGLIATAIGFVFAPYILKIMNTPSDVFEEALIYLRLIFTGIIFLFIYNAFTAMLRGFGDSMTPLYALIISTIINIGLDCLFVIVFKWGIAGAAIATIIAQFISCFWLIFYCRIKYKDFRVNFFKLKFDKTICIQSVKMGFPSGIQQALVGGGFMALLSIVNTFGTQTAAAYSAAGKLDGFIVMPALNIGVALSSFTGQNIGAGRLDRVKKGLRASLFLGLGITITATTAIVIFGKAVMFLFVNNPEVIELGARYLIIVAPAYFFNTITFTLNGVIRGAGETVFPMISTLLAMWVFRVPAAAVLSRYLGSDGIWLAVSVGSAAGFLLTLFYYCSGKWKKKTAEILNLKK

SEQ ID NO: 1405 - protein, 401 aa, Clostridium tetani E88
MVYVAFNKKTIEDIDVKGRKVLVRCDFNVPLKDGKITDENRLMGALPTIKYIMEKGGKVILCSHLGKPKGEPKQELSLAPVAKRLSELLNKEVLFPADNEVVGENAKKAVENMKDGDVILLQNTRYRKEETKNEETFSKELASLADIFVNDAFGTAHRAHCSTVGVTEFVATSVCGYLIQKELKFLGNAVENPQRPFISILGGAKVSDKINVINNLLEKVDTLIIGGGMSYTFQKAQGYTIGSSLLEEDKIDYAKEMIEKAKEKGVKLLLPVDNVAAEKFAEDAEAIITEDQNIKEGYMGLDIGPKTSKLYSQEVQSAKTVVWNGPMGVFEFEKFAKGTIEVAKAMAESQATTIIGGGDSAAAVNQLGFGDKMTHISTGGGASLEFLEGKELPGIAALNDK

SEQ ID NO: 1406 - protein, 513 aa, Clostridium tetani E88
MNKKPVMLMILDGFGITNHEDGNAVKMANKPNFDKLLREYPHTQLKASGLNVGLPEGQMGNSEVGHLNIGSGRVIYQELTRITKDINDGVFFENTEINYAIDEAIKNNSSLHLLGLLSDGGVHSHIDHLKAILKLAKDKGLNRVYVHAFLDGRDVPPSSAKEYIINIENYMKELSVGQIATLAGRYYAMDRDKRWERVELAYNALVYGTGELSNSAVEAIEKSYKDNTTDEFVLPTVILKDGKPTGTIKDEDSIIFFNFRPDRARQITRALNDKDFDGFERKRLKLNFITMTQYDKTIENVRIAYKPQSYKNTLGEYVSSLGLNQLRIAETEKYAHVTFFFNGGVETPNKGEDRALIPSPKVATYDLKPEMSAFEVKDEVINRIESNKYDMIILNFANPDMVGHTGVFDAAKTAIEVVDKCVGEISDKILEKEGTVFITADHGNSEQMIDYSTGKPMTAHTTNEVPFVYVSKDAKDKRLKSEGILADIAPTMLTEMGVKIPEEMTGRNLIEGK

SEQ ID NO: 1407 - protein, 263 aa, Oryza sativa
  unsure (1)..(263): unsure at all Xaa locations
MEAKLSAASRRVAPSPIQQLSHLAQRAGAVNLAEGFPDFPAPAHVKAAAAAAIAADLNQYRHVQGICDALAETMKRDHGLRVDPLTDFAVCCGQSEAFAAAIFAIIDQGDEVLLFDPAFETYQTCIELARGVPVYVPLDPPSWTLNEDKFLKSFTNRTKAVVLNSPHNPTGKVFSREELLIIAQACQKMDCFAITDEVYEYITYDENELVPNSXTRLPGMQERTIITXSSLSKTYSVTGWRIGWACAPANICLINKKHPCHAN

SEQ ID NO: 1408 - protein, 431 aa, Clostridium tetani E88
MKNYIEIIDVSARQVLDSRSNPTVEVDVILEDGTTGRAAVPSGASTGIFEAVELRDGDKSVYNGKGVLKAIENVNTIIAEELVGMNVLDQIAIDKTMIELDGTDNKGKLGANAMLGVSLACAKAAAEYLGLSLYQYIGGVNAKVLPVPMMNIINGGEHADNNVDLQEFMIMPAGASSFSEALRMCSEVYHSLKSLLKAKGYDTGVGDEGGFAPNLNSNEEAIQVIVEAIEKAGYKPGVEIFIALDPASSEIFEDGKYNLKGEGKVLTPQEMVDYYANLVAKYPIISIEDGMAEEDWEGWRLITERLGTKIQLVGDDLFVTNTDRLTMGIERGVANSILIKLNQIGTLTETLNAIEMAERAGYTAVVSHRSGETEDTTIADLVVAVNAGQIKTGAPARSERVAKYNQLLRIEDELGEMGEYRGLKAFYNIKK

SEQ ID NO: 1409 - protein, 660 aa, Zea mays
MVLLFWLTTASLSPKLSRPRQLGADIVMHSAFKFIAGHSDLMAGILAVKGESLAKEVGFLQNAEGSGLAPFDCWLCLRGIKTMALRVEKQQANAQRIAEFLASHPRVKQVNYAGLPDHPGRALHYSQAKGAGSVLSFLTGSLALSKHVVETTKYFSVTVSFGSVKSLISLPCLLLTGFHPQPSHFPPSSQMAVAVPNAPGRLFLLQSTPFPNPSSSASAARAQSFRVPPLRLSLFRRMAGRSLTVIAGASGGSERDLSASAVSVEALDSVASDSDLETKEPSVSTMLTSFENSFDKYGALSTPLYQTATFKQPSATDYGTYDYTRSGNPTRDVLQSLMAKLEKADQAFCFTSGMAALAAVTHLLQAGQEIVAGEDIYGGSDRLLSQVVPRNGIVVKRVDTTKISDVVSAIGPSTRLVWLESPTNPRQQITDIKTISEIAHSHGALVLVDNSIMSPVLSRPIELGADIVMHSATKFIAGHSDLMAGILAVKGESLAKEVGFLQNAEGSGLAPFDCWLCLRGIKTMALRVEKQQANAQKIAEFLASHPRVKQVNYAGLPDHPGRALHYSQAKGAGSVLSFLTGSLALSKHVVETTKYFSVTVSFGSVKSLISLPCFMSHASIPASVREERGLTDDLVRISVGIEDVEDLIADLDRALRTGPV

SEQ ID NO: 1410 - protein, 448 aa, Corynebacterium glutamicum
MEDLSYRIPQSRTVAEQVPGPKSKALDERRQAAVARALAPGLPGYVVDADGGILADADGNRFIDLASGIAVTTVGGSNAAVAKAVGAAAARFTHTCFMVSPYETYVAMAERLNALTPGDHDKKSALFNSGAEAVENAVKVARAYTGKGAVVVFDNAYHGRTNLTMAMTAKNRPYKSGFGPLAADVYRAPMSYPLRDGLSGPEAAERAISVIESQVGAENLACVVIEPIQGEGGFIVPAPGFLAAISTWCRENDVVFIADEIQSGFLRTGDWFASDAEGVIPDVITTAKGIAGGMPLSAVTGRAEIMDAPGPGALGGTYGGNPVACAAALAAIEVMEQADLKTRAQEIETIIRDEFAQLSAFPEVAEIRGRGAMMAIELIDATGRPNAALTAAVAARAKAEGVLLLTCGTDGNVIRLLPPLVIAEDTLRDGLQVLVAALERETAHQKVG

SEQ ID NO: 1411 - protein, 187 aa, Leuconostoc mesenteroides subsp. mesenteroides ATCC 8293
MKPLITHPAIKGVLATETDIQAQVQRVANELTTKFEGNKERPIFIAVLKGGVIFATDLLRKMPLDVDFDFVDVKSYSGAASTGQVKVVHDVSMDLTGRDVVIVDEIIDSGRTMQWLHNYFELKGASSVTTVALADKKEARVVDFEVDYFGLEVPDEFLVGYGMDYNNFFRNLPVIAIVDFDKVDLIK

SEQ ID NO: 1412 - protein, 450 aa, Leuconostoc mesenteroides subsp. mesenteroides ATCC 8293
MAHITFDTKNIENFVADHELDEMQPLIKMADEQLRNRSGAGAEYSDWITLPTDYDKDEFARIQTAAQKIQSDSKVLVVIGIGGSYLGAKMAVDFLNPMFNNELADNQRQGVKIYFAGNSTSASYINDLVRVIGDQDFSVNVISKSGTTTEPSIAFRVFKQLLEKKYGAEAAKQRIYATTDANRGALHDEAKISGYETFTIPDGVGGRFSVLTAVGLLPIAASGADIEALMTGARDAQEEYSDSDIKNNEAYKYAAVRRILYDKGYTTELLINWEPTMQYLSEWWKQLMGESEGKNQKGIYPSSANFSTDLHSLGQYIQEGRRDLFETVVKLDNPVSNIDLPHEDGNNDGLQYLEGVTIDEVNTKASQGVTLAHVDGGVPNLAVHLPAQDAYSLGYLIYFFEIAVGASGYTFGINPFNQPGVEAYKTAMFALLGKPGYEEQTKVYRARLGK

SEQ ID NO: 1413 - protein, 226 aa, Triticum aestivum
  unsure (1)..(226): unsure at all Xaa locations
MLSTLRVASRRAARPAQYNLAAIRAASNWANVPQGPPDAILGITEAFKADKFDKKINLGVGAYRDDAGKPYVLPSVREAEMKVVESKLNKEYAGITGVPEFPPAAAKLAYGANSPALDRITITQTISGTGALRVGAAFLAKFFPGEKKIYIPQPSWANHKAVFNHXGLEVEQYRYYDKKTIGXLDFEGLIADVKSAPNGSVFLFHACAHNPTGVDPTQXQWKQISD

SEQ ID NO: 1414 - protein, 607 aa, Streptomyces avermitilis MA-4680
MPVSVTLPALGESVTEGTVTRWLKAEGERVEADEPLLEVSTDKVDTEIPSPAAGVLASIKVAEDETVEVGAELAVIDDGTGAPAAAPAPAAEQAAEQVAPPAPEPAPQATPSTEQAAPAPAPTAEAAAGAGSAEGTDVVLPALGESVTEGTVTRWLKEVGEEVSEDEPLLEVSTDKVDTEIPAPASGTLLLEIVVGEDETAEVGAKLAVIGAPGAAPAAAPAQAAPAPAAAPAAPAPAPAAPAPAAPAPAPAAPAPAQAAPAAPAAPAQAAPAPAAPQAPAAPAPAPVTPAAAPAATSGDDGAYVTPLVRKLAAENGVDLATVKGTGVGGRIRKQDVTAAAEAAKAAAPAPAAAPAAAKKAPALEVSPLRGQTVKMPRIRKVIGDNMVKALHEQAQLSSVVEVDITRLMKLRAQAKDSFAAREGVKLSPMPFFVKAAAQALKAHPAVNARINVDEGTITYFDTENIGIAVDSEKGLMTPVIKHAGDLNIAGIAKATADLAGKVRANKITPDELSGATFTISNTGSRGALFDTIIVPPNQVAILGIGATVKRPAVIETEEGTVIGVRDMTYLTLSYDHRLVDGADAARYLTAVKAILEAGEFEVELGL

SEQ ID NO: 1415 - protein, 414 aa, Aquifex aeolicus VF5
MIEDPMDWAFPRIKRLPQYVFSLVNELKYKLRREGEDVVDLGMGNPNMPPAKHIIDKLCEVAQKPNVHGYSASRGIPRLRKAICNFYEERYGVKLDPEREAILTIGAKEGYSHLMLAMISPGDTVIVPNPTYPIHYYAPIIAGGEVHSIPLNFSDDQDHQEEFLRRLYEIVKTAMPKPKAVVISFPHNPTTITVEKDFFKEIVKFAKEHGLWIIHDFAYADIAFDGYKPPSILEIEGAKDVAVELYSMSKGFSMAGWRVAFVVGNEILIKNLAHLKSYLDYGIFTPIQVASIIALESPYEIVEKTAKVYQKRRDVLVEGLNRLGWKVKKPKATMFVWAKIPEWINMNSLDFSLFLLKEAKVAVSPGVGFGQYGEGYVRFALVENEHRIRQAIRGIRKAFRKLQKERKLEPERSA

SEQ ID NO: 1416 - protein, 255 aa, Pseudomonas putida KT2440
MSKTHLFDLDGKIAFVSGASRGIGEAIAHLLAQQGAHVIVSSRKLDGCQQVADAIIAAGGKATAVACHIGELEQIQQVFAGIREQFGRLDVLVNNAATNPQFCNVLDTDPGAFQKTVDVNIRGYFFMSVEAGKLMRENGGGSIINVASINGVSPGLFQGIYSVTKAAVINMTKVFAKECAPFGIRCNALLPGLTDTKFASALVKNEAILNAALQQIPLKRVADPKEMAGAVLYLASDASSYTTGTTLNVDGGFLS

SEQ ID NO: 1417 - protein, 500 aa, Streptomyces avermitilis MA-4680
MGSRQDRAPTTGPKKSGRTPAADRSLTTGVAHMHGGRDVANDASTVFDLVILGGGSGGYAAALRGAQLGLDVALIEKDKVGGTCLHRGCIPTKALLHAGEIADQARESEQFGVKATFEGIDVPAVHKYKDGVISGLYKGLQGLIASRKVTYIEGEGRLSSPTSVDVNGQRVQGRHVLLATGSVPKSLPGLAIDGNRIISSDHALVLDRVPESAIVLGGGVIGVEFASAWKSFGADVTVIEGLKHLVPVEDENSSKLLERAFRKRGIKFNLGTFFSKAEYTQNGVKVTLADGKEFEAEVLLVAVGRGPVSQGLGYEEQGVAMDRGYVLVDEYMRTNVPTISAVGDLVPTLQLAHVGFAEGILVAERLAGLKTVPIDYDGVPRVTYCHPEVASVGITEAKAKEIYGADKVVALKYNLAGNGKSKILNTAGEIKLVQVKDGAVVGVHMVGDRMGEQVGEAQLIYNWEALPAEVAQLIHAHPTQNEAMGEAHLALAGKPLHSHD

SEQ ID NO: 1418 - protein, 417 aa, Pseudomonas syringae pv. syringae B728a
MQAGDSSSIFGIITMQFNKSNKLANVCYDIRGPVLKHAKRLEEEGHRILKLNIGNPAPFGFEAPDEILQDVIRNLPTAQGYSDSKGLFSARKAVMQYYQQKQVEGVGIEDIYLGNGVSELIVMSMQALLNNGDEVLVPAPDYPLWTAAVALSGGSPVHYLCDEQANWWPDLEDIKAKITPNTKAMVIINPNNPTGAVYSREVLLGMLELARQHNLVVFSDEIYDKILYDDAVHICTASLAPDLLCLTFNGLSKSYRVAGFRSGWIAISGPKHNAQSYIEGIDILANMRLCANVPSQHAIQTALGGYQSINDLILPPGRLLEQRNRTWELLNDIPGVSCVKPMGALYAFPRIDPKVCPILNDEKFVLDLLLSEKLLVVQGTAFNWPYPDHFRVVTLPRVDELEQAIGRIGNFLKGYRQ

SEQ ID NO: 1419 - protein, 397 aa, Leuconostoc mesenteroides subsp. mesenteroides ATCC 8293
MKTFSNRVNAITASPTLVMNGLAKQMQAEGIDVINLGVGEPDFQTPKNISDAAIEAIQAQKTSFYTPASGLPALKQAIVENVSQRYEAAITTQNVSVTTGAKLSLYVLMQVLLNPGDTVVTAAPEWVSYVEQIKLAGGELIEVHSESSSMKLTISDLDKIKETVKLVIVNSPTNPTGQVYSKQEIQDILDWSNTHGVYVILDEIYGQLVYNGAEFTSGLQLQHLENSAMIIVDGVSKAYSMTGWRIGWTLASSEIISAMNKLLGHMTSNPTVAAQYAAIEALNGEQDTVENMRQAFEQRLNTTFEAINKINGVHVDVKPQGAFYLFPQVDEKLKKLVGVSNTVELSTKILEEAHVALPAGEGFGMPGYLRLSYAKDQDTLNEAVLRLTQFFKKYTKD

SEQ ID NO: 1420 - protein, 195 aa, Haemophilus influenzae R2866
MKQKIVLATGNKGKVKEMADVLSDFGFEVIAQTDLGIESPEETGLTFVENALLKARYTSEKSGLPAIADDSGLVVSALNGAPGLYSARYAGEEGNDAKNREKLLAELAHVAQDKRQAKFVSCIVFLQHPTDPSPIIAEGECCGVIGFEEKGENGFGYDSLFFSPEQGCTFAELETVEKKKISHRAKALSVLKSKL

SEQ ID NO: 1421 - protein, 198 aa, Agrobacterium tumefaciens str. C58
MSVASLPSFLCLSQESSRRASARRESPSSPRTWAGWIPVTGTGMRECVVALCLLLTLIFAAASPALAFNPDEVLKDPVLEQRARNLTSQLRCMVCQNQSIDDSNAELARDLRVLVRERLVQGDSDKAVIDYVVSRYGEFVLLKPRLSLRTLLLWGAPIGLTLAGIFAVFVFSRRRATQERPQKLSADEEERIRNLIEK

SEQ ID NO: 1422 - protein, 216 aa, Brassica napus
DVSKFTVGDVVGVGVIVGCCGSCKPCSSDLEQYCNKRIWSYNDVYTDGKPTQGGFADTMIVNQKFVVKIPEGMPVEQAAPLLCAGVTVYSPLSHFGLMSSGLRGGILGLGGVGHMGVKIAKAMGHHVTVISSSERKREEAMDHLGADDYVVSSDQAEMQRIADSLDYIIDTVPVFHPLEPYLACLKLDGKLILMGVINTPLQFITPLVILGRKVIS

SEQ ID NO: 1423 - protein, 340 aa, Sinorhizobium meliloti 1021
MTMTAAVVREFGKPLVIEEVPVPQPGPGQVLIKYEATGVCHTDLHAAKGDWPVRPNPPFIPGHEGVGYVAKLGAEVTRLKEGDRVGVPWLHTACGCCTPCRTGWETLCGSQQNTGYSVDGTFAQYGLADPDFVGRLPARLEFGPAAPVLCAGVTVYKGLKETEVRPGEWVLVSGIGGLGHMAVQYAKAMGMHVAAADIFPDKLALAEKLGADLVVDARAPDAVEEVQRRTGGLHGALVTAVSPKAMEQAYSMLRSKGTMALVGLPPGQICLPVFDTVLKRITVRGSIVGTRQDLEEALEFAGEGKVAAHFSWDKIENINAIFERMEEGKIDGRIVLDLNG

SEQ ID NO: 1424 - protein, 211 aa, Brassica napus
VSKFTVGDVVGVGVIVGCCGRCKPCSSDLEQYCNKRIWSYNDVYTDGKPTQGGFADTMIVNQKFVVKIPEGMPVEQAAPLLCAGVTVYSPLSHFGLMSSGLRGGILGLGGVGHMGVKIAKAMGHHVTVISSSERKREEAMDHLGADDYVVSSDQAEMQRIADSLDYIIDTVPVFHPLEPYLASLKLDGKLILMGVINTPLQFITPLVILGR

SEQ ID NO: 1425 - protein, 215 aa, Brassica oleracea
VSKFTVGDVVGVGVIVGCCGRCKPCSSDLEQYCNKRIWSYNDVYTDGKPTQGGFADTMIVNQKFVVKIPEGMPVEQAAPLLCAGVTVYSPLSHFGLMSSGLRGGILGLGGVGHMGVKIAKAMGHHVTVISSSERKREEAMDHLGADDYVVSSDQAEMQRIADSLDYIIDTVPVFHPLEPYLASLKLDGKLILMGVINTPLQFITPLVILGRKVIS

SEQ ID NO: 1426 - protein, 211 aa, Brassica rapa
VSKFTVGDVVGVGVIVGCCGSCKPCSSDLEQYCNKRIWSYNDVYTDGKPTQGGFADTMIVNQKFVVKIPEGMPVEQAAPLLCAGVTVYSPLSHFGLMSSGLRGGILGLGGVGHMGVKIAKAMGHHVTVISSSERKREEAMDHLGADDYVVSSDQAEMQRIADSLDYIIDTVPVFHPLEPYLACLKLDGKLILMGVINTPLQFITPLVILGR

SEQ ID NO: 1427 - protein, 172 aa, Arabidopsis lyrata subsp. petraea
ANVDEAVAKLKSKGIDAYGIVCHVSNAQHRRNLVEKTVQKYGKIDIVVCNAAANPSTDPILSSKEVVLDKLWEINVKSSILLLQDMAPHLEKGSSVIFITSIAGFQPQGAMAMYGVTKTALLGLTKALAAEMAPETRVNAVAPGFVPTHFASFITGSSEVREGIEEKTLLNR

SEQ ID NO: 1428 - protein, 457 aa, Zea mays
MAGLLHLQSTLLPSASALRRRAGAPVPCSSRRRCRVEAKIREIFMPALSSTMTEGKIVSWTAAEGDRLSKGDPVVVVESDKADMDVETFHDGFLAAVLVPAGESAPVGSAIALLAESEEEIPVAQSQAASFSSSSPSPPPPQETAQEASPSPPPPPPSAPVAVSAPALPSPATQGGGRVVASPYAKKLAKDLGVDLFSVTGSGPGGRIVAKDVEAALAAPKKAAPVTAARPDVPLGSTVPFTTMQGAVSKNMVESLAVPTFRVGYTITTDALDQLYKKIKSKGVTMTALLAKATAMALVQHPVVNSSCRDGKSFTYNRSINIAVAVAIDGGLITPVLQDADKLDIYSLSRKWKELVDKARAKQLQPHEYNSGTFTLSNLGMFGVDRFDAILPPGTGAIMAVGASEPTVVGTKDGRIGIKSQMQVNVTADHRVIYGADLAAFLQTLAKIIEDPKDLTF

SEQ ID NO: 1429 - protein, 126 aa, Beta vulgaris
KFYTREGNFDLVGNNFPVFFIRDGMKFPDMVHSLKPNPKSHIQENWRVMDFFSHHPESLHMFTFLFDDIGVPANYRHMEGSGVNTYTLINKAGKVHCVKFHWKPTCGVKSLLEDEAIKVGGANHSH

SEQ ID NO: 1430 - protein, 549 aa, Oryza sativa
MFFSRVKTDNRQITLRFPNPVPLYPVSASATGILGKGGGEFARGFWLMANIRALLIGLNYSIVAGLRVNTKFDARLCIAHFLTECLSSRPSYLASLGRHYKVPMEIRWLSSTAIGPARLLWQQLIGLQQQAMGTVSACSSWIRPTARFPPHLVVGMPALSPTMNQGNIAKWRKQEGEKIEVGDVICEIETDKATLEFESLEEGYLAKILAPEGSKDVQVGQPIAVTVEDLEDIKNIPADASFGGEQKEQSIASEAQKVETDAAKESSIITRISPAAKLLIKEHRLDQSVLNASGPRGTLLKGDVLAALKLGASSSSTKQKNAPAAPSSQPTHDFQAQSVTIPQQNDAYEDIPNSQIRKVIAKRLLESKQTTPHLYLSQDVILDPLLAFRNELKEQHGVKVSVNDIVIKAVALALRNVPEANAYWNNDKEQAQKCVSVDISIAVATEKGLMTPIIRNADQKTISAISSEVKQLAEKARAGKLAPNEFQGGTFRHSGILAVGRGNKIIEPVVDSDGTEKATVVTKMSLTLSADHRVFDGQVGGTDILRPVV

SEQ ID NO: 1431 - protein, 507 aa, Mycobacterium avium subsp. paratuberculosis str. k10
MTVFARPGSAGALMSYESRYDNFIGGQWVAPARGRYFENPTPVTGQTFCEVARSDEADVDKALDAAHAAAPAWGKTAPAERAAILNKIADRIEENLESLAVAEVWDNGKPIREALAADIPLAADHFRYFAGALRAQEGSLSQIDDDTVAYHFHEPLGVVGQIIPWNFPILMGAWKLAPALAAGNAVVLKPAEQTPVSVLYLMSLIGDLLPPGVVNVVNGFGAEAGKPLASSNRIAKIAFTGETTTGRLIMQYASQNLIPVTLELGGKSPNIFFSDVMAKADDYQDKALEGFTMFALNQGEVCTCPSRSLIQADIYDEFLELAAIRTKAVRQGDPLDSETMLGSQASNDQLEKVLSYIAIGKDEGATIITGGERAELGGDLSGGFYMQPTIFAGNNKMRIFQEEIFGPVVAVTSFTDYDDAISIANDTLYGLGAGVWSRDGNTAYRAGRDIQAGRVWVNCYHAYPAHAAFGGYKQSGIGRENHKMMLDHYQQTKNMLVSYSNKAQSFF

SEQ ID NO: 1432 - protein, 300 aa, Persea americana
MVPSSPILFSSKPPCPFLPIPSKPIKLIHLSTSSSSWVSFKKSPSPSSRSLTTLVAQTSDWAQQEEDSNVAEATLSDWEGEGEGEGEEQTESGAEDGEESGGDGFVEGGEEDSYPLPPEEAKLFVGNLPYDVDHQALAELFDQAGTVEVAEVIYNRETDQSRGFGFVTMSTVEEAEKAVEMFNRYDINGRLLTVNKAAPRGARVDRPPRAFEPAFRMYVGNLPWQVDDARLEQVFSEHGKVVEARVVYDRETGRSRGFGFVTMSTQTELDDAIAALDGQSLDGRAIRVNVAEDRPRRASF

SEQ ID NO: 1433 - protein, 431 aa, Mycobacterium avium subsp. paratuberculosis str. k10
MTSHYDVVVLGAGPGGYVAAIRAAQLGLSTAIVEPKYWGGVCLNVGCIPSKALLRNAELAHIFTKEAKTFGINGEATFDYGAAFDRSRKVAEGRVAGVHFLMKKNKITEIHGYGRFTDPHTLAVELNDGGTETVTFDNAIIATGSSTRLVPGTSLSANVVTYEEQILSRELPESIIIAGAGAIGMEFGYVLHNYGVEVTIVEFLPRALPNEDADVSKEIEKQFKKLGVKILTGTKVESISDDGSQVTVVVSKDGNSQELKAAKVLQAIGFAPNVEGYGLEAAGVALTDRKAIGITDYMRTNIEHIYAIGDVTGKLQLAHVAEAQGVVAAETIAGAETLALGDYRMMPRATFCQPNVASFGLTEQQARDEGHDVVVAKFPFTANGKAHGVGDPSGFVKLIADANTVSCWAGTWSATTSPSCCRSSPWRRSGT

SEQ ID NO: 1434 - protein, 69 aa, Glycine max
  unsure (1)..(69): unsure at all Xaa locations
MXTXVSIKGXQIXDXRGNPXVEVDXXCSDGTFARAAVPSGASTGIIEALELRXGGSDYXGKGVSXAVDN

SEQ ID NO: 1435 - protein, 315 aa, Persea americana
MANTSISPLSTLFCPKTLIPFLSIPSKAKLLHLSHSTSSVPSWVSLKSKLSSSGGSFIALVARTSDWARQDGDNEIGEAGFDWEGEGTEAQVSDWEGEVEEDGEVLGESGAEDEEESGEVGFADEEDSYSAPPEEVKIFVGNLPFDLESADLADLFNKAGVVESAEVIYNRETDQSRGFGFVSMSTVEEVVKAIEMFDRYDINGRTLTVNKAAPRGSRAERPPRDFEPAFRVYVGNIPWQVDNLRLEQLFSEYGKVEEARIVFDRETGRSRGFGFVTMSSQIEMEDAIAALDGSDLDGRAIKVSMAQERPRRGHF

SEQ ID NO: 1436 - protein, 164 aa, Glycine max
  unsure (1)..(164): unsure at all Xaa locations
VYRASVCMVGPFTGLKSMAGLPTKKTNYDITFIALNCGILQCMRVCPPDGKKKFETLCYLPHLDDAQXAKEVQYLLRKGWIPCLQFQLDHGFVYREHNRSPRYYDGRYXTMWDLPXFGCTDAYQXVKELQEAXTXYPNCFIRIIRFDHLSPSPCINFIAFKSPS

SEQ ID NO: 1437 - protein, 393 aa, Borrelia burgdorferi B31
MSIKTVKDFSSFAGKRALVRCDFNVPLKEGSISDDTRIRAALSTIEYLKERGARIVLVSHLGRPDGKKNPKYSLKPVANRLSELLGQDVKMLSDCIGSEVVNSTLQMKDGDVVLLENVRFYAEEEKNDKNFAKKLSENGDVFVNDAFGAAHRAHASTVGVADYLPSVGGFLMEKEDKFLGGILKNPERPFVSIIGGSKVSSKIAVLESLLSKSNVVVIGGGMAYTFLHSEGYSIGKSLLEDEYIGIASSFLKKAKELGVKVILPLDHIVADDFNKNSIPEYIDSFNIPENKIGMDIGANTLKEIENVVKTAKTIIWNGPLGVFEFDSFSKGTAKVAEMVASCSGLTVVGGGDSVAAVNKFNLSDKITHVSTGGGASLEYLEGRILPGIKVLEN

SEQ ID NO: 1438 - protein, 492 aa, Capsella bursa-pastoris
MVLDGNNGGAVWLGGGGEREENEEGSWGRNQEDGSQFKPMLEGDWFSNPPHPQDLQMLQNHQDCRFLGGFPFNPNDNLLLQHSIDSSSSCSPSQAFSLDPSQQNQFLSTNNKSCLINVPSSANPFDNAFEFGSESGFLSQIHAPMSMGFGSLTQLGNRDLSSVPDFLSARSLLAQDHNSSNSVLCGGGGGFTAPLELEGFGSPANGGFVGNRAKVLKPLEVLASSGAQPTLFQKRAAMRQSSRSKMGNSESSGMRRLSDDGDMDETGIGVSGLNYESDEPNESGKAAESVQIGGGKGKKKGMPAKNLMAERRRRKKLNDRLYMLRSVVPKISKMDRASILGDAIDYLKELLQRINDLHNELESTPPGSLPPTSSSFHPLTPTPQTLSCRVKEELCPSSLPSPKGQQARVEVRLREGRAVNIHMFCGRRPGLLLATMKALDNLGLDVQQAVISCFNGFALDVFRAEQCQEGQEILPDQIKAVLFDTAGYAGMI

SEQ ID NO: 1439 - protein, 383 aa, Aquifex aeolicus VF5
MKTSLISGERFYSLEESNLVKEIFKKAVKIFEAFGYDYINLSHFEPYEFQELTFGEGSKEAITFKDSYTKESFGLRLDFTTQVVRTISHLRNVKLPERVYYFGKVFSLDRRGFEKLQTGVELIGEKSILADFEVIQVLTEFLKSLGLKDLKVILSHAGIVRKVADEREELLRAFSERNLEALKEVLGNDIKFFVEVSKNPEVLNFLEKYDLEKEKEELLELGKLLEEFGIDYAYDLGEVRNFPYYTGVIFEIYELKSGKALAGGGRYDNLSKIYGKEYPATGGAVYLERLLDILPKNVEKKDYFVIDKTKKRLGLKLADVLREKGKKVGMEIVKERGLEHSLIYAFDKGFKEVLLVEDEIVKVYTTPKDYVVMKIREFLDLIE

SEQ ID NO: 1440 - protein, 343 aa, Arabidopsis thaliana
MATTASSSLLLPSISLNNLSSSKNASFGFAAKNLSRSRISMSVSAGSQSTTVHDSLFADYKPTSAFLFPGQGAQAVGMGKESQSVGAAGELYKKANDILGYDLLDICVNGPKEKLDSTVISQPAIYVTSLAAVELLRVREGGEQIINSVDVTCGLSLGEYTALAFAGAFSFEDGLKLVKLRGEAMQAAADAAKSAMVSIIGLDSEKVQQLCDAANQEVDEADKVQIANYLCPGNYAVSGGLKGIEVVEAKAKSFKARMTVRLAVAGAFHTSFMEPAVSRLEAALAATEIRSPRIPVISNVDAQPHADPDTIKKILARQMQMLTTGDISSPMGDNSKDSLIQRT

SEQ ID NO: 1441 - protein, 609 aa, Bacillus cereus ATCC 14579
MCMCGITGWVDWKEDLSNQHVILKKMANSIEHRGPDAEGFWFSPHAAFAHRRLIVIDPEGGTQPKTFRAGDYTYALTYNGEIYNFRELKEQLQKCGHAFETHSDTEVLLHAYLEWKEDCVQHLNGIFAFALWDDQKQQLFLARDHLGVKPLFYTERNDSIIFGSEIKALLAHPSVPAEIDADGINEIFGLGLFRTPGCGVFKHIQEVRAGHSITFTRHKKVVTKYWNLESKFHTDSIEDTSSHILSILQDTVKRQLIADVPLVCMLSGGLDSSGITALAGKEFAAENKTLHTYSVDFVNSAKDFELTFARTGLDAPWVKRVSEHVGTAHHDIIVNAEELANHLFVPLHAKDLPSAGEMETSLYLLFCEMKKDATVALSGESADEVFGGYPWFHQEELLYVDKFPWLTNWKNTSPLLLNEVSNQCNLENYIDTRFQEAILEVPTLEGESKKSAKQRQMFYLFLTRFLPFLLDRKDRMSMAVGFEVRVPFCDYRLVEYLWNVPFNIKSIDNIEKGILRRALQPALPDDVRNRRKSAYPTSQDPHYLQTIRNLTLDMCSHKNNPIFSLINHSILLSIADQSNKEINNFEARSAMEYMLQVNEWLKTYHIHIA

SEQ ID NO: 1442 - protein, 439 aa, Nostoc punctiforme PCC 73102
MLSIPINLNLPRIPHLITSLPGPLAQAIVQRDRAVTSPSYTRDYPLVVSRGQGCMVEDVDGNVFLDMTAGIAVTATGHAHPEVVKAIQEQSERLLHMSGTDFYYEPMVELAEQLAIRAPFPQPQGNSAFPAKVFFTNSGAESNEGALKLAKYYTKRSLIVAFLGAFHGRTYGAMSLTGSKAVQRANFGPLVPGVTHIPYGTHASLDYLEQQLFGTILPPQEVAAIVVEPIQGEGGYIVPEDGFLKRIRDICDRHGILMVVDEVQAGMGRTGRLFAIEHWGVMPDIITTAKGIASGLPLGAILAKPELMTWPPGSHATTFGGNPVACAAGIATLRLLESGLMANATQMGELLQASLSELHQRFPRVSPPRGKGLMVAVDLLDEQGNLDRELRDRIIQEAFLRGLLLLGCGKAAIRFCPPLVIDSDQIQIALQIISNILTS

SEQ ID NO: 1443 - protein, 164 aa, Ralstonia eutropha JMP134
MSNVYQFEAKSLAGQPVPLSQFRGKVLLIVNTASECGFTPQYAGLQALHDAYAARGLEVLGFPCNQFGKQEPGDAQQIGQFCESRFSVKFPMFAKIDVKGPDAHPLYQWLTSAKRGVLGTQAIKWNFTKFLLRRDGTVYKRYGSITKPEEIRADIETLLADPAA

SEQ ID NO: 1444 - protein, 316 aa, Vibrio vulnificus CMCP6
MSNKLEQLRKLTTVVADTGEIDAIKKYQPEDATTNPSLILKAAQIAEYAPLIDASIEYAKTQSDDKAQQIQDTCDMLAVNIGKEILKTIPGRISTEVDARLSYDMEGSVAKARQLVKMYNDAGITNDRILIKLASTWEGIRAAEILEKEGINCNLTLLFSFAQARACAEAGVFLISPFVGRIMDWYKAKEGRDFEAQEDPGVLSVTKIYNYYKEYGYKTVVMGASFRNIGEILELAGCDRLTIAPALLAELEAAEGEVVEKLVDSKGAAERPAAMTHAEFLWEHNQDPMAVEKLAEGIRNFAVDQGKLEAMIAAKL

SEQ ID NO: 1445 - protein, 396 aa, Glycine max
MQSAAFTFSPSLPLRNPSPNYWRRPSLSLRLSAKHGNSNSDDVNSNGVSSTFFTRRSWTLPPSSSFKFRPLPPRAAESAVPESAPVENPLFKTLELGALFGLWYLFNIYFNIYNKQVLKAFHYPVTVTVVQFAVGTVLVAFMWGLNLYKRPKLSGAMLGAILPLAAVHTLGNLFTNMSLGKVAVSFTHTIKAMEPFFSVILSAMFLGEFPTPWVVGSLVPIVGGVALASVTEASFNWAGFWSAMASNVTNQSRNVLSKKAMVNKEDSMDNITLFSIITVMSFFLLAPVAIFMEGVKFTPAYLQSAGVNVRQLYIRSLLAALCFHAYQQVSYMILQRVSPVTHSVGNCVKRVVVIVSSVIFFQTPVSPVNAFGTAIALAGVFLYSRVKRIKAKPKTA

SEQ ID NO: 1446 - protein, 433 aa, Treponema denticola ATCC 35405
MSDIIYIEGREILDSRGNPTVEVEVQLSDFSYGRACVPSGASTGEYEALEMRDGDKSRYMGKGVLKAVDQVNTVIAEELDGADALDQAEIDNMLINLDGTENKSKLGANAMLGVSMAVARAAADSLGLPLYRYLGGVHAMQMPVPMANIINGGRHSDNKIDFQEYMIMPVGAPSIREGIRMTAEVFHALKDILKKEGHVTAVGDEGGFAPNIENVQALDYIMKAIEKAGYKPGKDVVIALDCASSELFDAGDRKGYKFWKSEPSKILNADEMVDLFKDWISKYPIVSIEDPLDQNDWEGYAKMTKELGNQIQIVGDDFFVTNTKRLARGIEEGACNSILIKLNQIGTVTETIDAVRMAQKAGYTAVISHRSGETEDAFIADLAVALETGQIKTGSMSRSDRIAKYNQLMRIEDELGYNARYAGMATFANLIKK

SEQ ID NO: 1447 - protein, 528 aa, Nostoc punctiforme PCC 73102
MDARALWQRYQNWLYFHEGLGLYLDISRMRFDDAFVESLQPKFDKAFADMAELEKGAIANPDENRMVGHYWLRNPDLAPTPELTQEIVQTLEQIEAFAEKVQTGAIHPPRASRFTDIISIGIGGSALGPQFVAEALAPDFPPLKIHFIDNNDPAGIDRVLNHLRNSLASTLVLVISKSGGTPEPRNGMIEVKKAYAGHNLEFAQYAVAITSVDSNLDKLAKDEGWLARFPMYDWVGGRTSEMSAVGLVPAALQGIDVRAMLDGAKEMDDATRVPDVKNNPAALLALSWYFAGNGKGEKDMVVLPYKDSLFLFSRYLQQLVMESLGKEKDLDGNVVHQGIAVYGNKGSTDQHAYVQQLREGVANFFATFVEVLEDRQGPSTEIDPGVTSGDYLSGFLQGTRQALYENHRDSITVTIPQVNPRTVGALIALYERAVGLYASLVNVNAYHQPGVEAGKKAAASILDLQTRVVAVLQKEKTPISLDELAKKAGASDQIEAIYKILRHIHANQRGVVLQGDLHKPGSLTVSAS

SEQ ID NO: 1448 - protein, 1129 aa, Avena sativa
MSSSRPASSSSSRNRQSSQARVLAQTTLDAELNAEYEESGDSFDYSKLVEAQRDGPPVQQGRSEKVIAYLQHIQKGKLIQTFGCLLALDEKSFNVIAFSENAPEMLTTVSHAVPSVDDPPRLGIGTNVRSLFSDQGATALHKALGFADVSLLNPILVQCKTSGKPFYAIVHRATGCLVVDFEPVKPTEFPATAAGALQSYKLAAKAISKIQSLPGGSMEVLCNTVVKEVFDLTGYDRVMAYKFHEDDHGEVFSEITKPGLEPYLGLHYPATDIPQAARLLFMKNKVRMICDCRARSIKVIEAEALPFDISLCGSALRAPHSCHLQYMENMNSIASLVMAVVVNENEEDDEAESEQPAQQQKKKKLWGLLVCHHESPRYVPFPLRYACEFLAQVFAVHVNREFELEKQLREKNILKMQTMLSDMLFREASPLTIVSGTPNIMDLVKCDGAALLYGGKVWRLRNAPTESQIHDIAFWLSDVHRDSTGLSTDSLHDAGYPGAAALGDMICGMAVAKINSKDILFWFRSHTAAEIRWGGAKNDPSDMDDSRRMHPRLSFKAFLEVVKMKSLPWSDYEMDAIHSLQLILRGTLNDASKPKREASLDNQIGDLKLDGLAELQAVTSEMVRLMETATVPILAVDGNGLVNGWNQKAAELTGLRVDDAIGRHILTLVEDSSVPVVQRMLYLALQGKEEKEVRFEVKTHGPKRDDGPVILVVNACASRDLHDHVVGVCFVAQDMTVHKLVMDKFTRVEGDYKAIIHNPNPLIPPIFGADEFGWCSEWNAAMTKLTGWNRDEVLDKMLLGEVFDSSNASCPLKNRDAFVSLCVLINSALAGEETEKAPFGFFDRSGKYIECLLSANRKENEGGLITGVFCFIHVASHELQHALQVQQASEQTSLKRLKAFSYMRHAINNPLSGMLYSRKALKNTDLNEEQMKQIHVGDNCHHQINKILADLDQDSITEKSSCLDLEMAEFLLQDVVVAAVSQVLITCQGKGIRISCNLPERFMKQSVYGDGVRLQQILSDFLFISVKFSPVGGSVEISSKLTKNSIGENLHLIDLELRIKHQGLGVPAELMAQMFEEDNKEQSEEGLSLLVSRNLLRLMNGDVRHLREAGVSTFIITAELASAPTAMGQ

SEQ ID NO: 1449 - protein, 1129 aa, Avena sativa
MSSSRPASSSSSRNRQSSRARVLAQTTLDAELNAEYEESGDSFDYSKLVEAQRDGPPVQQGRSEKVIAYLQHIQKGKLIQTFGCMLALDEKSFNVIAFSENAPEMLTTVSHAVPSVDDPPRLGIGTNVRSLFSDQGATALHKALGFADVSLLNPILVQCKTSGKPFYAIVHRATGCLVVDFEPVKPTEFPATAAGALQSYKLAAKAISKIQSLPGGSMEVLCNTVVKEVFDLTGYDRVMAYKFHEDDHGEVFAEITKPGLEPYLGLHYPATDIPQAARFLFMKNKVRMICDCRARSIKVIEAEALPFDISLCGSALRAPHSCHLQYMENMNSIASLVMAVVVNENEEDDEAESEQPAQQQQKKKLWGLLVCHHESPRYVPFPLRYACEFLAQVFAVHVNREFELEKQLREKSILKMQTMLSDMLFREASPLTIVSGAPNIMDLVKCDGAALLYGGKVWRLRNAPTESQIHDIAFWLSDVHRDSTGLSTDSLHDAGYPGASALGDMICGMAVAKINSKDIIFWFRSHTAAEIRWGGAKHDSSDMDDSRRMHPRLSFKAFLEVVKMKSLPWTDYEMDAIHSLQLILRGTLNDASKPKREASLDNQIGDLKLDGLAELQAVTSEMVRLMETATVPILAVDGNGLVNGWNQKAAELTGLRVDDAIGRHILTLVEESSVPVVQRMLYLALQGKEEKEVRFEVKTHGPRRDDGPVILVVNACASRDLHDHVVGVCFVAQDMTVHKLVMDKFTRVEGDYKAIIHNPNPLIPPIFGADEFGWCSEWNAAMTKLTGWNRDEVLDKMLLGEVFDSSNASCPLKNKNAFVSLCVLINSALAGEETEKAPFGFFDRSGKYIECLLSANRKENEGGLITGVFCFIHVASHELQHALQVQQASEQTSLKRLKAFSYMRHAINNPLSGMLYSRKALKNTDLNEEQMKQIHVGDNCHHQINKILADLDQDSISEKSSCLDLEMAEFVFQDVVVAAVSQVLITCQGKGIRISCNLPERFMKQSVYGDGVRLQQILSDFLFISVKFSPVGGSVEISSKLTKNSIGENLHLIDLELRIKHQGLGVPAELMEQMFEEDNKEQSDEGLGLLVSRKLLRLMNGDVRHLREAGVSTFILTAELASAPTAIGQ

SEQ ID NO: 1450 - protein, 495 aa, Avena sativa
MSSSRPASSSSSRNRQSSQARVLAQTTLDAELNAEYEESGDSFDYSKLVEAQRDGPPVQQGRSEKVIAYLQHIQKGKLIQTFGCLLALDEKSFNVIAFSENAPEMLTTVSHAVPSVDDPPRLGIGTNVRSLFSDQGATALHKALGFADVSLLNPILVQCKTSGKPFYAIVHRATGCLVVDFEPVKPTEFPATAAGALQSYKLAAKAISKIQSLPGGSMEMLCNTVVKEVFDLTGYDRVMAYKFHEDDHGEVFSEITKPGLEPYLGLHYPATDIPQAARFLFMKNKVRMICDCRARSIKVIEAEALPFDISLCGSALRAPHSCHLQYMENMNSIASLVMAVVVNENEEDDEAESEQPAQQQKKKKLWGLLVCHHESPRYVPFPLRYACEFLAQVFAVHVNREFELEKQLREKNILKMQTMLSDMLFREASPLTIVSGNPNIMDLVKCDGAALLYGGKVWRLRNAPTESQIHDIAFWLSDVHRDSTGLSTDSLHDAG

SEQ ID NO: 1451 - protein, 560 aa, Arabis gemmifera
MASSPALISDTEAWKDLKGHVEDIKKTHLRDLMTDANRCQSMMMEFDGLLLDYSRQRATVETVDKLLNLAKAAQLTEKISRMFNGEHINSTENRSVLHVALRAPKDAVIKADGKNVVPEVWNVLDKIKEFSEKIRSGSWVGATGKPLKDVIAIGIGGSFLGPLFVHTALQTDPEALESAKGRQLRFLANIDPVDVARNINGLNPETTLVVVVSKTFTTAETMLNARTLREWITAALGASAVAKHMVAVSTNLALVEKFGIDPNNAFAFWDWVGGRYSVCSAVGVLPLSLQYGFSVVEKFLKGASSIDQHFQSTPIEKNIPVLLGLLSVWNVSFLGYPARAILPYSQALEKFAPHIQQVSMESNGKGVSIDGLPLPFETGEIDFGEPGTNGQHSFYQLIHQGRVIPCDFIGIVKSQQPVYLKGEVVSNHDELMSNFFAQPDALAYGKTPEQLQKENVSENLIPHKTFSGNRPSLSLLLPELTAYNVGQLLAIYEHRVAVQGFVWGINSFDQWGVELGKVLATHVRKQLHSSRTQGTTLEGFNYSTTTLLKRYLETSSEPQM

SEQ ID NO: 1452 - protein, 560 aa, Arabis gemmifera
MASSTASISDPEAWKDLKGHVEDIKKTHLRDLMTDANRCQSMMMEFDGLLLDYSRQRATVETVDKLLNLAKAAQLTEKISRMFNGEHINSTENRSVLHVALRAPKDAVIKADGKNVVPEVWNVLDKIKEFSEKIRSGSWVGATGKPLKDVIAIGIGGSFLGPLFVHTALQTDPEALESAKGRQLRFLANIDPVDVARNINGLNPETTLVVVVSKTFTTAETMLNARTLREWITAALGASAVAKHMVAVSTNLALVEKFGIDPNNAFAFWDWVGGRYSVCSAVGVLPLSLQYGFSVVEKFLKGASSIDQHFQSTPIEKNIPVLLGLLSVWNVSFLGYPARAILPHSQALEKFAPHIQQVSMESNGKGVSIDGLPLPFETGEIDFGEPGTNGQHSFYQLIHQGRVIPCDFIGIVKSQQPVYLKGEVVSNHDELMSNFFAQPDALAYGKTPEQLQKENVSENLIPHKTFSGNRPSLSLLLPELTAYNVGQLLAIYEHRVAVQGFVWGINSFDQWGVELGKVLATHVRKQLHSSRTQGTTLEGFNYSTTTLLKRYLETSSEPQM

SEQ ID NO: 1453 - protein, 324 aa, Zea mays
MARPPCCDKEGVKKGPWTPEEDLVLVSYIQDHGPGNWRAVPTRTGLMRCSKSCRLRWTNYLRPGIRRGNFTEQEEKLIVHLQALLGNRWAAIASYLPERTDNDVKNYWNTHLKRKLQAGGGDGDGDGAAKPPAHRPPPSNSKGQWERRLQTDINLARRALREALTPLGDLKPQPQPQRDGAGVGIVGGDSPAASSLSSQCSPPPAPAALGTYVLTADNVSRMLDGWAGLNGKRRGGAPGTPGGAETASTGSSSEVSYGGGTAVVAPAAGGPVFEYETKPPAAPFQLMMPLSAIESWLFDDDTHFHRPVQSASLLDAAPMDYYLL

SEQ ID NO: 1454 - protein, 500 aa, Synechocystis sp. WH 8501
MCGIAGIWGQTEQTNVEAMMKSIIHRGPDAKGIFTVPNGSGILGHQRLSIMDVDGGDQPIYSKANTQAIIGNGEIYNYPKLQPELAKKYKFLTKSDTEAVLHLYEEKNTTAVGELDGMFAFAIIDDNKFIAARDPIGIKPLYYSEKDGNFWFASELKAITQFCENVEEFPPGHFFSSETGFSQYYSLPDIPPELDANVDELLQEIRETVEASVVKRLMSDVPLGAFLSGGLDSSIIAAIAKKHKSELHTFSVGIAGSKDINAARLVSDYLGTIHHEYIITPEEAIAKLPEIIYYLESFDQDLVRSGIPCYFTSRLASEYVKVILTGEGADELFAGYTYYKDIPSDDTLHRELRRSVNSLHNINLQRVDRLTMAHSIEGRVPFLDLKMIELGQKVPAHLKLKGTPPVEKWILRKAFEDILPEEIVWRKKEQFDEGSGTVDLLTETLKDVMNEQQAQQYQKEHPDIKLRSAEECYYHQIFMKAFDNPDALLTNVARWAETRF

SEQ ID NO: 1455 - protein, 560 aa, Arabis gemmifera
MASSTALISDTEAWKDLKGHVEDIKKTHLRDLMTDANRCQSMMMEFDGLLLDYSRQRATVETVDKLLNLAKAAQLTEKISRMFNGEHINSTENRSVLHVALRAPKDAVIKADGKNVVPEVWNVLDKIKEFSEKIRSGSWVGATGKPLKDVIAIGIGGSFLGPLFVHTALQTDPEALESAKGRQLRFLANIDPVDVARNINGLNPETTLVVVVSKTFTTAETMLNARTLREWITAALGASAVAKHMVAVSTNLALVEKFGIDPNNAFAFWDWVGGRYSVCSAVGVLPLSLQYGFSVVEKFLKGASSIDQHFQSTPIEKNIPVLLGLLSVWNVSFLGYPARAILPYSQALEKFAPHIQQVSMESNGKGVSIDGLPLPFETGEIDFGEPGTNGQHSFYQLIHQGRVIPCDFIGIVKSQQPVYLKGEVVSNHDELMSNFFAQPDALAYGKTPEQLQKENVSENLIPHKTFSGNRPSLSLLLPELTAYNVGQLLAIYEHRVAVQGFVWGINSFDQWGVELGKVLATHVRKQLHSSRTQGTTLEGFNYSTTTLLKRYLETSSEPQM

SEQ ID NO: 1456 - protein, 853 aa, Sinorhizobium meliloti 1021
MKSRESPVYMSNVEEFPLTGRVLTEYEALITSAPTALDAIPGAVYVCDHEGWLVGYNAEAAELWGRQPSLSAPRERFCGSQRLFLSDGSPMDHQECPMAEAIKTGVSTRNAEVIIERPDGSRIFALVNIRPLRDHRGVIQGAINCFQDISQQKRIEAEVNCKSKDLEDFFENSAIGLHIVSAAGIILRANKAELELLGYPADEYVGRHIAEFHADAPVIGDILDRLSCGEKLDRYPARLRARDGSIKHVLITSNSRFEDGKFVNTRCFTTDITSLHETENAWRETEERLAATYQAATIGIAESDADGRLLRVNDAFCTMLGRSREQLLNMTFLDYTHEDDRDEEARCYARQVSGETDTYAIRKRAVKADGTVIYLDVYSSTVRDRTGRFRYGVRVLLDVTEAKRMDDRRRESEQHMRDLLEALPAAVYTTDAEGRITFFNKAAVEMAGRTPQIGDKWCVTWRLYRPDGTYLPHDQCPMAVTLKEDRPVRGEQAVAERPDGTRVPFIPYPTPLHDVAGKLVGAVNMLVDISDREKAAEYAERLASIVRFSDDAIVSKDTQGIIQTWNKGAERLFGYSAEEVIGKPINILIPPDRQGEEPGILERIRRDEHIDHYETVRIRKDGSLIDVSLTVSPLKDARGRVVGASKIARDITERRRSEEHRKLLVNELNHRVKNTLATVQSLAAQTFRGVNASEDFGRFQSRLVALARAHDVLTRESWQGADLGEVLHATINPICVEPQQRVQASGPPLRLRPKMALALSMAFHELCTNAAKYGALTNDGGLIKVNWHVSNIESVSHLHLQWEEIGGPSVMVPARTGFGTRLLERALARELGGKVDLVFAPSGVRFHIEAPLT

SEQ ID NO: 1457 - protein, 120 aa, Sinorhizobium meliloti 1021
MTERRLRVLVVEDESMIAMLIEDTLCELGHEVAATASRMQEALDIARKGQFDIAIIDVNLDGEPSYPVADILAERNVPFIFATGYGSKGLDTRYSNIPLLTKPFLDSELEAVLVQISKEV

SEQ ID NO: 1458 - protein, 560 aa, Arabis gemmifera
MASSTASISDPEAWKDLKGHVEDIKKTHLRDLMTDANRCQSMMMEFDGLLLDYSRQRATVETVDKLLNLAKAAQLTEKISRMFNGEHINSTENRSVLHVALRAPKDAVIKADGKNVVPEVWNVLDKIKEFSEKIRSGSWVGATGKPLKDVIAIGIGGSFLGPLFVHTALQTDPEALESAKGRQLRFLANIDPVDVARNINGLNPETTLVVVVSKTFTTAETMLNARTLREWITAALGASAVAKHMVAVSTNLALVEKFGIDPNNAFAFWDWVGGRYSVCSAVGVLPLSLQYGFSVVEKFLKGASSIDQHFQSTPIEKNIPVLLGLLSVWNVSFLGYPARAILPYSQALEKFAPHIQQVSMESNGKGVSIDGLPLPFETGEIDFGEPGTNGQHSFYQLIHQGRVIPCDFIGIVKSQQPVYLKGEVVSNHDELMSNFFAQPDALAYGKTPEQLQKENVSENLIPHKTFSGNRPSLSLLLLELTAYNVGQLLAIYEHRVAVQGFVWGINSFDQWGVELGKVLATHVRKQLHSSRTQGTTLEGFNYSTTTLLKRYLETSSEPQM

SEQ ID NO: 1459 - protein, 448 aa, Borrelia burgdorferi B31
MVYRIKNENLDFKIDSLGECKQNNPLIDFYASEGSSHFVNEKNKIKFSVYRNEDKGDRYEDVLLEKAGPREKIYFVPRHVKAAITTCGGLCPGFNDVIRSIVRTLWKIYGVRNIYGVKFGYQGLLPESNSPFINLNPDVVDDINKFGGTILGSSRGGIKPVEIVDTLERMNINMIFNIGGDGTQKGSLLIAEEIEKRNLKIAVVGIPKTVDNDFMFVQKSFGFETAVEQAVAAVAGAHFEANSAYNGIGLVKVMGRDSGFIAAHTALSSNDVNFCLIPELDFDIEGPNGFLVHLERRLLEKESLEEIPHAVILIAEGAGQKYFDHFPKKKDDSGNLLYEDIGLYIKDKITEYFKAKNIQFTLKYIDPSYIIRSSPANASDSLYCARLGSNAVHAAMAGKTKMLISLWSTKFVHIPIKMAVIDRNKVNPNGSFWRDVLSSTGQPISMKN

SEQ ID NO: 1460 - protein, 147 aa, Candida albicans
MSLKRINKELSDLGRDPPSSCSAGPVGDDLYHWQASIMGPPDSPYAGGVFFLSIHFPTDYPLKPPKIALTTKIYHPNINSNGNICLDILKDQWSPALTISKVLLSICSLLTDANPDDPLVPEIAHIYKQDRKKYEATAKEWTKKYAV

SEQ ID NO: 1461 - protein, 343 aa, Arabidopsis thaliana
MGFKRKKDDGDGEEMESDVRGKSTFSGGEKRNVILPSMIKNKDKRSKVYAKQKHEKKLEKQKKIRARDAAEKRALELGEEPPQKMIPKTIENTRESDETVCRPDDEELFADIDADEFNPVLRREIAPKVLLTTCRFNSTRGPALISELLSVIPNSHYQKRGTYDLKKIVEYATKKDFTSLIVVHTNRREPDALLIIGLPNGPTAHFKLSNLVLRKDIKNHGNPTSHQPELVLNNFTTRLGNRVGRFFQSLFPPDPNFRGRRVVTFHNQRDFIFFRHHRYIFETKESKSDKGKEETIKPRLQECGPRFTLKLVTLQHGTFDTKGGEFEWVHKPEMDTSRRRFFL

SEQ ID NO: 1462 - protein, 331 aa, Saccharomyces cerevisiae
MRSIKCVIIGDGAVGKTSLLISYTTNSFPTDYVPTVFDNYSTTIAIPNGTASSPLELDNGNDKRGSLSSASSSPSTDRKLYKINLWDTAGQEDYDRLRPLCYPQTDIFLICFSVSEHASFANVTEKWLPELKQTSNIEGTSLYTKLGKYPILLVGTKSDLRDDPATQKKLQEANSDYVSQEEIDELVQRCGFMGYTECSAATQAGVREVFEQAVRYAIYEPESPNQKSANHTLTDELTTATTNTNGDKNIREQKQQPHHNNSTDSTLPKGSLQQEKEALNIKPTKKGQKDKIHEQSKSKGSKIASNNHHNKQAKPKTRNDKKKKKSKCVIL

SEQ ID NO: 1463 - protein, 532 aa, Borrelia burgdorferi B31
MFMLNYKNLNELENFKILEGIAPEVLKTALTGKRIKEYDITIEGDSVHYNYASKQINETHLKIFQNLSDEANLIEKYKEVLDGEKINISENRKVLHHLTRGQIGKDVIEDNKENMREFFQSELEKIYNFAKQIHSGNIKSSNGKKFKNVVQIGIGGSSLGPKALYSSIKNYAKKHNLALMNGYFISNIDPDESEEVLSSINVDETLFIIVSKSGNTLETKANMQFLINKLKLNGIKEYKKQMVIITLKDSMLAIEEKGYLEYFFMHDSIGGRFSPTSAVGLTLLTLCFTEKVAKEILKGANEADKKSLNKNVKDNASLLAALISIYERNVLNYSSNCIIAYSKAMENFYLHLQQLEMESNGKSVNRFNETINYKTVRIIWGGIGTDVQHSFFQMLHQGTDIVPMDFIGFNETQLKEDVISDNSSSNDKLKANLIAQIIAFSKGKENSNKNKNFQGERPSALIYSKELTPYAIGAILSHYENKVMFEGFLLNINSFDQEGVQLGKIIANQILKNDNFKDEVIESYSKKILKKF

SEQ ID NO: 1464 - protein, 446 aa, Zea mays
MKTEASHKAIAAGGGKMTVLHSPVGVRSIVTSLVAFFILASSIVFLLDRGQEEQVQVAVEHGRQEVQVKLESGLQEPAIRGTTQEGDASNEECNWSRGRWVYDNVSRPLYSGLKCSFIFPEVACDKYGRKDAMYQHWRWQPHGHGCDLPRFDAIKLLENLRNKRMVFVGDSVNRNQWVSLVCMVEASIPDDRLKIRTFNGSLISFKALEYNATIDFYWSPLLVESNSDNPIIHRVEYRIIRADRIEKHASVWRDADIIVFNSYLWWRKQKDDMRMKVMYGSFEDGDAKLDEMEMVDGFEIALKKLTEWLGENIDKNKTRIFFAGSSPTHSWASNWGGEDKNKCLNETEPIYKTGYKAATTDYSLMAKAKHYFRTLEPKGIHVQILNITELSDYRKDGHPTVYRKQFAPLTKEQIADPASYADCTHWCLPGVPDVWNEFLYGYLVQK

SEQ ID NO: 1465 - protein, 91 aa, Glycine max
FSHQYLRTVQNTLKKVRRAIIPAAGLGTRFLPATKAMPKEMLPIVDKPTIQYIIEEAVESGIEDIIIVTGKGKRAIEDHFDFAPELERNLE

SEQ ID NO: 1466 - protein, 299 aa, Treponema denticola ATCC 35405
MMNKIIECVPNFSNGRDPEVLEKIIAPFRGKENVKLLDYESDKDHNRSVVTVIGEPEELKKTVVEAIGIAASLIDLRKHEGAHPRMGATDVVPFIPIKNSTMEECIELSKEVGKLIWEQHKIPVFLYEKSASSPARENLSNIRKGQFEGMAEKVKQPEWKPDFGGTEIHPSAGVTAVGCRMPLVAFNVNLATNDLSIADKIAKKVRFIGGGLRFVKAMGVDLTERGIVQVSMNMTDYTKTSLYQSYEMVKMEAKRYGVNVVGTEIVGLTPMAALMDVASYYLQIENFEFSQIIEARLLE

SEQ ID NO: 1467 - protein, 473 aa, Nostoc punctiforme
MYEKITPPAAGAKIAFKNGEPIVPDNPIIPFIRGDGTGIDIWPATQKVLDAAVAKAYKGQRQISWFKVYAGDEACDLYGTYQYLPQDTLTAIEEYGVAIKGPLTTPVGGGIRSLNVALRQIFDLYACVRPCRYYAGTPSPHKNPEKLDVIVYRENTEDIYLGIEWRQGSEIGDRLIKILNEELIPATPEHGKKRIPLDSGIGIKPISKTGSQRLVRRAIKHALLLPKNKQQVTLVHKGNIMKYTEGAFRDWGYELATSEFRQETVTEQESWILSNKEKNPNISLEENARQIEPGFDNLTPDKKAQVVKEVETVLNTIWATHGDGKWKEKVLVNDRIADSIFQQIQTRPDEYSILATMNLNGDYLSDAAAAIVGGLGMGPGANIGDSSAIFEATHGTAPKHAGLDRINPGSVILSGVMMLEFLGWQEAADLIKKGLSDAIANSQVTYDLARLLEPPVEPLKCSEFADAIIQHFG

SEQ ID NO: 1468 - protein, 154 aa, Beta vulgaris
MESNGKGVSIDGVVLPFEAGEIDFGEPGTNGQHSFYQLIHQGRVIPCDFIGIAKSQQPVYLKGEVVSNHDELMSNFFAQPDALAYGKTQEELQKENVSPDLVPHKTFSGNRPSISLLLPSLTAYNVGQLLAIYEHRIAVEGFIWGINSFDQWGV

SEQ ID NO: 1469 - protein, 568 aa, Vibrio vulnificus CMCP6
MLKQVTDWLARDPDPRTREELQYLIDEKMTEELQDRFRGRLEFGTAGLRGKVGSGPNRMNRLVIQETATGLGHYLIETIRDAAARGVVIGYDGRTDSKQFAHDTAAVLTALGIKVYLTHKVAPTPVVAFGVKQFNAAAAVVVTASHNPPEYNGFKVYWENGAQIIPPHDAGIAAEIEQATHKPIPLMSLSDAEKHGLLVWLKEDYYQTYRQAMNTHPLLKSGHAVDISIAYTAMHGVGAEMAETLLADAGFTHVLSVPEQREPDGTFPTVNFPNPEEAGAMDMVMNLAKTVDAEIACANDPDADRFAVAVRKPDGNYQMLTGDQVGALFANYLLSSVDASKQLVGNTIVSSRLLADIAKQHGAHYYQTLTGFKWLTNVAMTQQSDDKQFLFAYEEALGYTVGNKVWDKDGLSALVAFAQLTAHLKENGLTLWDKLEQLYRQHGFYFNAQRSIALSPDSPPIGDQLRAKPPKTIAGQKVTVIEDLKASLRYVTNGVTEAINLPASDVLIYHLEDRSRVIVRPSGTEPKLKCYYEVISDFPAELDYQTAQFKAESKMNALIAAHQQSLSS

SEQ ID NO: 1470 - protein, 560 aa, Arabis gemmifera
MASSTALISDTEAWKDLKGHVEDIKKIHLRDLMTDANRCQSMMMEFDGLLLDYSRQRATLETVDKLLNLAKAAQLTEKISRMFNGEHINSTENRSVLHVALRAPKDAVIKADGKNVVPEVWNVLDKIKEFSEKIRSGSWVGTTGKPLKDVIAIGIGGSFLGPLFVHTALQTDPEALESAKGRQLRFLANIDPVDVARNINGLNPETTLVVVVSKTFTTAETMLNARTLREWITAALGASAVAKHMVAVSTNLALVEKFGIDPNNAFAFWDWVGGRYSVCSAVGVLPLSLQYGFSVVEKFLKGASSIDQHFQSTPIEKNIPVLLGLLSVWNVSFLGYPARAILPYSQALEKFAPHIQQVSMESNGKGVSIDGLPLPFETGEIDFGEPGTNGQHSFYQLIHQGRVIPCDFIGIVKSQQPVYLKGEVVSNHDELMSNFFAQPDALAYGKTPEQLQKENVSENLIPHKTFSGNRPSLSLLLPELTAYNVGQLLAIYEHRVAVQGFVWGINSFDQWGVELGKVLATHVRKQLHSSRTQGTTLEGFNYSTTTLLKRYLETSSEPQM

SEQ ID NO: 1471 - protein, 335 aa, Candida albicans SC5314
MSQTNSFMHLVRPNVIAPAAGSANGPASIKIHAPAMLTILEIISQQVLNKRIIGTLLGSRSDDGLEMEIKDGFMVPINETGDSIAIEDQVHKSLYQLYKKAHPKETVLGWFGSSNQIDDITSLIHDFYSKGVDRAFPFPAIYLNVEFLNEKNQVIEPKITTYIGAAVGKPVSNTQQIGWKTTNVNNSYIFTPIPNEVINATITEKIAFKTLIDQKINQQNDNTNTNTNNNNGNNNNTDDLSYLSQQLNKATDNVGQLLSYIENNGNKDQDIDLLRLLSNQLLNKPAILTNLPELEKLFKDHNQDVIMIEYLTKAVKDQIELSARLTASAEADKAR

SEQ ID NO: 1472 - protein, 404 aa, Bordetella pertussis Tohama I
MAITDVLVPQLSESVSEATLLTWKKQAGAAVEADEILIEIETDKVVLEVPAPSSGVLSEIVMGDGSTVTSGEVIARIDTAAKAAAAPAAAAEAPAAAAAPAAAAPAAASSAASGVASPAAAKILAEKGVDAASVAGTGRDGRVTKGDALAAGNAPAAKAAAPVAPPTLSLDGRPEQRVPMSRLRARIAERLLQSQAENAILTTFNEVNMQAVMDLRARYKDKFEKEHGVKLGFMSFFVKAAVAALKKYPVLNASVDGKDIIYHGYFDIGIAVGTPRGLVVPILRNADQLTIAEIEKTIADFGKRAADGKLGIEEMTGGTFSISNGGVFGSMLSTPIINPPQAAILGIHATKERPVVENGQIVIRPINYLAMSYDHRIIDGREAVLGLVAMKEALEDPQRLLLDL

SEQ ID NO: 1473 - protein, 560 aa, Arabis gemmifera
MASSTALISDTEAWKDLKGHVEDIKKTHLRDLMTDANRCQSMMMEFDGLLLDYSRQRATVETVDKLLNLAKVAQLTEKISRMFNGEHINSTENRSVLHVALRAPKDAVIKADGKNVVPEVWNVLDKIKEFSEKIRSGSWVGATGKPLKDVIAIGIGGSFLGPLFVHTALQTDPEALESAKGRQLRFLANIDPVDVARNINGLNPETTLVVVVSKTFTTAETMLNARTLREWITAALGASAVAKHMVAVSTNLALVEKFGIDPNNAFAFWDWVGGRYSVCSAVGVLPLSLQYGFSVVEKFLKGASSIDQHFQSTPIEKNIPVLLGLLSVWNVSFLGYPARAILPYSQALEKFAPHIQQVSMESNGKGVSIDGLPLPFETGEIDFGEPGTNGQHSFYQLIHQGRVIPCDFIGIVKSQQPVYLKGEVVSNHDELMSNFFAQPDALAYGKTPEQLQKENVSENLIPHKTFSGNRPSLSLLLPELTAYNVGQLLAIYEHRVAVQGFVWGINSFDQWGVELGKVLATHVRKQLHSSRTQGTTLEGFNYSTTTLLKRYLETSSEPQM

SEQ ID NO: 1474 - protein, 475 aa, Bordetella pertussis Tohama I
MSKQFDVVVIGAGPGGYIAAIRAAQLGMSVACIDAWQNGQGGPAPGGTCTNVGCIPSKALLQSSEHYEQANHHFAEHGIEVKGVSLKLDTLIGRKNTVVKQNNDGILYLFKKNKVTYFHGKGAFAGQVDGGWSIKVTGTTDADLVAKHVIVATGSSARELPGLPFDEKNILSNDGALNIGAVPKKLGVIGAGVIGLEMGSVWRRLGAEVTILEAMPEFLAAADQQVAKEALKSFAKQGLDIQTGVKIGEIKAAAKSITVPYVDAKGAEQKLVVDKLIVSIGRVPYTGGLNAEAVGLKLDERGFVAVDEDCKTNLPNVWAVGDVVRGPMLAHKAEEEGVAVAERIAGQHGHVNFATVPWVIYTSPEIAWVGKTEQQLKAEGREYKAGSFPFMANGRARALGDTTGFAKVIADAKTDEVLGVHIIGPMASELISEAVTIMEFRGAAEDIARICHAHPTLSEAVKEAALAVDKRTLNF

SEQ ID NO: 1475 - protein, 371 aa, Candida albicans SC5314
MPIPASMKAIVFYAPYDVRTEERPTPKIKDPKDVIVKVRYSGLCGTDLHSYRGHIKGPVGTIIGHEFVGTVVATGDNITKFSIGDDVISNFSIECGECWYCKHGYSGQCNVTNTFGKVGLDGGQAEYVRVPYAETTLTKKPSTTNSNDDVDDSVYVLMADIFTTGYYGVKKIKDFLSISAAEGIKPQSFEETTILQLGAGPVGLCALRILKYFGFGKVVVVDNVPSRLEEAKRLGATEVINFETEPDGIKKYITEETDGVGFDAVLEVVGSAAAHKTSFDAVRRNGFISSIGMGHEPFPFNGLDVYLKNINMSFGRCHSWSLFPESLAIFEEMKGDLASFIDYKAKLEDSKEAFDMFDKHKVKKIVFDLTS

SEQ ID NO: 1476 - protein, 560 aa, Arabis gemmifera
MASSTALISDTEAWKDLKGHVEDIKKTHLRDLMTDANRCQSMMMEFDGLLLDYSRQRATVETVDKLLNLAKAAQLTEKISRMFNGEHINSTENRSVLHVALRAPKDAVIKADGKNVVPEVWNVLDKIKEFSEKIRSGSWVGATGKPLKDVIAIGIGGSFLGPLFVHTALQTDPEALESAKGRQLRFLANIDPVDVARNINGLNPETTLVVVVSKTFTTAETMLNARTLREWITAALGASAVAKHMVAVSTNLTLVEKFGIDPNNAFAFWDWVGGRYSVCSAVGVLPLSLQYGFSVVEKFLKGASSIDQHFQSTPIEKNIPVLLGLLSVWNVSFLGYPARAILPYSQALEKFAPHIQQVSMESNGKGVSIDGLPLPFETGEIDFGEPGTNGQHSFYQLIHQGRVIPCDFIGIVKSQQPVYLKGEVVSNHDELMSNFFAQPDALAYGKTPEQLQKENVSENLIPHKTFSGNRPSLSLLLPELTAYNVGQLLAIYEHRVAVQGFVWGINSFDQWGVELGKVLATHVRKQLHSSRTQGTTLEGFNYSTTTLLKRYLETSSEPQM

SEQ ID NO: 1477 - protein, 671 aa, GIBBERELLA ZEAE PH-1
MCGISAFITHPGHSRSPVLNGDAKQVVEELETSLDLIAHRGPDARGRWFSDNHHVGLGHVRLSIIDLSPSGNQPFHDEQGGIHAVVNGELYDYERYKAQLADEFKFVGNSDCEIVIALYKHYGLSFISHLRGEFAFVLWDENRQQLIAARDRYGIKSLYYTVHQNKLLVATEIKSFLAFGLEPEWCVRSLRDQSWRVDSTTFFEGVYKVRPGHYLICRPNEREEQHPYWDLEYPDKFAKDLRSEDEITEGVRERLLEAVRIRLKADVPVAVYLSGGIDSSSVAGMVSHLIKQGTKLGNETSLLPSSMKCYTVQFDEGSGADESAIARRTADFLGVDIHLVKMDEEALVSRFEDTTWYSEVPLPDLNGMGRLALAEAVHAQGIKAVITGEGSDEHFGGYDAFRADSLSEPDHSWPAMMTDTERQEAHALASKEAQYGIFGDFTPKVPISTKRMFYSNHVASSIARVGSLPFSDWTKVYGNSIPETTMIEGFDGRVRDNILKRWHPVHTAQYMFVKTFMPHFILRYNGDNIDMVHQVESRCPFLDHHLTEYVNNVPPSLKMRYNAKDKSWREKHILREAVKPFVTDEVYNMSKKAYMGPRKFWPGGPLHKKISELVTKANVENLGFVDWQATQDAMDGAFNKQEGLALRRIITVAQFVVLGQRFGVKRASGRR

SEQ ID NO: 1478 - protein, 560 aa, Arabis gemmifera
MASSTALISDTEAWKDLKGHVEDIKKTHLRDLMTDANRCQSMMMEFDGLLLDYSRQRATVETVDKLLNLAKAAQLTEKISRMFNGEHINSTENRSVLHVALRAPKDAVIKADGKNVVPEVWNVLDKIKEFSEKIRSGSWVGTTGKPLKDVIAIGIGGSFLGPLFVHTALQTDPEALESAKGRQLRFLANIDPVDVARNINGLNPETTLVVVVSKTFTTAETMLNARTLREWITAALGASAVAKHMVAVSTNLALVEKFGIDPNNAFAFWDWVGGRYSVCSAVGVLPLSLQYGFSVVEKFLKGASSIDQHFQSTPIEKNIPVLLGLLSVWNVSFLGYPARAILPYSQALEKFAPHIQQVSMESNGKGVSIDGLPLPFETGEIDFGEPGTNGQHSFYQLIHQGRVIPCDFIGIVKSQQPVYLKGEVVSNHDELMSNFFAQPDALAYGKTPEQLQKENVSENLIPHKTFSGNRPSLSLLLPELTAYNVGQLLAIYEHRVAVQGFVWGINSFDQWGVELGKVLATHVRKQLHSSRTQGTTLEGFNYSTTTLLKRYLETSSEPQM

SEQ ID NO: 1479 - protein, 475 aa, Listeria monocytogenes EGD-e
MAKEYDVVILGGGTGGYVAAIQAAKNGQKVAVVEKGKVGGTCLHRGCIPTKALLRSAEVLQTVKKASEFGISVEGTAGINFLQAQERKQAIVDQLEKGIHQLFKQGKIDLFVGTGTILGPSIFSPTAGTISVEFEDGSENEMLIPKNLIIATGSKPRTLSGLTIDEEHVLSSDGALNLETLPKSIIIVGGGVIGMEWASMMHDFGVEVTVLEYADRILPTEDKEVAKELARLYKKKKLNMHTSAEVQAASYKKTDTGVEIKAIIKGEEQTFTADKILVSVGRSANTENIGLQNTDIATENGFIQVNDFYQTKESHIYAIGDCIPTIQLAHVAMEEGTIAANYIAGKAAEKLDYDLVPRCIYTSTEIASVGITEEQAKERGHEVKKGKFFFRGIGKALVYGESDGFIKIIADKKTDDILGVSMIGPHVTDMISEAALAQVLNATPWEVGNTIHPHPTLSESFREAALAVDGNAIHG

SEQ ID NO: 1480 - protein, 409 aa, Glycine max
MAAAPAATFAIGTTGSLGQRGSSLPQSKSFGLKFNSLNHLKSFCGLKAMSSVRCESESSFFGNKTGAALRASFASKAQKENNHNSQPQASYKVAVLGAAGGIGQPLSLLIKMSPLVSNLHLYDIANVKGVAADISHCNTPSQVRDFTGASELPNCLKDVNVVVIPAGVPRKPGMTRDDLFNINAGIVRDLVSAVADYCPDAFVQIISNPVNSTVPIAAEVLKQKGVYDPKKLFGVTTLDVVRANTFVAQRKNLKLIDVDVPVVGGHAGITILPLLSKTRPSASFTDEEIDELTVRIQNAGTEVVEAKAGTGSATLSMAYAAARFVESSLRALDGDGDVYECSFVESNLTDLPFFASRVKLGRTGVEALIPSDLQGLTDYEQKALEALKPELKASIEKGIAFAQKQTVAA

SEQ ID NO: 1481 - protein, 416 aa, Listeria monocytogenes EGD-e
MAVEKITMPKLGESVTEGTISSWLVKPGDTVEKYDAIAEVLTDKVTAEIPSSFSGTIKEILAEEDETLEVGEVICTIETEEASSSEPVVEAEQTEPKTPEKQETKQVKLAEAPASGRFSPAVLRIAGENNIDLSTVEGTGKGGRITRKDLLQVIENGPVAPKREEVKSAPQEKEATPNPVRSAAGDREIPINGVRKAIAKHMSVSKQEIPHAWMMVEVDATGLVRYRNTVKDSFKKEEGYSLTYFAFFIKAVAQALKEFPQLNSTWAGDKIIEHANINISIAIAAGDLLYVPVIKNADEKSIKGIAREISELAGKARNGKLSQADMEGGTFTVNSTGSFGSVQSMGIINHPQAAILQVESIVKRPVIIDDMIAVRDMVNLCLSIDHRILDGLLAGKFLQAIKAKVEKISKENTALY

SEQ ID NO: 1482 - protein, 383 aa, Nicotiana sylvestris
RGSPESLRDIRGFAVKFYTREGNFDLVGNNVPVFFNRDAKSFPDTIRALKPNPKSHIQEYWRILDFFSFLPESLHTFAWFFDDVCLPTDYRHMEGYGVHAYQLINKAGKAHYVKFHWKPTCGVKCMSEEEAIRVGGTNHSHATKDLYDSIAAGNYPEWKLFIQIMDTEDVDKFDFDPLDVTKTWPEDILPLMPVGRLVLNRNIDNFFAENEQLAFNPGHIVPGLYYSEDKLLQTRIFAYADTQRHRIGPNYMQLPVNAPKCAHHNNHRDGAMNFMHRDEEVDYLPSRFDPCRHAEQYPIPSRVLTGRREMCVIEKENNFKQAGERYRSWEPDRQDRYVSKWVEHLSDPRVTYEIRSIWISYLSQADKSCGQKVASRLTLKPTM

SEQ ID NO: 1483 - protein, 469 aa, Bacillus cereus ATCC 14579
MKPPADNNKEGAESHKLESESKPIWKSMSMFLVPLLLSNVLQSVGQLFGMVVVGRWLGVNDLAAISAFFPLFFLLVSFVIGIGSGSSILIGQAFGAKNEDRLKAIVGTTLTFTFIIGVLLAIIGSIFAMDIMRLMGTPENIIEISVHYARILFISMPVLFLYFAYTTFMRGTGDSKTPFYFLIVSTALNMILLPILIFGWLGAPKLDVYGAAYASVISTVITFIVMLVYLKKKNHPLQLDGTVRKYLRMDGELLKLLLRLGIPASINMILVSLSEIAVIAFVNRYGSDATAAYGVVNQVASYVQMPAVSLGITVSIFAAQSIGANQFDRLQKVVKAGIIMNYVIGGVLISLIYVFSRDILSLFLTSQTTIEIAHSLVMITLWSYLIFGHAQIISATMRASGTVLWPTVIGVVSIWLVEVPVAYYLSYHTSLGIEGIWIGYPAAFIVSLILQYAYYKLSWQKKRITRLVS

SEQ ID NO: 1484 - protein, 477 aa, Arabidopsis thaliana
MQRFAAKRSVQNISVSLWRRCISSTSQAATASVKDSDEFQARLPPFAYTPPPYTGPSADVILSKRKEFLSPSMFCLYRKPLNIVDGKMQYLFDESGRRYLDAFAGIAVVNCGHCHPDVVEPVINQIKRLQHPTVLYLNHAIADFSEALASKLPGDLKVVFFTNSGTEANELALMMAKLYTGCQDIVAVRNGYHGNAAATMGATGQSMWKFNVVQNSVHHALNPDPYRGVFGSDGEKYAKDLQDLIQYGTTGHIAGFICEAIQGVGGIVELAPGYLSAAYDTVKKAGGLFIADEVQSGFARTGNFWGFEAHNVVPDIVTMAKGIGNGFPLGAVVTTPEIAGVLTRRSYFNTFGGNSVSTTAGLAVLNVIEKEKLQENAAMVGSYLKEKLTQLKEKHEIIGDVRGRGLMLGVELVSDRKLKTPATAETLHIMDQMKELGVLIGKGGYFGNVFRITPPLCFTKGDADFLVEAMDYSMSKM

SEQ ID NO: 1485 - protein, 428 aa, Lactobacillus johnsonii NCC 533
MKVQRPKGTVDILPGESGSWEKVESIARNFFKRANYREIRTPSFENYEVFSRSSGETSDVVSKEMYDFNDKGGRHIALRPEGTAGVVRAYVENKLYGPDVVKPFSVYYIDNTFRYERPQAGRQREFHQIGVESFGSDSPLADVETLMMAHDLLAELGVKNYELHINSLGNAQVREAYHDALVNYFTPVKDQLSEDSQRRLSQNPLRILDSKDERDKKFLPNAPKIVDYLDDESRENFKTITDMLEQLGINYVMDDDLVRGLDYYTGIIFEFMVEDKNLWESATTILGGGRYNHLVEEFDGPETPAVGFGIGEERLMLVLKEQNPDLFQEEGIDFFITNIGAGTEFKAVEVARSLREQGFSAQYDVDQKKLKQQFRKADRVHATFVITLGAKELENGVLNIKRLSDGKTIDLSLEDINNMQDVINKLED

SEQ ID NO: 1486 - protein, 418 aa, Geobacter sulfurreducens PCA
MATDITMPKLSDTMTEGRLVAWKKGVGDRVERGDIIAEVETDKATMELEAFASGVLAEQRVKPGELVNVGTVIGVIGGADEVKPTEKAAAAPPELADWQPPPEAPANGAEPEIPERVLELPEASAPPAPLPPGDDTKASPAVRRLAREKGIDLHQVRGSGPEGRILMEDLDQVAANEEPPAAQAGQVSAGESPAPPEAEPMTRMRGAIARITAEAWRTIPHFYETVEIDMKEAGEIVRELKGSGNAVTYNDLVLKAAALALVQFPRMNASFRDGGVVAHREVNIGFAVAMEEGLQVPVVKGCQSLALKEIALQTVRLAERARSGAITQEEISGGTFSVSNLGMYGIDEFAAVIMPPQAAILAVGAVADRPVVRDGQLAVARTMRATLSCDHRVVDGAYAAQFLGELRRVLENPVLMLV

SEQ ID NO: 1487 - protein, 265 aa, Glycine max
MEREKKRRLVLVHGACHGAWCWYKVAALLKSNGHQVTALDMAASGIHPKQVHDLNSISEYFEPLMYFLGSLPTEERVILVGHSFGGACISVAMEMFPTKIAAAVFVAAWMPSPDLSFSTLLQEFQYSRIMESDLHSKIMFDENTSNHRNGSRMFGPQFLASKLYQLSPPEDLTLAMSLLRPTRIYGDVELLRENTRLTKDNYGTVAKAYIVCEQDNVLRKDFQLSMIERNPPNEVKVIVGADHMPMFSKPQELFSYLQEIANTYY

SEQ ID NO: 1488 - protein, 351 aa, Streptococcus agalactiae 2603V/R
MRAATYLSANELSLTDKAKPQVIKPTDAVVRLVKTTICGTDLHILGGDVPACKPGTTLGHEGIGIVEEVGSAVNHFKVGDKVIISCVTACNTCYYCKHQLPSHCEDGGWILGHLIEGTQAEYVHIPHADGSLYHAPEGVCDDALVMLSDILPTSYEIGVLPSHIKPGDTVCIVGAGPIGLSALLTAQFYSPAKIIMVDLSQKRLEASKKFGATHTILSTSTQEVKEEIDKITKGRGVDVVLECVGYPATFDICQNVVSIGGHIANVGVHGKPVEFNLQDLWIKNITLNTGLVNANTTEMLLEVLETGKIDATQLVTHHFKLSEIEEAYKVFKAAEENNTLKVIIENDITPA

SEQ ID NO: 1489 - protein, 179 aa, Glycine max
  unsure (1)..(179): unsure at all Xaa locations
MASSMISSPAVTTVNRAGAGMVAPFTGLKSMAGFPTRKTNNDITSIASNGGRVQCMQVWPPVGKKKFETLSYLPDLDDAQLAKEVEYLLKKGWIPCLEFELKHSFIYHKHNKSPEYYDRHYXPYXKLPIFNYTNTSQVLKELQEAKTTYPNHFIHIIKFNNXVRQVQYIIFITYKPPSF

SEQ ID NO: 1490 - protein, 314 aa, ASPERGILLUS NIDULANS FGSC A4
MASSSDLTLAFIGCGNMGSAILSGILDASKVVSSPFSRILACTKTQSSAEKLDARFRDHGSPLTASFFADKNTAAAEEADVIILGCKPYLVDAMLAEEELADALAGKLVISIIAGKTIDVLSEGISQNQTENSPSKKAVIVRAIPNVAASVRESMTVIELPTPSPSNDQKDLITWIFSQIGQTSFLSSDLFDCGTMLMASIATVSVAVDGILDGCVAEGMKRADASEMTAQCLLGLAKLLREGYHPAVLRESISSPRGCTIQGLLAVERGGVRTGTVQEPRARHKMLDLGIGKTRGFTVRGGRIKKRGAVIDPS

SEQ ID NO: 1491 - protein, 213 aa, Azorhizobium caulinodans
MKGIILAGGSGTRLHPITLVVSKQLLPVYDKPMIYYPLCTLMMAGIRDILIITTPHDSELFQKLLKDGSQFGLNISYAVQPSPRGLADAFIVGREFVGNDRVALVLGDNLFFGHGLPELLKTAQARETGATVFGYPVTDPERYGVVEMDETGKVLSLEEKPLKPKSNLAVTGLYFYDNRVVDIAANLAPSPRGEIEITDVNKAYLDLGELEFT

SEQ ID NO: 1492 - protein, 188 aa, Methanopyrus kandleri AV19
MKVLFATGNIGKYHEAKQILARYGIEVERVDLDYPELQSDSLEEIAAYGARYCAESLGQPVIVEDSGLFIEALNGFPGPYSAYVFDTIGNEGILKLLEGEENRKAEFISVVGYCEPGGRPVTFTGEIRGRIAEEPRGEEGFGYDPIFIPEGEDSTFAELGVEEKCKISHRTKALERFAEWYKNNVAGR

SEQ ID NO: 1493 - protein, 1233 aa, Stigmatella aurantiaca
MRAGAGGHPLLGVSFTTSVQKENRFWESALSAKEPSYLADHRVGGAVVVPGAAYLEMALSAARELSGEKAYELVDTSFKEGLLLPEGQERVVQMALSGEGGDALSFQLSSQKASTEPNAPAGWMAHVVGQIRPIEGGPSTQTPESFEAIRERCSEVIAQAAHYEELASRGVAYGPAFQGVQQIWRGRAEALGHVRLPEPLAARASAYRIHPALLDACFQLVAAAVPQEDLTPDAGPAVPVALAHLRLHEQPGTEVFCHVRLRPSEGARRGVYEFDLVLRDASGRILVEALGLRVQQLDAPAAEHAGKDLFFALEWRHASAVQQVPAEGPGASGRWLLIADGSELADTVESQLRERHGEVIRVDLAGAGQGRRVVDATSPQAFDGVLSEAFGAGSAPRGVIHLTGLEPREVDPIMGCGGVLHLVQALSRVSLASPPRLWLVTRGVHHGSGSRSASDVVQASLWGLGRTLAHEHSELKCTRVDVSAAMGTGDAGAALMRELLVADDEEEISLRADGRHVGRIVRGSPGRAPSEAVVPAGGRPFHLERDAQGRLEFRAGARRPPGPGELEIEVEVAALGGPGEGTGPERWEGAGEGIGCSGRVVAIGEGVKNVAVGEERIALVASGLGSHVSVPAGCTAIRPSSSSHGEAAALAATVLPAWYALFHLGRLEKRGRVWVLGATSGLGRAAIKLAKRAGAEVFAVATTDEQRASLRELGADQVMDPSDASFVSRVLDATGGRGVELAIVAPGAVELERSLPTLSEGARVLDLRASGASARTGDANVAWCVVDVQDFARRRPERFASLWQEVKAAFEAGGLPSAAADAKALALKDPKARVVVPAADARRLRADGTYLVTGGLGGLGLAVAKWMVEQGAGHLVLVGRDTVLSPEQQEVVTALEAAGARVRVARADVSDRAQIARILSEIAEGGAPLRGVIHAAGVLDDGVLLQQTVERFRRVMAPKVLGGWNLHVLTREAPLDFFVLYSSAASMFGAPGQGNYVAGNAFLDALAHHRRALGLPGLSINWGPFSEVGLAAAQANRGERLAQRGSDSLTPAEGNTILGRLLDGDVTQMAVMPLELRKWVEFYPRAKSSPWLSELVPADAGQEVGEARDVALLETLRTATPQEAKAALEQFVREQLARVLRLDSARIDPEAPLQSFGLDSLMGLELRNRLVSGLGVSLPASLIWKHPTLAALCAHLLGEVMDRTLAETLAQAAAGAGPAVDESAADDKEVFVL

SEQ ID NO: 1494 - protein, 187 aa, Thermoplasma acidophilum
MVKVEDAIVARLESHGYHFEILVDPDAIERIRKGNIDIENDLAFPEVYKDVRKGEKASDDSLKEAFKTTVIAQVAIEIVKKGQIQLTTEQRREMYDERRKQIVNLIAREGINPQTNTPHTPYRISQAMDEAKVKIDPLKPAEDQVQNVLKAIMPIIPIRLEKAKIAVKLIGDAYGKLYGELAKSGYM

SEQ ID NO: 1495 - protein, 439 aa, Triticum aestivum
  unsure (1)..(439): unsure at all Xaa locations
MANNGSSSRRGDDGVGVGATPSRWRFFRPTAGTPLAAAGSMSIRSVLNRLNSSVDASGTRPVVPLGHGDPTSSACFRTAPEAEDAVVDALRSRKHNGYSPTVGVPQARSAIAGXCLENLPYELSPDDIYLTSGCVQAIEIMISVLAHPGANILLPSPXFPMYESRTTFSELEVRYFDLVPERGWEADLESVKAIADENTVAMLIINPSNPCGSVYSHDHLAQIAETAGELGILIIADEVYDHLAFGIKPFIPMGVVGKTVPVITLGAISKRWLVPGWRLGWIATCDPNGILKETKIDQSIQNYINITSDPATFIQGAVPXQIIANTKEEYFNKILDLLRNSADLCYGKIKDIRGITCPHKPEGSMFVMAKLDLSCLDGFSDDIDFCCRLAKEESVIVLPGTALGMKDWVRITFAIDLPSLEDGLERLKSFCERHARVEA

SEQ ID NO: 1496 - protein, 491 aa, Saccharomyces cerevisiae
MKLSTKLCWCGIKGRLRPQKQQQLHNTNLQMTELKKQKTAEQKTRPQNVGIKGIQIYIPTQCVNQSELEKFDGVSQGKYTIGLGQTNMSFVNDREDIYSMSLTVLSKLIKSYNIDTNKIGRLEVGTETLIDKSKSVKSVLMQLFGENTDVEGIDTLNACYGGTNALFNSLNWIESNAWDGRDAIVVCGDIAIYDKGAARPTGGAGTVAMWIGPDAPIVFDSVRASYMEHAYDFYKPDFTSEYPYVDGHFSLTCYVKALDQVYKSYSKKAISKGLVSDPAGSDALNVLKYFDYNVFHVPTCKLVTKSYGRLLYNDFRANPQLFPEVDAELATRDYDESLTDKNIEKTFVNVAKPFHKERVAQSLIVPTNTGNMYTASVYAAFASLLNYVGSDDLQGKRVGLFSYGSGLAASLYSCKIVGDVQHIIKELDITNKLAKRITETPKDYEAAIELRENAHLKKNFKPQGSIEHLQSGVYYLTNIDDKFRRSYDVKK

SEQ ID NO: 1497 - protein, 298 aa, Mycobacterium avium subsp. paratuberculosis str. k10
MSAMLSGMARIAIIGGGSIGEALLSGLLRAGRQVKDLVVVERVPERAKYLADTYSVLITSVADAVENASFVVVAVKPADVESVMSEIARAAGQAESDTAEQVFVTVAAGVTIGYFESRLPAGTPVVRAMPNAAVLVGAGVTALAKGRFVTAPQLEGVSALFDSVGGVLSVPESQMDAVTALSGSGPAYFFLLVEALVDAGVAAGLSREVAADLTAQTMAGSAAMLLERMDADRRLGEAETPGLRVDATATQLRATVTSPGGTTAAGLRELERGGLRAAVDAAVQAAKMRSEQLRITSE

SEQ ID NO: 1498 - protein, 159 aa, Exiguobacterium sp. 255-15
MLQEQTFQRIDGTEATLKDYPGQAWLIVNTASKCGLTPQFEGLEQLHQDYRKQGLVVLGFPCNQFAGQDPGTDEEIQSFCQMNYGVTFPVFSKIEVNGKGTHPLFAELKALAPNTTGEQDVEWNFTKFLVTRDGEVTRFAPKTNPTDLVAAIERIVVPV

SEQ ID NO: 1499 - protein, 711 aa, Corynebacterium glutamicum ATCC 13032
MLTMNKPGGIDCPGCAWPEPSTANLGVVEFCENGAKAVAEETTPDRAGKEFWAEHSIYDLREKTDHWLGKRGRITEPMFYDRSSGDDHYRPISWDRAFAIIASKLREIEPDEAVFYTSGRAPNEPAYMLQLLARRLGTNNLPDCGNMCHESTGTALGETLGLGKGSVVMEDFYNTDLLISVGQNPGTNHPRALTAFKELKENGGKILALNPMPETGLMKFREPQSVKGALSISDKLADEYLQIRLDGDRAFFQALNKELIRRDALDHAFLDKFCSGVDETIEHLKSLDDEVLLKGCGLTAAEINKAADMVEKSDTVVVSWTLGVTQHKNAVYTIREMVNFLLLTGNIGKPGAGTAPLRGHSNVQGDRTMGIWEKMPEAFLAALENEFGFDVPRKHGFDTVNSLRAMREGKTKFFLSLGGNLVRVSSDTSVVEKGMESNELTVHLSTKPNGSQAWPGEQSLILPVIARTDKDVQKSGVQRVTVEDSAGAVHASTGKRTANKDLNLKSECDIIGTIGKQTFGDAFWQPMIDNYDVVRDHIEATIPGFHDFNRRIDNPGGFLLPNGPRERIFNTSNGKAQLTVNETNVIELPKDYLLMNTVRSHDQYNSTIYGLDDRYRGVRNGRRVVFVNPQDCKQRGLKDGDIVDIVSVFDDGERRAPNFRVVEYDTARDCVTTYFPEANVLVPLDSVAEKSNTPVSKSVVVRLEATGRTAS

SEQ ID NO: 1500 - protein, 400 aa, Pseudomonas putida KT2440
MRAVSYHGANDVRVDSVPDPILQDADDIILRVTATAICGSDLHLYRGKIPETEQGDIFGHEFMGIVEEVGRDVTTLQVGDRVVIPFVIACGSCFFCQQDLFAACETTNTGRGSIINKKGIPPGAALFGYSHLYGGIPGGQADYVRVPKGNVGPFKVPTTLADDKVLFLSDILPTAWQAVINAEIGEGSSVAIYGAGPVGLLSAACARMLGAHTVFMVDDNDYRLAYAQEAYGVIPINFEKDDDPADSIIRQTPGMRGVDAVIDAVGFEAKGSTTETVMTALKLEGSSGKALRQSIAAVRRGGVVSVPGVYAGFIHGFMFGDAFDKGLTFKMGQTHVQKYLPELLEHIEAGRLQPELIVTHRLALEEAAMGYKMFDQKQDNCRKVILVPGAAPGTLGPDHL

SEQ ID NO: 1501 - protein, 279 aa, Listeria monocytogenes EGD-e
MAKIGFIGFGSMASLIATKIIETEVATPEEIILYSNSKNEHFNQFYTKYPTAELADNEAEIFTKADHSFVCKLPLAVLPLMKDCAAVLTPDRHVVSIAAGVSTSDIIEITPGLQVSKLIPSLTTAVNVGTTLIAHAETVNQTNTSWLETTFEHFGHVMTIREENMDIASDLTSSSPGIIAAIFEQFVEAALRRSSLSDAEVFQMINFALAGTSKLLVEEDYTFSGLIQRVATKDGTTAEGVELSKAQLPNFFDELLDRTQNKYASSEKEIQAQKRELLS

SEQ ID NO: 1502 - protein, 312 aa, Escherichia coli
MKVAVLGAAGGIGGALALLLKTQLPSGSELSLYDIAPVTPGVAVDLSHIPTAVKIKGFSGEDATPALEGADVVLISAGVARKPGMDRSDLFNVNAGIVKNLVQQVAKTCPKACIGIITNPVNTTVAIAAEVLKKAGVYDKNKLFGVTTLDIIRSNTFVAELKGKQPGEVEVPVIGGHSGVTILPLLSQVPGVSFTEQEVADLTKRIQNAGTEVVEAKAGGGSATLSMGQAAARFGLSLVRALQGEQGVVECAYVEGDGQYARFFSQPLLLGKNGVEERKSIGTLSAFEQNALEGMLDTLKKDIALGEEFVNK

SEQ ID NO: 1503 - protein, 178 aa, Lactobacillus johnsonii NCC 533
MNNDIESVLYTQNDLNNRMDEMAAELNKKYKNEEPIIVPVLNGAMIFASDMIKRLSFKLTIDPIKASSYEGSHSTGKVKITQDIKSDVKNRPVIFMEDIIDTGRTLQALSEIMKERGAKSVEVVSMLDKPETRVVDFHVDYYGFKAPDEFLVGYGLDYNGLYRNLPYVGILKHEVYAS

SEQ ID NO: 1504 - protein, 785 aa, Escherichia coli O157:H7
MASSALTLPFSRIAHAVDSAIPTKSGEKVIWSACTVNCGSRCPLRMHVVDGEIKYVETDNTGDDNYDGLHQVRACLRGRSMRRRVYNPDRLKYPMKRVGARGEGKFERISWEEAYDIIATNMQRLIKEYGNESIYLNYGTGTLGGTMTRSWPPGNTLVARLMNCCGGYLNHYGDYSSAQIAEGLNYTYGGWADGNSPSDIENSKLVVLFGNNPGETRMSGGGVTYYLEQARQKSNARMIIIDPRYTDTGAGREDEWIPIRPGTDAALVNGLAYVMITENLVDQAFLDKYCVGYDEKTLPASAPKNGHYKAYILGEGPDGVAKTPEWASQITGVPADKIIKLAREIGSTKPAFISQGWGPQRHANGEIATRAISMLAILTGNVGINGGNSGAREGSYSLPFVRMPTLENPIQTSISMFMWTDAIERGPEMTALRDGVRGKDKLDVPIKMIWNYAGNCLINQHSEINRTHEILQDDKKCELIVVIDCHMTSSAKYADILLPDCTASEQMDFALDASCGNMSYVIFNDQVIKPRFECKTIYEMTSELAKRLGVEQQFTEGRTQEEWMRHLYAQSREAIPELPTFEEFRKQGIFKKRDPQGHHVAYKAFREDPQANPLTTPSGKIEIYSQALADIAATWELPEGDVIDPLPIYTPGFESYQDPLNKQYPLQLTGFHYKSRVHSTYGNVDVLKAACRQEMWINPLDAQKRGIHNGDKVRIFNDRGEVHIEAKVTPRMMPGVVALGEGAWYDPDAKRVDKGGCINVLTTQRPSPLAKGNPSHTNLVQVEKV

SEQ ID NO: 1505 - protein, 559 aa, Zea mays
MGSSGFSWTLPDHPKLPKGKPVAVVVLDGWGEANPDQYNCIHVAQTPVMDSLKNGAPEKWRLVKAHGTAVGLPSDDDMGNSEVGHNALGAGRIFAQGAKLVDQALASGKIYDGDGFNYIKESFESGTLHLIGLLSDGGVHSRLDQLQLLLKGVSERGAKKIRVHILTDGRDVLDGSSIGFVETLENDLLELRAKGVDAQIASGGGRMYVTMDRYENDWDVVKRGWDAQVLGEAPYKFKSALEAVKTLRAQPKANDQYLPPFVIVDDSGNAVGPVLDGDAVVTINFRADRMVMLAKALEYADFDNFDRVRVPKIRYAGMLQYDGELKLPSRYLVSPPEIDRTSGEYLVKNGIRTFACSETVKFGHVTFFWNGNRSGYFDATKEEYVEVPSDSGITFNVAPNMKALEIAEKARDALLSGKFDQVRVNLPNGDMVGHTGDIEATVVACKAADEAVKIILDAVEQVGGIYLVTADHGNAEDMVKRNKSGKPLLDKNDRIQILTSHTLQPVPVAIGGPGLHPGVKFRNDIQTPGLANVAATVMNLHGFEAPADYEQTLIEVADN

SEQ ID NO: 1506 - protein, 472 aa, Geobacter sulfurreducens PCA
MAEQTFDLIVIGAGPGGYVAAIRAAQLGMTVAVAEQRETLGGVCLNEGCIPSKALLDSSEFFAQARDGFAGHGILIDPPRLDLARMMARKDDVVKKLTDGIAYLFKKNRITWLKGTARLAGRNGDLLRVEVGGNGTAPAHLLEAGKVLLATGSEAVPVPGLAFDGETVVSAREALAFDRVPEHLLVVGAGYIGLELGSVWRRLGSQVTVVEVLAKPLPATDGQVADALVRSLKKQGISFRMETRVTGIEKREGTAVVTVESSAGGRDAIACDRVLVAAGRRPVMAGLGLEPFNLAMEGGRIRVDDNYLTSAPGIYAIGDLIHGPMLAHKAMAEGEVFAERLTGEASVVDYEYIPGIVYTWPEAAGVGLTEEQLKEQGIPYAAGRFNFMANGRARCMGETEGFVKILAKPDTGRVLGIHVVGPRASDLIAEAVTVMTYGGSAADIAMTFHAHPTLAEAMKEAALDVEKRAIHA

SEQ ID NO: 1507 - protein, 567 aa, Oryza sativa
MASSHIILPPDDDDEEQRRLEEEEDEDPWARSGPPPAAPEHAMKAALPFSATCVRISRDSYPNLRALRNASSVSLADAAYVKISEGDFGYVLDDVPHLVDHLPDAPTYPNPLQDHPAYSTVKQYFVNEDDTVPQKVVVQKNSRRGVHFRRAGPRQKVYFESDEVKACIVTCGGLCPGLNTVIRELVCGLAHMYNVSKIYGIQNGYKGWSSSNYLTLTPKSVDDIHKRGGTVLGTSRGGHDTKKIVDNIQDRGINQVYIIGGDGTQKGAYEIFKEIRKRGLKVSVAGIPKTIDNDIAIIDKSFGFDTAVEEAQRAIDSAHVEACSAENGIGLVKLMGRYSGFIAMYATLASRDVDCCLIPESPFYMDGEGGLLQYVERRLKENKHMVIVVAEGAGQDLIAKSLSTSEQQDASGNKLLLDIGLWLTHKIKDHFKSKKMEMTIKYIDPTYMIRAIPSNASDNVYCTLLAHSAIHGAMAGYSFTVGNVNGRHAYIPFYRVTSTRNKVKITDRMWARLLSSTNQPSFLSQKDIDEAKENDRTANKPPLPTGLSHHVANSFDQSASSSSNSQI

SEQ ID NO: 1508 - protein, 229 aa, Streptococcus agalactiae 2603V/R
MLTKPIIGITGNEREMSDIPGYYYDSVSRHISEGVKNAGGLPVILPISEAESAKAYVEMIDKLIISGGQNVLPSYYGEEKIIESDDYSLARDIFEFALVEEALKQNKPIFAICRGMQLVNVALGGTLNQSIDNHYQEPYIGFAHYLNVEKGSFLEGFISGDFKINSLHRQSVKLLAEGLIVSARDPRDGTVEAYESRTEQCIIGVQWHPELMLHQIENQTLFGYFVNET

SEQ ID NO: 1509 - protein, 409 aa, Geobacter sulfurreducens PCA
MEIKIPSVGESVFEALVATWLRQDGDAVRKDEPVCEIETDKITMELNAEADGVLSIAVPAGTTVKIGTVIGTIREGAAAPVAESPAPAQAAAAAPAAEPPLSPSVRKMARERGISPEAVPGTGRGGRVTVDDLFSFAEKREQGASPAGAPPPAAPQPPAQQPRPAAEQPRQAEPPEADRTTRTPMTPIRKRIAERLMAARQQTAMLTTFNEADLGRIVELRARHKEQFAKRHGVSLGFMSFFVKACVEALKAFPLVNARIDGNDIVRHHYYNIGIAIGADKGLVVPVLRDADRLHFWEIEQAIAAFVEKIKTNRLELSDLEGGTFSITNGGVYGSLLSTPILNPPQSGVLGMHAIQDRPVARDGQVVIRPMMYLALSYDHRIIDGREAVGFLRTVKEYVEDPEELFLEG

SEQ ID NO: 1510 - protein, 1163 aa, GIBBERELLA ZEAE PH-1
MSAKVYVGNLGWNTTDDSLRNAFQDYGQILDSIVMRDRDTGRSRGFGFVTFGSSQEAETAIISLNEQELDGRRIKVNLANARPGGGGGGGGYSGGGGYMGGGGYNGGGGYNGAMMNSHMLLIDTYILSIIDFQVICSYMEDILYTHKLRLPYIESHLISRLPPKYCLNVTQENPLVTSVEYSTKANTCSYPMKLYPAIEKLTLNDIESVKSAIMNGLDPNTLWTEEVLVLPVPKSGCVMWSQPFDFDTWPHWNTPLHRAIKFSDFETAAFLLQHGANVDLYNAVGKTPLHEAVWNRKYDAIRFLLGHNAEMNNFTLGACIRYEGENQDIHGIGGQLNIQKALSSSDLTSVQLLVHAGADLCPPSQHPWTTLDLALLYGDRTIVELLRKLGHKLPTTGPTSSRDVYQDSSRDLLRFSRDGNIVPSKDLYEVYCFVLGKVDQVAIIDADILIKRFFEALHETANDTDGNKHIIICTSCQNFQSEARVIFEVENYFTFDFDENREHLGFTFDLHPSRRQLIDSASNGCAICAIIADALDDHERNPRTAFQPFDTEFGPESDSVKLQPARYWSLNCIKVSCSELGTEIPLFDVYDSLTSSFEDGHQMDNSTGSSSAMIMAKNWIRICQENHTECQELEKKRHRKSILPRRLIRVGTSEIQPRIVHVQDTVPYCALSYCWGSKDFFTTTRDNLVQNMRGISMESFPAIMRDAISVVRSLEFEYIWIDALCIVQDDERDWAHEAGIMGDIYSNAELTISTLVSSDCHTGLFQPRSVRISHPVPLGIWQPKTKRKANASSALTPQWLERDVKTSGPVHSRGWTLQEQLLSKRILYFGHEMLHFECLHDYVVEANPGGEYRRSANQHDQELQIRRHTKKALQGARTRESVSSETGCDRQPFELWKQQVKDFTQRNLTRASDRPPAFDAISKSLATAIGCKPLCGIWDGGKLFESLCWQTGNCADAPLNLPNIPSWTWLARTGAISFALASRDGREEVQTSSGATVVSINSEATGLSITLRGTLHRKQRIDDTLLEHWKKLESDKRYNPSVYLDYNMGDDRDVYTFDTLRFPQGHPHKGYGYPVCPNGRNPETLGLLLQKVDNKLNTFQRIGIAKIPPRYEGYEGYEGFKTIPELDPHDGIIPAPCISHEITQIKWLSTDEETFTDQQFTLV

SEQ ID NO: 1511 - protein, 578 aa, Arabidopsis thaliana
MCGILAVLGCVDNSQAKRSRIIELSRRLRHRGPDWSGLHCYEDCYLAHERLAIVDPTSGDQPLYNEDKTIAVTVNGEIYNHKALRENLKSHQFRTGSDCEVIAHLYEEHGEEFVDMLDGMFAFVLLDTRDKSFIAARDAIGITPLYIGWGLDGSVWFASEMKALSDDCEQFMCFPPGHIYSSKQGGLRRWYNPPWFSEVVPSTPYDPLVVRNTFEKAVIKRLMTDVPFGVLLSGGLDSSLVASVALRHLEKSEAACQWGSKLHTFCIGLKGSPDLKAGREVADYLGTRHHELHFTVQDGIDAIEEVIYHVETYDVTTIRASTPMFLMSRKIKSLGVKMVLSGEGSDEIFGGYLYFHKAPNKKEFHEETCRKIKALHQYDCLRANKSTSAWGVEARVPFLDKEFINVAMSIDPEWKMIRPDLGRIEKWVLRNAFDDEKNPYLPKHILYRQKEQFSDGVGYSWIDGLKDHANKHVSETMLMNASFVFPDNTPLTKEAYYYRTIFEKFFPKSAARATVPGGPSVACSTAKAVEWDAAWSQNLDPSGRAALGVHVSAYGEDKTEDSRPEKLQKLAEKTPAIV

SEQ ID NO: 1512 - protein, 388 aa, Synechocystis sp. WH 8501
MKAMILAAGKGTRVRPITHTIPKPLIPILQKPVMEFLLELLRKHGFDEIMVNVSHLAEEIEGYFRDGQRFGVQIGYSFEGKIVDGDLVGEALGSAGGLRRIQDFNPFFDDTFIVLCGDALIDLDLTAAVKYHRDKGAIATIITKSVPKESVSSYGVVVSDEEGRIKTFQEKPSVEEALSTNINTGIYIFEPEIMNYIPPNQKYDIGGELFPMLVEKGAPFYAVNMDFEWVDIGKVPDYWHAVRGVLSREIKNVQIPGIEVKPGIYTGLNVSVNWDKVNIQGPVYIGAMTHIEDGATIIGPSMIGPNCWVCSGATVDNSVIFEYSRLGPGVRLLDKLVFGRYCVDKTGAAIDVQAAALDWLITDSRQTFPDDTQIPQQAIAELLNQDNG

SEQ ID NO: 1513 - protein, 424 aa, Sorghum bicolor
KLEALDCGKPYDEAVWDMDDVAGALSTLRDSAEALDKRQNSPVSLPMETFKCHSGESLLGVVGLITPWNYPLLMATWKVAPALAAGCTADVKPSELASVTCLELADICKEVGLSSGVLNIVTGLGPDAVLLCQGSPDVDKVSILLGRFETGKKIMARAAPMVKPVTLELGGKSPIVVFDDVDIDKAVEWTLFGCFWTNGQIAAHISSSYPYKIAKEFNERMVAWAKNIKVSDPLEEGCRLGPVVSEGQYEKIKKFISNAKSEGATILTGGLRTAHLEKGFFIEPTIITDITTSMEILEGGVLVSLCVKISTEDEAIELANHTQYGLAGAVLSGDRERCQRLSEEIDAGCIWVNCSQPCFCQAPWGGNKRSDFGRELGEGGIDNYLSVKQVTEYISDEKWGWYQSPLQAVNEKMARKLVCFIRIK

SEQ ID NO: 1514 - protein, 494 aa, Sorghum bicolor
MAAADVPRPSFIGGDWREPCLPVCQPSTEATIGDIPAGTAEDVEMPVARGRVSDGGALVACLWGRASQLSHTIAAKIKDRKSESLALLETLDSGKPLDEASADMDDVAACFEYYADLAEALDGKQRSPISLPMENFKSYVLKEPLGVVGLITPWNYPLLMATWKVAPALAAGCTAVLKPSELASVSCLELGAICMEIGLPPGVFNVITGLGLKLVLHYPHIPCGIRLLLLGSTETGKRIMTSAAQMVKPVSLELGGKSPLIVFDDIRDIDKAVEWTMFGILPNAGQVCSAASRLLLHEKMAKKFLDRLVHGAKNIKVSDPLEEGGRLGSVVSEGQYEKIKKFISTARSEGATILYGGARPQHLKRGFFLEPTIITDVSTSMQIWREEVFGPVICVKEFRRESEAVELANDTQYGLAGAVISSDQERCRAISKALQSAIDNCSQPCFVQAPWGGNKRMFGRELGEWGLDNYMTVKQVTKYCSDEPWGWYQPPSKL

SEQ ID NO: 1515 - protein, 389 aa, Methanopyrus kandleri AV19
MDARELIDKYHMNTYSRFPVTLVPGEGARVWDDEGNEYIDLVAGIAVNVLGHCHPAVVEAVKEQVERLIHCSNLYYNEPQAEAARLLAEAAPKDLNKVFFCNSGTESVECAIKLARKFTGCTKFIAFEGGFHGRTMGALSATWKPEFREPFEPLVPEFEHVPYGDVNAVEKAIDDDTAAVIVEPVQGEAGVRIPPEGFLRELRELCDEHGLLLIVDEVQSGMGRTGQFFAFEHEDVLPDIVCLAKGLGGGVPVGATIAREEVAEAFEPGDHGSTFGGNPLACAAVCAAVSTVLEENLPEAAERKGKLAMRILSEAEDVVEEVRGRGLMMGVEVGDDERAKDVAREMLDRGALVNVTSGDVIRLVPPLVIGEDELEKALAELADALRASG

SEQ ID NO: 1516 - protein, 160 aa, Clostridium difficile
MKKEMLAMILAGGQGSRLGVFTKRIAKPAVSFGGKYRIIDFVLSNCSNSGIDTVGVLTQYRPLILNSHIGMGSHWDLDRINGGVYVLQPFMNEKEGNWYNGTAHAIYQNMDFVDTYNPEYVLILSGDHIYKMDYSKMLKFHKEKGSKATIAVIEVPWDEA

SEQ ID NO: 1517 - protein, 105 aa, Citrus sinensis
GEGTATQDSNNSGANSNGTATNGGEEDLKSWDTDFVKVDQATLFDLILAANYLNIKGLLDLTCQTVADMIKGKTPEEIRKTFNIKKDFTPEEEEEVRRENQWAFE

SEQ ID NO: 1518 - protein, 423 aa, Zea mays
  unsure (1)..(423): unsure at all Xaa locations
MRRRPHPPRPRPDWAHCPGAYWCATPRAPPPTGCTALAFCPPLESVLDHQPYHSLPAARARSGALPCGDWCARPSSLTPSPATPSSILPDGAPGSRNKMSNRATHWCYACRRPIRLRGQDIVCPNCNDGFIQEISEMGGILNTYGLIEPDFEERRARRFGMMDAMSSLMRQRMEEMGRDGLFDIRGRQGTGTEYGRRSTAVPTLVFGGIPSPAVGSSDVNVVIRGGRRAGAARPNFSSLVVGPSLEALFEQLLLQNNRQGPAPAPQSAIDSMPVVKINRRHLDDDPQCAVCKDKFEVGAEAREMPCKHLYHTDCIIPWLVQHNSCPVCRHPLPSQRSGSTSSARPSAYYNEAADPPGVTRADLEPAPRDGGRESQERRRSFSFLWPFGXSSSRSSSYQYEQNVDEPAVYDPNQIAYSEWHYDH

SEQ ID NO: 1519 - protein, 279 aa, Thermosynechococcus vulcanus
MTSSLELQPQTSRLNWGFVFFLGAVHILAAVALFFFSWSALAVTIFLHWLFGSIGICLGYHRLLSHRSFQVPQWLEYVIAVVGALAMQGGPIFWVAGHRLHHAHTEDEIKDPYSARRGFWWSHMLWLVYPQSQFFNAEEYARFAPDLTRDPFYRWLDRYFLLLQLPLALLLYGLGGWSWLLWGMFMRAVFLWHSTWLINSATHKWGYRRFETEDNSRNLWWAALLTYGEGWHNNHHAYPHVAKAGWYWWEVDPTWWVIRTLQGLGLAAKVQLPPPKALS

SEQ ID NO: 1520 - protein, 512 aa, Gloeobacter violaceus PCC 7421
MEVRPMVVAAPAASASESIFKPRYDNFIGGQWRAPLKGQYTDNITPVNGRVLCQVPRSTVEDIELALDAAHAARESWGALSAAERSNILLKIADRMEANLHKLAVAETWDNGKPIRETTGADVPLAVDHFRYFAGCIRAQEGSISEIDGNTIAYHFPEPLGVVGQIIPWNFPILMAAWKLAPALAAGNCVVLKPAGPTPASILVWLEVVGDLLPAGVLNVVIGPGPEVGKALAASKRVAKVAFTGETETGRQIMQYAAQNIVPVTLELGGKSPNLFFADVMNADDDFLDKAVEGFVMFAFNQGEVCTCPSRALVHESIYEKFIDRAVRRVASIKQGNPLDPETMLGAQVSQAQMEKIARYVELGKQEGAEVLIGGERNSEPGEGLAGGYYYKPTVMKGHNQMRIFQEEIFGPVLAVTTFKDAEEAVRIANDTPYGLGAGVWSRDINTAYRVGRGIQAGRVWVNCYHVYPAHAAFGGYKASGVGRETHKMMLSHYQQTKNLLVSYDTKPQGFF

SEQ ID NO: 1521 - protein, 181 aa, Raphanus sativus
MASSMLSSAAVVTSQLQATMVAPFTGLKSSAAFPVTRKTNTDITSIASNGGRVSCMKVWPPIGKKKFETLSYLPDLSDVELAKEVDYLLRNKWIPCVEFELEHGFVYREHGSTPGYYDGRYWTMWKLPLFGCTDSAQVLKEVQECKKEYPNALIRIIGFDNNRQVQCISFIAYKPPSFTDA

SEQ ID NO: 1522 - protein, 552 aa, Oryza sativa
MELSLSARLALPLSPAAGTARPRRPAAFACRCCSGGASHDGTTRRRWLASLLAATGAAVGIGVAGGDADAVSTSRRALRSAKIPESEFTTLPNGLKFCYRVTGRQTILCYFPFSECRVTSEALSRYYDITVGSGLKAVKGSRVAVHYVAKWKGITFMTSRQGLGVGGGTPYGFDIGNSERGNVLKGLDLGVEGMKVGGQRLIIVPPELAYGKKGVQEIPPNATIEASDSSSEVSVNRVQDDQRMMMEDVNSLKRMVSALEEQAASIESQFHDYCDMKEQESTYQKMQIMCLGMKLEQLESQNQRLEAAAAEIRASAEEFATMRARFDAMQSKSKKIWKKNKQDLDAIDERVLALDAREAEMATRCQGFEQFMEEMKQLTLQLQKEKGTNNENVEVIVERSMRKLGSSGRDVLDGLEALRDRWAADMEEMIYLGWITAWLQHDLLVLDGGEVGTPAAIIGDETPAQPRHKGEKVVVAVAPSNEVELCKAASASSSSSSEMRGAAEPSCMMGFVAGGCTSIGRPRLLRRLRGWAGGKGGSSRRQCKIEFPTSPM

SEQ ID NO: 1523 - protein, 197 aa, Oryza sativa
PGSSNFQQHGVVTDPEAIDTLVRYSMACPALPTCGLAVTESERIMPSVNARLRDLLNSLDLPNESIVTRMTGCPNGCARPYMAEIGFVGSAPNSYQVWLGGSPNQERLAAAYTEKMPLEQLESLFEPLFVYFKQSRKGKESFGDFCHRVGFTALREFSHGYTAPAKGGKNRKNQRRVSLSDEMYAQLKGPSERDYSP

SEQ ID NO: 1524 - protein, 250 aa, Lactobacillus johnsonii NCC 533
MEHSWMLKYFAEFFGTLIMVMFGNGAVANSFLKGTTGNAHDGKANGGWILIAFSFGFGVMLPAMLFGSISGNHLNPAVTLAQATAGVFPWAQVTPYIISQVLGAICGQLLIITIYWPYIKKSTDSNIVFACFATSDCVNSKWNGFISELVGTGVLMFVAIGLYKGMFFKQAVDIANIGVGFLITALVMALGGPTGPALNPARDFGPRLVYSILPIPNKKDAHWSYGWVPVVAPILGAIIGIFLYKIPFGL

SEQ ID NO: 1525 - protein, 628 aa, Bordetella bronchiseptica
MCGVLGAWWRHHDEHEDARFAAGLRKLAHRGPDDRGSEHFAAPHGRLSLGHTRLAVIDLSAAGHQPMHADADRLAVVFNGEIYNYRELRSELRQIGASFRGDSDTEVLLAAWQHWGVAALRRFKGMFAFALYDRRQQTLTLARDAFGIKPMYYHAAPERLLFGSELPAVQALLPHPPRLNWQRAYDYLAYGQYDQPPDTFIAGIRQLPAGHLLTLDLRTGQAGEPMAWDDPASQECRPIGFQEAAEELRARFLDNVRLHLRSDVPIGAALSGGIDSSAIVCAMRWLEPDLPIQTFSFISDDTHRSEERWVDLVNQHCGATGHKIHIAPHELLDDLDDLIRVQGEPVGSTSIYAQYRVFKLAREHGVVVTLDGQGADELLGGYGGYPTERLASLLETGRLGAAARLLRQQGRGAPARLLQAAALAAGGRHLANLRHATGRQHAPAWLDAQVLRDQGVTMREPAHAWAAATPLRGRRLVNELAHALYHRGLGALLRHGDRNSMRFSVESRVPFLTQDLAEFALSLPERYLVSDSGQTKHIFRKAMRGIVPDSILDRDDKIGFATPEQQWMQATAPQMRQWLVDAADIPFLRNAEVTAQFDAMIAGATPFSWQAWRWVNFQRWMQHATVLP

SEQ ID NO: 1526 - protein, 492 aa, Hebeloma cylindrosporum
MSNLATGQFDRGDISFIVVAGAMVFFMVPGLAFLYSGLSRRKSALSLIWAVAASNAVVIFQWYFVGYSLAFSSTATNGYIGNLRNFGLMKVEADPSPGSPLIPEILYSFFQMEFACVTAGILMGGLAERGRVFPAMIFIFFWMTFVYCPLACWAWSTHGWAFKWGVLDFAGGGPVEIGSGVGGLAYAWVLGRRNERELLNFRPHNVGLVGLGTFMLWFGWIGFNGGSAFGANLRAIFAIWNTMIAASFGGMVWCLLDFRIERRWSMVGFCSGTIAGLVAATPSSGYLRPWSSVVVGVLAGTLCNFATKVKFLLRIDDALDLFAEHAVGGVVGLMLNAFFAETAVIAMDDVTIGVRGGWVDHNWKQLYIQFTYVVATCAYSFVMTALVAKTVDLIPGLKLRSSPEGEMLGMDEVEIGEFATDYIELRRDVADCSTFGFTRGSNGYIPHAATNETHAQDTSSNDDPHHRIDEPTAPERLEPLTEKNECGTVTPS

SEQ ID NO: 1527 - protein, 237 aa, Streptococcus agalactiae 2603V/R
MTQFLGEFLGTFILVLLGDGVVAGNVLSKTKEEGTGWTAIVFGWGIACTVAVYVSGLFSPAHLNPAVTLAMASIGAISWGQVIPFIIAQMLGAMVAATILWLHYYPHWKETKDSGLILASFSTGPAIRHTPSNLLGEIIGTAILVITIMAIGPSKVAAGLGPIIVGIVIFAVGFSLDPTTGYAINPARDLGPRLMHAILPIENKGNSDWSYAWIPVVGPIIGGVLGAILYNIALTLV

SEQ ID NO: 1528 - protein, 428 aa, Lactobacillus johnsonii NCC 533
MLKSVIENVHALEIFDSRGNPTVEVFVTLSNGVVGKAEVPSGASTGENEAVELRDGGSRLGGKGVMNAVNNVNTEINDALKGLDPHDQPNIDATMIALDGTPNKGRLGANAILGVSMATAAAAAKDNHQPLYRYLGGTDLEMPQTFHNVINGGEHADNGIDIQEFMITPVAKTSFRDGFEKIVNVYHTLKKVLEDMGYETGLGDEGGFAPNMKNSEEALKALHESIIKAGYKPGEDIAIACDCAASYFYNKEDGKYHLEGKVLTDEELADYYDKLLDEFPELISMEDPYDENDVEGMVKFTQSHKDRIQIVLDDFICTNPKLLNKAIHEGAGNASLIKLNQIGTVTETLETIRLSRKNGYNTMISHRSGETGDTFIADFAVAVNGGQLKTGAPARSERVEKYNRLLEIEEELGKGERLAFFPDNVDLD

SEQ ID NO: 1529 - protein, 113 aa, Glycine max
  unsure (1)..(113): unsure at all Xaa locations
MKNGIMECSVCHSKLVSPSAKTISRAYDRHXSRISSKQRALNVXLVVGXCVLVGFQPILVYMSKVDGKFKFSPISGKFLTEINKVFFAIGMLLXQAGHQKVGXNPFFFISSFV

SEQ ID NO: 1530 - protein, 609 aa, Oryza sativa (japonica cultivar-group)
MMIQQHRLHTQSDLARDILLNFDTLLPKFIKVYPRDYKRVLDKLKEEKAAKEAEQKAREVVDKKPVEVIQAPNGISVKTEKVMNEEPSSRPSRVSNAVKYRGFIKYEREGTSYRDPNERVKDWNEVAIELVPGPLLKTQSARCMDCGTPFCHQEGSGAGCPLGNKIPEFNELVHQNRWHEALDRLLETNNFPEFTGRVCPAPCEGSCVLGIIDNPVSIKSIECAIIDKGFEEGWMVPRPPLRRTGKRVAIVGSGPAGLAAADQLNKMGHFVTVFERADRIGGLMMYGVPNMKADKEGIVQRRVELMAKEGVQFIVNAHVGSDPLYSVEKLRSENDAIILACGATKPKDLPIPGRELAGIHFAMEFLHANTKSLLDSNLEDGNYISAQGRKVVVIGGGDTGTDCIGTSIRHGCTNLVNLELLPEPPRKRAPDNPWPQWPRIFRVDYGHQEATSKFGKDPRSYKVLTKRFIGDENGNVKALEVIRVEWGKVNGRFQFKEVEGSEEIIEADLVLLAMGFLGPEATVANKLGLEQDMRSNFKAQFGNFATNVEGVFAAGDCRRGQSLVVWAITEGRQAAAAVDNYLSKDDEGETNGTEDIAVSSEGLVQPVVA

SEQ ID NO: 1531 - protein, 444 aa, Bifidobacterium longum NCC2705
MQKFSNMPLSEVASAAVPAARRVAVPTAKPASLSAEALNIPRSGIRDVFDRVERVPDAISLTVGEPSATAAPHIVAAACEAAQAGRTRYTNVLGVPEYRKAVADYSARVKGLTYDPETEIQAVDGATIGLFLALKAVVGTGDEVIIPSPFFTSYDAEVMLCGGRPVTVALRPEHGMRVNAADIEAAITPRTRAVIINSPGNPTGAVTSAAELARIAEVCKQHNIWAISDEVYHPFVFGETFGETLGGEAAVAPSIAAVPGMKDRTIVVESLSKTYAMTGWRIGYLLAPEAVIEQTGKIAELMHSSVNSLAQYAGVAALAGPQDHVAAMREEYRAKRQIVLDGLAGCPVLRLIEPQGAFYAFVDVRLTGLDSGEFADRLLDEEHVAVVPGEAFGEEGRGFVRLSYAGDAGELREGVARLRAFAERVWNPITGHHTATYHPMEVLA

SEQ ID NO: 1532 - protein, 435 aa, GIBBERELLA ZEAE PH-1
MRVYRVLVSSYHNIVPVSFKTLIKIHLREGLFMVWVNDLATIDVMQLEIDPSLGKYPISGYSSVRREGVIDCFLALDLVHINQCCSHAEAAHVNLSTNIKEFNAPYSVSEVDKPKPKPHQLLIQIKAGGFCHTDCMALAGEFGSKLPFIGSHEPTGVVVEVGSEVEGFTEGDRVGCLNFDSCCGKCPDCKAGKPIYCDAPLMKGLTADGAWAEYMVSDARFAVKLPDALKFPTAACMMCAGATIYGGIKNAKVPAGGSIGIIGIGGLGHIGTQLAKAMGYQVAAIDAKQDTLDLVSSYTLKPDVCILASDPLEYSMKKITDVVKSDYPGLDAVIIATDAPPAFDLAAQLTRKHGTMVLLGQPEKGITLSYQNIIFRDIKLVGSLLADRPVLEELLKLVVEHDIQVKIKEWKIEDAEKMRQEYLTGKNSGKNVIVF

SEQ ID NO: 1533 - protein, 371 aa, Candida albicans SC5314
MLIKSNYNCINIKRFLLNQTRVSVTASNSFSFYFYFKPYKFNCYKSYSTMSTTTPTIKLNSGYEMPIVGFGCWKVTNATAADQIYNAIKTGYRLFDGAEDYGNEKEVGEGINRAIKDGLVKREELFIVSKLWNNYHSPENVEKALNKTLTDLNLEYLDLFLIHFPIAFKFVPLEEKYPPGFYCGDGDKFHYENVPLLDTWKALEKLVNLGKIKSIGISNFNGGLIYDLIRGATIKPAVLQIEHHPYLQQPRLIEFVQNQGIAITAYSSFGPQSFLELQSKRALDTPTLFEHETIKSIADKHGKSPAQVLLRWATQRNIAVIPKSNNPDRLAQNLAVVDFDLTEEDLQAISKLDIGLRFNDPWDWDKIPIFV

SEQ ID NO: 1534 - protein, 946 aa, Candida albicans SC5314
MISIVNGTSTLSLVAGSVETLNQAINFYTNILGLSVHSEQNDWTYLSNDDNKMIVKIQLDTKSGLSLDQINDRRTEIIAKLNITDWRSLDTTSVLKVQNLVALIETLTTFNYTLQITPNELYPNEVYCVDPLGYIIGFTACDEPLTLVPPLQKSHPKPGLVSNLMSKSGSQSRNIEETKAVRRNIAVMTSGGDSQGMNAAVRAVVRATIFHGSKAFAVQEGYAGLVKGGPEYIKEMKWQDVRGFLSEGGTNIGTARCMEFKERWGRLKGCKNLIDAGIDGLIVCGGDGSLTGADLFRHEWPSLIQELKDKGEITNEQFERHKHLYICGMVGSIDNDMAMTDATIGGYSALERICRAIDYIDATANSHSRAFVVEVMGRHCGWLALMAGIATSADYIFIPEKPASSKDWQDQMCDIVGKHRAQGKRKTIVIVAEGAITSDLKPITSDEVKDVLVDRLGLDTRITVLGHVQRGGTAVAFDRTLATLQGVEAVKAILELTPDVPSPLIAIDENKICRRPLVEAVRITKSVASAIEAKDFEKAMSLRDHEFKEHLANFMAMNTANHEKPTLPREKRKKIAIINIGAPAGGMNSAVYAMATYCMSRGHTPYAIHNGFAGLSRHESVKSIEWIDIEGWNSIGGSEIGTNRQTPEETDIGMIAHYFEKYQFDGLIIVGGFEAFVSLEQLERSRAMYPSFRIPMVLIPATISNNVPGTEYSLGADTCLNSLMEYCDIVKQSASATRGTAFIIDVQGGNSGYIATFASLISGAQASYVPEEGISLQQLEMDINSLREAFAVEQGMTKSGKLIIKSSNASKVLTPHTLADIFNDECHGDFDTKTAIPGHVQQGGLPSPIDRSRGDRFAIRAVQFIEDHCDVLAPYRYELDFPIDDKKILNTAAVLGIKSSRLRFTSIRHLFDFETELGRRMPKTIYWNTIRDISDQLVGRTRLDKP

SEQ ID NO: 1535 - protein, 307 aa, Saccharomyces cerevisiae
MLISSRIVRSSLVNVPLRLSRCFTQAHRACKEEEVNSPLSSAAEQPEQKYTHFGSKTVLKSTKQKLVGDVFSSVANRYDLMNDVMSLGIHRLWKDHFINKLDAGKRPNSTTPLNFIDVAGGSGDIAFGLLDHAESKFGDTESTMDIVDINPDMLKEGEKRAMEQGKYFKDPRVRFLVSNGEKLEEIDSDSKDIYTVSFGIRNFTDIQKGLNTAYRVLKPGGIFYCLEFSKIENPLMDFAYQQWAKVLPVMGSMIANDYDSYQYLVESIERFPDQETFKSMIEKAGFKSAGYESLTFGICAIHWGIKV

SEQ ID NO: 1536 - protein, 408 aa, Crocosphaera watsonii WH 8501
MWGLIACHNYAPKYISYKIRKVCELIAELVPDNLVTAQKTQDKQQVNLIKQLQTYLKTSVDYETNLLTRLVNQETDTLLNLVNAQGVALSYGETLNLVGKTPKKAAIEDLILWLKSNHREKVFATHNLSKIYNQGKDIITESSGILAISILLNSTSYYIIWFRPEVIQTVNWAGDPNESFSIGVDGEIKLCPRNSFAIWKETVKNTAIPWKKFEKEAAEKLREILLLAALEFSHTVMEEAVKKAEAANRIKGEFLANMSHELRTALNAILGFAQIMRRSSKLDAEQQENLSIITGSGEHLLNLINQVLDLSKIEAGRTIINKTELDFYRLLDDLEDMFQFKAEEQKLRLLFERSPNVPQYIRTDQVKLRQVLVNLINNALKFTEEGGVSLRVRGESLNFMETNDTKET

SEQ ID NO: 1537 - protein, 935 aa, Stellaria longipes
MASPAQSQNSTNSGRSKHSARIIAQTIQDAKLHAEFEESSNEFDYSSSVRGSTSGVNQLPKSDKVTSSYLLQIQKGKFIQPFGCLLALDDKTFRVIAFSENAPEMLTMVSHAVPSVGDLPVIGIGTDIRTIFTGPSASALQKALGFTDVSLLNPILVHCKNPGKPFYAIVHRVTRSLVIDFEPVKPYEVPMTAAGALQSYKLAAKAITRLQSLPSGNMDRLVDTMVQEVFELTGYDRVMAYKFHDDDHGEVVSEVTKPNLDSYLGLHYPATDIPQAARFLFMKNKVRLICDCRAKNVRVVQDEKLSVDLTLCGSTLRAPHGCHAQYMENMNSIGSLVMAVVVNDEDDEDGGSAPAQPHKRKRLWGLVVCHHTSPRFVPFPLRYACEFLAQVFAIHVNKELELENQFLEKKILRTQTLLCDMLMRDAPLGIVTQSPNIMDLVKCDGAALLYNNKVWRLGITPTDYQLQEIGGWLSRDHMDSTGLSTDSLYDAGYPAALELGDSVCGMAAVRITVNDMLFWFRSHTAAEIKWGGAKHEAGEKDDGSKMHPRSSFKAFLEVVKRRSVPWKDYEMDAIHSLQLILRNAFKDGEAADLNTSVIHSKISDLQISGLKELEAVTSEMVRLIETATVPIFAVDSDGLVNGWNTKIYELTGIPVEEAVGKHIAALVEDSSIDNVKQMLQSALQLASHDLQHALHIQRLAEQAATKRANVLAYMKRRIKNPLAGIIFSGKILDGTNVDEKQRLVLQTSARCQGQLNKILDDSDLDSIIDGYCELEMVEFAVQDILVASISQVMAKSSEKGIQMSNNCTEHGFKETLYGDSLRLQQILADFLSISVNFTSPGGHIGVTVRLTKDKIGESVQLANLEFRITHTGGGISEELLSEMFESRGNASEDGISLLISRKLVKLMNGDIQYLRSAGTSTFIISVELAVAGNSS

SEQ ID NO: 1538 - protein, 158 aa, Triticum aestivum
  unsure (1)..(158): unsure at all Xaa locations
MAPTVMASSATSVAPFQGLKSTAGLPVSRRSNGASLGSVSNGGRIRCMQVWPIEGIKXFETLSYLPPLSTXGLLKQVDYLIRSKVVPFLRXQQVXXIFXXEHNASPGYYDGRXYWDMLELPKFPDAPTPPGXXTKVEEVQERIPDPISAHRKSVMLNL

SEQ ID NO: 1539 - protein, 1123 aa, Stellaria longipes
MASPAQSQSSTNSGRSKHSARIIAQTIQDAKLHAEFEESSNEFDYSSSVRGSTSGVNQLPQSDKVTSSYLLQIQKGKFIQPFGCLLALDDKTFRVIAFSENAPEMLTMVSHAVPSVGDLPVIGIGTDIRTIFTDPSASALQKALGFTDVSLLNPILVHCKNSGKPFYAIVHRVTRSLVIDFEPVKPYEVPMTAAGALQSYKLAAKAITRLQSLPSGNMDRLVDTMVQEVFELTGYDRVMAYKFHDDDHGEVVSEVTKPNLDSYLGLHYPATDIPQAARFLFMKNKVRLICDCRAKNVRVVQDEKLSVDLTLCGSTLRAPHGCHAQYMENMNSIGSLVMAVVVNDEDDEDGGSAPAQPHKRKRLWGLVVCHHTSPRFVPFPLRYACEFLAQVFAIHVNKELELESQFLEKKILRTQTLLCDMLMRDAPLGIVTQNPNVMDLVKCDGAALLYNNKIWKLGISPTDYQLRDIAGWLSRDHTDSTGLSTDSLHDAGYPGARSLGDTVCGMAAVRITLNNMLFWFRSHTAAEVKWGGAKHETGEKDDGSKMHPRTSFKAFLEVVKRRSVPWKDYEMDAIHSLQLILRNAFKDVEASDLNTSVIHSKISDLQINGLRELEAVTSEMVRLIETATVPILAVDADGLVNGWNTKIFELTGVPVAEAVGKHIASLAEESSIDNVKRMLQLALQGEEKKNVQFEIKRHQSNPDSSPISLVVNACASKDVNGNVVGVCLITQDITGQKTVMDKFTRIEGDYKAIIQSPNPLIPPIFGTDEFGWCSEWNPAMAKLTGWSREEVIDKMLLGEVFGTQKSCCRLKNQEAFVNFGIILNGAMSGQNTDKLPIEFFTRFGKYIECLLCVNKKLDGDGAVTGVFCFLQLASHDLQHALHIQRLAEQAATKRAKALAYMKRQIKNPLSGIMFSGKILDGTEMGEDQRQVLQTSIRCQGQLNKILDDSDLDSIIDGYCELEMVEFTVQDILVASTCQVMAKSNEKGIQIANDSTTEHGLKETLYGDSLRLQQILADFLWISVNFTPAGGNVGIKVRLTKDKIGESIQHANLEFRISHTGGGISEELLSQMFENQGEVSEEGISLLVSRKIVKLMNGDVQYLRSAGSSTFIISVELAIAGNSL

SEQ ID NO: 1540 - protein, 1122 aa, Stellaria longipes
MASPAQSQSSTNSGRSKHSARIIAQTIQDAKLHAEFEESSNEFDYSSSVRGSTSGVNQLPKSDKVTSSYLLQIQKGKFIQLFGCLLALDDKTFRVIAFSENAPEMLTMVSHAVPSVGDLPVIGIGTNIRTIFTGPSASALQKALGFTDVSLLNPILVHCKNSGKPFYAIVHRVTRSLVIDFEPVKPYEVPMTAAGALQSYKLAAKAITRLQSLPSGNMDRLVDTMVQEVFELTGYDRVMAYKFHDDDHGEVVSEVTKPNLDSYLGLHYPATDIPQAARFLFMKNKVRLICDCRAKNVRVVQDEKLSVDLTLCGSTLRAPHGCHAQYMENMNSIGSLVMAVVVNDEDDEDGGSAPAQPHKRKRLWGLVVCHHTSPRFVPFPLRYACEFLAQVFAIHVNKELELENQFLEKKILRTQTLLCDMLMRDAPLGIVTQNPNVMDLVKCDGAALLYNNKIWKLGITPTDYQLRDIAGWLSRDHTDSTGLSTDSLHDAGYPGARSLGDTVCGMAAVRITPNDMLFWFRSHTAAEVKWGGAKHETGEKDDGSKMHPRTSFKAFLEVVKRRSVPWKDYEMDAIHSLQLILRNAFKDVEASDLNTSVIHSKISDLQINGLRELEAVTSEMVRLIETATVPILAVDADGLVNGWNTKISELTGVPVAEAVGKHIASLAEESSIDNVKRMLQLALQGEEKKNVQFEIKRHQSNPDSGPISLVVNACASKDVNGNVVGVCLIAQDITGQKTVMDKFTRIEGDYKAIIQSPNPLIPPIFGTDEFGWCSEWNPAMAKLTGWSREEVIDKMLLGEVFGTHKSCCRLKNQEAFVNFGIILNGAMSGQNTDKLPIEFFTRFGKYIECLLCVNKKLDGDGAVTGVFCFLQLASHDLQHALHIQRLAEQAATKRAKALAYMKRQIKNPLSGIMFSGKILDGTEMGEDQRQVLQTSIRCQGQLNKILDDSDLDSIIDGYCELEMVEFTVQDILVASISQVMAKSSEKGIQMSNNCTEHGFKETLYGDSLRLQQILADFLSISVNFTSPGGHIGVTVRLTKDKIGESVQLANLEFRIMHTGGGISEELLSEMFESRGNASEDGISLLISRKLVKLMNGDIQYLRSAGTCTFIIYVELAVADNSS

SEQ ID NO: 1541 - protein, 292 aa, Escherichia coli
  unsure (1)..(292): unsure at all Xaa locations
MKGIMLAGGSGTRLHPITRGVSKQLLPIYDKPMIYYPLSVLMLAGIREILIITTPEDKGYFQRLLGDVGEFGIQLEYAEQPSPDGLAQAFIIGETFLNGEPSCLVLGDNIFFGQGFSPKLRHVAARTEGPVFGYQVMDPERFGXVEFDDNFRAISLEEKPKQPKSNWAVTGLYFYDSKVVEYAKQVKPSERGELEITSINQMYLEAGNLTVELLGRGFAWLDTGTHDSLIEASTFVQTVEKRQGFKIACLEEIAWRNGWLDDEGVKRAASSLAKTGYGQYLLELLRARPRQY

SEQ ID NO: 1542 - protein, 106 aa, Glycine max
RGNTTATNNLSLTVVPKIGAGSLSCDREYNITLRYLRNADPVLSPLIDIHQPPTFDNFHTPFLALTHSILYHQTSYKAGTFIYTLFISLCVGENGVIPETVLSLTP

SEQ ID NO: 1543 - protein, 492 aa, Zea mays
MDPYKHRPSSAFNAPYWTTNSGAPVWNNDSSLTVGARGPILLEDYHCEKLANFDRERIPERVVHARGASAKGFFEVTHDITHLTCADFLRAPGVQTPVIVRFSTVIHERGSPETLRDPRGFAVKFYTREGNWDLVGNNFPVFFIRDGIKFPDMVHALKPNPRTHIQDNWRILDFFSHHPESLHMFSFLFDDVGIPADYRHMDGSGVHTYTLVSRAGTVTYVKFHWRPTCGVRSLMDDEAVAVGGANHSHATKDLTDAIAAGNFPEWTLYIQTMDPEMEDRLDDLDPLDVTKTWPEDAFPLQPVGRLVLNRNIDNFFAENEQLAFCPGLIVPGIYYSDDKLLQTRIFSYSDTQRHRLGPNYLLLPANAPKCAHHNNHYDGSMNFMHRHEEVDYFPSRYDAVRNAPRYPIPTAHIAGRREKTVISKENNFKQPGERYRAMDPARQERFITRWVDALSDPRLTHEIRTIWLSNWSQADRSLGQKLASRLSAKPSM

SEQ ID NO: 1544 - protein, 490 aa, Beta vulgaris
MSSDSEAGLGGGGGDLRKPFLHTGSWYRMGSRQSSLMGSSQVIRESSISVLACVLIVALGPIQFGFTAGYSSPTQSAITNELGLSVAEYSWFGSLSNVGAMVGAIASGQISEYIGRKGSLMIAAIPNIIGWLAISFAKDSSFLYMGRMLEGFGVGIISYTVPVYISEIAPQNLRGALGSVNQLSVTIGIMLSYMLGLFVPWRILAVLGILPCTILIPGLFFIPESPRWLAKMGMMEEFEVSLQVLRGFDTDISLEVNEIKRSVASSSKRTTIRFAELRQRRYWLPLMIGNGLLILQQLSGINGVLFYSSTIFKEAGVTSSNAATFGLGAVQVIATVVTTWLVDKSGRRLLLIVSSSGMTLSLLVVAMSFFLKEMVSDESTWYSVFSILSVVGVVAMVVTFSLGIGAIPWIIMSEILPINIKGLAGSIATLANWFVAWIVTMTANIMLSWNSGGTFSIYMVVCAFTVAFVVIWVPETKGRTLEEIQWSFRR

SEQ ID NO: 1545 - protein, 147 aa, Mycoplasma pneumoniae
HRSGLSEHDWEGMETLTKHWSTHQIVGDDLYCTNPAIAEKGVAHKATNSILIKLNQIGTLTETIKAINIAKDANWSQVISHRSGETEDTTIADLAVAACTGQIKTGSMSRSERIAKYNRLLQIELELGNNAKYLGWNTFKNIKPQKA

SEQ ID NO: 1546 - protein, 451 aa, Nostoc punctiforme
MTLETETLQATSSTSTFETPENQQEFNWRQSWYPVCFLQDLPTNRPYTFSLYEEPFVLFKDQNGQLICLTDRCSHRAARLSDGQIIDGKIECSYHGWQFGNNGQCLHIPQLASDAKIPVNACVPSFKVLERQGIIWMWAGEAETAIDELIPSLPDWNKPECFNLDYVRDLPYDQSYFIENIIDPAHVPISHDGIIGSREDAQALDIEVIESNIQGIKGRWQRTRTPNLPWISLDFIAPNLILYKFANVQQGKFWGTALYSIPLGKNRCRILIRNYSNSFPQKTKLMPPWLDHILIRNKILEGDLQLVVEQKAQIERLKKNLKEVYLPLKTSDTLVVEYRKWLDKFGSSLPFYQGYSTSKNVGNSESDEKLITLDRFSQHTIICHSCNQAYQVTNKVRQSCIGVAIALAAIGILADDSRIRIAAISVSITAIVISAMAQTLKTHFERSYTRH

SEQ ID NO: 1547 - protein, 367 aa, Arabidopsis thaliana
MGKKKKRATEKVWCYYCDREFDDEKILVQHQKAKHFKCHVCHKKLSTASGMVIHVLQVHKENVTKVPNAKDGRDSTDIEIYGMQGIPPHVLTAHYGEEEDEPPAKVAKVEIPSAPLGGVVPRPYGMVYPPQQVPGAVPARPMYYPGPPMRHPAPVWQMPPPRPQQWYPQNPALSVPPAAHLGYRPQPLFPVQNMGMTPTPTSAPAIQPSPVTGVTPPGIPTSSPAMPVPQPLFPVVNNSIPSQAPPFSAPLPVGGAQQPSHADALGSANAYPPNNSIPGGTNAHSYASGPNTSGPSIGPPPVIANKAPSNQPNEVYLVWDDEAMSMEERRMSLPKYKVHDETSQMNSINAAIDRRISESRLAGRMAF

SEQ ID NO: 1548 - protein, 565 aa, Zea mays
MGSTAAVSVSASAIASRGCARSEAARRPGGIRVCGLRSEVLTCHSLRISQAPARLTVARPPPPAAATNGAAAGTCGFDYDLVIIGAGVGGHGAALHAVEEGLKTAIIEGDVVGGTCVNRGCVPSKALLAVSGRMRELHDEHHMKSLGLQVSSPGYDRQAVADHANNLASKIRINLTNSMKALGVDILTGVGTIVGKQKVRYGKAGFPDKEITARNIIIATGSVPFVPKGIEIDGKTVFTSDHALKLESVPDWIAIVGSGYIGLEFSDVYTALGSEVTFVEALDQLMPGFDPEIAKLAQRVLINPRKIDYHTGVFASKITPAKDGKPVLIELIDAKTKEHKETLEVDAALIATGRAPFTKGLGLENINVVTQRGFVPVDERMRVMDADGNVVPNLYCIGDANGKLMLAHAASAQGISVVEQISGKDHILNHLSIPAACFTHPEISMVGLTEPQAREKADKEGFEINVVKTSFKANTKALAENEGDGIAKLIYRPDTGEILGVHILGLHAADLIHEASNAIALGTRVQDIKFAVHAHPTLSEVLDELFKAAKVNSGVSHSVNEPVAA

SEQ ID NO: 1549 - protein, 139 aa, Glycine max
  unsure (1)..(139): unsure at all Xaa locations
YVDISVAVATEKGLVTPVVRNAESMDSXSAIEKAIADLGKKARDNKLTIEDMAGGTFTISNGGVFGSLMGTPIINLPQTAVLGLHAIKEKPVAINGKVEIRPMMYLALTYDHRLLDGREAVTFLVKVKEYIEDPRKMLL

SEQ ID NO: 1550 - protein, 268 aa, Zea mays
  unsure (1)..(268): unsure at all Xaa locations
MDPKMTEVTQMFARFKAAYARNDLNTCVTLLSQLKVHLTQFPSLPPLFQQTPNIVEELKLARDIYEHAVVLSVKLEDQDAFERDFCQLKPYYMDTCGIIPASPEEYPILGLNLLRLLVQNRIAEFHTELELLPAKALEHPCIKHAVELEQSFMEGAYNRVLSARQAVPHETYVYFIDLLAKTVRDEIAGCSEKGYDSLSVSDAKQMLMFSSDQDLHEYITEEHPEWEIKNGAVFFQKAKESQXPCKEIPSLQLINQTLSYARELERIV

SEQ ID NO: 1551 - protein, 91 aa, Oryza sativa
MGGGMEVHKNKWIEEWNAGRENLEFNFRWTRRSLAVVGLFGLAVPILVYKGIVREFVIPSSEPPLLFLAVPSWVIQHMQDEDAGRPYRKFL

SEQ ID NO: 1552 - protein, 272 aa, Bacillus cereus ATCC 14579
MDKQIGFIGCGNMGMAMIGGMINKNIVSSNQIICSDLNTANLKNASEKYGLTTTTDNNEVAKNADILILSIKPDLYASIINEIKEIIKNDAIIVTIAAGKSIESTENAFNKKVKVVRVMPNTPALVGEGMSALCPNEMVTEKDLEDVLNIFNSFGQTEIVSEKLMDVVTSVSGSSPAYVYMIIEAMADAAVLDGMPRNQAYKFAAQAVLGSAKMVLETGIHPGELKDMVCSPGGTTIEAVATLEEKGLRTAIISAMQRCTQKSVELSGQTKK

SEQ ID NO: 1553 - protein, 515 aa, Citrus unshiu
MASIGSLKVPSSPSTAATSSNSNNHSRRSVVKRLAFSSSQLSGDKIFSKAVTGDRRRERRRSLCLLQAVSDSKNSPLDPEASRRVLGIILGGGAGTRLYPLTKKRAKPAVPLGANYRLIDIPVSNCLNSNISKIYVLTQFNSASLNRHLSRAYASNMGGYKNEGFVEVLAAQQSPENPNWFQGTADAVRQYLWLFEEHNVLEFLVLAGDHLYRMDYERFIQAHRETDADITVAALPMDEKLATAFGLMKIDEEGRIIEFSEKPKGEQLKAMKVDTTILGLDDARGKEMPFIASMGIYVISKDVMLSLLRDKFPGANDFGSEVIPGATSIGMRVQAYLYDGYWEDIGTIEAFYNANLGITKKPIPDFSFYDRSDPIYTQPRYLPPSKMLDADVTDSVIGEFCVIKNCKIHHSVVGLRSCISEGAIIEDTLLMGADYYETDADRRFLAAKGSVPIGIGKNSHIKRAIIDKNARIGNNVKIVNRDSVQEAARETDGYFIKSGIDTIIKDALIPSGTII

SEQ ID NO: 1554 - protein, 485 aa, Oryza sativa
MMVSSQTSSLTRTIAQDPELFTAKIILPMGPPDVISENDEFDFSDVFGTTPVQTPTGISVAGPDSPAPLAESNEGVYNDPIVIIKRSHSLVGPTSLVSQSLRLSNLTLNKTEGSSEPAEEKERNLGQLSDEEFDNATTENEGIGLDDFEILKLVGQGAFGKVFQVRKKGTSEIYAMKVMRKDKILEKNHAEYMKAERDILTKVDHPFVVQLKYSFQTKYRLYLGPDFINGGHLFFQLYKQGLFREELARIYTAEIVSAVAHLHDNGIMHRDLKPENILLDADGHAMLTDFGLAKEFNENTRSNSMCGTVEYMAPEIILGRGHDKAADWWSVGILLFEMLTGKPPFVGNRDKVQQKIVKEKLKLPSFLSSEAHSLLKGLLHKEGGKRLGSGPGGSDEIKRHKWLKPINWRKLEARQIQPSFRPNVSGLTCIANFDECWTSMPVLDSPVATPVAGGAGHSSFAGFTYVRPAPFLQDVKPPSSSRLKD

SEQ ID NO: 1555 - protein, 693 aa, ASPERGILLUS NIDULANS FGSC A4
MCGISAVLSLSEGSICPQALASQMNESLQLIKHRGPDARGQWLSSDYRVGLGHARLSVIDLNPAGNQPFHDPEGTVHAVVNGEIYDHKKYRAKLAHQYEFRSNSDCEIVTALYRHYGISFLNKLRGEFALVLWDAKRKLFLAARDRYGIKSLYYTVVNNRLLVATEIKSFLPFGWQPEWSIENLLRKGWLWDTEMYFKGVHRLEPGQYMVSQNYKFPVVKTYWDMDYPDKRTPFPQTEEQIVLELRKRMLESVRLRLRADVGVGFYLSGGLDSSAIAGMAKYLIQQGEPLGNDSSGDISKMSCYTIRFGEGSGVDESGIKDTFVPEVSDRRLTKSELYPVTLTEEDIASRFEDTVWYTETPIPDVNGMGRVAVGELAHSHGKKVILTGEGSDEHFGGYPDMLSKMFVEPDLSWHPPPFKMPNSSKVFEAGREAVPAAVESLASTKRMLNNSSIFARVDSFYMFPLASATVESEEPDPETAFAESLGAQTLSNISENWHPLNSASYQWTKSILANYILRYIGDGADMVYQIETRPPFLDHHVTEYANRIPPSLKIRYDPVKNDLREKYILREAMRPFITDEVMNRTKRAYLGPSNYREDGPLHRVVKSLLTEDNVNKLGFVDWDRLQEHIVKGFRDGDPRYFRSSLFVAQLVVLSQRFGVKVATTTDALPVTSEILDRTQNNDNMTTVQDRSRL

SEQ ID NO: 1556 - protein, 504 aa, Xanthomonas campestris pv. campestris str. ATCC 33913
MTHTNGFDALHAHAQRLRGAAIPALLAAEPQRPTQYARQVGPLYFNFARQKYDRAALDALFAIARERDLAGAFQRLFRGEQVNVTEQRAALHTALRGDLTDAPVASDAYATAAEVRQRVGALIQQLEGTDVTDIVSVGIGGSDLGPRLVADALRAPSGARFRVHFVSNVDGAAMQRTLATLDPARTAGILISKTFGTQETLLNGSILHAWLGGSERLYAVSANPERAAKAFDIAPGRVLPMWDWVGGRYSLWSAVGFPIALAIGFERFEQLLDGAAQFDAHVLNTPLEENVAVLHGLTAVWNRNLLGSATHAVMTYDQRLALLPAYLQQLVMESLGKRVKLDGAAVDSDTVAVWWGGAGTDVQHSFFQALHQGTSVVPADFIGTVHNDDPYAENHVALMANVLAQTEALANGQDSSDPHRSYPGGRPSTVILLDALTPQALGALISMYEHSVYVQSVMWGINAFDQFGVELGKQLASQLLPALKGEAADVADPVTRELLAKLRG

SEQ ID NO: 1557 - protein, 174 aa, Triticum aestivum
MAPAVMASSATTVAPFQGLKSTAGLPVSRRSSASLGSVSNGGRIRCMQVWPIEGIKKFETLSYLPPLSTEALLKQVDYLIRSKWVPCLEFSKVGFVFREHNSSPGYYDGRYWTMWKLPMFGCTDATQVLNEVEEVKKEYPDAYVRVIGFDNLRQVQCVSFIAFRPPGCEESGKA

SEQ ID NO: 1558 - protein, 459 aa, Azotobacter vinelandii
MPPEPRLRRLRRELRALADLALPIVVAQLAQIAMGFVDTLMAGRVGPEALAAVALGNSFWVPAYLLSTGILLATTPRVAHLRGAGRQPEIGPLVRQALWLALAAGSAAALLLWNVEPALHLMRVEASLIEPTMGYLRAVACGIPAVALYYVLRCFSDGLGHTRPSMLIGIAGLLLNIPANYVFIHGKLGLPAMGGVGCGWATALVMVFMLLAMLFWVRHAPHYRPSRLFERFDRPCWPELRRLLAVGLPIGVAVFAEASIFSVIALLIGGLGAQVVAGHQIALNFSGLVFMVPYSLGMAVTVRVGHALGRGSPRDARFSAGTGIIAALGFATLAAGLMLLLRERIPHIYSSDPAVIAIASSLLLYSALFQFSDAIQVTAAGALRGYQDTRAIMSITLLAYWGVGLPIGYGLGLGGWLDESSGPRGLWQGMVIGLSCAALLLGARLIRSARRHIHGPAAA

SEQ ID NO: 1559 - protein, 984 aa, Aquifex aeolicus VF5
MLIRPISFAYNPLRKCDCKWKSLRLILNGSTGGLKMEIGGSFYERKYYSTCYMCACRCGIEVYVRNGKVTYIKGNDDHPLNKGVLCAKGSSGIMKEYSPARLRKPLLRVGPRGSGQFKEIEWDEALEIAAKWIKEAAQKNPSKVAFFTGRDQMQAINGWFAGQIGTLNWAAHGGFCSVNVAAAGLMSVGYSFWEFGDPDFEHTKYFMMIGVAEDHASNPFKLGIQELKRRGGKFVFVNPVRWSYGAIADEWVPIKPGTDGAFILGLAHVLFKYNLIDWEFLKEFTNAPWLVIQAPGTPKDGLFYRNEEGKPMVFDKKSNSFKPADRIVPEDLDPAFIGEFETPEGYKVRPAFDIFAERIVKDYTPEKVEKITGIPAETIERIAKELGVTALYNPIELPIEWTDVWGRKHKKMVGRPVSFHIMRGIASHTNGYQTARAVFVLMMLLGCIDRPGGHLAKPPYPKHIEDLPKPKKIKSLDELEFGKPYGPHLGIPQSPDDLLVDEKGNPLRIDRAYSWEFPIAAHGCIQNVIPAAYQKDPYDIEVLMIYMANMAWNSSQNIPYILEALTAKDASGNYIIPKIITIDAFYSEMVAYSDLVLPDATYLEQWFALSLLDRPPSVASGPVDAIRQPIVEPQDLKGEKLDVLPWGEVMVRLGTKLGLPGFLNEDGTPKYKDWKDFLINWQPQPGVGALAGWRGKNGDKHFVGEPNPNQLEMYAKNKGFFYYPLPEHMRYYRHVNKDYLEWAKSVKFVKRTDPIIMNFYVETLQKFRLAGQGLWEGENQPPNDPAIRERLVRYFDPLPFWYPPFEEEVSGKDYPLYAFTKRPQWMYHSWDSQNAWLRQISTRNYLYMNPKTAKKLGIKHLDWVWVESRIGRVKCQVFLTECTEPNSVWTWNAIGKMIGAWGLKPEAEEGHQGFLLNHVIPHSIKMNGKEFYYGDPITGHLAWFDTKVRVYKAEDQTPETYPEFKVEPLPYIKERWVDVLRYKP

SEQ ID NO: 1560 - protein, 244 aa, Nitrosomonas europaea ATCC 19718
MTNSTHFGFTTVSETEKARKVAEVFHSVAARYNLMNDLMSMGLHRLWKRFAIDVSGAKPGDKVLDIAGGTADLTRLFLEKTGSTGEVWLTDINNSMLSIGRDRMLNDGKSVPVAQCDAEKLPFPDNYFDRVCVAFGLRNMTHKDAALREMWRVLSPGGSLIVLEFSKVWKPLQPLYDTYSFKALPFMGKIVARDDTSYRYLAESIRMHPSQEELKQLMQQAGFERVEYFNLTAGVVALHRGYKF

SEQ ID NO: 1561 - protein, 388 aa, Listeria monocytogenes EGD-e
MKIGIDKIGFYTPAFYVDMVELAEARNIDPNKFTIGIGQDKMAFAPITQDSVTMGANAALQILDEEDLKKIDLVILATESGIDESKAGAVYIHRLLGIQPFSRAIEIKEACYGATAGINLAKDYVAKHPDSKVLVIGSDIARYGLATGGEATQGAGAVAMVIAADPRCITLEDDNVFYTEDIMDFWRPVYSEYACVEGKYSTEQYIHFFQTIWEKYSAKFGKNLEDFAAICFHLPYTKMGKKALDTIIETAPSDVQEKLLENYRLSTLYSRNVGNIYTGSLYLSFISLLDNQPDLQAEDKIGFFSYGSGAVGEFFHGVLQPDYKKYIRKDEHAELLANRTKLAIPDYETKFKQQLPKDGSIFEVDPASDPAAIVLTGIQEHKRQYIKK

SEQ ID NO: 1562 - protein, 827 aa, Haemophilus somnus 2336
MNLSRRDFMKANAALAAASVAGLIIPVKNVNAADTSITWDKAVCRFCGTGCAVLVGTKDGRVVASQGDPDAEVNRGLNCIKGYFLPKIMYGKDRLTHPMLRMKNGQYDKEGEFTPVTWDFAFKTMAEKFKSALKAKGPNGVGMFTSGQSTIFEGVAKSKLFKAGLLSNNIDPNARHCMASAAVAFVRTFGIDEPMGCYDDIEHADAFVLWGSNMAEMHPILWSRISDRRLANPDTVSVNVLSTFEHRSFELADLGILLKPQSDLAILNYIANYLIENNAINREFIEKHTKFKRGETDIGYGLRPQDPREQTAKNVKTAGKMYDSSFEEFKKLVAPYTLEKAHEISGVPKEQLEKLAKLYADPNKKVVSYWTMGINQHTRGVWANHLIYNIHLLTGKISLPGCGPFSLTGQPSACGTAREVGTFIHRLPADLVVIKPEHRKIAEKIWKLPEGLISDKLGFHAVAQSRALKDGKMQVLWQMCNNNMQAGPNINEETYPGWRNPDNFIVVSDPYPTVSALSADLILPTAMWVEKEGAYGNAERRTQFWRQQVKAPGEAKSDLWQLVEFSKYFTTDEVWPAEILAKNPAYQGKTLYEVLYLNGQVNQYSNDELKGRLNDEAYHFGFYIQKGLFEEYASFGRGHGHDLADFDTYHKARGLRWPVVDGKETLWRYREGYDPYVKAGEGVSFYGQADKRAVILAVPYEPPAEVPDRKYDLWLTTGRILEHWHTGSMTRRVPELHRSFPNNLVWMNPNDAKKRGLKHGDKIKVISRRGEITSYIDTRGRNKCPEGLIYTTFFDAGQLANKLILDATDPISKETDFKKCAVKVVKA

SEQ ID NO: 1563 - protein, 159 aa, Oryza sativa
MRMAAPQQVHVRAAPLARALRTRVAAAAASASSPERALLGLSEPDLRQLAVDLGQQSYRGKQLHDLLYKSRAKQIQEFSHVPKVFREALVGAGWKVGRSPVHHAVTASDGTTKILLKLEDNRLIETVGIPVDDDKGPSRLTACVSSQVGCPLRCSFCAT

SEQ ID NO: 1564 - protein, 531 aa, Citrus unshiu
MDSCCVGLRANTHVVKASKYGSKIGDNALWGERIRGSVRNDGCTKQLKKSLKAEKRDEKVKPGVAYAIMTSKHPNEVMTLAPPRLERRRVDPKNVAAIILGGGAGTKLFPLTLRAATPAVPVSGCYRLIDIPINSGINKIFVLTQFNSASLNRHIARTYFGNGTNFGDGFVEVLAATQTPGESGKNWFQGTADAVTRFTWVFEDAKNRNIENVAILCGDHLSILCGDHLYRMDYMDFIQSHVDRDADITISCAAVGESRASDYGLVKIDNMGRIAQFAEKPSGANLKAMQVDTSLLGFSPQEARKSPYVASMGVYVFKKDVLLKLLRWRYPTSNDFGSEIIPAAIMEHDVQAYIFRDYWEDIGTIKSFYEANMALTKESPAFHFYDPKTPFYTSPRFLPPTKIDNCRMKDAIISHGCFLRECTVEHSIVGERSRIDYGVELKDTVMLGADYYQTESEIASLLAEGKVPIGVGRNTKIRNCIIDKNVKIGKDVVIVNKDGVQEADRPELGFYIRSGITIIMEKATIEDGMVI

SEQ ID NO: 1565 - protein, 638 aa, Azotobacter vinelandii
MSEIIRVPDIGGDGEVIELLVKTGDLIEVEQGLVVLESAKASMEVPSPKAGVVKSVSVKLGDKLKEGDAIIELEPAAGAAAAPAEAAAVPAAPTQAVDEAEAPSPGASATPAPAAASQEVRVPDIGSAGKARVIEVLVKAGDQVQAEQSLIVLESDKASMEIPSPASGVVESVAIQLNAEVGTGDLILTLRTTGAQAQPTAPAAAAAASPAPAPLAPAAAGPQEVKVPDIGSAGKARVIEVLVKAGDQVQAEQSLIVLESDKASMEIPSPAAGVVESVAVQLNAEVGTGDQILTLRVAGAAPSGPRARGSPGQAAAAAAAAPAPAPVGAPSRNGAKVHAGPAVRQLAREFGVELAAINSTGPRGRILKEDVQAYVKAMMQKAKEAPAAGAASGAGIPPIPPVDFAKYGEIEEVPMTRLMQIGATNLHRSWLNVPHVTQFESADITELEAFRVAQKAVAEKAGVKLTVLPLLLKACAYLLKELPDFNSSLAPSGQALIRKKYVHIGFAVDTPDGLLVPVIRNVDQKSLLQLAAEAAELAEKARSKKLGADAMQGACFTISSLGHIGGTAFTPIVNAPEVAILGVSKASMQPVWDGKAFQPRLMLPLSLSYDHRVINGAAAARFTKRLGDLLADIRAILL

SEQ ID NO: 1566 - protein, 501 aa, Suaeda liaotungensis
MSIPIPSRQLFIDGEWREPIKRNRLPIINPSTEETIGEIPAATAEDVEAAVSAARRALKRNKGRDWAATSGAHRARYLRAIAAKVSEKKDHFVKLETMDSGKPLDEAVLDIDDVSTCFEYFADQAEALDNKQKYPVKLPMDRFKSHVLRQPIGVVGLISPWNYPLLMATWKIAPALAAGCTAVLKPSELASVTCLEFGEVCNEVGLPPGVLNILTGLGPDAGAPLVSHPDVDKVAFTGSSATGSKVMGSAAQLVKPVTLELGGKSPIIVFEDVVDLDVAAEWTIFGVFWTNGQICSATSRLLVHESIAAEFVEKLVKWSKKIKISDPFEEGCRLGPVISKGQYDKIMKYISTAKSEGATILCGGSRPEHLKKGYFIEPTIVTDITTSMQIWKEEVFGPVLCVKTFSTEEEALELANDTEYGLAAAVFSKDLERCERVTKALEVGAVWVNCSQPCFCHAPWGGVKRSGFGRELGEWGIENYLNIKQVTSDISDEPWGWYKSP

SEQ ID NO: 1567 - protein, 504 aa, Bacteroides thetaiotaomicron VPI-5482
MSKKALLMILDGWGLGDQKKDDVIFNTPTPYWDYLMNNYPHSQLQASGENVGLPDGQMGNSEVGHLNIGAGRVVYQDLVKINRACADNSILQNPEIVSAFSYAKENGKSVHFMGLTSNGGVHSSMVHLFKLCDISKEYGIDNTFIHCFMDGRDTDPKSGKGFIEELSAHCEKSAGKIASIIGRYYAMDRDKRWERVKEAYDLLVNGQGKKATDMVQAMQESYDEGVTDEFIKPIVNANCDGTIKEGDVVIFFNYRNDRAKELTVVLTQQDMPEAGMHTIPGLQYYCMTPYDASFKGVHILFDKENVANTLGEYIASKGLNQLHIAETEKYAHVTFFFNGGRETPFDNEDRILVPSPKVATYDLKPEMSAYEVKDKLVDAINENKYDFIVVNFANGDMVGHTGIYEAIEKAVVAVDACVKDVIEAAKAQDYEAIIIADHGNADRALNEDGTPNTAHSLNPVPCVYVTGNKAAKVEDGRLADVAPTILKIMGLEAPADMNGQILIK

SEQ ID NO: 1568 - protein, 749 aa, Ajellomyces capsulatus
MTSKVEEGLQRVKELVENMQPGEQKVADLARDTTDVNGCLPFTTDHGVKVSNTDFWLRLASENQTGPLLLEDQIAREKIHRFDHERIPERVVHARGTGAFGHFKLFESAADVTSAGVLTDTSRTTPVFVRFSTVQGSKGSFDTVRDVRGFATKFYTEEGNWDLVGNNIPVFFIQDAVKFPDFVHAVKPEPHNEVPQGQTAHNNFWDFVYMHPEATHMFMWAMSDRAIPRSYRMMQGFGVNTFVLVNKQGKRHFVKFHWMPELGVHSLVPDESFKLGGQDPDFHRKDLMEAIDNKVYPKWKFGIQVLPEEKEHDFDFDILDPTKIWPESLIPVRYIGEMELNRNVDEFFPQTEQVAFCTAHIVPGIEFSGDPLLQGRNFSYFDTQITRLGVNWEELPINRPVCPVMNHNRDGAMRHKITQGTVNYWPNRFEACPPTKPEDGGFVTYPQKVEQSIKARMLSSKFREHINQAQLFYNSLSEYEKLHVNNAFCFELDHCDDPIVYNRLVSRISEIDHALAQAVAVKVGAPTPPRPGRDNPGQTTINLSQKYINDRQLSSPTIKGRRIAILIGDGYDSVAFGTVIAAVSAMGALPFIIGTKRQPIFADDEDRNHSKGVTPNHNYTSQRSTCFDATFIPGGSHIKELSQLGLIQHWVAEQFGHCKAIGATGEAINLIVQALSNLPDLEVASASSGHPVDWYGVVTSSKLHEPHSLTEGIKLFPEASDFLGKLFYQISQHRNYEREMAGLTDKVPF

SEQ ID NO: 1569 - protein, 345 aa, Triticum aestivum
  unsure (1)..(345): unsure at all Xaa locations
RRCTRETHCEFLTEQVTCMRNGRRDDSYQKWRWQPTDCDLPRFDARLLLEPPRGVRRRLGGAARVRCPGESXVCLVQSAIPKGHKTLTKFVNNGSSNVFYAHDYNATVEFYWAPFLVESNSDNPKVHSVPDRVIQWHSIAKHAKNWVGVDYLVFNTYIWWLSALDMKVLKKGSFDEGATEYEEVDRPVAYSEVLKTWAKWVDRNIDPNSTTVFFMGMSPNHITPEAWGNXXGIKCAMETQPIANRSATLDVGTDWRLYAGAQDVLKTFRRVPVHFVDITALSELRKDAHTSVHTLRQGKLLTPEQQANPKTYADCIHWCLPGLPDTWNQFLYARIVSSASTQRQE

SEQ ID NO: 1570 - protein, 728 aa, Ajellomyces capsulatus
MRSLKLILASASVVSATCPYMSGEMPNSQNGPLDRRHDTLSDPTDQFLSKFYIDDEQSVLTTDVGGPIEDQHSLKAGNRGPTLLEDFIFRQKIQHFDHERVPERAVHARGAGAHGVFTSYNNWSNITAASFLNAAGKQTPVFVRFSTVAGSRGSVDSARDIHGFATRLYTDEGNFDIVGNNVPVFFIQDAIQFPDLIHAVKPQPDSEIPQAATAHDTAWDFFSQQPSSLHALFWAMSGHGIPRSMRHVDGWGVHTFRLVTDEGNSTLVKFRWKTLQGRAGLVWEEAQALGGKNPDFHRQDLWDAIESGRYPEWELGFQLVNEADQSKFDFDLLDPTKIIPEELVPFTPIGKMVLNRNPKNYFAETEQIMFQPGHVVRGIDFTDDPLLQGRLYSYLDTQLNRHGGPNFEQLPINRPRIPFHNNNRDGAGQMFIPLNTAAYTPNSMSNGFPQQANRTHNRGFFTAPGRMVNGPLVRELSPSFNDVWSQPRLFYNSLTVFEKQFLVNAMRFENSHVRSETVRKNVIIQLNRVDNDLARRVALAIGVEPPSPDPTFYHNKTTVPIGTFGTNLLRLDGLKIALLTRDDGSFTIAEQLRAAFNSANNKVDIVLVGSSLDPQRGVNMTYSGADGSIFDAVIVVGGLLTSASTQYPRGRPLRIITDAYAYGKPVGAVGDGSNEALRDVLMAAGGDASNGLDQPGVYISNDVSEAYVRSVLDGLTAYRFLNRFPLDR

SEQ ID NO: 1571 - protein, 517 aa, Oncidium cv. 'Goldiana'
MELCMKSQIALSAAVLQPHAGSGRFSDGETMGQRLDFSSFRRANEQICRRRRASLLRMSFATTELVAEGKLRDLELEGRDPRTVVAVILGGGAGTRLFPLTRQRAKPAVPIGGAYRLIDVPMSNCINSGINKVYILTQFNSASLNRHLLRAYNFSNGIGFGDGFVEVLAATQTPGEAGKKWFQGTADAVRQFHWLFEDAKGKEIEDVLILSGDHLYRMDYMDFVQSHRQSGADITISCVPMDVSRASDFGLMKIDNNGRVLSFSEKPKGQELKAMEVDTSVLGLSREQAKKTPFIASMGVYVFKKEILLNLLRWRFPTANDFGSEIIPASAKELFVKAYLFNDYWEDIGTIKSFCEANLSLTRHPPNFSFYDATKPIYTSRRNLPPTAINNSKIVDSIISHGSLLSNCLIEHSVVGIRSRINDNVHLKDTVMLGADLYETDAEIAALLAEGRVPVGIGENTKIKDCIIDKNARIGKNATISNVDGVQEADRSAEGFYTRSGITVILKNSTIPDGFAI

SEQ ID NO: 1572 - protein, 387 aa, Aquifex aeolicus VF5
MFEFSDRLKVLPPYLFAELDRKKQEKIEQGVDVIDLGVGDPDMPTPKPIVEAAKKALENPENHKYPSYVGKYEFRKAVADWYKRRFDVDLDPNTEVITLIGSKEGIAHFPLAFVNPGDIVLCPDPAYPVYRIGAIFAGGTPYTVPLKEENNFLPDLDSIPEDVAKKAKIIWINYPNNPTSAPPTLEFYKKLVDWAKEYNVIIASDNAYSEIYTGQEKPPSILQVPGAKDVAIEFHSLSKTYNMTGWRIGMAVGNKELVAGLGKVKTNVDSGQFGAVQDAGIVALNLPEEEVEKIRDVYRERKKIMTEALEKIGLEIYRSDYTFYLWIKVPEGYTSAEFVGRLIDEAGIVCTPGNGFGEYGEGYFRISLTVPTERLLEAAERIKNLKL

SEQ ID NO: 1573 - protein, 504 aa, Sinorhizobium meliloti
MLSNFIAPDSNDPRLRIKSRYQMLVDGKSVDAASGSTIDRVSPGHAGEVVGTWPEASADDVRKAVAAARKAFDAGPWPRMSGAERSRLMFKVADLILARQEELALIESLEVGKPIAQARGEIGFCADLWSYAAGQARALEGQTHNNIGDDRLGLVLREPVGVVGIITPWNFPFIIASERVPWAIGSGCTVVLKPSEFTSGTSIRLAELAREAGIPDGVFNVVTGYGDPAGQVLAEDPNVDMVAFTGSVRVGTKLGEIAARTVKRVGLELGGKGPQIVFADADLDAAADGIAYGVYHNAGQCCISGSRLLVQEGIRDALMERLLDISRKVAFGDPLNERTKIGAMISEAHAEKVHSYVTAGITSGAELLLGGERIGREAGLYYAPTVFAGVTPDMSIAREEIFGPVLSTLTFKTADEAVALANATEFGLSASVWSTNLETALQTIRRIRAGRCWINSVIDGTPELPIGGYKKSGLGRELGRYGFDEYSQFKGVHVTLGRPAPWFT

SEQ ID NO: 1574 - protein, 267 aa, Zea mays
  unsure (1)..(267): unsure at all Xaa locations
MDPKMTEVTQMFARFKAAYTRNDLDACVTLLSQLKVHLTKFPSLPPSFEQTPNAVEELKLARDIYEHAVVLSVKLEDQDAFERDFCQLKPYYMDTCGIIPPSPEEYPILGLNLLRLLVQNRIAEFHTELELLPVKALEHPCIKHAVELEQSFMEGAYNRVLSARQAVPHETYVYFMDLLAKTVRDEIAGCSEKGYDSLSVSDAKQMLMFSSDQDLHEYITEEHPEWXEFKNGAVFFQKAKESQPXQEIPSLQLINXTLSYARSWTYV

SEQ ID NO: 1575 - protein, 250 aa, Comamonas testosteroni
MGRVNDKVVLVTGGAMGMGLTHCTLLAREGATVYLSDMNEELGHQAVAEIRRQGGKAHFLHLDVTNENHWTGAVDTILAESDRLDALVNNAGILTLKPVQDTSNEEWDRIFEINVRSVFLGTRAVIEPMRKAHKGCIVNVSSIYGLVGAPGAAAYEASKGAVRLFTKACAVDLAPFNIRVNSVHPGVIATPMTQQILDAPQSARALLGPTLLGRAAQPMEVSQAVLFLVSDEASFVHGSELVVDGGYTAN

SEQ ID NO: 1576 - protein, 290 aa, Actinobacillus actinomycetemcomitans
MKGIILAGGSGTRLYPITRGVSKQLLPVYDKPMIYYPLSVLMLAGIRDILIITTPEDNESFKRLLGDGSNFGVNLQYAIQPSPDGLAQAFLIGEAFINGDSCCLVLGDNIFYGQHFTQMLQRAVARPYGATVFGYLVKDPGRFGVVEFDENFKAVSIEEKPAQPKSNYAVTGLYFYDNRVVDFAKQVKPSARGELEITTLNEMYLKDGSLNVQLLGRGFAWLDTGTHESLHEAASFVRTIERVQGLQVACLEEIAWRNGWLTSEQVEILARPMVKNEYGQYLLRLINEEK

SEQ ID NO: 1577 - protein, 728 aa, Aspergillus fumigatus
MRLTFIPSLIGVANAVCPYMTGELNRRDEISDGDAAAATEEFLSQYYLNDNDAFMTSDVGGPIEDQNSLSAGERGPTLLEDFIFRQKIQRFDHERVPERAVHARGAGAHGVFTSYGDFSNITAASFLAKEGKQTPVFVRFSTVAGSRGSSDLARDVHGFATRFYTDEGNFDIVGNNIPVFFIQDAILFPDLIHAVKPRGDNEIPQAATAHDSAWDFFSQQPSTMHTLLWAMSGHGIPRSFRHVDGFGVHTFRFVTDDGASKLVKFHWKSLQGKASMVWEEAQQTSGKNPDFMRQDLHDAIEAGRYPEWELGVQIMDEEDQLRFGFDLLDPTKIVPEEFVPITKLGKMQLNRNPRNYFAETEQVMFQPGHIVRGVDFTEDPLLQGRLFSYLDTQLNRHGGPNFEQLPINQPRVPVHNNNRDGAGQMFIPLNPHAYSPKTSVNGSPKQANQTVGDGFFTAPGRTTSGKLVRAVSSSFEDVWSQPRLFYNSLVPAEKQFVIDAIRFENANVKSPVVKNNVIIQLNRIDNDLARRVARAIGVAEPEPDPTFYHNNKTADVGTFGTKLKKLDGLKVGVLGSVQHPGSVEGASTLRDRLKDDGVDVVLVAERLADGVDQTYSTSDAIQFDAVVVAAGAESLFAASSFTGGSANSASGASSLYPTGRPLQILIDGFRFGKTVGALGSGTAALRNAGIATSRDGVYVAQSVTDDFANDLKEGLRTFKFLDRFPVDH

SEQ ID NO: 1578 - protein, 331 aa, Oryza sativa
MAPSFDFAASILLCAEDNTAILDLGEESEEISWVVGVDASLGDLSMDFPLQSDDCIEALLGREEQQHIPMEGYLQRLLLQPDGLDLVAVRSDAIDWIWKVHELYKFGPLTAVLSVNYLDRFLSVFDLPVCDAKYVFETRTIKRMELAVLNALKWRMQAVTACSFIDYYLHKFNDDDTPSTSALSRSVDLILSTCKVAEFLVFRPSEIAASVALGASEEHETSMFERVATCYKNLKKLLVHLMPVFWNSDSSIPSHTGRSNDQITLMELRLLGFQFLGNDDDDGDEAAAAVVAAVRWTGAAEDRFTVSLSDLAARAIMHATAVSFAAAVRET

SEQ ID NO: 1579 - protein, 189 aa, Glycine max
  unsure (1)..(189): unsure at all Xaa locations
MASSMISSPAVTTVNRAGAGMVAPFTGLKSMAGFPTRKTNNDITSIASNGGRVQCMQVWPPVGKKKWETLSYLPDLGDAQLAKEVEYLLRKGWIPCLEFELEHGFVYREHNRSPGYYDGRYWTXWKLPMFGCTDALRVLXELQEAKTAYPHGFXRISGFDDGVPSAMALIVSGVQPPGLLSERRYAKLW

SEQ ID NO: 1580 - protein, 263 aa, Zea mays
MGEEKNQQHFVLVHGACHGAWCWNKVKPLLEASGHRVTALDLAASGIDTTRSITEISTCEQYSEPLIQLIASLPSDEKVVLVGHSFGGFSLAMAMDKFPDKISVSVFVTAFMPDTKHSPSFVVDKFKRDTPPEAWLGSEFKSYGSDNSGVSMSFSTEFMKHALYQLSPVEDIELGLLLKRPGSLFINDLSKVENFSDKGYGSVPRAYIVCKEDKTITKEIQWWMIDNYPTKVVKEMEDTDHMPMFCKPQLLSDYLLEIAEKLA

SEQ ID NO: 1581 - protein, 539 aa, Arabidopsis thaliana
MAYASRIINHSKKLKDVSTLLRRENAATIRYYSNTNRAPLNREDTFNSRLGYPPLERISICSTSTLPVSIIFSTTRSNLSSAMGRPIFGKEFSCLMQSARGFSSGSDLPPHQEIGMPSLSPTMTEGNIARWLKKEGDKVAPGEVLCEVETDKATVEMECMEEGYLAKIVKAEGSKEIQVGEVIAITVEDEEDIGKFKDYTPSSTADAAPTKAEPTPAPPKEEKVKQPSSPPEPKASKPSTPPTGDRVFASPLARKLAEDNNVPLSDIEGTGPEGRIVKADIDEYLASSGKGATAKPSKSTDSKAPALDYVDIPHSQIRKVTASRLAFSKQTIPHYYLTVDTCVDKLMALRSQLNSFKEASGGKRISVNDLVVKAAALALRKVPQCNSSWTDDYIRQFKNVNINVAVQTENGLYVPVVKDADRKGLSTIGEEVRLLAQKAKESSLKPEDYEGGTFTVSNLGGPFGIKQFCAVVNPPQAAILAVGSAEKRVVPGNGPDQFNFASYMPVTLSCDHRVVDGAIGAEWLKAFKGYIENPKSMLL

SEQ ID NO: 1582 - protein, 520 aa, Zea mays
MRATIPALSLLVTPRLPSLAVPLAGGRLREGGRSRTRLRVAAPTSVPGEAAEQAEPSTSAPESGEKFSWRDHWYPVSLVEDLDPSRPTPFQLLNRDLVIWKEPKSGEWVALDDRCPHRLAPLSEGRIDETGCLQCSYHGWSFDGSGACTKIPQAMPEGPEARAVRSPKACAIKFPTLVSQGLLFVWPDENGWEKAAATKPPMLPKEFEDPAFSTVTIQRDLFYGYDTLMENVSDPSHIEFAHHKVTGRRDRARPLTFRMESSGAWGYSGANSGNPRITATFEAPCYALNKIEIDTKLPIFGDQKWVIWICSFNIPMAPGKTRSIVCSARNFFQFTMPGKAWWQLVPRWYEHWTSNLVYDGDMIVLQGQEKIFLAATKESSTDINQQYTKITFTPTQADRFVLAFRTWLRKFGNSQPEWFGNPTQEALPSTVLSKREMLDRYEQHTLKCSSCKGAYNAFQNLQKVFMGATVVCCAAAGIPPDVQLRLLIGAAALVSAAVAYAFHELQKNFVFVDYVHADID

SEQ ID NO: 1583 - protein, 469 aa, Bordetella bronchiseptica RB50
MASTMETDLLVLGGGPGGYTAAFRAADLGLSVVLVEQRPTLGGVCLNVGCIPSKALLHCAKALDEARAMSELGIEFSEPRIRLDKLRAHKEALVAKLCGGLGGLARQRKVQVVTGTGRFDGPHSLAVSDGSRVAFKQAVIAVGSRPVRLPFLPDDPRIMDSTGALELKEIPRRLLVIGGGVIGMELATVYAALGARVTVVELTDGLLPGCDRDLVKPLAQRVAGRYEAVLLGTRVSAAQARDDGIHVGFEGPQAPGPQVYDQVLVAAGRRPNGAAIDAERAGVRVDEGGFIRVDAQQRTNVGHIYAIGDVVGEPMLAHKAAHEGKVAAETAAGMRVANDARVIPAVAYTDPEVAWVGLTETAAQRDGIAYEKAAFPWAASGRALSLGRGEGLTKILVDPATHALLGVGMVGPQAGDLIAEAALAIEMGAEPGDIALTIHPHPTLSETLAFAAEAYEGTLTELYLTRKKS

SEQ ID NO: 1584 - protein, 334 aa, Escherichia coli
MSMIKSYAAKEAGGELEVYEYDPGELRPQDVEVQVDYCGICHSDLSMIDNEWGFSQYPLVAGHEVIGRVVALGSAAQDKGLQVGQRVGIGWTARSCGHCDACISGNQINCEQGAVPTIMNRGGFAEKLRADWQWVIPLPENIDIESAGPLLCGGITVFKPLLMHHITATSRVGVIGIGGLGHIAIKLLHAMGCEVTAFSSNPAKEQEVLAMGADKVVNSRDPQALKALAGQFDLIINTVNVSLDWQPYFEALTYGGNFHTVGAVLTPLSVPAFTLIAGDRSVSGSATGTPYELRKLMRFAARSKVAPTTELFPMSKINDAIQHVRDGKARTAWC

SEQ ID NO: 1585 - protein, 457 aa, Borrelia burgdorferi B31
MMDIKTLKGFKDYLPKDSLIRIHIVRQIFSVLNSYNFDLIDTPVLEYSDLLLKKSGDETEKQIYRFKDNGGRDVSMRFDLTVPFARFVATNISALKLPFRRSQFGKVFRGENSQKGRYREFMQFDFDIVGEDTFRGDAEILSVVYYGLEEIFLNFIEGINKKFIIHYSHIGILNSFFEKLGLKEKSIFILRNIDKIDKIGIDKVKEALLLEIEKEAVDSILSLVSLQGTFKDKIQALKSILGDNESIKRVEDVFQHLSLLKIQDSFNLNLKISRGLDYYTGIVFESEVFGSNMGSVCSGGRYDNLVSSFSNSIQKISGVGGSFGVDRIKDIIDLEKFSYIKIFVTKARSKVLIVNLDSALQNYYYELATRFRNHDYSKVKNISCEVYFKNKNGKNIKEQIEYALSKEIRFLVFVGQEEYKENKMKVRDLTKKEELLLSFEESINLIKCNEKLLCTPF

SEQ ID NO: 1586 - protein, 88 aa, Zea mays
MSALTLGEDDLNGKKVFVLADVNVPLDDAQKITDDTLIRAFVPTIKLLLEKGAKVILVRHLGPRKGVTPKYRLTPLVPRLSELLGVSV

SEQ ID NO: 1587 - protein, 427 aa, Methanopyrus kandleri AV19 [sequence omitted]

SEQ ID NO: 1588 - protein, 536 aa, Deinococcus radiodurans
MSDENNKGVGTAVQGVGGPRDGRTAPGEQGTTLTTRQGHPVHDNQNSRTVGSRGPMTLENYQFIEKLSHFDRERIPERVVHARGVGAHGVFRATGKVGDEPVSKYTRAKLFQEDGKETPVFVRFSTVGHGTHSPETLRDPRGFAVKFYTEDANWDFVVNNLKIFFIRDALKFPDLIHSQKPSPTTNIQSQERIFDFFAGSPEATHMITLLYSPWGIPASYRFMQGSGVNTYKWVNDQGEGVLVKYHWEPVQGVRNLTQMQADEVQATNFNHATQDLRDAIERGDFPQWDLFVKIMEDGEHPELDFDPLDDTKIWPREQFPWRHVGQMTLNRNPENVFAETEQAAFGTGVLVDGLDFSDDKMLQGRTFSYSDTQRYRVGPNYLQLPINAPKKHVATNQRDGQMAYRVDTFEGQDQRVNYEPSLLSGPKEAPRRAPEHTPRVEGNLVRAAIERPNPFGQAGMQYRNFADWERDELVSNLSGALAGVDKRIQDKMLEYFTAADADYGQRVREGIQAKEAEMKGQKQEAPVYGTEASSLY

SEQ ID NO: 1589 - protein, 444 aa, Streptomyces coelicolor A3(2)
MTALPQERRVVTAIPGPKSQELQARRTAVVAQGVGSTLPVFVARAGGGVIEDVDGNRLIDFGSGIAVTSVGASAEAVVRKASAQLADFTHTCFMVTPYEGYVAVAEALAELTPGDHAKKSALFNSGAEAVENAVKIARAYTKRQAVVVFDHGYHGRTNLTMALTAKNMPYKHGFGPFAPEVYRVPVAYGYRWPTGAENAGPEAAAQAIDQISKQVGAENVAAVIIEPVLGEGGFIEPAKGFLPAIREFASDNGIVFVADEIQSGFCRTGQWFACEDEGIVPDLITTAKGIAGGLPLSAVTGRAEIMDAAHSGGLGGTYGGNPVACAGALGAIETMKELDLNARAKDIEAVMKSRLAAMAEKFDVIGDVRGRGAMIAIELVKDRETKEPNPAATAALAKACHQEGLLVLTCGTYGNVLRFLPPLVIGEDLLNEGLDIIEQAFTRV

SEQ ID NO: 1590 - protein, 446 aa, Listeria monocytogenes EGD-e
MAKFTYDVVIIGSGASGTTVAFEAQAAGLKVAIVEERNWGGTCVLRGCDPKKVLIGAREARNLSTRLRGKGIKQAATISWTDLMAFKETFVENVPESRLASFQEAGIETFFGAASFQDSHSLQVGDDLIYAEKIVIATGATPSTLKVEGKEYIQTSDDFLSLEKLPDSVVFIGGGYISFEFASIALAAGRDVHIIHHNSEPLKKFDPDFVAALVANIKDEGIHFHFDTDITKIENDGGKLHIKGKDSFSLQTDLIIGATGRMPNIAHLSLENASIDYTKKGIVVNEKLQTPNNPHIYACGDVAATKGAPLTPVVSLEAALVAKNVIGVNEKITYPAIPSVVFTSPKLASIGISTEEAKANPEKYQIKNHDTTSWYTYKRTNEQIALAKIIEDRESGQIKGAHFLSEEADYMINYIAILMKANLTLADLQSVIFAYPSPASDLTALN

SEQ ID NO: 1591 - protein, 306 aa, Exiguobacterium sp. 255-15
MGKTVWMFPGQGSQMPGMGQTLLHHEESRQALMDLGTRIGLDLTDLLTTGTKEDLKPTEIAQPAIVAHSTLLANRYAALGHRPDFVLGHSVGEYSALVAASVLTASEAVYLVRERGNLMNQVTGGTMAAVIGLNDVEAAHHAVESIAATGEIVQIANYNCPGQFVISGQVAAVETATAKLKELGAKRVLPLDVSGAFHSSLMTPFASRFEDILVSSPFQAAKTKFISNVDSDFHDQPDELIRLLVQQLYSPVRFEACVEKLIAEGADTFIEFGPSSPLSGLVKRIKKDVKIVSITTLEQLEAEAIR

SEQ ID NO: 1592 - protein, 201 aa, Zea mays
MDPKFPTPLALNKTEPTTVTTTTTLTVQYHYRPDPKDYPQQTAQHQEQQQHHHHPHLQIQIHQPPPPPQDGGGGVKEQQQLLQVVAQPGDRRQQALAPKRSSNKDRHTKVDGRGRRIRMPALCAARIFQLTRELGHKSDGETVQWLLQQAEPAIVAATGTGTAGGHIGFAPMFAGHAAANAGLELGLSQDGHIGVLAAQSI

SEQ ID NO: 1593 - protein, 316 aa, Gloeobacter violaceus PCC 7421
MSASAFAERAGTLQRDTLETLQLNLGKYCNLACTHCHVEAGPNRTEMMDSPTARRIAAWLGANRVRNLDLTGGAPELNAQFRFLVETGRALGLHVMDRCNLTVLFEPGQADLAEFLAGYRVEVIASLPCYSPDNVDKQRGNRVFEQSIAALRQLNQLGYGQPAGGLLLNLVYNPVGAHLPPAQTSLEARYRQELSEHYGIVFNRLFTITNMPIRRFRHYLQRMGQLDTYNRLLSDNFNPSTLVGLMCRSLVSVDWQGRLYDCDFNQMLDLTALGTTGRFLWEYSAADLIGRPIATGEHCFGCTAGSGSSCGGALAT

SEQ ID NO: 1594 - protein, 184 aa, Zea mays
  unsure (1)..(184): unsure at all Xaa locations
MVSPENANWISDLIDADYGSFTIQGPGFSWPVHQPLAVSSNSSAGVDGSAGNSEASKEPGSKKRARCESSSATSSKACREKQRRDRLNDKFTELSVILEPGNPPKTDKAAILVDAVRMVTQLRGEAQKVXGHHFXSFRDKIKELKTEKNELRDEKQRLKTEKEKLXQQLKAMNAXSXSFXXSSP

SEQ ID NO: 1595 - protein, 491 aa, Pseudomonas syringae pv. tomato str. DC3000
MTTQPLNSHRVDPHTAQKFYIDGHWSAPLSPVSIAVVNPATEEVVAHVASGSAADVDRAVAAARAAFAGWSGTSPEVRAQVIGRIHELIIERKEELAQAISLEMGAAISSARAMQVPLAAEHVRVARDLLATYRFQTVEGGTAIEREPIGVCALITPWNWPLYQITAKVAPAIAAGCTVVLKPSELSPLSALLFAQLVHDAGLPPGVFNLVNGSGPEVGGAMAAHPDIDMISITGSNRAGALVAQAAAPTVKRVTQELGGKSPNILLPDADFANAVPPGVMAAFRNVGQSCSAPTRMIVPRNRLAEVEALAAQTAGTIVVGDPQLEHTVLGPIANEAQFHRVQAMINAGICEGAKLVCGGPGRVQGHEQGFYTRPTVFSEVDSSMRIAREEIFGPVLCLIAYDTIDEAVAIANDTVYGLGAHVQGQDLELARSVASRIRAGQVHLNYPSWNPMAPFGGYKRSGNGREYGVHGFEEYLETKAIVGFAPADLM

SEQ ID NO: 1596 - protein, 389 aa, Haloferax volcanii
MPTRSARFPVDERDGRPAAVKWTIHIASHLCPQGPYLTAYVKSAVYRGPGDVRIEEKPEPELQQPTDAVIRVTHTAICGSDLWFYRGHEEHEEGSGVGHEPMGIVEEVGEDVTSVQPGDRVLVPFAYSCGECEFCRKGIHTACVDGGFFGPHGDETGGAQAEKVRVLHADGTVVRVPERYADDEETLKSLLPLTDVMSTGHHAAVLADLEAGDTAVVIGDGAVGLCGVLAAKRIGAERIIAVGHHEDRLEVARELGATDTVSSRGQEAVEEVLELTHGGANHVLECVGAASALETAAQVARPGGSIGAVGVPHVESADFLQPIFYKNLSFSAGGAPVRNYIEELMDDVLQGTLDPSPILTKTVDLDGVPEGYQAMDDREAIKVMVKVDE

SEQ ID NO: 1597 - protein, 581 aa, Hordeum vulgare
MCGILAVLGCGDESQGKRVHVLELSRRLKHRGPDWSGLHQVADNYLCHQRLAIIDPASGDQPLYNEDKSVAVAVNGEIYNHEELRERLSGHRFRTGSDCEVIAHLYEEHGESFIDMLDGVFSFVLLDARDHSFIAARDAIGVTSLYIGWGIDGSVWISSEMKGLNDDCEHFEIFPPGNLYSSKEKCFKRWYNPPWFSEVIPSVPYDPLRLRSAFEKAVIKRLMTDVPFGVLLSGGLDSSLVAAVAARHFAGTKAAKRWGTRLHSFCVGLEGSPDLKAAKEVADHLGTVHHEFNFTVQVRIDAIEDVIYHIETYDVTTIRASTLMFQMSRKIKALGVKMVISGEGADEIFGGYLYFHKAPNKEEFHQETCRKIKALHQYDCLRANKATSAWGLEVRVPFLDKEFIDEAMSIDPEWKMIRPDLGRIEKWILRKAFDDEEKPFLPKHILYRQKEQFSDGVGYSWIDGLKDHAASNVSDKMMSNAKFIYPHNTPTTKEAYYYRMIFERYFPQSSAILTVPGGPSVACSTAKAIEWDAQWSGNLDPSGRAALGVHLSAYEQDTIAVGGSNKPGPMETVVNGVAIES

SEQ ID NO: 1598 - protein, 506 aa, Pseudomonas aeruginosa UCBPP-PA14
MIYAAPGTPGAVVTFKPRYGNYIGGEFVPPVKGQYFTNTSPVNGQPIAEFPRSTAEDIDKALDAAHAAADAWGRTSVQERSNILLKIADRIEQNLELLAVTETWDNGKAVRETLNADIPLAADHFRYFAGCIRAQEGSAAEINDSTVAYHIHEPLGVVGQIIPWNFPLLMAAWKLAPALAAGNCVVLKPAEQTPLGICVLLELIGDLLPPGVLNVVQGFGREAGEALATSKRIAKIAFTGSTPVGSHILKCAAENIIPSTVELGGKSPNIYFEDIMQAEPAFIEKAAEGLVLAFFNQGEVCTCPSRALVQESIYPAFMEEVLKKVRAIKRGDPLDTETMVGAQASQQQYEKILSYLDIAQQEGAEVLTGGSVEKLEGNLASGYYIQPTLLKGHNKMRVFQEEIFGPVVGVTTFKDEAEALAIANDTEYGLGAGLWTRDINRAYRMGRGIKAGRVWTNCYHLYPAHAAFGGYKKSGVGRETHKMMLDHYQQTKNLLVSYDIDPLGFF

SEQ ID NO: 1599 - protein, 439 aa, Neurospora crassa
MGQTLSEPVVEKASATGGDERLIYGVSAMQGWRISMEDAHTTVLDLLANNPKEAKDHSQKLSFFGVFDGHGGDKVALFAGANIHDIIAKQDTFKTGNYEQALKDGFLATDRAILNDPKYEEEVSGCTACVGLITDEKIFVANAGDSRSVLGVKGRAKPLSFDHKPQNEGEKARITAAGGFVDFGRVNGNLALSRAIGDFEFKKSAELAPEQQIVTAYPDVMVHDLADDDEFLVLACDGIWDCQSSQAVVEFVRRGIAAKQDLDKICENMMDNCLASNSETGGVGCDNMTMIIVGFLRGRTKEEWYEEIAKRVANGDGPCAPPEYAEFRGPGVHHNFDDSDSGYDLEDNGNKGKPFGMGGYKGRIIFLGDGTEVLTDADDTEMFDNVDEDKDLASQVSKSPSSITTNDQDQKEQAAVAAAAADNSTQNAKKEETSSPAKA

SEQ ID NO: 1600 - protein, 416 aa, Bordetella bronchiseptica RB50
MSQLNDLLMPKLGLTMTEGMLIEWSVTSGAEVKAGDSLFVVETDKVANEIVAQADGTLAEILVAAGETVPVGTVVARWTGPGQGADDLADAPPAPAPQPPQPAAEAAPAAAREPARGGRVVATPLARRLAREAGLDLAQVSGSGPGGRIKAADVRQAPPALPVAPRDAASPAPAARASLAPAAGEQRIEASALVQSMARRMTQAKQVPHFYLSAEAEVSALLALRQRLNAQADAPRLTLNHFVIAAVARALAAMPHQNRIWNDDHIVQFQGIDVGVAVSTERGLMAPVLHGLDHASLDDIAAQSGALLGRVRAGKATREDMSGGAISISNAGMFNVTYMAPIINPPQSAILGVGSIRELFRPDEQGAPALRREMGLVLAADHRLHDGASALAFLNHVIDLLQDPYRLLRNRPHTKG

SEQ ID NO: 1601 - protein, 291 aa, Saccharomyces cerevisiae
MNTLLFKRKGGNCGNESNIVSQGSPSSSNLPESPGTLDEKNLPRLPTPFARSLSTIPSYEQMKRTNKLPDYHLKIVVVGDGAVGKTCLLISYVQGTFPTDYIPTIFENYVTNIEGPNGQIIELALWDTAGQEEYSRLRPLSYTNADVLMVCYSVGSKTSLKNVEDLWFPEVKHFCPSTPIMLVGLKSDLYEADNLSDLVEPSSAESLAKRLGAFAHIQCSARLKENIDEVFETAIHTLLSDSLYAPREPTHTIKNPFKRNTTRSDIDSSTGDTSVSISGTKRLRKNKCIIM

SEQ ID NO: 1602 - protein, 391 aa, Acalypha californica
REFTSDSADVPITAAGALKSYKLAAKAISRLQSLPSGNMSLLCDVLVKEVSDLTGYDRVMVYKFHEDEHGEVIAECHRPDMEPYLGLHYPATDIPQASRFLFIKNKVRMICDCLAPPVKVIQDSSLTQPVSLCGSTLRSPHGCHAQYMTNMGTLASLVMSATINEDADEIDDDQQKGRKLWGLVVCHHNSSRFVPFPLRYACEFLIQVFGVQINKELELAAQMREKNMLQTQTVLCDMLLRDAPEAIITQSPNVMNLVKCDGAALYYRKKFWLLGVTPTEAQIKDIADWLLEYHGESTGLSTDSLMEAGYPGASILGDAVCGMAAIRISSKDFLFWFRSHTAKEIKWSGAKHDPEDKDDGRKMHPRSSFKAFLEVVKWRGLPWEDMEMDAI

SEQ ID NO: 1603 - protein, 252 aa, Bordetella pertussis Tohama I
MRLNGKTAIVTGAGSGFGEGIAAAFAREGAKVAVADINEAGGQRVAAAINAAGGQAVFVRADVSDNAAVANLLAATLKAFDGLDIVVNNAGTTHRNRPMLEVEEDEFDRIYAINVKSIYLTAKHMVPYFRAHGGGSFINIASTAAIRPRPGLTWYNGSKGAVVTTSKSMAAELGPDNIRVNCVNPVIGATGLLADFMGVPDTPENRKRFLATIPLGRFSTPQDIANACLYLASDETAFITGACLEVDGGRCV

SEQ ID NO: 1604 - protein, 391 aa, Atuna racemosa
DLEPVNPADVPVTAAGALKSYKLAAKAISRLQSLPSGNISLLCDVLVKEVSDLTGYDRVMVYRFHEDEHGEVVAECCRPDLEPYLGLHYPATDIPQASRFLFMKNKVRMICDCLAPPVKVIQDKRLAQPLSLCGSTLRAPHGCHSQYMANMGAIASLVMSVTINDDEEEMEADQRKARKLWGLVVCHHTSPRFVPFPLRYACEFLIQVFGIQINKEVELAAQTREKHILRTQTVLCDMLLRDAPVAIITQSPNVMDLVKCDGAALYYRKKFWLLGITPTEAQIKDIVEWLLHYHGESTGLSTDSLMEAGYPGASVLGGAVCGMAAVKITSKDFLFWFRSHTAKEIKWGGAKHDPNDKDDGRKMHPRSSFKAFLEVVKRRSLPWEDVEMDAI

SEQ ID NO: 1605 - protein, 477 aa, Xanthomonas campestris pv. campestris str. ATCC 33913
MIKPRTPPGIMELLPREQIAFQRMLDVIRRNYERFGFLPVETPVFELSDVLLTKSGGETERQVYFVQSTGALANAAAAADEGAESGGLPELALRFDLTVPLARYVAEHEHELSFPFRRYQMQRVYRGERAQRGRFREFYQCDIDVIGKDALSIRYDAEVLAVIHAVFAELGIGDFKVQLNNRKLLRGFFESLGVAEGELQLAVLREVDKIDKRGAEYVRDTLAGEGFGIAAAQVDKILAFVAVRSNGHADALAQLQALETSVGASVTLGEGIAELREVLELVKALGVPETAYCLNFSIARGLDYYTGTVYETTLTDHPQIGSICSGGRYENLASHYTKSKLPGVGISIGLTRLFWQLREAGLIAGIAESSVHAMVALMDESRLDDALDIARRLRIGGINTEVQMEPKKVGKQFQYAARAGIRFVVLAGDDELARGVVAVKDLVREQQFDVARDELASTLQVELEQAKAMLVSGIAAN

SEQ ID NO: 1606 - protein, 406 aa, Methanopyrus kandleri AV19
MYENISTMDDFEFENKWVLLRIDINSTVIDGKIEDDERIKRHLGTIKELMEHDARVAILAHQGRPGEDDFTTLEPHAEIMSEELDNFEYVPDVFGPTAKKKIRSLEPGEVILLENVRFYSEERINRDPEWHARRHLVRNLAPLFDIFVNDAFAAAHRSNASLVGFTRRLPSCVGRVMEREIEVLETMVRDEMEDGVFVIGGSKIEDAIKVIRRAIEMDNVRRVLLGGLVGNLFLWASGVDLGKPSRKFLDMKGYTGYLDEARELLEEGDDVILVPEDVALNRGGEREEVDVDELPADAPVFDIGTGTIERYRKEVESAGMVVANGPMGVYEEPGFEKGTYEVLNAIADSEAFSVIGGGHIIAAAKACGAYDSIDHVSTGGGAMLRMLAGERLPAIDAILTCPFSGC

SEQ ID NO: 1607 - protein, 148 aa, Escherichia coli
AADAGELGSNGILPDVESLRIPVQYLANLLTAGEYQTGTARTETYAGDASLQTAETVDGKVDTRALEEVGLTEAQAQEMYRYLAIANYEDRFVVPSSHRELAREAFPEKNGCGFTFGDGCHGSDTKFNLFNSRRIDAIDVTSKTEPHP

SEQ ID NO: 1608 - protein, 58 aa, Glycine max
MATIKAVKARQIFDSRGNRTVEVDVILSDGCFHRAAVPSGASTGVYEALELRDGGSYY

SEQ ID NO: 1609 - protein, 174 aa, Triticum aestivum
MAPAVMASSATTVAPFQGLKSTAGLPVSRRSSGSLGRVSNGGRIRCMQVWPIEGIKKFETLSYLPPLSTEALLKQVDYLIRSKWVPCLEFSKVGFVFREHNSSPGYYDGRYWTMWKLPMFGCTDATQVLNEVEEVKKEYPDAYVRVIGFDNLRQVQCVSFIAFRPPGCEESGKA

SEQ ID NO: 1610 - protein, 143 aa, Triticum aestivum
  unsure (1)..(143): unsure at all Xaa locations
MAPTVMASSATSVAPFQGLKSTAGLPVSRRSNGASLGSVSNGGRIRCMQVWPIEGIKKFETLSYLPPLSTEALLKQVDYLIRSKWVPCLDSASWVHLPVEHNASPXYYDGRYWDNVXTAYFGCTDPPVGSQEGYLTLCISVRS

SEQ ID NO: 1611 - protein, 204 aa, Triticum aestivum
  unsure (1)..(204): unsure at all Xaa locations
SVFAGIAQGPEDPILGVTVAYNKDPSPVKVNLGVGAYRTEEGKPMVLNVVRRAEQMLIQNESRVKEYLPITGLADXRTGSLRVGGEFLARHYHERTIYIPQPTWGNHPKVFTLAGLTARSYRYYDPATCGLDFQGLLEDLSSAPSGAIVLLHACAHNPTGVDPTLEQWEQIRQLMRSKALLPFFDSAYQGFASGSLDKDAQSVR

SEQ ID NO: 1612 - protein, 629 aa, Ustilago maydis 521
MNPPASGSGDGGEDAASATQRSSSINQMAFCHECGIEIRPLMTPDPTCPRCNGQFVEIIDENSAADGMSFALETDEDDEIPLPGHFASLSSVQGGGLLNHLLTAMATGRAAQRSPHTPGSSDSNPRTATAADSPGRNQSPYTTTRSGTTSFGPFGLQWNVQYGSGGGDPYQRAAEQQAEQDQRQQQNSNLQSPPTLSNFLRFAFGGADSTDDPATRPDTYFHEDGMGGAGGVADGRHFNHDNRGTFHQPDRSNDPSSRDSGTNAGSPNNDLPPELSALRNLFTSLFGEPGAQGGSLLDVLAAGAQGGGPRGQWGDYVLGQQGLDDIISQLMEQTQGSTAPPPATEDVIEKLERFTLEDKQRIQKARNQDCPTCKDDFLPSSEANKQDGSGEKGEDADEQQQDLISMPCGHIFHVDCLVPWLRMHGTCPVCRISIVKPTEGQEEQSSSNTTTQQPQGSSGGNTSDASAARATAIPGGWPSPPNPFASSFNHNMHQGVQVPRDSPEVSTMTIHPQPATSTTVTSTTYPAHVIGTPSTTGATGPAGIVINSIMSSPPIVSDREEFFAEPPSMDESQQQAHSGIREDMRETLRRAAEDRARNAGAQADGSTGGAGQRQRQRQRQPWLEPDELD

SEQ ID NO: 1613 - protein, 253 aa, Arabidopsis thaliana
MLNVHSHNNNLSNGDKTPLVLSPMSSLHATVSLPLFSNSNHKKLTCAATLSPPPWKQSRRVISVSFFLSRLLLLPNDAMAGGLMDKLDKYVKRKKLDPLEAYVPPVILAQLQIQDLEGFLNWEKPEFEACRRQLRSGPASSLRVNIRAVAQYASDDGFSKTATDDVDRCLRALEELDSLFLRASRKDSNATVVLMKSQLGTALTALDSLLQTVPSQVLDKGKAMVEVYRSASEEDAGSDDLESSEIKQLQSIL

SEQ ID NO: 1614 - protein, 169 aa, Bordetella pertussis Tohama I
MRPMTEIIKPWHSVRRSRLHGNGVFATRKIPAGTRIIEYGGKRISAEEADRRHPTNPDDPFHTFFFSLSSGRVIDGGDEGNDARWINHSCDPNCEAQEGRHGKRVYIVALRDIARGEELFYDYGLVLDGRITRKLKEGYRCLCGTTPCRGTMLALPEKKKTKARSAEKA

SEQ ID NO: 1615 - protein, 391 aa, Austrobuxus megacarpus
DLEPVNPADVPVTAAGALKSYKLAAKAISRLQSLPSGNISLLCDVLVKEVSDLTGYDRVMVYRFHEDEHGEVVAECCRPDLEPYLGLHYPATDIPQASRFLFMKNKVRMICDCMALPVEVVQDERLSQPLSLCGSTLRSPHGCHAQYMANMGSVASLVMSVTINEDDDEMDSGQQTGRKLWGLVVCHHTCSRFVPFPLRYACEFLIQVFGVQISKEVELAAQMREKHILRTQTVLCDMLLRDAPVAIISQSPNVMDLVKCDGAALYYRKKFWSLGVTPTEAEIRDIAEWLLECHNGSTGLSTDSLMEAGYPGASILGDAVCGMAAVRITSKDFLFWFRSHTAKEIKWGGAKHDPDDKDDGRKMHPRSSFKAFLEVVKRRSLPWEDVEMDAI

SEQ ID NO: 1616 - protein, 167 aa, ASPERGILLUS NIDULANS FGSC A4
MPDASSELIDEIGIVKIFRCFSPDIETARICIKVPSTREGLIACRTLEMAGVRTLATTLFTFVQAALAAEVGCTYIAPYVNQLKVHFESGFVDPQKLLPLCVSAQNYYEAIGVRTQVLPASLTSTDEIFALAGAHHITIALSLLQQLSLPLYPRLCSTLNRRVQVPK

SEQ ID NO: 1617 - protein, 391 aa, Balanops vieillardi
DLEPVNPADVPVTAAGALKSYKLATKAISRLQSLPSGNISVLCDVLVKEVSDLTGYDRVMVYRFHEDEHGEVVAECRRPDLEPYLGLHYPATDIPQASRFLFMKNKIRMICDCLAPPVKVIQDKRLAQPLSLCGSTMRAPHRCHVQYMANMGSIASLVMSVTINEDDDETESDQQNGRKLWGLVVCHHSSPRFVPFPLRYACEFLIQVFSIQINKEVELAAQMREKHILQTQTVLCDMLLRDAPEAIITQSPNVMDLVKCDGAALYYRKKVWLIGVTPTEAQIRDIAEWLLEYHRESTGLSTDNLVEAGYPGASVLGVAVCGMAAVRITSKDFLFWFRSHTAKEIKWGGAKHDPDDKDDGRKMHPRSSFKAFLEMVKRRSLPWEDVEMDAI

SEQ ID NO: 1618 - protein, 384 aa, Staphylococcus aureus subsp. aureus MW2
MISNKLANIPDSYFGKTMGRKIEHGPLPLINMAVGIPDGPTPQGIIDHFQQALTIPENQKYGAFHGKEAFKQAIVDFYQRQYNVTLDKEDEVCILYGTKNGLVAVPTCVINPGDYVLLPDPGYTDYLAGVLLADGKPVPLNLEPPHYLPDWSTVDSQIIDKTKLIYLTYPNNPTGSTATKEVFDEAIAKFKDTDTKIVHDFAYGAFGFDAKNPSILASENGKDVAIEIYSLSKGYNMSGFRVGFAVGNKDMIQALKKYQTHTNAGMFGALQDAAIYALNHYDDFLEEQSNVFKTRRDRFEAMLAKADLPFVHAKGGIYVWLETPPGYDSEQFEQFLVQEKSILVAPGKPFGENGNRYVRISLALDDQKLDEAAIRLTELAYLYE

SEQ ID NO: 1619 - protein, 390 aa, Bergia texana
DLEPVNPADVPVTAAGALKSYKLAAKAISRLQSLPSGNISLCDVLVKEVSDLTGYDRVMVYKFHEDEHGEVIAECHRPDLEPYLGLHYPATDIPQASRFLFMKNKVRMICDCMAPPVKVIQDKRLTQPLSLCRSTLRSPHGCHAEYMANMGSIASLVLSVTINDEVDKIEGDKLLGRKLWGLVVCHHASPRFIPFPLRYACEFLIQVFGVQINKEVALAAQTREKHILRTQSVLCDMLLRDAPVAIITQSPNVMDLVKCDGAALYYRKKFWLLGVTPSEAQIRDIADWLLECHSGSTGLSTDSLMEAGFPGASVLGDAVCGMAAVKITSKDFLFWFRSHTAKEIKWGGAKHDPDDKDDGRKMHPRSSLRAFLEVVRWRSLPWEDVEMDAI

SEQ ID NO: 1620 - protein, 390 aa, Bergia texana
DLEPVNPADVPVTAAGALKSYKLAAKAISRLQSLPSGNISLCDVLVKEVSDLTGYDRVMVYKFHEDEHGEVIAECHRPDLEPYLGLHYPATDIPQASRFLFMKNKVRMICDCMAPPVKVIQDKRLTQPLSLCGSTLRSPHGCHAEYMANMGSIASLVLSVTINDEDDKIEGDQLLGRKLWGLVVCHHASPRFIPFPLRYACEFLIQVFGVQISKEVALAAQTREKHILRTQSVLCDMLLRDAPVAIITQSPNVMDLVKCDGAALYYRKKFWLLGVTPSEAQIRGIADWLLECHSGSTGLSTDSLMEAGFPGASVLGDAVCGMAAVKITSKDFLFWFRSHTAKEIKWGGAKHDPDDKDDGRKMHPRSSLRAFLEVVKWRSLPWEDVEMDAI

SEQ ID NO: 1621 - protein, 364 aa, Glycine max
MGKGGMSIDEHGEGKEENMAAWLVGMNTLKIQPFKLPTLGPHDVRVRMKAVGICGSDVHYLKTLRCAHFIVKEPMVIGHECAGIIEEVGSQVKSLVPGDRVAIEPGISCWHCNHCKHGRYNLCDDMKFFATPPVHGSLANQIVHPADLCFKLPDNVSLEEGAMCEPLSVGVHACRRANIGPETYVLIMGAGPIGLVTMLAARAFGAPKTVIVDVDDHRLSVAKSLGADDIVKVSTNIQDVAEEVVQIQKVMGAGIDVTFDCAGFDKTMSTALSATQPGGKVCLVGMGHSEMTVPLTPAAAREVDVVGVFRYMNTWPLCLEFLRSGKIDVKPLITHRFGFSQKEVEEAFETSARGGNAIKVMFNL

SEQ ID NO: 1622 - protein, 439 aa, Leptospira interrogans serovar lai str. 56601
MENQKNFLTTAPYKGTRDFYPEDMRLRNWMFSVMRETVLSFGYEEYDGPILESFDLYKAKSGEEIVERQLYDFIDKGERRVAIRPEMTPTLARMVAGNLRNLPKPVRWFSIPNLWRYEQPGKGRLREHWQLNVDLFGVDSHRAELEILLIADSILKKFGAPIGSYQIKVSHRKLLDSFLKNSLKLNGDQVHGVSKLLDKKSKISPEAFETEMKPFLNNFKEQFSLIETYLNSNLETVSKIPGIDTNSVSFIQNLFQELGELGIDKQLLFDPSIIRGFDYYTGCIFEVFDTNPENRRSLYGGGRYDNLIGLFSKEQLSGIGFGLGDVTLKNFLEGHNLIPNLSREKTIFLPIMDESLFVDTFKLSKELRENEILTETMLDSAKIGKQIQIAEKKGYRYVLFLGESEIRTETVQIKDLISGEQKSLPRKGLSDTLKKDFQL

SEQ ID NO: 1623 - protein, 391 aa, Calophyllum soulattri
DLEPVNPADVPVTAAGALKSYKLAAKAISKLQSLPSGNISLLCDVLVKEVCELTGYDRVMVYKFHEDDHGEVVAECHRPDLEPYLGLHYPATDIPQASRFLFMKNKVRMICDCLAPPVKVIQDNGLSQALKSRWIYLESSPWLHSQYMANMGSIASLVMSVIINEDGDEMESDQQKGRKLWGLVVCHHTGPRFVPFPLRYACEFLIQVFGIQINKEVELAAQMREKHILETQTVLCDMLLRDAPMAIVTQSPNVMDLVKCDGAALYFKEKFWLLGITPTEAQIRDIAEWLLDYHNGSTGLSTDSLMEAGYPGASILGDAVCGMAAIRINSKDFLFWFRSDTAKEIKWGGAKHDPGDKDESRKMHPRSSFKAFLEVVKWRSLQWEDVEMDAI

SEQ ID NO: 1624 - protein, 394 aa, Synechocystis sp. WH 8501
MSLSWMPRADRLNALPPYVFARLDELKAKAREQGLDLIDLGMGNPDGMAPQPVIDGAIAALQKPQTHGYPPFEGTASFREAITAWYRRCYRVDLDPSSEALPLIGSKEGLGHLALAYINPGDVVLVPSPSYPAHFRGPLIAGADLYPLILSAEKDWLIDLNSIPENVAKAAKILYFNYPNNPTTATAPRAFFEEIIKWATHYEIMLVHDLCYAELAFDGYQPTSLLEIPGGREIGVEFHTLSKTYNMAGWRVGFVVGNGEIIQGLRTLKTNLDYGIFSAVQAAAETALNLPDSYIKTVQERYQTRRDFLIKGLGELGWNIKPSQATMYLWVPCPTNTNSTDFALDVLEKTGIVFTPGNAFGEGGEGYVRISLIADCDLLGEALNRLKQAGIYYK

SEQ ID NO: 1625 - protein, 442 aa, Oryza sativa
MAVTIQSVKARQIFDSRGNPTVEVDVGLSDGSFARGAVPSGASTVIIRYMLIPFDLRFPRNAYLRYHRMVGIYEALELRDGGSDYLGKGVLKAVSNVNTIIGPALIGKDPTEQVDIDNFMVQQLDGTSNNWGWCKQKKLQHIANLAGNKTLVLPVPAFNVINGGSHAGNKLAMQSIIKKKYGQDATNVGDEGGFAPNIQVVIGMDVAASEFYSEKDKTYDLNFKEDNNDGSHKISGDSLKDVYKSFVSEYPIVSIEDPFDQDDWATYAKLTDEIGQQVQIVGDDLLVTNPTVNQIGSVTESIEAVRMSKRAGWGVMASHRSGETEDTFIADLSVGLSTGQIKTGAPCRSERLAKYNQEQVRIRALDTCSALGLIAPGISLRVCISDRQQKMRTSSLEEMILLNKNQTTQNQHKIKAVLQCKARQRTHNDEVNPFAPTRTDAQ

SEQ ID NO: 1626 - protein, 496 aa, Synechocystis sp. WH 8501
MVSTRTKKDVPIWQPLKVIARSFSPYWIACIPLAAIITIVWNKAVVAESVELITAEGNSEAIAQLQGTLNAIWVLIAAILVIFMNAGFGMLETGFCRQKNAVNILSKNLIVFALATLAYWAIGYSLMFGGPENPFIGFGGWFLSGEPATYGLDPFPAGLPISVAFLFQAAFAGTAATIVSGAVAERIKFTDFIIFSLLLVGISYPITGHWVWTGNGWLGSIGFSDFAGSTVVHSVGGWAALMGAAILGPRMGKYVEGRPQAIPGHNMSIATLGCLILWIGWFGFNPGSQLAADEAVPYIAVTTNLAAAAGGVAATFVAWFKDGKPDLSMIINGILAGLVGITAGCDGVSYFGAVIIGAVAGVIVVYSVSMIDSLLKIDDPVGAVSVHLVNGIWGTLAVGLFNTESGLFYGGGFAQLGSQIVGIVAIGAFTAIFSGIVWTVLKSTMGIRVSPEEELEGLDVGEHGMEAYAGFLKETDTFSGSGSSTADEDVTTGAGI

SEQ ID NO: 1627 - protein, 543 aa, Triticum aestivum
  unsure (1)..(543): unsure at all Xaa locations
MATTNWTLPDHPTLPKGKTVAVVVLDGWGEASPDQXNQYNLPSTPVTDSLKNGAPEKWRLVKAHGTAVGLPSDDDMGNSEVGHNALGAGRIFAQGAKLVRMLVDAALASGKIWEDEGFNYIKESFDKGTLHLIGLLSDGGVHSRLGHVXRLVEXASERGAKRSSLHILTDGRDVLDGSSVGFXVERIHEQLGQMTGSVVQAWVGCPGYLVEAPHKLQNALLAGXLVGSMTTCADESXYLPPFVIGWMESGKSXVGPIVDVGSLXTFNXKADRMVVFAKSRRFRDSEISNPGRVPKVMYAEVLQYDGELKLPTXYLVSPFWLERTSGEYLVKNGVRXTFACSETVKFGHVTFFWNGNRSGYFDETXEEYVEIPSDSGITFNEQPKMKALEIAERTRDAILSGKFDQVRINLPNGDMVGHTGDIEATVVACKAADEAVKMVLDAVEQVGGIYLVTADHGNAEDMVKRNKAGQPMLDKSGSIQILTSHTLQPVPVAIGGPGLHPGVRFRSDIQTPGLANVAATVMNLHGFQAPADYETTLIEVIDK

SEQ ID NO: 1628 - protein, 559 aa, Thiocapsa roseopersicina
MSAPIHENERIKARSNCLRGTLRESLADTLTGAISPEDTQISKFHGFYQQDHRDRRQARPEQYLEPYFGFMLRAPLPGGVCTPAQWLAIDGMGRELGGGSLRLTTRQSFQYHGILKRDIASVIRGINAVMIDSIGGCGDVNRNVLCNPNPVESALHREVYDWAKRISEHLLPRTRAYHEIWLDGEQVGGGEDVEPIYGRTYLPRKFKTAVGVPPHNDVDVYANDLGFAAVADGSRLIGFNVSAGGTGRNTGIPATFPRLADVLGFVEPERTLAVAEAVVTTQRHFGDRLDRTQARLKYTIERMGLDAFRDEVERRAGIRFAPARPIGFTDQGDRTAWVRGQDGRWHLTLYIESGRLIDGPGQSSMQGLREIARIHQGDFRITPNQNLIVARVPEPGKSEIEALARKYGLLDKGIALRLNGMSCVALPTCPLAMAEAERYYPDFLAQVERLTRKHGLAEQEIVTRMTGCPNGCARPYLAELALVGKGPGRYNLMLGGNGRRYRLNRLYRENLDEAAILAEIDTLLGRYAACRQPGERFGDYLIRDGIVRPVVNPAEDFHE

SEQ ID NO: 1629 - protein, 251 aa, Triticum aestivum
MAAAGALFFLFSSFCLLARQAAAGGYGGWQSAHATFYDGGDASGTMGGACGYGNLYSTGYGTNTAALSTALFNDGAACGSCYELRCDNAGSSCRPGSILVTATNFCPPNYGLPSDDGGWCNPPRPHFDMAEPAFLHIAQHRAGIVPVPYRRVPCVKKGGIRFTINGHSYFNLVLVTNVAGAGDARSVSIKGTRTGWQAMSRNWGMNWQSNTFLDGQCLSFRVTSSDGRTVTSNAAAPAGWHFGQTFEGAQF

SEQ ID NO: 1630 - protein, 111 aa, Clavispora lusitaniae
EDTWHYWFHRGLHHGVFYKYIHKQHHRYAAPFGLTAEYAHPVEVALLGMGTVGIPLVWCYFTRDLHLFTISLWICLRLFQAVDAHSGYEFPWSLHHFLPFWAGADHHHEDH

SEQ ID NO: 1631 - protein, 274 aa, Candida albicans SC5314
MKDYTITVLGCGVMGTAVTSAILKSKFDPYPKKIIACTIPSQEQSLKETFADQPLVHVSAGVENNNKAVTEADVIILGCKPYMYEGIYEEVKESLTGKQLLISLLAGTTIKELSIFTPYVAKVMTNTPARFGCGTAAIAFAPEVGEESQELVMKLIDTVGMTVKIPEKNMDIATSLIGSGPAFCLLMMESMIDGAVRMGMPYDVASVAAAKVMEGTARMVLETGEHPAALKSKVCTPGGTTIGGLLTMEDRGLRSAIARGVEEAANISASFAKK

SEQ ID NO: 1632 - protein, 424 aa, Oryza sativa
MDLERSPPPPPPEGGGGGGGGGASCSICLDPVVAGGRSVARLQCGHEFHLDCIGSAFNAKGAMQCPNCRKIEKGRWLYASGHHPSPDIDIGGWVTGETYDITSDIPFGFQWCPFSGFTQLASVFEEGEAEQTSYHTVGDHSNAASSSLVCPYLALRGFLHPVHVPSSSSSGAENSSFHRHPTSLEGHAAHDLSNTQVFHATESRNHDNDHRYMSNLPVSGIPDHSVAPFGIGLPRYDSSSQQRTRPYAHHRPLVHRPTPRNGSNMVTPLGSVPAVMAETRGHGHGARGHMYQQSMHSLQSSPFPPTSRRVRPRALTITSFIAASSSAEIGGHHGFAPPVNRSNSSDGEAVSRPVDRPYGWGQEGFTPFPWIPADGESHWWGTFNPMQNHTHGGFTRRPTGERMPQSHPDSGYHSMHPQRMPPFL

SEQ ID NO: 1633 - protein, 1015 aa, Escherichia coli; identical to SEQ ID NO: 573
  unsure (1)..(1015): unsure at all Xaa locations

SEQ ID NO: 1634 - protein, 321 aa, Zinnia elegans
VIKVICCGVCHTDLHQIKNDLGMSNYPMVPGHEVVGEVVEVGPDVTKFNVGDCVGVGCLVGCCNNCRPCNADVEQYCNKKIWTYNDVYTDGKPTQGGFAGSMVVHQKFVVKIPEGMAPEQVAPLLCAGVTVYSPLNHFGMKGSGLKGGILGLGGVGHMGVLIAKAMGHHVTVISSSDKKKEEALDVLGADDYLLSTDVERMQELADSFDYIIDTDPVHHPLEPSLSLLKLDGKLIIMGVINVPLQFVSPLLMLGRKTITEAFIGSMKETQEMLHFCKEKGVRSTIEVVKMDYINTAMERLAKNDVRYRFVVDVAGSNLHNE

SEQ ID NO: 1635 - protein, 392 aa, Cespedesia bonplandii
DLEPVNPADVPVTAAVALKSYKLAAKAISGLQSLSSGNISMLCNVLVKEVCDLTGYDRVMVYKFHEDEHGEVIAEYHRPDLEPYIGLHYPATDIPQASRFLFMKNKVRMICDCMAPAVKVVQEKKLAQPLSLGGSTLRAPHGCHSQYMANMGSIASLVMSVMINDDDYNEMESDRQKPRKLWGLVVCHHTSPRLVPFPLRYACEFLIQVFGVQINKEVELTAQMKEKQILQTQTVLCDMLLRDTPVAIVTQSPNVMDLVKCDGAALFYKNKFWLIGITPPEDQIRDIACWLNEYHDGSTGLSTDSLMEAGYHGASILSGAVCGMAAIRVSLKDFLFWFRSQAAKEIKWGGAKHDPNEKDNGRNMHPRSSFNAFLEVVKWRSLPWEDMEMDAI

SEQ ID NO: 1636 - protein, 574 aa, Arabidopsis thaliana
MAPALAVTRDLTAVGSPENAPAKGRASVYSEVQSSRINNTLPLPSVLKGAFKIVEGPASSAAGNPDEIAKLFPGLYGQPSVAVVPDQDAPSSAPKLKIGVVLSGGQAPGGHNVISGLFGKDYLQERAKGSTFYGFKGGPAGIMKCKYVELNAEYIQPYRNQGGFDMICSGRDKIETPDQVEYFFVFKQAEETAKKLDLDGLVVIGGDDSNTNACLLAENFRSKNLKTRVIGCPKTIDGDLKCKEVPTSFGFDTACKIYSEMIGNVMIDARSTGKYYHFVRLMGRAASHITLECALQTHPNITIIGEEVSAQKQTLKNVTDYMVDVICKRAELGYNYGVILIPEGLIDFIPEVQELIAELNEILANEVVDENGLWKKKLTEQSLKLFDLLPEAIQEQLMLERDPHGNVQVAKIETEKMLIQMVETELEKRKQAGAYKGQFMGQSHFFGYEGRCGLPTNFDATYCYALGYGAGVLLNSGKTGLISSVGNLAAPVEEWTVGGTALTALMDVERRHGKFKPVIKKAMVELEGAPFKKFASLREEWALKNRYISPGPIQFTGPGSDSLSHTLLLELGAQ

SEQ ID NO: 1637 - protein, 260 aa, Mycobacterium tuberculosis CDC1551
MTSLDLTGRTAIITGASRGIGLAIAQQLAAAGAHVVLTARRQEAADEAAAQVGDRALGVGAHAVDEDAARRCVDLTLERFGSVDILINNAGTNPAYGPLLEQDHARFAKIFDVNLWAPLMWTSLVVTAWMGEHGGAVVNTASIGGMHQSPAMGMYNATKAALIHVTKQLALELSPRIRVNAICPGVVRTRLAEALWKDHEDPLAATIALGRIGEPADIASAVAFLVSDAASWITGETMIIDGGLLLGNALGFRAAPSTEH

SEQ ID NO: 1638 - protein, 392 aa, Clusia gundlachii
DLEPVNPADVPVTAAGALKSYKLAGKAISKLQSLPSGNILLLCDVLVKEVRELTSYDRVMMYKFHEDDHGEVIAECRRPDLEPYLGLHYPATDIPQASRFLFMKNKVRMICDCMAPPVNVIQDNGLSQPLSLGGSTLRAPHGCHAQYMANMGSIASLVMAVTINEDDDGDREGDQRKQRRLWGLVVCHHTGPRFVPYPLRYACEFLIQVFGIQINKEVELGAQMREKHILETQTVLCDMLLRDSPVAIVTQSPSVMDLVKCDEAALYYKKKFWLLGITPTETQIRDIAEWLLEYHSGSTGLSTDSLMEAGYADASLLGDAVCGMAAIKINSRDFIFWFRSHTAKEIKWGGAKHDPDDKDEGMKMHPRSSFKAFLEVVKWRSLPWEDIEMDAI

SEQ ID NO: 1639 - protein, 279 aa, Pseudomonas syringae pv. syringae B728a
MIKKCLFPAAGYGTRFLPATKAMPKEMLPVVNKPLIQYGVEEALAAGLTEISIVTGRGKRALEDHFDISYELEHQIKGTDKEKYLVGIRKLIDECSFSYTRQTEMKGLGHAILSGRPLIGNEAFAVVLADDLCVNPEGDGVLAQMVKLHKHYGCSIIAIQEVDPQETNKYGVIAGEEIKPGLFRVTNMVEKPKPEDAPSNLAIIGRYILTPDIFEKIEQTEPGKGGEIQITDALMKQAAEGNVLAYKFKGERFDCGGAEGYIQATNFCFEHFYKTGKAH

SEQ ID NO: 1640 - protein, 409 aa, Bordetella bronchiseptica RB50
MSRADLDTRLSDRLAASRPSATGAVSELARRLAAEGRSVISLSEGELDFDTPAHIQQAAIDAIKGGQTRYTSVGGTPALKAAIARKFARDHQLDYAPAELIAATGAKQILFNALLATIDPGDEALVVAPFWVSYTEMARIAGGTPVVITPDAANQFKLTPELLAAHITPRTRWLILNGPCNPSGALYSREELAALAEVVRQHPRLLVMSDDIYEQLVYEGKFTSFVEAAPDMRERTLTINGVSKTYAMTGWRLGYAGGPAWLIKALELLQSQSTSNPSSISQAAAAAALDGPQDFLQDWRASLSSRRDMALSVLRDAAPAMTFTRPPAAFYLFADCSQAIGMRTPKGERIGDDADFARYLLEEAGVAAVPGSAFGLAPYLRLTFCVAEARLRQACERIVAACARLARPA

SEQ ID NO: 1641 - protein, 391 aa, Croton alabamensis
DLEPVNPADVPITAAGAMKSYKLAAKAISKLQSLPSGNMSLLHDILVKEISDLTGYDRVMVYKFHEDDHGEVVAECRRNDLEPYLGLHFPATDIPQASRFLFMQNKVRMICDCSAPPVKVIQDKSLAQPLSLCGSILRSPHGCHAQYMGNMGTIASLVMSVTINEDDDEMETDRQKGKKLWGLVVCHHTSPSFVPFPLRYACEFLIQVFGVQIIKEVKLAAQKREKHILQTQPLLCDMLLRDDPVAIVTQTPNIMDLVNCDGAALYYKKKIWLLGAAPSEERVRDIAEWPLEYHSESTGLSTDSLMEAGYPGASILGDATCGMAAIRISSRDFIFWFRSHTAKEIKWGGAKHDPGAKDDVRKMHPRSSFKAFLEVVKWRSLPWEDVEMDAI

SEQ ID NO: 1642 - protein, 288 aa, Escherichia coli
IGQALALLLKTQLPSGSELSLYDIAPVTPGVAVDLSHIPTAVKIKGFSGEDATPALEGADVVLISAGVARKPGMDRSDLFNVNAGIVKNLVQQVAKTCPKACIGIITNPVNTTVAIAAEVLKKAGVYDKNKLFGVTTLDIIRSNTFVAELKGKQPGEVEVPVIGGHSGVTILPLLSQVPGVSFTEQEVADLTKRIQNPGTEVVEAKAGGGSATLSMGQAAARFGLSLVRALQGEQGVVECAYVEGDGQYARFFSQPLLLGKNGVEERKSIGTLSAFEQNALEGMLDTL

SEQ ID NO: 1643 - protein, 786 aa, GIBBERELLA ZEAE PH-1
MALVLTSEGAFEVGVTDDSSSNVASATSTPPTTVADEASLHSESPKRDVVHVALDIESPEVTLTTSNLIEPTDSISLAEPPPPAPTRSRRSRVSAPVYNLVQLSGTAGHGKRRAKGDIVADRRRRRRTVSGPVLPGYGSTSSSPAQGATPETVRSGIDALGVTQSASKLDSPRTRRQRILEEELPSKRPSTRRSSTIAPAAVTPVNKKSKVTKRSRKSLESETPLSRELRRLQDTKEFSHIDEKPVIQSVWSNGKFVDPKAPAPPPKKKSEPEPAAEEPKDTEPEPMNRFRNRKPKKYLVKGLYAGQDTPTDIIKALSGVDKKTIAQVPDLIPNGRVNKTMPMPIFTGLRTLIDGRDFKLPYQVCHPLPPGQPKPDEWKKMTKNRFIGESKDYWRKSPHFHDYSSKCVCKPEDGCGESCQNRIMLYECDEQNCNAGKKYCTNRAFANLTARRNRGGKYRVGVEVIKTSDRGYGVRSNRCFRPNQIIMEYAGEIITEEECERRMTEVYKDNECYYLMSFDQNMIIDATTGSIARFVNHSCNPNCRMIKWIVSGQPRMALFAGDKPIMTGDELTYDYNFDPFSAKNVQKCLCGEPNCRGVLGPKPREVKQPKADLKNAVKGAVKAGKRKLKELVGDEADSGNNAKKRKVQPAKGVKRAISNASSKVAKGAASAIKKGVSTVAATAKKAALGSKPPAKQRVSAGAILKKTTTKRVIQTYSRTPQKRAAGRASNVGLVAASKAKGASVKKVNTKSTTKIGSIKRKPFPTPMPRTTMNISQLAEIMVAADD

SEQ ID NO: 1644 - protein, 762 aa, Oryza sativa
MAPISGAAAAAPSSSGASCGLRLRRDHLPRSSHFRLARPSSITDVSRSCSSSSSSPPRSLSSKQSGHADVLAHGAVDKDPIRLWNRYVEWLYQHKQLGLFVDVSRIGFTEEFLRRMEAPMGRAFAAMRELEKGAIANPDEGRMVGHYWLRNPALAPNSFLRDKIETTLERILAFASDVISAKIRPPSSPAGRFTQILSIGIGGSSLGPQFVAEALAPDNPPLMIRFIDNTDPAGIDHQIAQLGPELASTLVIVISKSGGTPETRNGLLEVQKAFRDAGLEFSKQGVAITQENSLLDNTARIEGWLARFPMFDWVGGRTSEMSAVGLLPAALQRLITTYKGIDIKEMLVGAAQMDEETRNTEIKENPAALLALCWYWASDGIGSKDMAVLPYKDSLLLLSRYLQQLVMESLGKEFDLDGNRVNQGLTVYGNKGSTDQHAYIQQLREGVHNFFVTFIEVLRDRPPGHEWELEPSVTCGDYLFGMLHGTRSALYANDRESITVTVQEVNPRAVGALVALYERAVGLYAYLININAYHQPGVEAGKKAAGEVLALQKRILLVLNEASCKDPAEPLTLDQIADRCHCPEEPWSSVSLTAKFNFFVVLDTPKLCWTCWPVAQDRTRARRPAGSFAGRSSNSSHHSLHHWTEALLRSSPHQLQPESSSRPNFPGKPTGRTIDPRTRLRHALRSQFFSPVRMRAVESTHKRTRRRAMPTSPSRARRRVVTKSDRVVSRCETVIWLTNRRMDTLRGVNYLVQRNSFDRYYY

SEQ ID NO: 1645 - protein, 396 aa, Denhamia celastroides
  unsure (1)..(396): unsure at all Xaa locations
YLEPVNPADVPITAAGALKSYKPAAKAISRLQSLPSGNMSLLCDVLVKEVNELTGYNRVMVYRFHDDDHGEVVAXXXXELIWNLIQACNYPATDIPQASRFLFMKSKVRMICDCLAPPVRVLQDKRLAQPFSLGGSTLRSPYGCHAQYMANMGSIASLVMSVTINEDDDXXXXETNSDQQKARRLWGLVVCHHTTPRFVPFPLRYACEFLIQVFGVQINKEVELATQLKEKHILQTQTVLCDMLLRDSPVGILIQSPNVMDLVKCDGAALYYRDKFWLLGLTPTETQIKYIAEWLLEYHSESTGFSTDSLMEAGYPNASILSEAVCGMAAVKITSKDFLFWFQSHTAKEMKWGGAKYDPDYKDDGKRMHPRSSFKAFLELVKQHSLPTEDVEMDAI

SEQ ID NO: 1646 - protein, 391 aa, Dichapetalum macrocarpum
DLEPVNPADVPVTAAGALKSYKLAAKAISKLQSLPSGNISLLCDVLVKEVRDLTGYDRVMVYKFHDDEHGEVVSECHRPHLEPYLGLHYPATDIPRASRFLFMKNKVRMICDCLAAPVKVIQDNRLTQPLSLCGSTLRAPHGCHAQYMENMGSIASLVMSVMINEDDDEDRNCQQKGRKLWGLVVCHHTSPRFVPFPLRYACEFLIQVFGIQINKEVELSAQMREKHVLRIQTVLCDMLLRDAPVAIITQSPNVMDLVRCDGAALYYRKKFWLLGITPTEGQISDIAEWLLEYHRESTGLSTDSLMEAGYPGASDLGDAVCGMAAVRIASKDFLFWFRSHTAKEIKWGGAKHDPDVKDDGRKMHPRSSFKAFLEVVKWRSLPWEDIEMDAI

SEQ ID NO: 1647 - protein, 1132 aa, Physcomitrella patens
MSTPKKTYSSTSSAKSKAHSVRVAQTTADAALQAVFEKSGDSGDSFDYSKSVSKSTAESLPSGAVTAYLQRMQRGGLTQSFGCMIAVEGTGFRVIAYSENAPEILDLVPQAVPSVGEMDTLRIGTDVRTLFTASSVASLEKAAEAQEMSLLNPITVNCRRSGKQLYAIAHRIDIGIVIDFEAVKTDDHLVSAAGALQSHKLAAKAITRLQALPGGNIGLLCDTVVEEVRELTGYDRVMAYRFHEDEHGEVVAEIRRADLEPYLGLHYPGTDIPQASRFLFMKNKVRIIADCSAPPVKVIQDPTLRQPVSLAGSTLRSPHGCHAQYMGNMGSIASLVMAVIINDNEEDSHGSVQRGRKLWGLVVCHHTSPRTVPFPLRSACGFLMQVFGLQLNMEVESAAQLREKHILRTQTLLCDMLLRDAPIGIVSQIPNIMDLVKCDGAALYYGKPFWLLGTTPTESQIKDIAEWLLEYHKDSTGLSTDSLADANYPAAHLLGDAVCGMAAAKITAKDFLFWFRSHTAKEIKWGGAKHDPGENHDGRKMHPRSSFKAFLEVVKRRSLPWEDVEMDAIHSLQLILRGSFQDIADSDTKTMIHARLNDLKLHDMDELSVVANEMVRLIETATAPILAVDSNGMINGWNAKIAQVTGLPVSEAHGRSLVKDLVTDESVAVVERLLYLALRGEEEQNVEIKLKTFGTQTEKGVVILIVDACSSIHVSENVVGVCFVGQDVTGQKMFMDKFTRIQGDYKTIVQNPHPLIPPIFGADEFGYCFEWNPAMEGLTGWKKDEVVGKLLVGEIFGMQMMCCRMKSQDAMTKFMIALNTAMDGQSTDKFTFSFFDREGKYVDVLLSTNKRTNADGVITGVFCFLQIASSELQQALKVQRATEKVAVAKLKELAYIVREIKNPLCGLTFTRQLLEDTDLSDDQQQFLDTSAVCEQQLQKSLNDMDLESIEDGYLELDTAEFEMGTVMNAVISQGMTTSREKGLQIFRETPREINTMRLLGDQIRLQQVLSDFLLNTVRFTPSPEGWVKIKVVPTRKRLGGSVHVVHLEFRVSHPGAGLPEELVLEMYDRGKGMTQEGLGLNMCRKLVRLMNGDVHYVREAMQCYFVVNVELPMAQRDDASSQCRSLYSYLLA

SEQ ID NO: 1648 - protein, 165 aa, Synechocystis sp. WH 8501
MFFIQSPIATLGCLILWFGWFGFNAGSTLELNSPAVAHILVNTLVAGATGGIIGTLSAWFMFDNKPSLTFIINGILAGCVSITASCAYVHLLSAVFIGMVGGWFVVWATDFIDRFGIDDPVGAIPVHLFCGFWGTLAVGFFSAGPGVVDWVISEKAFPIGGNRLD

SEQ ID NO: 1649 - protein, 396 aa, Brucella melitensis
MMFRTLDDANVQSKRVLVRVDLNVPMANGEVTDLTRIERIVPTIAELSRKGAKVILLAHFGRPKGVASDENSLKHVVKPLSKVLDHSVHFAEDCIGDKAKAAVDALKDGDVLLLENTRFHKGEEKNDPEFVQALAANGDLYVNDAFSAAHRAHASTEGLAHVLPAFAGRAMQAELEALEKGLGNPARPVVAIVGGAKVSTKLDLLSNLIEKVDALVIGGGMANTFLAAKGLDVGKSLCEHELASTAREIMAKAETTKCAIILPVDAIVGWHFAADTPHQTYGVDSVPGDAMILDAGELSTDLIASAIDDAATLVWNGPLGAFELRPFDTATVKVARHVAKRTKEGKLVSVGGGGDTVAALNHAGVADDFTYISTAGGAFLEWMEGKPLPGVDVLKK

SEQ ID NO: 1650 - protein, 392 aa, Neisseria meningitidis serogroup B
MAFLKLTEQNVQGKTVLIRADMNVPFKDGKISDDTRIRASLASIKYCVDNGASVIVMTHLGRPTEGEFHPEDDVAPVAAHLGSLLGKDVKVLNDWRENKPALNAGDVVMLQNVRINKGEKKNDLELGKAYASLCDVFVNDAFGTAHRAQASTEAVAQAAPVACAGVLMAGELDALGKALKQPARPMVAIVAGSKVSTKLTILESLADKVDQLIVGGGIANTFLLAEGKAIGKSLAEHDLVEESKKIMAKMAAKGGSVPLPTDVVVAKAFAADAEAVVKDIADVAEDEMILDIGPKSAAALADLLKAAGTVVWNGPVGVFEFDQFAGGTKALAEAIAQSKAFSIAGGGDTLAAIAKFGVTEQIGYISTGGGAFLEFLEGKELPAVAALEKRGA

SEQ ID NO: 1651 - protein, 469 aa, Medicago truncatula
MASTRRVQCLMRRFYRGSRTFGVATQPNASSSSQTIIDKEFQHSAHNYHPLPIVFAHAKGSAVWDPEGNKYIDFLSGYSAVNQGHCHPKILKALKNQAGRLTVSSRAFYNDRFPVFAEYSTALFGYDMVLPINTGAEGVETALKLARKWGYDKKKIPNDEALIVSCCGCFNGRTLGVISMSCDNEATRGFGPLIPGHLKVDFGDAEALEKILKEKGDAIAAFILEPIQGEAGVKIPPDGYLKAVRDLCSKYNVLMIADEIQTGLARTGKMLACEWEEVRPDVVVLGKALGGGIIPVSAVLADKEVMLCIKPGQHGSTFGGNPLASAVAIASLEVIKEERLAERSTKLGGELLGLLEKIQKQYPDHVKEVRGRGLFIGVELNSESLSPVSFFELSEKLKDRGVLAKSTHDTIIRFTPPLCISADEIQQGSKALADVLEIDLPMLKKMKPKDAAPPAGPSACDRCGRVVYG

SEQ ID NO: 1652 - protein, 625 aa, Bradyrhizobium japonicum USDA 110
MCGIFGWVLAAAKHQNRDTLIGLTDLMSHRGPDASGYWLHQTSDERYQIGFGHRRLSIIDIGGGAQPMATEDGRFNLVFNGEIYNYLELRKELVALGHHFRTDSDTEVLIEAYRAWQLDAVRRLRGMFAFALWDDAEQRLVLARDAFGKKPLFLAEAQGAVLFGSEIEPLVQFPGFSRALDSDAIGHYLLNRYVPGPSTFFQSVKKLQPGHCAVWQNGMLKSTRYYTPPFATTVPDVKDFNSAIRLFEGAFDEAVRIRMRSDAPYGAYLSGGIDSSAVVATMVKHSTEPVRTFSVGFRETGYSELDHARVIAGQFGTIHNDLIVEPSAFMDHWSTAALRRGAPVSEASDIPIFMLSEMASRSVKMVLTGEGADELMGGYPKYRAERWIGLYQWLIPHLLHERLIHPLVRSLPYGMRRAKIVALAAGERDLANRMRVWFGGLSVGESEAMLGRLLSATPPDLFPYSSQIGSSLRRTLFFDQTSWLPDNLLERGDRMMMAGSIEGRMPFMDTVLAGVVARFPDDFLTGGKGGKRVLRAAMDKILPSEIIRRKKIGFRVPIGEWFRGPYREFLRDMLVSETSAVAQMVRGDRLRQLVTEHLDARQNHERLLWSFVNLEIFVRAFRVAS

SEQ ID NO: 1653 - protein, 342 aa, Triticum aestivum
  unsure (1)..(342): unsure at all Xaa locations
MGGGGGGGGGGAEEELTAQETALYDREVRVWGVDAQKRLSKAHVLVFGVNGATIEFWNNLVLTVVGSXSLMDDHIVTEDDLSSNFLIHHDESVYGGKSKAEALAAKSLKDXFNPMVRFAGCNILTHNXDGAYYHMINMIIACYAALXTILFINEQSVGKTKPSFIAFYSXVECTRISCGXEYLLNLQDHSYLSEEAWRRTLKQQELXYPSLQEAISVPWKDLSKRTTKLYYAMRVLESYESSEGRDPGETSLSDLPAVLARRKDMCDRMSVDESKIPTSLLERLLAAGKKEHPPVCAILGGILGQEVIKSISCKGDPIKNFFYFDDADGKGAMEDIPPTPED

SEQ ID NO: 1654 - protein, 429 aa, Oceanobacillus iheyensis HTE831
MSMKAPRGTVDLLPEQSIKWQFAESKIKEICHNYHYQEIRTPLFEHTEVFQRGVGDTTDIVQKEMYTFEDRGGRSLTLRPEGTASVARAYVENKLFGSPNQPTKLFYFGSMFRYERPQKGRMRQLNQFGTEVIGSEDPAVDAEVMDFAMNIYKSLGLKSVKLVINSLGDQESRESHRNALIQHFEPHREELCHDCQNRLDKNPLRVLDCKKDRDHPAMGTAPKITDFLNEYSKTYFADVMTYLDALDIEYVVDPNLVRGLDYYNHTAFEIMSEAEGFGAITTLAGGGRYNGLVEEFGGPSSPGIGFGMGLERLIMALEAENITLPIDQQLDCFVANMGDESKLEATKVVKRLRDNGIQADMDYQKRKMKGQLKAADRYQSKFVIFLGDDEIEKQEVTLKEMSTGDQSEVSMSQLVEVLQEKLNGGKIYE

SEQ ID NO: 1655 - protein, 769 aa, Rhodopseudomonas palustris CGA009
MSEIKRIPHCSHWGAYTLLVQDGSIVGVEPFAHDPAPSPIIHSVPEWANPKRQVPSPLVRAGWLEKREHSDRRKRGAEKFVPVSWDEATTLVADEIRRVSTTYGNASIFAGSYGWTNSGRLHHASSLLKRMLNLVGGFTRHVDTYSIAAGPVILRHTLGSSDACDGRANTLDTIAEHTETLVVFGALSPRTAQTEAGGIGVHRVESYLRKIADRGIRIVHVSPLKDDLPEWVDAEWWPIRPNTDAALMLGLAGEIVLAGRHARDFLDRCTSGADQLIAYLDGSADGIRKDATWAAEICGLDAESIRQLARRLVDTRSMLTVSWSLQRAHHGEQPFWSALGLASIIGQIGLPGGGVGYGYASLGGVGSPFNIGKSPAISQLTRPIDSFIPVARISDMLLNPGGTFTYEGKTHTYPDTRLVYWAGGNPYHHHQDLNRLAEAWTRPETIIVQDPMFTATAQRADIVLPATTSIERNDLAGNRRSDFVIAMKQAIAPVGESLPDFEIFNRIAAKLGVADGFNEGRDEMGWVRQLYEEVRQDAVERLGFEMPDFDTFWERGYARCPVRAEHTFLADFRTDPAAHPLNTESGRIVLGSRTLAGLGYDDCPPHPAWLEPAEWLGRGDASDLHLISHQPIGRLHSQIETGVASVAAKRNGREQAKLNPRDAAARGIDDGQTIRVWNGRGACLATATVTDSVRPGVLVLPTGAWFTPRDENGLEVAGNPNVLTLDIGTSQFGQGCSAHTCLVRAEAHIADQRDAFDEYQDKLVALATA

SEQ ID NO: 1656 - protein, 465 aa, Akebia quinata
SGKPFYAIVHRVTGSLIIDFEPVKPYEVPMNAAGALQSYKLAAKAIARLQSLPNASMDRLCDTVVQEVFELTGYDRVMAYKFHDDDHGEVVSEITKPGLEPYLGLHYPATDIPQAARFLFMKNKIRMICDCNATHVKVFQDEKLPLDLTLCGSTLRAPHSCHSQYMENMGSIASLGMAVVINEGDEEDNGSGSAQPQRRKRLWGLVVCHNTTPRFVPFPLRYACEFLIQVFAIHINKELELGNQVLEKSVLRTQTLLCDMLMRNAPLGIVSQSPNIMDLVKCDGATLLYKNKIWRLGLSPSEFHIRDIASWLYEYHMDSTGLSTDSLHDAGFPGALSLGDGICGMAAVRITSKDMIFWFRSHTAAEVRWGGAKHDPCEEDDGRKMHPRSSFKAFLEVAKTRSLAWKDYEMDAIHSLQLILRNAFKDGDTADLNPSVIHSRLDNLKIEGMEELEAVTNEMVRLMET

SEQ ID NO: 1657 - protein, 460 aa, Zea mays
MAPANVGAAQAPSADRRLSTLVGHLLPSSPRRAAADTSATSTLESFPTMASQGSSVFAALEQAPEDPILGVTVAYNKDPSPVKVNLGVGAYRTEEGKPLVLNVVRRAEQMLINNPSRVKEYLPITGLAEFNKLSAKLIFGADSPAIQENRVATVQCLSGTGSLRVGGEFLARHYHERTIYIPQPTWGNHPKVFTLSGLNVRSYRYYDPATCSLHFKGLLEDLGSAPSGSIVLLHACAHNPTGVDPTIEQWEQIRQLMRSKSLLPFFDSAYQGFASGSLDKDAQSVRMFVADGGELLMAQSYAKNMGLYGERVGALSIVCRSADVAVRVESQLKLVIRPMYSNPPLHGASIVATILRDRIINMRHHEWTLELKAMADRIINMRQQLFNALKSRGTPGDWSHIIKQIGMFTFTGLNSEQVAFMRQEYHIYMTSDGRISMAGLSMRTVPHLADAIHAAVTQLK

SEQ ID NO: 1658 - protein, 1018 aa, Chromobacterium violaceum ATCC 12472
MQVTRRQLFKLTAAQLGASSLVAMGFAPQQALAEVRQFKLLGARETRNTCTYCSVGCGLILYGLGDGAKNAHGEIYHIEGDPDHPVSRGSLCPKGAGLLDFIHSPKRLKYPEVREPGSGEWKRIGWDEAISRIARLMKDDRDAHIVEKNAAGVPINRWLSTAMLTASAGSNETGIISQKFIRSLGIVATDAQARVCHGPTVSALASTFGRGAMTNSWVDIKNADFILVMGGNAAEAHPVGFKWAIEAKKTRGTRLIVVDPRYNRTASVSDLYLPIRVGSDIAFLGGVINWLIQHDKIHWDYVKAYTNAALIVRDDYRFDEGLFSGYDAAKGKYDKSSWNYELGDDGYAKTDPSLQHPRCVWQLLKQHYSRYTPEMVNTICGTPVDGFLQVCKELGETARPDKAGTILYALGWTQHTTGSQNIRTMAMIQLLLGNIGMPGGGVNALRGHSNIQGLSDLGLLSTQLPGYLTLPSEADHPDLATYLAKTTPKALQANQFNYWSNTPKFFVSLMKWMWGDNAGKDNDWGYDWLPKWDKMYDVLHMAELMYQGKMNGFIVQGFNPLASFPDAAKVTEAFSKLKYMVIIDPIATETSTFWQNHGDAHDVDPAKIQTTVFRLPSTCFAEEDGSIVNSARWLQWHWKGAQPPGEARGDNEIIGELFVAIRDLYRKEGGKLADPILKVNWNYRNPKAPTPSELAMEMNGKALADLPDPADPSKTLVKKGEQLPGFAALQDDGRTACACWIFSGCWTQAGNQMARRDNTDTGLGNTPGWSWSWPANRRILYNRASCDPAGKPWDPARKLISWNGEKWVGGDVPDFKADAAPDSGMQPFIMNPEGVGRLFCADKLVDGPFPEHYEPMESPIGTNPLHPKVVSSPAVRLFDSDRKRLGTHKDFPYVGTTYRLTEHFQFWTKSVLLSAIAQPEQFVEIGEALAREKGIAQGDMVKVSSNRGFVKAKAVVTKRLMALKVNGQTVHQIGIPLHWGWEGVARPGYLTNALPPAVGDCNTQTPEYKAFLVKLEKL

SEQ ID NO: 1659 - protein, 392 aa, Akebia quinata
DLEPVNPAEDPVTAAGALKSYKLAAKAISRLQSLPSGDISLLCDVLVHEVSDMTGYDRVMVYKFHEDEHGEAVAECLRSDLEPYLGLHYPATDIPQASRFLFLKNKVRMICDCSARSVEIVQDKRLTQPLSLGGSTLRAPHGCHAQYMENMGSVASLVMSVTINEDDDEMETNQQKGRKLWGLVVCHHSSPRFVPFPLRYACEFLIQVFGIQLNKEVELAAQLREKHILRIQTVLCDMLLRDAPVGIFTQSPNVMDLVKCDGAALYYKNKLWLLGVTPTEAQIREIAAWILEYHDRSTGLSTDSLMEAGYPGASVLGDAVCGMAAINITSKDFIFWFRSHTAKEIKWGGAKHDTVDKDDGRKMHPRSSFKAFLEVVQWRSLPWEDMEMVAIQ

SEQ ID NO: 1660 - protein, 150 aa, Zea mays
  unsure (1)..(150): unsure at all Xaa locations
ARVRNVLNGGSHVFFRRFPRFRAXPCEAPTFYQAMRQGAEVYQKLKALAKKTYGQSAGNVFDEGGVAPDIQTAEEALDLITKAIEEAGYTGKINIGIDVASSEFYKADEKKCDLDFNNPDSDKSKWITSEQLIDMYKSLPEKYPIVNIDD

SEQ ID NO: 1661 - protein, 466 aa, Aristolochia grandiflora
SGKPVYAIIHRVTGSLIIDFEPVKPYEAPMTAAGALQSYKLAAKAISRLQSLPSGSMERLVDTVVQEVYELTGYDRVMAYKFHDDDHGEVISEVTKPDLEPYLGLHYPATDIPQAARFLFMKNKVRMICDCYAKPVKVFQDEKLSFDLTLCGSTLRAPHSCHLQHMKNMSSIASLVMAVVVNEGEEDDNPDPNQQQQVPKRKRLWGLVVCHNTTPRFVPFPLRYACEFFMQVFAIHVNNEIELENQIREKNILRTQTLLCDMLLRDSPLSIVTRSPNIMDLVKCDGAALMYQNKVYTLGLSPTESQISEINRWLLEYHMDSTGLSTDSLHDAGYPNAPSLGDIVCGMAAVRITSTDMLFWFRSHTAGEVRWGGAKHDPSDKDDGRRMHPRSSFKAFLEVVKNRSLPWKDYEMDAIHSLQLILRGSTKETAAIDTKTVISSQLNNLKLDGLHELQAVTNEMVRLMET

SEQ ID NO: 1662 - protein, 392 aa, Aristolochia grandiflora
DLEPVNLADAQVSASGALKSYKLAAKAISRLQSLPSGNIVLLCDVLVREVRDLTGYDRVMAYKFHEDEHGEVIAECKRPDLEPYLGLHYPATDIPQASRFLFMKNKVRMIYDCSATPVSVIQDKGLAQPLCLGGSTLRAPHGCHSQYMANMGSIASLVMSVTINEDDDEKGSGQRGRKLWGLVVCHHCSPRFIPFPFRYACDFLMQVFGIQINKEVELAAQVREKHILRTQTLLCDMLLRDAPMGIVNKSPNVMDLVKCDGAALYYQNKFWLLGTTPTEAQIRDLAQWLLQYHNNTTGLSTDSLVEAGYPGAQDLGDAVCGMAAVKITSRDFLFWFRSHAGKEIKWGGAKHDPKEHDGDGKKLHPRSSFNAFLEVVKWRSTPWEDVEMDAIQ

SEQ ID NO: 1663 - protein, 554 aa, Asparagus falcatus
PYEVPMTAAGALQSYKLAAKAISRLESLPGGSMEKLCNAVVEEVFELTGYDRAMAYRFHEDDHGEVFSEVTKPGLEPYLGLHYPATDIPQAARFLFMKSKVRMICDCRAKPVRVLQDEKLPFDITFCGSTLRAPHSCHLQYMENMNSIASLVMAVVVNEGGEDEGEGEAGQASSPAQQQQGLRRKRLWGLVVCHNESPRFVPFPLRYACQFLMQVFAIHVNKEFELEHQIREKNILRTQTLLCDILLREAGPLGIVTARSPNVTDLVRCDGAALLYEDKIWRLGRTPTDSEIRDIAYWLVEYHADSTGLSTDSLLEAGYPGAFALGDLVCGLAAARINSRDILFWFRSHTAAEVRWGGAKHDPSDEDDGRRMHPRSSFKAFLEVVKTRSLPWSDYEMDAIHSLQLILRGSFNDVKKSEGLDSRMRSLRVEGMEELQAVTNEMVRLIETATVPILAVDVDGVINGWNLKIAELTGLPVDEAIGKHLLALVEDSSVAQVRRMLLLALQGTEEQNVEFQMKTCGDRGDDGPVILVVNACASRDLNEKVVGVCFVAIT

SEQ ID NO: 1664 - protein, 391 aa, Dillenia philippinensis
DLEPVNPTDVPVTAAGALKSYKLAAKAISRLQSLPSGNMSLLCDALVQEVSDLTGYDRVMVYKFHEDDHGEVVAECRRPDLEPYLGLHYPATDIPQASRFLFMKNKIRMICDCLAPPVQVIQDKCLAQPLSLCGSTLRSPHGLHAQYMANMGSIASLVMSVTINEDDDEVESDKQKGRKLWGLVVCHHTSPKVVPFPLRYACEFLIQVFGVQVNKEVELAAQLKEKHILKTQTVLCDMLLRDAPVGIVTQSPNVMDLVKCDGAALYYRNKFWLLGITPTEAQIRELAGWLLDCHNGSTGLSTDSLMEAGYPGASILGDALCGMAAIKITSKDFLFWFRSHTAKEIKWGGAKHDPVDKDDGKKMHPRSSFKAFLDVVKRRSFPWEDVEMDAI

SEQ ID NO: 1665 - protein, 166 aa, Sinapis alba
MASPDVEYRCFVGGLAWATDDRALETAFSQYGEVLDSKIINDRETGRSRGFGFVTFKDEKSMKDAIEGMNGQDLDGRSITVNEAQSRGSGGGGGGRGGGGGYRSGGGGGYGGGGGGYGGGGREGGYSGGGGGYSSRGGGGGGYGGGGRRDGGEGGGYGGSGGGGGW

SEQ ID NO: 1666 - protein, 367 aa, ASPERGILLUS NIDULANS FGSC A4
MAAPEIPKKQKAVIYDNPGTVSTKVVELDVPEPGDNEVLINLTHSGVCHSDFGIMTNTWKILPFPTQPGQVGGHEGVGKVVKLGAGAEASGLKIGDRVGVKWISSACGQCPPCQDGADGLCFNQKVSGYYTPGTFQQYVLGPAQYVTPIPDGLPSAEAAPLLCAGVTVYASLKRSKAQPGQWIVISGAGGGLGHLAVQIAAKGMGLRVIGVDHGSKEELVKASGAEHFVDITKFPTGDKFEAISSHVKSLTTKGLGAHAVIVCTASNIAYAQSLLFLRYNGTMVCVGIPENEPQAIASAYPGLFIQKHVHVTGSAVGNRNEAIETMEFAARGVIKAHFREEKMEALTEIFKEMEEGKLQGRVVLDLS

SEQ ID NO: 1667 - protein, 391 aa, Dissiliaria muelleri
DLEPVNPADVPVTAAGALKSYKLAAKAISRLQSLPSGNISLLCDVLVKEVSDLTGYDRVMVYRFHEDEHGEVVAECRQPDLEPYLGLHYPATDIPQSSRFLFMKNKVRMICDCMAPPVEVVQDERLSQPLSLCGSTLRSPHGCHAQYMANMGSVASLVMSVTINEDDDEMDGDQQTGRKLWGLVVCHHTCPRFVPFPLRYACEFLVQVFGVQINKEVELAAQMREKHILRTQTVLCDMLLRDAPVGIITQSPNVMDLVKCDGAALYYRKKFWLLGVTPTEAEIRDIAEWLLECHSGSTGLSTDSLMEAGYPGASILGDAVCGMAAVRITSKDFLFWFRSHTAKEIKWGGAKHDPGDKDDGRKMHPRSSFKAFLEVVKRRSLPWEDVEMDAI

SEQ ID NO: 1668 - protein, 567 aa, Oryza sativa (japonica cultivar-group)
MASSHIILPPDDDDEEQRRLEEEEDEDPWARSGPPPAAPEHAMKAALPFSATCVRISRDSYPNLRALRNASSVSLADAAYVKISEGDFGYVLDDVPHLVDHLPDAPTYPNPLQDHPAYSTVKQYFVNEDDTVPQKVVVQKNSRRGVHFRRAGPRQKVYFESDEVKACIVTCGGLCPGLNTVIRELVCGLAHMYNVSKIYGIQNGYKGFYSSNYLTLTPKSVDDIHKRGGTVLGTSRGGHDTKKIVDNIQDRGINQVYIIGGDGTQKGAYEIFKEIRKRGLKVSVAGIPKTIDNDIAIIDKSFGFDTAVEEAQRAIDSAHVEACSAENGIGLVKLMGRYSGFIAMYATLASRDVDCCLIPESPFYMDGEGGLLQYVERRLKENKHMVIVVAEGAGQDLIAKSLSTSEQQDASGNKLLLDIGLWLTHKIKDHFKSKKMEMTIKYIDPTYMIRAIPSNASDNVYCTLLAHSAIHGAMAGYSFTVGNVNGRHAYIPFYRVTSTRNKVKITDRMWARLLSSTNQPSFLSQKDIDEAKENDRTANKPPLPTGLSHHVANSFDQSASSSSNSQI

SEQ ID NO: 1669 - protein, 369 aa, Acinetobacter sp. ADP1
MKSRAAVAFGPGQPLQIVEVDVEPPKAGEVLIKVTHSGVCHTDAFTLSGDDPEGVFPAILGHEGAGIVIEVGEGVTSVQPGDHVIPLYTAECGECLFCKSNKTNLCVSVRATQGKGVMPDGTTRFSYNGEPIYHYMGCSTFSEYTVVAEVSLAKINPEANHEQVCLLGCGVTTGIGAVHNTAKVQEGDSVAVFGLGGIGLAVVQGARQAKAGRIIVVDMNPEKFELAKEFGATDFLNPKDYDKPIQQVIVEMTGWGVDHSFECIGNVNVMRSALECAHRGWGQSVIIGVAGAGQEISTRPFQLVTGRKWLGTAFGGVKGRSQLPKMVEDAMKGDIQLEPFVTHTMPLDEINHAFDLMHEGKSIRSVIHF

SEQ ID NO: 1670 - protein, 391 aa, Dovyalis rhamnoides
DLEPVNPADVPVTAAGALKSYKLAAKAISRLQSLPSGNISLLCDVLVKEVSALTGYDRVMAYKFHEDQHGEVVAECCRPDLEPYLGLHYPATDIPQASRFLFMKNKVRMICDCLAPPVKVVEHKRLAQPLNLCGSTLRSPHGCHVQYMENMGSIASLVMSVTINEDDDEMDSDQQKGRKLWGLVVCHHTSPRFVPFPLRYACEFLLQVFGVQINKEVELAAQMREKHILETQTVLCDMLLRDAPAAIITQSPNVMDLVKCGGAALYFRKKFWLLGVTPTEAQIRDLSEWLLQYHSESTGLSTDSLLEAGYPGASALGDAVCGMAAIKISSKDFLFWFRSYTAKEIKWGGAKHDPDDKDDGRKMHPRSSFKAFLEVVKRRSLPWEDVEMDAI

SEQ ID NO: 1671 - protein, 391 aa, Putranjiva roxburghii
DLEPVNPSDVPVTAAGALKSYKLASKAISRLQSLPVANISLLCDVLVKEVRDLTGYDRVMVYRFHKDEHGEVVAECCRPDLEPYLGLHYPATDIPQASRFLFVKNKVRMICDCMAPAVKVIQDKRVARPLSLCGSTLRAPHGCHTQYMVNMGSIASLVMSVTINEDDDEMDSDQEQGRRLWGLVVCHHTSHRFVPFPLRYACEFLIQVFGVQIDKEVELARQMRKNIFCKLKLVLCDMLLRDAPMAIITQSPNVMDLVNCDGAALYYRKKIWLLGVTPTEAQIRDITEWLLEYPSGSTGLTTDSLMEAGYPGASILGGSVCGMAAIRITSNDFLFWFRSHTAKEIKWGGAKHDPGDKDDGRQMHPRSSFKAFLGVVKWRSLPWEDIEMDAI

SEQ ID NO: 1672 - protein, 441 aa, Bifidobacterium longum NCC2705
MTKHRIQSVDECGVLFRNACNMQSGKIGHFDVRFVKERIFMKTLKDLGDLKGKRVLVRADFNVPLDGTTITDDGRIKAALPTIKTLREEGAKVILMAHLGRPKGKVVPELSLAPVAARLGELLGANVPLAKDTYGEDAQAKVAAMNDGDVVLLENVRFNPEETSKDADERAAYAKKIAALGEAFVSDGFGVVHRAQGSNYDVAADLPAAAGLLVEKEVKALSKATENPERPFTVVLGGSKVSDKLGVIENLLDKANRLVIGGGMVFTFLKAKGYEVGTSLLEEDQLEKVKGYIETAEKNGVELVLPTDVVVNAGFPAGDTPVAPEVVAADAIPADKMGLDIGPESQKLFHDKIVDSKTVVWNGPMGVFEVPEFAAGTKAVAQGLVDATAVGAFTIVGGGDSASAVRNLGFPEDGFSHISTGGGASLEFLEGKELPGLKVLE

SEQ ID NO: 1673 - protein, 392 aa, Elaeodendron orientale
DLEPVNPADVPITAAGALKSYKLAAKAISRLQSLPSGNISLLCDVLVKEVNELMGYDRVMVYRFHDDDHGEVVAEYCRPDLEPYLGLHYPATDIPQASRFLFMKNKVRMICDCLAPPVKVLQDKILAQPLSLSGSSLRSPHGCHAQYMANMGSIASLVMSVTINDDDDDETNNDQQKGRKLWGLVVCHHTTPRFVPFPLRYACEFLIQVFGVQINKEVELATQLKEKHILRTQTVLCDMILRDAPVGILTQSPNVMDLVKCDGAALYYRNKVWLLGVTPTETQIKEIVEWLLEYHSESTGLSTDSLMEAGYPDASILGEAVCGMAAVKITSKDFLFWFRSHTAKEMKWGGAKHDPDDKDDGKRMHPRSSFKAFLEVVKIRSLPWEDVEMDNH

SEQ ID NO: 1674 - protein, 640 aa, Corynebacterium glutamicum ATCC 13032
MCGLLGILTANGNAEAFVPALERALPCMRHRGPDDAGTWHDADAAFGFNRLSIIDIAHSHQPLRWGPADEPDRYAMTFNGEIYNYVELRKELSDLGYAFNTSGDGEPIVVGFHHWGESVVEHLRGMFGIAIWDTKEKSLFLARDQFGIKPLFYATTEHGTVFSSEKKTILEMAEEMNLDLGLDKRTIEHYVDLQYVPEPDTLHAQISRLESGCTATVRPGGKLEQKRYFKPQFPVQKVVKGKEQDLFDRIAQVLEDSVEKHMRADVTVGSFLSGGIDSTAIAALAKRHNPDLLTFTTGFEREGYSEVDVAAESAAAIGAEHIVKIVSPEEYANAIPKIMWYLDDPVADPSLVPLYFVAAEARKHVKVVLSGEGADELFGGYTIYKEPLSLAPFEKIPSPLRKGLGKLSKVLPDGMKGKSLLERGSMTMEERYYGNARSFNFEQMQRVIPWAKREWDHREVTAPIYAQSRNFDPVARMQHLDLFTWMRGDILVKADKINMANSLELRVPFLDKEVFKVAETIPYDLKIANGTTKYALRRALEQIVPPHVLHRKKLGFPVPMRHWLAGDELFGWAQDTIKESGTEDIFNKQAVLDMLNEHRDGVSDHSRRLWTVLSFMVWHGIFVENRIDPQIEDRSYPVEL

SEQ ID NO: 1675 - protein, 408 aa, Thermosynechococcus elongatus BP-1
MVYQPACGARDILPLDVARQRWLEQRLERVFQSWGYQEIITPTIETLATLTAGGTVHPETVIQVQGSGDEPLGLRPELTASIARAAVTRMAGMQLPQRLYYKTNVFRRTTGAELGNQQEFFQAGVELLGATGLAADAEILWLVQECLGVLAVGEAYLLVGDAHLTQQLLGTFPAELQKTVRQCLANLDRVSLQALPAPWRDRALALFDLRGTPEEVGERLAQWSDVAGVVDRFAQLQQLLALVAESLAITLDLSLVQSFDYYTGIIFEVLIPTETELRLVAQGGRYDQLLSIYHPDGATVPGIGFVFNVEALLQAVAIPPAALLAPRSQWLVVPRTANALAAALHHAQTLRLDGSTRVELALLELTPEQIRAYARDRQIPYIAWIESDAPPQIEALSDGATSLQIQRV

SEQ ID NO: 1676 - protein, 158 aa, Nitrosomonas europaea ATCC 19718
MNIYDCGIKTMDGQDKLLGDYKGKVLLIVNTASKCGFTPQYQGLEDLYRRYKDRGFVVLAFPCNQFGHQEPGSESEIQQFCTTRYDVSFPVFAKIEVNGANTHPLYRYLKNEKSGVLGTKAIKWNFTKFLVDRSGHVVRRYAPADKPESLTGDIEQLL

SEQ ID NO: 1677 - protein, 311 aa, Triticum aestivum
MATIALVVVAMVLSLAQLSAGSRRLMELYVPPESDRLTYHQGGVLSGDIPVSILWYGKFTPAQRSIVSDFVVSLNSAPDGAATPSVGQWWGTIEQLYLSKAAAANGQAGATHVLLAEQVTDEQCSLGTSLTLAQIDQLAASIGAKKGGIALVFTDEDVAVEGFCSSRCGRHGSSTGGDSTHIWVGNSVKQCPGQCAWPFAQPQYGPQGAPLVAPNGNVGMDGMVMVLATMVAGTVSNPYGDGYYQGPKGASLEACTACPGVYGSGAYPGYAGNLLVDPSTGASYNANGANGRKYLLPALYDPATASCNTLV

SEQ ID NO: 1678 - protein, 682 aa, Rhodopseudomonas palustris CGA009
MSEAGAERPSPPRWDEQERLSALERYGILDTPREPDFDDIVQLAADTFGAPIAAVNLIASGRQWFKAEIGLGARELPLDVSICAHAIVQSGTMVVPDTRLDARFVDNPLVTAAGGLRFYAGALLKTPEGLPLGTVCVLDREPRPAGISDLQRRTLEVLARLVMTQLEMRRVIALQDAHARQLEAEMRERKHAEAARRSSDDRYRALFDSIDTGFCIIEVAFGADGVASDYQFIETNSAFMQQTGLADVEGKWMRQLAPGHEQYWFDTYGEVARSGIPIRFKKPAKALDDRWFDVHAFRIGDPGDRLVAVLFNDITARRRGELRRDALLKMGDQLRSLTTIQDMTGIASEIVGRALGAVRAGFGRVDPGEESVIIENDWSAAGYASLAGWHSLSDHPSFETANATKQPVVVADVAAAPPDNLSSQAKDDPGIGSLAVIPIENHDGSTALFFVHVAEPRDWSDDDLAFLRNVGDRLAAGVGRLDAEALQHTLNLELSHRMKNTLAMVMAIARQTLRSIPDQAPVEAFNARLQALSTAHMALLQQHWTAAKINEVVKGVVGAVEGLDRFTISGPAVSLGARATLSSSLLLHELATNALKYGALSAPTGRVTISWKVADEQLIIEWRETGGPAITPPTHKGFGSRLIQLGLIGTGGVELRYLASGFEADFSAPLSQVQERNAGENR

SEQ ID NO: 1679 - protein, 432 aa, Oryza sativa (japonica cultivar-group)
MAMSSSRSAAAIRGRRVGALARARRHATRAMASLFGHVEPASKDPILGVTEAFLADPSPDKVNVGVGAYRDDNGKPVVLECVREAERRIAGNLNMEYLPMGGSIKMIEESLKLAYGEDSDFIKDKRIAAVQALSGTGACRLFADFQRRFLPNSQIYIPTPTWSNHHNIWRDAQVPQRTFTYYHPESRGLDFAGLMDDIKNAPNGSFFLLHACAHNPTGVDPTEEQWREISYQFKIKNHFPFFDMAYQGFASGDPERDAKAIRIFLEDGHQIGCAQSYAKNMGLYGQRAGCLSILCEDEMQAVSVKSQLQQIARPMYSNPPVHGALVVSIILNDPELKSLWLKEVKGMADRIIGMRKALRENLEGLGSPLSWDHITNQIGMFCYSGMTPEQVDRLTNEYHIYMTRNGRISMAGVTTGNVAYLANAIHEVTKTK

SEQ ID NO: 1680 - protein, 113 aa, Antirrhinum majus
HYPATDIPQAARFLFMKNKVRMICDCRAKHVKVIQDEKLSVDLTLCGSTLRAPHTCHLQYMENMDSIASLVMAVVVNEGDEEETDTVQPQKRKRLWGLVVCHNTTPRFVPYPL

SEQ ID NO: 1681 - protein, 444 aa, Asparagus falcatus
  unsure (1)..(444): unsure at all Xaa locations
DLEPVNPADVPVTAAGALKSYKLAAKAISRLQSLPSGNISLLCDVLVREISDLTGYDRXMAYKFHDDEHGEVIAECRRSDLEPYIGLHYPATDIPQASRFLFMKSKVRMICDCSAHPVKIIQDKKLAQPLSLCGSTLRAPHGCHAQYMSNMGSVASLVMSVTINEDDDESGSDQKGRKLWGLVVCHHTNPRFVPLPLRYACEFLLQVFGIQLNKEVELAAQAREKHILRTQTVLCDMLLRDAPIGIFTQTPNVMDIVKCDGAALYYKNQIWVLGTTPAEPQIRDISAWLLECHDGSTGLSTDSLMEAGYPGALALGDAVCGMAAIKITDKDFIFWFRSHTAKEIKWGGAKHEPANRDDEGRKLQPRSSFKAFLEVVKWRSLPWEDIEMDSVHSLQLILRESLHNEIAVGESKTLVNSTLDDMKRIQGMDELRAVTNEMVRLIET

SEQ ID NO: 1682 - protein, 1224 aa, Ustilago maydis 521
MAVVDVGFSGYFWLAIKSFAARVICLLSDSGLRSAVSDRMPTKSRKSAPSKFAFFLDQQETFSLHISIFEPLGAVGVAPFQTDNRISLHRVFDRLPDTALQGGHGRATRSQRNFLSTDKSTKSFGSPIDIRFGPLRIDWAERAQDKEMSQASQYRNASSSSTSVGPATVTASASELTKASRRRNVFHAKQPQVALPVASFEKTDSFQGDVSGSKEAESRLASCTEMFQGMTIGATEVAFGIVHLFRDKQDATSNATPTRRAASTTGQTALENQIPEQDIGAVVAVLAVPAYLTASHFLSYIEPAVEAITHLRMLRDMHPNRCMVLIRFRDAKDAEDFHKMYNGQPFNAMDPQEICQVVYITSLTVSKHSSLPFSYPTLTNSDPWPLRPPANAVNQPAYELPTCPVCLERMDSSVTGLMTISCQHTFHCSCLSKWGESRCPVCRYSQTGQPSMHQRRRTPRSSMDPSTPVRQANQVGGSDADESDAESDLDEPSCCAVCETQQDLWVCLVCASVGCGRYKHGHAHRHFSETGHLYSLELETQRVWDYAGDGYVHRLIQNKADGKLVELPSASSATATPEHSSTLPASASYASAMSMSGTKHSGPPAIHSRGDNTRPPYDAQERRRQQQQQQRDQNYAIRDQDSCRSADDQLEAIGMEYSYLLTSQLESQRHFYEDKLDQFQAQLASLTGDLEMLSRKSQLIDELSARTAELERTNEQLRRDKDKSDKKADKAIELARTLERDLHSERSMNKGLMDRLEKTKESEVGLKAQVTDLQEQVSDLMFFVQARDKLDQEGSEAQGGDVEKLDSTFGNAFVISGRNARCGTGGSSTHPPITSLKLESKLIWPVLEKKTLRVMQHGGGKSTKHNPQSTKHEAIVNLCNVLYSYHLPARQTKPREYYIMSLNKTFTLNDGNKIPLIGLGTWLSKPGEVENAVEIAVKAGYRHLDLAKIYQNQDEVGAALKKVIPSVVKREELFITSKLWNTSHQPDKVEAAYNETLKELGLDYLDLYLIHWPVAFQPGSDLVPKTEDGKFTALDLETSLVDTWKALIALQKAGKVKSIGVSNFTIAHLDAIINATGVVPAVNQIEAHPLLPQDDLVAYAQQKNIHLTAYSPLGNNLTGKTKIVDYPQVSEVAKKYNADPAQVLIAWGVKRGYSVIPKSVTETRIKSNFEQLELKDDDYETVTSLYKQLGKVRFNVPFTYSPQWDINVFGEDAEKEAKNEVKTE

SEQ ID NO: 1683 - protein, 463 aa, Ceratophyllum demersum
GKPFYAVVHRVTGSLVIDFEPVRPYEVPTTAAGALQSYKLAAKAITKLQSLPSGSMQRLCDTIVKEVYELTGYDRVMVYKFHEDDHGEVVAEVTKPNMEPYLGLHYPATDIPQASRFLFMKNKVRMICDCHAKAIKVYQDGNLPMDLTLCGSTLRAPHSCHVQYMHNMGSVASLVMAVVVNEGEDDQGESTESGQQRKKKLWGLVVCHNTSPRFVPFPLRYACEFLMQVFAIHVGKQIELENQLQEKNILRIQTLLCDMLMRDSPLGIVSKSPSIMDLVKCDGAALLYKNKVWLLGLTPSELQIHDIASWLSTHHMDSTGLSADSLYDAGYPGALSLGNAVCGMASVRITSKDMIFWFRMHTASEVRWGGAKHYPDDKDDGQKMHPRSSFKAFLEVVKTRSLPWKDYEMDAIHSLQLILQGTFKEIENGGIKNTIDSQFDGLKIDQMEELQVVANEMVRLMET

SEQ ID NO: 1684 - protein, 505 aa, Agrobacterium tumefaciens str. C58
MNIQVQQKAGEAPFKLKYGNYIGGKWVEPKSGRYMDNLSPVTGHKICEVPRSDASDIEFALDAAHKAREKWGKTSITERSNILLRIAQRIEDNLDLIARAETWDNGKPLRETTNADIPLTIDHFRYFAGCIRAQEGTIGEIDNDTVAYHFHEPLGVVGQIIPWNFPILMAAWKLAPALAAGNCVVLKPAEQTPASILIVMELIEDLLPPGVLNIVNGTGLEAGKPLAQSNRIAKIAFTGSTSVGKEIMRYAADNVTNISLELGGKSPNIFFADVMNEDDAFLDKALEGFAFFALNQGEVCTCPSRALVHESIYDRFMEKAIKRVQAISQDDPLNPSTMLGAQASQEQFDKIMSYLEIGKKEGAKVLTGGDRKTLTGDLKDGYYIQPTVFEGNNKMRIFQEEIFGPVVSVTTFKTVEEALEIANDTVYGLGAGVWSRDTNIAYRAGRGIEAGRVWTNCYHVYPAGAAFGGYKQSGIGRETHKMMLDHYQQTKNLLVSYSPNKVGFF

SEQ ID NO: 1685 - protein, 356 aa, Ceratophyllum demersum
ILHRIDAGIVIDLEPVNPSDVPVTAAGALKSYKLAAKSISRLQSIPSGNISLLCDVLVREVSELTGYDRVMAYKFHEDEHGEVIAECKRSDLEPYLGLHYPATDIPQASRFLFMKNRVRMICDCMVKPVKVIQDKRLNQSLSLCGSTLRAPHGCHAQYMANMGSIASLVMSVTINDDEEEEAPGEVQNQKTRKLWGLVVCHHTSPRFVPFPLRYACEFLIQVFGIQLNKEVELAVQLREKHILRTQTMLCDMILRDTPIGIVTRSPNVMDLVKCDGAALYYQNQFWLLGITPTEVQIRDILLWLLEYHKGTTGLSTDSLMEAGYPGALVLGDAVCGMAAIEITPKDYLFWFRSHTA

SEQ ID NO: 1686 - protein, 141 aa, Oryza sativa
QKSFNKLQDEIQRQILQAQTDIEELKKKLEQSRIGRLYKEECEAIRKMISLQPPRSETEKLIAGLEKEIANLEAENTACIRTLELRKKQLSLLLHVVEELQISIEDEQRSIADELRAGAEEQQNMSTDEGSGDASDAMALD

SEQ ID NO: 1687 - protein, 465 aa, Coptis trifolia
SGKPFYAIAHRVTGSLIIDFEPVKPYEVPMTAAGALQSYKLAAKAITRLQSLPGGSMERLCDAVVQEVYELTGYDRVMAYKFHEDDHGEVVSEVTKEGLEPYLGLHYPATDIPQAARFLFMKNKIRMICDCRAKHVRVLQDEKLSFDLTLCGSTLRAPHSCHLQYMENMDSIASLVMAVVVNDDDEDDEGTRPSQPQKRKRLWGHAVCHNTTPRFVPFPLRYACEFLIQVFAIHVSKEFELENQILEKNILRTQTLLCDMLMRNVPLGIVSQSPNIMDLVKCDGAALLYKNKIWRLGSSPNEIQIRDIASWLSDYHMDSTGLSSDSLYDAGFPGALSIADTVCGMAAVRINSKDMLFWFRSHTAAEVRWGGAKHDPGEKDDGRKMHPRSSFKAFLEVVKTRSAPWKDYEMDAIHSLQLILRSAFKDIETTDGNTKAFHSQLDNLKINGMEELEAVTNEMVRLIET

SEQ ID NO: 1688 - protein, 391 aa, Coptis trifolia
DLEPVNPADVPVTAAGAMKSYKLAAKAISRLQSLPSGNIAVLCDVLVQEVSDLTGYDRVMVYKFHEDDHGEVIAECRVPELEPYLGLHYPATDIPQASRFLFMRNKVRMICDCSAAPVKVIQDNKLEQPLSLGGSALRAPHGCHAQYMANMGSVASLVMSVTINENDDQMETDQQKGRKLWGLLVCHHTSPRFVPYPLRYACEFLIQVFGMQINKEVELATQVRERHILQTQTVLCDMLLRDAPIGIVTQSPNIMDLVKCNGAALYYRSRFWLLGVTPTEAQIRDIAEWLLQYHNASTGLSTDSLMEAGFPGASVLGTAVCGMAAIKITLKDFLFWFRSHTAKEIKWGGAKHNPTEKDDGWKMHPRSSFKAFLEVVKHRSLPWEDVEMDAI

SEQ ID NO: 1689 - protein, 391 aa, Elatine triandra
DLEPVNPADVPVTAAGALKSYKLAAKAISRLQSFPSGNIPLLCDVLVKEVSDLTGYDRVMVYKFHEDEHGEVIAECRKPDLEPYLGLHYPATDIPQASRFLFMKNKVRMICNCMVTPVKVIQDKRLPQPLSLSGSTLRSPHGCHAQYMANMGSIASLVLSVTINEEDDKIDGDQLLGRKLWGLVVCHHTNPRFVPFPLRYACEFLIQVFGVQINKEVELATQVKEKHILRTQSVLCDMLLRDAPVAIVTQSPNVMDLVNCDGAALYYKKKFWLLGVTPSEAQIRDIGDWILECHSSNTSLSTDSLMEAGFPGASVLGEAVCGMAAIKITSKDFLFWFRSHTAKEIKWGGAKHDPDDKDDGRKMHPRSSFRAFLEVVKWRSLPWEDVEMDAI

SEQ ID NO: 1690 - protein, 391 aa, Elatine triandra
DLEPVNPADVPVTAAGALKSYKLAAKAISRLQSLPSGNIPLLCDILVKEVRDLTGYDRVMVYKFHEDEHGEVIAECRKHDLEPYLGLHYPATDIPQASRFLFMKNKVRMICDCMATPVKVIQDKRLPQPLSLSGSTLRSPHGCHAQYMANMGSIASLVLSVTINEEDDKIDGDQLLGRKLWGLVVCHHTNPRFVPFPLRYACEFLIQVFGVQINKEVELATQVKEKHILRTQSVLCDMLLRDAPVAIITQSPNVMDLVNCDGAALYYKKKFWLLGVTPSEAQIRDISDWLLECHSGNTGLSTDSLMEAGFPGASVLGEAVCGMAAIKITSKDFLFWFRSHTAKEIKWGGAKHDPDDNDDGRKMHPRSSFRAFLEVVKWRSLPWEDVEMDAI

SEQ ID NO: 1691 - protein, 514 aa, Bifidobacterium longum NCC2705
MFAERLRNAMNSRGLKQVDLVHAAEHRGVKMGKSHISQYVAGKTMPREDVLEFLASELDVDMNWLRGEESTTQLNSDASNSVTDGEHAATPLATGASKPQTDSEIPVGRRRTFGKSHKLDNVLYDVRGPVADEAMRMEANGTHILKLNIGNPAPFGFRTPDEVVYDMAHQLTDTEGYSPSKGLFSARKAIMQYAQLKNIPNVTIDDIYTGNGVSELINLSMSALLDTGDEVLVPSPDYPLWTACVNLAGGTAVHYLCDEQSEWYPDIDDIRSKITSNTKAIVIINPNNPTGALYPKEVLQQIVDIAREHQLIIFSDEIYDRLVMDGLQHISIASMAPDLFCVTFSGLSKSHMIAGYRIGWMILSGNKRIAKDYIEGLNMLANMRMCSNVPAQSVVQTALGGHQSVNDYIVPGGRVHDQRDLVYDMLNQIPGITAVKPKAAFYIFPKIDVKRFNIHSDEQFALDLLHDKHILISHGGAFNWHRPDHFRVVYLPRMGMLRETMGEISDFFSYYWQS

SEQ ID NO: 1692 - protein, 391 aa, Endospermum moluccanum
DLEPVNPVDVPTTAAGALKSYKLAAKAISKLQSLPSGNISMLCDVLVTEVRDLTGYDRVMVYKFHEDEHGEVIAECHKPDLEPYLGLHYPATDIPQASRFLFMKNKVRMIYDCFASPVKVIQDKSLSQPLSLCGSTLRSPHGCHAQYMANMGSIASLVMSVTINVDGDEMDNDQQKGIKLWGLVVCHHTSTRFVPFPLRYACEFLIQVFGVQIHKEVGLAKQMREKHILQTQTLLCDMLLRDAPVAIITQSPNLMDLVKCDGAALYFENKFWLLGVTPTEEQIRDIAEWLLKYHSENTGLSIDSLVEAGYPGASVLGDAICGMAAIRIASKDFLFWFRSHTAKEIKWGGAKHDPEEKDDGRKMHPRSSFKAFLEVVKWRSSPWEDVEMDAI

SEQ ID NO: 1693 - protein, 429 aa, Nostoc sp. PCC 7120
MKKVLAIILGGGAGTRLYPLTKLRAKPAVPVAGKYRLIDIPVSNCINSEIFKIYVLTQFNSASLNRHIARTYNFSGFSEGFVEVLAAQQTPENPNWFQGTADAVRQYLWMLQEWDVDEFLILSGDHLYRMDYRLFIQRHRETNADITLSVIPIDDRRASDFGLMKIDNSGRVIDFSEKPKGEALTKMRVDTTVLGLTPEQAASQPYIASMGIYVFKKDVLIKLLKEALERTDFGKEIIPDAAKDHNVQAYLFDDYWEDIGTIEAFYNANLALTQQPMPPFSFYDEEAPIYTRARYLPPTKLLDCHVTESIIGEGCILKNCRIQHSVLGVRSRIETGCMIEESLLMGADFYQASVERQCSIDKGDIPVGIGPDTIIRRAIIDKNARIGHDVKIINKDNVQEADRESQGFYIRSGIVVVLKNAVITDGTII

SEQ ID NO: 1694 - protein, 391 aa, Galearia filiformis
DLEPVNPADVPVTAAGQLKSYKLAAKAISRLQSLPSGNISLMCDVLVKEVSDLTGYDRVMVYRFHEDEHGEVVAECCRPDLEPYLGLHYPATDIPQASRFLFMKNKVRMICDCQAPAVKVIQDKRLVQPLSLCGSTLRSPHGCHAQYMANMGSVASLVMSVTINGDDDEMHSDQQKRRKLWGLVVCHHTSPRFVPFPLRYACEFLIQVFGVQINKEVELAAQMREKHILQIQTMLCDMLLRDSPLAIITQSPNVMDLVKCDGAALYYKKKFQLLGVTPTEAQIKDIADWLLEYHSGSTGLSTDSLMEAGYQGASILGDAVCGMAAVRITSNDFLFWFRSHTAKEIKWGGAKHDPNDKDDGRKMHPRSSFKAFLEVVKWRSLPWEDVEMDAI

SEQ ID NO: 1695 - protein, 508 aa, GIBBERELLA ZEAE PH-1
MPRSERRRGERQQREREREQDSQYNGVLHDETSPLLPRISEVSEPETSVSLTDVHSLLAEAKLLCRYSLPLIATYLLQYSFTVITTIVAGRLGAEELAASSLALTTINIIGFTIFEGMATALDTLCAQAYGSGRYTGVGMHIQRMMVLMAIVMVPVGAIWLCSHWILPLLVPQRSLALKAASFLRVSLVGLPGYAFFEAGKRFLQAQGEFGPGMVVLIICAPVNAFLSWYFAVRLNMGLDGAAFGQALANNLRPALLLLYVILIGKKSHRCWGGWDARAAFAVREWGPMIRLSVASTAVNLAEWLAFEILMISTSYIDTPHLAAQTVLNTLSIVTWHVPFSISVAVTTRFGHLVGAGALKEARRAAILYSIVFVGVGILDGAFLFLLRRPLADLFSDDSMVKDLAVGSMVTVACFQIIDSVICGTNGVLRGLAKQSVAAWVVLAVNYLAAVPFAIWLELGSPDLKLDGLWIGLGSGMVIIAGIECAYMKWISWQDCVDDVKEREDDGT

SEQ ID NO: 1696 - protein, 391 aa, Goupia glabra
DLEPVNPADVPVTAAGALKSYKLAAKAISRLQSLPSGNISLLCDVLVKEVSDLTGYDRVMAYRFHDDEHGEVVAERRRPDLEPYLGLHYPATDIPQASRFLFMKNKVRLICDCLAPPVKVIQDKRLAQPLSPCGSTLRSPHGCHAQYMANMGSIASLVMSVTINDDDDEMNSDQQKGRKLWGLVVCHHTSPRFVPFPLRYACEFLIQVFGVHISKEVELAAQMRKSIFCEFKLVLCDMLLRDAPVAIITQSPNVMDLVKCDGAALYYKKKFWLLGVTPTEAQIRDIAEWLLEYHNESTGLSTDSLMEAGYPGASILGDAICGMAAARITSKDFLFWFRSHTAKEIKWGGAEHDPGDQDDGRNMHPRSSFKAFLEVVKQRSLPWEDVEMDAI

SEQ ID NO: 1697 - protein, 507 aa, Thermosynechococcus elongatus BP-1
MKLRSILRRGFRLQHPLTQILYLPTRRTLLTFAVMIGVLSATAALGQDTAASAAVPEKVQVALNTLWVILAGVLVFFMNAGFGMLETGFCRAKNAVNLLSKNLIVFALASISYWAIGFALMFGDGNGVLGSSGFFLLGADNSPATGEAYRGVYSSLSWAAVPLSAKFFFQLVFAGTAATIVSGAVAERIKFYAFFIFSLLLVGISYPITGHWIWGGGWLQQLGMWDFAGSTVVHSVGGWAALMGAALLGPRLGRFLPDGSVAAIPGHNFAIATLGCLILWLGWFGFNPGSTMAADPGAIAHIAVTTNMAAAFGGVTATVVSTLYFGKPDLSMIINGILAGLVAITASCAFVTIESAALIGAIAGTIIVFSVVTIDRLKIDDPVGAISVHLVNGVWGTLAVGLFADGPGRFYEAGAGPLKGLLWSGDFTQFGYQLVGVLAVGGFTVAFSTAVWLLLNATIGIRVSPEEEIEGLDIGEHGMEAYAGFLLREEVKGFVDLLKRMSGSGRS

SEQ ID NO: 1698 - protein, 395 aa, Crocosphaera watsonii WH 8501
MIQLANRVTQVTPSLTLAITAKAKEMKAQGVDICSFSSGEPDFDTPQYIKDAAVSALDQGKTKYGAVAGEPGLREAIARKLNNDSQLNYSPNNVIVTNGGKHSLFNLMLALIEPGDEVIIPAPYWLSYPEMVKLAQGNPIIVDTTAETDYKITPEQLRQAITSKTKLFVLNSPSNPTGTVYNPAEIKALAEVIVEHNLWVVSDEIYEKILYDGVVHISIGSLGEEILKRTIISNGFAKSYSMTGWRIGYLAGPEPLIKAVSTIQSHSTSNVCTFAQYGAIAALESPKSPPCLQTMRDAFSQRRQVILEKIRAIPQLSCPTPMGSFYVFVDISKTGLNSLEFCDQLLEKQQVAAIPGKAFGADHCIRLSYATDLASIEKGMDRIERFVQETKVNQL

SEQ ID NO: 1699 - protein, 546 aa, Arabidopsis thaliana
MQSSTYAVKGNAAFAFQRRTFSSDRSTTSTGIRFAGYKSLATTGPLYCSGSEAMGATLARADNGIQSVMSFSSVKARSVRAQASSDGDEEEAIPLRSEGKSSGTVLPFVGVACLGAILFGYHLGVVNGALEYLAKDLGIAENTVLQGWIVSSLLAGATVGSFTGGALADKFGRTRTFQLDAIPLAIGAFLCATAQSVQTMIVGRLLAGIGIGISSAIVPLYISEISPTEIRGALGSVNQLFICIGILAALIAGLPLAANPLWWRTMFGVAVIPSVLLAIGMAFSPESPRWLVQQGKVSEAEKAIKTLYGKERVVELVRDLSASGQGSSEPEAGWFDLFSSRYWKVVSVGAALFLFQQLAGINAVVYYSTSVFRSAGIQSDVAASALVGASNVFGTAVASSLMDKMGRKSLLLTSFGGMALSMLLLSLSFTWKALAAYSGTLAVVGTVLYVLSFSLGAGPVPALLLPEIFASRIRAKAVALSLGMHWISNFVIGLYFLSVVTKFGISSVYLGFAGVCVLAVLYIAGNVVETKGRSLEEIELALTSGA

SEQ ID NO: 1700 - protein, 290 aa, Glycine max
MALGTVTRRLGNKLFTVLSPTPRLLHSHATSFGFKQVNEDEKARMVGDVFTSVASSYDLMNDLMSVGLHRLWKDRLVSKLNPFPGMKHLDVAGGTGDVAFRILESIHKVKLRGLRGAFQDTLEAETQIYVCDINPKMLNVGKQRASEKGFGEDGSLVWVEGNAESLSFQNDSMDGYTIAFGIRNVTHIEKVLSEAHRVLKPGGRFLCLELSHVGIPIFKDLYDYYSFSVIPYMGELVAGDRQSYQYLVESIRRFPSQEKFASMIADAGFQKVEYENLVGGVVAIHSGLKI

SEQ ID NO: 1701 - protein, 510 aa, Oryza sativa
MALLLRHSPKLRRAHAILGCERGTVVRHFSSSTCSSLVKEDTVSSSNLHPEYAKKIGGSDFSHDRQSGKELQNFKVSPQEASRASNFMRASKYGMPITANGVHSLCVKKGGDKVSPGEVLCEVETDKATLEMECMEEGYLAKIIHGDGAKEIKVGEIIAVTVEEEEDIGKFKDYKAPSSAESAAPAESKPQSEPTEPKKEKEQPKAPEPKATKTEESFLSEDRTFSSPIARKLAEDNNVPLSSIKGTGPDGRILKADIEDYLASVAKGAKKETAAAPGLGYVDLPNTQIRKVTANRLLHSKQTIPHYYLTVDTRVDKLIKLRSELNPLQDTSGGKKISINDLVIKAAALALRNVPECNSSWMNDFIRQYHNVNINVAVQTEDGLFVPVIRDADKKGLATIADEVKQLAQRARDNSLKPEDYEGGTFTVSNLGGPFGIKQFCAIVNPPQSAILAIGSAEKRVIPGAEGQFEVGSFMSATLSCDHRVIDGAIGAEWMKAFKGYIENPTTMLL

SEQ ID NO: 1702 - protein, 141 aa, Chorispora bungeana
MAMSFSGATVLSGIGSTFQSGGVKTPSVGFVGVGKKLEFVAVSQRKKSSLIYAEKDGNILDDLNEATKKASDFATEKTKELLKDGEKAKDYVDEKNSENTEKAVEEGKKASEYVQEKLKEAGNSAAEFVEGKAGEAKDATK

SEQ ID NO: 1703 - protein, 176 aa, Oryza sativa
MASPEGSTWVFDCPLMDDLAAAAGFDAAPAGGFYWTTPAPPQAALQPPPPQQQPVAPATAAPNACEAQKLKESNESLQEKIKELKAEKNELRDEKQKLKAEKESLEQQIKFLNARPSFVPHPPVIPASAFTAPQGQAAGQKLMMPVIGYPGFPMWQFMPPSDVDTTDDTKSCPPVA

SEQ ID NO: 1704 - protein, 508 aa, Vicia faba
MSSIVTSGVINVPRSSSSSKNLSFSSSSQLSGNKILTVSGNGAPRGRCTLKHVFLTPKAVSDSQNSQTCLDPDASRSVLGIILGGGAGTRLYPLTKKRAKPAVPLGANYRLIDIPVSNCLNSNISKIYVLTQFNSASLNRHLSRAYASNLGGYKNEGFVEVLAAQQSPENPNWFQGTADAVRQYLWLFEEHNVLEYLILAGDHLYRMDYEKFIQAHRESDADITVAALPMDEKRATAFGLMKIDEEGRIIEFAEKPKGEQLKAMKVDTTILGLDDERAKEMPFIASMGIYVISKNVMLDLLRDKFPGANDFGSEVIPGATSIGMRVQAYLYDGYWEDIGTIEAFYNANLGITKKPVPDFSFYDRSSPIYTQPRYLPPSKMLDADITDSVIGEGCVIKNCKIFHSVVGLRSCISEGAIIEDTLLMGADYYETEADKRFLAAKGSVPIGIGKNSHIKRAIVDKNARIGENVKIINSDNVQEAARETEGYFIKSGIVTIIKDALIPSGTVL

SEQ ID NO: 1705 - protein, 240 aa, Methanopyrus kandleri AV19
MARVSLEDAVVARLEKGGERFEVLVDPEGARKFREGEDVDVEEILAVEQVFRDARKGERASEQAMEELFGTSDPIKVAEIVIKEGEIQLTAEQRRRMQEEVKRKIIHIIARRAVDPRTGAPHPPERIERAMEEAGVHIDPMKSAEEQVKDVIKQLRPVLPMKFEEVKVAIRIPAKYTGQAMGVVREFGDIEREEWQYDGAWVAVVRLPAGLQDEFFEKLNEITKGDFESKILERESVEGP

SEQ ID NO: 1706 - protein, 512 aa, Vicia faba
MAAIGVLKVPPSSSSSSSSSSSKAIARNLSFTSSHLSGDKIFTLSGRTRRTSGRNPFIVSPKAVSDSKNSQTCLDPDASRSVLGIILGGGAGTRLYPLTKKRAKPAVPLGANYRLIDIPVSNCLNSNISKIYVLTQFNSASLNRHLSRAYASNLGGYKNEGFVEVLAAQQSPENPNWFQGTADAVRQYLWLFEEHNVLEYLVLAGDHLYRMDYERFIQAHRESDADITVAALPMDEARATAFGLMKIDEEGRIIEFSENPKGEQLKAMKVDTTILGLDDDRAKEMPYIASMGIYVVSKHVMLDLLRDKFPGANDFGSEVIPGATELGMRVQAYLYDGYWEDIGTIEAFYNANLGITKKPVPDFSFYDRSSPIYTQPRYLPPSKMLDADITDSVIGEGCVIKNCKIHHSVVGLRSCISEGAIIEDTLLMGADYYETDADRRFLAAKGGVPIGIGKNSHIRRAIIDKNARIGDDVKIINSDNVQEAARETEGYFIKSGIVTVIKDALIPSGTVI

SEQ ID NO: 1707 - protein, 375 aa, Saccharomyces cerevisiae
MLRTSTLFTKRVQPSLFSRNILRLQSTAAIPKTQKGVIFYENKGNLHYKDIPVPEPKPNEILINVKYSGVCHTDLHAWHGDWPLPVKLPLVGGHEGAGVVVKLGSNVKGWKVGDLAGIKWLNGSCMTCEFCESGHESNCPDADLSGYTHDGSFQQFATADAIQAAKIQQGTDLAEVAPILCAGVTVYKALKEADLKAGDWVAISGAAGGLGSLAVQYATAMGYRVLGIDAGEEKEKLFKKLGGEVFIDFTKTKNMVSDIQEATKGGPHGVINVSVSEAAISLSTEYVRPCGTVVLVGLPANAYVKSEVFSHVVKSINIKGSYVGNRADTREALDFFSRGLIKSPIKIVGLSELPKVYDLMEKGKILGRYVVDTSK

SEQ ID NO: 1708 - protein, 391 aa, Hirtella bicornis
DLEPVNPADVPVTAAGALKSYKLAAKAISRLQSLPSGNISLLCDVLVKEVSDLTGYDRVMVYRFHEDEHGEVIAECCMPDLEPYLGLHYPATDIPQASRFLFMKNKVRMICDCLAPPVKVIQDKRLAQPLSLCGSTLRAPHGCHSQYMANMGAIASLVMSVTINEDDEEMETGQQKARKLWGLVVCHHSSPRFIPFPLRYACEFLIQVFGIQINKEVELAAQTREKHILRTQTVLCDMLLRDAPVAIITQSPNIMNLVKCDGAALYYRKKFWLLGITPTDTQIKDIVEWLLQYHGESTGLSTDSLMEAGYPGASVLGDAVCGMAAVKITSKDFLFWFRSHTAKEIKWGGAKHDPDDKDDGRKMHPRSSFKAFLEVVKRRSLHWEDVEMDAI

SEQ ID NO: 1709 - protein, 466 aa, Bifidobacterium longum NCC2705
MAKGASISGFPEWLPSERVVEQRVIDTLRKVFELNGFIGIETRAVETGASLLKKGETSKEIYLLSRLQEVGHESDTPIEERLGLHFDLTVPLSRYVVEHSGALAFPFKRWQIQKVWRGERPQEGRFREFVQADIDVIGAGDLPDHYEVELPLVMVSALEELRAYGLPKATVHANNRKLSEGFYRGLGLTDVEGVLREIDKLDKIGADEVARLLTETCGATEAQARACLELAELTASDGAELAAKFDALCEAHGIVKDSEAYTLARQGLDTLAMIVDEAAAIRPGSVIADLKIARGLDYYTGSVYETFLDGAASLGSICSGGRYDNLASQGNRKYPGVGLSIGLSRLVSYMLHTAGAHANRVSPAAVLVAVWNEEDRPAANRIANQLRARGIATDVAPTAAKLGKQIKYADKLGIPYVWFPATAAEGAEGAEPAGDEVKNIVTGEQVAADCTSWEPDTVVAQQTVEI

SEQ ID NO: 1710 - protein, 391 aa, Omalanthus populneus
DLEPVNPADVPITAAGALKSYKLVAKAISKLQSLPSGNISRLCDVLVKEVSDLTDYDRVMVYRFHNDEHGEVIAENCRPDLDPYHGLHYPATDIPQASRFLFMKNKVRMICDCLAPPVKVIQDQSLGQSINLCGSALRSPHGCHAQYMENMGSIASLVISVTINEDGSEMDDDQQKARKLWGLVVCHHTSPMFIPFPLRYACEFLIQVFGVQINKEVEMAAQMREKRILQTQTVLCDMLLRDAPVAIITQSPNVMDLVKCDGAALFYRKKFWLLGVTPTEAQVEDIVEWLLEFHSESTGLSTDSLMEAGYPGASTLGHAICGMAAVRISSKDFLFWFRSHTAKEIKWGGAKHDPEDKDDGRKMHPRSSFNAFLEVVKWRSLPWDDVEMDAI

SEQ ID NO: 1711 - protein, 139 aa, Triticum aestivum
  unsure (1)..(139): unsure at all Xaa locations
MKSLGSPCGDPLCPTLALNHPWGSLTHWGALVPCLGIPRGXHXFXRFAPSGRRDHCGMWLPGNXHRCFWNNTAYHDXHHQLRXSGYNFSQPFFVTWDRVFGTHMPYVDRGRQGPRCAPGAAHGLTYICRKIATRKHTSS

SEQ ID NO: 1712 - protein, 391 aa, Hugonia platysepala
DLEPVNLADVPMTATGALTSYKIAAKAISRLQTVPSGSINLLCDVLVKELRELTGYDRVMVYRFHEDDHGEVVAECRSSDLESYLGLHYPATDIPQASRFLFMKNKVRMICDCLASSVKVMQDKSLAEPVSLSGSILRSPHGCHAQYMANMGSIASLVMSVTINEDCNEMESDQQRGRKLWGLVVCHHTSPRFVPFPLRYACEFLIQVFSIQISKEVELEAQRREKHIMQTQTVLCDMLLRDAPLAIMTQSPNVMDLVKCDGAALCCRKNCWLLGLTPTEQQIADIAEWLLEYHGESTGLTTDSLMEAGYPGASVLGNAICGMAAIRITSKDFLFWFRSHTAKEIMWGGAKHDPGDKDGGRKMHPRSSFKAFLEVVKWRSLTWEDVEMDAI

SEQ ID NO: 1713 - protein, 457 aa, Staphylococcus aureus subsp. aureus MW2
MHINTVNGRGMYMSKAHQLIQEDEHYFAKSGRIKYYPLVIDHGYGATLVDIEGKTYIDLLSSASSQNVGHAPREVTEAIKAQVDKFIHYTPAYMYHEPLVRLAKKLCEITPGDFEKRVTFDLTGSDANDGIIKFARAYTGRPYIISFTNAYHGSTFGSLSMSAISLNMRKHYGPLLNGFYHIPFPDKYRGMYEQPQANSVEEYLAPLKEMFAKYVPADEVACIVIETIQGDGGLLEPVPGYFEALEKICREHGILIAVDDIQQGFGRTGTWSSVSHFNFTPDLITFGKSLAGGMPMSAIVGRKEIMNCLEAPAHLFTTGANPVSCEAALATIQMIEDQSLLQASAEKGEYVRKRMDQWVSKYNSVGDVRGKGLSIGIDIVSDKKLKTRDGSAALKICNYCFEHGVVIIAVAGNVLRFQPPLVITYEQLDTALNTIEDALTALEAGNLDQYDISGQGW

SEQ ID NO: 1714 - protein, 245 aa, Pseudomonas sp. 61-3
MTDQRKGSDAEPTTHFGFKNVPESQKAEKVAEVFHSVAAKYDLMNDLLSGGMHRLWKRFAIELSGVRTGNRVLDIAGGTGDLTRKFSHLVGPTGQVVLADINESMLKVGRDRLLDLGVAGNVEFVQADAEKLPFPDNHFDCVTIAFGLRNVTHKEDALRSMLRVLKPGGRLLVLEFSKPTNALMSKAYDAYSFAFMPLMGKLITNDSESYRYLAESIRMHPNQETLKSMMVEAGFDRVTYHNMTA

SEQ ID NO: 1715 - protein, 391 aa, Hymenanthera alpina
DLEPVNPADVPVTAAGALKSYKLAATAISRLQSLPSGNISLLCDTLVKEVSDLITYDRVMVYRFHDDEHGEVIAESCKPGLEPYLGLHYPATDIPQASRFLFMKNKIRMICDCLAPPVKVVQDKRLEQPLSLCGSTLRSPHGCHSQYMANMGSIASLVMSVTINEDDDEMDSDQQKGRKLWGLVVCHHSSPRFVPFPLRYACEFLIQVFSVQISKEVEVAAQMKEKHIFKTQTVLCDMLLRDAPEAIITHSPNVMDLVKCDGAALYYRKKVCLLGVTPTEAQIRDIAEWLLEYHSGSTGLSTDSLMEAGYPNASILGDLVCGMAAVRITSKDFLFWFRSQTDKEVKWGGAKHDATDKDDLRKMHPRSSFKAFLEVVKWRSLPWEDVEMDAI

SEQ ID NO: 1716 - protein, 348 aa, Saccharomyces cerevisiae
MSIPETQKAIIFYESHGKLEHKDIPVPKPKANELLINVKYSGVCHTDLHAWHGDWPLPTKLPLVGGHEGAGVVVGMGENVKGWKIGDYAGIKWLNGSCMACEYCELGNESNCPHADLSGYTHDGSFQEYATADAVQAAHIPQGTDLAEVAPILCAGITVYKALKSANLRAGHWAAISGAAGGLGSLAVQYAKAMGYRVLGIDGGPGKEELFTSLGGEVFIDFTKEKDIVSAVVKATNGGAHGIINVSVSEAAIEASTRYCRANGTVVLVGLPAGAKCSSDVFNHVVKSISIVGSYVGNRADTREALDFFARGLVKSPIKVVGLSSLPEIYEKMEKGQIAGRYVVDTSK

SEQ ID NO: 1717 - protein, 392 aa, Hypericum empetrifolium
DLEPVNPADVPVTAAGALKSYKLAAKAISKLQSLPSANISLLCDVLVKEVSDLTGYDRVMVYKFHEDDHGEVVAECHRPDLEPFLGLHYPATDIPQASRFLFLKNKVRMICDCYAQPVKVVQYSGLSQSLSLCGSSLRAPHGCHAQYMVNMGSIASLVMAVTINDDDDDEAEADRRKGRKLWGLVVCHHRAPRFVPFPLRYACEFLIQVFGIQINKKVKLEAQMREKHILETQTVLCDMLLRESPVAIVTQSPTVMNLVKCDGAALCYQNTFWLLGVSPTEAQVRDITEWLLEYHAGSTGLSTDSLMEAGYPGASVLGDAVCGMAAIRINSKDFLFWFRSHAAKEIKWGGAKHDPDDKDEGRKMHPRSSFKAFLEVVKWRSLPWEDVEMDAI

SEQ ID NO: 1718 - protein, 932 aa, Acinetobacter sp. ADP1
MNTIPAVQLQSTTDNQLEYSVQTTNTTCPYCGVGCGVSATVEKTVSGQRISVTGDQEHPSNFGRLCIKGSRLADTLGLETRLLQPMIGRGDLRKVTTWDDVTEQIATRFQQCIDTYGAESIAFYVSGQLLTEDYYVVNKFVKGYLGTANIDTNSRLCMSSAVAAHKRSFGEDLVPASYKDFEHTDMVVLVGSNTAWCHPVLYQRIMQAKTERDLTVVVIDPRFTATCEQADLHLPILPGQDVTLFNGLLQYLYQQGYTDHSFVTAYTENLDSALLASDAEADIKVVSEKTGIALEKLQQFYQMFAQTDKVMSLFSMGVNQSSQGVNKANAIINCHLLTGKIGQLGAAPFSMTGQPNAMGGREVGGLANMLAAHMELDQPLHQEIVQSFWHSPRIASKAGLKAVDLFQAVETGKIKAVWIMATNPLVSLPDADQVKRALNKCEFVVVSDICQDTDTTAFADVLLPALGWGEKDGTVTNSERRISRQRAFLDTPEHTKADWWAVCQVAKKMGFSGFEFEHAHQIFQEHAELSSYQNAAMSHRDEAKAFRYFNLSGLTQISQSDYDQLKPIQWPVLKSIDELNDTDSERLFVQGQYSHSSKKAKFIATDAIAPVHATTHQYPLILNTGRIRDQWHTMTRTGLSSNLTTHRAEPYCEIHPQDALKYGVREHGLVEVTSNWGKCVLRVHLSEGIRRGQVFAPIHWNDQFASDARIGKVVNPVVDSISGEPEFKHTPVMLNPFYVHWQGVLYIREGMEQLIQTCLKNVVWWTKVKMTKVNRFEIAGRNKLDEVQYALKDFLPFDDASFEWMNLSDTSMQMSHSIILKDGILIASLYIAPAEMLPDRDWVATLFKRERLSALHRKALLAGMPMSMSSHDGPLVCSCFKVGKNKIIETIKTQNITHEKQVTACLKAGGNCGSCLPEIRGLIKACQQEIDA

SEQ ID NO: 1719 - protein, 423 aa, Campylobacter jejuni subsp. jejuni NCTC 11168
MNFNKETLALHGAYNFDTQRSISVPIYQNTAYNFENLDQAAARFNLQELGNIYSRLSNPTSDVLGQRLANVEGGAFGIPVASGMAACFYALINLASSGDNVAYSNKIYGGTQTLISHTLKNFGIEAREFDIDDLDSLEKVIDQNTKAIFFESLSNPQIAIADIEKINQIAKKHKIVSICDNTVATPFLLQPFKHGVDVIVHSLSKYVSGQGTALGGALIERKDLNDLLKNNDRYKAFNTPDPSYHGLNLNTLDLPIFSIRVIITWLRDLGASLAPQNAWLLLQGLETLAVRIEKHSQNAEKVANFLNSHPDIKGVNYPTLASNAYHNLFKKYFDKNFASGLLSFEAKDYEHARRICDKTQLFLLAANLGDSKSLIIHPASTTHSQLSEEELQKAGITKATIRLSIGLENSDDLIADLKQAIES

SEQ ID NO: 1720 - protein, 403 aa, Chlamydophila caviae GPIC
MDRLTVRELSPEENKVLVRVDFNVPIKDGKILDDIRIRSAMPTINYLLQKRAAVILMSHLGRPKGTGFEEKYSLQPVVEVLEGYLGHHVPLAPDCIGEVARQAVAQLSPGRVLLLENLRFHRGEEHPEEDPTFAAELSSYGDFYVNDAFGTSHRKHASVYHVPQAFPGRSAAGLLMEKELEFLGQHLLHSPKRPFTAILGGAKVSSKIGVIEALLSQVNNLLLAGGMGFTFLKALGKSVGNSLVEESGIELARRVLKLAEQRNVRIVLPIDVKVAKACEPGVSWSETLIDQGIPADLEGLDIGTKTIQEFCKIIDASATVFWNGPVGVYEVPPFDQGSMAIANCLARHSSATTVVGGGDAAAVVALAGCTSQVSHVSTGGGASLEFLENGFLPGTEVLSPAQD

SEQ ID NO: 1721 - protein, 383 aa, Oceanobacillus iheyensis HTE831
MEHLLNQQVQNIEISGIRKFFNLVSNEKDIVSLTIGQPDFYTPHAIKQASINAVNNNHTTYTANAGVIELRKAIANYYESRYQIPYHPESEIIVTAGASEAIDITLRTILEPGDEVILPAPIYPGYEPLITLARAKPIHMDTTKTNFKITKSQLEETITEKTKCIIIPSPSNPTGAAYTKKELDEIVSVLKDKKLFILSDEIYSEIIFDQPHVSIASYPEMRDQTIVINGLSKSHSMTGFRIGYALAPHWLSKHMLKVHQYNVSCASSISQYAALEAFNSNDDHLQLIKDTYKSRRDLVYNRLTSMGIDVQLPEGAFYMFPRFPMRNENSFEFGLTLVKQAKVALVPGNSFSQYGEGFMRLSYAYHEDVLNKGLDRIEKFLNQ

SEQ ID NO: 1722 - protein, 193 aa, Oryza sativa
LTHSLNNFFFFFFFFFFFFFFFFFFFFFFILSWTTKNIMGFPVGGYSGVPRLLLHLLFLLTHLRRLSSCLLRLAGADIDDSPTAVDAEYDGSYSYSSQSSQLLELDDHSPALRFDALSSSLQPPLHVATCAVCLRDFHKSAQVRRAHRCRHVFHRACLDAWAHHGHRTCPLCRSPLLPSSAPPVLLPLPLPAS

SEQ ID NO: 1723 - protein, 433 aa, Ferroplasma acidarmanus
MFDFIDYLSISNILINNLWIVIAAIFIFAMTIAVGFLEVGELGKKFKNSMLKTIVITGTAMFVMAIIGFNTAFAPTLYGIIGNPFYKDGFMLGGFSPGVIFNTWWSMGTSYFNTGLTTGSYFFFETACAAVTLALVGVIVLNKVKFGAFFAFSIVYFIFIWNLPAAWIWNPSGWLYQMGMRDFAGGIVVHGAAAIAGLAIVYEIWREERKKGLKTSLKVNIKPDYQWLAVGILILWIGWFGFNPGSILAFNDDVLVVVIATFVASGAGMVSTMLFSRMFDRETPIIIVAVNGILMGLIIVTPLAGFVSPASALILGLIGGPLFVGAEKLFAKVKWFSDPVGLFPAHGVGGIFGVLMIGLFTQHAFAAASGNAILPNGLLFGGGFAALRQLGIEAFGVFVVVITVFAISFLAIFIIGKISHGILNEDAYKQSER

SEQ ID NO: 1724 - protein, 404 aa, Vibrio vulnificus YJ016
MQDILTVILAGGMGSRLSPLTDDRAKPAVPFGGKYRIIDFTLTNCLHSGLRKILVLTQYKSHSLQKHLRDGWSIFNPELGEYITSVPPQMRKGGKWYEGTADAIYHNLWLLERSEAKYVMVLSGDHIYRMDYAPMLEEHIANNAALTVACMDVNCKEAKAFGVMGIDEHHRVHSFVEKPQNPPHLPNDPERSLVSMGIYIFSMEVLQQALIEDADNDASSHDFGKDIIPKLIDTGSVFAYKFCGSKGRVDKDCYWRDVGTIDSFYQANMDLLEPIPPMNLYQKDWGIRTYEPQYPPARTVSSGSGNEGIFINSMISNGVINSGGSVQHSIVSSNVRINDSATIVDSIIFDDVEIGEGCQLVNCIIDKHVKVPPYTQIGLNRLEDAQRFKISENGIVVVPESYQF

SEQ ID NO: 1725 - protein, 436 aa, Candida albicans SC5314
MSSTPDFKVSSETAREYETKYSAHNYHPLPVVFSKAEGAHVWDPEGKEYLDFLSAYSAVNQGHCHPKIVAALVDQASKLTLCSRAFSSDVFGVYAKYITEYFNYEMVLPMNTGAEAVETGLKLARKWGYDKKGIPSGEAIILSAVNNFHGRTLGVISMSTDPDATTNFGPYLRGVGPQIPGEPEGTLLRYGVIEDVEKAFANAGDKIAAILLEPIQGEAGIVVPPEDYLPRVQELCKKHNVLLICDEIQTGIARTGKMLCYEHSKGVKPDIVLLGKAISGGVMPVSAVLSSKEVMSTLEPGSHGSTYGGNPLACRVAIAALDVVRDENLVERAQKLGALLREKLEELQKESNGMISEVRGKGLLSAIVIDESKTNGRTAWDLCLLMKNHGVLAKPTHDNIIRLAPPLVISEEDLLKGVDSIRKSLKELPNVAKTEH

SEQ ID NO: 1726 - protein, 525 aa, Cicer arietinum
MRLVEIAVTLVLIALFIHFRPTPTAKSKALRHLPNPPSPKPRLPFVGHLHLLDHPLLHQSLIRLGERYGPLYSLYFGSMPTIVASTPDLFKLFLQTHEAVSFNTRFQTSAIRRLTYDNSVAMVPFAPYWKFIRKLIMNDLLNATTVNKLRPLRSQEIRKVLNVMAKSAQTQEPLNVTEELLKWTNSTISRMMLGEAEEIRDIARDVLKIFGEYSLTDFIWPLKKLKVGKYEKKIEEIFNRFDPVIEKVIKKRQDVRRRRKERNGELEEGEQSVVFLDTLLDFAEDETMEIKITKEQIKGLVVDFFSAGTDSTAVATDWCLSELINNPRVMKKAREEVDSVVGKDRLVDESDIQNLPYIRAVVKETFRMHPPLPVVKRKCTEECEINGYVIPEGALVLFNVWAVGRDPKYWDRPLEFRPERFLENAGEGDAGSIDLRGQHFQLLPFGSGRRMCPGVNLATAGMATLLSSVLQCFELQVAGPNGQILKGADAKVSMDERPGLTVPRAHNLVCVPLARPGAAAKLLSS

SEQ ID NO: 1727 - protein, 440 aa, Candida albicans SC5314
MPSHFDTLQLHAGQPVEKPHQPRAPPIYATTSYVFNDSKHGAQLFGLETPGYIYSRIMNPTNDVFEQRIAALEGGIGALATSSGQSAQFLAIAGLAHAGDNIISTSYLYGGTYNQFKVAFKRLGIETKFVNGDAAEDFAKLIDDKTKAIYIETIGNPKYNVPDFEKITKLAHEHGIPVVVDNTFGAGGFLVNPIAHGADIVVHSATKWIGGHGTTIAGVIVDSGNFPWTEYPEKYPQFSKPSEGYHGLVLSDALGKAAYIGHLRIELLRDLGPALNPFGSFLLLQGLETLSLRVERQSENALKLAQWLEKNPNVESVSYLGLPSHESHELSKKYLNNDAKYFGGALAFTVKDITNTSSDPFNEASPKLVDNLEIASNLANVGDSKTLVIAPWFTTHQQLSDEEKLASGVTKGLIRVSTGTEYIDDIINDFEQAFKKVYNN

SEQ ID NO: 1728 - protein, 391 aa, Lachnostylis bilocularis
DLEPVNPADVPVTTAGALKSYKLAAKAISRLQSLPSGNISLLCDVLVKEISDLTGYDRVMVYRFHDDEHGEVIAECRRPDLEPYLGLHYPAIDIPQASRFLFMKNKVRMICDCLAPPVKVIQDKRLSQQLSLGGSTLRSPHGCHAQYMANMGSIASLVMSVTINEDDDEMDSDRERGIRLWGLVVCHHTSPRFVPYPLRYACEFLIQVFGVQVSKEVQLAAQMREKHILQTQTVLCDMLLRDAPVAIITQSPNVMDLVKCDGAALYYRKKFWLLGVTPTEAQIKDIAEWLLECHGGSTGLSTDSLMEAGYPGAAVLDDAVCGMAAVRITSKDFLFWFRSHTAKEIKWGGAKHDPEDKDDGRKMHPVSSFKAFLDVVKQRSLPWEDIEMDAI

SEQ ID NO: 1729 - protein, 308 aa, Chlamydia muridarum
MERIGLLFPGQGSQFVGMGKDLYQQYPEVTQLFAQADEFLGFSLSSIMFEGPEETLLKTTNSQLAIYLHSLAVLEILSARCSFNPVLVSGLSLGEYTALTASKRISLEDGLRVVQKRAELMNAACEQSLGAMAAVLGLTADIVLPALESLGSGIWVANYNAPKQIVIAGVRDKVEEAAVVLRELGAKKVVMLKVSGAFHTPLMQSAQDELAPYLYQLAIRDSSIAFASNVVGELVQESEMIRSLMVKQMTSPTLWYQTCFQIDSKVDLFLELGSGNVLTGLCRSIGLASPCKHLGSVEDIENFCRSFE

SEQ ID NO: 1730 - protein, 391 aa, Leonia glycycarpa
DLEPVNPIDVPVTAAGALKSYKLAAKAISRLQSLPSGNISLLCDVLVKEVSELTGYDRVMVYRFHEDEHGEVIAESCKPGLEPYLGLHYPATDIPQASRFLFMKNKIRMICDCLAPPVKVVQDKRLDQPLSLCGSALRSPHGCHSQYMTNMGSIASLVMSVTINEDDDEMDSDQQKGRKLWGLVVCHHTSLRFVPFPLRYACEFLIQVFGVQINKEVKLAAQMKEKHILQTQTVLCDMLLRDAPVAIITQSPNVMDLVKCDGAALYYGKKFWLLGVTPTEAQIRDIAEWLLEYHSGSTGLSTDSLMEAGYPNASILGDPVCGMAAVRITSKDFLFWFRSHTAKEVKWGGAKHDPDDKDDGRKMHPRSSFKAFLEVVKQRSLPWEDVEMDAI

SEQ ID NO: 1731 - protein, 377 aa, Yersinia pestis CO92
MIKTRAAVAWGPNQPLSVEEVDLMPPQKGEVLVRIVASGVCHTDAYTLSGADPEGVFPTILGHEGGGIVEAIGEGVTSVAVVDHVIPLYTPECGECKYCRSGKTNLCQAIRSTQGKGLMPDGTTRFSKNGQPIFHYMGTSTFSELTVVPEISLAKINKEAPLEEVCLLGCGVTTGMGAVMNTAKVKPGDTVAIFGLGGIGLSAVIGAQMAGASRIIGIDLNTSKFELARKLGATDLINPKDYDKPIQEVIVELTDGGVDFSFECIGNVNVMRSALECCHKGWGESVIIGVAGAGEEISTRPFQLVTGRVWRGSAFGGVKGRSELPGIVQQYLDGKFALNDFITHTMALDQINEAFDLMHEGKSIRSVIHFNHSSESK

SEQ ID NO: 1732 - protein, 496 aa, Staphylococcus aureus subsp. aureus MW2
MELLKHLSQRQYIDGEWVESANKNTRDIINPYNQEVIFTVSEGTKEDAERAILAARRAFESGEWSQETAETRGKKVRAIADKIKEHREALARLETLDTGKTLEESYADMDDIHNVFMYFAGLADKDGGEMIDSPIPDTESKIVKEPVGVVTQITPWNYPLLQASWKIAPALATGCSLVMKPSEITPLTTIRVFELMEEVGFPKGTINLILGAGSEVGDVMSGHKEVDLVSFTGGIETGKHIMKNAANNVTNIALELGGKNPNIIFDDADFELAVDQALNGGYFHAGQVCSAGSRILVQNSIKDKFEQALIDRVKKIKLGNGFDADTEMGPVISTEHRNKIESYMDVAKAEGATIAVGGKRPDRDDLKDGLFFEPTVITNCDTSMRIVQEEVFGPVVTVEGFETEQEAIQLANDSIYGLAGAVFSKDIGKAQRVANKLKLGTVWINDFHPYFAQAPWGGYKQSGIGRELGKEGLEEYLVSKHILTNTNPQLVNWFSK

SEQ ID NO: 1733 - protein, 391 aa, Maytenus arbutifolia
DLEPVNPADVPITAAGALKSYKLAAKAISRLQSLPSGNMSLLCDVLVKEVSELTGYDRVMVYRFHDDDHGEVVGECCRPDLEPYLGLHYPATDIPQASRFLFMKNKVRMICDCLAPPVKVLQDKRLAQPLSLGGSTLRSPHGCHAQYMSNMGSIASLVMSVTINEDDDETTSDQQKGRKLWGLVVCHHSTPRFVPFPLRYACEFLIQVFGVQINKEVELATQLKEKHILRTQTVLCDMLLRDAPVGILTQSPNVMDLVKCDGAALYYRNKFWLLGVTPTETQITDIAEWLLEYHSESTGLSTDSLMEAGYPDASILGEAVCGMAAIKITSKDFLFWFRSHTAKEMKWGGAKHNPDDKDDGKRMHPRSSFKAFLVVVKRRSLPWEDIEMDAI

SEQ ID NO: 1734 - protein, 565 aa, Arabidopsis thaliana
MASTPKLTSTISSSSPSLQFLCKKLPIAIHLPSSSSSSFLSLPKTLTSLYSLRPRIALLSNHRYYHSRRFSVCASTDNGAESDRHYDFDLFTIGAGSGGVRASRFATSFGASAAVCELPFSTISSDTAGGVGGTCVLRGCVPKKLLVYASKYSHEFEDSHGFGWKYETEPSHDWTTLIANKNAELQRLTGIYKNILSKANVKLIEGRGKVIDPHTVDVDGKIYTTRNILIAVGGRPFIPDIPGKEFAIDSDAALDLPSKPKKIAIVGGGYIALEFAGIFNGLNCEVHVFIRQKKVLRGFDEDVRDFVGEQMSLRGIEFHTEESPEAIIKAGDGSFSLKTSKGTVEGFSHVMFATGRKPNTKNLGLENVGVKMAKNGAIEVDEYSQTSVPSIWAVGDVTDRINLTPVALMEGGALAKTLFQNEPTKPDYRAVPCAVFSQPPIGTVGLTEEQAIEQYGDVDVYTSNFRPLKATLSGLPDRVFMKLIVCANTNKVLGVHMCGEDSPEIIQGFGVAVKAGLTKADFDATVGVHPTAAEEFVTMRAPTRKFRKDSSEGKASPEAKTAAGV

SEQ ID NO: 1735 - protein, 259 aa, Oryza sativa
  unsure (1)..(259): unsure at all Xaa locations
MAPPLLLLLASLLLVAARRALGLGLGQWQPGHATFYGGGDASGTMGGACGYGNLYSQGYGTSTAALSTALFNRGLSCGSCYELRCAGDHRRSCLPGGATVTVTATNFCPPNYALPSDGGGWCNPPRRHFDLAEPAFLRIARHAAGIVPVSFRRVACARKGGVRFTVNGHAYFNLVLVTNVGGAGDVRSLAVXGSGSGSRVGGRWQPMSRNWGQNWQSNAYLDGKALSFRVTAGDGRSLTCADVAPAGWQFGQTFEGRQF

SEQ ID NO: 1736 - protein, 392 aa, Maytenus senegalensis
DLEPVNPADVPITAAGALKSYKLAAKAISRLQSLPSGNMSLLCDVLVKEVSELTGYDRVMVYRFHDDDHGEVVAECCCRPDLEPYLGLHYPATDIPQASRFLFMKNKVRMICDCLAPPVKVLQDKRLAQPLSLGGSTLRSPHGCHAQYMTNMGSIASLVMSVTINEDEDETNSDQQKGRKLWGLVVCHHSTPRFVPFPLRYACEFLIQVFGVQINKEVELATQLKEKHILRTQTVLCDMLLRDAPVGILTQSPNVMDLVKCDGAALYYRNKFWLLGVTPTETQVKDIAEWLLEYHSESTGLSTDSLMEAGYLDASILGEAVCGMAAIKITSKDFLFWFRSHTAKEMKWGGAKHDPDDKDDGKRMHPRSSFKAFLVVVKRRSLPWEDVEMDAI

SEQ ID NO: 1737 - protein, 392 aa, Prochlorococcus marinus str. MIT 9313
MPLPPHLSDRVVALQPSLTLAISARAKALQQEGRDICSLSAGEPDFNTPEFIIDATVKALRDGITRYGPAAGDPELREAIATKLSKENTVPTNAEQVLVTNGGKQAIFNLFQVILNPGDEVLIPAPYWLSYPEMARLAGAKVTTLPSTPENGFCLDLNNLEASIGPKTRLLLLNSPGNPTGRVMARKELETLADLLRDHPQILVMSDEIYEFILEEGQQHYSFSAIAPDLSNRTFIVNGFAKGWAMTGWRLGYLAGPADAVKAATALQSQSTSNVCSFAQRGALAALQGSRECVKKMVKSYNTRRELLTSGLLSLEGMSLVPPKGAFYAFPKLPPESLDSVSFCEQALENHGLAMVPGAAFGDDSCVRLTCAVSPETICDGLERLRKALKQS

SEQ ID NO: 1738 - protein, 391 aa, Mesua sp. Coode 7884
DLEPVNPADVPVTAAGALKSYKLAAKAISKLQSLPSGNISLLCDVLVKEVCELTGYDRVMVYKFHEDDHGEVVAECRRPDLEPYLGLHYPATDIPQASRFLFMKDKVRMICDCLAPPAKVIQDNGLTQALSLCGSTLRAPHGCHAQYMENMGSIASLVMSVTINDDDDEMASDRQKGRKLWGLVVCHHTGPRFVPFPLRYACEFLIQVFGIQITKEAELAAQIREKHILETQTVLCDMLLRDSPMAIVIQSPNVMDLVKCDGAALYFKEKFWLLGITPTEAQIRDISEWLLDYHNGSTGLSTDSLMEAGYPGASILGDAVCGMAAIRVNSKDFLFWFRSHTAKEIKWGGAKHDPGDKDEGRKMHPRSSFKAFLEVVKWRSLPWEDMEMDAI

SEQ ID NO: 1739 - protein, 385 aa, Zea mays
DCFTAAMMISATVIIYVQSNVSWPIGLGIPTALMFLACVLFFMGTRLYVRVTPEGSPFTSVVQVLSAALKKRSLKQPKDPKQDLFDPPHTSAIVTKLAHTDQFRCLDKAAIVASPDEVRSGGGAPADPWRLCSVQQVEEVKCLIRIVPVWSTGIIYYVAVVQQSTYVVLSALQSDRHLGRAGFQIPAASFTVFAMLAQTLWIPFYDRLLLPKLRKITGKEEGFTLLQRQGIGIALSTVAMVISAIVEDRRRAIALSQPTLGTTITGGAISAMSSLWMVPQLMILGLSEAFNLISQIEFYYKEIPEHMRSVAGALAFCNLALGNYLSGFLVTIVHRTTGSGQNWLAQDLNKGRLDLFYWTIAGIGVFNFIYFVICARWYRFKGASN

SEQ ID NO: 1740 - protein, 427 aa, Bradyrhizobium japonicum USDA 110
MGERSVKLPDIGEGIAEAELVEWHVKEGDLVREDDLLATVMTDKASVEIPSPLAGEVSWIGARIGDAVAIGSTLVKLKVAGDDTSEPADEAPTEDVATPSAVTNAKTPDAVPTPPARIRPAAIEARPATTSAVRRTPGEKPLASPAIRLKAREAGLDLRQVHGTGPAGRITHEDIDAFLSRGPAPTHGRGMAPKTAVTDVKVVGLRRRIAEKMALSKSRIPHITIIEEVNVSPLEDLRATLNRKPAPEHPKLTLLPFLMRAMVKALTEQPALNALYDDEAGIVHEHAGIHIGIATQTPSGLVVPVVKHAEARDLRDCSIELNRLAQRAREGTATREELTGSTITITSLGALGGLATTPVINHPEVAIVGVNKIAIRPVWDGTQFVPCKMMNLSCSFDHRVIDGWDAAVFVQRVKELLENPATIFVDP

SEQ ID NO: 1741 - protein, 465 aa, Bradyrhizobium japonicum USDA 110
MTEITCQLLVVGAGPGGYVCAIRAGQLGLDTVLVERGKLGGSCLNVGCIPSKAMIHVAEEFEKLVEAADGKTPFGLTAAQPALDFKQAIAWKDGIVHRLNNGVAALLRKAKVKIVQGHGRFRDGKTIVVETETGPKTIKAETVVIATGSAPVELPTLPFGGRVISSTGALSLAEVPKSLVVVGGGYIGLELGTAFAKLGSKVAVVEAQDNILPLYDVELTAPIARRLTALGVEVLTGARALGLTAQGDGLRVETPDGQERSLTADKILVTVGRTPVTEALGLEQLVLDMDGRFIRIGQHCETSMRGIYAIGDVTGEPMLAHRAMAQGEMVAEIAAGMPRAWDKCCIPAICFTDPEIVSAGLSPDEARRAGINIKVGQFPFAANGRAMTRHGEPGFVRVVARADNQRVLGIQALGQGVSELSAAFGLAIEMGAVLQDIAGTIHAHPTLGEAIQEAAFKALGHAIHV

SEQ ID NO: 1742 - protein, 176 aa, Agrobacterium tumefaciens
AFGKRHVIKALALALRDVPDANVSWTESNMVKHKHSDVGVAVSIPGGLITPIIRKAEEKSLSTISNEMKDYGKRAKERKLKPEEYQGGTTAVSNMGMMGVKSFSAVINPPHATILAVGAGEERAVVKNGEIQDRQCHDGYALYRPPLRRWRARSRTDRRLQALHRKPDGHAGLIGE

SEQ ID NO: 1743 - protein, 526 aa, Citrullus lanatus var. lanatus
MASSMAAVGVLRLPTTSASSSSSSNGGSNRARRHSLRSLSFGASHISGDKIDFRASALGSRRVSGGRAVPSIVSPKAVSDSKNTQTCLDPDASRSVLGIILGGGAGTRLYPLTKKRAKPAVPLGANYRLIDIPVSNCLNSNISKIYVLTQFNSASLNRHLSRAYASNMGGYKNEGFVEVLAAQQSPENPNWFQGTADAVRQYLWLFEEQNVLEYLVLAGDHLYRMDYERFIQAHRETDADITVAALPMDEKRATAFGLMKIDEEGRIIEFAEKPKGEQLKTMKVDTTILGLDDARGKEMPFIASMGIYVISKDVMLSLLRDKFPGANDFGSEVIPGATSIGMRVQAYLYDGYWEDIGTIEAFYNANLGITKKPVPDFSFYDRSSPIYTQPRYLPPSKMLDADITDSVIGEGCVIKNCKIHHSVVGIRTCISEGAIIEDTLLMGADYYETDADRRLLAAKGSVPIGIGRNSHIKRAIIDKNARIGEDVKIVNGDNVQEAARETDGYFIKSGIVTVIKDALIPSGTVI

SEQ ID NO: 1744 - protein, 317 aa, Eucalyptus botryoides
MGSLEKERTTTGWAARDPSGVLSPYTYSLRHEVVGEVLEVGSEVTKYRVGDRVGTGIVVGCCRSCGPCNSDQEQYCNKKIWNYNDVYTDGKPTQGGFAGEIVVGQRFVVKIPDGLESEQDAVMCAGVTVYSPLVRFGLKQSGLRGGILGLGGVGHMGVKIAKAMGHHVTVISSSDKKRTEALEHLGADAYLVSSDENGMKEATDSLDYIFDTIPVVHPLEPYLALLKLDGKLILTGVINAPLQFISPMVMLGRKSITGSFIGSMKETEEMLEFCKEKGLTSQIEVIKMDYVNTALERLEKNDVRYRFVVDVAGSKLD

SEQ ID NO: 1745 - protein, 174 aa, Borrelia hermsii
MDEEISTLFTEEKIKSKIKELAQKIRNYYKDKSNVVFISLLKGSFMFFADITREMGLNVKIDFLQVSSYKNKTHSSLNVLIKKDIDIDIKDSYVIIFDDIIDTGLTYDKIITYLKTKNPKEIKICTLFNKPSRRLIELKIDYAGFEIENDFIVGYGIDFNEKHRTLKDVAKINK

SEQ ID NO: 1746 - protein, 526 aa, Citrullus lanatus var. lanatus
MVAMDSCFVSLKSNTHLMKGNWGGLDRCENGFYGEKVRGSFNENAWIKSLKSEKKALKLTPNVAYAVATPNISKQPVSIQVPSIPKVKANPKNVASIILGGGAGTHLFPLTRRSATPAVPVGGCYRLIDIPMSNCINSGINKIFVLTQFNSASLNRHISRTYFGNGVNFGEGFVEVLAATQTSGETGMHWFQGTADAVRQFIWVFEDAKNRNVENILILAGDHMYRMDYMDFVQNHIDRNADISISCAAVGDSRASDYGLVKIDSRGRIIQFSEKPMGANLSAMRVDTTSFGLSREESLKSPYIASMGVYVFKTDILLNLLKWRYPTSNDFGSEIIPAAVKEHNVQAYIFRDYWEDIGSIKTFYDANLALTEEFPKFEFYDPKTPIYTSPRFLPPTKIDKCQIVDAIISHGCFLRECSVQHSIVGERSRLDYGVELKDTIMMGADTYQTEPEIAGLLAEGKVPIGIGRNTKIRNCIIDKNAKIGKDVVIMNKEGVQEADRPEQGFYIRSGITIILEKATIEDGTVI

SEQ ID NO: 1747 - protein, 399 aa, Methanococcoides burtonii DSM 6242
MATVIKKNNILEDMKACIMCGGEGTRLRPLTFERPKPSIPILNKPSVVHLVEHLAKEGFTEIVITIGYMAEKIEECLGDGRMYGVYIEYVYEEKRLGTAGGVKNAEEFLKDEPFMIVGGDHVMDLSLRSIYRQHEMNDAMITIGLMSIDDPREFGIADMDVNNRIHRFLEKPGPGEIFSNLASTGIYMCSPEIFDWIPKDEKYDFAKDLFPALMSKGKKINGMLVRGHWTDVGSSTAYRQAQRWMLESLPGTSIEGNFNTKDARIQGPLKIGNNVIVGTNSALVGPMVIGNNTTIGDNVLIGPYTAIGSNCVIKDNCRILSSYIFNDVTIGSNTNASGSIIDNHTIVGQNCNLENGTVIGPRVIIRDDATIHSDVKIWPEVNIKAGSRIKETIINPEFD

SEQ ID NO: 1748 - protein, 177 aa, Triticum aestivum
  unsure (1)..(177): unsure at all Xaa locations
MAPTVMASSATSVAPFQGLKSTAGLPVSRRSNGASLGSVSNGGRIRCMQVWPIRGXIKKFRDLSYLPPLSTGGXLSKQDHYLIRSKWXPCLQFIKGGFIXREHNASAVYYHGRYWTMWKLSMFXCTDSTQVINQVEEAKKEYPDAYVRIIGFDNMRQVQCVSFIAFKPPGCEESGKA

SEQ ID NO: 1749 - protein, 274 aa, Candida albicans SC5314
MKDYTITVLGCGVMGTAVTSAILKSKFDPYPKKIIACTIPSQEQSLKETFADQPLVHVSAGVENNNKAVTEADVIILGCKPYMYEGIYEEVKESLTGKQLLISLLAGTTIKELSIFTPYVAKVMTNTPARFGCGTAAIAFAPEVSEESQELVMKLIDTVGMTVKIPEKNMDIATSLIGSGPAFCLLMMESMIDGAVRMGMPYDVASVAAAKVMEGTARMVLETGEHPAALKSKVCTPGGTTIGGLLTMEDRGLRSAIARGVEEAANISASFAKS

SEQ ID NO: 1750 - protein, 391 aa, Micrantheum hexandrum
DLEPVNPADVPVTAAGALKSYKLAAKAISRLQSLPSGNISLLCDVLVKEVSELTGYDRVMVYRFHEDEHGEVIAECCQPDLEPYLGLHYPATDIPQASRFLFMKNKVRMICDCMALPVKVLQDERLSQPLSLSGSTLRSPHGCHAQYMANMGSVASLVMSVTINDDDDGLDSDQQAGRKLWGLVVCHHTCPRFVPFPLRYACEFLIQVFGVQINKEVELAVQMREKHILQIQTVLCDMLLRDAPVAIITQSPNVMDLVKCDGAALYYRKKIWLLRVTPTEAQIRDIAEWLLESHSGSTGLSTDSLMEAGYPGASVLGDAVCGMAAVRITSKDFLFWFRSHAAKEIKWGGAKHDPDDKDDGRKMHPRSSFKAFLEVVKRRSLPWEDIEMDAI

SEQ ID NO: 1751 - protein, 428 aa, Chlamydia muridarum
MVSLLKMPKLSPTMETGTLVKWHKQAGDEVHFGDVLLEISTDKAVLEHTASEDGWLLQILVKEGTKIPIGTPIAVFSTEQNAEYDLKQLLPLEEASGANEPTEILPQTSPQNDSHYSGPSMAIVGFRPEPPLTTPLSVKYSGDKVAASPLAKKLAKEQNLDLSGVAGSGPGGRIVKKDLEKAPPLRIAGFGYPEAPDVNPGSYVEESLSPIRESISKRLQAAKTFIPHFYVRQRIYASPLLALLKELQVQNIKLSINDCIVRACALALKEFPEINSGFNSVDNTIIRFSTIDISIAVAIPDGVITPIIRCADRKNVGTISAEIKGLAARARQFSLKEEEYKGGSFCISNLGMTGISDFTAILNPPQAAILAVGSVEEQPVVLNGELAVGSTCMLTLSVDHRVIDGYPAAMFMKRLQKLLEAPSVLLLN

SEQ ID NO: 1752 - protein, 391 aa, Microdesmis puberula
DLEPVNPADVPVTAAGALKSYKLAAKAISRLQSLPSRNISLLCDVLVKEVSDLTGYDRVMVYRFHEDEHGEVVAECCRTELEPYLGLHYPATDIPQASRFLFMKNKVRMICDCQAPPVKVLQDRRLAQPLSLCGSTLRSPHGCHAQYMANMGSVASLVMSVTINEDDDEMHSDQQKGRKLWGLVVCHHTSPRFVPFPLRYACEFLIQVFGVQINKEVELAAQMREKHILRIQTLLCDMLLRDSPVAIITQSPNVMDLVKCDGAALYYNNKFWLLGVTPTEAQIRDISEWLLEYHSGSTGLSTDSLMEAGYHRASILGDAVCGVAAVRITSNDFLFWFRSHTAKEMKWGGAKHDPVDKDDGKKMHPRSSFKAFLEVVKWRSLPWEDVEMDAI

SEQ ID NO: 1753 - protein, 165 aa, Staphylococcus aureus subsp. aureus MW2
MNNRNVYDIEVSDYKGLTYKLEAFRGKVILVVNTATECIYSEQLKKLETLFQKYKDRGFVVLSFPNNNFDNRQPGSNEEILKISREKFGVTFPVLAKISVNGNDEHPLFTHLKNEQPGIFGSPIKWNFTKFIIDRQGNVVNRFLPMEDPLDISTNIEILLQESSS

SEQ ID NO: 1754 - protein, 391 aa, Neoscortechinia kingii
DLEPVNPADVPVTAAGALKSYKLAAKAISRLHSLPSGNISLLCDVLVKEVSDLTGYDRVMVYKFHEDEHGEVVAEFRRPDLEPYLGLHYPATDIPQASRFLFMKNKVRMICDCLAPPVKVIQDKSLAEPLSLWGSTLRSPHGCHAQYMANMGSIASLVMSVTINEDDDRMDSDQQKGRKLWGLVVCHHTCPRFVSFPLRYACEFLIQVFGIQINKEVQLAAQMREKHILQIQTMLCDMLLRDAPVAIITQSPNVMDLVKCDGAALYYKKKFWLLGVTPTEAQIRDIVEWLLDVHSESTGLSTDSLMEAGYLGASILGDAVCGMAAIRISSKDFLFWFRSHTAKEIMWGGAKHDPDDKDHVRKMHPGSSFKAFLEVVKWRSLPWEDMEMDAI

SEQ ID NO: 1755 - protein, 392 aa, Ochna multiflora
DLEPVNPADVPVTAAGALKSYKLAAKAISRLQSLPSGKISMLCDVLVKEVHDLTGYDRVMVYKFHEDEHGEVVAECHRPDLEPYIGLHYPATDIPQASRFLFMKNKVRMICDCMESPVKVIQDKKLAQPLSLSGSILRAPHGCHSQYMANMGSIASLVMSIMINDDDDNEMESNHQKPRKLWGLVVCHHTSPKVCPFPLRYACEFLIQVFGVQINKEVEVPAQVKEKHILRTQNVLCDMLLRDTPVAIVTQSPNVMDLVKCDGAALFYKNKFWLLGITPTADQIRDIASWLNEYHNGSTGLSTDSLMEAGYHGASILGGAVCGMAAIRISSKDFLFWFRSQTAKEIKWGGAKHDPNEKDDGRKMHPRSSFNAFLEVVKWCSLPWEDMEMDAI

SEQ ID NO: 1756 - protein, 392 aa, Ochna sp. Davis 31-01
DLEPVNPADVPVTASGALKSYKLAAKAISRLQSLSSGNISMLCDVLVKEVHDLTGYDRVMVYKFHEDEHGEVVAEYHRPGLEPYIGLHYPATDIPQASRFLFMKNKVRMICNCMEPAVKVIQDKKLAQPLSLAGSTLRAPHGCHSQYMANMGSVASLVMSVMINDDDDNEMESNHQKPRKLWGLVVCHHTSPRFVPFPLRYACEFLIQVFGVQINKEVELTAQLKEKHILRTQSVLCDMLLRDTPVAIVTQSPNVMDLVKCDGAALFYKNKFWLLGITPTEDQIRHIASWLNEYHNGSTGLSTDSLMEAGYHGASILGGAVCGMAAIRISSKDFLFWFRSQTAKEIKWGGAKHDPSEKDDGGKMHPRSSFNAFLEVVKWCSLPWEDMEMDAI

SEQ ID NO: 1757 - protein, 486 aa, Pseudomonas syringae pv. syringae B728a
MTSQSLNSHHVDPDTALKLYIDGRWSAPLDPVSIAVINPATEEVVAHVASGSAADVDRAVAAARAAFAGWSGSSPHARAQVIGRIHELILERKEQLAQAISLEMGASISSARAMQVPLAAEHVRVARDLLATYRFHTVEGSTAIEREPIGVCGLITPWNWPLYQITAKVAPAIAAGCTVVLKPSELSPLSALLFAQLVHDAGLPPGVFNLVNGSGPEVGGAMAAHPDIDMISITGSNRAGALVAQAAAPTVKRVTQELGGKSPNILLPDADFAKAVPPGVMAAFRNVGQSCSAPTRMIVPRNRLAEVEALAAETAAAIVVGDPQLEETVLGPIANEAQFQRVQAMIDAGLSEGAKLVCGGPGRVQGHERGFYTRPTVFSEVDSSMRIAREEIFGPVLCLIAYDTVEEAIAIANDTVYGLGAHVQGQDLEQARAVASRIRAGQVHLNYPAWNPMAPFGGYKRSGNGREYGVQGFEEYLETKAIVGFA

SEQ ID NO: 1758 - protein, 430 aa, Chlamydophila caviae GPIC
MKVALPKGVFDIFPYITDAKHMWRHTSLWHRVEDVIHEVCDLYGFSEIRTPVFEKSEVFLHVGEQSDIVKKEMYTFLDKKGRSLTLRPEGTAPIVRSFIDNPMSQREDNKFYYILPMFRYERQQSGRYRQHHQFGVEAIGVRHPLRDAEVLSLLWNFYSAIGLQYMQIQLNFLGGSATRKRYDQVLRGYFLQHLDSLSSLSKERFNTNLLRILDSKEPEDQEIIKSAPPILEYVSDEDRKYFDEILSALSALNIPYSINSRLVRGLDYYTDVVFEAITTFGGHSYALGGGGRYDGLIAASGGVATPACGFGVGLERVIQTLLAQGNLTLPSSHKLRLIPVEPEADSFCFVWAQHLRSLGIPTEVDWTHKKLKAALKTADTEKVTFVCPIGERELLSEQLTIKNMSLRQEFSGSKQEVEQRLLYEIQNTSL

SEQ ID NO: 1759 - protein, 395 aa, Acinetobacter sp. ADP1
MNFKRMTDLDLSEKRVLIREDLNVPVKNGQITSDARLRAALPTIQAALAQGAAVMVCSHLGRPVEGEPKPEQSLAPVAAYLSDALGQEVKLLTDYLEGVEIAPGQVVLLENVRFNLGEKKNNAELAQKYAALCDVFVMDAFGTAHRAEASTEGAARYAKVAAAGPLLATELDALGRALQTPEKPMVAIVAGSKVSTKLDVLTSLSDICGQLIVGGGIANTFLAAAGFNVGKSLCENDLIDTAKAIAAKVSVPLPTDVVVADATEIDFADFLGSLAKAQAIVKKVEDIADNDMILDVGPDTAKAFAEILKTAKTILWNGPVGVFEVDQFGEGTKTLSLAIAESKGFSIAGGGDTLAAIDKYKVADKIGYISTGGGAFLEFVEGKTLPAVAVLLERA

SEQ ID NO: 1760 - protein, 421 aa, Oryza sativa
FVERILGLDNDRMGDLIGALLLAKVVDLLTELDVNITWEDILRDVPGVGPRVRELEDLGEDEDSLGQEGTKALFGGNACAEKLDGLMVVFCEHLKSCKEHGRLPQEFDILKTIFRASVLRVHKSKFAQFIMFYACSLDPEICGLEFALFLSDIFIKKEEDSISRMSAVSYVGSYLSRARFISADTVVGILKRLVDWCVDYCDLQNNIRITTKPINHQIFYASCQAVMYILCFRLRSIMDYPNLKAQLFNMPFGYILTHPLEPLKVCLPSIVDEFLRQAKAARLFNASVHSEFEDALESDLSKTFGGMNRLDMFFPFDPYLLKESDRYMRPNFEYWSMVKTTYNNYNSDVDDELVDLDAPEMNVGSLDDHVEIDLNSDDDLEYSMNKMSITPNRSFFHQIMANSDTGLTMPARIRPSISPPS

SEQ ID NO: 1761 - protein, 112 aa, Zea mays
LMSNFFAQPEAVAYGKTAEQLHSEKVPENLIPHKTFKGNRPSLDWVVRTICLYAGSPLSFTFEHRIGMQDLLWGTHAFDPWGGELGKALACQVGKQLHGNLLEGKAVEAPNH

SEQ ID NO: 1762 - protein, 481 aa, Citrullus lanatus var. lanatus
NSNSSPRSTARKLTPGVAYSVLMSEISEVSSTLQAPIFETPRADPKKIASIILGGGAGTRLFPLTSQRAKPAVPIGGCYRLIDIPMSNCINSGIEKIFVLTQFNSFSLNRHLARIYNFGNGVNFGDGFVEVLAATQTSGETGKKWFQGTADAVRQFIWLFEDAKTKNVEHTLILSGDHLYRMDYMDFVQRHIDTNADITVSCIPMDDSRASDYGLMKIDDTGRILHFAEKPKGSDLEAMKVDTTVLGLSNQDARKNPYIASMGVYIFRTDLLLKLLTWSYPSCNDFGSEIIPSAVKDYKVQAYLFNDYWEDIGTVKSFFDANLALTEQPPKFEFYDPKTPFYTSPRFLPPSKVEKCRIVDAIISHGCFLRECSVEHSIVGVRSRLEYGVELKDTMMMGADYYQTESEIASLLAEGKIPIGIGENTKIRNCIIDKNARIGRNVVIANSDDVQEADRPEDGFYIRSGITVTLKNATIKDGTII

SEQ ID NO: 1763 - protein, 300 aa, Zea mays
  unsure (1)..(300): unsure at all Xaa locations
LQDPTAQTEIDNFMVQQLDGTKNEWGWCKQKLGANAILAVSLAVCKAGASIKRIPLYQHIANLAGNKQLVLPVPAFNEFMILPTGAASFKEAMKMGVEVYHHLKXICLNVGQDAANVGDEGGYENXEGLELLKTAIEKAGYTGKAHHILVVIGMDVAASEFYSDKDQTYDLNFKEENNDGSQKISGDSLKNDDWVHYAKMTEEIGEQVQIVGDDLLVTNPTRVAKAIKEKSCNALLLKVNQIGSVTESIEAVKMSKRAGWGVMTSHRSGETEDTFIADLAVGLSTLLRIEEELGAIAVYA

SEQ ID NO: 1764 - protein, 427 aa, Oceanobacillus iheyensis HTE831
MAFNFKLPDIGEGIHEGEIVKWFVKEGDEVKEDDVLCEVQNDKSVVEIPSQVDGKVTKIHVAEGDVAVVGDTLISFEAEGYDDEEGDSADDSSSDSKEEKSTDSKEEEKEASKEESSEQSDDTRVIAMPSVRKFARDNDVNIKDVNGTGKNGRILKEDVESYLSGDQPSSEVAEDKAEASSEDKQETKAAPQGQYPETREKMTAIRKSIAKSMVNSKSKAPHVTLMDEIDVTELVAHRKKFKAVAAEQDIKLTYLPYVVKALVSASKKFPILNSYIDENTDEIVEKHYYNIGIAADTDRGLLVPVVKDSDKKSIFQISQEINELAGKARDGKLKPDEMKGASNTISNIGSAGGQWFTPVLNYPEAVILGIGRIADKPVVRDGEIVVAPVLSVSLSFDHRIVDGATAQLALNQIKRLLNDPQLIMMEA

SEQ ID NO: 1765 - protein, 429 aa, Ferroplasma acidarmanus
MDFDAAIIGSGAGGYYSALRLLKHGKKVLIIEKEKFGGECLNYGCIPSKALIELSENIGYLHDMPGVTMNYKIDMKEWQEWKESMVKRITGGAEKLCISLGAKVVYGVGSVKDRNTVTVNGTDYTAKNIIINTGSVPVKIKGIDDVYYNREMLAVETIPAKLVIIGGGYIGVEMGTAFRKLGSEVYIVEMKDRILPEIEEDLAREVDKRLRKLGVNIMTGMKVLSVKKDKNYKVSIEGSDTIEADTVLMSVGRIPNTEGSGIEKLGIEMDGRFIKTDSHKRTNIPNIYAIGDVSGVPMLAHKAFYDGYVAAENILGNDTVVDYRAMPFVVYTDPEIAFTGKAGTKSNKVPVLANPRSLTMNQKDGFFKLYYDDDGTITGAGVAAPRSSESITEISLAVESGLSIDDLFLTIHPHPTVSEGLKDAAERRD

SEQ ID NO: 1766 - protein, 475 aa, Vibrio parahaemolyticus
MSKEIKAQVVVLGSGPAGYSAAFRCADLGLETVLVERYSTLGGVCLNVGCIPSKALLHVSKVIEEAKAMADHGVVFGEPQTDINKIRIWKEKVVNQLTGGLSGMAKMRNVTVVNGYGKFTGPNSILVEGEGESTVVNFDNAIVAAGSRPIKLPFIPHEDSRIWDSTDALELKEVPEKLLIMGGGIIGLEMGTVYHSLGSKVEVVEMFDQVIPAADKDIVKVYTKRIKDKFKLMLETKVTAVEAKEDGIYVSMEGKKAPAEAERYDAVLVAIGRVPNGKLIDGEKAGLEIDERGFINVDKQMRTNVPHIFAIGDIVGQPMLAHKGVHEGHVAAEVISGKKHYFDPKVIPSIAYTEPEVAWVGKTEKEAKAEGIKYEVATFPWAASGRAIASDCSDGMTKLIFDKETHRVIGGAIVGTNGGELLGEIGLAIEMGCDAEDIALTIHAHPTLHESVGLAAEVFEGSITDLPNKKAVKKK

SEQ ID NO: 1767 - protein, 384 aa, Ferroplasma acidarmanus
MYTVSLPPIGEGIQEGEIVKWTVKPGDSIKKDDELVEVMTDKITVKIPSPVAGKVSKILIKEGETAMIGDAMVEIDSPDESNSPEKPVEKPATTAHQEVSVSTDEKIPSVKATPAVRAYARSKNVDILKVKPAAQDGRITKEDVDAYMKQPAEPIAQKAPSGEDEVFTPTGIRKLIFDKMTKSKQIIPHFTITDFIDTENIEKAINQYSKKKYVSFTAFFVKAVTVAFRDFPKFNAVYNENDRTYTIKKKYNIGVAVDSPAGLTVVVVKDVASKNIFQISEEIKDMAERARNGKLGLQDVQGSTFSVTNIGSIGGIMATPIINYPEVAILEINTRTSGFVNGELKHGLYLTLACDHRLIDGAEAARYLEKLKEVLEYPLMYIGD

SEQ ID NO: 1768 - protein, 486 aa, Rubrobacter xylanophilus DSM 9941
MQSRVIESQIESRNYIGGEWVPADSGEVEEVRNPARPSEVLGTAPRSDRGEMERAVAAAQEALPGWRSALPAARGQILLRAADIIDSRSEELARLMALEAGKPLGESRAEVSRAAAIFRYYGSEGWRLYGVEAPSTRPGVRITSTREPLGVVGLITPWNFPLAIPSWKMAPALICGNTVVIKPAANAVLNAAELVRILEEAGLPGGVVNLVMGPGGSSGDALVRDERVRAISFTGSTAVGLSIQERAAGKKVQLEMGGKNPYVVMEDADLEDAAAKVAYGAFGYAGQKCTASSRAVVVEEVYEAFLEQVVEATRALKLGEPLDEEAVIGPVINESQYESILGAIEQAREDGRVVLDGGATGPREEGYYISPVIVADVDNGSKTAREEIFGPVLAVIKARDFDHAVEIANDTRYGLTAGIATRSLRYAEEFIERSQTGLVNVNLPTAGVEFQVPFGGSKQSGVGGREQGMAAIEFYTGWKTASVLAL

SEQ ID NO: 1769 - protein, 137 aa, Pectobacterium carotovorum subsp. carotovorum
LFNVNAGIVRNLVEQIAVTCPKACIGIITNPVNTTVAIAAEVLKKAGVYDKNKLFGVTTLDIIRSNTFVAELKGKQPQDINVPVIGGHSGVTILPLLSQVPGISFSEQEVADLTKRIQNAGTEVVEAKAGGGSATLS

SEQ ID NO: 1770 - protein, 548 aa, Glycine max
  unsure (1)..(548): unsure at all Xaa locations
MASHLLNHSSKMRNASKLLHHERALLVRWFSGDAQSSLNRNRDVWKTQFHESSTTRSVFEPASSFNKRSFGMQKRNISMATIKRGSIIGFGFNGEISRSSQVLSRRCYASASDLPPHQEIGMPSLSPTMTEGNIARWLKKEGDKISPGEVLCEVETDKATGEMECMEEXGYLAKIIPRDGAKEIKVGEVIAVTVEDEGDIAKFKDYQPSASEPSEPPAKETSAPPPPKKEEVVEEPAREPEPKVSKPSAPPSSGDRTFASPLARKLAEEKNVPLSSIKGTGPEGLIVKADIDDYLASGAKEVSASSKAKVAADAALDYTDIPVSQIRKVTASRLLLSKQTIPHYYLTVDTCVDKLMSLRTQLNSLQEASGGSRISVNDLVIKAAALALRKVPQCNSSWANDYIRQYHNVNINVAVQTDNGLFVPVVRDADKKGLSKIGEEVKQLAKKAKENSLKPQEYEGGTFTVTNLGGPFGVKQFCAIINPPQAGILAVGSAERRVVPGSGAEEFKFASFMSVTLSCDHRVIDGAIGAEWLKAFKGYIENPETMLL

SEQ ID NO: 1771 - protein, 140 aa, Pectobacterium carotovorum subsp. carotovorum
RSDLFNVNAGIVRNLVEQIAVTCPKACIGIITNPVNTTVAIAAEVLKKAGVYDKNKLFGVTTLDIIRSNTFVAELKGKQPQDINVPVIGGHSGVTILPLLSQVPGISFSEQEVADLTKRIQNAGTEVVEAKAGGGSATLS

SEQ ID NO: 1772 - protein, 553 aa, Mycobacterium tuberculosis CDC1551
MAFSVQMPALGESVTEGTVTRWLKQEGDTVELDEPLVEVSTDKVDTEIPSPAAGVLTKIIAQEDDTVEVGGELAVIGDAKDAGEAAAPAPEKVPAAQPESKPAPEPPPVQPTSGAPAGGDAKPVLMPELGESVTEGTVIRWLKKIGDSVQVDEPLVEVSTDKVDTEIPSPVAGVLVSISADEDATVPVGGELARIGVAADIGAAPAPKPAPKPVPEPAPTPKAEPAPSPPAAQPAGAAEGAPYVTPLVRKLASENNIDLAGVTGTGVGGRIRKQDVLAAAEQKKRAKAPAPAAQAAAAPAPKAPPAPAPALAHLRGTTQKASRIRQITANKTRESLQATAQLTQTHEVDMTKIVGLRARAKAAFAEREGVNLTFLPFFAKAVIDALKIHPNINASYNEDTKEITYYDAEHLGFAVDTEQGLLSPVIHDAGDLSLAGLARAIADIAARARSGNLKPDELSGGTFTITNIGSQGALFDTPILVPPQAAMLGTGAIVKRPRVVVDASGNESIGVRSVCYLPLTYDHRLIDGADAGRFLTTIKHRLEEGAFEADLGL

SEQ ID NO: 1773 - protein, 126 aa, Pectobacterium carotovorum subsp. carotovorum
NVNAGIVRNLVEQIAVTCPKACIGIITNPVNTTVAIAAEVLKKAGVYDKNKLFGVTTLDIIRSNTFVAELKGKQPQDINVPVIGGHSGVTILPLLSQVPGISFSEQEVADLTKRIQNAGTEVVEAK

SEQ ID NO: 1774 - protein, 391 aa, Pera bicolor
DLEPVNPSDVPVTAAGALKSYKLAAKAISKLQSLPSGNISLLCDVLVKEVGDLTGYDRVMVYRFHEDEHGEVVAECRRPDLEPYLGLHYPATDIPQASRFLFMKNKVRMICDCLAPPVKVIQDSSLCQPVKSLWIYTEIPSWLHAQYMANMGSVASLVMSVTINEDDDEIDTDQRKGRKLWGLVGCHHTSPRFVPFPLKDACEFLIQVFGVQINKEVELAAQMREKHILRTQTMLCDMLLRDDPAAIVTQSPNVMDLVKCDGAALYYRKKFWFLGVTPTEAQTRDIAEWLLEYHSDSIGLISDSLMEAGYPGASVLGNAICGMAAVRITSKDLLFWFRFHTAKEIKWGGAKHDPGDKDDGRKMHPRSSFKAFLETVKWRSLPWEDVEMDAI

SEQ ID NO: 1775 - protein, 118 aa, Pectobacterium carotovorum subsp. carotovorum
GIVRNLVEQIAVTCPKACIGIITNPVNTTVAIAAEVLKKAGVYDKNKLFGVTTLDIIRSNTFVAELKGKQPQDINVPVIGGHSGVTILPLLSQVPGISFSEQEVADLTKRIQNAGTEV

SEQ ID NO: 1776 - protein, 391 aa, Peridiscus lucidus
DLEPVNPADVPVTAAGALKSYKLAAKAISRLQSLPSGNISLLCDVLVKEVSDLTGYDRVMVYKFHEDEHGEVVAECCRPDLEPYLGLHYPATDIPQASRFLFMKNKVRMICDCLALPVKVIQDKRLAQPLSLCGSTLRSPHGCHAQYMANMGSIASLVISVTINEEDEEMESSQQRGRKLWGLVVCHHASPRFVPFPLRYACEFLIQVFGVQINKEVELAAQLKEKHILQTQTVLCDMLLRDAPVGILTQSPNVMDLVKCDGAALYYREKFWLLGVTPTEVQIKTIAEWLLEYHSGSTGLSTDSLTEAGYPGASILGDAVCGMAAVKITSKDFLFWFRSHTAKEIKWGGAKHDPSDKDDGRKMHPRSSFKAFLEVVKRRSLPWEDMEMDAI

SEQ ID NO: 1777 - protein, 137 aa, Pectobacterium carotovorum subsp. carotovorum
KPGMDRSDLFNVNAGIVRNLVEQIAVTCPKACIGIITNPVNTTVAIAAEVLKKAGVYDKNKLFGVTTLDIIRSNTFVAELKGKQPQDINVPVIGGHSGVTILPLLSQVPGISFSEQEVADLTKRIQNAGTEVVKPKQ

SEQ ID NO: 1778 - protein, 117 aa, Hordeum vulgare subsp. vulgare
KHMIEDDCADNGIPLPNVNSKILSKVIEYCNKHVQAKPADAAGPGASDALPPADDLKNWDAEFVKVDQATLFDLILAANFLNIKGLLDLTCQTVADMIKGKTPEEIRKTFNIKNDFS

SEQ ID NO: 1779 - protein, 391 aa, Petalostigma pubescens
DLEPVNPADVPVTAAGALKSYKLAAKAISRLQSLPSGNISLLCDVLVKEVSELTGYDRVMVYRFHEDEHGEVVAECCRPDLEPYLGLHYPATDIPQASRFLFMKNKVRMICDCMAPPVEVVQDERLSQPLSLCGSTLRSPHGCHAQYMANMGLIASLVMSVTINEDNDEMDGDQQTGRKLWGLVVCHHTSPRFVPFPLRYACEFLIQVFGVQINKEVELAVQMREKHILRTQTVLCDMLLRDAPVAIITQSPNVMDLVKCDGAALYYRKKFWLLGVTPTEAQVRDIAEWLLECHSGSTGLSTDSLMEAGYPGASILGDAVCGMAAVRITSKDFLFWFRSHTAKEIKWGGAKHDPGDKDDGRKIHPRSSFNAFLEVVKRRSLPWEDVEMDAI

SEQ ID NO: 1780 - protein, 124 aa, Vicia faba
  unsure (1)..(124): unsure at all Xaa locations
MASTKKITLKSSDGEAFEVDEAVALESQAIKHMIEDDCADSGIPLPNVTSKILAKVIEFCKKHVXAAASDDKPTEDELKAWDADFVKVDQVTLFDLILAANYLNIKNLLDLTCQTVADMIKGKT

SEQ ID NO: 1781 - protein, 391 aa, Phyllanthus epiphyllanthus
DLEPVNPDDVPVTAAGALKSYKLAAKAISKLQSLPSGNISLLCDVLVKEVSELTGYDRVMVYKFHQDEHGEVVAESCRPDLEPYLGLHYPATDIPQASRFLFMKNKVRMICDCQAPPVKVVQDKQIAQLLSLCGSTLRSPHGCHAQYMANMGTIASLVMSVTINEDDEETDNDQQIGRKLWGLVVCHHTNPKFVPFPLRYACEFLIQVLGVQVHREVELAAQTTEKHILQTQTVLCDMLLRDAPVAIVTQSPNVMDLVKCNGAALFYRKKFWMLGVTPTEAQIKDITEWLLEYHGESTGLSTDSLMEAGYPGAAILRYAVCGMAAIKITSKDFLFWFRSHSAKEIKWGGAKHDPGDKDDGRKMHPRSSFKAFLEVVKWRSIAWEDVEMDAI

SEQ ID NO: 1782 - protein, 243 aa, Campylobacter jejuni subsp. jejuni NCTC 11168
MLYILANGSMATALAYGLKDDYEICIVGRSIEKLQALAKEGFKTLLYKDFNIEGKDVILAFKPYALENIAQMLKGQARILISVLANVDFEKLQTIKAQNYVRIIPNTAAKYKASTTPYILKNSHFENEILDILKTFGSAYKLDNEIQMNAAMAISGCAPAFLALIAESIANAGVYEGLSKELSLNLTRSLFKSSNALLEHEHPAIIKENICSPGGVTIKGIKILEQKGIRGSFFEAINASSAK

SEQ ID NO: 1783 - protein, 113 aa, Vicia faba
KHMIEDDCADETGIPLPNVTSRILAKVIEYCKKHVEAPKIDEYGMPVDGKDMKKWDAEFVKVDQDTLFDLILAANYLDIKSLLDLTCKTVANMMDGRTPDEIRRTFNIKNDFT

SEQ ID NO: 1784 - protein, 391 aa, Pimelodendron zoanthogyne
DLEPVNPADVPVTAAGALKSYKLAAKAISKSQSLPSGNISLLCDVLVKEVSDLTGYDRVMVYKFHEDEHGEVIAEYHRPDLEPYLGLHYPATDIPQASRFLFMKNKVRMICDCLAPPVKVIQDRSLAQSLSLCGSTLRSPHGCHAMYMTNMGSIASLVMSVAINEDGSEMDDDQQKGRKLWGLVVCHHTSPRFIPFPLGYACEFLIQVFGVQINKEVEMAAQMREKHILQTQTVLCDMLLRDSPMAIITRSPNVMDLVKCDGAALYYRKKFWLLGVTPTETQIKDIAEWLLECHRESTGLSTDSLIEAGYPGASIIGKAICGMAAVRINSKDFLFWFRSHTAKEIKWGGAKHDPDDKDDGRRMHPRSSFEAFLDVVKWRSLPWEDVEMDAI

SEQ ID NO: 1785 - protein, 468 aa, Oceanobacillus iheyensis HTE831
MVVGDFPVEVDTLVVGAGPGGYVAAIRAAQLGQKVTIVDKGALGGVCLNVGCIPSKALIEAGHKYENAHGSEDLGIKTDKVEVDFSKVQDWKGSVVNKLTSGVESLLKGNKVDIVKGEAYFVDANTAKIAGESSSQTYKFKDCIIATGSSPIEIPSFKFSDRVLDSTGALSLKEIPKKMVVIGSGYVGTELGTAYANFGTEITFLEGAKDILGGFEKQMTQLVKKGLKKKGATIITEAMAKGVEETKDGVKVSYEVNGKEETIEADYVLVTVGRRPNTDELGLEQMGVKMTDRGHIEIDKQCKTSVDNIYAIGDIVEGPALAHKASYEGKIAAEAISGEKSEIDYVGIPAVAFTEPELATVGLSEQDAKDAGYDVKVGKFPFGANGRALSLNNTEGFLKLITRKDDGLVIGGQIAGPNASDMISEIGLAIEAGMTAEDISLTIHAHPTLGEITMEAAEVALGTPIHTM

SEQ ID NO: 1786 - protein, 610 aa, Zea mays
  unsure (1)..(610): unsure at all Xaa locations
MCGILAVLGCADEAKQGSSKRSRVLELSRRLKHRGPDWSGLRQVGDCYLSHQRLAIIDPASGDQPLYNEDQSVVVAVNGEIYNHLDLRSRLAGAGHSFRTGSDXEVIAHLYEEHGEEFVDMLDGVFSFVLLDTRHGDRAGSSFFMAARDAIGVTPLYIGWGVDGSVWISSEMKALHDECEHFEIFPPGHLYSSNTGGFSRWYNPPWYDDDDDEEAVVTPSVPYDPLALRKAFEKAVVKRLMTDVXPFGVLLSGGLDSSLVATVAVRHLARTEAARRWGTKLHSFCVGLEGSPDLKAAREVAEYLGTLHHEFHFTVQDGIDAIEDVIYHTETYDVTTIRASTPMFLMSRKIKSLGVKMVISGEGSDELFGGYLYFHKAPNKEELHREXTCRKVKALHQYDCLRANKATSAWGLEARVPFLDKEFINAAMSIDPEWKMVQPDLGRIEKWVLRKAFDDEEQPFLPKHILYRQKEQFSDGVGYSWIDGLKAHATSNVTDKMLSNAKFIFPHNTPTTKEAYYYRMVFERFFPQKSAILTVPGGAXSVACSTAKAIEWDAQWSGNLDPSGRAALGVHLAAYEHQHDPEHVPAAIAAGSGKKPRTIRVAPPGVAIEG

SEQ ID NO: 1787 - protein, 84 aa, Zea mays
CLELSHVDVPIFKEIYDVYSFSMVPAIGELVAGDRQSYQYLVESIRRFPNQEKFAQMIQEAGFQRVEYENLVGGVVAIHSGLKL

SEQ ID NO: 1788 - protein, 438 aa, Oryza sativa (japonica cultivar-group)
MTAESARDPRGPYMSGCHVGRPASPSTGAVDEPCRCGNAHRLRPRLQKPHQKPSPRSRSPLDPAPRRWRRLRRWELVVGLRELYGVRDVFGVAAGYRGFYGPDADHARLDLAAVDDWHKKGGTVLKTTRGGFDLNKIVDGIVARGYTQCLTSNTFYHDYILLKVYAIGGDGTMRGAVAIFNEFKRRGLNISITGIPKTVDNDIGIIDRSFGFQTAVEIAQQAIDAAHVEAVSAVNGIGLVKLMGRSTGHIALHATLSSRDVDCCLIPEVDFYLEGKGGLFEFLYERIKQKGHAVVVVAEGAGQELIPRTDDQKREQDESGNIVFLDVGPWLKSELGKWWKREHPSELFTVKYIDPTYMIRAVPANATDNLYCTLLAHSAIHGIMAGYTGFVPGPINGNYSYIPLEDVAVAKNPVDVNDHKWAWVRSVTNQPDFMKPKY

SEQ ID NO: 1789 - protein, 261 aa, Zea mays
  unsure (1)..(261): unsure at all Xaa locations
MSLAPDPADGGAGTGTGTGDDWFLDCGILDDLPAAACGAFPWDASPSSSNPSVEVGSYVNTNDVFKEPNDVFKEPGSNKRLRSGFNDVHVPTSKASREKMRRNKLNDRFLELGSTLEPGKPVKADKAAILSDATRMVIQLRSEAQQLKETNGSLEEKIKELKAEKDELRDEKQKLKLEKESLEHQMKLMTSTPTYMPHPTLMPAPFPQAPLAPFHAQGQAAGQKLMMPFVSYPGYPXMWQFMXPPSEVDTSKDSEACPPVA

SEQ ID NO: 1790 - protein, 579 aa, Arabidopsis thaliana
MCGILAVLGCIDNSQAKRSRIIELSRRLRHRGPDWSGLHCYEDCYLAHERLAIIDPTSGDQPLYNEDKTVAVTVNGEIYNHKILREKLKSHQFRTGSDCEVIAHLYEEHGEEFIDMLDGMFAFVLLDTRDKSFIAARDAIGITPLYIGWGLDGSVWFASEMKALSDDCEQFMSFPPGHIYSSKQGGLRRWYNPPWYNEQVPSTPYDPLVLRNAFEKAVIKRLMTDVPFGVLLSGGLDSSLVAAVALRHLEKSEAARQWGSQLHTFCIGLQGSPDLKAGREVADYLGTRHHEFQFTVQDGIDAIEEVIYHIETYDVTTIRASTPMFLMSRKIKSLGVKMVLSGEGSDEILGGYLYFHKAPNKKEFHEETCRKIKALHQFDCLRANKSTSAWGVEARVPFLDKEFLNVAMSIDPEWKLIKPDLGRIEKWVLRNAFDDEERPYLPKHILYRQKEQFSDGVGYSWIDGLKDHANKHVSDTMLSNASFVFPDNTPLTKEAYYYRTIFEKFFPKQSAARATVPGGPSIACSTAKAVEWDATWSKNLDPSGRAALGVHVAAYEEDKAAAAAKAGSDLVDPLPKNGT

SEQ ID NO: 1791 - protein, 166 aa, Pseudomonas aeruginosa UCBPP-PA14
MRKEYVMSAFHDLTLLGLDGQDLPLSPFKGKVLLVVNVASKCGLTPQYAGLENLYQTYRERGFAVLGVPCNQFAGQEPGSEADIQSFCSLNYGVSFPMSAKVEVNGSARHPLYRLLAGEGAEFPGDITWNFEKFLLGPDGRVLARFSPRTAPDDPALVQAIEKALG

SEQ ID NO: 1792 - protein, 355 aa, Oryza sativa
MGKKKKRVEKVFCYYCDREFDDEKILVQHQKAKHFKCHVCHKKLSTAGGMAIHVLQVHKESVTKVPNAKPERESTEIEIFGMQGIPPDVLAAHYGEEEDPSSKVAKVEVPSLRPPVMPNPAGMVYPPRPAYGVAPPMYNPALNPLMARPPIWPAPPPQPWFTQPVVSVPQMASGLAPQQPLFPIQNMPAPMTSAPANLLQTSFPMAHVGVPSPGTPQVSQPLFPVSTSAGNGAVKSPYVASVAPGSIPTSSPSVAPAGVGYAATNQGTGGPAAVPPPASNNKAPATQPGANEVYLVWDDEAMSMEERRLSLPKYQVHDETSQVSSDFYNFISVILMICEKNQVEVHGDALNWNIV

SEQ ID NO: 1793 - protein, 138 aa, Shorea roxburghii
EKNLPVLLGLLSIWNVSFLGYPARAILPYSQALEKFAPHIQQVSMESNGKGVSIDGVPLPFEAGEIDFGEPGTNGQHSFYQLIHQGRVIPCDFIGSAKSQQPIHLKGEVVGNHDELMSNFFAQPDALAFGKTPEELHR

SEQ ID NO: 1794 - protein, 137 aa, Pectobacterium carotovorum subsp. carotovorum
GIVRNLVEQIAVTCPKACIGIITNPVNTTVAIAAEVLKKAGVYDKNKLFGVTTLDIIRSNTFVAELKGKQPQDINVPVIGGHSGVTILPLLSQVPGISFSEQEVADLTKRIQNAGTEVVEAKAGGGSATLSMGQAAR

SEQ ID NO: 1795 - protein, 138 aa, Shorea roxburghii
EKNLPVLLGLLSIWNVSFLGYPARAILPYSQALEKFAPHIQQVSMESNGKGVSIDGVPLPFEAGEIDFGEPGTNGQHSFYQLIHQGRVIPCDFIGSAKSQQPIHLKGEVVSNHDELMSNFFAQPDALAFGKTPEELHR

SEQ ID NO: 1796 - protein, 137 aa, Pectobacterium carotovorum subsp. carotovorum
GIVRNLVEQIAVTCPKACIGIITNPVNTTVAIAAEVLKKAGVYDKNKLFGVTTLDIIRSNTFVAELKGKQPQDINVPVIGGHSGVTILPLLSQVPGISFSEQEVADLTKRIQNAGTEVVEAKAGGGSATLSMGQAAG

SEQ ID NO: 1797 - protein, 267 aa, Oryza sativa
MDPKLVEVTQLFSRFKAAFARNDFDTCVDLLSQLKVRLTKFPSLPPSFQQTPNAVEELKIARDIYEHAVVLSVKIEDQDAFERDFCQLKPYYMDTCGIIPPSPQEYPILGLNLLRLLVQNRIAEFHTELELLPVTALENPCIKHAVELEQSFMEGAYNRVLSARQAVPHETYVYFMDLLAKTVRDELAGCSEKGYDYMSIAEARQVLMFSSDKELHQYIAEEHPEWEVKDGSVFFQKAKETQPCKEIPSLQVINQTLSYARELERIV

SEQ ID NO: 1798 - protein, 628 aa, Glycine max
MALSRLRHPLFSRSLRILSSPARSLSRTSNSSIFTLGGDHHNIIRPAFCSRLTGIHDRSLKSKWTDVKYFSSSDSSHEVLGMPALSPTMTQGNIAKWRKKEGEKIEVGDVLCEIETDKATLEFESLEEGFLAKILVPEGSKDVPVGQPIAITVEDENDIQNVPASVGGETRVEEKKPTLGGVSDERKSESTSTIINASELPPHVLLEMPALSPTMNQGNIAKWRKQEGDKIEVGDILCEIETDKATLEFETLEEGYLAKILAPEGSKEVAVGHPIAITVEDASDIEAIMNSVSRSSTNQQKAPQRDTKSEAKAQKNNIIRISPAAKLLITEYGLDASTLNATGPYGTLLKGDVLSAIKSGKLSPKPASSKEKVSSFQSHQQVAASQESKSDLKMSDAYEDFPNSQIRKVIAKRLLDSKQNTLHLYLSSDVILDPLLSLRKGLAVPGDVKVSVNDIIIKVVAAALRNVPEANAYWNVEKGEVVLNDSIDICIAVATEKGLMTPIIKNADQKTISAISSEVKELAAKARAGKLKPHEFQGGTFSISNLGMFPVDKFCAIINPPQACILAVGRGNKVVEPVIGTDGIEKPSIATKLSLTLSADHRLFDGKVAGAFLSALQSNFTDLRRLLF

SEQ ID NO: 1799 - protein, 295 aa, Eremothecium gossypii
MSDLTNYKRLEKVGEGTYGVVYKAVDLRHGQRIVALKKIRLESEDEGVPSTAIREISLLKELKDDNIVRLYDIVHSDAHKLYLVFEFLELDLKRYMESVPKDQPLGDKIIKKFMMQLCKGIAYCHAHRIIHRDLKPQNLLINRNGNLKLGDFGLARAFGVPLRAYTHEIVTLWYRAPEVLLGGKQYSTGVDVWSIGCIFAEMCNRKPLFSGDSEIDQIFKIFRLLGTPNESVWPDIVYLPDFKPTFPKWQRRDLAQVVPSLNEHGLDLLDKLVTYDPIHRISAKRAVTHPYFKDE

SEQ ID NO: 1800 - protein, 139 aa, Pectobacterium carotovorum subsp. carotovorum
NAGIVRNLVEQIAVTCPKACIGIITNPVNTTVAIAAEVLKKAGVYDKNKLFGVTTLDIIRSNTFVAELKGKQPQDINVPVIGGHSGVTILPLLSQVPGISFSEQEVADLTKRIQNAGTEVVEAKAGGGSATLSMGQAAR

SEQ ID NO: 1801 - protein, 391 aa, Podostemum ceratophyllum
DLEPVNPSDVPASAAGALKSYKLAAKAISKLQSLPSGNIGLLCDVLVKEVTDLTGYDRVMIYKFHEDDHGEVVSEWHAPELEPYLGLHFPATDIPQASRFLFMKNKIRMICDCMAAPVNVVQDAGLTQALNLSGSTLRAPHGCHAQYMANMGSIASLIMSVTINEDDEELEQQQQAGDELWGLVVCHHTVPRFRAVPAAVRCEFLIQVFGIQINKEVEMAAQMHEKRVLETQAVLCDMLLRDSPVAIMTRTPNVMDLVKCDGAALYHEKRFWLLGITPKETQIRHLMTWLNENHRETTGLSTASLLEAGFPDAMALGDAVCGMVAIRVNSKDFLFWFRSHTAKEIKWGGAKHDADEKDEERKMHPRSSFKAFLEVVKWQSLPWEDMEMDAI

SEQ ID NO: 1802 - protein, 135 aa, Pectobacterium carotovorum subsp. carotovorum
GIVRNLVEQIAVTCPKACIGIITNPVNTTVAIAAEVLKKAGVYDKNKLFGVTTLDIIRSNTFVAELKGKQPQDINVPVIGGHSGVTILPLLSQVPGISFSEQEVADLTKRIQNAGTEVVEAKAGGGSATLSMGQA

SEQ ID NO: 1803 - protein, 452 aa, Corynebacterium glutamicum ATCC 13032
MDPSDLAWILAAFALVSLMFPGLSLLYGGMLGGQHVLNTFMMVMSSLGIISLVYIIYGHGLVLGNSIGGWGIIGNPLEYFGFRNIMEDDGTGDLMWAGFYILFAAISLALVSSGAAGRMRFGAWLVFGVLWFTFVYAPLAHWVFAIDDPESGYVGGWMKNVLEFHDFAGGTAVHMNAGASGLALAIVLGRRHSMAVRPHNLPLILIGAGLIVAGWFGFNGGTAGGANFLASYVVVTSLIAAAGGMMGFMLVERVFSGKPTFFGSATGTIAGLVAITPAADAVSPLGAFAVGALGAVVSFWAISWKKGHRVDDSFDVFAVHGMAGIAGALFVMLFGDPLAPAGVSGVFFGGELSLLWREPLAIIVTLTYAFGVTWLIATILNKFMTLRITSEAEYEGIDRAEHAESAYHLNSNGIGMATRTNFGPEIPEETVPDAVQVGVDKQKIADTRKASK

SEQ ID NO: 1804 - protein, 395 aa, Quiina pteridophylla
DFEPVKPYEVPMTAAGALQSYKLAAKAITRLQALPSGSMERLCDTMVQEVFELTGYDRVMTYKFHDDDHGEVISEITKPGLEPYLGLHYPATDIPQAARFLFMKNKVRMIVDCRAKHVKVLQDDKLPFDLTLCGSTLRAPHSCHLQYMENMDSIASLVMAVVVNEGNEDSDGPDPVHPQKRKRLWGLVVCHNTTPRFVPFPLRYACEFLAQVFAIHVNKELELENQIVEKNILRTQTLLCDMLMRDAPLGIVTQSPNIMDLVKCDGAALLYKSKIWRLGVTPTDLQLQEIALWLSDYHMDSTGLSTDSLYDAGYPGALALGDVVCGMAAVRITSKDLLFWFRSQTAAEVRWGGAKHEPGEKDDGRRMHPRSSFKAFLEVVKTRSLPWKDVEMDAI

SEQ ID NO: 1805 - protein, 137 aa, Pectobacterium carotovorum subsp. carotovorum
GIVRNLVEQIAVTCPKACIGIITNPVNTTVAIAAEVLKKAGVYDKNKLFGVTTLDIIRSNTFVAELKGKQPQDINVPVIGGHSGVTILLCLSQDPGISFSEQEVADLTKRIQNAGTEVVEAKARGGSATLSMARLPA

SEQ ID NO: 1806 - protein, 360 aa, Stackhousia minima
DLEPVNPADVPITAAGALKSYKLAAKAITRLQSLPSGNISLLCDVLVKEVSELTGYDRVMVYRFHDDDHGEVVAECCRPDLEPYLGLHYPATEIPQASRFLFMKNKVRMICDCLAPPVKVLQDKRLTQPLSLGGSTLRSPHGCHAQYMVNMGSIASLVISVTINDDEDEANSEQHRGRKLWGLVVCHHTTPRSVPFPLRYACEFLIQIFGVQINKEVELSAQKKEKHILRIQTVLCDMLLRNAPEGILAQSPNVMDLVKCDGAALYYRNDVRLVGITPTEKQIRDIAEWLLEHHSESTGLTTDSLMEAGYADASILGEAVCGMAAVKITSKDFLFWFRSHTAKEMKWGGAKHDPDDKDGG

SEQ ID NO: 1807 - protein, 506 aa, Perilla frutescens
MALYAALFLLSAAVVRSVLDRKRGRPPYPPGPFPLPIIGHLHLLGPRLHQTFHDLSQRYGPLMQLRLGSIRCVIAASPELAKECLKTHELVFSSRKHSTAIDIVTYDSSFAFSPYGPYWKFIKKLCTYELLGARNLAHFQPIRTLEVKSFLQILMRKGESGESFNVTEELVKLTSNVISHMMLSIRCSETESEAEAARTVIREVTQIFGEFDVSDIIWLCKNFDFQGIRKRSEDIQRRYDALLEKIITDREKQRRTHGGGGGGGEAKDFLDMFLDIMESGKAEVKFTREHLKALILDFFTAGTDTTAIVCEWAIAEVINNPNVLKKAQEEIANIVGFDRILQESDAPNLPYLQALIKETFRLHPPIPMLARKSISDCVIDGYMIPANTLLFVNLWSMGRNPKIWDYPTAFQPERFLEKEKAAIDVKGQHFELLPFGTGRRGCPGMLLAIQEVVIIIGTMIQCFDWKLPDGSGHVDMAERPGLTAPRETDLFCRVVPRVDPLVVSTQ

SEQ ID NO: 1808 - protein, 90 aa, Triticum aestivum
  unsure (1)..(90): unsure at all Xaa locations
IGAANVVLMGNNLTLSFDDVEANFSPAVKGSGVNGLVYTAEPLNACSALTSKAVEGPPSPFALVIRGGCTFDEKVKNVQDAGFKAAIXYD

SEQ ID NO: 1809 - protein, 278 aa, Ralstonia eutropha JMP134
MLDTLTFGFLGGGNMATALISGLIARGVPAGSIRVVDPFPDAQQRLVRDLRVHVAGAPDAAFGGSDVLVLAVKPQQFREAAASLLPHLPATGAGNLIISVAAGIRLQDMERWLGGRTRLVRAMPNTPALSGMGMTGLAAPAGLSQHDRAIASAVAEAVGKSAWVDGDEQIDAVTAISGSGPAYVFYFIEAMERAATELGLTTQQGRELAVQTFLGAATLAGQSTEPVATLRERVTSKGGTTYAALTAMESAGIGDAFVRAMQAAAARGKEMGEEFGKD

SEQ ID NO: 1810 - protein, 405 aa, Corynebacterium glutamicum ATCC 13032
MAVKTLKDLLDEGVDGRHVIVRSDFNVPLNDDREITDKGRIIASLPTLKALSEGGAKVIVMAHLGRPKGEVNEKYSLAPVAEALSDELGQYVALAADVVGEDAHERANGLTEGDILLLENVRFDPRETSKDEAERTAFAQELAALAADNGAFVSDGFGVVHRAQTSVYDIAKLLPHYAGGLVETEISVLEKIAESPEAPYVVVLGGSKVSDKIGVIEALAAKADKIIVGGGMCYTFLAAQGHNVQQSLLQEEMKATCTDLLARFGDKIVLPVDLVAASEFNKDAEKQIVDLDSIPEGWMSLDIGPESVKNFGEVLSTAKTIFWNGPMGVFEFAAFSEGTRGIAQAIIDATAGNDAFSVVGGGDSAASVRVLGLNEDGFSHISTGGGASLEYLEGKELPGVAILAQ

SEQ ID NO: 1811 - protein, 405 aa, Populus nigra
MGFLCCSGKPSKRLESSSINENNSNIKRKDQTHVTSGSLKMKPYVNNLSKEGESKDDQLSLDVKSLNMKDEISKDRRSNGKQAQTFTFEELAAATSNFRSDCFLGEGGFGKVYKGYLDKINQAVAIKQLDRNGVQGIREFVVEVVTLSLADHPNLVKLIGFCAEGDQRLLVYEYMPLGSLENHLHDIPPNRQPLDWNTRMKIAAGAAKGLEYLHNEMKPPVIYRDLKCSNILLGEGYHPKLSDFGLAKVGPSGDKTHVSTRVMGTYGYCAPDYAMTGQLTFKSDIYSFGVVLLELITGRKAIDQRKERGEQNLVAWARPMFKDRRNFSCMVDPLLQGQYPIRGLYQALAIAAMCVQEQPNMRPAVSDLVMALNYLASHKYDPQVHSVQDSRRSPSRPGLDKDRGQ

SEQ ID NO: 1812 - protein, 660 aa, Thermosynechococcus elongatus BP-1
MCGLTGFWQPCGCPTDEVSATIQRMADTLVHRGPDDVGVWVDTEVGIALGHRRLAILDLSPAGHQPMVSATGRYVIAFNGEIYNHLELREELSKVGAGGTAPVWRGHSDTETLLAAFAALGIEKTLKRVVGMFAIALWDRETRTLTLARDRMGEKPLYYGWVRDALVFGSELKALRAYPGFDNAIERRSLALFMRYDYIPAPWSIYENIWKLPPGCFVQFRAASHGGEPLAVGSRGNIKPYWSVRDVAERGLANPFTGREADAVEELERLLRQSIAGQMMADVPLGAFLSGGIDSSTVVALMQAQSSRAVKTFTIGFHEQDYNEAKHAKAVACHLRTNHTELYVTPQEAMAVIPKLPSLYDEPFADSSQIPTFLLAQLARQQVTVSLSGDGGDELFGGYTRYFLTHSLWQRLAWIPLPMRKLAEQGVLAISPQTWNRVFALLAPVLPERLRFRLPGDKLHKAAALFVTRRPEDIYLRFVSHWHDPTSLVIGTEEPRTALTEPATVLEGADFEARMMYLDSITYLPDDILVKVDRAAMGVSLETRVPLLDHRIVEFAWQLPHYFKIRRGQSKWLLRQVLYRYVPKELIERPKMGFGIPLDQWLRGPLREWAEDLLSEERLKREAFLNPELVRQKWQEHLLGRRNWAYHLWNVLMWEAWLAA

SEQ ID NO: 1813 - protein, 352 aa, Lagenaria siceraria
MVPPYALDSLYCSEDHWENDDEEEERGFHEQPYSNLTTESSSPILAVAEQDLFWENDELISLFSREKPNELFKTIQIDPSLAAARRSAVGWMLKVNAHYSFSALTAVLAVDYLDRFLSCFHFQRDKPWMSQLAAVACISLAAKVEETQVPLLLDLQVEDSRYLFEAKTIKKMELLVLSTLQWRMNPVTPFSFVDYISRRLGFKEHICWEILWQCERTILSVILESDFMSFLPSVMATATMLHVFKAMEEPTLSVEYDSQLLNILGIDKGNVEECCKLISNASRRNGNQFKKRKIGSIPGSPNGVMDVSFSSDSSNDSWSVASSVSSSPEPLTKKNRANGSMSGDCETFRTLS

SEQ ID NO: 1814 - protein, 406 aa, Populus nigra
MGFLCFSGKSSKRSENSSIDENNSNIKRKDQTQLTSGSMKVKPYVNDSREEGASKDDQLSLDVKSLNLKDEISKDIRNNGNPAQTFTFEELVAATDNFRSDCFLGEGGFGKVYKGYLEKINQVVAIKQLDQNGLQGIREFVVEVLTLSLADNPNLVKLIGFCAEGDQRLLVYEYMPLGSLENHLHDIPPNRQPLDWNARMKIAAGAAKGLEYLHNEMAPPVIYRDLKCSNILLGEGYHPKLSDFGLAKVGPSGDHTHVSTRVMGTYGYCAPDYAMTGQLTFKSDVYSFGVVLLELITGRKAIDQTKERSEQNLVAWARPMFKDRRNFSGMVDPFLQGQYPIKGLYQALAIAAMCVQEQPNMRPAVSDVVLALNYLASHKYDPQIHPFKDPRRRPSHPGLDKDNGRT

SEQ ID NO: 1815 - protein, 108 aa, Triticum aestivum
  unsure (1)..(108): unsure at all Xaa locations
MSRRYDSRTTIFSPEGRLYQVEYAMEAIGNAGSALGILAADGVVLVGEKKVTSKLLQSSRSAEKMYKIDSHLACXVAGIMSDANILINTARLHAQRYALSYQEPIPVE

SEQ ID NO: 1816 - protein, 525 aa, Deinococcus radiodurans R1
MKELLLPELAESVVEGEILKWLVEEGDAIALEQPLCEVMTDKVTVELPSPFEGTLHKRMANEGDVVAVHAVIALIDDGAGAGAGAIPSATQAIQDSAENPTTTEVTLPAQAEEEREAMGGSIVEAGHIAKADDDSTSLFKTFANDEEVKVQGLGARSGSGAPGSSTAGTGTLDRAPETAPASPTPATANGGRVLAVPAARQAARELGIDLAAVRGSGPNGRIRVADVLAHQQSGQAQPQQTQPQQAAASQAVAPQPQAAAPAAPAPAGKLAAPSAHLPAPVQYRTPKGYEDRETRVPLRGMRRAIANQMQASHLYTVRTLTVDEVNLTKLVEFRQRVKDEAKAADVKLSYLPFIFKAITVALKKYPSLNTSFDEATQEIVQKSYYNLGMAVATEAGLTVPVIRDVDRKSIFDLARDVVDLAGRANAGKLSPDELTGSSFSVTNIGSIGALFSFPIINVPDAAIMGVHSIVKRPIVDEHDNITVAHMMYLSLSFDHRLIDGAEAARFCKEVIRLLENPDRLMLEGF

SEQ ID NO: 1817 - protein, 254 aa, Brucella melitensis biovar Abortus
MKAMVLEKPGQPLVLVERPDPLPGPGQIRLKVEACAVCRTDLHVVDGELERPKLPLVPGHEIVGVIDAVGTGVDPSRTGRRVGVPWLGHTCGACDYCRSGAENLCDAPLFTGYTRDGGFATHVVADADFAFDLDEAADPVALAPLLCAGLIGWRSLKKAGEGKRIGLYGFGAAAHIIAQVCRWQTGRFTLSQSPEIRKRKILRAALARYGPEIQIFCRRHRWMQLSFSHPPGSSFQPPCVRCARAAGWSAAASI

SEQ ID NO: 1818 - protein, 423 aa, Acremonium chrysogenum
MSPTAAPAIDGAVVETPPRPPTPVHNFGTLAVHAGSPHDAATGAVIESISLSTTFAQTAVGKPVGEYEYSRSANPNRTNFETAVAALEHARYALAFSSGSATTATILQSLAAGSHVISVSDVYGGTHRYFTQVAKAHGVKVTFTPEIEVDVSEHITDQTRLIWIETPSNPTLRLVDIRAVVSVAHKHGVLVVVDNTFLSPYVQNPLDLGADIVVHSVTKYINGHSDVVMGVAAFNSPELKDRLGFLQNAIGAVPSAFDSWLAHRGLKTLHLRAREASRNAAAVAAALEASPNVISVNYPGLDSHPHRHIALKQHRDGMGGGMLSFRIRGGHDAAERFCQQTRIFTLAESLGGVESLVELPSSMTHAGIPRDQREAVGVFDDLVRVSCGVEDAEDLKNDVPRRGEGRGVVKEWCQGPITPTYLP

SEQ ID NO: 1819 - protein, 415 aa, Oryza sativa
MQPRATSQQVLLQQGVKNRRFRFGLAFEQKAQKVSAWEEQNAMQELLRGNKDVMSLAQGVVYWQPPEAAMNKIKEIVWEPSISKYGSDDGLPELREALLEKLRRENKLTKSSIMVTSGANQAFVNVVLTLCDAGDAVVMFAPYYFNSYMSFQMTGVTDILVGASNPETLHPDVDWLEKVLQENNPIPKLVSVVNPGNPSGAFIPKPMLERISELCRNAGAWLVVDNTYEYFMYDGMEHYCLEGNHIVNLFSFSKAYGMMGWRVGYIAHPNEADGLHAQLLKVQDNIPICASIIGQRLALYALEAGPEWIRERVRDLVKNRELLMEAMSPLGKDSVKGGEGAIYLWAKLPEKCSDDFEVVRWLANKHGVAVIPGSASGGPGYIRVSFGGLKESDTRLAAERLRRGLQELVTEGMVQ

SEQ ID NO: 1820 - protein, 418 aa, Haloferax volcanii
MSYDQIEVPDDGEKITVDEETGELSVPDNPIIPIIHGDGIGTDVGPAAQKVLDAAAEATGRSVSWMRVYAGSSARDKYDENLPEDTVSAIRNHRVAIKGPLTTPVGAGFRSLNVALRKKLDLYANVRPTYHLDGVPSPVKNPSAMDMVTFRENTEDVYAGIEWEAGTDEVQKVKEFVEEEMGADGVIHDGPVGIGIQPITEFGTKRLVREAIEYALENDRRRTLVHKGNIMKFTEGAFRDWGYELAEEEFGDVTITEDELWEEYDGERPEDKVVVKDRIADNMLQQLLTRTADYDVIATMNLNGDYMSDAAGAQIGGLGIAPGANFGEGLCLAEPVHGSAPKYAGEDKVNPTAMILSGRLMFEYMGWKDAGKLIRDAVEKTISDGDVTYDLERQIEGGNKLATSEYADKVVENIKELA

SEQ ID NO: 1821 - protein, 138 aa, Shorea bracteolata
EKNIPVLLGLLSIWNVSFLGYPARAILPYSQALEKFAPHIQQVSMESNGKGVSIDGVPLPFEAGEIDFGEPGTNGQHSFYQLIHQGRVISCDFIGSAKSQQPIHLKGEVVSNHDELMSNFFAQPDALAFGKTPEELHK

SEQ ID NO: 1822 - protein, 457 aa, Mycobacterium bovis AF2122/97
MSFVNVAPQLVSTAAADAARIGSAINTANTAAAATTQVLAAAQDEVSTAIAALFGSHGQHYQAISAQVAAYQERFVLALSQASSTYAVAEAASATPLQNVLDAINAPVQSLTGRPLIGDGANGIDGTGQAGGNGGWLWGNGGNGGSGAPGQAGGAGGAAGLIGNGGAGGAGGQGLPFEAGANGGAGGAGGWLFGNGGAGGVGGAGGAGTTFGVAGGDGGTGGVGGHGGLIGVGGHGGDGGTGGTGGAVSLARAGTAGGAGGGPAGGIGGTGGVGGAGGAAGAVTTITHASFNDPHGVAVNPGGNIYVTNQGSNTVSVIDPVTNTVTGSITDGNGPSGVAVSPVTGLVFVTNFDSNTVSVIDPNTNTVTGSIPVGTGAYGVAVNPGGNIYVTNQFSNTVSVIDPATNTVTGSPIPVGLDPTGVAVNPVTGVVYVTNSLDDTVSVITGEPARSVCSAAI

SEQ ID NO: 1823 - protein, 705 aa, Ajellomyces capsulatus
MPSGQKGPLDRRHDTLSDPTDQFLSKFYIDDEQSVLTTDVGGPIEDQHSLKAGNRGPTLLEDFIFRQKIQHFDHERVPERAVHARGAGAHGVFTSYNNWSNITAASFLNAAGKQTPVFVRFSTVAGSRGSVDSARDIHGFATRLYTDEGNFDIVGNNVPVFFIQDAIQFPDLIHAVKPQPDSEIPQAATAHDTAWDFLSQQPSSLHALFWAMSGHGIPRSMRHVDGWGVHTFRLVTDEGNSTLVKFRWKTLQGRAGLVWEEAQALGGKNPDFHRQDLWDAIESGRYPEWELGFQLVNEADQSKFDFDLLDPTKIIPEELVPFTPIGKMVLNRNPKSYFAETEQIMFQPGHVVRGIDFTDDPLLQGRLYSYLDTQLNRHGGPNFEQLPINRPRIPFHNNNRDGAGQMFIPLNTAAYTPNSMSNGFPQQANRTHNRGFFTAPGRMVNGPLVRELSPSFNDVWSQPRLFYNSLTVFEKQFLVNAMRFENSHVRSETVRKNVIIQLNRVDNDLARRVALAIGVEPPSPDPTFYHNKATVPIGTFGTNLLRLDGLKIALLTRDDGSFTIAEQLRAAFNSANNKVDIVLVGSSLDPQRGVNMTYSGADGSIFDAVIVVGGLLTSASTQYPRGRPLRIITDAYAYGKPVGAVGDGSNEALRDVLMAAGGDASNGLDQPGVYISNDVSEAYVRSVLDGLTAYRFLNRFPLDRS

SEQ ID NO: 1824 - protein, 380 aa, Lagenaria siceraria
MKKMALHSNKHRTQRLHNSLFFFDFLHCTEQQHLQTEHPIFLNNGGTNDFPLFQQTTTHFLVYEDEELNHLLSKEKDQNLQTGAVLKTLVQTDNALSLARTEAIDWLLKVNAFYGFSSLTALLAINYLDRILSGPYFQRDKPWMLQLAAVTCISLAAKVEEIRVPLLLDLQVEDSKYIFEAKTIQRMELLVLTALQWKMHPVAPVSFLGIITKGLGMKNQYIQREFLRRCERILLSLVSDSRSVGILPSIMAVSAMVSVVEEMGNCNPLEEFQDQLLNALKINKGRVKECCKVIMEAKIKGSGKRKHVEEEAEAEAESESSEAETEGEAEAEAGSPNGVMEANFSCESSNDSWEMGTIVSEYTHFSSSSSSSSKRIRPTR

SEQ ID NO: 1825 - protein, 480 aa, Triticum aestivum
  unsure (1)..(480): unsure at all Xaa locations
MQRLASSRRLLRAALAPGRAHSSLSAAAVAAAPENGAGAPKMPPFAYTXPPPYDGPRVAEIAQKRAQFLSPSLFHFYDRPLNIVDGKMQYLFDEDGRRYLDAFGGIATVCCGHCHPDVIEAIVNQAKKIQHSTVLYLNHAIADFAEALAAKMPGDLKVVFFTNSGTEANELALMIARLYTGSHDIISLRNGYHGNAAATMGATAQSNWKFNVVQTGVHHALNPDPYRGAFGSDGEKYARDIQETIDYGTTGRVAGFISEAIQGVGGIVELAPGYLPAAYDMVRKAGGLCIADEVQAGVARTGSHFWGFEGQGVIPDIVTMAKGIGNGIPIGAVVTTPEIAKVLTRRSYFNTFGGNPVSTAAGHAVLKVLEKEKLQENAFVVGSYLKEKLNALSXKKKHDIIGDVRGKGLLLGVELVTDRQKKTPAKAEIAQVMNHMKDMGVLVGKGGFFGNVFRVTPPLCFSKEDSDYMIEVMDIALSKL

SEQ ID NO: 1826 - protein, 358 aa, Wautersia eutropha
MYPKNFWYVGAMKHEVGRQLLARTLLEQPVVFFRRNDGSVAALADRCSHRRVSLSLGRLIGDEVQCGYHGLTFAGDGSCTSIPGQSRVPPSACVRSYPVVERDGFVWIWPGDPALANETLVPDYAEICSSGRYVGRPAEALLVEAPFLFNIENVLDLSHVTYAHPETVGTPEVALTRPTVDVSEAKVQVTRNWDKASTGPSFKNLFGWDFVKNSQRISFWPGANMLLEIEVEPVGNNDPTQIKRLRVPGPCTPSTSTTHFKFSALYRDFLPDNEALTVGMFEQFRKTVMEDKVLMENQQRNWALDGVEVIRRIEPSSSGGMMDIAVDHAPLAARRWLQRLAMAERSAPEIKAPGVLQG

SEQ ID NO: 1827 - protein, 396 aa, Zea mays
  unsure (1)..(396): unsure at all Xaa locations
MQSAAAFRPCPTRLLVSSPCRPLLSARPLRVSAAGAVATRSSAVGPRGLGLGLLPASPDRDGKCRQRQVSCSAAGDAVAAPKAEEGGGLMKTLWLGSLFGLWYLFNIYFNIYNKQVLKVFPYPINITEVQFAVGTVAALFMWITGIIKRPKISGAQLVAILPLAIVHTMGNLFINMSLGKVAVSFTHTIKAMEPFFSVILSAIFLGELPTIWVVSSLLPIVGGVALASLTEASFNWAGFWSAMASNVTFQSRNVLSKKLMVKKEESLDNLNLFSIITVMSFFLLAPVTFFTEGVKITPTFLQSAGLNVNQVLTRCLFAGLCFHAYQQVSYMILAMVSPVTHSVGNCVKRVVVIVTSVLFFRTPVSPINSLGTAIALAXGVFLYSQLKRLKPKPKTA

SEQ ID NO: 1828 - protein, 463 aa, Glycine max
MGAVYFSQSCYKPRQIFNLERESTLVGRCPVVQIRCRRVVSACLNVDVDAPNTGNTTSEKKKTKDVIEMEGMYLVGTYARTPVVLERGEGCKLYDVEGNEYLDLSAGIAVNALGHGDADWLKAVVEQAGTLTHTSNIFHTIPQVELAKRLVASSFADRVFFANSGTEANEAAIKFARKYQRHTTSNGKVPATEFIAFSNCFHGRTLGALALTSKVQYRMPFEPVMPGVTFLEYGNAQAAVELIKQGKIAAVFVEPIQGEGGIYSATKEFLQSLRNACDETGALLVFDEVQCGLGRSGFLWAHEAYGVFPDMMTLAKPLAGGLPIGALLVTERVASAINYGDHGSTFAGSPLVCSAALAVLDKISKPDFLSSVSKKGLYFKELLREKLGENRHVKEIRGVGLIIGIDLDVPASPLVDACRSSGLLVLTAGKGNVVRLVPPLIITEKELEQAAGILCQTLPVLDN

SEQ ID NO: 1829 - protein, 257 aa, Wautersia eutropha
MPAAALSDKVAIITGAASGIGAATAERFIAEGAQVMLADIDGAAAEAVAARLGPRAAAAHGNHCLPADNARVVAETLARFGHVDILYNNAGVLSRGALDTIEGDELRAVLDANLVGPALMSRACLAALRESARLGRAPCILFTGSIQSLMVRPGFAAYGSSKHGVAGLASTLALELAPEGIRVNALCPGPVDTPLFRKSAAPAGAVGPSIEQLAAGIPIGRLIRVEEVASAALFLCSDQASAISGVLLPVDGAITAR

SEQ ID NO: 1830 - protein, 403 aa, Thermobifida fusca
MRAVVWHGVGDIRVEDVDEPTIQDPQDAIVQLTTSAICGTDLHLLRGTIPGMRPGTIMGHEGVGVVTEVGPGVRNFRPGDRVVISPTIGCGACSYCRAGYFSQCDNANPAGRRSGTAFLGGPEANGAFHGTQAERVRVPYANVGLIGLPERVSDEEGILLADMFPTGWFGARLAEVTPGDTVAVFGCGPVGLFTILSAWQQGAGRVLAVDGVESRLEQARGLHAEVINYNVEDPVAALVELTGGIGPDRVIDAVGVDAQRPESGPAVAAEDDVHRLEKEHAATVPSARPGETAQILSDERAQVLQWAVEAVAKAGTLAIIGNYPLNARIFPIGLAMNKNLTLNAGSCHHRKYIPKLLDMITSQQLDITSVLTQEEPITGDVLRAYEAFGQHKPGWTKVALTTV

SEQ ID NO: 1831 - protein, 504 aa, Neisseria meningitidis Z2491
MTTSKCPVTHLTMNNGAPVADNQNSLTAGPRGPLLAQDLWLNEKLADFVREVIPERRMHAKGSGAFGTFTVTHDITKYTRAKIFSEVGKKTEMFARFTTVAGERGAADAERDIRGFALKFYTEEGNWDVVGNNTPVFFLRDPRKFPDLNKAVKRDPRTNMRSATNNWDFWTLLPEALHQVTIVMSDRGIPAGYRHMHGFGSHTYSFWNEAGERFWVKFHFRTQQGIKNLTNEEAAKIIADDRESHQRDLYEAIERGEFPKWTMYIQVMPEADAEKVPYHPFDLTKVWPKKDYPLIEVGEFELNRNPENFFADVEQSAFAPSNLVPGVGASPDKMLQARLFNYADAQRYRLGVNFRQIPVNRPRCPVHSNQRDGQGRADGNYGSLPHYEPNSFGQWQQQPDFAEPPLKINGDAAHWDYRQDDDDYFSQPRALFNLMNDAQKQALFGNTAAAMGDAPDFIKYRHIRNCYRCDPAYGEGVAKALGLTVEDAQAARATDPALGQAGLL

SEQ ID NO: 1832 - protein, 767 aa, Kineococcus radiotolerans SRS30216
MQAGALGHPHQALPARAGLQHGRRAPPVVLDAEAQRVVVPADHDVGAGPGPGVLEDVGQGLLHDPVGGQADRGRQVARPPDHLGVDLQPAGPDLLDEVGDHPRVRLGGALVARALAQHPEQVAHVAQRLPPGAGDGLEDPHRHGRVRARGVAPPVGLGDDHRQGVRHDVVHLAGDALALGGGGEAGLVLPLDLQQPGALDEGELVLPARPAQAAQRPGGQDHDADEHRGHHHRGHPAGAEEPQRAQGRAEQPEGQPAEGGPAPGVGGQGVDRDEHGDVPERRRGREDLEEAKEGHQGAGDLGEAAPHGQGQAHRQAHEPGERPPADAVGGAEEPGERGEHQRAEGVEEQAVGPRPPHEAVEDVQRGFPRHGPSVGIPAVAVVGPQDDPRGPPTGGGVHPSRRGDRMPDVRGRASATLARMVDTLRLAVIPGDGIGQEVTVEALKVLTAVLGGGGRVATTEYDLGARLYHRTGETLPDSVLEELRGHDAILLGAVGDPSVPSGVLERGLLLKLRFALDHHVNLRPSKLHPGVPSPLGDPGEIDFVVVREGTEGPYVGNGGALRVGTPQEIATEVSVNTAFGVERVVRDAFARAAARPRRKLTLVHKHNVLVHAGHLWRRTVEAVGAEFPDVAVDYLHVDAATIFLVTDPARFDVIVTDNLFGDILTDLAAAVTGGIGLAASGNVNPDRTTPSMFEPVHGSAPDIAGQQIADPTAAVLSVSLLLAHLGRDDLAARVEAAVAADLARRATGEVGTRSTSAVGDALAAAVG

SEQ ID NO: 1833 - protein, 329 aa, Chlamydophila pneumoniae AR39
MPMSNQFDQLKKLSTIVCDSGDPELVKASGSQDATTNPSLILKVAQEPKFQELLNEAVVWGIRQNGDDLQTLSFILDKIQVNFALEIIKNIPGRISLEIDARLSFNVEAMVQRAVFLSQLFEAMGGDKKRLLVKIPGTWEGIRAVEFLEAKGIACNVTLIFNLVQAIAAAKAKATLISPFVGRIYDWWIAAYGDEGYSIDADPGVASVSNIYAYYKKFGIPTQIMAASFRTKEQVLALAGCDLLTISPKLLDELKKSQHPVKKELDPAEAKKLDVQPIELTESFFRFLMNEDAMATEKLAEGIRIFAGDTQILETAITEFIKQIAAEGA

SEQ ID NO: 1834 - protein, 155 aa, Glycine max
MASTKKITLKSSDGEAFEVEEAVALESQTIKHMIEDDCADSGIPLPNVTSKILAKVIEYCKKHVEANSADEKPSEDVLKAWDVDFVNVDQATLFDLILAANYLNIKSLLDLTCQTVADMIKGKTPEEIRKTFNIKNDFTPEEEEEVRRENQWAFE

SEQ ID NO: 1835 - protein, 144 aa, Glycine max
  unsure (1)..(144): unsure at all Xaa locations
VYVVLFFSLLSFFFVHGKVNGPVLVEDTCLCFNALKGLPGPYXLNNLLMAYDDKSAYALCVFSFAAGPDSEPITFSGKTPGKIVPPRGPNDFGWDPIFEPDGSGQTYAQMPKEEKNQISHRSKSLALVKSHFAEARFTFDVKNF

SEQ ID NO: 1836 - protein, 362 aa, Triticum aestivum
MVGAYYSETNKTKGKKVSCKIHKKAPLHSIPHRRERARDWDRAEGMEGKRTDQAKLSTMHSKVICCKLYISESQNAAVVDAISRIGQKDPEVVLLNKFEDEYYNRVRYTLVSYINSESATGEAVFSPIRKVLLAMIEAAFSAINLEVHCGTHPRIGVVDDISFHPLTQAATMEDAAQLAKLVASDIGNGLQVPVFLYAAAHPTGKSVSAVRRELGYFRPNHKGVQWAGPVLPDTLSMKPDVGPVHVPHERGATMVGAQPLVESYNVPIFCKDVPTVRRITRRVTGRSGGLPSVQALALFHGDNCTEIACFLLDPDHVGADRVQWLVEQIAEEQGLEVDKGYFTDLSKHMMLERYSEMVSAAD

SEQ ID NO: 1837 - protein, 10625 aa, Streptomyces sp. FR-008
MASSEAKLRDYLKKVTTDLRRTRQRLETVEARESEPIAVIGMACRFPGGVRSPEDLWQLVADGTDAIGPLPADRGWDLDGLYDPDPGTPGKSYVREGGFLEGAADFDADLFGIAPREALAMDPQQRLLLETAWEAVERARISPASLRNTDTGVFVGGADTNYGSLARTAEETEGHNLTGGAMSVLSGRISYTLGLEGPAVTVDTACSSSLVALHLAVRALRAGECSLALAGGVAMMPTTELFTEFSRQRGLATDGRCKPFAEAADGTSWGEGVGVLLVERLSDARRNGHPVLAVVRGTAVNQDGASSRLTAPNGPSQRRVIEAALADARLAADQVDAVEAHGTGTTLGDPIEAQALLATYGQNRPEDRPLRLGGIKSNIGHAQAAAGVAGVIKMVMAIRHGLLPATLHVDTPTPHVDWTAGAVELLTEAVDWPDADRPRRAGVSAFGISGTNAHVLLEQATPEPAGAEDTPQDATPAEPVTATDPAVTPWLLSARSQTALRAQAARLLAHLTDHTGPESPRPADIALSLATSRAPLPHRAVVLATDPGTTEAALTSLAADEPHPAVLEDAVRSASTAFLFSGQGSQRLGMGRGLYERFPVFAEAFDAVCAGLDEHLERPLREVVWGDDTSVLDGTAYAQAGLFAVEVALFRLVESWGVRPEFVAGHSIGEVAAAHVAGVFSLADACVLVAARGRLMQALPEGGAMVAVEASEAEVLPRLESVEGVSVAAVNGPSSVVVSGAEDAVEAVAEVFREQGRRVSRLRVSHAFHSPLMEPMLGDFREALAGLSYAEPSLPVVSNVSGRIAEPGELTTPDYWVRHVREAVRFDDGVQALAAEGVARFVELGPDGVLSGMARVSAGEDAVLVPLLRKDRDEEVTALAALGRLHATGAPVDWTAVLAGTGARLVDLPTYAFQHEHYWPVPAPAPAGDVESAGLRAAGHPLLSAAVELSDSGGLLLTTRLSLRTHPWLGEHVVMGNALLPGTAFVELAVRAGDEVGCDRVEELTLAAPLVLPEQGGVQLHLHVGPADAAGRRVLAARSRAEGADDQPWTEHATGVLAPGERTVEFDTSVWPPADAESLDLTGLYERMAEGGYRYGPLFQGLRAAWRRGDDVFAEVALPDSAERDATAYGLHPALLDASLHVSALGGLAHGVVPFSWEGVCLHATGAREVRVRMTRTGDETVTVAVADPTGAPVASVENLVLRRVAPDATGVDALTRDALFRVDWVRTEAPGDAAGTGPVGVLGDSDASTALAGVLRADGLSDGGFVAFPDLEDLAAAEEVPATVLVRVRPDAATRPDAVVDAVHALAARGLELVREWLAQERFTDSRLVFVTSDAVDGGDLADAALRGLVRSAVSEHPGRFGLMEVGRGTDTATVLAAVATGEPETAARDGEVLAPRLARITSGTTTGPRWDSIDGTVLLTGGTGGLGRIVARHLVVERGVRDLLLVSRSGAAADGAGQLVAELSETGAHVTVEACDVSDPAAVAELVARHPVRAVVHSAGVLDDGTVESLTAERVTRVLRPKADAAWNLHEATRALDLEAFVVFSSMSGILGGPGQANYAAGNTFLDALVRHRRSLGLPATSLAWGPWTQDAGMIGTLSGTSRHRVARAGMPELTAEQGTALFDAALASGEPVVLPVRLDLAALRGQGDLHPMMLGLVRRRGRRAAAGGSVAAAGLVQRLGALGVDERREVLLDLVRGQVAVVLGHAGVQSVDPGRAFQDLGFDSLTAVELRNRLGKSTGLRLPATVVFDYPTVNALVGYLLEELFGGVEPASVVPVSALPSVAEDPIVIVGMACRYPGGVSSPEDLWTVVSEGVDTVSEFPVNRGWDVDALYNPDRDASGTTYTKAGGFLHDAGAFDSEFFGMSPREAVATDSQQRLLLETTWEAIERSGIDPASLRGSQTGVFAGVMYNDYGNMLADERYEGFRSNGSAPSIASGRVSYTFGFEGPAVTVDTACSSSLVALHWAAQALRSGECSLAVAGGVTVMSTPTTFVEFSRQGGLSADGRCRSFADSADGVGWSEGVGMVVLERLSDARRNGHRVLAVVRGSAVNQDGASNGLTAPNGPSQQRVIRQALASGGLSAGDVDVVEAHGTGTTLGDPIEAQALLATYGQEREEGRPLWLGSVKSNLGHTQAAAGVAGVIKMVMAMRHGRLPRTLHVDAPSSHVDWSAGAVELLTGERVWPGEERLRRAGVSSFGISGTNAHVILEQPEPVAEPETGGDGIAALAPGIVPWVLSGRTEEALRAQAARLLAQVEGHPGLRPVDLALSLATQRSLFDHRAVVLTDDRETAVRGLAAVCVGEPDPAVVLGAVEPGRTAFLFSGQGSQRLGMGRGLYERFPVFAEAFDAVCAGLDAHLDRPLREVVWGDDTSVLDGTAYAQAGLFAVEVALFRLVESWGVRPEFVAGHSIGEVAAAHVAGVFSLADACVLVAARGRLMQALPEGGAMVAVEASEAEVLPRLESVEGVSVAAVNGPSSVVVSGAEEAVEAVAEVFRELGRRVSRLRVSHAFHSPLMEPMLDAFHEVLRDLSFAEPRLPVVSNVSGRIAEPGELTAPDYWVRHVREAVRFDDGVRALAEEGVTRFVELGPDGVLSGMARASAGEDAVLVPLLRKDREEVAVALSALAELHVRGVSAGWGAVLDGTGGRAVDLPTYAFQHEHYWPTGTTTGTGDIRLAGLGAAGHPLLGAAVELAGADGLILTGRLSTRSHPWLADHVVQGAVLVPGTALLEMAVRAADEAGCGSVEELTLSAPLVLPERGAVRVQVGVGEPDESGRRTVAIHSRDDGDERQPWSLHAQGVLAPETIDADPAAEGFDASVWPPRDAVPVDVTDCYESLAEAGLRYGPVFQGLRAAWRRDDEVFAEVALPDGVDATAFGLHPALFDAALHASFAFGGDDAPGGVPFVWENATLHASGASVLRTRLTRTGDDTLAVHVADPTGAPVASVGSLTVRAAAGARAADTAEPLYRVEWVPARGTRATPAAGSVVLLGEGLADLAGDGAAVRADLQELAAAEAVPETVVVAVPPAPDTEGVVGSAHASAAWALALVKEWLAQERFAGSRLVFITRGGHVTEPASALTSAPVRGLVRSVALEHPGRFGLLHLPAGTDAGRLFAALAVDEPETAVLDSEVCVPRLVRTTPDAGGEETAGSSAGLGSGTVLLTGGTGGLGRIVARHLVVERGVRDLLLVSRSGAAAEGVDAFTAELTGLGARVSVAACDLADRTALDALLAGVPADRPVRAVVHAAGVLDDGMAESLTAERVAAVLRPKVDAAWNLHEATRGLDLEAFVVFSSVAGTFGSAGQGAYAAGNVFLDALVEYRRSLGLPGVSLVWGPWAQDAGMTRGLSETDRRRIARSGLPPVEAEQGTALFDAALASGEPVVLPVRLDLAALRGEEDVPALFRGLVRRRGRRAAAGGSVAAAGLVQRLGALGVDERREVLLDLVRGQVAVVLGHAGVQSVDPGRAFQDLGFDSLTAVELRNRLGKSTGLRLPATVVFDYPTVNALVGYLLEELFGGVEPAAVVPVSALPSVAEDPIVIVGMACRYPGGVSSPEDLWRVVSEGVDTVSDFPSDRGWDVDALYNPDRAVPGTSYTRSGGFLHDAPEFDPEFFGMSPREAVSTDAQQRLLLETTWEAIERSGIDPVSLRGSQTGVFAGVMYHDYANLLASPEYEGYQGSGSAGSVASGRVSYTFGFEGPAVTVDTACSSSLVALHWAAQALRSGECSLAVAGGVTVMSTPSTFVEFSRQGGLSADGRCRSFADSADGVGWSEGVGMVVLERLSDARRNGHRVLAVVRGSAVNQDGASNGLTAPNGPSQQRVIRQALASGGLSAGDVDVVEAHGTGTTLGDPIEAQALLATYGQGRDEERPLLLGSVKSNIGHTQAAAGVAGVIKMVMAMRHGRLPRTLHVDAPSSHVDWSAGAVELLTGERVWPGEERARRAGVSSFGISGTNAHVILEQPEPVTGSGPGEADGTEASSGVQPWVLSARTEEALRAQAARLADFLTDAPADVRDVALSLATQRTLFDHRAVVLGADLETALTSLRALAAGAPDAAVAEGVAGNGRTAFLFPGQGSQRLGMGRDLYERFPVLAEAFDAVCAELDEHLDRPLREVVWGDDAELLNRTAYAQPGLFAVEVALFRLVESWGVRPEFVAGHSIGEVAAAHVAGVFTLADAAALVAARGRLMQALPEGGAMAAVEATCAEVLPHLTGNLSIAAVNGPSSVVVSGSEASVESVAEVFRELGRRVSRLRVSHAFHSPLMEPMLHAFREVVEGLSFAAPRIPLVSNITGTLAEPGQVDEPEYWVTHVREAVRFDDGVRALAEEGVTRFVEVGPDGVLSGMARESAGEDAVLVPLLRKDREETGSALSALGRLHTVGVDVDWSGFLVGARPVDLPTYAFQKQRYWPEATLPRAGDVRFAGLGSAGHPLLGAAVELAGADGADGVVLTGRLSTRSHPWLADHVVQGTVLVPGTALLEMAVRAADEAGCGSVEELTLSAPLVLPERGALQIQIRVAAPDEDGRRALGVHARTEDDDGAPWTVHATGTLAPETLAPDPFDATVWPPRDAAQVDVTDCYERLAEAGFAYGPAFRGLRAAWRHGDALYAEVALDGGTDGDAFGLHPALFDAALHAFALADDGRGGVPFSWGGVSLHASGATALRVRLTRDADGTMALALADPAGSPVATVHSLTVRPLATGQLTTPARDSLYQVEWVPARPLDGPADTGAVAVLGEARSAVPAADDFVTYATLEELAAAEEMPSTVLVAASDDADGTDPAQAAHTAAARALALVRSWLAEDRFAGSRLVFVTASTDRTTGLADAAARGLVRSAISEHPGRFGLLELPADADTASLRSALASGEAESVVRDGEVRVPRLARVTPEATEGLRWDALTGPVLITGGTGGLGRVLARHLVMTHGVRDLLLVSRSGANAEGAGELVTELTEAGAHVAVEACDAADADAVAGLVTRHGVRAVVHAAGVIDDATLASLTAERVAAVLRPKVDAAWNLHEATRDLGLEAFVVFSSVAGTFGSAGQGAYAAGNVFLDALVEYRRALGLPGVSLVWGPWAQDAGMTRELSETDRRRIARSGLPPVEAEQGTALFDAALASGEPVVLPVRLDLPALRAQGEVPPLLSGLIRTSVRRTAAAAGAAATGLAARLAGLAEAERREVLLDLVRGQIAVVLGHSGAQTVNPHRAFQDLGFDSLTAVELRNRLGKVTGLRLPATVVFDYPTADLLAGHLLDGVLGTEPAVAVPVAALPSVADDPVVIVGMACRYPGGVTSPEDLWSVVSDGVDAVGDFPSDRGWDVESLYSEDRGVPGTTYTRSGGFLHDAPEFDPEFFGMSPREAVSTDAQQRLLLETTWEAIERSGIDPVSLRGSQTGVFAGVMYNDYGSILTDDQYEGYRGNGSAGSIASGRVSYTFGFEGPAVTVDTACSSSLVAMHWAAQALRSGECSLAVAGGVTVMATPTAFVEFSRQGALSPDSRCKAFSDAADGAGWSEGVGMVVLERLSDARRNGHRVLAVVRGSAVNQDGASNGLTAPNGPSQQRVIRQALASGGLSAGDVDVVEAHGTGTTLGDPIEAQALLATYGQGRDEERPLLLGSVKSNIGHTQAAAGVAGVIKMVMAMRHGRLPRTLHVDAPSSHVDWSAGAVELLTGERVWPGEERLRRAGVSSFGISGTNAHVILEQPEEAQEPAPTVAPAVDVPWVLSARSAPALRAQAERLRVHVAAEPVSAPDVAFSLVSGRATFDHRAVVLGTDREAALEALASGLPDAGVVEGVATGGRTAFLFSGQGSQRLGMGRGLYERFPVFAEAFDAVCAGLDEHLERPLREVVWGDDTSVLDGTAYAQAGLFAVEVALFRLVESWGVRPEFVAGHSIGEVAAAHVAGVFTLADAAALVAARGRLMQALPEGGAMVALEASEAEVLPRLESVEGVSVAAVNGSSSVVVSGAEDAVEAVAEVFREQGRRVSRLRVSHAFHSPLMEPMLGDFREVLSGLSYAEPSLPVVSNVSGRIAEPGELTTPDYWVTHVREAVRFDDGVRALAEEGVTRFVELGPDGVLSGMAREGAGEDAVLVPLLRKDREETSTALAALARLHTVGAEVKWTGFFAGTAARTVDLPTYAFQKRRFWPETTVRAAADPRSAGVDAADHPLLGAVVSLPDSGGVVLTGRLSVEAQPWLADHVVLGRVLLPGTGLVELALAAGDAAGSTALEELTLAAPLVLPEDTGLQLRVVAGPKTDGRRTVAVHSRPEGAEDAPWTAHAHGFLTDAPAGSGEALTEWPPPGADPVPVEHAYEEFRHRGYGYGPVFQGLRAAWRRDDAMFAEVALPEDAAGEAGRFGLHPAVLDAAMHAGILNEEEGQAVVPFAWNDVTLHAVGASAVRVRVSRVDAHTVSLTLADSTGAPVLTVGSLASRPVSAEQLGSASAGAGALYGIEWTPVTVDTSTAPAHVSWAEALEADTTAPGAVVLEVREPAGPDVPAAVRAVLDQVLPAIQQWLRDERFTSSRLVVVTRGAAPAGSSADVVQAPVWGLVRAALAENPGRFALADVSVDADDAAVDRAVAAALSGEAEVAVRDGVVLVPRLSRLAEPELPLSVPSLDGEGAVLVTGGTGGLGAVMARYLVAERGVRDLVLVSRRGGDAPGAAELAGELREAGAAVEVVACDLSDRESVVGLVESLVAGRGLRAVVHAAGVGGGGLVGTLSSDRFDAVLGAKADAAWWLHEATAGVELAAFVLVSSAGGLVLTAGQGNYAAANVFLDALASRRRAEGLVATSMAFGFWDVGAGLGEYLSEVDRRRMASQGLPLLSHEAGLELFAAGLDRGEATVVPLRVDTAALRTRTDEIPALLKSLAPVRRSAAVVPPATVEGSPAHRLASLPEAERHRTLLHLVRSQVAAVLGHGSAEAIGADRAFQELGFDSLAATELRNQLNTLTGLRLPATLVFDHPNALAVTDHLSARLAGESARAETPVRTGTAAPADDEPIAIVGMACRYPGGVTTPEELWRLVTDGVDTVSDLPGDRGWDIEGLYDPEPGKEGKSYTRRGSFLHDAAQFDPGFFGISPREALYMDPQQRLLLETSWEALERAGIDPATLRGSRTGVFAGVMYHDYALNVSPSGTAGGSVVSGRLSYTFGWEGPAVTVDTACSSSLVALHLAVQALRSGECSLAVAGGATVMSTPGMFVEFSRQRGLSVDGRCKAFAGAADGVGWSEGVGVLLVERLSDAVRNGHRVLAVVKGTAVNQDGASNGFTAPNGPSQQRVIRQALHGAGVPASEVDVVEAHGTGTTLGDPIEAQALLATYGQDRPEDRPLLLGSVKSNIGHAQAAAGVAGVIKMVMAMEHGTVPRTLHVDRPSPHVDWTEGRAELVTEDRPWPVTGRPRRASVSAFGLSGTNAHVVLEQGPDAAADAPSTAEEGRAPAVLPWTVSAATPDALRAQATRLLDHLADRPGTRPLDVAHALATSRTPLEARAVVLGTGRDDLLTGLRALAAGEHAPGVITGTARSVGTTAFLFSGQGAQRLEMGRGLHEAFPVFAEAFDAVCAGLDEHLDRPLREVAWGENAPDLDGTAYAQSALFAYEVALFRLLASWGVTPDLVAGHSIGEVAAAHVAGVFSLADACALVAARGRLMQALPEGGAMVAVEASETEVLPHLESVEGVSVAAVNGPSSVVVSGAGEAVEAVAEVFREQGRRVSQLRVSHAFHSPLMEPMLADFREVLSGVSYAEPSLPVVSNVSGRIAESGELATPDYWVTHVREAVRFGDGVRALRAAGVDRCVEIGPDAVLTGMARTCLDGDEDTAVLLVPSARKGREEPDALLTALAQLHTAGTAVDWAGFFAGSGAGPVDLPTYAFQRQRYWLTATDGAPAAAGAGLDAADHPLLGAVVSLPDSGGAVLTGLLSVEAQPWLADHVVLGRVMLPGAVLVELALAAGESVDCAVLDELTLATPLVLPEHGGAQVRVVVGPRTAERRTVAVYSRPEGTGQEWATHATGFLTDNALVAGAEAALEQWPPTGAASVPVDSAYQIFRERGYGYGPVFQGLRAAWRRGGELFAEVALPEEAASEAGRFGLHPALLDAAMHVAILNDSNDSNDSNDNAEGGSGGTVIPFAWNRVALHAVGAAAVRVRIATAADGGMDIRVTDVTGAPVLTVGSMVSRTVSAGQLGAAPRDAGALYAPEWVPVTRLDDTDTAWATWSRVEEAGTEVPAVVVLDASAPAGADVPGSVRSALDGVLTVAQRWLTEERFAASRLVVVTRGAMPVGSGGAPAEGDVVQAPVWGLVRAALAENPGRFALADVAVDADDAAVDCAVAAVLSGEAEVAVRDGVVLVPRLTRLTADAPAAELPLSVPSLDGEGAVLVTGGTGGLGAVMARYLVAERGVRDLVLVSRRGGDAPGAAELAGELREAGAAVEVVACDLSDRESVVDLVGSLVSGRGLLAVVHAAGVGDNGLLGSLTPDRFDAVLGAKADAAWWLHEATAGVELAAFVLVSSAGGLVLTAGQGNYAAANVFLDALASRRRAEGLVATSMAFGFWDVGAGLGEYLSEVDRRRMASQGLPLLSHEAGLELFAAGLDRSEATVVPLRVDTAALRTRTDEIPALLRALAPARRATAASGSAAAPGPDDSPSRRLAELPAPERHRAVLHLVRSQVAAVLGHGSAEAIGADRAFQELGFDSLAATELRNQLNTLTGLRLPATLVFDHPNALAVTEVVEEELAAAHPASGAGGATGDDDGVRRALSAIPARRLRDAGLAETLLELAADSDEMSDTDRDALLAAFDGDDEDDASGPYDESDGAAETAGTGTATEPGADALRAARAETARLRRDNRRLTSAQHEPIAIVGMACRYPGGVSSPEDLWRLVTSGDDAIVPFPQDRGWDLSILRDPDGDHPDGLYAREGGFLDGAADFDPAFFGISPREALGMDPQQRLALEMSWEALERAGIDPASLKGSRTGVFTGVMYHDYPGSDGNGSVVTGRVAYKLGLEGPAVSVDTACSSSLVALHLAVQALRQGECSLAVTGGVTVLSTPAVFAEFGRQGGLAPDGRCKSFASAADGTGFSEGAGFLVVERLSDAVRNGHEVLAVVRGSAVNQDGASNGLTAPNGPSQRRVIRQALANARLAADQVDAVEAHGTGTTLGDPIEAQALLATYGQDRPEDRPLLLGSVKSNIGHAQAAAGVAGVIKMVLALRNGLLPATLNVDAPSDQVDWTTGSVELLTEARQWTGSGRPRRAGISSFGISGTNAHVIVEQAPAAVPSDEPATGADDDGVAPVVPWLLSARDRDALRAQAERLLHHLTGDHPAAGGTEARPLDVAYSLATARTAFEHRVAVTGAGRDGLLAALGSVARGEEPATTTGEGLLALLFPGQGSQRLGMGRDLYERFPVFAEAFDAVCAGLDAHLDRPLREVVWGDDEDALNATAYAQAALFALGVGLHRLVASWGVTPDLVAGHSIGEIAAAHVAGVFSLADACALVAARGRLMQALPEGGAMAAVQATEDEVLAHLTDGVSVAAVNGPTSVVVSGTAEGVEKVTEALRERGRRTTALRVSHAFHSPLMEPMLAEFRAVVAGLSPQAPVIPVVSNLTGTTARAEELCSAEYWVRHVREAVRFADGVRALHEAGATRYLELGPDGVACAMARESLPESAVTVAAQRRTVPGEQALVEAVARLHGHGVRVDWPAFFAGRGARRVELPTYAFQRRRFWPAGMMPLGAGAEAAGLAPAGHPLLGGAVELAGTDGHLFTGRLSQGTHGWISDHRVMGAVLVPGTALLELAVHAGGVLGCDVVEELTLAAPLVLPEQGTVQVQVGVGAPDEEGRRGITIHSRPADDSGAPWTSHAEGTLAAGPAQAPATDFDATVWPPEKAEPLDTTGLYERFEDAGFAYGPVFQGLRAAWSRDGEVFAEASLPDGTDGDAFTLHPALFDAGLHATALAGDGGESEGTGGVPFSWNGVSVHAVGASSVRLRLSRTDDGTLAIAVTDTAGTPVASVGSLVTRPLSAGQFGGAGGAGRDSLFQLDWAAAGDPATRDAETPGPVAVLGPDTALLGGGDLLAEAGTEGVTGLADLVTGTGPGEDVPSVVLLPVATAPEAGSGTGDVAAAAHAATARVLETLRDWSAQERFAASRLVVVTRGASDGADPAAAAVWGLVRAAQAENPGRFILLDLEPSATSPLGMSALRAALASGEPQLALREDRLLAPRLVRAVTPAESDAAGWDPEGTVLITGGTGGLGATVARHLVAEHGVRSLLLVSRRGPAAEGAGELAAALEESGAHVTVAACDVGDRTAVDALLAEIPADRPLRAVIHAAGVLDDGVLDSLTPERLAAVLRPKADAAWHLHEATEGLTLDAFVLFSSVAGTLGSAGQANYAAGNAFLDALARHRRDRGLPAVSMAWGPWTRGSGMTGELTEADTARMARAGMPPIDPEQGLALFDAVTGAAEQAPAVLPVRLDLGALRSLGEVPPLFRSLIRTQARRAASDGGAAAAADLTRRLTGLTRTEGEEVLLDLVRGQIATVLGHAGQADIEPARAFQDLGFDSLTSVELRNRLGALTGVRLPATLLFDYPTPGELVAHLYTRVAPAPADGSAVVLAELDKLERAFAGAEVGAELFDQVAGRLEVLRGKWQEMRAEALKGGEKAEESFDFASASDEDMFDMLDNELGLS

SEQ ID NO: 1838 - protein, 450 aa, Burkholderia fungorum LB400
MSANRFDTLALHAGAAPDPTTGARATPIYQTTSFSFRDSDHAAALFNMERAGHVYSRISNPTVAVFEERVAALENGAGAIGTASGQAALHLAIATLMGAGSHIVASSALYGGSHNLLHYTLRRFGIETTFVKPGDLDAWRAALRPNTRLLFGETLGNPGLDVLDIAAVAQIAHEHRVPLLVDSTFTTPYLLKPFEHGADFVYHSATKFLGGHGTTIGGVLVDGGTFDFDASGRFPEFTEPYDGFHGMVFAEESTVAPFLLRARREGLRDFGACLHPQAAWQLLQGIETLPLRMERHVANTRRVVEFLAGHAAVGAVAYPELPTHPDHALAKRLLPRGAGAVFSFDLRGDRAAGRSFIEALSLFSHLANVGDARSLVIHPASTTHFRMDAAALAAAGIAEGTIRLSIGLEDPDDLIDDLKRALKAAQKAGSSSAAHGGASGSAAQPRPESA

SEQ ID NO: 1839 - protein, 195 aa, Glycine max
CKYLLAVRTALVALIAFMPTNPNGALGSLDYKKEERRTLAVKSREAPPKFGTPERQKLIDEIHEYMVSKASEENPRNEEAETHANSLNPESLTAGEVILDQEVDGIVEEQEEVLANANPAGVEASREVQPSVSRYEVLQKSDTRVQNPKPETRVQKPDDRLFTLAAIGLTIAIVVLLLKKFLKSTQHGALFSDGS

SEQ ID NO: 1840 - protein, 499 aa, Brucella suis 1330
MTDRPIMTTSAGAPIPDNQNSLTAGERGPILMQDYQLIEKLSHQNRERIPERAVHAKGWGAYGTLTITGDISRYTKAKVLQPGAQTPMLARFSTVAGELGAADAERDVRGFALKFYTQEGNWDLVGNNTPVFFVRDPLKFPDFIHTQKRHPRTHLRSATAMWDFWSLSPESLHQVTILMSDRGLPTDVRHINGYGSHTYSFWNDAGERYWVKFHFKTMQGHKHWTNAEAEQVIGRTRESTQEDLFSAIENGEFPKWKVQVQIMPELDADKTPYNPFDLTKVWPHADYPPIDIGVMELNRNPENYFTEVENAAFSPSNIVPGIGFSPDKMLQARIFSYADAHRHRLGTHYESIPVNQPKCLVHHYHRDGQMNVYGGIKTGNPDAYYEPNSFNGPVEQPSAKEPPLCISGNADRYNHRIGNDDYSQPRALFNLFDAAQKQRLFSNIAAAMKGVPGFIVERQLGHFKLIHPEYEAGVRKALKDAHGYDANTIALNEKITAAE

SEQ ID NO: 1841 - protein, 484 aa, Capsicum annuum
SSAFNSPFCTTNSGAPVWNNNSSLTVGARGPVLLEDYHLVEKLANFDRERIAERVVHARGASAKGFFEVTHDITHLTCADFLRAPGVQTPVIVRFSTVIHERGSPETLRDPRGFAVKFYTREGNFDLVGNNFPVFFIRDGMKFPDMVHSLKPNPKSHIQENWRVLDFFSHHPESLHMFTFLFDDIGIPQDYRHMDGSGVHTFTLINKAGKSTYVKFHWRPTCGVKSLLEEEAIRVGGANHSHATQDLYDSIAAGNYPEWKLFIQTMDPAHEDRFDFDPLDVTKTWPEDIFPLQPLGRLVLNKNIDNFFNENEQLAFCPSIVVPGVYYSDDKMLQTRIFSYSDTQRYRLGPNYLQLPANAPKCAHHNNHYDGSMNFMHRDEEIDYFPSRYDPVRHAENYPIPTTVCSGKREKCIIQKENNFQQPGERYRSFSADRQERFIRRWVEALSDPRITYEIRSIWISYWSQADKSLGQKLASRLNVRPSI

SEQ ID NO: 1842 - protein, 482 aa, Panicum miliaceum
MAATVAVENLNPKVLKCEYAVRGEIVIHAQHLQQQLQTQPGSLPFDEILYCNIGNPQSLGQQPVTFFREVLALCDHPCLLEKEETKSLFSADAISRAKQILSTIPGRATGAYSHSQGIKGLRDAIAAGIASRDGFPANADDIFVTDGASPGVHMMMQLLIRNEKDGILCPIPQYPLYSASIALHGGTLVPYYLDEKTGWGLEISDLKKQLEDARSKGIDVRALVVINPGNPTGQVLAEDNQCDIVRFCKNEGLVLLADEVYQENIYVDDKKFNSFKKIARSVGYGEDDLPLVSFQSVSKGYYGECGKRGGYMEITGFSAPVREQIYKIASVNLCSNITGQILASLVMNPPKVGDESYAAYKAEKDGILQSLARRAKALEDAFNNLEGISCNKAEGAMYLFPQIHLPKKAIEAAKAANKAPDAFYALRLLESTGIVVVPGSGFGQVPGTWHIRCTILPQEDKIPAVITRFKAFHEAFMAEYRD

SEQ ID NO: 1843 - protein, 492 aa, Capsicum annuum
MDPYKHRPSSAANSPYWTTNSGAPVYNNNSSLTVGARGPILLEDYHLLEKLANFDRERIPERVVHARGASAKGFFEVTHDITRLTCADFLRAPGVQTPVIVRFSTVIHERGSPETLRDPRGFAVKFYTREGNFDLVGNNFPVFFVRDGMKFPDMVHALKPNPKSHIQENWRILDFFSHHPESLHMFSFLFDDLGIPQDYRHMEGSGVNTYTLINKAGKAHYVKFHWKPTCGVKCLLDDEAVKVGGTNHSHATQDLYDSIAAGNYPKWKLFIQTIDPDHEDKFDFDPLDVTKIWPEDILPLQPVGRLVLNKNIDNFFVENEQLAFCPAIIVPGIHYSDDKLLQTRVFSYADTQRHRLGPNYLQLPPNAPKCAHHNNHHEGFMNFMHRDEEVNYFPSRFDPCRHAEQYPIPPRVLNGKRDRCIIQKENNFKQPGERYRSWAPDRQERFICRWVDALSEPRVTHEIRTIWLSYWSQADKSLGQKLASRLNVKPTM

SEQ ID NO: 1844 - protein, 302 aa, Mycobacterium tuberculosis CDC1551
MIALLAPGQGSQTEGMLSPWLQLPGAADQIAAWSKAADLDLARLGTTASTEEITDTAVAQPLIVAATLLAHQELARRCVLAGKDVIVAGHSVGEIAAYAIAGVIAADDAVALAATRGAEMAKACATEPTGMSAVLGGDETEVLSRLEQLDLVPANRNAAGQIVAAGRLTALEKLAEDPPAKARVRALGVAGAFHTEFMAPALDGFAAAAANIATADPTATLLSNRDGKPVTSAAAAMDTLVSQLTQPVRWDLCTATLREHTVTAIVEFPPAGTLSGIAKRELRGVPARAVKSPADLDELANL

SEQ ID NO: 1845 - protein, 663 aa, Mycobacterium tuberculosis CDC1551
  unsure (1)..(663): unsure at all Xaa locations
MTSASWASNPVQRGAANPRQLPRSPQCASLAAIESALSAQSGSSWEVTMLYVVASPDLMTAAATNLAEIGSAISTANGAAALPTVEVVAAAADEVSTQIAALFGAHARSYQTLSTQAAAFHSRFVQALTTAAASYASVEAANASPLQVALDVINAPAQTLLGRPLIGNGADGSTPGQAGGPGGLLYGNGGNGAAGGPNQAGGAGGNAGLIGNGGAGGAGGVGAVGGKGGTGGLLFGNGGAGGQGGLGLAGINGGSGGQGGHGGNAILFGQGGAGGPGGTGAMGVAGTNPTPIGTAAPGSDGVNQIGNGGNTDLTGGAGGDGNAGSTTVNGGNGGTGGAARNSSGGTGNSFGGAGGAGGDGANGGDGGAGGEALTEGGATAVSGAGGKGGNAXASGGAGGNXGKGGFAQATTSVTGGNGGNGGNGHDSNAPGGAGGSGGVGGDGGRGGLLAGNGGTGGAGGNGGTGGAGAPGGAGGAGGKADIANSLGDNATVTGGNGGTGGDGGSALGTGGAGGAGGLGGHGGAGGLLIGNGGAGGAGGLGGAGGAGGAGGEGGAGGAGGEAIPGGASTNSAGGDGGAGGTGGNGGDGGAGGAPGLGGAGGAGGWLIGQSGSTGGGGAGGAGGAGGAGGAGGSGGAGGHGDTTSGKNGSSGTAGFDGNPGQPG

SEQ ID NO: 1846 - protein, 125 aa, Cicer arietinum
PKCAHHNNHHEGFMNFIHRDEEVNYFPSRHDPVRHAERFPTPPAALSGKRERCIRPKENNFKQPGERYRTWAPDRQDRFARRWIEALSDPRVTHEVRSIWISYWSQADRSLGQKIASHLNMRPSI

SEQ ID NO: 1847 - protein, 355 aa, Streptomyces globisporus
MKALVLSGGSGTRLRPISYAMPKQLVPIAGKPVLEYVLDNIRNLDIKEVAIVVGDWAQEIIEAMGDGSRFGLRLTYIRQEQPLGIAHCVKLARDFLDEDDFVLYLGDIMLDGDLSAQAGHFLHTRPAARIVVRQVPDPRAFGVIELDGEGRVLRLVEKPREPRSDLAAVGVYFFTADVHRAVDAISPSRRGELEITDAIQWLLEQGLPVEAGRYTDYWKDTGRVEDVVECNRRMLGRLALQVSGEVDPESELVGAVVVEEGARVTRSRVVGPAVIGAGTVVEDSQIGPYASIGRRCTVRASRLSDSIVLDDASILAVSGLHGSLIGRGARIAPGARGEARHRLVVGDHVQIEIAA

SEQ ID NO: 1848 - protein, 459 aa, Mycobacterium tuberculosis CDC1551
METYDIAIIGTGSGNSILDERYASKRAAICEQGTFGGTCLNVGCIPTKMFVYAAEVAKTIRGASRYGIDAHIDRVRWDDVVSRVFGRIDPIALSGEDYRRCAPNIDVYRTHTRFGPVQADGRYLLRTDAGEEFTAEQVVIAAGSRPVIPPAILASGVDYHTSDTVMRIAELPEHIVIVGSGFIAAEFAHVFSALGVRVTLVIRGSCLLRHCDDTICERFTRIASTKWELRTHRNVVDGQQRGSGVALRLDDGCTINADLLLVATGRVSNADLLDAEQAGVDVEDGRVIVDEYQRTSARGVFALGDVSSPYLLKHVANHEARVVQHNLLCDWEDTQSMIVTDHRYVPAAVFTDPQIAAVGLTENQAVAKGLDISVKIQDYGDVAYGWAMEDTSGIVKLITERGSGRLLGAHIMGYQASSLIQPLIQAMSFGLTAAEMARGQYWIHPALPEVVENALLGLR

SEQ ID NO: 1849 - protein, 366 aa, Rhodospirillum rubrum
MAEIRRIGVLTSGGDCAGLNAVIRAVTHRARRAYGWKVFGILDGTMGLMDRPLRYRELDSEMFSGFDILRAGGTVLGTVNKGDPFAFPMADGSKTDRSLDFVDGFHSLELDALVVVGGDGSMRILKKLCDKGSIGMVGVPKTIDNDVHGTEYAVGFSTATNVVTEALDRLQATAASHHRVMILEVMGRDAGHIAVSAGIAGGADVILIPEIPYTLEGVAKRIREVQQEGRSHALIVVAEGVLTPEGERATVAYAGGQTRYGGISQYLSDRIAQDTGTETRVTILGHVQRGGIPSMRDRLLASAFGVHAVDLVAARKFGRMVAWQDRGVVDVPLEEVCIGPRSLDPNGTLVHAARGLGIYVGEIGAA

SEQ ID NO: 1850 - protein, 377 aa, Ralstonia metallidurans CH34
MRIFKLPDLGEGLQEAEIVNWHVKPGDTIAADQPLLSVETAKAIVEIPSPFAGQVAKLFAQPGDIVHLGAPLVGFEGAGASDDAGTVVGAVKVGTHVVNEGVTRVGAAGIPGGHGIKATPAVRALARKLSVDLSMVTPSGHDGVITATDVQRVATTLADVGAPDVLRGVRRAMAQNMARAQSEVAAATVMDDADLHAWQATGASVTGQDITIRLVRALVAGVRAEPALNAWYEGRTGRRHLLERIDVGIAADLPEGLFVPVLRNVGKRDAADLRAGLDRMRADVVARTIAPEEMRGNTITLSNFGMIAGRYAAPIVVPPTVAILGAGRVRDEVVASGGVPAVHRVMPLSLTFDHRVVTGGEAARFLRAVIEDLERPE

SEQ ID NO: 1851 - protein, 594 aa, Ralstonia eutropha
MSVIEVKVPDIGDFDAVEVIEVLVKAGDTVEVEQSLIVLESDKASMDVPSSAAGKVVEVKVKVGDKVGQGAVICTIEAQQAAAAPAPAQAPAPAQAPAPAAAAPAPAPAAASHSGGADIQCEMLVLGAGPGGYSAAFRAADLGMNTVLVERYSTLGGVCLNVGCIPSKALLHNAAVIDEAKALAAHGILFGEAKIDLDGLRHYKNQVVGKLTGGLAGMAKARKVQVVRGIGNFLDPHHMEVELTEGEGKRSTGKKTVIRFEKAIIAAGSQAVKLPFIPEDPRIVDSTGALELPEVPNKMLVIGGGIIGLEMATVYSTLGADIDVVEMLDGLMNGADRDLVKVWEKKNKDRFGKVMLKTKTVGVEAKPDGIYVKFEGEAAPAEPQRYDLVLVSVGRSPNGKRISAEKAGVAVSERGFINVDKQMRTNVPHIFAIGDIVGQPMLAHKAVHEAHVAAEAAHGEKAYFDAKQIPSVAFTDPEVAWAGLTEDECKEKGIKYSKGVFPWAASGRAIANGRDEGFTKLIFDEETHRVIGGGIVGTHAGDLISEVCLAIEMGADAVDIGKTIHPHPTLGESIGMAAEIYEGTCTDVPPPRKR

SEQ ID NO: 1852 - protein, 138 aa, Hopea dryobalanoides
EKNLPVLLGLLSIWNVSFLGYPARAILPYSQALEKFAPHIQQVSMESNGKGVSIDGVPLPFEAGEIDFGEPGTNGQHSFYQLIHQGRVIPCDFIGSAKSQQPIHLKGEVVSNHDELMSNFFAQPDALAFGKTPEELHK

SEQ ID NO: 1853 - protein, 693 aa, Nicotiana tabacum
MTTSFGAAINIAVADDPNPKLQIHNFSGLKSTSNSLLLSRRLHVFQSFSPSNPSSIVRAVSTPAKPAAVEPKRSKVEIFKEQSNFIRYPLNEEILNDAPNINEAATQLIKFHGSYMQYDRDERGGRSYSFMLRTKNPGGEVPNRLYLVMDDLADQFGIGTLRLTTRQTFQLHGVLKKNLKTVMSTIIKNMGSTLGACGDLNRNVLAPAAPFAKKDYMFAKQTADNIAALLTPQSGFYYDVWVDGEKVMTAEPPEVVKARNDNSHGTNFPDSPEPIYGTQFLPRKFKIAVTVPTDNSVDIFTNDIGVVVVSNEDGEPQGFNIYVGGGMGRTHRMETTGPRLAEPLGYVPKEDILYAVKAIVVTQRENGRRDDRRYSRLKYLLSSWGIEKFRSVTEQYYGKKFQPCRELPEWEFKSYLGWHEQGEGSLFCGLHVDNGRVKGAMKKALREVIEKYNLNVRLTPNQNIILCNIRQAWKRPITTVLAQGGLLQPRYVDPLNLTAMACPAFPLCPLAITEAERGIPDILKRVRAIFERVGLKYSESVVIRITGCPNGCARPYMAELGLVGDGPNSYQIWLGGTPNQTSLAKTFKDKLKVQDLEKVLEPLFFHWRRKRQSKESFGDFTNRMGFEKLGEFVEKWEGIPESSSRYNLKLFADRETYEAMDALASIQDKNAHQLAIEVVRNYVASQQNGKSMD

SEQ ID NO: 1854 - protein, 356 aa, Oryza sativa
MASAAAPTTSSLSLAARRAAAVGPAAASPLRRGGLAAGCQPARSLAFAAAADPRLATHVASRCRQAASSSSRGTRAVATMAKKSVGDLTAADLEGKRVFVRADLNVPLDDNQNITDDTRVRAAIPTIQYLIKNGAKVILSSHLVTKAEDVIGPDVEKLVSELPNGSVLLLENVRFYKEEEKNDPEFAKKLASLADLYVNDAFGTAHRAHASTEGVTKFLKPSVAGFLLQKELDYLVGAVSSPKRPFAAIVGGSKVSSKIGVIESLLEKCDILLLGGGKRKGVSLLLPSDVIIADKFAPDANSQVVPASAIPDGWMGLDIGPDSVASFSSTLETTQTVIWNGPMGVFEFDKFAVGTE

SEQ ID NO: 1855 - protein, 240 aa, Zea mays
  unsure (1)..(240): unsure at all Xaa locations
PGDSIAAGSFPEWTLYVQVMDPDTXEQYDFDPLDDTKTWPEDLLPLRPVGRLVLDRNVDNFFNENEQLAFGPGLVVPGIYYSDDKMLQCRVFAYADTQRYRLGPNYLMLPVNAPRCAHHNNHYDGAMNFMHRDEEVDYYPSRHAPLRQAAPXPTPLPPRPVAGRREKATIRKPNDFKQPGERYRSWDADRQDRFVRRFADSLGHPKVSQELRSIWIDLLAKCDASLGMKIATRLNMKPNM

SEQ ID NO: 1856 - protein, 506 aa, Glycine max
  unsure (1)..(506): unsure at all Xaa locations
MASLSCSANDLAPLFNDTAAANYLCAQFDSISRKLNVTTYAVDNTYLLFSAYLVFAMQLGFAMLCAGSVRAKNTMNIMLTNVLDAAAGGLSYYLFGFAFAFGGPSNGFIGRHFFGLRKFPKDSPPSGDYSFFLYHWAFAIAAAGITSGXSIAERTQFVAYLIYSSFLTGFVYPIVSHWFWSSDGWASATRSHGNVLFGSGVIDFAGSGVVHMVGGIAVLWGALIEGPRIGRFDRSGRSVALRGHSASLVVLGSFLLWFGWYGFNPGSFLTIAKGYGSGGYYGQWSAIGRTAVTTTLAGSTAALTTLFSKWLLAGHWNVIDVCNGLLGGFAAITSGCAVVEPWAAIVCGFVAAWVLIWLNKLAAKVEYDDPLEAAQLHGGCGAWGVFFTGLFAKKVYVEEIYGVGRPFGALMGGGGRLLAAQVIQILVVCGWVTATMAPLFYGLHKMKLLRISRDDETAGMDLTRHGGFAYAYHDDEDGSSRGVGFMLRRIEPAASTTPSPPAAPQV

SEQ ID NO: 1857 - protein, 193 aa, Streptomyces coelicolor A3(2)
MRARPRDPGKIQTAPPSILCMTSAPNTRNDDNLPLDVEIGALQGGAADLSQYAGRVVLVVNVASKCGLTPQYAGLERLHERYAEQGFTVLGVPCNQFMGQEPGSADEIAEFCSATYGVTFPMTGKAEVNGEGRHPLYDRLTGFADAEGHSGDIRWNFEKFLIGRDGKVAARFSPQTEPEAAEVVAAVEERLAG

SEQ ID NO: 1858 - protein, 181 aa, Cicer arietinum
MASSMISSSAVTTVKRASSVPSGAVAPFVGLKSMAGFPVRKVNNDITSIASNGGRVHCMQVWPPIGKKKFETLSYLPPLTEEQLLKEVEYLLRKGWVPCLEFELEKGFVYREHNNSPGYYDGRYWTMWKLPLFGCTEAVQVLKELQEVVKAYPNAFVRIIGFDNVRQVQCISFIAHTPKEF

SEQ ID NO: 1859 - protein, 397 aa, Bordetella parapertussis 12822
MLVHIPTIAMIRSKLPDVGTTIFTVMSRLAIEHKAINLGQGFPDFDPDPELCALVGKAMAAGHNQYPYMPGVAPLREAIAAKVKTLYGHAYDPETEITVTSGATEALMATVLAAVGPGDEVVVIEPCYDSYLPAIRLAGGTAVPVPLRAPTRDDPYYRIDWQRVRDAIGARTRLLMLNFPHNPTGAVLDESDLDALESIVRETGVLLLSDEVYEHIVFDGKPHASLSRRPLLAEHAFVIASFGKTYHTTGWKVGYCCAPRQLSAELRKVHQFMVFTVSSPMQFALAEYMANPKPYLDLPAFYQAKRDRLAAGLANTRFRPLPSPGTFFMLADYSEITKHAEADFARHLTIDHGVTVIPVSAFYQNPAAPESNHHLVRFCFAKQDATLDAAIERLAHV

SEQ ID NO: 1860 - protein, 465 aa, Glycine max
MFFNQKIVLFKSFALMGTSNLLLFFSLMSLCAMAASKVVLIGNNITLSFDDIEANFAPAVKGSGKYGVLYLAEPLDACAELTNKVEQLPNASSPFALVVRGGCSFEEKVRIAQKAGFKAVIVYDNEEGGILVAMAGNSAGIRIHAVFVSKASGEILKKYAGLTNVEIWLIPTFENSAWSIMAISFISLLAMSAVLATCFFVRKHRIRRERPRASLVREFHGMSSRLVKAMPSLVFTSVLEDNCTSRTCAICLEDYCVGEKLRILPCCHKFHAACVDSWLTSWRTFCPVCKRDARTGLTDPPPSESTPLLSSTPASMASSAASMASSALHSARSSLASSSAIQISRAASQTPSVSRNHSIASTPYVQPSLRSSYHQSPSLSISRSSVDLRNASQRSLASHLNSPCSMGYPSLSSLNSRYMSPHIPSPSNASVSYMGSSSHQQHPLRYSESAASFSPFASTHSLPEC

SEQ ID NO: 1861 - protein, 493 aa, Zea mays
MDPYKHRPSSAFNAPYWTTNSGAPVWNNDSSLTVGARGPILLEDYHLVEKLANFDRERIPERVVHARGASAKGFFEVTHDITHLTCADFLRAPGVQTPVIVRFSTVIHERGSPETLRDPRGFAVKFYTREGNWDLVGNNFPVFFIRDGIKFPDMVHALKPNPRTHIQDNWRILDFFSHHPESLHMFSFLFDDVGIPADYRHMDGSGVHTYTLVSRAGTVTYVKFHWRPTCGVRSLMDDEAVAVGGANHSHATKDLTDAIAAGNFPEWTLYIQTMDPEMEDRLDDLDPLDVTKTWPEDAFPLQPVGRLVLNRNIDNFFAENEQLAFCPGLIVPGIYYSDDKLLQTRIFSYSDTQRHRLGPNYLLLPANAPKCAHHNNHYDGSMNFMHRTEEVDYFPSRYDAVRNAPRYPIPTAHIAGRREKTVISKENNFKQPGERYRAMDPARQERFITRWVDALSDPRLTHEIRTIWLSNWSQADRSLGQKLASRLSAKPSM

SEQ ID NO: 1862 - protein, 772 aa, Thermobifida fusca
MSRAPQEDPRQDTPAISAPTRSAAGIPAVINSLRVVSRQSGAARGLATLRDVNQKTGFDCPGCAWPEGKRRHLAEFCENGAKAVAEEATRRAVTPEFFARYSVAELATRSGYWLGQQGRLTHPVFLDKGATHYVPVSWERAFSLIAEELAALDSPDEAVFYTSGRTSNEAAFLYQLFARKFGTNNLPDCSNMCHESSGVALTETLGVGKGSVLLEDLYQADLIIVAGQNPGTNHPRMLSALEKAKRGGTRIITVNPLPEVGLMRFKNPQKARGIVGGGTRLTDLFLQIRLGGDLALFRAWNRMLVEADRDNSGSVLDREFIAEHTHGFDAFVDELCADSDEKFWADVDTATGLPREQITEALEMIQASKRIVVCWAMGLTQHKHSVPTIREVVNFLLLRGNVGRPGAGVCPVRGHSNVQGDRTVGIVEKPKEEFLDALGAEFGFEPPRHHGYDTVRAIRAMRDGKVGVFFAMGGNFVSASPDTLVTEDAMRRCRLTVHVSTKLNRSHVVTGARALILPALARTDRDLSGGKEQFVTVENSMGMVHSSRGSVRPLSDQMRSEVSIVAGLARRVFGPDDPVPWEDFARDYDLIRDRIERVIPGFANYNERARRPGGFLLPHAPRDSRRFPTATGKANFTVNRMTPLTVPEGRLLLQTLRSHDQYNTTVYGLDDRYRGVRGGRRVVLVNPEDAQRLGLADGSYTDIVSEWPDGVERRAAHYLVVYYPTAPGCAAAYYPETNVLVPLDSTAEGSNTPTSKSIVVRFEPDSGPVETG

SEQ ID NO: 1863 - protein, 488 aa, Listeria seeligeri
MTDRRNLTTNQGVPIGDNQNSMTAGLKGPTLLEDYVLIEKLAHFDRERVPERVVHARGAGAHGKFVTKKSMKKYTKAQFLQEEGTETEVFARFSTVIHGQHSPETLRDPRGFSVKFYTEEGNYDFVGNNLPVFFIRDAIKFPDVIHSLKPDPRTNIQDGNRYWDFFSLTPEATTMITYLFSDEGTPASYREIRGSSVHAFKWINEEGKTVYVKLRWVPKAGIVNLSTDQAAQIQAKEFNHASRDLYEAIENGDYPEWDLYVQVLDPKDLDNYDFNPLDATKDWFEDVFPYEHVGTMTLNRNPDNIFAETESVGFNPGVLVPGMLPSEDRLLQGRLFSYSDTQRHRVGPNYLQLPINSPKTPVDNNQRDGQMPFKQQTSSINYEPNSYDTEPKENPAYIEPEQEIRGDISGRLVAEKPNNFGHAKEVWKRYSDAERAALVKNIVDDWEGVREDIKIRNLRNFYQVEPEFAERVAAGTGINLAEHVIDLK

SEQ ID NO: 1864 - protein, 293 aa, Escherichia coli
MKMRKGIILAGGSGTRLYPVTMAVSKQLLPIYDKPMIYYPLSTLMLAGIRDILIISTPQDTPRFQQLLGDGSQWGLNLQYKVQPSPDGLAQAFIIGEEFIGGDDCALVLGDNIFYGHDLPKLMEAAVNKESGATVFAYHVNDPERYGVVEFDKNGTAISLEEKPLEPKSNYAVTGLYFYDNDVVLMAKNLKPSARGELEITDINRIYLEQGRLSVALMGRGYAWLDTGTHQSLIEASNFIATIEERQGLKVSCPEEIAFRKGFIDVEQVRKLAVPLIKNNYGQYLYKMTKDSN

SEQ ID NO: 1865 - protein, 293 aa, Escherichia coli
MKMRKGIILAGGSGTRLYPVTMAVSKQLLPIYDKPMIYYPLSTLMLAGIRDILIISTPQDTPRFQQLLGDGSQWGLNLQYKVQPSPDGLAQAFIIGEEFIGADDCALVLGDNIFYGHDLPKLMEAAVNKESGATVFAYHVNDPERYGVVEFDKNGTAISLEEKPLEPKSNYAVTGLYFYDNDVVQMAKNLKPSARGELEITDINRIYLEQGRLSVALMGRGYAWLDTGTHQSLIEASNFIATIEERQGLKVSCPEEIAFRKGFIDVEQVRKLAVPLIKNNYGQYLYKMTKDSN

SEQ ID NO: 1866 - protein, 318 aa, Glycine max
  unsure (1)..(318): unsure at all Xaa locations
SSSILYEYSIKEYTETEQFDLGLTWKHPIVWNSPHAPLYASRFSMGSGNERGAIAISLKLIQGLVAINNVKERCKFQANVLQIVPXWYVKVXYYHTLQLVVDERXSSXTDFVERMRVSPSEDKVSPGVMEMVLQFPCEMKSAALNCGFLHIDEYPPDVNQGFDIPSAIISFPDFHAGLQLSNKSRSKSPLLSKLQERSPVLSYTEVLLVPLTTPDFSMPYNVITITCTVFALYFGSLLNVLQRRVGEEERLLKDKVANKAVFLRRVLSKLSAKLRGRSLELTPPAPSWSSSSSFVTPKLILRVLVVAGIAFAWQYYSQ

SEQ ID NO: 1867 - protein, 547 aa, Arabidopsis thaliana
MNAPIIDPLQGDFPEVIEEYLEHGVIKCVAFNHRGSLLAAGCADGGCVIWDFETRGIAKEIRDNDCSAAITSVSWSKYGHRLLVSAADKSLTLWDVSTGEKIARTILQQTPLQARLNPGLSSPSLCLACPLSSAPMIVDFDIDCTTLLPVSVPEMPDVLAPPQRSKCPESNPPFSPAAACFNKCGDLVYIGNSKGEILIVDYKSVRVLALVSASGAAPVKNIVFSRNGQYLLTNSHDRTIRIYENLLPAKNVLKSLEDLGKNIDGLDGIEKMKTVGSKCLTLFREFQDSVTKMHWKAPCFSGDGEWVVGGSACKGEHKIYIWDRAGHLVKILEGPKEALIDLAWHPVHPIIVSVSLAGLVYIWAKDYTENWSAFAPDFKELEENEEYVEREDEFDLIPETEKVKVLDVNEDEEVDIDTVEKDAFSDSDMSVEELRYLPAEPIPDTNDQQDNLVESIKLIEGQISASPASEEAGQNGHHASSPQAEEMGETRGKRKRKPSEKAMELQAEKAKPLKGSGKTVRAKNRAAFDQETDDSINGGDDDDDAYY

SEQ ID NO: 1868 - protein, 265 aa, Burkholderia fungorum LB400
MLPIVDKPLIQYAVEEAMAAGITEMIFVTGRSKRAIEDHFDKSYEIEAELQARGKDKLLELVRSIKPSHVDCFYVRQPEALGLGHAVLCAEKLVGDNPFAVILADDLLYGTPPVMAQMIEVFDHYHSSVIGVEEIPAQETKSYGIVDGKEWEDSIIKMSGIVEKPEPNVAPSNLGVVGRYVLKPRIFEHLRALKPGAGGELQLTDAIQSLLADEQVLAYKYHGTRFDCGSKLGYLKATVEFALRHPEVAADFEEYLRTRSPVLEG

SEQ ID NO: 1869 - protein, 361 aa, Mycobacterium tuberculosis CDC1551
MSQTVRGVIARQKGEPVELVNIVVPDPGPGEAVVDVTACGVCHTDLTYREGGINDEYPFLLGHEAAGIIEAVGPGVTAVEPGDFVILNWRAVCGQCRACKRGRPRYCFDTFNAEQKMTLTDGTELTAALGIGAFADKTLVHSGQCTKVDPAADPAVAGLLGCGVMAGLGAAINTGGVTRDDTVAVIGCGGVGDAAIAGAALVGAKRIIAVDTDDTKLDWARTFGATHTVNAREVDVVQAIGGLTDGFGADVVIDAVGRPETYQQAFYARDLAGTVVLVGVPTPDMRLDMPLVDFFSHGGALKSSWYGDCLPESDFPTLIDLYLQGRLPLQRFVSERIGLEDVEEAFHKMHGGKVLRSVVML

SEQ ID NO: 1870 - protein, 564 aa, Zea mays
MAAAAVTSNGGAVAANGPAPGRLASVYSEVQTNRLLHALPLPSVLRSNFSVVVGPASSAAGNPDEIAKLFPNLFGQPSASLVPSAEPAATRPLKIGVVLSGGQAPGGHNVICGIFDYLQERAKGSTLYGFKGGPAGIMKCKYVELTSDFVYPYRNQGGFDMICSGRDKIETPEQFKQAEDTANKLDLDGLVVIGGDDSNTNACLLGEYFRSRNMKTRVIGCPKTIDGDLKCKEVPTSFGFDTACKIYSEMIGNVMTDARSTGKYYHFVRLMGRAASHITLECALQTHPNAALIGEEVAAKKQTLKNVTNYITDIICKRADLGYNYGVILIPEGLIDFIPEVQKLIAELNEILAHDVVDEAGAWKSKLQAESRELFEFLPKTIQEQLMLERDPHGNVQVAKIETEKMLISMVETELEKRKAEGRYSAHFRGQAHFFGYEGRCGLPTNFDSNYCYALGYGAGALLQSGKTGLISSVGNLAAPVEEWTVGGTALTSLMDVERRHGKFKPVIKKAMVELDAAPFKKYASLRDEWAIKNRYISPGPIQFSGPGSDDSNHTLMLELGAEL

SEQ ID NO: 1871 - protein, 827 aa, Magnetospirillum magnetotacticum
MSLTRRDFIKANAVPATAAAAGLATPAIAQPAKANIRWDKGVCRFCGTGCSVLVGVQDGRVVATQGDPDSPVNRGLNCIKGYFLSKIMYGEDRLTRPLLRMKDGKFDKNGEFQPISWDQAFDIMAEKWKEQLKKPDGVTRVGMFGSGQWTIWEGYAASKLYKAGFRSNNLDPNARHCMASAVAGFMRTFGIDEPMGCYDDIEQTDAFVLWGSNMAEMHPILWSRVTDRRLTHEGCKVAVLSTFEHRSFELADIPMVFTPQTDLAILNYICHYIISKNAYNKEFIDKHVNFKKGATDIGYGLRPTHALEKDQANAATPDKADPMTFDEFKAFVAEYTVEKVSKLSGVPADKLEALAKLYADPKVKVVSFWTMGFNQHTRGTWVNNMIYNVHLLMGKISEPGNSPFSLTGQPSACGTAREVGTFAHRLPADMVVMNDKHREIAERCWKLPAGTINPKIGYHAVLQHRMLKDGKLNAYWVMCTNNMQTAPNMNEEGYPGYRNPANFIVVSDPYPTVTALAADLILPTAMWMEKEGAYGNAERRTQFWAPEGQGSGRGRSDLWQIMEFSKRFKIEEVWPEELIAKKPELRGKTLFEVLYKNGQVDKFPLTELQAGFENDEAKAFGFYPQKGLFEEYASFGRGHAHDLAPFESYHKARGLRWPVVDGKETLWRFREGYDPYVKAGEGVKFYGKPDGKAWIFALPYAPAAESPDKDFDLWLSTGRVLEHWHSGSMTRRVPELHKSVPNAVLYMHPNDAAKRNLRNGDVVKVASRRGEVTTRIDTRGRNKPPEGLVFMPFFDESQLVNKLTLDATCPISKETDYKKCAVKVSKA

SEQ ID NO: 1872 - protein, 394 aa, Rhodospirillum rubrum
MKAANSLFSGLGTTIFSVMSHLAQEYGAINLGQGFPEGLEPADVIAAAARSLAAGPHQYPPMMGLPALRQALAAHEKRFYDLDIDWQTEVMVTSGATEALADALFGLIEPGDEVVLIEPLYDSYLPIIRRAGGIPRLVRLEPPRWSLPREALAAAFSPRTKLILVNSPMNPCAKVFSADEMAFIGDLAIAHDAYIVCDEVYEHLVFDGQSHRPLMAQPGLRERCVRIGSAGKTFSLTNWKVGYVIAAPEVLDPIAKTHQYITFTTPIPLQQAVAEGLAKDDAYFAGLAHDMAARRDRLGAGLRRIGFEVLDCAGTYFLTADFRPLGFAGDDLAFCRHITCEAGVTAVPVSAFYQPGQGGIPTSFARFCFAKRDDALDEAVARLERHFAGGRRNA

SEQ ID NO: 1873 - protein, 187 aa, Triticum aestivum
  unsure (1)..(187): unsure at all Xaa locations
MAPTVMASSATSVAPFQGLKSTAGLPVSRRSNGASLGSVSNGGRIRCMQVWPIXEGIKNSKTLSYLPPLNTXGLLKQVDYLDPAPXVPCLQFNKVXXLPVEHNASPGVLTMAGYWTMWXLPNVXGCTGRTQVINEVEXVKKXIPDPYVRIIXSTNAQGACVNLPLNQRARSKAKSSQHIKCNFARAL

SEQ ID NO: 1874 - protein, 387 aa, Rubrobacter xylanophilus DSM 9941
MGQAGGPTAVMNASLLGFLEGCPPGAEIWGVLDGFRGLVEGDLARLPPGCVDRRLYLSPGAWLGAGRRPLGEGDPERCVERLAARGVRGLAMVGGNGTMWACARIEEAARRAGYGLAVVGIPKTVDNDLAGTDHAPGFPSAARYVAAVVRDIGADLEAMRGFESVRVLETMGRNAGWLALSAGYLRREPSDPPHLIYVPERPFDPDAFLGDVEAAVRAHGFVVAVVSEGLVRRPREEGLRRPVIGGVAPELARRVEEALGLPSRGELLGMGQRSFSLAASPLDREEARALGNRAARMLLEGRSGLMPALRRLPGRRYRVAVEEVPFGRVAGAERPLPPRWVVPPQEVPQGFRGWLAPLVGEDLAPHPPPLVRRLRGAAAGREGRSES

SEQ ID NO: 1875 - protein, 444 aa, Arabidopsis thaliana
MATITVVKARQIFDSRGNPTVEVDIHTSNGIKVTAAVPSGASTGIYEALELRDGGSDYLGKGVSKAVGNVNNIIGPALIGKDPTQQTAIDNFMVHELDGTQNEWGWCKQKLGANAILAVSLAVCKAGAVVSGIPLYKHIANLAGNPKIVLPVPAFNVINGGSHAGNKLAMQEFMILPVGAASFKEAMKMGVEVYHHLKSVIKKKYGQDATNVGDEGGFAPNIQENKEGLELLKTAIEKAGYTGKVVIGMDVAASEFYSEDKTYDLNFKEENNNGSQKISGDALKDLYKSFVAEYPIVSIEDPFDQDDWEHYAKMTTECGTEVQIVGDDLLVTNPKRVAKAIAEKSCNALLLKVNQIGSVTESIEAVKMSKKAGWGVMTSHRSGETEDTFIADLAVGLSTGQIKTGAPCRSERLAKYNQLLRIEEELGSEAIYAGVNFRKPVEPY

SEQ ID NO: 1876 - protein, 312 aa, Photorhabdus luminescens subsp. laumondii TTO1
MKVAVLGAAGGIGQALALLLKTQLPSGSELSLYDIAPVTPGVAVDLSHIPTEVKIKGFAGEDATPALEGANVVLISAGVARKPGMDRSDLFNINAGIVRNLVEQVAKTCPKSLIGIITNPVNTTVAIAAEVLKKAGVYDKNRLFGVTTLDVIRSNTFVAELKGKKPQEIEVPVIGGHSGVTILPLLSQIPGVNFTDGELAALTKRIQNAGTEVVEAKAGGGSATLSMGQAAARLGLSLVRGLQGESDVVECAYVEGDGKYARFFAQPVRLGKNGVEERLNIGELSDFEQKALEGMLDVLRKDIELGEKFINN

SEQ ID NO: 1877 - protein, 124 aa, Streptomyces avermitilis MA-4680
MSIEKPEIDFPGGEPPADLEIKDIWEGDGPVAKAGNTVSVHYVGVAFSTGEEFDASWNRGTPLQFQLGAGQVIKGWDQGVQGMKVGGRRQLTIPAHLAYGDRGAGGGRIAPGETLIFVCDLVAV

SEQ ID NO: 1878 - protein, 327 aa, Chlamydophila caviae GPIC
MSSQFEQLKLLSVLVCDTGDPELVKTSGSQDATTNPSLILKVAQEPKYQELLTEAIAWGIRQNGDDIQTLTFVLDKIQVNFGLEILKCIPGRVSLEIDARLSFNTEAMIQRAIFLSELFAATGGDKKRLLVKIPGTWEGIRAVEVLEKQGIACNVTLIFNLIQAIAAAKANATLISPFVGRIYDWWIAAYGDEGYSIDADPGVASVSNIYTYYKKFDIPTQIMAASFRSKEQVLALAGCDLLTVSPKLLDELKKDQSPVAKKLDVAAAKKLDVQPVELTESVFRFLMNEDAMATEKLAEGIRIFSGDTQILEAAVTEFIKQIAAQDA

SEQ ID NO: 1879 - protein, 244 aa, Gloeobacter violaceus
MYRPFLEHLQQKLQSSFDLQSLTIPAGLDYRISERGRESTTIRSWCYTCSELRKIRYTYIDGGEHAQVFNSVIYPAHRYDLPLLGIDLLAFGKKKNLIVLDFQPLFRDKAYLARYIEPMRILRERYGDVAQDVEMKFYDANQYFSKYLLFARTDAETVAGRVFTAYCDYLDLYWQLLASAAPLGDAQDIRRIVKAQKDYDQYSADRDPASGLFSSYFGHEWAERFLYEFLFEDAVPLAVGQPGR

SEQ ID NO: 1880 - protein, 272 aa, Pseudomonas aeruginosa UCBPP-PA14
MSSTIHPLPSFGLGTFRLTGQVVVDSVRSALELGYRAIDTAQIYGNEADIGRAIAESGVPRSELFLTTKVWVDNYACEKLLASLRESLEKLRTDRLDLVLIHWPAPGNGVELAEYMAALAEAKSLGLTRRIGVSNFNIELTRQAIAAVGAGEISTNQIELSPYLQNRALTAYLEEQGIAVTSYMTLAYGKVLKDPALAGIAARHRATVAQVALAWAMQLGYAVIPSSTRRENLASNLLARDLRLDAEDMARIAGLERNGREVSPQGLAPAWD

SEQ ID NO: 1881 - protein, 212 aa, Ralstonia eutropha JMP134
MNRRQTAFAASVRRAMFATALALAAASAALLPHPARAADKPAAMPAAAPAGNCPASLNFQFPRLQDEAPQNLCQYAGKVVLVVNTASYCGFTPQYEGLEALYSKYRDRGLVVLGFPSNDFSQEPGSSKEIADFCYNTYGVKFPMLGKSHVRGGDVNPMYALLAKETGTAPKWNFYKYLIDRSGNVVGSYNSMTKPDDKQFVAKIEQLLSSPR

SEQ ID NO: 1882 - protein, 414 aa, Oryza sativa
GRVMMALAVDVSRFEGVPMAPPDPILGVSEAFKADQNDLKLNLGVGAYRTEELQPYVLNVVKKAETLMLEKGENKEYLPIEGLAAFNKATAELLFGADNPVLKQGRVATLQSLSGTGSLRLAAAFIQRYFPEAKVLISSPTWGNHKNIFNDAKVPWSEYRYYDPKTVGLDFEGMIADIQAAPDGSFVLLHGCAHNPTGIDPTPEQWEKIADVIQEKKHMPFFDVAYQGFASGSLDEDASSVRLFVQRGLEVFVAQSYSKNLGLYAERIGAINVVCSTPEVANRVKSQLKRLARPMYSNPPIHGARIVANVVGDPTMFGEWKQEMEEMAGRIKNVRQKLYDSLSAKDDSGKDWSFILRQIGMFSYTGLNKTQSDNMTDKWHIYMTKDGRISLAGLSLAKCEYLADAIIDSFHNVS

SEQ ID NO: 1883 - protein, 322 aa, Fragaria x ananassa
MAAAPSESIPSVNKAWVYSEYGKTSDVLKFDPSVAVPEVKEDQVLIKVVAASLNPVDFKRALGYFKDTDSPLPTVPGYDVAGVVVKVGSQVTKFKVGDEVYGDLNEAALVNPTRFGSLAEYTAADERVLAHKPKDLSFIEAASLPLAIETAYEGLERAELSAGKSILVLGGAGGVGTHIIQLAKHVFGASKVAATASTKKLDFLRTLGVDLAIDYTKENIEDLPEKFDVVYDAVGETDKAVKAVKEGGKVVTIVGPATPPAIHFVLTSKGSVLEKLKPYLESGKVKPVLDPTSPYPFTKLVEAFGYLESSRATGKVVVYPIP

SEQ ID NO: 1884 - protein, 492 aa, Campylobacter jejuni subsp. jejuni NCTC 11168
MKQKCVLIITDGIGYNKNSKFNAFEAAKKPSYEKLFKEVPNSLLKTSGLAVGLPEGQMGNSEVGHMCIGSGRIIYQNLVRINKAIENKELEKNENLKKLLAKCKRVHIIGLYSDGGVHSMDTHFKAMLEICAKNGNEVFAHAITDGRDVSPKSGLNFIKDLKEFCENLGVHFATLCGRFYAMDRDKRWDRVKEYYECLLGKAYKVPNLLEYLQKSYDENVTDEFIKAAQNENYKGMREEDGIIFINFRNDRMKQLVEVLNSKDFKEFEREKIFENLLTMSVYDDKFKLPVLFEKEKIENTLAQVISKAGLSQLHTAETEKYAHVTFFFNGGKEELLENETRVLIPSPKVKTYDEKPQMSAFEVCDAVKKGIEKGEDFIVVNFANGDMVGHTGDFNATIKAVEAVDTCLGEILECAKKHDYAFIITSDHGNCEAMQDEKGNLLTNHTTFDVFVFVQARGVSKIKDNMGLSNIAASVLKILDLEIPKEMNEALF

SEQ ID NO: 1885 - protein, 470 aa, Lactobacillus plantarum WCFS1
MDVSESTNKKSNSHTGFLWLATFIAAMGSLLFGYDTGIVNGSLEFMAVKGQLDLTAFQQGIVSSGLTLGAAFGAIIGGPFADKIGRKKILTILGIIFSVGALGCAFATNITILIVFRFILGLAVGSASANVPVYIAEIAPTELRGKMVTTAQVMIVSGQFVAFGVNAALTPLGAQNAAIWRWMLGLGTIPGIILWIGMYLIPESPRWLVSQGKMDKALGVLRRIRSAASVESEMKEIQDKDKADKELNAEQATFKELISKRWVVQILITGAMLGIIQQFAGINSIMYYGGKIIQESGFDTTVAAILNAGNGFLSIVGAVLGMFTIDWLGRRKLEFAGLTICGITLVSAGVIHTVAPNASWAGITIVVLVYLYIIFFQGTLGPVTWLINSEIFPQRYRGIGTGITIFVLWIGNFIVGLLSPVLLEWNMSNTFYIFAVCCVLGIIFVALRVPETKGVPLEEIEKYFRTKYDK

SEQ ID NO: 1886 - protein, 243 aa, Cucumis sativus
DDVGIPINYRHMEGFGVQAYSLINKSGKARLVKFHWKPTCGVKSMLEEEAIRIGGTNHSHATQDLYESIAAGNFPEWRLYIQTIDYDDQNNFDFEPLDTTIEWPEDVIPLQPVGRLVLNKNIDNFFAENEMLAFSMSLVPGIHYSDDKMLQARSFAYADTQRHRLGPNYLQLPVNAPKCPHHNNHHEGFMNFMHRDEEVNYFPSRYDPCRHAEKFPMPPNVLSGKRERCVIPKENHNFKHAGS

SEQ ID NO: 1887 - protein, 488 aa, Lactobacillus plantarum WCFS1
MSAEKSISSDHVPLSDPALKTINRNAGRNLNHIAFISTLGGLLFGVDTGVINGAIGYMATPAELNLSPNNEGLVTSGITLGAAFGAVFAGHLSDRIGRKRLLKYLALLFFVCTLACSLAPNALFMIISRVLLGLAVGGASVIVPTYLSEISTPEIRGRLVTQNELMIVTGQLLAFIVNAILGNWFGHISNIWRYMIGFGMIPAVALFFGMMVVPESPRWLVMVNQLDNAFDSLRKIRSHPETCNEEITQIQDTLNQESEIKQATFKDLSTPWIRRLVFIGIGLGVMQQFIGINIMMYYGTTILTNSGFAHNAALIANIGNGLVSVIATFIGMSIMNRVNRRSMLIAGIIGTTTSLILIVGVSAFLSQSPLLPILVVLCTMMFLGFFQGFISPLVWLLLSEIFPQNLRGLGMGVSTFFLWFANFLVGYFFPILLSAVGMTWTFLIFVFFNILSFIFAYKYAPETRGKSLELIQMEFKYGDTTGINPEDK

SEQ ID NO: 1888 - protein, 144 aa, Arabidopsis thaliana
MDYRESTGESQSKYKGIRRRKWGKWVSEIRVPGTRDRLWLGSFSTAEGAAVAHDVAFFCLHQPDSLESLNFPHLLNPSLVSRTSPRSIQQAASNAGMAIDAGIVHSTSVNSGCGDTTTYYENGADQVEPLNISVYDYLGGHDHV

SEQ ID NO: 1889 - protein, 915 aa, Ralstonia metallidurans CH34
MNLSDIAVVATTPTKTISTTCPYCGVGCGVRATVRADGLVDIAGDADHASNAGRLCVKGSALGETLDLNGRLLHPQVRDADGSLRRVDWDEALDKVARGFTEIIARHGPDAVALYVSGQLLTEDYYVANKLMKGFIGTANIDTNSRLCMSSAVAGHKRAFGEDLVPCSYEDLELADLVILVGSNTAWCHPILFQRLTRAKEARPEMKIVAIDPRRTATCELADLHLPLRAGTDVRLFNGLLSYLARHGHGDDVFVADHTAGLNDALAVADADGADIAAVARACKLAPQDVQAFYELFAATTKVVTAFSMGVNQSSAGTDKVNSIINCHLLTGRIGRPGMGPFSLTGQPNAMGGREVGGLANMLAAHMELGDPRHRDIVQDFWHSPAMADKPGLKAVDLFQAIEQGKVKAVWVIATNPVVSLPDADQARRALARCELVVTSDIVTRTDTNDAAHILLPALGWGEKDGTVTNSERRISRQRAFLPAPGEARADWDILCDVARRMGFAGFDYAGQHEIFDEHARLSAWRNGDDSGDDAAHAPRMFDIGGLAGMDQAAYDAMLPVQWPLPVMASSGKQRLFENARFAFADGRARFVATAARAPVHATDDEFPLILNTGRVRDQWHTMTRTGKAARLSDHLPEPFVDMHPQDALLCGVGEGKLARVTSRWGMMIGRVRFGGGIPRGSVFVPIHWNDQFSSDARVGAVVNPAVDPVSGEPEFKHTPVRVEEFRVSWHGFVLSRKVLPADALTWWTRIQGKHFHRHEFAGRDVITDRAAWARERLGAQAPDADWLEFEDRAAGVYHAGYIVDDRLEACVYLSTRPDLPSRAWLSQLFGQARLEDSDRIGLLLGQPLEKTADAGPTVCSCFGVGRNTICDAVRQHDLKTPAEITACVKAGGNCGSCVPELRKLLVEIRVVEAA

SEQ ID NO: 1890 - protein, 521 aa, Eremothecium gossypii
MAIGMLRRNSSGTAVSVLQGRVLRTRRLSSVKDGSRFVPAEPMTLADVNENVVKAKYAVRGKIPTRAEELERRLEEHPGSLPFSKIIQANIGNPQQLGQKPLTFYRQVISLMQNPQLLEMPAEWLQQAFKADVVVRARRMLQDAGGSVGAYSASQGVKGYRRTVAQFIERRDGIPANPDNVYLTAGASSAVSCLLSTFCKGPETGVLIPIPQYPLYTATITQNNAVALPYYLNEADGWSTNPDEMERVILDSKKRNIAPKCLVVINPGNPTGSVLSVKDMEAILTLAAKYGIVVIADEVYQDNVFGDAKFHSMRKVLKNLQLREPTLYKNVQLASLHSISKGLSGECGQRGGYMELIGFREELRKVFVKLASISLCPVVTGQALVDLMVGPPSQGDPSYEQYTQETRSIYHELEERSQLLWKTFCSLEGIECNMPQGALYLFPKLHLPQKAIEAAQKLGIPADELYCSELLDETGICTVPGTGFGQIPGTYHVRTTFLPPGTKWIESWKDFHKKFYDKYRD

SEQ ID NO: 1891 - protein, 439 aa, Photorhabdus luminescens subsp. laumondii TTO1
MRHCNSLIEKIDMKRQFSVAASVVASCVPSLSQAAEGVVDKADNAFMMICTVLVLFMTIPGIALFYGGLLRSKNVLSLMAQVMVSFALVCVLWVIYGYSLAFEPGNGFFGGFSQVMLKNLAFTDLSGNFYQLIHVAFQGSFACITVALIIGALGERIRFPALLVFTVLWLTFSYLPMAHMVWGGGVLSQDGALDFAGGTVVHINAAVAGLVGAYLLGKRTGFGKEAFKPHNLPMVFTGTTVLYIGWFGFNAGSASAANEIAALAFLNTIVATAAAILSWVFAEWLFRNKPSLLGACSGCIAGLVGITPAAGMVGVGGALIIGLIAGFTGLWGVVALKRWLRVDDVCDVFGIHGVCGIVGCLLTGVFTAKSLGGIGYAEGITMLGQVGIQAFSILVCVIWSVVVAFIAFKIADLLVGLRVTVEIEREGLDINSHGESAYN

SEQ ID NO: 1892 - protein, 417 aa, Neurospora crassa
MTASSDHPITTPPRAPSPVHGFGTLAVHAGSPHDPATGAVIEAISLSTTFAQTAVGKPVGEFEYSRSSNPNRANFEKMVAALEHAKYALAYSSGSATTANILQSLAAGSHVISVSDVYGGTHRYFTQVAKAHGVKVTFTPEIEVDIRDHITDATKLVWIETPSNPTLRLVDIRAVATAAHERGILVVVDNTFLSPYVQNPLDHGADIVVHSVTKYINGHSDVVMGVAAFNSDELYARLSFLQNAIGAVPSAFDSWLAHRGAKTLHLRAREATTNATAIAHALEASPLVISVNYPGLESHPHRAIALKQHRNGMGGGMLSFRIHGGHAAAEKFCQYTKIFTLAESLGGVESLCEIPSSMTHAGIPKAQREAVGIFDDLVRISCGVEDAEDLKADVLQALERAVADAANGVSNGVNGTH

SEQ ID NO: 1893 - protein, 138 aa, Hopea odorata
EKNIPVLLGLLSIWNVSFLGHPARAILPYSQALEKFAPHIQQVSMESNGKGVSIDGMPLPFEAGEIDFGEPGTNGQHSFYQLIHQGRVIPCDFIGSAKSQQPIHLKGEVVSNHDELMSNFFAQPDALAFGKTPEELHE

SEQ ID NO: 1894 - protein, 84 aa, Arabidopsis lyrata subsp. petraea
ANVDEAVAKLKSKGIDAYGIVCHVSNAQHRRNLVEKTVQKYGKIDIVVCNAAANPSTDPILSSKEAVLDKLWEINVKSSILLLQ

SEQ ID NO: 1895 - protein, 492 aa, Mycobacterium avium subsp. paratuberculosis str. k10
MARLLLPPRCGGHRRRARLGVVVTRIVILGGGPAGYEAALVAASSHPDSTHVTVIDSEGIGGAAVLDDCVPSKTFIASTWLRTELRRAPRLGFEIDIDDAKISLPQIHARVKQLATEQSADITEQLLGVGVHVVAGRGELIDPTPGLARHRIKATAPDGSSSEYEADVVLIATGASPRILPSAQPDGERILTWRQLYNLDALPDHLIVVGSGVTGAEFVHAYTELGVPVTVVASRDRVLPYEDADAALVLEEAFSERGVQLVKNARAQSVTRTPDGVLVTLTDGRTVAGSHALMTIGSVPNTAGLGLERVGIELGRGGYLTVDRVSRTSVPGIYAAGDCTGLLPLASVAAMQGRIAMYHALGEGVSPIRLRTVAATVFTRPEIAAVGVPQTMIDDGSVSARTIMLPLRTNARAKMSGLRQGFVKVFCRKSTGVVIGGVVVAPIASELILPIAVAVQNRITVNELAQTLAVYPSLSGSITEAARRLMAHDDLD

SEQ ID NO: 1896 - protein, 466 aa, Oryza sativa (japonica cultivar-group)
MNLAGFLATPATATATRHEMPLNPSSSASFLLSSLRRSLVASLRKASPAAAAALSPMASASTVAAENGAAKAAAEKQQQQPVQVAKRLEKFKTTIFTQMSMLAIKHGAINLGQGFPNFDGPDFVKEAAIQAINAGKNQYARGYGVPELNSAIAERFLKDSGLQVDPEKEVTVTSGCTEAIAATILGLINPGDEVILFAPFYDSYEATLSMAGANVKAITLRPPDFSVPLEELKAAVSKNTRAIMINTPHNPTGKMFTREELEFIATLCKENDVLLFADEVYDKLAFEADHISMASIPGMYERTVTMNSLGKTFSLTGWKIGWAIAPPHLTWGVRQAHSFLTFATCTPMQAAAAAALRAPDSYYEELRRDYGAKKALLVNGLKDAGFIVYPSSGTYFVMVDHTPFGFDNDIEFCEYLIREVGVVAIPPSVFYLNPEDGKNLVRFTFCKDDETLRAAVERMKTKLRKK

SEQ ID NO: 1897 - protein, 493 aa, Agrobacterium tumefaciens str. C58 (Cereon)
MTIATPLKAQPKASHFIDGDYVEDNTGTPFESIFPATGEMIAKLHAATPAIVERAIASAKRAQKEWAAMSPMARGRILKRAADIMRERNDALSTLETLDTGKPIQETIVADPTSGADAFEFFGGIAPSALNGDYIPLGGDFAYTKRVPLGVCVGIGAWNYPQQIACWKAAPALVAGNAMVFKPSENTPLGALKIAEILIEAGLPKGLFNVIQGDRDTGPLLVNHPDVAKVSLTGSVPTGRKVAAAAAGHLKHVTMELGGKSPMIVFDDADIESAVGGAMLGNFYSSGQVCSNGTRVFVQKKAKARFLENLKRRTEAMILGDPLDYATHLGPLVSKAQQEKVLSYIEKGKAEGATLITGGGIPNNVAGEGAYVQPTVFADVTDDMTIAREEIFGPVMCVLDFDDEDEVLARANATEFGLAGGVFTADLARAHRVVDGLEAGTLWINTYNLCPVEIPFGGSKQSGFGRENSAAALEHYSELKTVYVSTGKVDAPY

SEQ ID NO: 1898 - protein, 526 aa, Mycobacterium avium subsp. paratuberculosis str. k10
MTPEEWIAHDPDPRTAAELAACGAAELAARFARPLRFGTAGLRGPVRAGPDAMNVAVVSRASWALAQVLKRRGPAGARVIVGRDARHGSAVFATVAAEVLAAQGFSVLLLPGPAPTPVVAFAVRHTGAAAGVQITASHNPPTDNGYKVYDGGGIQIVSPTDHQIEAAMADAPPADEIRRTPVPPAHTDLVQRYIERAAGVRRGTGSVRVALTALHGVGGTVAVDALHRAGFGRIHTVASQFAPDPDFPTVVFPNPEEPGATDALLTLAADVDADVAIALDPDADRCAVGIPDASGWRMLSGDETGWLLGDYLLSQPQRADRPVVASTVVSSRMLSAIAARHGAVHVETLTGFKWLARADAEVPGGTLVYAYEEAIGHCVDPAAVRDKDGISAAVLVCDLVAGLIARGGSVSGRLDELARRHGVHDVAAVSRRVGTDGAAELMRRLRTSPPETLAGFGVALTDITDALIFTGGDDDTSVRLVVRPSGTEPKVKCYLEIRCAPSDDLASSRRRARALRELLVATVRSW

SEQ ID NO: 1899 - protein, 280 aa, Prochlorococcus marinus str. MIT 9313
MASNHSMPCSLGVIGLGRMAQALVLPLLKQGELAPQQLVAVVGCGASVERLADQLPIGLRLKAADDPTAAEAWMAPIQLLAVKPQQLDQIAASAARLKKTADGPHLLISVLAGVSLARLQQAFPAHACVRAVPNTPALVGAGLTGLSWGEGVTPEQRLAVERLFLPVSEVLELPESQLDAFLALTSSGPAYVALVAEAMADGAVAAGLPRSLAHHLAHRTLAGTAALLKQQKLHPAELKDMVTSPGGTTIAALRKLERAGVRSALIEAVVAAAQRSRELA

SEQ ID NO: 1900 - protein, 416 aa, Staphylococcus aureus subsp. aureus MW2
MNLNDTIFMFLCTLLVWLMTPGLSLFYGGLVQSKNALNTVMQSMAAIVLVTFVWITVGFTISFGNGNLWFGNWEYTFLNHVGFATQEDISPHIPFALFMLFQMMFCTIAISILSGSIAEKMKFIPYLLFVVIWTALVYSPVAHWVWGGGWINKLGVLDFAGGTVVHITSGVSGLVLAIMIGKGNKHSESTPHNLIITLIGGIFVWIGWYGFNVGSAFTFDKIAMLAFTNTVISASAGSIGWLILEYIFKKTTSLLGLLLGALAGLVVITPAAGYVTYLSATIMALIGGICCYIVINYIKVKLKYHDALDAFGIHGVGGIIGAALTAVFQSKKANPDIENGFIYTGDIHIILVQILCVTAVVIFSIVMTFIIAKVIKLITPLSVTEQETNIGLDKIVHGEHAYFEGELNRFNKHIRY

SEQ ID NO: 1901 - protein, 796 aa, Helicobacter pylori 26695
MSISRRSILTKIPIALASANVLKAVGVFEKVESIPHATHFGPFIAKVQNGVIKDIVPQKSDYNPTMMLKAMVDRVYSDSRVKYPCVRKSFLENKKNHKELRGREEFVRVSWDVALDLAAKKLKEIPKENIYNASYGGWGHAGSLHRCHHLAWRFFNTTLGGAIGTDGEYSNGAAARINPMIVGDMEVYSQQTTHEEMIKNCKVYVMWGADLLKCNRIDYFVPNHVNDSYYPKYKRAGIKFISIDPIYTETAQAFSAEWIPIRPNTDVALMLGMMHYLYTSNQYDKAFIAKYTDGFDKFLPYLLGESDNAPKTLEWASQITGVSAEKIKELADLFVSKRTFLAGNWAMQRAQYGEQPDWALIVLASMIGQVGLSGGGFGFSMHYGGNAQASSGARIVPMISQGHNSVKSVIPASRVSEAILNPDKEIDFMGKKLKLPKIKMIYNCGADLLGHETDTNELIRALRTLDCVIVHEPWWTPTAKFADIVFASTSTVERDDIAFGGSYSKNVVYAMRKVVEPVYESKDDYEIFRQLALRIGGNETEQKFTESKSYMEWIKGLYEKSDGPTLKSFDQFWRDGFVEFEIPENARKFVRHAKFRQDPINNKLDTESGKIQIFSQKCADFKLADFKGHPTWFEPAEWLGSKMAEIYPFHLISPHPKYRVNSQLDNTWVRNVYKIQGREPVMINELDANKLGIRHGEIVEVFNARGRLLAGAFVTKNIRQGVLSIQKGAWYDPEDERVRNPRCNAGHVNTLTSLRPTSSMTQAISANTALVNIRRLRRYELVKPYHSISTPSIIGA

SEQ ID NO: 1902 - protein, 1012 aa, Desulfovibrio gigas
  unsure (1)..(1012): unsure at all Xaa locations
MLIKRRAFLKLTAAGATLSAFGGLGVDLAPAKAQAATMALKTVDAKQTTSVCCYCSVGCGLIVHTDKKTNRAINVEGDPDHPINEGSLCAKGASTWQLAENERRPANPLYRAPGSDQWEEKSWDWMLDTIAERVAKTREATFVTKNAKGQVVNRCDGIASVGSAAMDNEECWIYQAWLRSLGLFYIEHQARIXHSATVAALAESYGRGAMTNHWIDLKNSDVILMMGSNPAENHPISFKWVMRAKDKGATLIHVDPRYTRTSTKCDLYAPLRSGSDIAFLNGMTKYILEKELYFKDYVVNYTNASFIVGEGFAFEEGLFAGYNKETRKYDKSKWGFERDENGNPKRDETLKHPRCVFQIMKKHYERYDLDKISAICGTPKELILKVYDAYCATGKPDKAGTIMYAMGWTQHTVGVQNIRAMSINQLLLGNIGVAGGGVNALRGEANVQGSTDHGLLMHIYPGYLGTARASIPTYEEYTKKFTPVSKDPQSANWWSNFPKYSASYIKSMWPDADLNEAYGYLPKGEDGKDYSWLTLFDDMFQGKIKGFFAWGQNPACSGANSNKTREALTKLDWMVNVNIFDNETGSFWRGPDMDPKKIKTEVFFLPCAVAIEKEGSISNSGRWMQWRYVGPEPRKNAIPDGDLIVELAKRVQKLLAKTPGKLAAPVTKLKTDYWVNDHGHFDPHKIAKLINGFALKDFKVGDVEYKAGQQIATFGHLQADGSTTSGCWIYTGSYTEKGNMAARRDKTQTDMQAKIGLYPGWTWAWPVNRRIIYNRASVDLNGKPYAPEKAVVEWNAAEKKWVGDVPDGPWPPQADKEKGKRAFIMKPEGYAYLYGPGREDGPLPEYYEPMECPVIEHPFSKTLHNPTALHFATEEKAVCDPRYPFICSTYRVTEHWQTGLMTRNTPWLLEAEPQMFCEMSEELATLRGIKNGDKVILESVRGKLWAKAIITKRIKPFAIQGQQVHMVGIPWHYGWSFPKNGGDAANILTPSVGDPNTGIPETKAFMVNVTKA

SEQ ID NO: 1903 - protein, 195 aa, Zea mays subsp. mexicana
APLDKVCVLSCGISTGLGASINVAKPPKGSTVAVFGLGAVGLAAAEGARIAGASRIIGVDLNPSRFEEARKFGCTEFVNPKDHNKPVQEVLAEMTNGGVDRSVECTGNINAMIQAFECVHDGWGVAVLVGVPHKDAEFKTHPMNFLNERTLKGTFFGNHKPRTDLPNVVELYMKKELEVEKFITHSVPFAEINKA

SEQ ID NO: 1904 - protein, 448 aa, Corynebacterium glutamicum ATCC 13032
MPESILGRMDTKLGAELGTEFDLIVVGFGKAGKTIAMKRSAAGDKVALIEQSPQMYGGTCINVGCIPTKKLLFETATGKDFPDAVVARDQLIGKLNAKNLAMATDKGVTVIDGKATFTASHEITVTSGSDTLVLYAPTIVINTGSTPVIPNVPGTDNPHVFDSTGIQHISPLPKHLAIIGGGPIGLEFATLFSGQGSKVTIIDRGELPLKNFDREVAELAKTDLEARGITFLNNAELTGFSGDLTIALKDHDLLADAALLAIGRRPATDGLGLEQAGIKTGTRGEVLVDAHLRTNIDGIFAVGDVNGGPQFTYVSYDDHRIVLDQLAGTGKKSTAHRLIPTTTFIEPPLSTIGDNTEGENVVVKKALIADMPIVPRPEIINQPHGMVKFFVDKQSDALLGATLYCADSQELINTVALAMRHGVTASELGDGIYTHPATSEIFNQLLGS

SEQ ID NO: 1905 - protein, 554 aa, Corynebacterium efficiens YS-314
MAHERAGQLAQPEDLIDIAEVVTAYFTRIPDVENPDQQVAFGTSGHRGSSLDSAFNEHHILATTQAIVDFRNQRSSNWVGPIFIGRDTHALSEPAMISALEVLLANDVEVLVDAAGGYTPTPAVSHAILRHNKDVRWGTAGPSYPLADGIVITPSHNPPRDGGFKYNPTNGGPADADATDWIADRANELLRGGLADVKRVPVNGVLDERAGRYDFKGTYIEDLPNVINIEAIREAGVRIGADPMGGASVDYWGAIAETHGLDLTVVNPHVDATFRFMTLDSDGKIRMDCSSPHAMASLIANRDKFDVATGNDADADRHGIVTPDAGLMNPNHYLAVAIDYLFANRPGWSENTAVGKTLVSSSMIDRVVASLGRTLVEVPVGFKWFVPGLISGEIGFGGEESAGASFLRMDGTTWSTDKDGIILNLLAAEIIAVTGKTPSQRYAELAEQYGAPAYARTDAEANREQKAILKALSPEQVTATELAGEPITAKLTEAPGNNAAIGGLKVTTENAWFAARPSGTEDKYKIYAESFKGEEHLRQVQEEAQALVSQVLGQ

SEQ ID NO: 1906 - protein, 553 aa, Neurospora crassa
MKPFLGLRGQPLNLAVGAVAGCDFLLFGYDQGVMGGILTLPEFLGYFEQINPDAPGLTPHESSMRSTYQGISVASYNLGCFIGAIITIFIGNPWGRKKIILLGTSIMIVGAILQASATTLGHFIIGRIITGIGNGGNTSTVPTWQSETSKAHKRGKMVMIEGSLVTAGIMLSYWIDLGLSFAPGSVAWRFPLAFQIIFCILILIFIPFLPESPRWLVFKGRDAEAKEILAALNDVELDDPIVDTEFHFIHDTVVEMSKGSFKDLFTMDKDRNFHRTLLAYLNQVFQQISGINLITYYAAVIYSGLGMSDFLARLLAALNGTEYFIASWPAVFLVERVGRRKLMLFGAIGQAATMAILAGVNSRPDDKPYQIAGIVFLFVFNTVFAVGWLGMSWLYPAEIVPLRIRAPANALSTSANWIFNFMVVMITPVAFNKIKYQTYIIFAVINAFIVPVVYFFYPETACRSLEEMDMIFHKVDGWKGYFTVVHQAKVEPKWYDKDGQRIGGADFEKTAGYQSHSIPESSGFEKPTKAHVESPRADDGITSSSSDGGNRES

SEQ ID NO: 1907 - protein, 375 aa, Brucella suis 1330
MKFKAAVLDRHGVERPYNQTKPLVIREIELREPKADEVLVKLAASGLCHSDLSVINGDRSRQIPMVLGHEAAGVVEKIGEGVTDLVPGDHVVCVFVPNCGHCQPCAEGRPALCEPGAAANGKGEMLSGGLRLFCDDGDVYHHCGVSAYAEYAVMSRYSIIRIEKDIPLHIAALMGCAVLTGTGSIFNTGLVKPGSRVAIAGLGGVGLAAVMGAVAAGATEIIALDMFDDKLALAEQLGATKTFNVQSEGVVEAVKEYTKGGVDAAFEYAGSGAALAMCYALTKRGGEVVTAGLPNPKNMLSIPAVSLVAEEKSIRGSYLGSGVPTRDIPLFLDLYRKGKLPVEKLLTHRIKLEEINEGFERLAAGKAIRQVVEFN

SEQ ID NO: 1908 - protein, 150 aa, Triticum aestivum
  unsure (1)..(150): unsure at all Xaa locations
RAPTRPLVYIEQSFDKHDWEHSEXTTLELCEDARDDLLMXDPERIKRAVNEYTCDALTLKASQVGTVTEAIEAVKQAKDAHWGVMVSHRSGDTDDSFIADLAVGAAAGQIKAGAPCRGECLTKYNQLLRIEEEFGSEGVYAGENWRTTAS

SEQ ID NO: 1909 - protein, 234 aa, Arabidopsis thaliana
MVSPENANWICDLIDADYGSFTIQGPGFSWPVQQPIGVSSNSSAGVDGSAGNSEASKEPGSKKRGRCESSSATSSKACREKQRRDRLNDKFMELGAILEPGNPPKTDKAAILVDAVRMVTQLRGEAQKLKDSNSSLQDKIKELKTEKNELRDEKQRLKTEKEKLEQQLKAINAPQPSFFPAPPMMPTAFASAQGQAPGNKMVPIISYPGVAMWQFMPPASVDTSQDHVLRPPVA

SEQ ID NO: 1910 - protein, 147 aa, Oryza sativa (japonica cultivar-group)
MASKRIQKELKDLQKDPPTSCSAGPVGEDMFHWQATIMGPSDSPYAGGVFLVTIHFPPDYPFKPPKVAFRTKVFHPNINSNGSICLDILKDQWSPALTISKVLLSICSLLTDPNPDDPLVPEIAHMYKTDRHKYENTARTWTQRYAM

SEQ ID NO: 1911 - protein, 339 aa, Magnaporthe grisea 70-15
MAEEKKTMRAWQLSGPGDVAKTLQLNDAAPYPSQPLKKGQVLTQVKAASINPADYKFPAVPVVGRLMVSAGKIPGMDCAGVVVKAGPDSAYKVGDRVLGRVDPRGSQGTLAEYTILEHEGSAKIADNVTFEEAAGANTAALTGLQPIAANIKEGSDAKVFINGGAGGTGTYAIQIAKQLGCHVTATCSTAKAQFCKDLGADEIIDYKTSDVVAELKKKGQVFDLAVDLVGFSPGNLYTGSPDYLRPEAKYIAVGGAANSAVVTSMVKGLMLPGFLGGGKRKMEFYMTSNNHNDLSRVSEWLANGKIKTVTHKTFPFEQVKEAFAELKTGRAAGKIIITL

SEQ ID NO: 1912 - protein, 453 aa, Treponema denticola ATCC 35405
MYDLIVLGGGPGGYVAAIKAGRAGLKTALIEKNRLGGTCLNKGCIPTKYLLHTAEVFGSFAENDLGLSGENLKYDIKAIYEKKNAVVDKLVGGIEKLIENAGVDFYNGEGKITSKSSVSVNGKELEFKNLIIATGSSVFAPPIAGIETAMTSDDILGKEPVDFKSVIIIGGGVIGIEFATVYANLGKEVTIVELEKTILPPFDRDIAMQQAIVLKKRGVKIINGAMVTKIEKTGCTFTLKEKEESITADAVIVCIGRIAEIKDIGLDSAGIEYDKRGIITDACMKTNVEGIYAIGDAVKGNVMLAHNAENQGHLVVENIVNNTKHEKQDVIPSCVYSTPEIAGVGLSEKEAEAKGITVKIGKVPMGSNGKSVLSGLDVGFIKVLFNEEDRIVGCQMMCDSATDMIGAIGTLVTNKAKRENILKSMYPHPTVVEAFYEAVEDVEKSATHMIYKK

SEQ ID NO: 1913 - protein, 316 aa, Buchnera aphidicola str. Sg (Schizaphis graminum)
MNQLNALKQFTTIVADTSDIESICKYKPQDATTNPSLILKAVSSSVNKRFIDQAIEYARKKGGSYNYKIVNASDKILVDLGVEILKHIPGYISSEVDARLSFNKEKCILKAKKIIDMYEEKGISRNRVLIKLAATWECIKAAEELKKNNIACNLTLLFSFAQARACAESNVFLISPFVGRIYDWYLSQNLILKNPADQDPGVLSVCKIYDFYKKYNYKTIIMGASFRNVQQILSLSGCDRLTISPVLLKELESSNKELNRKLCPPTSFLNPPVPLTEAEFRWEHNQDEMAVQKLSEGIRNFGKDQLSLEKIFSKLI

SEQ ID NO: 1914 - protein, 439 aa, Prochlorococcus marinus str. MIT 9313
MPALSSTMTEGKIVEWLKQPGDKVGRGESVLVVESDKADMDVESFQDGYLAAVLMPAGCSAPVGETIGLIVESEAEIAAVQANAPAAPASDPAPLKTAAKVVDDPAPASTPAPVVESPPVAAPPPVASQAVDTDKRIVASPRAKKLAAQMGVDLAKLRGSGPHGRIQAEDVQLAAGQPISVPQLAEGNASFATTHATSAGVAHAVSSPVGQSFGAPGETAAFNNLQQAVNRNMEASLAFPCFRVGYTITTDQLDAFYKQVKPKGVTMTALLAKAVALTLVRHPQVNAAYSTAGMVYPEQVNVAVAVAMDDGGLITPVLQNADRTDLYEMSRQWADLVKRSRSKQLQPEEYSTGTFTLSNLGMFGVDRFDAILPPGTGAILAVAASRPAVVAGKDGSIAVKRQMQVNLTADHRVIYGADGAAFLKDLAELIETRVESLAL

SEQ ID NO: 1915 - protein, 275 aa, Enterobacter cloacae
IGQALALLLKTQLPSGSELSLYDIAPVTPGVAVDLSHIPTAVKIKGFSGEDARPALQGADVVLISAGVARKPGMDRSDLFNVNAGIVKNLVQQIAEICPKACIGIITNPVNTTVAIAAEVLKKAGVYDKNKLFGVTTLDIIRSNTFVAELKGKQPTEVEVPVIGGHSGVTILPLLSQIPGVSFTEQEVADLTKRIQNAGTEVVEAKAGGGSATLSMGQAAARFGLSLVRALQGEKGVVECAYVEGDGEHARFFSQPLLLGKNGIEERKSIGTLSA

SEQ ID NO: 1916 - protein, 544 aa, Rhodospirillum rubrum
MTVTVLEVPTTPFAGQKPGTSGLRKKVGVFRQPHYLENFVQAVFDSLDGFQGQTLVVGGDGRFHNREAVQTILKMAAANGFGRVLVGRDGLLSTPAASCVIRAHKAFGGIILSASHNPGGPEGDFGIKYNIGAGGPAPEKITDAIFAATASLSRYRTLENAPEVDLGRIGETDLGGMRVVVIDPVADYAALMETLFDMEAIRRLFRDGFTMCFDAMHAVTGPYAHAILEGRLGAPAGTVINGTPLEDFGGGHPDPNLTYAKDLADLMMGDRAPDFGAASDGDGDRNMILGRGVFVNPSDSLAVLAANAELIPGYRGRMTGVARSMPTSRAVDRVAAKRGWECHETPTGWKFFGTLLDAGRATLCGEESFGTGSDHVREKDGLWAVLAWLNIIAARAQTVRQILADHWGNYGRTFYSRHDHEGLDAAKAEALMADLRAAPLLGQTLGGRKVALHDDFAYTDPIDGSTSQGQGIRIEFEDGARIVVRLSGTGTEGATLRLYLERFEPDPAAHDQDAQVALADLIATIRDLTRLKDRFGSEDPTVIT

SEQ ID NO: 1917 - protein, 275 aa, Escherichia sp. Souza-57
IGQALALLLKTQLPAGSELSLYDIAPVTPGVAVDLSHIPTAVKIKGFSGEDARPALEGADVVLISAGVARKPGMDRSDLFNVNAGIVKNLIQQVATTCPKACIGIITNPVNTTVAIAAEVLKKAGVYDKNKLFGVTTLDIIRSNTFVAELKGKQPTELEVPVIGGHSGVTILPLLSQIPGVSFTEQEVADLTKRIQNAGTEVVEAKAGGGSATLSMGQAAARFGLSLVRALQGEQGVVECAYVEGDGEHARFFSQPLLLGKNGIEERKSIGTLSA

SEQ ID NO: 1918 - protein, 1016 aa, Escherichia coli O157:H7 EDL933
  unsure (1)..(1016): unsure at all Xaa locations
MQVSRRQFFKICAGGMAGTTAAALGFAPSVALAETRQYKLLRTRETRNTCTYCSVGCGLLMYSLGDGAKNAKASIFHIEGDPDHPVNRGALCPKXAGLVDFIHSESRLKFPEYRAPGSDKWQQISWEEAFDRIAKLMKEDRDANYIAQNAEGVTVNRWLSTGMLCASASSNETGYLTQKFSRALGMLAVDNQARVXHGPTVASLAPTFGRGAMTNHWVDIKNANLVVVMGGNAAEAHPVGFRWAMEAKIHNGAKLIVIDPRFTRTAAVADYYAPIRSGTDIAFLSGVLLYLLNNEKFNREYTEAYTNASLIVREDYGFEDGLFTGYDAEKRKYDKSSWTYELDENGFAKRDTTLQHPRCVWNLLKQHVSRYTPDVVENICGTPKDAFXKVCEYIAETSAHDKTASFLYALGWTQHSVGAQNIRTMAMIQLLLGNMGMAGGGVNALRGHSNIQGLTDLGLLSQSLPGYMTLPSEKQTDLQTYLTANTPKPLLEGQENYWGNYPKFFVSMMKAFFGDKATAENSWGFDWLPKWDKGYDVLQYFEMMKEGKVNGYICQGFNPVASFPNKNKVISCLSKLKFLVTIDPLNTETSNFWQNHGELNEVDSSKIQTEVFRLPSTCFAEENGSIVNSGRWLQWHWKGADAPGIALTDGEILSGIFLRLRKMYAEQGGANPDQVLNMTWNYAIPHEPKSEEVAMESNGKALADITDPATGAVIVKKGQQLSSFAQLRDDGTTSCGCWIFAGSWTPEGNQMARRDNADPSGLGNTLGWAWAWPLNRRILYNRASADPQGNPWDPKRQLLKWDGTKWTGWDIPDYSAAPPGSGVGPFIMQQEGMGRLFALDKMAEGPFPEHYEPFETPLGTNPLHPNVISNPAARIFKDDAEALGKADKFPYVGTTYRLTEHFHYWTKHALLNAILQPEQFVEIGESLANKLGIAQGDTVKVSSNRGYIKAKAVVTKRIRTLKANGKDIDTIGIPIHWGYEGVAKKGFIANTLTPFVGDANTQTPEFKSFLVNVEKV

SEQ ID NO: 1919 - protein, 278 aa, Rhodospirillum rubrum
MGTRFLPATKTMAKEMLPVVDKPLIQYAVEEAAAAGIDHFIFITGRGKSVLMDHFDHMPELEALLKERGKTDVLENLLGSMPSPGKVFSTRQQQPLGLGHAVWCARAFIGDEPFAVLLPDDLVLADTPCIKQLIDAHAQTGGNVVAVEDVPRERTNKYGILDVVEDNGTLARAKGLVEKPDSDKAPSTLAIIGRYVLDPGIFDLLENQNRGAGGEIQLTDAMNAQIKDVPFHGLRYEGARYDCGDKVGFLQANIAFALERPDMRDAVKAVLADFAKTI

SEQ ID NO: 1920 - protein, 389 aa, Prochlorococcus marinus str. MIT 9313
MAPAQNDQQQEVAGISTRAIHHGESFAAETGAVMPPIFTSSTFAHGNPQGFDYTRSGNPNFRILESVLAAVESCQFATVFASGVSAITAIASTLQAGDLVLCEENLYGCTVRLFEQVFSRFGVQTAWLDFTNPSALDAIAVQKPAMIWLESPTNPLLKVIDLAAVCDAAAAEKIPVVVDNTFATALLQQPLQLGATLSLTSTTKYINGHSDALGGVVCSDDPQWQQKMVFAQKALGLQPSPFDAWLITRGIKTLPLRLERHIANAAAIADQLASHPRMHWVRYPLRSDHPQQAVARKQMSGGGAIVTVSLDADQSQTYAFCKSLRYFTMAESLGGVESLVCHPATMTHASVDPDVKRKLGIDDGLVRFSVGCEDLADLSRDLDQALKQL

SEQ ID NO: 1921 - protein, 469 aa, Agrobacterium tumefaciens str. C58
MSAVAFMGVRSVMNEVSKPMSNLAAIDAAHHLHPFSDMGKLNAAGTRIIERAEGVFIYDSTGKKYLDAFAGLWCVNIGYGRREIADVVQRQMNELPYYNAFFGTTTPPATLLAQKIASRAGPKMNHVFFTNSGSEATDTWFRMARVYWKALGHPTKTRVIARRNGYHGSTVAGASLGGMKWMHEQGNLPIEGIAHIGQPYWYAEGGDLSPAEFGLKVARELDAKIDELGEENVAAFVAEPIQGAGGVIVPPETYWPEIARICKARNILLVSDEVICGFGRLGSWFGYQHFGVEPDLAPVAKGLSSGYLPIGGVIVSDRVAEVMLSEVGDFNHGFTYSGHPVCAAAALENLRIIEDEGLVERVRDDIGPYFSEGWKSLADHELVGEAVNVGLMGGLQLTADKATRRRFAKPDDIGTAVRNHCLANGLVMRATGDRMLASPALTVSRSEVDEIIETLRQGLNHLRDTREHF

SEQ ID NO: 1922 - protein, 204 aa, Clostridium perfringens str. 13
MKKFILASNNAHKVKEIKEILKDFNLNILSLNEAGIDIDVEEDGKTFEENSFKKANEIRKYLLSKGESDFIVMADDSGLEVDYLNGAPGIYSARYAGEHGNDSKNNEKLLEELKNVKDDERKANFICVIVAVTDKGEKIVAEGKSYGLILEALSGNEGFGYDPLFFVPEYKKTFAEMTSDEKNAISHRGRALEKLKDNLKGILK

SEQ ID NO: 1923 - protein, 689 aa, Rhodospirillum rubrum
MGALPSRSVCPHDCASVCPVELELTEGGKLARLRGSRVNSYTEGVICAKVARYDQRLHHPERLMEPLLRVGPKGSGQFRPISWDEALDRAAEGLRAAAAQWGAEAVWPYYYAGTMGLVQRDGINRLRHVLGYSQTEETICIGFSDPGWKAGIGGKRGVDAREMVQSDLVIFWGCNAVHTQVQLMNWATKARRMRGAPLVVVDPYRNATAEKADIHLMPRPGTDGALACAVMHVMFAEGLADRAYMAAHTDDPRALEAHLESRTPAWAAAITGLEAAEIIDFARLYGRTKRSYLRLGYGFTRQRNGSAAMHAVSCLPAVSGAWAHPGGGALYSGSGLFPLDTTLIEGKDVADPTVRKINQISFGRALTGDAEALAGGPPVKALLIQNTNPMVVCPETDRVRAGMAREDLFTVVHEQFMTETAAMADIVLPATMFLEHDDIYKAGGHTYLQVAKAVMPAPGQCRSNHAVICALAERLGARHPGFSLSAWALIEATLAASKLPPAGEILESGGLDGVPADFNDAHFLNGFPNASGRFRFRAEWEGPMASQMPALPDHLALIEEADARYPFRLVAAPARNFLNSTFSETPGSIGAEGRPQVLIRPDEAAALGILDGALVHLTSRRGEITIHARLFEGLPKGVVVVESLWPNAAFPGGKGINTLTGADPGPPLGGGAFHDNAVAIRPYDHGKLC

SEQ ID NO: 1924 - protein, 176 aa, Triticum aestivum
  unsure (1)..(176): unsure at all Xaa locations
MAPTVMASSATSVAPFQGLKSTAGLPVSRRSNGASLGSVSNGGRIRCMQVWPIEGIKKFETLSYLPPLSTEALLKQVDYLIRSKWVPCLEFSKVGFIFREHNASPGYYDGRYWTMWKLPMFGCXTDATQVINEVEEVKKEYPDAYVRIIGFDNMRQVQCVSFIAFKPPGCEESGKA

SEQ ID NO: 1925 - protein, 468 aa, Chromobacterium violaceum ATCC 12472
MKTPPQSSCPFHAVGRPPTPPRSSAGRWPPGPESGLTGWGLLKLMSRDLMGTLAGWQREFGDLVHVRTWPEHQVIVSDPQLARELLVNQADALQRWERALTVYRRVHGHSVLIAEGQVWREKRQALQPDFTRKSVQAFSPSIVEAARRAFEQWPARHAAWPIESELTSVTMEVILRMMFSSGVGSEAQQAEEAVHTLMVASTEELWRPASLPDWVPWQRKRRRARLLMNGLIERHLQARLAMPQDAWPEDLLSRLLRLHLQQPQSWPLQAVRDECKTAFLAGHETVATSLTWWAWCMASHPEIQERAREEALAALSGGGQADPAALQYVSQTLLETMRLYPAVPLLMSRRALKPVTLGDWTFPAKTVFMVPMQLMQHDERWFPEPRSYRPERFGPDAARPQQGAYLPFGGGPRVCLGQHLAMAEMALVAAQLLLRYRLSAPEGAEPPRPVFHVSQRPSQPLTLGIARI

SEQ ID NO: 1926 - protein, 314 aa, Glycine max
  unsure (1)..(314): unsure at all Xaa locations
MDFNKEQKKTIDQSILLCCKFFVSESRNNATLNAIERVARSNPETVIVNMFHDRSYNRARYDLVSYVLHDCTGNPIYSPLHQTVIAMAEATFNAINLEFHEGAHPRLGALDDIIFHPLGHASLDEAAWLAKAVAADIGNRFSVPVFLYAAAHPTGKEVDAIRRELGYYRPNSRGSQWXGWAMPETLPLSPDEGPNVVSRAKGITVIGARPWITFYNVPILCTDVSVARRIPRKVSARGGGLPPVQTIAVVHEDSTEIACMLLDPKLVGADRVQNRVEMQAAEEGLDVEQGYFTDLSPEMFVEKYMKLINNANKS

SEQ ID NO: 1927 - protein, 231 aa, Magnolia praecocissima
ENKINRQVTFSKRRNGLLKKAYELSVLCDAEVALIVFSSRGKLYEFGSAGINKTLERYQRCCYTFHDANITDRDTQGWYQEVSKLNAKCDSLQRSQRHLLGEDLGPLSVKELQKLERQLESALTQTRQRKTQIMLEHMEALREKERQLGDINKELKNKLEAKGQGAFRAMQASWESGPLVGNNGFPMHPSQSAAIECEPTLQIGYHSFAAPEANIPRTVVAESNFMHGWIL

SEQ ID NO: 1928 - protein, 286 aa, Desulfovibrio desulfuricans G20
  unsure (1)..(286): unsure at all Xaa locations
MLPHKRIFIVKGSHLQSFFPYTSLXXXXXXXXXXXXXXXXXXXXXXXXXXXXXXXXXLIVSGGSDVFPELYGQQPQQKKKTGILPPRHLLKRVAGSVILPVFLFLLRRLLSLKQAPRHDRPRDALEMSLITQAETLGMPVLGICRGMQLINVVRGGSLHQSIADFYEDVRHPHTVLPHKRIFIVKGSHLQSFFPYTSLKVNALHHQAVDRLGTGLSVAARDEAGVTQAIIDEKKPFFVGVQWHPEYMPQHNSQRSLFTCLVRHARNYGRYKENHETPAPDGKQDNR

SEQ ID NO: 1929 - protein, 248 aa, Magnolia praecocissima
  unsure (1)..(248): unsure at all Xaa locations
NRQVTFCKRRNGLLKKAYELSVLCDAEVALIIFSSRGKLYGFGSAGTNKTPERYQRCCYTPQDVVVSDRETQGWYQEVSRLKAKYESLQRSQRHLLGEDLGPLSVKELQHLERQLEVALSQARQRKTQIMIEQMEELRKKERQLGDINKQLKIKLEAEGQGPFRCIQGSWESGAMVGNNNFSMNAPQAAPMECEPTLQIGYHHFVPPEANIPRSVLAXXTSSRGGSFEPFKQNKQTDSNNMIGMNFIL

SEQ ID NO: 1930 - protein, 946 aa, Mycobacterium bovis AF2122/97
MLMVERGSLLPSGGFTEPNPAIPFTELGLRVVDELQEWPVVAGRPRRAGVSSFGFGGTNAHVIVEEAGSVGADTVSGRADVGGSGGGVVAWVISGKTASALAAQAGRLGRYVRARPALDVVDVGYSLVSTRSVFDHRAVVVGQTRDELLAGLAGVVAGRPEAGVVCGVGKPAGKTAFVFAGQGSQWLGMGSELYAAYPVFAEALDAVVDELDRHLRYPLRDVIWGHDQDLLNTTEFAQPALFAVEVALYRLLMSWGVRPGLVLGHSVGELAAAHVAGALCLPDAAMLVAARGRLMQALPAGGAMFAVQAREDEVAPMLGHDVSIAAVNGPASVVISGAHDAVSAIADRLRGQGRRVHRLAVSHAFHSALMEPMIAEFTAVAAELSVGLPTIPVISNVTGQLVADDFASADYWARHIRAVVRFGDSVRSAHCAGASRFIEVGPGGGLTSLIEASLADAQIVSVPTLRKDRPEPVSVMTAAAQGFVSGMGLDWASVFSGYRPKRVELPTYAFQHQKFWLAPAPSVSDPTAAGQIGASDGGAELLASSGFAARLAGRSADEQLAAAIEVVCEHAAAVLGRDGAAGLDAGQAFADSGFNSLSAVELRNRLTAVTAVTLPATAIFDHPTPTELAQYLITQIDGHGSSAAAAANPAERIDALTDLFLQACDAGRDADGWKMVALASNTRERMSSPVRNNVSKNVALLADGISDVVVICIPTLTVLSDQREYRDIANAMTGRHSVYSLTLPGFDSSDALPQNADMIVETVSNAIIDVVGGSCRFVLSGYSSGGVLAYALCSHLSVKHQRNPLGVALIDTYLPSQIANPSMNEGFSPNDTGKGLSREVIRVARMLNRLTATRLTAAATYAAIFQAWEPGRSMAPVLNIVAKDRIATVENLREERINRWRTAAAEAAYSVAEVPGDHFGVMSTSSEAIATEIHDWISGLVRGPHP

SEQ ID NO: 1931 - protein, 138 aa, Shorea laevis
EKNIHVLLGLLSMWNVSFLGYPARAILPYSQALEKFAPHIQQVSMESNGKGVSIDGVPLPYEAGEIDFGEPGTNGQHSFYQLIHQGRVIPCDFIGSAKSQQPIHLKGEVVSNHDELMSNFFAQPDALAFGKTPEELRK

SEQ ID NO: 1932 - protein, 450 aa, Mycobacterium avium subsp. paratuberculosis str. k10
MARGSRRGLLVGLTAASVGVIYGYDLSIIAGAQLFVTEDFGLSTRQQELLTTMAVIGQIGGALFAGVLANAIGRQRSVLLILSGYAVFALLAAFSVGLPMLLTARLLLGLTIGVTVVVVPVYVAESAPTAVRGALLTAYQLAIVSGLIVGYLSGYLLADTHSWRWMLGLACVPAVLLLPLVFRMPDTARWYLLKGRVDDARRALLRVEPVARVDDELAEIDRAVSEEAASLPAMLAEMVRSPYRRATVFVVVLGFLIQITGINAIIYYSPRIFEAMGFTGNFALLALPALVQVAGLVAVGTALLLVDRVGRRPILLCGTAMMIVADVVLVAVFGRGPGGVIAGFAGVLLFIFGYTMGFGSLGWVYASESFPSRLRSIGSSTMLTSNLVANAIVAAVFLTLLHSLGGAGTFAVFAVLAVVAFAFVHRYAPETKGRQLEDIRHFWENGGRWD

SEQ ID NO: 1933 - protein, 560 aa, Arabis gemmifera
MASSTASISDTEAWKDLKGHVEDIKKTHLRDLMTDANRCQSMMMEFDGLLLDYSRQRATVETVDKLLNLAKAAQLTEKISRMFNGEHINSTENRSVLHVALRAPKDAVIKADGKNVVPEVWNVLDKIKEFSEKIRSGSWVGATGKPLKDVIAIGIGGSFLGPLFVHTALQTDPEALESAKGRQLRFLANIDPVDVARNINGLNPETTLVVVVSKTFTTAETMLNARTLREWITAALGASAVAKHMVAVSTNLALVEKFGIDPNNAFAFWDWVGGRYSVCSAVGVLPLSLQYGFSVVEKFLKGASSIDQHFQSTPIEKNIPVLLGLLSVWNVSFLGYPARAILPYSQALEKFAPHIQQVSMESNGKGVSIDGLPLPFETGEIDFGEPGTNGQHSFYQLIHQGRVIPCDFIGIVKSQQPVYLKGEVVSNHDELMSNFFAQPDALAYGKTPEQLQKENVSENLIPHKTFSGNRPSLSLLLPELTAYNVGQLLAIYEHRVAVQGFVWGINSFDQWGVELGRVLATHVRKQLHSSRTQGTTLEGFNYSTTTLLIRYLETSSEPQM

SEQ ID NO: 1934 - protein, 275 aa, Escherichia sp. Souza-207
IGQALALLLKTQLPSGSELSLYDIAPVTPGVAVDLSHIPTAVKIKGFSGEDARPALQGADVVLISAGVARKPGMDRSDLFNVNAGIVKNLVQQIAETCPKACIGIITNPVNTTVAIAAEVLKKAGVYDKNKLFGVTTLDIIRSNTFVAELKGKQPSEVEVPVIGGHSGVTILPLLSQIPGVSFTEQEVADLTKRIQNAGTEVVEAKAGGGSATLSMGQAAARFGLSLVRALQGEKGVVECAYVEGDGEHARFFSQPLLLGKNGIEEHQPIGKLSA

SEQ ID NO: 1935 - protein, 560 aa, Arabis gemmifera
MASSTALISDTEAWKDLKGHVEDIKKTHLRDLVTDANRCQSMMMEFDGLLLDYSRQRATVETVDKLLNLAKAAQLTEKISRMFNGEHINSTENRSVLHVALRAPKDAVIKADGKNVVPEVWNVLDKIKEFSEKIRSGSWVGATGKPLKDVIAIGIGGSFLGPLFVHTALQTDPEALESAKGRQLRFLANIDPVDVARNINGLNPETTLVVVVSKTFTTAETMLNARTLREWITAALGASAVAKHMVAVSTNLALVEKFGIDPNNAFAFWDWVGGRYSVCSAVGVLPLSLQYGFSVVEKFLKGASSIDQHFQSTPIEKNIPVLLGLLSVWNVSFLGYPARAILPYSQALEKFAPHIQQVSMESNGKGVSIDGLPLPFETGEIDFGEPGTNGQHSFYQLIHQGRVIPCDFIGIVKSQQPVYLKGEVVSNHDELMSNFFAQPDALAYGKTPEQLQKENVSENLIPHKTFSGNRPSLSLLLPELTAYNVGQLLAIYEHRVAVQGFVWGINSFDQWGVELGKVLATHVRKQLHSSRTQGTTLEGFNYSTTTLLKRYLETSSEPQM

SEQ ID NO: 1936 - protein, 275 aa, Escherichia sp. Souza-273
IGQALALLLKTQLPSGSELSLYDIAPVTPGVAVDLSHIPTDVKIKGFSGEDATPALEGADVVLISAGVARKPGMDRSDLFNVNAGIVKNLVQQIAKTSPQACIGIITNPVNTTVAIAAEVLKKAGVYDKNKLFGVTTLDIIRSNTFVAELKGKSSSDVEVPVIGGHSGVTILPLLSQIAGVSFSEQEVADLTKRIQNAGTEVVEAKAGGGSATLSMGQAAARFGLSLVRAMQGEKGVVECAYVEGDGQYARFFSQPLLLGKNGVEERRSIGTLSA

SEQ ID NO: 1937 - protein, 560 aa, Arabis gemmifera
MASSTALISDTEAWKDLKGHVEDIKKTHLRDLMTDANRCQSMMMEFDGLLLDYSRQRATVETVDKLLNLAKAAQLTEKISRMFNGEHINSTENRSVLHVALRAPKDAVIKADGKNVVPEVWNVLDKIKEFSEKIRSGSWVGATGKPLKDVIAIGIGGSFLGPLFVHTALQTDPEALESAKGRQLRFLANIDPVDVARNINGLNPETTLVVVVSKTFTTAETMLNARTLREWITAALGASAVAKHMVAVSTNLALVEKFGIDPNNAFAFWDWVGGRYSVCSAVGVLPLSLQYGFSVVEKFLKGASSIDQHFQSTPIEKNIPVLLGLLSVWNVSFLGYPARAILPHSQALEKFAPHIQQVSMESNGKGVSIDGLPLPFETGEIDFGEPGTNGQHSFYQLIHQGRVIPCDFIGIVKSQQPVYLKGEVVSNHDELMSNFFAQPDALAYGKTPEQLQKENVSENLIPHKTFSGNRPSLSLLLPELTAYNVGQLLAIYEHRVAVQGFVWGINSFDQWGVELGKVLATHVRKQLHSSRTQGTTLEGFNYSTTTLLKRYLETSSEPQM

SEQ ID NO: 1938 - protein, 561 aa, Pseudomonas stutzeri
MTHLKITGITCDSCAGHVKEALEKVPGVQSALVSYPKGTAQLAIVPGTSPDALTAAVAGLGYKATLADAPLADNRVGLLDKVRGWMAAAEKHSGNEPPVQVAVIGSGGAAMAAALKAVEQGAQVTLIERGTIGGTCVNLGCVPSKIMIRAAHIAHLRRESPFDGGIAATVPTIDRSKLLAQQQARVDELRHAKYEGILGGNPAITVVHGEARFKDDQSLTVRLNEGGERVVMFDRCLVATGASPAVPPIPGLKESPYWTSTEALASDTIPEPLAVIGSSVVALELAQAFARLGSKVTVLARNTLFFREDPAIGEAVTAAFRAEGIEVLEHTQASQVAHMDGEFVLTTTHGELRADKLLVATGRTPNTRSLALDAAGVTVNAQGAIVIDQGMRTSNPNIYAAGDCTDQPQFVYVAAAAGTRAAINMTGGDAALNLTAMPAVVFTDPQVATVGYSEAEAHHDGIETDSRTLTLDNVPRALANFDTRGFIKLVIEEGSGRLIGVQAVAPEAGELIQTAVLAIRNRMTVQELADQLFPYLTMVEGLKLAAQTFNKDVKQLSCCAG

SEQ ID NO: 1939 - protein, 331 aa, Glycine max
  unsure (1)..(331): unsure at all Xaa locations
MVSWNRLRLGMDGDGEELTAQETALYDRQIRVWGADAQRRLSKSHVLVYGMKGTVAEFCKNIVLAGVGSLTLVDDRVATEEVLSSNFLIPPDENAYSGKTLGELCCNSLKDFNPMVRVSIEKGDLSSFDVEFFSKFDVVVVSCCSLSAKKXANDKCRKLSKRVAFYAVDCRDSCGEIFVDLQDYKYSKKKQDETVKCDLKYPSFEDALSVPWRALHRRMSKLYYAMRVIEKFEEAEGRSAGEVSIADLSGVLKLKKEICTAQSLNESHVPDTLLERLVTNAIEFPPVCAIIGGILGQEVIKAISGKGDPLKNFFFFDAFDGKGIIEDLSPK

SEQ ID NO: 1940 - protein, 346 aa, Mesorhizobium loti MAFF303099
MKAVVFEKFGEAPTIQTVPDPKPAADGVVIKVEATGLCRSDWHGWMGHDDGITLPHVPGHELAGVVVAAGKQVSRWKAGDRVTVPFAVGCGRCFECSSGNHQVCEHQTQPGFTGWGSFAEYVGIEHADTNLVRLPDEMEYATAASLGCRFVTSFRAIVDQGRVKPGEWVAVHGCGGVGLSAIMIASSMGANVIAIDLTDEKLEFARKIGAVATINASTTPNVVKAVKQIANGGAHMSMDALGHPTTSFNSIANLRRRGRHVQVGLMLGEHARPQVPMDKIIAFELEILGSHGMQAYRYQAMMDMIRNGKLKPELLVGKKISLDEAPAALMAMGGFEGIGIGVVTKF

SEQ ID NO: 1941 - protein, 258 aa, Thermobifida fusca
MAVPTVTLNNGVTMPQLGFGTWQVGYDAVAAALAAGYRCFDTAEMYRNETAVAAALADSGLDRSDVFITTKLWNNHHGFQPALDAFHASRRRLGLDVIDLYLIHWPNASDAVNVETWRALEQLYAEGVVRAIGVSNFSPAQLAVLLEACDVVPAVNQIELNPSRPRLEERVYHARHGIATQAWAPLAKGGALLTHPVITEIAEAHQKTPAQVVLRWHLQHGILVIPRSATPERIRSNFAVTDFSLAPQEMAAVDALGA

SEQ ID NO: 1942 - protein, 545 aa, Glycine max
MEADVSIIFVAFQNPPPPQIPISPSVFLLWMFFNQKIVLFKSFALMGTSNLLLFFSLMSLCAMAASKVVLIGNNITLSFDDIEANFAPAVKGSGKYGVLYLAEPLDACAELTNKVEQLPNASSPFALVVRGGCSFEEKVRIAQKAGFKAVIVYDNEEGGILVAMAGNSAGIRIHAVFVSKASGEILKKYAGLTNVEIWLIPTFENSAWSIMAISFISLLAMSAVLATCFFVRKHRIRRERPRASLVREFHGMSSRLVKAMPSLVFTSVLEDNCTSRTCTSRTCAICLEDYCVGEKLRILPCCHKFHAACVDSWLTSWRTFCPVCKRDARTGLTDPPPSESTPLLSSTPASMASSVLSSARSSLASSSAIQIARTASMASSALPSARSSLASSSAIQIARTASMASSALHSARSSLASSSAIQISRAASQTPSVSRNHSIASTPYVQPSLRSSYHQSPSLSISRSSVDLRNASQRSLASHLNSPCSMGYPSLSSLNSRYMSPHIPSPSNASVSYMGSSSHQQHPLRYSESAASFSPFASTHSLPEC

SEQ ID NO: 1943 - protein, 186 aa, Bradyrhizobium japonicum USDA 110
MPAISSNKPYRVGRSKTGLGLFATKPIKKGTRIIRYFGPILDSRIPAHDEIENKYLFELNGRWTIDGSVRKNLARYINHSCRPNAESDVRPRERKVFIRAIKNIEPGDEINYDYGTDYFKAYLKPIGCKCASCETKRKKLRAEERAERAKVKARTEAKAKKAGAKAVKKKKLNGHAVGKANGSARA

SEQ ID NO: 1944 - protein, 362 aa, Spinacia oleracea
MDYSTSWLSHSSPSLDISNANTLRLFDDAPVRDTNIFKQDPSPPRPPSTNLWHKDESGALVEELKRVNAENKRLTEMLTVVCENYNELKRQLVDHMSKQSSSNNEITKKRKLDNNNNNNNNNNNNNNNNGLVVRTNNNNNGESSSSDEEDSYGKPKEETIKAKITRVAVRTQASDSTLILKDGYQWRKYGQKVTRDNPCPRAYFKCSFAPGCPVKKKVQRSLEDQSMLVATYEGEHNHQPPAQQEGQGGAPSGSSRSLPLGSVPCTLDLTKSKSNANNVVNETTTTTTSSNNNNNNNNNNNNNKVLNNTTSSNHNQLPKFSSPEFQKLLAEQMASSLTKDPNFTAALAAAITGRFVQQTSSD

SEQ ID NO: 1945 - protein, 125 aa, Pseudomonas syringae pv. syringae B728a
MSSESDDRTSHPKVLLVEDETMLAMLMEMMLEDLGFATAYHASTLNDGIEYARNGEYDLAILDINIIGGNSFPIAAAIADRGIPFMFCSGYGRLGIPDAWLNRRCVAKPFSAEQLSEALSELLEV

SEQ ID NO: 1946 - protein, 506 aa, Ralstonia eutropha
MNMAEIAQLGVSNPYKQQYENYIGGAWVPPAGGEYFESTTPITGKPFTRVPRSGQQDVDAALDAAHAAKAAWARTSTTERANILNRIADRIEANLKLLAVAESIDNGKPVRETTAADLPLAVDHFRYFAGCIRAQEGGISEIDADTIAYHFHEPLGVVGQIIPWNFPLLMATWKLAPALAAGNCVVLKPAEQTPASILVLMEVIGDLLPPGVVNVINGFGLEAGKPLASSPRISKVAFTGETTTGRLIMQYASQNLIPVTLELGGKSPNIFFEDVLAADDAFFDKALEGFAMFALNQGEVCTCPSRALIQESIYDRFMERALKRVAAIRQGHPLDTGTMIGAQASAEQLEKILSYIDLGRKEGAQCLTGGERNVLDGDLAGGYYVKPTVFAGHNKMRIFQEEIFGPVVSVTTFKDEEEALAIANDTLYGLGAGVWTRDGARAFRMGRGIQAGRVWTNCYHAYPAHAAFGGYKQSGIGRENHRMMLDHYQQTKNLLVSYSPNALGFF

SEQ ID NO: 1947 - protein, 252 aa, Thermobifida fusca
MKRFEGKVAVVTGASRGIGFAVARRIVDEGGRVVVTARGAEALAEAVTQLGGPEHALGIAGRAHDQAHRAEVVQRTLDTFGRVDVLVNNTGINPVFDSILKVDEAAMAKIFEVNVIAAVGWVREVYNAWMGEHGGAIVNVASLAGQHPSPGIGIYGASKAALINLTQQLAYELAHRRIRVNAVAPAVVKTRFAEALYAENEEKVAAGYPLGRLGEPDDIAAAVAYLASSDASWVTGQVITLDGGKTLRAGVE

SEQ ID NO: 1948 - protein, 198 aa, Pseudomonas syringae pv. syringae B728a
MPAFLKLPYLESVMSADLEHIRQVMREADCLYTEAEVDAAIARVGAQINAELAERNPVVFCVMNGGLIFSGKLLTHLNFPLEASYLHATRYRNETTGGDLFWKAKPEVSFMDRDVLIIDDILDEGHTLGAIIDFCKHAGARAVHTAVLIDKDHDRKARPDLKADYVGLPCIDRYIFGFGMDYKGYWRNAAGIYAVKGM

SEQ ID NO: 1949 - protein, 261 aa, Streptomyces avermitilis MA-4680
MRHAPRASSQGGLLCPGPPAKVWARAIGSKGGGHVTGRPLIGVSTYLESGARWGVWELEAALLPAGYPRLVQRAGGLAAMLPPDDPAHATAAVGRLDGLVIAGGPDVDPSHYGAARSPRTGPPAPERDAWELALIRAALASGTPLLGICRGMQLLNVALGGTLVQHIDGHVEQVGAFGHHPVKPVPGTRYGDLAPEETAVPTYHHQSVDRLGTDLLPCAHAADGTVEAIELPAPAWALGVQWHPEMGEDLRVMRALVAAAS

SEQ ID NO: 1950 - protein, 515 aa, Arabidopsis thaliana
MSFRDDNTEEGRNDLRRPFLHTGSWYRMGSRQSSMLESSQVIRDSSISVLACVLIVALGPIQFGFTCGYSSPTQAAITKDLGLTVSEYSVFGSLSNVGAMVGAIASGQIAEYVGRKGSLMIAAIPNIIGWLSISFAKDTSFLYMGRLLEGFGVGIISYTVPVYIAEIAPQTMRGALGSVNQLSVTIGIMLAYLLGLFVPWRILAVLGVLPCTLLIPGLFFIPESPRWLVCLYNRIAYIVEFVALLAKMGLTDDFETSLQVLRGFETDITVEVNEIKVVTKLKKCFDRSVASSSKRSAVRFVDLKRRRYYFPLMVGIGLLALQQLGGINGVLFYSSTIFESAGVTSSNVATFGVGVVQVVATGIATWLVDKAGRRLLLMISSIGMTISLVIVAVAFYLKEFVSPDSNMYNILSMVSVVGVVAMVISCSLGMGPIPWLIMSEILPVNIKGLAGSIATLLNWFVSWLVTMTANMLLAWSSGGTFTLYALVCGFTVVFVSLWVPETKGKTLEEIQALFR

SEQ ID NO: 1951 - protein, 483 aa, Ralstonia metallidurans CH34
MTATRPDLPKHDLLIDGKRLPPGSGEYSTDINPATEEPIALVAQGSAADVDTAVLAARAALKSWAGMRAADRGRILNRFADLLEAHAEELITLESLDAGKPLAAVRRQDLPAVVDTVRYYAGWCDKIHGAVIPTRPDALTYTVREPVGVVAAIIPWNFPLMIGMWKIAPALACGCTLIVKPAEITPLTALRVAELALEAGVPPGVFNVVTGKGSVVGNALVAHPGIDKVTFTGSPGVGRGIMQGAASNFKRVTLELGGKSANVIFADADIDAATRAAASGIFFNSGQVCSAGSRILAQRKVYDEVVERLTTRARAIRVGDPASPDTTMGPVVSAAQMKTVLDYVEIGKREGASAVTGGARIGQRGFFVEPTVFANVEHEMRISQEEIFGPVASVIPFEDEAEAVRIANGTAFSLAAGVWSADIARVHKVAGELRAGTVWINTYGYTDVRLPWGGAGDSGLGREHGDAAIENFTEPKAIWLSLR

SEQ ID NO: 1952 - protein, 134 aa, Helianthus annuus
GVGYSWIDGLKSHAEQHVTNKMMLNAERIFPHNTPVTKEAYYYRMIFERFFPQNSAKLTVPGGASVACSTAKAIEWEGFWSNNLDPSGRGALGVHNAAYKKKSGSISPAKLAPSIADNVPRMMDITGPEIVIRS

SEQ ID NO: 1953 - protein, 281 aa, Brassica oleracea
MSKEVSEEGHTQSHGKDYVDPPPAPFLDMGELKSWSFYRALIAEFIATLLFLYVTVATVIGHKKQTGPCDGVGLLGIAWAFGGMIFVLVYCTAGVSGGHINPAVTFGLFLARKVSLVRAVGYMIAQCLGAICGVGFVKAFMKTPYNTLGGGANTVAPGYSKGTALGAEIIGTFVLVYTVFSATDPKRSARDSHIPVLAPLPIGFAVFMVHLATIPITGTGINPARSFGAAVIYNNEKAWDDHWIFWVGPFVGALAAAAYHQYILRAAAVKALASFRSNATN

SEQ ID NO: 1954 - protein, 183 aa, Triticum aestivum
  unsure (1)..(183): unsure at all Xaa locations
MAPTVMASSATSVAPFQGLKSTAGLPVSRRSNGASLGSVSNGGRIRCMQVWPIEGIKKFETLSYLPPLXSTEALLKQVDYLIRSKWVPCLEFSKVGFIFREHNASPGYYDGRYWTMWKXLPMFGCTGPTGYSTKVEGGQKRSYPGRVISQSRIPTTRPCAFKFPPSSQPSGSPGKGKLHNANI

SEQ ID NO: 1955 - protein, 172 aa, Arabidopsis lyrata subsp. lyrata
ANVDEAVAKLKSKGIDAYGIVCHVSNAQHRRNLVEKTVQKYGKIDIVVCNAAANPSTDPILSSKEAVLDKLWEINVKSSILLLQDMAPHLEKGSSVIFITSIAGFQPQGAMAMYGVTKTALLGLTKALAAEMAPDTRVNAVAPGFVPTHFASFITGSSEVREGIEEKTLLNR

SEQ ID NO: 1956 - protein, 281 aa, Oryza sativa
MMSGVGGGRSGGRDAEGEWEVRPGGMLVQRRDGDTGPAVRLRVSHGASFRDVAVPAHSTFGMILASSLLVKLAVGDCNEGELKGVLTQATGVEPERQRLFFRGKEKSDNEFLHTAGVKDGAKLLLLEKPAPANVEQRAEPVIMDESMMKACEAVGRVRAEVDRLSAKVCDLEKSVFAGRKIEDKDFVVLTELLMMELLKLDGIEAEGEARAQRKAEVRRVQGLVETLDKLKARNANPFSDQNKSVSVTTQWETFDNGMGSLNAPPPRVSSTQINTDWEQFD

SEQ ID NO: 1957 - protein, 499 aa, Dechloromonas sp. RCB
MKRLLALLALVGAVGFGAPAWAEEKAAAPEAVAATAPAAAPAAAAPAAAPAAAAPAAAPAAAPIPPNKGDNAWVMISAALVILMSIPGLALFYGGLVRTKNMLSVLMQVFVTFSLISVLWVVYGYSAAFTEGNEFFGVLDKLFLKGVTVDSVAATFSKGVNISEFAYVIFQGAFAAITCGLIVGAFAERAKFAAILVFMVIWFTLSYIPMAHMVWYWAGPDAYIDAAAGELAGKTAGFLFQKGALDFAGGTVVHINAAIAGLVGAYMVGKRSGLGNVSMAPHSLTLTMIGASLLWFGWFGFNAGSALEASGGAALAMVNTWVATACAALSWMFAEWILKGKPSMLGAASGAVAGLVAITPAAGFVGVMGSIIIGLLAGVVCLWGVNGLKKLLGADDSLDVFGVHGVGGILGAMLTGVFADPALGGTGVYDYVANAVGPYDMTAQLISQAWGVGTVIVWSGVVSIVAYKLVDIVIGLRVPEEEEREGLDLTSHGETAYHH

SEQ ID NO: 1958 - protein, 479 aa, Prochlorococcus marinus subsp. pastoris str. CCMP1986
MTDTNFDFDLIVIGAGYGGFDAAKHAAEKGLKVAIIESGDMGGTCVNKGCVPSKALLAASGKVREIANYEHLAKFGIHASPVRFERSKIADHANNLVSNVRENLTKTLKRSGVEIILGFGRLEGNQKVGVRDNNGIDRIFTCKNIVLATGSSPFVPPGITLDNRTVFTSDEAVKLEWLPRWIAIIGSGYIGLEFADVYTALGCEVTIIEALENIMPTFDPDITKIAKKNLIQSRDIDTKSNVFATKITPGCPVKIELTDAKSKEIVENLEVDGVLVATGRSPNSKNLNLDSVGIETIKGYIPIDDQMRVLNGEKIIPNVWAVGDVTGKLMLAHTAAAQGTIAVENICGENIEINYGSIPAATFTHPEISSVGLSETDAKEIASKEGFTLGVVKSYFKANSKALAELESDGILKLLFNKDSGKVLGAHIFGMHAADLIQEIANAISRNQDVMQLSTEVHTHPTLSEVVEVAYKQAASQVK

SEQ ID NO: 1959 - protein, 204 aa, Capsicum annuum
MKVGNSKCNGVNNNKDVHYRGVRKRPWGRYAAEIRDPGKKSRVWLGTFDTAEEAAKAYDAAAREFRGCKAKTNFPLPSENQNGSDSGSPDESFSGENRAHAPSEFELTRCLGAGGEGVGNGGRLAEVGLVRNGDTIVHAPTELDLTRLLGAGGEGGDNSGYSAEVGLVRNGFPIFHHQPPIEAPMMSNRSSPAESYSGETIINT

SEQ ID NO: 1960 - protein, 417 aa, Prochlorococcus marinus subsp. pastoris str. CCMP1986
MELVDAPHSKCGTFGYVGSSPTAPTLMNTYTRFDISFKKGNGCWLWDEKGKKYLDAVAGIATCSLGHSNRILRKKLSAQLKKVQHISNLYKIEEQEELSKYLTKQSCAESVFFCNSGAEANESAIKLIKKYGNTVHKGKESFILAAESSFHGRTLATLSATGQPKYQKGFEPMVKGFKFFKYNDIASVKKLFEELKANNQKASGILVEPIQGEGGVIPGDKKFFKELREICNKYNSLLILDEVQSGVGRTGKMWGYENLEIEPDGFTLAKGLGGGHAIGALLVQKKANIFTPGDHASTFGGNPFACRAAITVLEEIKRRKILKNVLERGNQLNEGFTKISAKFPKIISGIRGLGLIQGLVINDSYTDAKTITLKAFDKGLLLVPAGGNVVRFVPPLIISRNEINILLKKLDLIFEEM

SEQ ID NO: 1961 - protein, 183 aa, Escherichia coli K12
MQDSILTTVVKDIDGEVTTLEKFAGNVLLIVNVASKCGLTPQYEQLENIQKAWVDRGFMVLGFPCNQFLEQEPGSDEEIKTYCTTTWGVTFPMFSKIEVNGEGRHPLYQKLIAAAPTAVAPEESGFYARMVSKGRAPLYPDDILWNFEKFLVGRDGKVIQRFSPDMTPEDPIVMESIKLALAK

SEQ ID NO: 1962 - protein, 231 aa, Sorghum bicolor
MGRGRVELKRIENKINRQVTFAKRRNGLLKKAYELSVLCDAEVALIIFSNRGKLYEFCSGQSITKTLERYEKHMRPDTAVQNKENELVQSSRNEYLKLKARVDNLQRTQRNLLGEDLGSLGIKELEQLEKQLDSSLRHIRSTRTQHMLDQLTDLQRREQMLCEANKCLRRKLEETSNQVHSKCGARCQLTRLRAATPPHSRPHHILAMDCSFIPWKLQQSQPCRSGSLLNI

SEQ ID NO: 1963 - protein, 156 aa, Glycine max
  unsure (1)..(156): unsure at all Xaa locations
ASSMIYSPTVTTVNRAGAGMVATFTGLKSMAGFPTKNTNNDITSIASNGGRVQCMHVWPPVGKNKDETHCYLPDLDDAQLAKEVEYLFRKGWIPRLEFXVXHGFMYGEHTRSPGYYDGHYWTMWKLPMVCCTDASKVLNDLXDAKTAYPNGFIRII

SEQ ID NO: 1964 - protein, 319 aa, Clostridium acetobutylicum
MKTIAVLTSGGDAPGMNAAIRAVVRTAIEKGINVKGIQGGYSGLINGEIFDMNRHSVSDIIQRGGTILRTARCPEFLKEEVRQKAANVLRVFGIDGLVVIGGNGSFMGAQKLSKLGVKTVGLPGTIDNDLPYTDYTIGFDTTLNTVLDAINKLRDTSTSHERVSIIEVMGRDCGDIALFSGIAGGAESVIIPEIGYDFNELCKNILEGKLRGKMHNLIILAEGVGGAAELAKKVEEVTGIETRSTILGHIQRGGSPSAFDRMLASRMGVKAVEVLMEGKTSRVIGIKEGKIMDQDIDEALAVPRSFNKELYDIANMLSK

SEQ ID NO: 1965 - protein, 716 aa, Neurospora crassa
MTTLTPVATRSQATPLTSSAIKSILRKPTTVLGRRSREEDGESSDGLPGSSPAKKRKTVMFNDKLNMIKEFGGKTLDDAKREVKQALEGHARGDDEDYDGLKEIFCPSPKRTIAEEEDADAPQPQDLQVYVVALTSHAPLLDRSCSGLIRAVLNCTWLDRDDVFARAYIQLLAALSAKVYFRQQALSMMVDKFTETRTSTVEVVPGFPPVDSETKKERLHLGLKYLLELYADARPMILDIVTHNFPHTEESKTRHMEYIDHLLRLKVDKPDLERDIMELILSRLVKLDVEMTLDLENDDDETTRAVLRQLEASNAKSDDEDDDAMSDADSDDEDEEESDEQTRRILLLKSKLETMDAILDLLFSIYDPVFADPDSPEALATFEDLLTDFVNVILPHLKSRHTQYLLFKFAMKSNRLMEMFIGTLFNIAFQSTRAPVVKQAAVAYLASFTARGARVQSDQVQLIAQTFLDYIDHYRNTHTSCRGPDIRRYGQYYAYFQGLLYIFCFRWRDLIDRDEVPASFDWDDPASFLGQDLPWMKGLRQRLQVNIASKLNPLKCCSPIIVDEFARLSHHLRLIYIYPQIEKNKTIHLSQFFTSSYATGGALRDSGFEFDHENWTHIEACFPFDPFQLPVAKRWLDLDKNYVEWRSIAMLEKGGDDDSDSEDDDDDDVSEDGMGDIGDASDYESDEEVEAGGVEHEDDESTDEERDGYHGSFRRI

SEQ ID NO: 1966 - protein, 399 aa, Oryza sativa (japonica cultivar-group)
MALSISTPPTSSSLLPASLQVGRWSSSAAMSARPVAFSLRRPVLAARVAAGGNAPSSSVDEVVTELDAVASFSEIVPDTVVFDDFEKFAPTAATVSSSLLLGIAGLPDTKFKSAIDTALADGECNTMEKPEDRMSCFLTKALANVGAEMAHLVPGRVSTEIDARLAYDTQGIIQRVHELLKLYSDHDVLSERLLFKIPATWQGIEASRLLESEGIQTHLTFVYSFAQAAAAAQAGASVVQIFVGRVRDWARTHSGDPEIDEALKKGEDAGLALAKKVYAYIHKNGYKTKLMAAAIRNKQDVFSLLGIDYIIAPLKILQSLEESVTDTDVKYGYVPRLTPALGKTYNFTEEELVKWDQLSLAAAMGPAAEELLASGLEGYVNQARRVEELFGKIWPPPNV

SEQ ID NO: 1967 - protein, 113 aa, Pseudomonas syringae pv. syringae B728a
MSKELQITDLHLGEGKAAVKGALITTHYTGTLEDGTVFDSSHERGKPFQCVIGTGRVIKGWDQGLMGMKVGGKRQLFVPAHLAYGDRSMGAHIKPGADLTFEIELLEVLTRDD

SEQ ID NO: 1968 - protein, 827 aa, Haemophilus influenzae R2866
MNLSRRDFMKANAAMAAATAAGLTIPVKNVVAAESEIKWDKAVCRFCGTGCAVLVGTKDGRVVASQGDPDAEVNRGLNCIKGYFLPKIMYGKDRLTQPLLRMTNGKFDKNGDFAPVSWDFAFKTMAEKFKEAFKKNGQNAVGMFSSGQSTIWEGYAKNKLWKAGFRSNNVDPNARHCMASAAVAFMRTFGMDEPMGCYDDIEQADAFVLWGSNMAEMHPILWSRITDRRISNPDVRVTVLSTYEHRSFELADHGLIFTPQTDLAIMNYIINYLIQNNAINWDFVNKHTKFKRGETNIGYGLRPEHPLEKDTNRATAGKMHDSSFEELKQLVSEYTVEKVSKMSGLDKVQLETLAKLYADPTKKVVSYWTMGFNQHTRGVWVNQLIYNIHLLTGKISIPGCGPFSLTGQPSACGTAREVGSFPHRLPADLVVTNPKHREIAERIWKLPKGTVSEKVGLHTIAQDRAMNDGQMNVLWQMCNNNMQAGPNINQERLPGWRKEGNFVIVSDPYPTVSALSADLILPTAMWVEKEGAYGNAERRTQFWRQQVKAPGEAKSDLWQLMEFAKYFTTDEMWTEDLLAQMPEYRGKTLYEVLFKNGQVDKFPLSELAEGQLNDESEYFGYYVHKGLFEEYAEFGRGHGHDLAPFDMYHKARGLRWPVVEGKETLWRYREGYDPYVKEGEGVAFYGYPDKKAIILAVPYEPPAESPDNEYDLWLSTGRVLEHWHTGTMTRRVPELHRAFPNNLVWMHPLDAQARGLRHGDKIKISSRRGEMISYLDTRGRNKPPRGLVFTTFFDAGQLANSLTLDATDPISKETDFKKCAVKVEKAA

SEQ ID NO: 1969 - protein, 535 aa, Zea mays
MTTPSTAPAPLASLLLRVSAAAVPVARRRPKSPAAAAAARWEGGGGRRRCRAAVVEEAGVLLPKEGEGEEAPDAAAGRYDWREEWYPLYLAKEVPDDAALPLTVFDRQLVLWRDAHGVLRCHEDRCPHRLAKLSEGQIVDGKLECLYHGWQFDGDGKCVKIPQLPEGAKIPRSACARNYEVRDSQGVVWVWMSDANPPDEGKLPWFEPYARAGFTDLSTVHELPYDHSILLENLMDPAHVPISHDRTDWTAKREDAQPLFFDVTERTPRGFAGYWGRTGTPHLRNLLRFEAPCVLTNTLEFADKDGREQCFSAHFLCRPAGQGKSMLLVRFGSTLRSPLAKVLPSWYFHQNACKVFEQDMGFLSSQNEVLLREKLPTRELYLNLRSSDTWVAEYRKWMDRAGHGMPYYFGHSTLSPPPVPAVVEQAPAGAVAGISASFPAKGGVGMVHAPNPTNRYFRHVVHCKSCRATVKKYTSLKTVFAALAAAALSAAILAATRQWKAVLVAASAVLAAASYACDAVLSLITTNFIRTHRRL

SEQ ID NO: 1970 - protein, 155 aa, Glycine max
KLGLMSCFVKAAVSGLQNQPIVNAVIDGDDIIYRDYVDVSVAVGTSKGLVVPVIRDADTMNFADIEKGINNLAKKATEGALSIDEMAGGTFTISNGGVYGSLISTPIINPPQSAILGMHSIVQRPVVVDGSILARPMMYLALTYDHRLIDGREAS

SEQ ID NO: 1971 - protein, 542 aa, Chlamydomonas reinhardtii
MSEACLLAAKSALVGVANGDSLASAICAAMEAAAPVARHLQETTVDLTTLQETVDTIGLNLQGTMDGLNTLLLLYGGALVFLMHGGSAMLEAGAIRSKNAMNILLQTVLDASCSALMWYFVGFAFAFGIGDKPNKFIGNAMFALVDIDTHNTGSGTGKWIDWFFQWAFAATAVTIPAGAVAERFNFNAYLGYSMFIGGWVYPIIAHWVWCIEGWLGYGVIKPFINAGMIDFAGSGVIHMTGGLAGLIGAIMVGPRLGRFDADGKPVDMPGHSAILVVLGTVLLWFGWYGFNPASVLLINSSTYAIVCGRAAVCTTLAGAAGGVSCLIFGFARHRGWDLVGLCNGILCGFVAVTACPHVIYPWAAIICGLVAGLWFEFLCWLLLKLKIDDPLSAGPMHFGCGMWGVFFTGLFARQQYIQEYYVHGPSAAGELSKPYPWGAFYKGYNADGELVMSDGKLLASQIVGILVIIGWVIGMMVPFFGIFQFFGALRIPPEEEEMGLDRSKHGGSAYNGTGANTLGGLSPGNDVMRNNSPLGKVLPVTA

SEQ ID NO: 1972 - protein, 527 aa, Chlamydophila caviae GPIC
MNKKGFLDSSSTKILQDLAVAPIDLTAPGVISKERIERFSLSVEGFTLSYATERVDEGILSALEDLASERGLIESMQAMQNGEVVNYIENFPSESRPALHTATRAWVKESPLQGNAEDISLRSKIEAQRLKDFLNRYRDVFTTIVQIGIGGSELGPKALHWALKGCCPSDKKVYFVSNVDPDNAAEVLQEIDCAKTLVVTVSKSGTTLETAVNEELLADHFLKQGLHFQDHFIAVTCEGSPMDDTSKYLEVFHIWDSIGGRYSSTSMVGGVVLGFAYGFDVFLQLLEGAASMDLAALEPRMSENLPLLSAMLGIWNRNFLRYPTSAVVPYATGLEYFPAHLQQCGMESNGKSVAQTGEVIGFATSPILWGEVGTNSQHSFFQCLHQGSDIVPIEFIGFQENQRGKDIVIAGSSSSQKLFANMVAQSIALAKGRENTNPNKNFRGNRPSSLLVSERLTPYTMGALLAFYEHKIVFQGFCWGINSFDQEGVTLGKDLANQVLQVMQGQEKEGALLEAEALLRLFNNIKK

SEQ ID NO: 1973 - protein, 460 aa, Thermobifida fusca
MNIAHVVMIAAAAAMGGFLFGYDSAVINGAVSAIQDTFRVGSTVIGFTVAAALIGSAVGAAIAGALADRIGRIRVMQLAAVLFAASAVGSALPFTVWDLAWWRVVGGVAIGIASVIAPTYIAEVSPPAFRGRLASLQQLAIVLGIATSQLVNYGLAAAVGGSALHRLGPLQAWQWMLGIEVLPAATYFVLTLVIPESPRHLVRIGRDARARRVLAEVEGGDVDGRVAEIRRVLGRERRPRLRDLRGRYGLLAIVWVGMALSAFQQLVGINVIFYYSAVLWQSVGIAETDSLLLSLFTSIVNIVGTLIAIGLVDRVGRKPLLLAGSAGMTVALAFTAFAFSHARGEGDDVVLSTAWALTALVSASTFVLFFALSWGVVTWVLLGEMFPLRIRAAAMAVATATQWITNWLVTVTFPSLRDWSLPGTYLVYTAFALLSFGFVLRFVRETKGRTLESMDELAGQ

SEQ ID NO: 1974 - protein, 705 aa, Oryza sativa
MASLFKDPTKLSAYRDRRFTGTQEEYEAALQASVTVYVGNMSFYTTEEQAYELFSRAGEIRKIIMGLDKNSKTPCGFCFILYYSREDAEDAVKYISGTMLDDRPIRVDFDWGFEEGRQWGRGRSGGQVTQSGVLPPDYQRKRYRNDERSSQRAPDSEFKRDAIDSEKNPRFREKGRPAVIEIMKIVEELLLPALAADLTSRLVSLLIRSYRSRATTGVVEDDDLEKLQLLLLELHAAVDEGQGRHVTSQRLLLWLRELTQSMYRGYYVLDTFRYRSVSIQAQQQDDARGAAAKRLRTSAGAAVRLVLGSSSRDDDDSSRALARALAHLQAVLQNVTPFLQMLGTYRRVPRRVSVDTERCVPIGRHVEKQRIVAFLLKEDEAAAHVVGVLPIVGPRGTGKSTLIHDASHDARVRAHFAVIERFGLDEVLLPLHAAGAGAAAATDDTSSRSLEDHRIYLDAVHNIVRQERFARNRSLLILEDAPAVIEFAETAWVLPMAHGSKVVVTSEYDQTKAGLGATEEAIRTKKMSKEEYWYHFKALAFRGAANDPAGPAHPALAATAKEIASVLNGSFLGMHILIALMRSDPRECFWRAVLQSLVDLCRSSNSKRIKADMGYVQEFALIGRIALKLVLPMRLTLRSCSITKQGGDPQLGPELNRVAGGIAYSCRSDDSGCVDVILCRSRIPPYEIYKLSCVMEEEVHLERAS

SEQ ID NO: 1975 - protein, 231 aa, Magnolia praecocissima
ENKINRQVTFAKRRNGLLKKAYELSVLCDAEVALIIFSNRGKLYEFCSSSSMLKTLERYQKCNYGAPELPVSTRETQSYHQEYLKLKARVEALQRSQRNLLGEDLGPLSGKELETLERQLDISLRQIRSTRTQCMLDQLGDLQRREHMLSEANKTLTRRLEEGAQANQNQVWEPNAHAVDSYNRQQPQQQGDGFFHPLECEPTLHIGYQPDQITIAAPGPSVNNYMPGWLV

SEQ ID NO: 1976 - protein, 212 aa, Magnolia praecocissima
  unsure (1)..(212): unsure at all Xaa locations
ENKINRQVTFAKRRNGLLKXAHELSVLCDAEVALIIFSTRGKLYEFCSSPSMLQTLERYQKCSYSTLEVSAPTNETQSSYQEYLKLKARVEILQRTQRNLLGEDLGPLSTKELEQLENQLEMSLKQIRSTKTQFMLDQLLDLKEGQCWRKQQGLKRKLEEMVEKSSSAVVGHRCTKHVFXKIANLLILRDSSSLWIANQHXRWXTIPCMKIR

SEQ ID NO: 1977 - protein, 171 aa, Arabidopsis thaliana
ANVDEAVAKLKSKGIDAYGIVCHVSNAQHRRNLVEKTVQKYGKIDIVVCNAAANPSTDPILSSKEAVLDKLWEINVKSSILLLQDMAPHLEKGSSVIFITSIAGFSPQGAMAMYGVTKTALLGLTKALAAEMAPDTRVNAVAPGFVPTHFASFITGSSEVREGIEEKTLLN

SEQ ID NO: 1978 - protein, 429 aa, Escherichia coli
MTTDDLAFDQRHILHPYTSMTSPLPVYPVVSAEGCELILSDGRRLVDGMSSWWAAIHGYNHPQLNAAMKSQIDAMSHVMFGGITHAPAIELCRKLVAMTPQPLECVFLADSGSVAVEVAMKMALQYWQAKGEARQRFLTFRNGYHGDTFGAMSVCDPDNSMHSLWKGYLPENLFAPAPQSRMDGEWDERDMVGFARLMAAHRHEIAAVIIEPIVQGAGGMRMYHPEWLKRIRKICDREGILLIADEIATGFGRTGKLFACEHAEIAPDILCLGKALTGGTMTLSATLTTREVAETISNGEAGCFMHGPTFMGNPLACAAANASLAILESGDWQQQVADIEVQLREQLAPARDAEMVADVRVLGAIGVVETTHPVNMAALQKFFVEQGVWIRPFGKLIYLMPPYIILPQQLQRLTAAVNRAVQDETFFCQ

SEQ ID NO: 1979 - protein, 240 aa, Magnolia praecocissima
MGRGRVQLKRIENKINRQVTFSKRRMGLLKKAHEISVLCDAEVAVIVFSTKGKLYEYSTDSRMSRILERYERYSYAERELVLSGPESEGSWCLEYGKLKAKVESLQRNLRHFTGEDLDTLSLKELQQLEHQLDAALKHIRSRRPIMLIHCGASKKEKSLREQNNMLEKEIQEKEKAMAQQAQWEQQNQSQSSHPSWLASPLPTLNIGTYHQGNEVEEEGARPPARTNSLMPPWMLRHVNE

SEQ ID NO: 1980 - protein, 594 aa, Neurospora crassa
MRRAAVKALRASYQCTCRGLRVSSRGSPLPLLQSSKAASSGSPTAHYNPRLGTATARYLSSTGARDSSGLVAYGAWYNSGDSNSESPIASTTSATTTATGAVPTRSVLVIGADELHTGTFVGDGPISKTTSDNERVVEMLSPEQATRKLRQYEQSVYVNRGQGVVRYDVAQLPSNDPIEDDHAEKIVEVPNKAPSSDPSDWMFWGVFDGHSGWTTSAKLRQALISFVARELNETYKSSPDLIPSAAAVESAIKTGFTRLDDEIVHQSVQRVLKSNNRLVAAEHLAPALSGSCALLSFYDSKSKLLRVACTGDSRAVLGRRSESGKWTATALSTDQTGSNPDEAARLRKLHPGEEHVVRHGRVLGGLEPTRAFGDASYKWSRELSEKLREKFFGRSVSPLLKTPPYVTAEPVVTTTKIEPEKGDFVVMATDGFWEMLTNEEVVGLVGKWIESQAGSSSKSSGYFSFLQKGSKTALPVESSESEKNSGNKTPIRQRQWGATGTDPMERFVVQDKNVATHLVRNALGGKNQEQVSALLTLPSPFSRRYRDDLTVQVIFFGYDGPKTGEIVVNKEATAAALAAAAADGNKTGPVKPKL

SEQ ID NO: 1981 - protein, 389 aa, Acinetobacter sp. ADP1
MNPPLPQAPINWIAVFALIFLPVLAIIAIPLYAYHHDFSIGAWVSMFVLLGMSSLGITAGYHRLWAHRAYEATLPLKIMLMIMGTFAVQNSILFWASGHRTHHRHVDDIEKDPYSIKNGFWYAHFGWMLRNYPAAEPDFKNAPDLLNDKLVMFQHKYYVALVIATHVVILTAVGWAVGDIWGVVLLGGLLRLILSHHVTFFINSLCHMWGKRPYTDENTARDNFWLAIATWGEGYHNYHHIFQYDYRNGVKWWQYDPTKWLIWSCSKLGLAKNLRRIPSFNIKKAELAMKFKYAEQDLAIYGHDVNSDLAQMKQRIAQEYDAFTHTLNDWAKLKEQELQSKKAAVAEKLHQMDHKLKVDFQLLEHRLSHHRECLETLMRNVKKRNTVSE

SEQ ID NO: 1982 - protein, 352 aa, Geobacter sulfurreducens PCA
MYKARAYSAASAASPLALDTIPRRETTERDVQIEILFCGVCHSDLHTVRDEWNSVMPTVYPCVPGHEIVGRITRVGSAVTKFKPGDLAGVGCLVDSDHTCPSCQSNLEQFCPDATFTYNSPDKHQAAPVTYGGYSESIVVDERFVLHVPATLDLAGVAPLLCAGITTYSPIRRWGDIRGKKAGVVGLGGLGHMGVKFARAFGAQVVVFTTSPGKKEDALRLGAHEVIVSTNAEEMQQHAGTFDFILDTIAADHDINAYLNMLGRDGTITLVGAPEKPLEVSAFALLFGRRSLSGSIIGGIAETQEMLDFCGQHNITADVEVIPIQKINEAYERLLKSDVKYRFSIDMASLKG

SEQ ID NO: 1983 - protein, 128 aa, Glycine max
  unsure (1)..(128): unsure at all Xaa locations
MVSEAANAGIDRVLWTEAEIATRVAEVASELAADIRRLAEPAVVVGVATGAFLFLADLVRRVDVPLAVDLVRVESYGDGTESSGRPRVTSDLKVDVAGKHVVVVEDIVDTGNTVSCLIAHLQKXGALS

SEQ ID NO: 1984 - protein, 532 aa, Neurospora crassa
MGLFSKKSAAPQTQSQDEIDLAAEQKVTFRAVFLGVVASVGGFMFGYVSGQISGFFDMEDFGRRFGNYQDADGWVFSAYRQGAIVALLPAGALLGSLVAGRIADTLGRRIAISASALFSCIGTIIEIASTTHWAQFAVGRLITGIGIGALSVVVPMYQSESAPAILRGILVSCYQLFITLGIWTAEMINYGTHDLSNSASWRIPNGISFLWALVLGGGILFLPESPRYAYRVGREDEARNTIARLAGLEPSARSVNMQIDEIRMKLEEEKAGADTKWYEIFGPALLRRTLIGIILQSGQQLTGANFFFYYGTTIFKATGLSDSYVTQIILGSVNAGCTVAGLWVVKNVGRRKALIGGALWMTMCFLVYSFVGRFVLDPVNPASTPQAGNVLIVFSCFFIVAFATTWGPLVWAVVAELYPARYRAPAMALATASNWLWNFLMSLFTRPITDSIGYFYGLVFAGCCLALAAFVWLFVIESKDRTLEEIETMYNQKVSPRHSTHWHAEVPSGPRDAEEKPEVHSGSATTSSHGEV

SEQ ID NO: 1985 - protein, 449 aa, Zea mays
  unsure (1)..(449): unsure at all Xaa locations
MESRRGGSVAEDASGAMTSFGPPQHGINTDVNSMQPSRVTDFGALAQSAGFRIEDLVNLNXNNTDVNSMQPSRVTDFGALAQSAGFRIEDXLTLMQGLKYPSLLIICLSALENWGESAMAGSPMTDTSTDPDTDERNQMFEQGLVAVPTASDSSDKSRDKLDQKTLRRLAQNREAARKSRLRKKAYIQNLESSRLKLTQLEQELHQTRQQGIFISTSGDQPQSTSGNGALAFDMEYARWLEEHNKHVNELRLAVNAHAGDNDLRGIVGSVMAHYDEFFRLKGVAARSDVFHVLSGMWKTPAERCFMWLGGFRSSEVLKLLAGHLEPLTDQQLVGISNLQQSSQQAEDALSQGMEALQQSLAETLASGSLGPAGPSGNVANYMGQMAMAMGKLGTLENFLRQADNLRLQTLQQMQRILTTRQSARALLAISDYFSRLRALSSLWLARPRE

SEQ ID NO: 1986 - protein, 342 aa, Streptomyces avermitilis MA-4680
MRVGVLTGGGDCPGLNAVIRGVVRKGVQEYGYDFVGFRDGWRGPLEGDAVRLDIPAVRGILPRGGTILGSSRTNPLKLDDGIRRIKENLAKQEVDALIAIGGEDTLGVAARLTDEYGVPVVGVPKTIDNDLSATDYTFGFDTAVGIATEAIDRLHTTAESHMRVLVCEVMGRHAGWIAIHSGLAGGANVILIPEQRFDVDQVCAYVTSRFKASYAPIVVVAEGAMPKDGQMVLKDESLDSFGHVRLSGVGEWLAKEIEKRTGKEARTTVLGHVQRGGTPSAFDRWLATRFGLHAIEAVRDGDFGKMVALRGTDIVRVPIAEATAKLKTVDPKLYEEVGVFFG

SEQ ID NO: 1987 - protein, 328 aa, Lactococcus lactis subsp. lactis
MEKINYLLPEESAEMTLNQVKSLRQIEGRLRKLFSLKNYQEVMPPSFEYTQLYTALESNGKTFNQEKMFQFINHEGQSITLRYDFTLPLVRLYSQIKDSTSARYSYFGKIFRKEKRHKGRSTENYQIGIELFGESADKSELEILSLALQVIEQLGLNKTVFEIGSAKFFQRLCHLADGSTELLTELLLKKDLSGLNAFIEKNNFSKELRELLKEIFITNELSRLENLVTNTKDDVLISSFDQLKEFSEKLSMIKPIIIDLGMVPKMDYYTDLMFKAYSSAANQPILSGGRYDQLLSNFQEEAVAIGFCCHMDTILKALERQELEEDND

SEQ ID NO: 1988 - protein, 543 aa, Haemophilus influenzae R2846
MSKQIQIPDIGSDEVTVTEVMVNVGDTISVDQSIINVEGDKASMEVPAPEAGVVKEILVKVGDKVSTGTPMLVLEAAGTAPVADAPTAPAADEPTAPVVATAPTASAIVEVNVPDIGGDEVNVTEIMVAVGDTITEEQSLITVEGDKASMEVPAPFGGVVKEILVKSGDKVSTGSLIMRFEVPGAAPAASASDSASAPQAAAPAAATTAQAPQSNNNVSGLSQEQVEASTGYAHATPVIRRLAREFGVNLDKVKGTGRKGRIVKEDIEAYVKTAVKAYESGATAQATGNGVANGAGLGLLPWPKVDFSKFGEIEEVELSRINKISGANLHRNWVIIPHVTHFDKADITDLEAFRKEQNALAEKQKLGVKITPVVFIMKAVAKALEAYPRFNSSITEDAQRLILKKYINIGVAVDTPNGLVVPVFKNVNKKGIIELSRELMEVSKKAREGKLTASDMQGGCFTISSLGGIGTTHFAPIVNAPEVAILGVSKSSMEPVWNGKEFAPRLILPMSLSFDHRVIDGADGARFISYLGSVLADLRRLVM

SEQ ID NO: 1989 - protein, 474 aa, Haemophilus influenzae R2846
MSKEIKTQVVVLGAGPAGYSAAFRCADLGLETVIVERYSTLGGVCLNVGCIPSKALLHVAKVIEEAKHANKNGIYFSEPRIELDEVRAGKEAVVAKLTGGLAGMAKARKVTVVEGLAAFTDPHTLVVRDRDGNPTTVKFDNAIIAAGSRPVQLPFIPHEDPRIWDSTDALKLKEVPKKLLIMGGGIIGLEMGTVYNALGSEVEVVEMFDQVIPAADKDVVGIYTKQVEKKFKLMLETKVTAVAAKDDGIYVSMEGKACNDTKRYDAVLVAIGRVPNGKLIDAGKAGVEVDDRGFIHVDKQMRTNVPHIYAIGDIVGQPMLAHKGVHEGHVAAEVIAGQKHYFDPKVIPSIAYTEPEVAWVGKTEKECKQEGLNYEVAKFPWAASGRAIASECSEGMTKLIFDKDTHCVLGGAIVGSNGGELLGEIGLAIEMGCDAEDIALTIHAHPTLHESVGLAAEVFEGSITDLPNAKAKKK

SEQ ID NO: 1990 - protein, 253 aa, Triticum aestivum
MDVKCRRLEGKVAVVTASTQGIGLAIAERLGLEGAAVVISSRKQKNVDEAVEGLRAKGITVVGAVCHVSNAEQRKHLVDTAVKNFGHIDIVVSNAAANPSVDSILEMKESVLDKLWDINVKASILLLQDAAPHLRKGSSVILISSIAGYNPDAALTMYGVTKTALFGLTKALATEMGPNTRVNCIAPGFVPTRFAGFLTTNETIRNELIERSIIKRLGSVEDMASAAAFLASDDASFITAETIVVAGGTQSRL

SEQ ID NO: 1991 - protein, 451 aa, Sinorhizobium meliloti 1021
MSSFTLSTSLRRVGATAAAMLAPVVAFAQEAAPAAAATPVPDKADTTFMFLSTLLVLFMLIPGLALFYGGLVRAKNMLSVLMQCTVIGAAMMIVWVVYGYSFAFGGSTSAYFGGFAKLFLAGVTVDSTAATFSDGVVIPEYLFMLFQMTFAAITPALIVGAFAERIKFSAAILFAILWATFVYFPIAHMVWDANGLLFGMGALDFAGGTVVHINAGVAGLVGAFMVGKRTGYGRDMMAPHSMTLTLVGAAMLWFGWFGFNAGSNLEASGGAVLATVNTFLATAAAVLSWSLVETLTRGKASMLGAASGMIAGLVAVTPAAGIAGPMGAIIMGLIVSPLCYFFVSVIKNKFHYDDTADVFGVHGVGGFFGAIATGVFASSSLGGIGYADGVTMGSQLMTQITAVAITIVWCGVVSAILYKVVDALVGLRVSMEAEREGLDLSSHGEAAYHAS

SEQ ID NO: 1992 - protein, 498 aa, Arabidopsis thaliana
MMNMIKAGIIHTQNIHIRVKNRSHVYPAENMLNEGMPVSSHWNSSPGPNAYTDSGHSVERPHYNPGVSGPSHDPSVNSTVPTFSAPHENYVTFASSSSYNSQTWSNASYVDHQSMESVRGAQKRKRPCPSSIYEMGSSSQYHGDRTPADTHFPSELHLGKSITHDHDPHYMPWLMNPTYRSNNLSIRGESSSRNVRSRPTLDSETSLGRNNLPRSLSLDSHSTHHHSVDHYGSGQFPGQTSHGNKDWNCARLSPVLRDINGFSPETNNFLPARSVVNSLSVNTSGYHHHELTGNRNPTVSHGVPGTSTLSTSSSRFSHRSTSTYRSSSHGSRSGHVASSSGDRSHLVTETYPSRHLRPPPHISWRSGDRPGRRRSSYERFQPPFDEVALHERFSSEEFMVEDRQPQYYGSRNMLDHHRDMRLDIDNMSYERNLQLLVSNNVLSIISNRGAKKMCNLPGEVKGCGHDYHGRCIKKWLSMKNSCPICKSPALPDASKNSS

SEQ ID NO: 1993 - protein, 430 aa, Oryza sativa
MAMSRAAAAAAGTPVARRRLMGAVAARSMASWFGHVEPAAKDPILGVTEAFLADPSPDKVNVGVGAYRDDSGKPVVLECVREAGRRIAGSMNMEYLPMGGSIKMIEESLKLAYGENCEFIKDKRIAAVQALSGTGACRLFADFQKRFLPDSQIYIPTPTWANHHNIWRDAQVPQKTFTYYHPESRGLDFAGLMDDIKNAPDGSFFLLHACAHNPTGVDPSEEQWREISHQFKVKKHFPFFDMAYQGFASGDPERDAKAIRIFLEDGHQIGCAQSYAKNMGLYGQRAGCLSILCDDEMQAVAVKSQLQQIARPLYSNPPVHGALIVSTILGDPELKSLWLKEVKGMADRIIGMRTALKENLEKLGSPMSWEHITNQIGMFCYSGMTPEQVDRLTKEFHIYMTRNGRISMAGVTTGNVAYLANAIHEVTKTK

SEQ ID NO: 1994 - protein, 270 aa, Escherichia coli O157:H7 EDL933
  unsure (1)..(270): unsure at all Xaa locations
MKSLFKVTLLATTMAVALHAPITFAAEAAKPATTADSKAAFKNDDQKSAYALGASLGRYMENSLKEQEKLGIKLDKDQLIAGVQDAFADKSKLSDQEIEQTLQAFEARVKSSAQAKMEKDAADNEAKGKEYREKFAKEKGVKTSSTGLVYQVVEAGKGEAPKDSDTVVVNYKGTLIDGKEFDNSYTRGEPLSFRLDGVIPGWTEGLKNIKKGGKIKLVIPPELAYGKAGVPGIPPNSTXVFDVELLDVKPAPKADAKPEADAKAADSAKK

SEQ ID NO: 1995 - protein, 263 aa, Glycine max
  unsure (1)..(263): unsure at all Xaa locations
MAASDRTVLQFSSSSSSSSQILSAKVHPLVIFNICDCYVRRXHQADRVIGTLLGSVLPDGTVDIRNSYAVPHNESXSNRYSTGLGVTGGSALIHEFYSREVPNPIHLTVDTGFTNGAGTIKAYVSNNLSLGERQIAAQFQEIPLDLRMVEAERIGFDMLKATAVDKIPSDLEGMEASMQHLLVLIDDIYKYVNDVVEGLVAPDNKIGRFISDAVGSLPKLSPSVFDKLVNDSLQDHLLLLYLSSITRTQLSLAEKLNTAAQIL

SEQ ID NO: 1996 - protein, 321 aa, Glycine max
  unsure (1)..(321): unsure at all Xaa locations
MASAASPTTFSLLHSATPSSSSTATSASPSPSRVQLTSSLRARPLRRLGFAAADPLLAASVAARVAAVRGGGKGARGVVSMAKKSVGDLSAADLKGKKVFVRADLNVPLDDNQNITDDTRIRAAIPTIKHLIQNGAKVILSSHLGRPKGVTPKYSLAPLVPRLSELIGIQIVKAEDSIGQDERWRHVLHMQVGRGVVFRXVPASAIPDGWMGLDIGPDSVKSFSEALDTTQTIIWNGPMGVFEFDKFAVGTEAIAKKLADLSGKGVTTIIGGGDSVAAVEKVGVASVMSHISTGGGASLELLEGKELPGVLALDEAVPVAV

SEQ ID NO: 1997 - protein, 162 aa, Pseudomonas syringae pv. syringae B728a
MSAFHDIKLKALGGQELPLANFRKKVVLVVNVASKCGLTPQYAALENLYQQYKDQGLEILGLPCNQFAGQEPGTEQEIAEFCQLNYGVTFTLGEKLDVNGPNRHSLYRLLAGEGAEFPGDITWNFEKFLVGKNGGVSARFSPRTTPDDPAVIQAIEKALAQS

SEQ ID NO: 1998 - protein, 574 aa, Thermobifida fusca
MPDLGESVTEGTVTQWLKQEGDTVEVDEPLLEVSTDKVDTEIPSPVSGVLTKILVGEDETVEVGAQIAIITPAGEAPPAQPAPETAAEPAAQPEPEPEPAPQPAAEARTEPAAPVADAGAATPVTMPNLGESVSEGTVTQWLKQEGDTVEADEPLLEVSTDKVDTEIPSPVSGVLTKILVGEDETVEVGAQIALISPAGQAAAPAAPAAPQPAPEPKPEARPEPAPQPAAQPEAAARTEPAPQPRRTRDDETPTVDLETISGTGQVLGTDATSEGYVTPLVRKLAAQEGVDLSQVKGTGVGGRIRKQDVLEAARRMREQRQRAAAAPAPAAADTALRGRTETMSRLRQTFAEQIVESLHTAAQLTQVVEVDVTAIARLREQVGERFAAETGVELGFFPFFALAVVEALQRHPKLNAVIDGTEVTYHDTENLAVVVDTEQGVLAPVVKDAGRLSLRELARRIDDLGARARTARLVPDELSGGTFTMVDSGAYGALVETPIIHQPQVAVLSTGTVVKRPVVVEEPQLGEVITVRSMVYLSLSFDHRLIDGADAARFLSDVKRRLEEGAFEDAVGLK

SEQ ID NO: 1999 - protein, 459 aa, Thermobifida fusca
MSESGGTFDLVILGGGSGGYSAAIRASELGMRVALIEKDKLGGTCLHYGCIPTKALLHAGEVADTVRASEKFGVRASFDTIDMARVHEYKDKVVSGLHRGLTGLIKARGITLVEGEGKLTGVDEVTVNGVAYKGRHIILATGSQARSLPGLEIDGERIITSYEALRLDRVPKSAIILGGGVIGVEFASVWRSFGAEVTIVEALPHLVPAEEESSSKLLERAFRKRGIKFELGSPFESVKLTETGVSMTLASGKTVEGELLLVAVGRGPVSQGLGYEEVGIRLERGFVQVDENLHTGVGNIYAVGDLIPTPQLAHVGFAEGIFVAEHIAGLNPVNIDYDGIPRVTYSDPEVASVGITSKTAAERGIETTEFVYNLAGNGKSQILQTQGAVKVIAAKDGPVLGVHMVGSRVGELITEGQLIYNWEALPSEVAQLIHAHPTQSEALGEAHLALAGKPLHVHD

SEQ ID NO: 2000 - protein, 361 aa, Leuconostoc mesenteroides subsp. mesenteroides ATCC 8293
  unsure (1)..(361): unsure at all Xaa locations
MTEIFKMPDIGEGMAEGDITSWLVKVGDTIAADDPVAEVQNDKLMQEILSPYGGKVTKLFVDAGTTVEVGDPLIEFDGDGSSENDSDNGHVAQPSTSSNVVETEQSTPKNTAPKETSTVQVANGHVLAMPSVRHLAHEKNIDLTQVPATGRHGHVTLADVENFQGSDNSAPTQTQTSTTSQTESSAAVHEEPTPALPLREGRQPMAPVRKAIARAMDRQAAIPTVTNFDSVDVRKLVGHRKAFKEMARDDKGIRLTYLAYAVKALAAVAKKFPELNASVDMKAQEIVYHDDVNMGIAVDAPTGLFVPVIKNADRKSIFTRRFSXXXXXXXXXXXXXXXXXQVATVMCWQCHQYVIWLMRKI

SEQ ID NO: 2001 - protein, 498 aa, Sinorhizobium meliloti
MDQLNNFLSPPAAPRDFGFFVDGKWQSGHDFFVRHSPGHGVAVTRTAKCSVDDLNAAVAAARRAFEDRRWSGLPGGSRASVLLRVAEILRTRRDELAYWETLENGKPIAQARGEIDHCIACFEVGAGAARLLHGDSFNSLGDGLFGMVLREPIGVVGLITPWNFPFLILCERVPFILASGCTMVVKPSEVTSATTLILAEVLAEAGLPDGVYNVITGSGRTIGQAMSEHPDIDMLSFTGSTAVGRSCVHAAADSNFKKLGLELGGKNPIIVFADSDLEDAADGAAFGISFNTGQCCVSSSRLIVERSVAREFEALLAEKMKRIRVGDPLDETTQVGAITTEAQNTTILDYIAKGKTEGAELVTGGTAIDLGRGQYIAPTLFSGVSREMAIARDEIFGPVLCSMTFDTVEQAVELANDTVYGLAASVWTKNIDKALTVTRRVRAGRFWVNTMMAGGPEMPLGGFKQSGWGREAGMYGVEEYTQVKSVHVEIGKRTHWIS

SEQ ID NO: 2002 - protein, 341 aa, Sinorhizobium meliloti
MKAAVLVEPRRFEVREVGIPEIGPADVLIRVTRAGICGTDLHIFNGHYAADRLPIVPGHEFCGTIAEIGASVTHLKTGMRVVADINIGCGNCYWCRRNEVLNCGEVEQIGIGRDGAFAQYVALPGRLVLPVPDGVPEAVLALVEPVACVVRAARKAGAAFGRSGVVLGAGPIGNLHVQMMRLVGMAPIIVADLSSERCRMAVEAGADAAVSEPATLRSKVLEMTGGRGADFVVESVGSSKLYRQAFDLVRKGGHVAFFGITPPGETIPIEILRTVLEENSLKGSVAGMGEDMHDALTLLSHGRFRTAAFTAAHYPLERIQEAFETIPARTGHLKTQILLDA

SEQ ID NO: 2003 - protein, 283 aa, Zea mays
  unsure (1)..(283): unsure at all Xaa locations
MDWGNRTKAAAAAAAPDERAGGGEGLGGYVKVMTDEQMEVLRKQISIYATICEQLVEMHRVLTEHQDTIAGLRFSNLYCDPLVIPGGHKITXARQRWQPTPMQLQILESIFDQGNGTPSKQKIKEITAELSQHGQISETNVYNWFQNRRARSKRKQAAASLPNNAESEAEADEEPLADKKPKSDRPPPPPPPIQDNTKATGALSADRVSGGTRHLDTGHDQTSGVMYGCNDSGLLRSSGSSGQMSLYENFMSNPRIDRFPAKVESSRSFPHLQQHGEGFGMFG

SEQ ID NO: 2004 - protein, 405 aa, Corynebacterium glutamicum ATCC 13032
MKGRPNVLAIVLAGGEGKRLFPLTEDRAKPAVPFGGTYRLIDFVLSNLVNSGFLKIAVLTQYKSHSLDRHISLSWNVSGPTGQYIASVPAQQRLGKRWFTGSADAILQSLNLISDEKPDYVIVFGADHVYRMDPSQMLDEHIASGRAVSVAGIRVPREEATAFGCIQSDVDGNITEFLEKPADPPGTPDDPDMTYASMGNYIFTTEALIQALKDDENNENSDHDMGGDIIPYFVSRNDAHVYDFSGNIVPGATERDKGYWRDVGTIDAFYECHMDLISVHPIFNLYNSEWPIHTTSEGNLPPAKFVRGGIAQSSMVSSGSIISAGTVRNSVLSNNVVVEEGATVEGAVLMPGVRIGKGAVVRHAILDKNVVVRDGELIGVDQVRDAQRFKVSAGGVVVVGKNQVV

SEQ ID NO: 2005 - protein, 493 aa, Azorhizobium caulinodans
MNVKTWSRVGLPTLLAASALALPVLAQTAAPAADAPAAAAAIPINKGDTAWMLVSAALVLMMSVPGLALFYGGLVRTKNMLSVLMQVFYTVSVVGILWVLYGYSLAFTGGSDFVGGFSKAFLAGITPDSGTGTFSVGVNIPEFAFIAFQMTFAMITPALIFGAFAERVKFSAIVLFVPLWVTFIYFPMAHMVWYWAGPDAVDAAAKALAAADAGGKAAAQSALDAVLADAGYIYKLGAIDFAGGTVVHINAGIAAFVGCLIVGKRTGYGKEAFQPHSLTLTLVGAGLLWVGWFGFNAGSNLEANGLTALAMMNTFIATCAAALSWMVVEWLAKGKPSMLGVVSGAVAGLVAVTPMAGFAGIMGSLVSGLIVGVLCFFFCTTVKNAFGYDDSLDVFGVHCIGGIFGAIATGIVVSPALGGTGIFDYTTGKVADYDMATQVIAQVKAVVVTLVWSGVGSAVLYYIVHAVVGLRATVEREREGLDITEHGERAYHS

SEQ ID NO: 2006 - protein, 555 aa, Mesembryanthemum crystallinum
MQASSCLVKGNLGFEVQNRRRGVLAVAGLGGFKNSSPILSSNLRFVNGVINKKSSSCKLTTSGSVLMGAGLARMGLDHVFQSTAKYRSVKAQAASGDYEDPAPVKFQGKSSASVLPYVGVACLGAILFGYHLGVVNGALEYLSPDLGIAGNTVLQGWVVSILLAGATVGSFTGGSLADKFGRTRTFQLDAIPLAIGAYLCATAQSVQTMMIGRLLCGIGIGISSALVPLYISEISPTEIRGALGSVNQLFICIGILAALVAGLPLAGNPLWWRTMFGIAAIPSVLLALGMAMCPESPRWLFQQGKVAEAEKASAALYGKERVPEVMNDLKASVQGSSEPEAGWFDLFSSRYRKVVSVGAALFLFQQMAGINAVVYYSTSVFRSAGIESDVAASALVGAANVFGTAIASSLMDRQGRKSLLITSFSGMAASMLLLSLSFTWPVLAPYSGTLAVLGTVLYVLSFSLGAGPVPALLLPEIFASRIRAKAVALSLGMHWASNFVIGLYFLSVVTKFGISRVYLGFASVCMLAVLYIAGNVVETKGRSLEEIERALSPAV

SEQ ID NO: 2007 - protein, 471 aa, Mycobacterium avium subsp. paratuberculosis str. k10
MSSPQEYDMVVIGSGPGGQKAAIASAKLGKSVAVVERGQMLGGVCVNTGTIPSKTLREAVLYLTGMSQRELYGASYRVKEKITPADLLARTQHVIGKEIDVVRNQLMRNRIDLLIGHGRFVDPHTIEVEDPSRREKITISGKYVVIATGTRPARPSGVEFDEDRVLDSDGILDLKSLPTSMVVVGAGVIGIEYASMFAALGTKVTVVEKRDDMLDFCDPEVVEALKFHLRDLAVTFRFGEEVTAVDVGSAGTVTTLASGKQIPAETVMYSAGRQGQTDHLDLHNAELEADNRGRIFVDDNFQTKVPHIYAVGDVIGFPALAATSMEQGRLAAYHAFGEASDGITELQPIGIYSIPEVSYVGATEVELTKDAIPYEVGVARYRELARGQIAGDSYGMLKLLVSTQDLKVLGVHIFGTSATEMVHIGQAVMGCGGTVEYLVDAVFNYPTFSEAYKVAALDVMNKVRALNQFRR

SEQ ID NO: 2008 - protein, 174 aa, Triticum aestivum
  unsure (1)..(174): unsure at all Xaa locations
MAPTVMASSATSVAPFQGLKSTAGLPVSRRSNGASLGSVSNGGRIRCMQVWPIEGIKKFETLSYLPPLSTEALLKQVDYLIRSKWVPCLDSTSWFIFXREHNASPGVLXDGGYWTMWNCXYFGXTGPTQVINEVEESKKDXPDAYFRIIXSTTSSRAWLNSSPTGSKIRKAKYH

SEQ ID NO: 2009 - protein, 477 aa, Candida albicans SC5314
MSALFAVSRSAIALRSIAPRSSTATTSSFLALARLYSSGKFPPHTVINMPALSPTMTQGNIQSWAKKVGDELTPGEAIAEIETDKASMDFEFQEEGYLAKILLDAGAKDVPVGQPIAVYVEDAGEVAAFENFTAADAGEAPKPAPAAEEEAPKKEEPKASTSTSAPASTPSPSSKKAPTDRIIASPFAKTIALEKGISLKGIKGSGPNGRIVAKDLEGVEPQAAAAAAPAAAAATAGAAPSATASYEDIPITSMRKTIASRLLQSTQQSPSYIIQSQISVSKLLKLRASLNATAEERYKLSINDLLIKAIAKTCVRIPEVNAAWLGEQGVIRQYKNVDVSVAVATPTGLITPIVTNAESKGLAEISNQVKDLGKRAKVGKLLPEEFQGGTICISNLGMNHAVTAFTSIINPPQSAILAIGTTEKKAVPSEVNEQGFVFDDVITITGTFDHRVIDGALGGEWMKELKRIVENPLEMLI

SEQ ID NO: 2010 - protein, 561 aa, Corynebacterium glutamicum ATCC 13032
MTTTTGSARPARAARKPKPEGQWKIDGTEPLNHAEEIKQEEPAFAVKQRVIDIYSKQGFSSIAPDDIAPRFKWLGIYTQRKQDLGGELTGQLPDDELQDEYFMMRVRFDGGLASPERLRAVGEISRDYARSTADFTDRQNIQLHWIRIEDVPAIWEKLETVGLSTMLGCGDVPRVILGSPVSGVAAEELIDATPAIDAIRERYLDKEEFHNLPRKFKTAITGNQRQDVTHEIQDVSFVPSIHPEFGPGFECFVGGGLSTNPMLAQPLGSWIPLDEVPEVWAGVAGIFRDYGFRRLRNRARLKFLVAQWGIEKFREVLETEYLERKLIDGPVVTTNPGYRDHIGIHPQKDGKFYLGVKPTVGHTTGEQLIAIADVAEKHGITRIRTTAEKELLFLDIERKNLTTVARDLDEIGLYSSPSEFRRGIISCTGLEFCKLAHATTKSRAIELVDELEERLGDLDVPIKIALNGCPNSCARTQVSDIGFKGQTVTDADGNRVEGFQVHLGGSMNLDPNFGRKLKGHKVIADEVGEYVTRVVTHFKEQRHEDEHFRDWVQRAAEEDLV

SEQ ID NO: 2011 - protein, 464 aa, Schizosaccharomyces pombe
MAPISKVFDYLVIGGGSGGLASARRAAKHGAKVALIEASGRLGGTCVNYGCVPKKIMWNIADLVAKMKTAKQNGFPNSQLGSFDWGMIKRKRDAYIGRLNGIYERNVNKDGVAYISGHASFVSPTEVAVDMNDGSGTQVFSAKYILIAVGGHPIWPSHIPGAEYGIDSDGFFELESQPKRVAIVGAGYIAVELAGVFAALGTETHMFIRQSKFLRKFDPIISDGIMDHFQHIGINVHTNSLEFKKVEKLPSGELCIHQQDGSTFNVDTLLWAIGRAPKIQGLRLEKAGVKTLPNGIIIADTYQRTNVPTVLSLGDVCGKLELTPVAIAAGRRLSDRLFGGIKDAHLDYEEVPSVVFAHPEAGTIGLTEQEAIDKYGESQIKVYNTKFNGLNYSMVEQEDKVPTTYKLVCAGPLQKVVGLHLVGDFSAEILQGFGVAIKMGATKSDFDSCVAIHPTSAEELVTLV

SEQ ID NO: 2012 - protein, 349 aa, Aspergillus flavus
MSIPEMQWAQVAEQKGGPLIYKQIPVPKPGPDEILVKVRYSGVCHTDLHALKGDWPLPVKMPLVGGHEGAGVVVARGDLVTEFEIGDHAGLKWLNGSCLACEFCKQADEPLCPNASLSGYTVDGTFQQYAIGKATHASKLPKNVPLDAVAPVLCAGITVYKGLKESGVRPGQTVAIVGAGGGLGSLALQYAKAMGIRVVAIDGGEEKQAMCEQLGAEAYVDFTKTQDLVADVKAATPEGLGAHAVILLAVAEKPFQQAAEYVSRGTVVAIGLPAGAFLRAPVFNTVVRMINIKGSYVGNRQDGVEAVDFFARGLIKAPFKTAPLQDLPKIFELMEQGKIAGRYVLEIPE

SEQ ID NO: 2013 - protein, 238 aa, Zea mays
  unsure (1)..(238): unsure at all Xaa locations
MARPPCCDKEGVKKGPWTPEEDLVLVSYIQDHGPGNWRAVPTRTGLMRCSKSCRLRWTNYLRPGIRRGNFTEQEEKLIVHLQALLGNRWAAIASYLPERTDNDVKNYWNTHLKRKLQAGSGDGDGDGAAKPPAHRPSPSNSKGQWESRLQTNINMARRALREALTPLGDLKPQQQRFGGGDSPASTSSXQCSPPPAPAAEGPYVLTADTVSRMLDGWAGLNGKRRGGADEAADRAVPG

SEQ ID NO: 2014 - protein, 1257 aa, Corynebacterium glutamicum ATCC 13032
MLQLGLRHNQPTTNVTVDKTKLNKPSRSKEKRRVPAVSSASTFGQNAWLVDEMFQQFQKDPKSVDKEWRELFEAQGGPNTTPATTEAQPSAPKESAKPAPKAAPAAKAAPRVETKPADKTAPKAKESSVPQQPKLPEPGQTPIRGIFKSIAKNMDISLEIPTATSVRDMPARLMFENRAMVNDQLKRTRGGKISFTHIIGYAMVKAVMAHPDMNNSYDVIDGKPTLIVPEHINLGLAIDLPQKDGSRALVVAAIKETEKMNFSEFLAAYEDIVARSRKGKLTMDDYQGVTVSLTNPGGIGTRHSVPRLTKGQGTIIGVGSMDYPAEFQGASEDRLAELGVGKLVTITSTYDHRVIQGAVSGEFLRTMSRLLTDDSFWDEIFDAMNVPYTPMRWAQDVPNTGVDKNTRVMQLIEAYRSRGHLIADTNPLSWVQPGMPVPDHRDLDIETHNLTIWDLDRTFNVGGFGGKETMTLREVLSRLRAAYTLKVGSEYTHILDRDERTWLQDRLEAGMPKPTQAEQKYILQKLNAAEAFENFLQTKYVGQKRFSLEGAEALIPLMDSAIDTAAGQGLDEVVIGMPHRGRLNVLFNIVGKPLASIFNEFEGQMEQGQIGGSGDVKYHLGSEGQHLQMFGDGEIKVSLTANPSHLEAVNPVMEGIVRAKQDYLDKGVDGKTVVPLLLHGDAAFAGLGIVPETINLAKLRGYDVGGTIHIVVNNQIGFTTTPDSSRSMHYATDYAKAFGCPVFHVNGDDPEAVVWVGQLATEYRRRFGKDVFIDLVCYRLRGHNEADDPSMTQPKMYELITGRETVRAQYTEDLLGRGDLSNEDAEAVVRDFHDQMESVFNEVKEGGKKQAEAQTGITGSQKLPHGLETNISREELLELGQAFANTPEGFNYHPRVAPVAKKRVSSVTEGGIDWAWGELLAFGSLANSGRLVRLAGEDSRRGTFTQRHAVAIDPATAEEFNPLHELAQSKGNNGKFLVYNSALTEYAGMGFEYGYSVGNEDSIVAWEAQFGDFANGAQTIIDEYVSSGEAKWGQTSKLILLLPHGYEGQGPDHSSARIERFLQLCAEGSMTVAQPSTPANHFHLLRRHALSDLKRPLVIFTPKSMLRNKAAASAPEDFTEVTKFQSVINDPNVADAAKVKKVMLVSGKLYYELAKRKEKDGRDDIAIVRIEMLHPIPFNRISEALAGYPNAEEVLFVQDEPANQGPWPFYQEHLPELIPNMPKMRRVSRRAQSSTATGVAKVHQLEEKQLIDEAFEA

SEQ ID NO: 2015 - protein, 549 aa, Brucella melitensis 16M
MARDATKLEATVAKLKKHWAESAPRDMRAAFSADPGRFGRYSLCLDDLLFDWSKCRVNDETMALLKELAVAADVEGRRAAMFAGEHINNTEDRAVLHVALRDTSSKEVLVDGHNVLPDVKHVLDRMAAFADGIRSGALKGATGRKITDIVNIGIGGSDLGPVMATLALAPYHDEPRAHFVSNIDGAHIADTLSPLDPASTLIIVASKTFTTIETMTNAQTARKWVADTLGEAAVGAHFAAVSTALDKVAAFGIPEDRVFGFWDWVGGRYSVWSAIGLPVMIAVGPDNFRKFLAGAHAMDVHFRDAPLEKNLPVMLGLIGYWHRAICGYGSRAIIPYDQRLSRLPAYLQQLDMESNGKSVTLDGKPVSGPTGPVVWGEPGTNGQHAFFQLLHQGTDTIPLEFIVAAKGHEPTLDHQHEMLMANCLAQSEALMKGRTLDEARAQLQAKNLPASQVERIAPHRVFSGNRPSLTLIHDMLDPYTLGRLIALYEHRVFVEAQIFGINAFDQWGVELGKELATELLPVVSGKEGASGRDASTQGLVAHLHARRKA

SEQ ID NO: 2016 - protein, 317 aa, Zea mays
  unsure (1)..(317): unsure at all Xaa locations
MKSRFLVLCAIVCVMAQMGDANVVLLGNNLTLSFADIEASFSPGVKGSGVNGIVYASEPLNACSPLTIKAVKGPPSPFALIIRGGCTFDEKVKNAQDAGFKAAIVYDNGIRGVLVSMAXSSSGIHIYAVFVSKASGEVXKKSSGHTDVEXTCFFVRRHRIRRDHPRIPEAREFHGMSSQLVKAMPSLIFTKVQEDNCTSSMCAICLEDYSVGEKLRVLPCRHKFHAACVDLWLTSWRTFCPVCKRDATSGVSELPATEATPLLSSAVRLPSQPSSFRSSVAASPPRPISRHPSLHSVSRAYSVSSTPHSPNPFRSHT

SEQ ID NO: 2017 - protein, 418 aa, Pseudomonas putida KT2440
MGYQKIKVPTDGTKITVNADHSLNVPDHPIIPYIEGDGIGVDVSPVMIKVVDAAVQKAYGGKRKIAWMEVYAGEKATQVYDQDTWLPQETLDAVRDYVVSIKGPLTTPVGGGIRSLNVALRQQLDLYVCLRPVLWFQGVPSPVKKPGDVDMVIFRENSEDIYAGIEWKAGSPEANKVIKFLKEEMGVTKIRFDQDCGIGVKPVSKEGTKRLVRKALQYVVDNDRESLTLVHKGNIMKFTEGAFKDWGYEVARDEFGAELLDGGPWMKFKNPKTGREVIVKDAIADAMLQQILLRPAEYDVIATLNLNGDYLSDALAAEVGGIGIAPGANLSDTVAMFEATHGTAPKYAGQDKVNPGSVILSAEMMLRHMGWTEAADLIIKGTNGAIAAKTVTYDFERLMEGAKLVSSSGFGDEMIKHM

SEQ ID NO: 2018 - protein, 575 aa, Arabidopsis thaliana
MATSSAWKLDDHPKLPKGKTIAVIVLDGWGESAPDQYNCIHNAPTPAMDSLKHGAPDTWTLIKAHGTAVGLPSEDDMGNSEVGHNALGAGRIFAQGAKLCDQALASGKIFEGEGFKYVSESFETNTLHLVGLLSDGGVHSRLDQLQLLIKGSAERGAKRIRVHILTDGRDVLDGSSVGFVETLEADLVALRENGVDAQIASGGGRMYVTLDRYENDWEVVKRGWDAQVLGEAPHKFKNAVEAVKTLRKEPGANDQYLPPFVIVDESGKAVGPIVDGDAVVTFNFRADRMVMHAKALEYEDFDKFDRVRYPKIRYAGMLQYDGELKLPSRYLVSPPEIDRTSGEYLTHNGVSTFACSSSCLLIIGLYYALHFCQYETVKFGHVTFFWNGNRSGYFNEKLEEYVEIPSDSGISFNVQPKMKALEIGEKARDAILSGKFDQVRVNIPNGDMVGHTGDIEATVVACEAADLAVKMIFDAIEQVKGIYVVTADHGNAEDMVKRDKSGKPALDKEGKLQILTSHTLKPVPIAIGGPGLAQGVRFRKDLETPGLANVAATVMNLHGFVAPSDYEPTLIEVVE

SEQ ID NO: 2019 - protein, 269 aa, Brucella melitensis 16M
MSQQNGNVNRVGAQDRVGASGGMEHSFGFKAVDENEKQGLVNDVFHKVAKRYDIMNDLMSAGMHRVWKDAMVAWLAPSKRPGWTSLDVAGGTGDIAFRIVEASGRQAHVTILDINGSMLGVGRERAIKKGLIDNLEFVEANAEELPFEDNSFDAYTIAFGIRNVPHIDKALSEAYRVLKPGGRFLCLEFSEVELPVLDKVYDEWSFRAIPRIGKMITGDADSYSYLVESIRKFPKQQDFAAMIEKAGFERVSYRNFTGGIAALHSGWKL

SEQ ID NO: 2020 - protein, 572 aa, Streptococcus pyogenes M1 GAS
MTYTENFQKWLDFEQLPDYLRQELLSMDEKTKEDAFYTNLEFGTAGMRGYIGAGTNRINIYVVRQATEGLAKLIETKGEEAKKRGVAIAYDSRHFSPEFAFESAQVLAQHGIKSYVFEALRPTPELSFAVRHLNAYAGIMVTASHNPAPFNGYKVYGQDGGQLPPADADALTDFIRAIENPFAVELADLDENKSSGLIQVIGEDVDMEYLREVKDVNINQDLINNFGKDMKIVYTPLHGTGEMLTRRALAQAGFESVVVVESQAKADPDFSTVKSPNPESQAAFALAEELGREVEADVLVATDPDADRLGVEIRQPDGSYKNLSGNQIGAIIAKYILEAHKTAGTLPENAALAKSIVSTELVTKIAESYGATMFNVLTGFKFIAEKIQEFEEKHNHTYMFGFEESFGYLIKPFVRDKDAIQAVLLVAEIAAYYRSRGLTLADGIDEIYKEYGYFAEKTISVTLSGVDGAAEIKKIMDKFRENGPKQFNNTDIVLLEDFQKQTATKNDGTISNLTTPPSNVLKYTLADDSWIAVRPSGTEPKIKFYIATIGDTLDIAQEKIANIETEINTFVG

SEQ ID NO: 2021 - protein, 253 aa, Zea mays
  unsure (1)..(253): unsure at all Xaa locations
MACPRGRTPFPLCFFLMICLMAQLGASNVVLMANNTTLSFDDVEAAFTPAVEGSGVSGVLYAVEPKDACSPLRAKAIHGSVSPFALIIRGGCQFDDKIRNAQNAGFKAAVVYNNEDNDILVSMAGSLLGVQIYAVFISKASGEELKKYSGQTDAELWIIPTYENSAWPIMAISFISLLAMSAILVACXFAREPRARREKARLHKALVSHLPRTQGLPHDVPPHDVADEVPFPYSPLHELIVWVFCGQCQRSLL

SEQ ID NO: 2022 - protein, 175 aa, Oryza sativa (japonica cultivar-group)
MAPSVMASSATTVAPFQGLKSTAGMPVARRSGNSSFGNVSNGGRIRCMQVWPIEGIKKFETLSYLPPLTVEDLLKQIEYLLRSKWVPCLEFSKVGFVYRENHRSPGYYDGRYWTMWKLPMFGCTDATQVLKELEEAKKANPDAFVRIIGFDNVRQVQLISFIAYKPPGCEESGGN

SEQ ID NO: 2023 - protein, 282 aa, Zea mays
QVSSSSSFLVTVAGLTEVTMAFAVSDELLGTFVPIAVYWLYSGLYVVLDGLGMDDYRLHPKGEEARNIVSRWTVVRGVLVQQAFQIAVSLLLFTVLGDDNGTVRKQPPALVMALQFLIAMFVMDTWQYFMHRYMHINRFLYKHVHSKHHTLVVPYAFGALYNHPLEGLILDTVGGALSFLISGMTPRIGIFFFSFATIKTVDDHCGLWLPGNILHVFFSNNSAYHDIHHQLYGNKYNFSQPFFVMWDKILGTYMPYTLETRKGGGFEARPVKLDQAQQIKAD

SEQ ID NO: 2024 - protein, 280 aa, Thalassiosira weissflogii
PHSFPPHSVALQVLGTFILWFGWYGFNPGSTLGISGEGVPDVAALCAVTTTIAAASGSVSAMFTDMLPSRRSTGETMYDITMCMNGALSGLVGITAGCSVVEPWAAFVIGIVAGWTYIFWSALLVKLKIDDAVDAIPVHFGNGIWGCIAVGLFAEPTRTINAFGEHGHYGRFYSWGNGSADAHLLAAQVCGVLWIIGWVTVIMLPYFLILNAIGLFRVDALEEEVGLDISHHKGAAYDMSGPSADVQEKFEISRSQRKIRFPRRTLMKQPKQATLQLLDF

SEQ ID NO: 2025 - protein, 117 aa, Oryza sativa
  unsure (1)..(117): unsure at all Xaa locations
MAPSVMAXSATTVAPLQGLKSTAGMPVARRSGNCSFGNVSNGGRIRCMQAWPIEGIKKVETLCYLTPITVEDLLKQIEYLLRSKRVPCLEYSKDGFVYRENHRSPEYYDGRYWTMWK

SEQ ID NO: 2026 - protein, 250 aa, Nanoarchaeum equitans Kin4-M
MDFMQLPQVMGYDRASTLFSPDGRLLQVEYARTTVKQSPTAIGMLYKTGVLVIGDKKIVEKFVIPSSIEKVYIVDDHVIAAPAGIIGDGRVLIERARVIAQTYKYFYGHPIDIRGLVKEIADIKQEYTQIGGVRPFGVSIIFAGIDDTGKHIFVTEPGGMFWEYKLAVIGEGEQKVLDYLGKEYNENLSLKKAIELGLKALYNFYKENNNELTAEKLDIAYVDEKTKKAKYVDVNEIEKILEKIKSGGNS

SEQ ID NO: 2027 - protein, 348 aa, Saccharomyces cerevisiae
MSIPETQKGVIFYESHGKLEHKDIPVPKPKANELLINVKYSGVCHTDLHAWHGDWPLPVKLPLVGGHEGAGVVVGMGENVKGWKIGDYAGIKWLNGSCMACEYCELGNESNCPHADLSGYTHDGSFQQYATADAVQAAHIPQGTDLAQVAPILCAGITVYKALKSANLMAGHWVAISGAAGGLGSLAVQYAKAMGYRVLGIDGGEGKEELFRSIGGEVFIDFTKEKDIVGAVLKATDGGAHGVINVSVSEAAIEASTRYVRANGTTVLVGMPAGAKCCSDVFNQVVKSISIVGSYVGNRADTREALDFFARGLVKSPIKVVGLSTLPEIYEKMEKGQIVGRYVVDTSK

SEQ ID NO: 2028 - protein, 354 aa, Candida albicans SC5314
MGAITRSKSITTKSVTSSTRKTAIVDSNSKLSQTSIENAKIIKKPKLSKPKPKLTKSSSDLEDLLTHITIPQDLSLPPKYIQDHTPEFIKGIQHILKIDPSLYPVIVHQNFKSFSSLIYTNVTMNENYNNSNDKENRIHTYWYSLIRSVIAQQVSGAAAKAIQTRFEGLFDGIPTPDKTLKFTPEELKSVGLSNMKVKYVQSISEAFNDPNNHLTRFEFYKQSKLDDILIELCKLKGIGIWSAKMFAMFTLEEMDVFAEDDLGIARGMARYLNKRPELLKQIKQECMNDEESQLLLKRKSKFANKTDSKRNWTPIHDAYVKYAAKRFSPYRSVFMMILWRLSSTNIDVLEKLDE

SEQ ID NO: 2029 - protein, 424 aa, Mesorhizobium loti
MTAIIDIVGREILDSRGNPTVEVDVVLEDGSMGRAAVPSGASTGAHEAVELRDGGARYLGKGVLKAVEAVNGELFEAIGGMEAENQIHIDQTMIELDGTPNKSRLGANAILGVSLAVAKAAADAAGLPLYRYVGGTKAHILPVPMMNIINGGAHADNPIDFQEFMILPVGAPTLREGVRWGSEIFHTLRKKLKDAGHNTNVGDEGGFAPNLKSAPVALDFIMESIEKAGFKPGEEIALGLDCAATEFFKDGNYVYEGEKKTRDPKAQAKYLAKLAADYPIVSIEDGLAEDDWEGWKYLTDLIGKKTQLVGDDLFVTNTARLRDGIRMGVANSILVKVNQIGSLTETLDAVETAHKAGYTAVMSHRSGETEDSTIADLAVATNCGQIKTGSLSRSDRMAKYNQLIRIEEELGKQARYAGKSVIKG

SEQ ID NO: 2030 - protein, 408 aa, Neurospora crassa
MATRRSARLSALAVAQLNDAAAPILPPPAPAPKSRKRKASVEDEGAPATEEPQLPSTPQKRKVSKKTAPPPATPTPAAAALLSSPAVQKPKPAAVSRLADPNKTNAPLLSPQTSRVVSSSPIRPRDIRDGLSPSKPQAPGWTTKDSESTTTENILEKACAHLIAIDPRMKPLIDKHPCRVFSPEGLAEQIDPFESLVSSIISQQVSGAAAKSIKAKFVALFEEEDDPPSDQEDGKEKKKTQENDPTPTPTKRRFPTPAHILAKDLPTLRTAGLSQRKAEYIHGLAAKFASGELSASLLASAPYEELVAKLVAVRGLGLWTVEMFACFALKRMDVFSLGDLGVQRGMAAFVGRDVKKLKNGGNGNGKDKKWKYMSEAEMREISERFRPYRSLFMWYMWRVEETDVSTME

SEQ ID NO: 2031 - protein, 226 aa, Nanoarchaeum equitans Kin4-M
MKEVIARLKIGKETFEVYVDFEEAIKLKEGKPYDKEKLLLVPEIFRNVKTGERQSEEVLKKVFKTTDVYVIAEQIIKKGQLQIPTEYKRKIKEELKRKIIELIRKNYIDPRTGLPYTYQRIELAMEKAKINIDITKPAEAQLESIVKELKKIIPLKGEKIRIVIKIPNEYIYKAYSYIKSFRPQKEEFSDNYYAILSLPAGIYQEFIEKIEKLTEGNAEIKELERY

SEQ ID NO: 2032 - protein, 415 aa, Rhodospirillum rubrum
MTSLAPPLAAGLASPTPEDLRDYLEVEHRLGAHNYKPLDVVLTRGQGVWVWDVAGRRYLDCLSAYSAVNQGHCHPRILEALIAQAGRLTLTSRAFHNDQLAPFYEEICALTGSHKVLPMNSGAEAVESALKCVRKWGYREKGVAEDQAEIIVCSDNFHGRTIAIVGFSSDPDARRDFGPFAPGFRCVPFGDGDALEAAITPRTVAVLIEPIQGEAGVIIPPPGYLKRVRDLCTAQGVMLILDEIQTGLGRTGALLAEEHEGIEADLTLVGKALSGGFYPVSAVLSNSEVLGVLRPGEHGSTFGGNPLACAVARMALKVLVDEDMIGNAARQGAYFLEKLRGLGNPLIRAVRGRGLMLAVEFAPEAGGARPFCEKLKDKGILCKETHRDIIRFAPPLVITEKEIDWAMERIAEVIG

SEQ ID NO: 2033 - protein, 123 aa, Dianthus caryophyllus
MITIHHPWVFAFGLLGNFISFMVFLAPLPTFIRVYKKKSTEGFQSFPYVVAIFSAMLWIYYALLKGNSLLLITVNVTGVIIETIYVIIFITYAPRQARISTMKLLLFMNFGGFCMIVPRPRPR

SEQ ID NO: 2034 - protein, 142 aa, Saccharomyces cerevisiae
MTEDIEQKKTATEVTPQEPKHIQEEEEQDVDMTGDEEQEEEPDREKIKLLTQATSEDGTSASFQIVEEDHTLGNALRYVIMKNPDVEFCGYSIPHPSENLLNIRIQTYGETTAVDALQKGLKDLMDLCDVVESKFTEKIKSM

SEQ ID NO: 2035 - protein, 442 aa, Oryza sativa (japonica cultivar-group)
MPTPRPRHRHHALPLALALAAPLLLLAAADGQPNESRDKNNGGGGGGFMAPSGGGGGMGSQSPSFSAPMVVLLVALIAAFFFIGFFSIYIRRCGGEASTGPTIPAAALAALSRQEQRSRRQRGLDPAVVESFPTMKYAEARELRDGGKDAVLECAVCLSEFDDDEELRLLPKCSHAFHPDCIGEWLAGHVTCPVCRCNLAPDAAAAEANVVSGEVDGEQQEEEVVVAIDVDREGEEEDEERRREAMELERIGSQRRAVRSRSGRPLPLPRSHSTGHSLATTRLGDAGDLERFTLRLPEHVRREMVAAAGEESLRRTAVREGRVGGGARSARIGRSDRWPSFIARTFSSRIPFWSASRRVLDAAEAGADAAATTTTTTPTSTARTKRDKTAAAADGSVSSAKGSVRFDCLGGGGGGGGPSNRVVAFANDDEEDDDEKPIARQV

SEQ ID NO: 2036 - protein, 554 aa, Pseudomonas putida KT2440
MAYYRTPHDVTALPAWQALQKHRDAMQSFSMREAFAADAKRFDQFSLSACGLFLDYSKNLITEQSRDLLVNLANEVGLQDAIKSMFSGEIINASEGRPVLHTALRRPVGDKLSVNGVNVMPEVHKVLNQITELVGRIHDGLWRGYSEKPITDVVNIGIGGSFLGPELVSEALLPYAQRGVRCHYLANIDGSEFHELSANLRAETTLFIVSSKSFNTLETLKNAMAARTWYLAQGGSEAELYRHFIAVSSNKAAAVAFGIREENIFPMWDWVGGRYSLWSAIGLPIALAIGTANFKELLSGAYTMDQHFQTAPFDKNMPVLLALLGVWYGNFWDANSHAILPYDHYLRNITKHLQQLDMESNGKSVLQDGTPVKTDTGPVIWGGVGCNGQHAYHQLLHQGTQLIPADFIVPVVSFNPVADHHQWLYANCLSQSQALMLGKTREEAEAELRAKGLNEADIEKLAPHKVIPGNRPSNTLVVERISPRRLGALVAMYEHKVFVQSVIWGINAFDQWGVELGKELGKGVYQRLVGSLEDSAEDGSTQGLINYFRGRHRG

SEQ ID NO: 2037 - protein, 306 aa, Gluconacetobacter xylinus
MSEHTATKPPKGILLAGGSGTRMHPMTQAVSKQLLPVYDKPMIFYPLSTLMLAGIRDIMIISTPADLPLFRRFVGDGSDMGVTFTYREQPSPDGIAQAIVIADDWLDDAPCALILGDNLIFADHLGRQLREAAARPTGDTVFAYEVRDPERYGVVSFSADGHALDIVEKPTSPQSNWAVTGLYFYDGRVREYARSLKPSSRGELEITDLNRIYLQKDDLHVQRLGRGCAWLDAGMPDSLMQAGQFVQTIRSRQGLLVGSPHEVAFRRGFIDAAALKFYAQRMIKTELGRELMKIASTLPQKDAVAA

SEQ ID NO: 2038 - protein, 484 aa, Agrobacterium tumefaciens
MIKLKNAALLRDACLVNGRWLKAADGKTIAVENPANSMIIGHVPSLSADEVEAAVESANKAFSEWSRRAAKDRAAILRRWFDLMVANADDLGALMTAEQGKPFAEARGEALYAASFVEWFAEEAKRVYGDTIPSPTTDKRITILKQPIGVCAAITPWNFPAAMITRKAAPALAAGCTMIVKPAEQTPLTALALGVLAEEAGVPAGVFQVVTGAARDIGKVFTESDTVRKISFTGSTEVGRLLMAQSAPTIKKLSLELGGNAPFIVFDDADLDAAVEGAIVSKYRNAGQTCVCSNRIYVQDGVYDAFAEKLVKRVESLSVGEGTEPGVLIGPLIDQDAVAKVEDHVADALGKGAKIVTGGKRHALGGTFYEPTVLTGATQAMKVAREETFGPVAPLFRFGTEDEAVAMANDTEFGLAAYFYTENVRRTWRVAEALEYGMVGHNTGLISNEVAPFGGVKQSGLGREGSHYGIDEYLEIKYLCSAIG

SEQ ID NO: 2039 - protein, 469 aa, Oryza sativa
MAKPRKNSTTTNTSSSGVAAAAAAAAVKPKRTRKSVPRESPSQRSSVYRGVTRHRWTGRFEAHLWDKNSWNESQNKKGKQVYLGAYDDEEAAARAYDLAALKYWGPDTILNFPLSAYEGELKEMEGQSREEYIGSLRRKSSGFSRGVSKYRGVARHHHNGRWEARIGRVFGNKYLYLGTYATQEEAAMAYDMAAIEYRGLNAVTNFDLSRYIKWLRPGADGAGAPQNPHPMLGALSAQDLPAIDLDAMASSFQHDGHGAAAAAAQLIPARHSLGHTPTTSALSLLLQSPKFKEMIERTSAAETTTTSSTTTSSSSPSPPQATKDDGASPQCSFPEDIQTYFGCAAEDGAAGAGYADVDGLFFGDLAAYASPAFHFELDLVVSESSAFDSKLSSEDLLHCTHRWRRRLLTGEVIGEVKFLSRGRPHGLQHGAREVVVRDIELLHLLHPGHLRWERASEGVEADVEECDLP

SEQ ID NO: 2040 - protein, 457 aa, Panicum miliaceum
MASAAFALTSPAAPAIAARSKVLGWGKNQGRNGCRVGITRKNFGRVLMALAVDVSRFEGVPMAPPDPILGVSEAFKADKNDLKLNLGVGAYRTEELQPYVLNVVKKAENLMLEKGENKEYLPIEGLAAFNKATAELLLGADNPVIKQGLVATLQSLSGTGSLRLAAAFIQRYFPEAKVLISSPTWGNHKNIFNDARVPWSEYRYYDPKTVGLDFEGMIADIEAAPEGSFVLLHGCAHNPTGIDPTPEQWEKIADVIQEKKHMPFFDVAYQGFASGSLDEDAFSVRLFVKRGMEVFVAQSYSKNLGLYAERIGAINVVCSAPEVADRVKSQLKRLARPMYSNPPIHGARIVANIVGDPTMFGEWKQEMEQMAGRIKNVRQKLYDSLSAKDKSGKDWSFILRQIGMFSYTGLNKAQSDNMTDKWHVYMTKDGRISLAGLSLAKCDYLADAIIDSFHNVS

SEQ ID NO: 2041 - protein, 150 aa, Lycopersicon esculentum
PGRTDEESDKEIVFHFKNNKRALLKDEDCESNSISDPKTPPVAKTQIVGWPPVRANRKNSFPSKKAEAECGMYVKVSMDGAPYLRKIDLKLYKGYPELLKALEKMFKLSIGEYSEREGYKGSEFAPAYEDKDGDLMLVGDVPFEMFLSSC

SEQ ID NO: 2042 - protein, 548 aa, Pseudomonas syringae pv. tomato str. DC3000
MSELIRVPDIGNGEGEVIELMVKVGDRIEADQSVLTLESDKASMEIPAPKAGVIKAMKVKLGDRLKEGDELFELEVEGEASAAPAPAAEPAAAAAPAAAEKPAEAAPAAAEPAPAAAATVQDIHVPDIGSSGKAKIIELMVKVGDSITADQSLITLESDKASMEIPSPAAGVIESIEVKLDQEVGTGDLILKLKVAGAAPAAAPAPAASAPAAAPAKAEAAAPAAAPAPKAEAAPAPAAPAKDGAKVHAGPAVRQLAREFGVELSAVSATGPHGRVLKEDVQVYVKAMMQKAKEAPAGGASGGSGIPPIPEVDFSRFGEIEEVPMTRLMQLGASGLHRSWLNIPHVTQFDQADITDLEAFRVAQKGAAEKAGVKLTVLPLLLKACAHLLKELPDFNASLAPSGKAVIRKKYVHIGFAVDTPDGLLVPVIRDVDQKSLLQLAAEAAVLAEKARSKKLTANDMQGACFTISSLGHIGGTGFTPIVNAPEVAILGVSKATIQPVWDGKAFQPKLMLPLSLSYDHRVINGAAAARFTKRLSELLTDIRTILL

SEQ ID NO: 2043 - protein, 570 aa, Escherichia coli
MSEKHPGPLVVEGKLTDAERMKLESNYLRGTIAEDLNDGLTGGFKGDNFLLIRFHGMYQQDDRDIRAERAEQKLEPRHAMLLRCRLPGGVITTKQWQAIDKFAGENTIYGSIRLTNRQTFQFHGILKKNVKPVHQMLHSVGLDALATANDMNRNVLCTSNPYESQLHAEAYEWAKKISEHLLPRTRAYAEIWLDQEKVATTDEEPILGQTYLPRKFKTTVVIPPQNDIDLHANDMNFVAIAENGKLVGFNLLVGGGLSIEHGNKKTYARTASEFGYLPLEHTLAVAEAVVTTQRDWGNRTDRKNAKTKYTLERVGVETFKAEVERRAGIKFEPIRPYEFTGRGDRIGWVKGIDDNWHLTLFIENGRILDYPARPLKTGLLEIAKIHKGDFRITANQNLIIAGVPESEKAKIEKIAKESGLMNAVTPQRENSMACVSFPTCPLAMAEAERFLPSFIDNIDNLMAKHGVSDEHIVMRVTGCPNGCGRAMLAEVGLVGKAPGRYNLHLGGNRIGTRIPRMYKENITEPEILASLDELIGRWAKEREAGEGFGDFTVRAGIIRPVLDPARDLWD

SEQ ID NO: 2044 - protein, 453 aa, Mesorhizobium loti MAFF303099
MPINITMPALSPTMEEGNLSKWLVKEGDKVSPGDVIAEIETDKATMEVEAVDEGTVAKLVVPAGTEGVKVNALIAVLAAEGEDASAAAKSGGGAAPAKAEAPKADAPKAEAPKAEPAAAAAPKAEPAPVANGHAAGERTFASPLARRIAKEAGVDVSAVTGTGPHGRVVKADVDAAIAGGGAKAALAAKAPAGAPAAPAPAVKPMSDDQVLKLFEQGSYELVPHDNMRKTIARRLVEAKSTIPHFYLTLDCELDALLALRTQINAAAPMKKTEKGDVPAYKLSVNDMVIKAMAMALKAVPDANASWTETAMVKHKHADVGVAVSIPGGLITPIIRKADEKTLSTISNEMKDLASRARSRKLKPEEYQGGTTAVSNLGMFGIKDFAAVINPPHATILAVGAGEERAVVKNGELKIATVMSVTLSTDHRAVDGALGAELLVAFKRLIENPMGMLV

SEQ ID NO: 2045 - protein, 459 aa, Bacillus cereus ATCC 14579
MNEKYDKHRKELLEEDFNKHRELTEPAKFHSQTVGSRGPVLEQDSVLHESLQQFIHEKILERPVHVKGFGAFGYFQTIYSMSEHTKLSFLQNSNEKVPVMVRFSLAVSTKGTPDTARNVRGFSTKFYTKEGIFDLLCNHIPVFSVRDPMRFPETIQALLPSPKNNLIDPNRFWSFVAKAPESIHFVVRLYSNNGTAKSLRHIPGHSVNTYVWRNAEGNRKYVKYHWYPFEGVQYITSKEAIKLAAENPDYSGKDLYDAIENGKPVEYGLYVQLMDPKDETHLSYDPLDDTKVWDEQTYPLIPVGKMVLNKNPENFMEQVEKVAFSPSNLLEGAELSDDKMLQGRANIYSDSQRRRIGPEFRKLTINQQQDWTPANQITTGEGRYVEGKLERASITKQDDFTQAGEFYTKLQPIEKEHLAENLASDLKVISDDIREIVLGYFNQVSTDLKTSIETKMKEH

SEQ ID NO: 2046 - protein, 481 aa, Mesorhizobium loti MAFF303099
MAENYDVIIIGSGPGGYVTAVRSAQLGFKTAIVEREHLGGICLNWGCIPTKALLRSAEIMHYSDHLKDYGLKLDGKVSVDTSAVVDRSRKVSLRLNGGVAFLMKKNKVDVIWGEAKLSKPGEVVVSKTAKTPMEPQPPVPKGVKGEGTYTAKHIILATGARPRALPGIEPDGKLIWTYFEAMVPKEMPKSLLVMGSGAIGIEFASFYRTMGADVTVVELLPAVMPVEDAEVSKFAQKQFEKQGMKIILEAKVTKVEKGANSVTAHVEMKDGKVEKITADRMISAVGVQGNIENLGLEALGVKTDRGCIVVDGYGKTNVPGIYAIGDVAGPPMLAHKAEHEGVVCVEKIAGFPGVHAIDKLKIPGCTYCNPQVASVGLTEAKAKAEGKDIRVGRFQFAANGKAIALGEDQGFIKTIFDKKTGQLLGAHMVGAEVTELIQGFVVAMNLETTEEELMHTIFPHPTLSEMMKESVLDAYGRALNA

SEQ ID NO: 2047 - protein, 400 aa, Chlamydia trachomatis
MDFRWFMKRNPHFVSLTKNYLFADLQKRVAQFRLENPQHTVINLSIGDTTQPLNASVAEAFASSIARLSSPTTCRGYGPDFGLPALRQKLSEDFYRGFVDAKEIFISDGAKVDLFRLLSFFGPNQTVAIQDPSYPAYLDIARLTGAKEIIALPCLQENAFFPEFPEDTHIDILCLCSPNNPTGTVLNKDQLRAIVHYAIEHEILILFDAAYSTFISDPSLPKSIFEIPDARFCAIEINSFSKPLGFAGIRLGWTVIPQELTYADGHFVIQDWERFLSTTFNGASIPAQEAGVAGLSILPQLEAIHYYRENSDLLRKALLATGFEVFGGEHAPYLWVKPTQANISDRDLFDFFLREYHIAITPGIGFGRSGSGFVRFSSLGKREDILAACERLQMAPALQS

SEQ ID NO: 2048 - protein, 136 aa, Glycine max
  unsure (1)..(136): unsure at all Xaa locations
ASSLISSPAATTVNRAGAGLVAPFTGLKSMAGFPTRKTNNDITSIASNGGRVRCMQVWPPIGKKKFETLSYLPYLDDAQLAKEVEYRVKKRLMPYLEFEVKHDCVYREHNRSPRCYNRLYXTMIKLAMFSCTEACQ

SEQ ID NO: 2049 - protein, 454 aa, Pirellula sp.
MFRLSRSTSISDSATNTVERLESEVRGYCRLFPSVFQTAKGSTLMTAEGRQFIDFFCGAGSLNYGHNPPAVKQALLDYVSHDGIQHSLDMMTEAKAQFLDRFEQTILRPRSMDYKIQFTGPTGTNAVEAAIKLAKQHRKRSHVVAFTNAYHGHSLGSLSLTGNQSYHSEYYGSHNNVSFLPYDGYLGDFDTTILLEKMLTDRSSGMPLPAAVVLETIQGEGGIHVANDAWLQRVQTLCREHDVLLIVDDIQVGNGRTGEFFSFEKAGLSPDLICLSKSIGGGLPLSLVMIRPECDVWQPGQHTGTFRGNNLAFVAANAVLNHWNEGSFVDGIQVRSNTLQAFLSSIVSEHVSENWDLRGRGMIWGLDVRRGDLARKVIDTAFQNGLLLESCGSDDEVLKFIPALNIPEQQLQQGLQLFRQSLQTVFPNPSATTPTLIPSTGSPVTSFGSSMVVS

SEQ ID NO: 2050 - protein, 378 aa, Bacillus subtilis subsp. subtilis str. 168
MKAVTYQGIKNVVVKDVPDPKIEKSDDMIIKVTSTAICGSDLHLIHGFIPNMQEDYVTGHEPMGIVEEVGSGVTKLKKGDRVIIPFNIACGECFFCKNQLESQCDQSNDNGEMGAYFGYSGQTGGYPGGQAEYLRVPFANFTHFKIPESCEEPDEKLSVIADAMTTGFWSVDNAGVKKGDTVIVLGCGPVGLFAQKFCWLKGAKRVIAVDYVNYRLQHAKRTNKVEIVNFEDHENTGNYLKEITKGGADVVIDAVGMDGKMSDLEFLASGLKLHGGTMSALVIASQAVRKGGTIQITGVYGGRYNGFPLGDIMQRNVNIRSGQAPVIHYMPYMFELVSTGKIDPGDVVSHVLPLSEAKHGYDIFDSKMDDCIKVVLKP

SEQ ID NO: 2051 - protein, 353 aa, Oryza sativa
SLTTKWSACVIGSHDLSVHPHIYDREYLPAVKGGEFGVNLLVCGVICPKRWEEALPLDAWVPGDDIIPVCKAVLEAYRDLGTRGNRQKTRMMWLIDELGMEAFRSEVEKRMPNGVLERAAPEDLIDKKWQRRDYLGVHPQKQEGIGTSKAPGELSYVGLHVPVGRVHKPDMFELARLADEYGSGELRLTVEQNIVIPNVKNEKVEALLAEPLLQKFSPQPSLLLKGLVACTGNQFCGQAIIETKQRALLVTSQVEKLVSVPRAVRMHWTGCPNSCGQVQVADIGFMGCLTKDSAGKIIVEAADIFVAGRVGSDSHLAGAYKKSVPCDELAPIVADILVERFGAVRREREEDEE

SEQ ID NO: 2052 - protein, 251 aa, Escherichia coli
  unsure (1)..(251): unsure at all Xaa locations
MVDKSQETTHFGFQTVAKEQKADMVAHVFHSVASKYDVMNDLMSFGIHRLWKRFTIDCSGVRRGQTVLDLAGGTGDLTAKFSRLVGETGKVVLADINESMLKMGREKLRNIGVIGNVEYVQAXXEALPFPDNTFDCITISFGLRNVTDKDKALRSMYRVLKPGGRLLVLEFSKPIIEPLSKAYDAYSFHVXPRIGSLVANDADSYRYLAESIRMHPDQDTLKAMMQDAGFESVDYYNLTAGVVALHRGYKF

SEQ ID NO: 2053 - protein, 433 aa, Zea mays
MPTQKRPPPPPPPSPSPSAAPGAGSPPPSSPPLPTAEPAEKKPKLEVNGSAGAEANGNANDFGAKEGTEVEASESESEDADAAKQEFVPVKLSDVRKEVQCPICLGIIRKTRTVMECLHRFCRECIDKSMRLGNNECPACRAHCASRRSLRDDPNYDALIAALYPDIDKYEEEELAFNEEENDRNKQIQASIAEAFRKQSEVIGRKSTAKATAAAFVRRSRRNIRPNGQNTYFRGRGKASSDDVALACSEDEEDGNGESCSKEASSAEESSPEKKQKRLPKWPTPRSSPARACNDEVASDEKDDVGISRENFSTSPLRAWGKNGTRSQTRHSSFSGSNGRMVKGGRMIKLVECLRNSDDNEGERDFVASQTSHKDEEVEMYALKPSCSKPVSTNTCGPDKARLAGEERLSDLRSSFTFPNGVLELVYAIKVAN

SEQ ID NO: 2054 - protein, 429 aa, Yersinia pestis CO92
MSHRELEQRRKEATPRGIGVLCDFYAVRAENATLWDEQGREYIDFTAGIATLNIGHRHPKVMAAVRQQLDQFTHTAYQVVPYASYVTLAEKINSLAPISDSNMTAAGNSKTAFFTTGVEAIENAVKIARAATGRPGVIAFSGAFHGRTLLAMALTGRAVPYKVGFGPFPASIFHALYPNELYGVSVEEAISSVERLFRCDISPTQVAAILFEPIQGEGGFNIAPPEFVSALRTLCDEHGILLIADEVQTGFARTGKLFAMEYYPDTKVDVITMAKSLGGGMPISAVTGRADIMDAPLPGSLGGTYAGNPLAVAASLAVLDIIAEEKLCERALILGAKLVDVLEKAQMSNAAIVGIRARGSMVAVEFNDPVSGKPSPELTRAYQRQALEEGLLLLSCGVHSNVIRFLYPLTIPDKQFKQAMNILTRLLAS

SEQ ID NO: 2055 - protein, 349 aa, Bacillus subtilis subsp. subtilis str. 168
MCNQHQTRVLSVSHAKAKFEQTTIERRGLRPHDVLIDIKFSGICHSDIHSAFDEWGGGIFPMVPGHEIAGVVTAVGTKVTKLAVGDRVGVGCFVDSCGECEYCLNAEEQFCTKGVVQTYNSVDYDGNPTYGGYSQKIVVTDRFVVRIPDRLEMDVASPLLCAGITTYSPLKHWNVGPGKKVAIVGVGGLGHLAIQFAHAMGAEVTVLSRSMNKKEEALELGANHYYATSDPATFTALAGRFDVILNTVSANLDVDAYLSMLRIDGTLVSVGAPAKPDTYSVFSLIMGRRSIAGSLVGGIQETQEMLDFAAEHGIEPKIEVIGADQVDEAYERILRSDVRYRFVIDISTL

SEQ ID NO: 2056 - protein, 781 aa, Rhodobacter capsulatus
EALANGTVMSGSHWGVFTATVENGRATAFTPWEKDPHPTPMLEGVLDSIYSPTRIKYPMVRREFLEKGVNADRSTRGNGDFVRVSWDQALDLVAAEVKRVEETYGPQGVFGGSYGWKSPGRLHNCTTLLRRMLTLAGGYVNGAGDYSTGAAQVIMPHVVGTLEVYEQQTAWPVLAENTEVMVFWAADPIKTSQIGWVIPEHGAYPGLEALKAKGTKVIVIDPVRTKTVEFFGADHVTPKPQTDVAIMLGMAHTLVAEDLYDKDFIANYTSGFDKFLPYLMGETDSTPKTAEWASDISGVPAETIKELARLFKSKRTMLAAGWSMQRMHHGEQAHWMLVTLASMLGQIGLPGGGFGLSYHYSGGGTPSSSGPALSGITDGGAATKGPEWLAASGASVIPVARVVDMLENPGAEFDFNGTRSKFPDVKMAYWVGGNPFVHHQDRNRMVKAWEKLETFIVHDFQWTPTARHADIVLPATTSYERNDIETIGDYSNTGILAMKKIVEPLYEARSDYDIFAAVAERLGKGKEFTEGKDEMGWIKSFYDDAAKQGKAGGVEMPAFDAFWAEGIVEFPVTDGADFVRYASFREDPLLNPLGTPTGLIEIYSKNIEKMGYDDCPAHPTWMEPLERLDGPGAKYPLHIAASHPFNRLHSQLNGTVLREGYAVQGHEPCLMHPDDAAARGIADGDVVRVHNDRGQILTGVKVTDAVMKGVIQIYEGGWYDPSDVTEAGTLDKYGDVNVLSADIGTSKLAQGNCGQTVLAEVEKYTGPAVTLTGFVAPKAAE

SEQ ID NO: 2057 - protein, 518 aa, Gloeobacter violaceus PCC 7421
MERSCRYCLEGAVANPIEKIKDEKPGLAVKAELIEFARLGWEAISKGDLERLKWIGWFFRKKTPGRWMVRLRVPGGILSSEQLRVVGGILAEFSDVKQLDITTRQNLEMRGLRIEDSVSIQERLEAVGLTTVQSGMDNVRNIVGSPVAGIDPDELIDVRPLVQQMQDLITEGGRGSFAFSNLPRKFNISITGDRENSAHAEINDIGFIPARREERIGFNVLVGGVLNSQRATPALPLDAFVLPEQVAPLCAAVLRIYSDHGPREARTRARLIYLLEDWGISKFRAAVEADLGFALPPAAHEEFIDYDKRDHVGVWPQKQAGYCFVGLHVPIGRLWAHQALEVADLAEVYGQGEVRLTVEQSFLIPHVAEEKLEALLVEPLLAVFSPEPNPLLRGLVSCTGAQFCNLAIIETKERALKLAHVLASELDLPQPVRIHWSGCPNSCGQPQIGDIGLIGTRTKVAGQSVDAVDILMGGQVGREARFGEVVREGVPCDELAAVLKGLLIEHFGAEERPVALAS

SEQ ID NO: 2058 - protein, 238 aa, Triticum monococcum
MGRGKVVLQRIENKISRQVTFAKRRNGLLKKAYELSLLCDAEVALVLFSHAGRLYQFSSSSNMLKTLEKYQRYIFASQDAAVPTTDEMQNNYLEYMELKARVEVLQRSQRNLLGEDLAPLSTIELEQLEGQVGKTLRQIRSRKTQVLLDEMCDLKRKEQILQDANMTLKRKLGEIELEATPDPPQQPQQQQMWQGDRGVPPHTPPQPEHFFQALERYPSLQPVFRGMDVNQPPPAWMA

SEQ ID NO: 2059 - protein, 376 aa, Paracoccus denitrificans
MLGNLKPQAPDKILALMGEFRADPRQGKIDLGVGVYKDATAHTPIMRAVHAAEQRMLETETTKTYAGLSGEPEFQKAMGELILGDGLKSETTATLATVGGTGALRQRGTGAHGNPDLRVFVSDPTWPNHVSIMNFMGLPVQTYRYFDAETRGVDFEGMKADLAAAKKGDMVLLHGCCHNPTGANLTLDQWAEIRSILEKTGALPLIDLAYQGFGDGLEEDAAGTRLIASRIPEVLIAASCSKNFGIYRERTGCLLALCADAATRELAQGAMAFLNRQTYSFPPFHGAKIVSSVKTKLRTRAELRWRAGSGCAAACCACASNGGELRDLSGSDRFGFVAEHRGIMFSRLGATPEQVKRIKEEFGIYMVGDSRINIAG

SEQ ID NO: 2060 - protein, 458 aa, Nostoc punctiforme
MTFDYDLFVIGAGSGGLAASKRAASYGAKVAIAEYDLVGGTCVIRGCVPKKLMVYASHFPALFSEASGYGWKVGNAELDWEYFITSIDKEVRRLSQLHINFLEKAGVELFSGRATLLDSHTVEVDGRKVTADKILIAVGGRPIKPDLPGMEYGITSNEIFHLKEQPKHIVILGAGYIGTEFACIMRGLGSEVTQITRGDKILNGFDEDVRTEIEEGMTNHGIRLIKNNVVKTVERVAEGFKLTLSGEDQEPIIADVFLVATGRTPNVDGLGLENAGVDVVASSIEGPGYPTTSAIAVNEYSQTNQPNIFAVGDVTDRINLTPVAIGEGRAFADSEFGNNRREFSHKTVPTAIFSNPEAATVGLTEAEAREKLGDAVTIYRTRFRPMYYTLTGKQEKTMMKLVVDSNTEKVLGAHMVGDSSAEIIQGVAIAVKMGATKKDFDATVGIHPSSAEEFVTMR

SEQ ID NO: 2061 - protein, 318 aa, Pachysolen tannophilus
MTLQYYTLNNGRKIPAIGMGCWKLENAADMVYAAIKEGYRLFDCACDYGNEKEVGEGINRAIKDGLVKRKDLFITSKLWNNFHAKENVKKALMKSLSDFNLDYFDLYLMHFPISFKFVPFEEKYPPGFYCGDGDKFIYEDVPIIETWRAMENLVDEGLVKSIGVSNVSGGLLEDLIKAARIKPASLQIEHHPYLQQNKLVEYAQLKGIVVTGYSNFGPLSFLELGNETAKKTQPLYENKTITTIAAKHGKTPFQVLLRWVNQRGIAIIPKSTFPNTLAVNLHVDEFDLTKEDFEEIAKLDRHLRFNDPWTWDKIPTFV

SEQ ID NO: 2062 - protein, 119 aa, Oryza sativa
  unsure (1)..(119): unsure at all Xaa locations
AAEIAPYVMASSATSVAPFQGLKSTVAMRVARRSGNFSFGNVSNGGRIRCMQVWLIEGIKKSVTLSYLAALTVEDLLXXIEYLNTSKREPCLEFSKDXFVNRENHISXXXYDSKIWTIW

SEQ ID NO: 2063 - protein, 261 aa, Mycobacterium avium subsp. paratuberculosis str. k10
MTCTPNGAISSHAEVQRWRRRGIPAPGSVKRVSRAELDKNPRDVASMFDGVARRYDLTNTVLSLGQDRYWRKATRSALGIGPGQKVLDLAAGTAVSTVELNKSGAWCVAADFSVGMLAAGAARRVPKVAGDATRLPFADDVFDAVTISFGLRNVVDTQAALREMARVTRPGGRLVVCEFSTPSNALFATVYKEYLMRALPRVARAVSSNPDAYVYLAESIRAWPDQAALADQIAGAGWAGVRWRNLTGGIVALHAAHRPPR

SEQ ID NO: 2064 - protein, 397 aa, Clostridium perfringens str. 13
MILSRKAQNIGASLTLALTAKAGELKKEGIDVVSFGVGEPDFNTPKNIIEAATRAMEEGKTKYTATSGIVELKEAIARKLHDDNGLNYGTKNIIISTGAKQSLANVFMAILNPGDEVIIPVPYWVSYPELVKLSDGVPVFIETKKENDFKVTYDELKSVLSENTKAIVINSPNNPTGTVYSKKDLEVIAKFAEENDLIIISDEIYEKLIYGKEEHISIASLSEDAFKRTVVINGFSKAYAMTGWRIGYAACYNEELIKVMNNVQSHMTSNTNSIAQFAALEALNGDQETIKNMVKEFSLRRELMIELISEIEDLTFIEPKGAFYVMIDVSKVLKKANIKGSMEFANLLLKEENVVVIPGIAFGEDNFIRLSYATSKEEIIKGLKRIKEFVNKLMNRD

SEQ ID NO: 2065 - protein, 183 aa, Zea mays
MGRPPCCDKMGVKKGPWTPEEDLMLGSYVQEHGPGNWRAVPTNTGLMRCTKSCRLRWTNYLRPGIKRGNFTEQEEKLIVHLQALLGNRWAAIASYLPKRTANDIKNYCTAHLKKKLKNMQAGEGGAGGKRPAVPKGQWERRLQTDIHTARQALRDALSLEPSADAAGQGGASADGSGVRDVRV

SEQ ID NO: 2066 - protein, 203 aa, Sinorhizobium meliloti 1021
MGIYRDVILPRLCDLSMRNERLRPYRERVIGAAQGRVLEIGVGSGLNLPFYGPVVGEVLALEPSAGLVAMAREAPRSDLPVSFIDASAEAIPLDDKSVDTVVTTWTLCTIPDAAAALTEMRRVLRPGGKLLFVEHGLAPDRGVRWWQDTLTPVWRRISGGCHLNRPIRSMIECGGFRMERVETGYMQGPKPMTFMYEGSARPE

SEQ ID NO: 2067 - protein, 394 aa, Mesorhizobium loti MAFF303099
MFEDLQPAPADKILALIGLYRADPRPNKVDLGVGVYKDRDGKTPVMRAVREAEKRLLNSQDTKTYLGLAGDTGFNAVMAKLAFGPGADMTRIRAAQAPGGSGALRLVAELLKRTRSDATIWLSDPTWPNHMPVMRAAGLQIREYPYFDAASGAVRFDDMLAALRTAKSGDVVLLHGCCHNPTGANLDAAQWQAVTDLMVERGLLPFVDIAYQGFGDGLEADALGLRLLAAKVPEMVVASSCSKNFAVYRDRVGAAMVLARDSAQADVAMSQMLSAARAMYSMPPDHGAAAVRIVLEDASLRADWEAELEEMRLRMLRLRVAFAEALRRQSNSDRFDFVASHRGMFSRLGLTEAQVERLRAEHGVYMVGDSRINVAGLPEDGMDALAKAIVSVLD

SEQ ID NO: 2068 - protein, 344 aa, Gloeobacter violaceus PCC 7421
MHSAMLYGVEDVRLEEVPCPEPGPGEVLVRVAVAPTCGTDLKVWLRGGHARMLVPPTPFGHEFAGEIAALGEGVSGWRSGERVVANNSAPCFDCFYCRRERFSLCENLLFNNGTFAEYLRIPAAIVRHNLLAVPPGLPLELAAMSEPLACVLHGVEEAGVRAGDTVVVMGDGAIGLMLVAVCAVRGAAVILAGGQSARLAVAEQLGAQVTLNYRQAGDPVGRLRALTEGGRGADIVIEATGKPAAWEAAIATARPGATVLLFGGCPRGTAVSVDTENLHYNELTLKGVFHNTPRHVREALALIACRRIAFELLVSDSLPLGKLDEALARMRDRTAIKVAMLPGS

SEQ ID NO: 2069 - protein, 256 aa, Streptococcus pyogenes SSI-1
MKIGIIGVGKMASAIIKGLKQTPHELIISGSSLERSKEIAEQLTLPYAMSHQDLIDQVDLVILGIKPQLFETVLKSLHFKQPIISMAAGISLQRLATFVGQDLPLLRIMPNMNAQILQSSTALTGNALVSQELQARVRDLTDSFGSTFDISEKDFDTFTALAGSSPAYIYLFIEALAKAGVKNGMPKAKALEIVTQTVLASASNLKTSSQSPHDFIDAICSPGGTTIAGLMELERLGLTTTVSSAIDKTIDKAKSL

SEQ ID NO: 2070 - protein, 369 aa, Haemophilus influenzae R2846
MTQQYAIDTLLAQAGNRSDERTGAVSAPIFLSTAYGHCGIGESTGFDYTRTKNPTRTVLEETIAKLENGDRGFAFSSGMAAIQVLMTLFTALDEWIVSSDVYGGTYRLLDFSYKNNNSVKPVYVNTASASEIEAAINPNTKAIFIETPSNPLMEECDVVEIAKLAKKHNLMLIVDNTFLTPVLSRPLDLGADVVIHSGTKYIAGHNDALVGLIVAKGQELCDRIAYIQNGAGAVLSPFDSWLTIRGMKTLSLRMKRHQENAQAIAEFLKDQPQVESVLYPNKGGMLSFRLQDEAWVNTFLKSIKLITFAESLGGTESFITYPATQTHMDIPETERVARGITNTLLRFSVGIEDVEDIKADLLQAFANLK

SEQ ID NO: 2071 - protein, 184 aa, Oryza sativa
  unsure (1)..(184): unsure at all Xaa locations
LTTWLCAPTVMGSSATSVAPFQGLKSTAGLPVSRRSXTSGFGNXVTNAGRIKCMQVWPIEAIKKFETLSYLPPLTVEDLLXQIEYLLRSKWVPCLEFSKVGFVYRENHRSPGYYDGRYWTMWKLPMFGCTDATQVLKELEEAXKAYPDAFVRIIGFXTNVRQVXQLISFIAYKPPQVARSLVAN

SEQ ID NO: 2072 - protein, 398 aa, Leuconostoc mesenteroides subsp. mesenteroides ATCC 8293
MNSGDLAWVLVSAALVWVMTPGLALFYGGLGERRNLLHTMFIPVMIIGIASLVWFVVGYTLSFGGSGNVIGNFKHLFLTNVSFTHSTKDLTIPDGAFALFQGMFPIITAAIITGSVIGRVRIKALLVFIALWLIFIYSPLAHMVWGGGFLAQLGAIDFAGGTVVHISSGVTGLVLALMIGHRHIDKHIPVRPSYVLIGGALLWVGWFGFNSGSALAANGTAVLALVNTWLASAAAVLTWGLVEYKYHGRATLSGITSGGVAGLVAITPAAGFVAPWAAVVMGLLAGFIGFAGITFVKNSFGYDDTLDAFGIHGIGGAVGAILTGVFADKSVGGVAGLINGNISLVGKQLVAILFTIAFAAIGTYVLAKITELIAAPLRLTADEEAEGYDAIMHDLTVE

SEQ ID NO: 2073 - protein, 213 aa, Leptospira interrogans serovar lai str. 56601
MKDKILKFEKKEFYSICDQLSRKDRGLHSILLKHGYPPFWSRKPNFETLVHIILEQQVSLASARAALVKLKNKIGSVTARKILLLSDIELRECYFSRQKTSYVRDLAEFVFSKRIILGDLASKSDQMIRGDLITVKGIGNWTVDIFLIMALHRADIFPLGDLAAVKSLKKIKKLPVDTSNDKILSVSKSWRPFRSIATMLLWHSYIQENNIKF

SEQ ID NO: 2074 - protein, 297 aa, Glycine max
MVSSNCYYLALVCCCVLLLLNPTVGEQDEQNLVLQYHKGALLKGRITVNLLWYGSFTPIQRSTIVDFIKSLSSSPGAPLPSVAWWWKTTEKYNGGSTTLVVGKQILQQTYSLGKYLNGTQLLYLSSRFNDLNAINVVLTSNDVGVDGFCRSRCGTHGSINGKARIPYMWVGNSEAQCPGQCAWPFHQPAYGPQTPPLVAPNADVGVDGMVINIATLLAGTVTNPFNEGFYQGPPTAPLEAVSACTGIFGSGAYPGYPGRVLLDKTTGASYNAYGGNGRKYLLPAMWDPQTSACKTQV

SEQ ID NO: 2075 - protein, 240 aa, Medicago sativa
RGKIQIKRIENTTNRQVIFSKRRNGLLKKAKELAILCDAEVGVMIFSSTAKLYDFASTSLRSVIGRYNKSKEEHNQLGSTASEIKFGQREAAVLRQQLHNLQESHRQIMGEELSGLTVKELQGLENQLEISLRGVRMKKEQLFMDEIQELNRKGDIIHQENVELYRKVYGTKDKNGTNRVLSLTNGVGIGDDSNRTCESPAQPATETRTTTALMHSLEISVLTCKQGKWTQILISYMNGI

SEQ ID NO: 2076 - protein, 181 aa, Rumex obtusifolius
MASSIMSSATVARPSAAQATVIAPFTGLKNIATFPTTRKSSDLSFPSNGGKVRCMQVWPPEGKIKFETLSYLPPLSEADLLAQINYLLINGWVPCLEFDVGPGAVYREHHHSPGYYDGRYWTMWKLPMFGCTDATQVVAELEEAKKAYPHAFVRIIGFDNVRQVQCVSFIAYKPPRAEGTY

SEQ ID NO: 2077 - protein, 1014 aa, Desulfovibrio desulfuricans G20
MHISRRSFIKATAASGIAAAFGGLGLSLVPSVSQAKLLPLRWAKQTTSVCCFCAVGCGLLVHTDKTSHRAVNVEGNPDHPVNEGSLCSKGASIYQVAENAERPATPMYRAPYSDAWQPVSWDWALTEIARRIKKDRDASFRFQNDMGLTVNRCDGIASVGSAALDNEECWVFQSILRALGLVWIEHQARICHSSTVPALAESFGRGAMTNHWNDIQHSDCVLVMGSNAAENHPISFKWVLRAMEKGAKLISIDPRFTRTSAKADLYVQIRAGTDIAVLGGLINYIIENDLIQRDYVVSHTNAPFLVSDSFSFKDGLFSGYKAGSKDSHYQGRYNKSLWDFAKDENGLPLKDETLAHPRCVYQLLKKHYSRYDIDTVVSVSGADKQGLLEFYRQYAATGKPDKAGTIMYAMGWTQHTVGTQYIRTMAMVQLLLGNIGVAGGGVNALRGESNVQGSTDHALLWQSLPGYLAVPDATHTSYKKHLEIKTAPHLAAAKDPKSAAWWQYYPKYMASFLKSMYPQAELADAYNWLPKADQGKTYTWLELFDAMHDGEFKGFFAWGQNPACSGAHAGKNREAMAKLDWMVNVNIFDNETGSFWRGPGMQPEKIKTEVFFLPCCVSIEKEGSITNSGRWMQWRYAGPDPRGAARSDGHIMVELMEKVRALYAEEGGTFTAPIEALSLDMWRDQKGYNPHNVARLINGTFLRDVTIKGTTYKKGQQVPSFALLQDDGSTCSGNWLYCASYTDEGNMGERQSRQQSPEQEKLGLFPNWTWCWPLNRRILYNRASCDLTGKPYNPQMPVISWTGEKWTGDVPDGGWKPGEKYSFIMKPHGHGRIYGPGLEDGPFPEHYEPMETPLKSHPLSRQRSNPACLSFNDEYKAVADPKFPYVATTFRVTEHWQTGLMTRHMPWLLEAQPQMFVELSEELARKLGVGNGDKVVVESARGSIWAVGMVTERVKPLRILGKTVHQISMPWCFGWFMPHDGSGGDSSNLLTAAVGDANTGIPETKVFMANVRKA

SEQ ID NO: 2078 - protein, 168 aa, Zea mays
CKYGSHCRFVHASSQQQQQAKPNPFGFGLGSRQQQQQQSSFRAQFQQQQQQKPNPFGFGVQGSAAAQSRNAPGQAKPFQNKWVRDPSAPTKQQEAAQPPAAAHTSCTDPESCRQQIAEDFKNETPLWKLTCYAHLRSGPCDITGDISFEELRANAYEQGRQGHPLQSI

SEQ ID NO: 2079 - protein, 506 aa, Vibrio vulnificus YJ016
MIYAQPGSDNAVVNFKSHYDNYIGGEWVKPVSGEYFDNISPVNGQAYCKVARSSAADINLALDAAHSVRYQWAKTSVTERANILLKIADRIEAHLEELAVAETWENGKPVRETLAADLPLVVDHFRYFAGCIRAQEGSAAELDANTASYHFPEPIGVVGQIIPWNFPMLMAAWKLAPALAAGCCVVLKPAEQTPTSILVLMEKIGDLIPAGVVNVVNGFGAEAGQALATSNRIAKLAFTGSTEVGNHILKCAAESLIPSTVELGGKSPNIYFPDVFDHEDAYLDKCIEGTLLAFFNQGEVCTCPSRVLVHESIYDQFIAKVAERAKSIKQGNPLDTDTQVGAQASQEQFDKILSYLEIGRQEGAKVVFGGEIAKQEDDLATGYYIQPTLLQGHNKMRVFQEEIFGPVIAVTTFKDEAEALAIANDTEYGLGAGVWTRDQNLAYRMGRNIEAGRIWINCYHAYPAHAAFGGYKKSGIGRETHKMMLNHYQNTKNLLISYDVNPLGFF

SEQ ID NO: 2080 - protein, 222 aa, Zea mays
ADVDVGTELRLGLPGGGADAAKAAKRGFEDTIDLKLKLPTAGMEEAAAAAAAKPEPAAEKAKRPAARAQAVGWPPVRSYRRNVMTVQSVKSKKEEEPEKQQSAANAGGNGSAFVKVSMDGAPYLRKVDLKMYNSYTELSVALKKMFSTFTTSGNNMNEGKLVDPVSGADVVTTYEDKDGDWMLVGDVPWEMFVESCRRLRIMKSSEAIGLAPRTKDKCKNRS

SEQ ID NO: 2081 - protein, 278 aa, Triticum aestivum
  unsure (1)..(278): unsure at all Xaa locations
MALRAAAARLASSSLRRRHGHLLPAAASASHTAFLHSHATSFGFKQVREDEKSKLVGNVFSSQYLVEGIRRFPKQEKFAQMIQEAGFEAVEYENLVGGVVAIHSGVKLXLEELTLFHVRGFNPIMLLVGLLRASEIGSDDELRRGWVLAHSEALSFEDGSMDGYTIAFGIRNVTHIEKALSEAYRVLKKGGRFLCLELSHVDVPVFKDIYDIYSFSVIPAVGELVAGDRQSYQYLVESIRRFPKQEKFAQMIQEAGFEAVEYENLVGGVVAIHSGVKL

SEQ ID NO: 2082 - protein, 284 aa, Nicotiana tabacum
MASYSLPSPIAKRLEGKVALITGGASGIGAATARLFVQHGAKVTIADIQDNLGTSLVQEIGNEHTIFVHCNVAVESDVQNVVDATIAKFGKLDIMFSNAGIGGKSISSILDVDYDIIKTVFDVNIVGAFFCAKHAARVMIPFKKGSIIFTASAATVVSGIVPHAYSASKGAVLGFSKNIGVELGKYGIKVNCVSPHYISTPLVLNALGIAEREIAEKWFAAGGNLKGALLDEEEVAKAVLYLASDDSKYVSGMNLVIDGGFSTTNVALTEAYNKLFSSENTHQC

SEQ ID NO: 2083 - protein, 341 aa, Thermobifida fusca
MRVGVLTGGGDCPGLNAVIRAVVRKGIKEYGYEFVGFRDGWRGPLEGDTMPLDIEAVRGILPRGGTILGSSRTNLMKIEGGVERVKDNMAALGVDALVAIGGEDTLGVARQLHDHGVNVVGVPKTIDNDLNATDYTFGFDTAVNIATEAIDRLHTTAESHHRALVVEVMGRHAGWIALHAGMAAGANVILIPERPFDIDEVVAYIESRFKTNYAPIIVVAEGAHPKEGQLTLASAERDSFGHVRLGGIGQRLAEEIEARTGKEARSVVLGHVQRGGTPSAFDRVLATRLGLHAITAVHDKDFGKMVALRGTEIVRVDLSEATDQLKTVPVERYEEAEVFFG

SEQ ID NO: 2084 - protein, 244 aa, ASPERGILLUS NIDULANS FGSC A4
MTTLHSYYPLGVEIPHYIANELSTPTLLAIFGTACSSQLSRSATLIEKKTGGSIHLVLEGYYALNFLTLASSSHPLAQLWKEYALSDSRYLTPNSFVMCMESITALFWGPLSFLLAGFIATNHPLRHPLQIIISLGQLYGDVLYYGTCAFEFLVNGLEFSRPERYYFWGYFMLLNMFWIVIPLEVFYFKLAVLAQLDGKPEPPLAGHGIARESVLSTLLTPAYMSVWYTALRDVAVCFESAPPI

SEQ ID NO: 2085 - protein, 468 aa, Bordetella pertussis Tohama I
MTPAAAPSPGFGATMRDIARQAWPVLISQWAGISFGVLDTAMTGHASPQDLAAMSLSVSVYITVFVGLMGVVHALIPILAQHFGAGQQREVGSTWGQGVWLALGLSVVGAILMLFPDAWLSLSGDVDPAVRDRVAAYLRALVLALPATLVFRTIYALGTAVSRPKVVMSINLAAVFVKAFCNWVLIYGKFGLPALGAVGAGLATAISGWLSLAAGLWIITHDRYYRRFRLRVGRPDWRALKELLRLGLPMGGSYLVEVSAFTFMALLVAREGTYVSGGHQIMSNLAALCYMMPMALGVATAALTAQAIGAGRPDLAHRTGMAGLALGLLGAALTAAVLLVGRPLIIAAYTDDLEVAAVAASLLAIIPLFHLCDSMQCINSYLLRAHKVAVMPLVLQTVALGGVGLLGGWWLGFGPGRGGLDPLRTALMPGSPAGAGTMWLMAMAGLGLSAVLLHYWYRRIARLALARG

SEQ ID NO: 2086 - protein, 692 aa, Gloeobacter violaceus PCC 7421
MPTDTLAKTLCPYCGVGCGLEVTADARVRGDRAHPSTLGMVCVKGATVLESIGKDRLLYPMVRARLDEPFRQASWEEALALVVGRLRAASPESLCFYGSGQFVTEDYYVAQKLFKGCLGSNHIDANSRLCMSSAVSGYLQSLGSDGPPACYDDLDLTDCAFLVGTNTAECHPVLFNRLLKHRKQDLNSRLVVVDPRATPTAKAADLHLAIRPGSDIDLFNGIAHLILQWDRADQRFIGAHTQGFAAMAEVVRHYPPEAVARRCGITTAALELAARLWVNSARVLSLWSMGINQSIEGTAKVRALINLHLLTAQIGRPGSGPFSLTGQPNAMGGREAGGLSQLLPGYRSVADPDHRRQVEEHWQLPSGSIAARPGRTAWEMIEALEAGAVEVFWIAATNPAVSLPDLERTKAALLRSPFTVYQDCYYPTETARYAHVLLPATQWSEKTGTMTNSERRVTLCPAFHPPPGEARDDWQIFAEVGRRLGFAEQFAFADAAAVFAEFAALTRGRPCEMTGISHARLEREGPLQWPCPAGSAGTARLYTDWRFATPDARARFAACHARGLAEPPDPEYPFVLINGRLYGHWHTLTRTGRIEKLLNLYPEPFIEIHPRDAGKLGLGEGDWVEVRSRRGAIRLPARLTLAVAPGTVFVPMHWGALWAEAAEVNALTHPESDPISGQPEVKSCAVQLSALP

SEQ ID NO: 2087 - protein, 238 aa, Stylosanthes hamata
MAPREKTPAVKVNGKSNAGVKEVHFRGVRKRPWGRYAAEIRDPGKKSRVWLGTFDTAEDAARAYDAAAREFRGPKAKTNFPFPDSDDINNNNIVVVKNNNRSPSQSSTVESSSRDRDSYSAAAATAVADSSPLDLNLAPQELDSPDPFGSHSTQPFAVFPGGMPAAKQALYLDAVLRASMASHGQFGFGYNRPAAAGAQSDSDSSSVIDLNQNEGDVAKNNGRGLVLDLNEPPPQEMA

SEQ ID NO: 2088 - protein, 980 aa, Bacillus subtilis subsp. subtilis str. 168
MMDVKSISVRVDGTEIQARAGATILDILNENGIEYPQICHVPEVDPIQTCDTCIVEANGKLVRSCATVAENGMSIDLSGNRVKEAQTEAMDRLLENHLLYCTVCDNNNGNCTLHNTAEMMGIEHQKYPYTPKEDPSCAVDMSHPFYRYDPNQCIACGQCVEVCQNLQVNETLSIDWERERPRVIWDEGVPINESSCVSCGQCVTVCPCNALMEKSMLGQAGFMTGIKEDVMEPMIDLVKNVEPGYGSIFAISEVEAAMRETRTKKTKTVCTFCGVGCSFEVWTKGRDILKIQPVSDAPVNAISTCVKGKFGWDFVNSKERITKPLIRKNGAFVESSWEEALDLVASRLGSIKEQYGKGSVGFISSSKITNEENYVIQKLARQVFETNNVDNCSRYCQSPATDGLFRTVGMGGDAGTIKDIAKAGLVIIVGANPAEGHPVLATRVKRAHKLHGQKLIVADLRKNEMAERSDLFISPKQGTDQVWLMAVTKYMIDQGWHDQAFIDENVNYFEDYKETLKTYTLDYAERITGLSKENIIQIAEMIRDADGTCVLWGMGVTQNTGGSDTSAAISNLLLATGNYRRPGAGAYPLRGHNNVQGACDMGTLPGWLPGYQHITDDKARAKFEEAYGVEIDGKPGLDNIQMLHAIEEGKMKAMYLVGEDMALVDSNANHVHDILSSLDFFVVQDIFLSRTAQYADVVLPATPSLEKDGTFTNTERRVQRLYQALPTLGDAKPDWWIIQEVANRLGANWNYSHPSDIFSEMASLSPLFAKASYEVLEGWNSFLWGSFTGESTPLLYEDGFNFPDKKARFALSDWTEPAAFPEEYDLHINNGRMLEHFHEGNMTNKSKGIQAKVPNVFVEISPELAQERGVCDGSLVRLVSPFGAVKLNALITDRVRKNELYLPMNSTDKESAINFLTGPAADKRTNTPAYKQTKVRMEVLGGCETAPLPKTNPRNKKRHPQNGVEAERKWNRPGYVHLTD

SEQ ID NO: 2089 - protein, 262 aa, Manihot esculenta
PISKMVTAHFVLIHTICHGAWIWHKLKPALERAGHKVTALDMAASGIDPRQIEQINSFDEYSEPLLTFLEKLPQGEKVIIVGEACAGLNIAIAADRYVDKIAAGVFHNSLLPDTVHSPSYTVEKLLESFPDWRDTEYFTFTNITGETITTMKLGFVLLRENLFTKCTDGEYELAKMVMRKGSLFQNVLAQRPKFTEKGYGSIKKVYIWTDQDKIFLPDFQRWQIANYKPDKVYQVQGGDHKLQLTKTEEVAHILQEVADAYA

SEQ ID NO: 2090 - protein, 379 aa, Bacillus subtilis subsp. subtilis str. 168
MKKKTLMIHGGITGDEKTGAVSVPIYQVSTYKQPKAGQHTGYEYSRTANPTRTALEALVTELESGEAGYAFSSGMAAITAVMMLFNSGDHVVLTDDVYGGTYRVMTKVLNRLGIESTFVDTSSREEVEKAIRPNTKAIYIETPTNPLLKITDLTLMADIAKKAGVLLIVDNTFNTPYFQQPLTLGADIVLHSATKYLGGHSDVVGGLVVTASKELGEELHFVQNSTGGVLGPQDSWLLMRGIKTLGLRMEAIDQNARKIASFLENHPAVQTLYYPGSSNHPGHELAKTQGAGFGGMISFDIGSEERVDAFLGNLKLFTIAESLGAVESLISVPARMTHASIPRERRLELGITDGLIRISVGIEDAEDLLEDIGQALENI

SEQ ID NO: 2091 - protein, 259 aa, Mycobacterium avium subsp. paratuberculosis str. k10
MTSQDLTGRTAIITGASRGIGLAIAQQLAAAGANVVLTARKQEAADEAAAQVGPQALGVGAHAVDEDAARQCVQLTLERFGSVDILVNNAGTNPAYGPLIEQDHARFAKIFDVNLWAPLLWTSLAVKSWMGEHGGSIVNTASIGGLHQSPAMGMYNATKAALIHVTKQLALELSPRVRVNAIAPGVVRTRLAEALWKDHEDPLSSSIALGRIGEPIDVAAAVAFLVSDAASWITGETLVIDGGTVLGAAQGFRPAPTPS

SEQ ID NO: 2092 - protein, 127 aa, Zea mays
PLHDLLYKSRAKQIQEFNHVPKAFREALLGAGWSVGRSPVHHAVTASDGTTKILLKLEDNRLIETVGIPVDDDNKGSSRLTACVSSQVGCPLRCSFCATGKGGFARNLKPHEIVEQVLPQQPLCLGT

SEQ ID NO: 2093 - protein, 452 aa, Nostoc punctiforme
MAFDYNLFVIGAGPGGLAAAKKAASYGVRVAIAEQESIGGTCVNRGCIPKKLIVYAADFALQKQIAPSYGWSECQTYFDWTLFIKSVHQHLDTLNQSYFQQLHKAGIELISDRATFIDAHTVDINGLKVTADKILIAVGGQPLKPKIPGIEYAITSREMFQLPYLPKRLAIIGGGYIGVEFSSMMHAFGCQVTVIEKDEMILSGFDDEIRSAVEQGLRKRGIKLLTSSTVQEIKYSDESLLLTITGKKREIITADTILVATGYAPNTKNLGLENAHVELGEHGAIKVDEYSRTTQENIFAVGDCTSRVQLSPVAKAEGIAFANTVFGNKVQKLDYDYVPSAVFCRPEAAGVGMTEAKAREKFGESVQCYYTQFQPLLYQLTDQNEPTTMKLVLNGDSGQVLGAHLVGEHAADIIQSLGVAIRKGITKEDLDEIIGIHPTVGEEFFSLDRVQE

SEQ ID NO: 2094 - protein, 475 aa, Escherichia coli
MMSTEIKTQVVVLGAGPAGYSAAFRCADLGLETVIVERYNTLGGVCLNVGCIPSKALLHVAKVIEEAKALAEHGIVFGEPKTDIDKIRTWKEKVINQLTGGLAGMAKGRKVKVVNGLGKFTGANTLEVEGENGKTVINFDNAIIAAGSRPIQLPFIPHEDPRIWDSTDALELKEVPERLLVMGGGIIGLEMGTVYHALGSQIDVVEMFDQVIPAADKDIVKVFTKRISKKFNLMLETKVTAVEAKEDGIYVTMEGKKAPAEPQRYDAVLVAIGRVPNGKNLDAGKAGVEVDDRGFIRVDKQLRTNVPHIFAIGDIVGQPMLAHKGVHEGHVAAEVIAGKKHYFDPKVIPSIAYTEPEVAWVGLTEKEAKEKGISYETATFPWAASGRAIASDCADGMTKLIFDKESHRVIGGAIVGTNGGELLGEIGLAIEMGCDAEDIALTIHAHPTLHESVGLAAEVFEGSITDLPNPKAKKK

SEQ ID NO: 2095 - protein, 339 aa, Tropheryma whipplei str. Twist
MASICDTTPEECAAAGNAVITCPGQGAQKSGLLNEWLDLPGSLEFFQAQSDFLKIDLIKHGTISDTDILRDTRIAQPLIVALGIFVIRTLQQKAKIIQSMPEEGLNGANPTERIMRCVGLAGHSVGEITAAFGAGVLTEKNAMRLVKHRANQMYKSTQIFDTGMVAVLGQSENLEEYITQRYKLFPANYNCPGQIVFAGLRENLDVLLANPPEKIKVIPLQVAGAFHTRFMRPAVQNLKKLKFVTDKSFAKDPDKRIWTNYDGSEIFSGSEYVQLLIDQIARPVRWDLCQKNFENIDYLIELPPAGTLTGLARRSLPKVKGIPINTIDDLEEASCCFLL

SEQ ID NO: 2096 - protein, 297 aa, Cochliobolus carbonum
MTFQKAIVTEAPHRARLVSDRLIPKLRDDYILVRTVSVALNPTDWKHILRLSPPGCLVGCDYAGIVEEVGRSVKKPFKKGDRVCGFAHGGNAVFSDDGTFAEVITVKGDIQAWIPENLSFQEAATLGVGIKTVGQGLYQSLKLSWPTTPIEHAVPILIYGGSTATGTLAIQLAKLSGYRVITTCSPHHFELMKSLGADLVFDYHEITSADHIRRCTQNKLKLVFDTISIDVSARFCDRAMSTEGGEYSALLDVSIARTNISSRWTLAYTVLGEGFTSEQIVFQPYPTTMSSGRNFGM

SEQ ID NO: 2097 - protein, 238 aa, Zea mays
MAATPLDSAWEWLITNFSEFQLATVVTFVLHESVFFLSGFPSLLFERLGLFAKYKIQKKSNTSAYQNRCVMRLILYHVCVNLPVMIFSYPAFKFMGLRSSLPLPHWTVIVSQVLFYFILEDFIFYWGHRALHTKWLYKHVHSVHHEYATPFGLTSEYAHPAEILFLGFATVVGPALTGPHLFTLWLWMVLRVLETVEAHSGYHFPWSPSNFLPLYGGSDFHDYHHRVLYTKSGNYAST

SEQ ID NO: 2098 - protein, 426 aa, Rhizobium leguminosarum
MNATSLTDRKNAAISRGVGMTTQIYADRAENAEIWDKEGRRYIDFAAGIAVLNTGHRHPRVIAAVKDQLDRFTHTCHQVVPYESYVHLAERLNALLPGDFEKKTIFVTTGAEAVENAVKIARAATGRSAVIAFGGGFHGRTFMGMALTGKVVPYKVGFGAMPGDVFHIPFPVELHGVTADQSLAALKKLFAADVDPQRVAAIIIEPVQGEGGFYSAPAAFMKALRELCDQHGILLIADEVQTGFARTGRMFAMDHHEVAPDLTTMAKSLAGGFPLAAVTGRAAIMDAPGPGGLGGTYGGNPLGIAAAHAVLDVIVDEDLCNRANLLGGRLKQRLESMRETVPEIVDIRGPGFMNAVEFNDRTTGLPSAEFANRVRLIALDKGLILLTCGVHGNVIRFLAPITIQDEIFGEALDILEASMLQASAAK

SEQ ID NO: 2099 - protein, 509 aa, Rhodococcus ruber
MTGTLSRDSGTTNQVDERLGAAAREFLGRPHQLFIDGQWVDAADGRTFGTYDPATGAEITQVAHGGPEDVDRAVAAARRAFDDGDWATMKPNKREQILWRIGDLLDARGEMLGQIEALDNGKSAAIATAVDVTFAADVFRYYAGWCTKIEGTTVDVSMPFAGDKQFHAYTQRVPVGVCGQIIPWNFPLLMAAWKLAPALATGNTLVLKPAEQTPLTALLLGEIMAEAGVPDGVVNIITGFGDAGAAISAHDDVDKVAFTGSTEVGKLIVDAAKGNLKKVSLELGGKSANIVFADCDFDAAVAGSVAAWMFNHGQACTAGTRLYVEDSIYEKFTQAVADAAAQATIGHGLDPATELGPLVDQDQFDKVSYYLRAGIEDGGRALTGGGRHGDTGYFIQPTVFVDVEPDHRVVTDEIFGPVVAALRFSDMDDAVRQANDSIYGLAAGVWTKDISKAHKVASRLHAGSVWVNQYNGFDTAMPFGGFKQSGWGRELGKGALDLYTQTRSVNIQL

SEQ ID NO: 2100 - protein, 369 aa, Rhodococcus ruber
MKTKAAVLFDLHKPFEIIELELDDPGPGEVLIKYTAAGLCHSDLHLSDGSLPPRFPIVGGHEGAGIIEAVGVGVTKVKPGDHVVCSFIPNCGTCRYCSTGRQNLCDMGATILEGHMPDGTFRFHAGGKDFGAMCMLGTFSERSVISQHSVVKVDDWLPLDKAVLVGCGVPSGWGTATYAGNVRQGDTVVIYGIGGLGINAVQGAVHSGARHVVVVDPVQFKRDEALKFGATHAFADAAEAHAEVEKLTWGQMADQALILVGTVDEPVVSSAFDVIGKGGTVVITGLGNMTDKTVQVSGTMMALFGKTITGTVFGSANPQYDIVKLLRLYDEGKLKLDELITTTYTLDQVNEGYQDLQDGKIMRGVIIHD

SEQ ID NO: 2101 - protein, 471 aa, Gloeobacter violaceus PCC 7421
MAGTAIRFGTDGWRSIIAREFTFENVTRVARASAEILAETFEGEGIVIGYDRRFLADEFARTAAEAVRSLGLSVLLADRPAPTPAFSWAVKKRGAKGALVLTASHNPASYCGIKIKGAFAGSVSPEFTRAVEERLEGPVPADRPRGSLALFDPWMDYLAQLRTRVDVAALQEANLAIFIDVMHGVGAGGLPHLLGPNVVEVRERHDPLFGGTPPEPIGRYLMPLFQAVRDYRGNRPVVGLALDGDADRIAAADRHGHFLSCQVLIPLLVDHLARRRGLAGKVVKTISGSDLIAKVARARGLPVEETAIGFKYIADVMLREPVLVGGEESGGIGYLGHMPERDGLLCALYLVEIVAQTGKDLGALFAQLQEELGFRSHYDRQDLRLADEAFKQRLLGELENSPPKTVAGQAVIEHSAIDGHKFRLADGHWLLVRFSGTEPLLRLYCEGPDPARVTETLQWAERWATGPGVLC

SEQ ID NO: 2102 - protein, 570 aa, Borrelia burgdorferi B31
MMLKIEAKRKLKNYILLEEDMHFKEEAIKIQKTNNSTEILNRFYKDLEFGTAGIRGIIGAGTCYMNTYNIKKISQGICNYILKINKNPKVAISYDSRYFSKEFAYNAAQIFASNNFETYIYKSLRPSPQLSYTIRKFDCDAGVMITASHNSKEYNGYKAYWKGGIQIIPPHDTLITNEIKNTKNIINTITIKEGIEKGIIKELGNEIDEEYVKAINKELPDFEKNSKETNLKIAYTALHGTGGTIIKKLFANSKIRLFLEKNQILPNPEFPTINYPNPEKQTSMLKVIELAKKKDCDIALATDPDADRIGIAFKDQNEWIFLNGNQISCILMNYILSKEKNPKNTFVISSFVTTPMLEKIAKKYGSQIFRTYTGFKWIGSLINEMEKNEPNKKFAFACEESHGYLIGRKVRDKDAFSAIKGICSLALDLKAKQQTIKDYLEKIYKEFGYYEEFNIEKNFEGANGEIQREKLMLKLRKEQKVQFAGIKIIEKLDYKTLKKINFKNEISEIKEYKYPINAIKFILENEIAIIVRPSGTEPKIKFYISVKLEYKEKHKIFDIINAIKMEIKKY

SEQ ID NO: 2103 - protein, 259 aa, Helianthus annuus
HEVLESEDEDGFPISSGANDKDDIPSGKKVTEESSKKGEKGKAKRKNEVDDSENNAKRKKDDSVEVPTPESDVKKSKKKSKKAKDTREDANVNNGVQKEETNKKQTPEKAASLVKDKKKKKNKQQENNTPAAKVNASATKANSSQVRTFPNGLVIEEIQMGKPNGKRADNGKKISMRYIGKLKKNGKIFDSNIAKAPFKFRLGAGEVIAGWDIGIKGMCVGEKRRLTIPPSMGYGARGAGSAIPPNSWLVFDVELVDVN

SEQ ID NO: 2104 - protein, 853 aa, Sinorhizobium meliloti 1021
MIKVTIDEQSLEVEAGSTVLAAAERLGIEIPTFCYWKRLPPLASCRMCLVEIEGLRRLQPACATVAADGMVVRTNTPLIEETRSSMLDMLLANHPLDCPICDKGGECELQDMVMAYGPGESRFRDPKRVFHSKDIRLSPVIIMNVNRCIQCQRCVRMCEEVVGAVALGTVEKGMDTAVTGFEGSLASCDQCGNCVEVCPVGALMSFPYRYKARPWDLAETDTICPHCGTGCQLTVGARKGEFMRVRSDWEHGVNRETLCVRGRFGLDFIESRDRIKRPMIRRDGTLTPVSWEEAGDFLRQRLGVAEGKAAGGLISPRLPNEVLYQFQKLMRTVLRTNNVDCSSRWSAPLDILVPIVASFYSRDPLEQVIGKDCVLIIGGNVTEENPVTEYLLRDAARRRHTRLLMLSARPSRLDADARAVLRAHPGGEGQSLAAVVAALVAVTDEGLPDDIFAKTSGTTASSGANDALDRLVSTLKEGRSVTLLVSVDLLRSPLARKTLEQLGNLLQLLRLLGKEPSLQFLFDRANQMGAWDMGVLPGVLPGLSPIADEATRTRFERSWGAEIPREPGADVDAMLELCEKGGMGVLYVVGSDPLISYPDREFVERALGAANLLIVQDAFLTDTAGLADVVLPAAGYGEESGTFTNNEGRTQALRKFREPAFDARSNLAIFGFIAALRERPLQPSTETVIFEEMTRLVPAYEGLTWEGLGADGAFTTSAPKPWTSGFFAPLSAPAVTDVLQLITGNCLFHNGYVSEHSETLNSVADDPFIEMSAQDAAGLSLSDGDQVLVRSARGELTAKLKVNRRFPHGLVFVPENYRALRLNSLMRRGEYPCPVEIRECAKRAASALDEERV

SEQ ID NO: 2105 - protein, 454 aa, Rhodobacter capsulatus
MAEFDVIIIGGGPGGYVCAIRCAQLGLKTACVEGRGALGGTCLNVGCIPSKALLHATHELHEVHENFEKMGLMGAKVKVDWAKIDGNTKGIEFLFKKNKVTYLRGWGSIPAPGQVKVGDEVHTAKNIVIATGSESSGLPGIEIDEQTVVTSTGALSLAKVPKSMVVIGAGVIGLELGSVYARLGAEVTVVEYLDAITPGMDAEVAKGLQRILTRQGLKFVLGAAVQGVDKAKGKNTVRYTLRKDESAHAIEAEVVLVATGRKPFTKGLGLEALGVEMLPRGQVKADSHWATNVPGLYAIGDAIVGPMLAHKAEDEGMAVAEVIAGKHGHVNYDVIPGVIYTTPEVAAVGKTEDALKQEGRAYKVGKFSFMGNGRAKAVFQAEGFVKILADAATDRILGAHIIGPSAGDMIHEICVAMEFGASAQDLALTCHAHPTYSEAVREAALACGDGAIHA

SEQ ID NO: 2106 - protein, 239 aa, Stylosanthes hamata
MAPREKTPAVKVNAGVKEVHFRGVRKRPWGRYAAEIRDPGKKSRVWLGTFDTAEDAARAYDAAAREFRGPKAKTNFPFPDSDDINSNNNNIVVVKNNNRSPSQSSTVESSSRDRDSYSAAAAATAVADSSPLDLNLAPAGAGFAGSIRFPFQQPFAVFPGGMPAAKQALYLDAVLRASMASHGQFGFGYNRPAAAAAGAQSDSDSSSVIDLNQNEGDVAKNNGRGLVLDLNEPPPQEMA

SEQ ID NO: 2107 - protein, 482 aa, Saccharomyces cerevisiae
MSAFVRVVPRISRSSVLTRSLRLQLRCYASYPEHTIIGMPALSPTMTQGNLAAWTKKEGDQLSPGEVIAEIETDKAQMDFEFQEDGYLAKILVPEGTKDIPVNKPIAVYVEDKADVPAFKDFKLEDSGSDSKTSTKAQPAEPQAEKKQEAPAEETKTSAPEAKKSDVAAPQGRIFASPLAKTIALEKGISLKDVHGTGPRGRITKADIESYLEKSSKQSSQTSGAAAATPAAATSSTTAGSAPSPSSTASYEDVPISTMRSIIGERLLQSTQGIPSYIVSSKISISKLLKLRQSLNATANDKYKLSINDLLVKAITVAAKRVPDANAYWLPNENVIRKFKNVDVSVAVATPTGLLTPIVKNCEAKGLSQISNEIKELVKRARINKLAPEEFQGGTICISNMGMNNAVNMFTSIINPPQSTILAIATVERVAVEDAAAENGFSFDNQVTITGTFDHRTIDGAKGAEFMKELKTVIENPLEMLL

SEQ ID NO: 2108 - protein, 371 aa, Triticum aestivum
  unsure (1)..(371): unsure at all Xaa locations
PTRPREGNWDLLGNNFPVFFIRDGIKFPDVIHAFKPNPKSHVQEYWRVFDFLSHHPESLHTFFFLFDDVGIPTDYRHMDGFGVNTYTFVSRAGKSHYVKFHWRPTCGVSCLMDDEATLVGGKNHSHATQDLYDSIDAGNFPEWKLFVQVIDPDDEDRFDFDPLDDTKTWPEDLVPLQPVGRLVLDRNVDNFFNENEQLAFGPGXLVVPGIYYSDDKMLQCRVFAYADTQRYRLGPNYLMLPVNAPKCGFKNNHYDGAMNFMHRDEEVDYYPSRHAPLRQAEPASFPVPTRPVVGKREKTRIKKENDFVQPGERYRSWAPDRQDRFVRRFADALAHPKVSHELRVIWIDFLSKCDKSCGMKVANRLNVKPSM

SEQ ID NO: 2109 - protein, 438 aa, Corynebacterium glutamicum ATCC 13032
MGADQIAAVSGNSAWMLMSASLVLLMTPALALFYGGMSRQKSVLNMMMMSFGALGVVTVIYLLWGWSMSYGTQSIAGIFANPFEFFGLKDSIVDADGNYIEGAAGYPNIIDIGFQLTFAVISTALISGALAERVKFSTWLIFSGAWVTLVYFPLAHMVWGGGLLGHNVTGFASWLFGSTDGEANIAPIDFAGGTVVHISAGTAALVLAFIVGKRKTFGKAIARPHNLPMVMLGAALLWFGWFGFNGGSAFAADGLAGLAWVNTTAATAAAMLGWLATEKFRDGHATSLGAASGVVAGLVAITPAAGALTPVTSLILGAIGGILACLGVGLKYRFGFDDSLDVVGVHLVAGLWGTVGVGLLATDIGWFSGGGMDGLKLFIVQIVIALVAVVFAGVITALIAFALKATVGWRVDDDVEQQGIDTHEHAESAYDTTGPEIR

SEQ ID NO: 2110 - protein, 353 aa, Mycobacterium avium subsp. paratuberculosis str. k10
MIWRRGGLIFVPEGGQLRWEGTMAKPPLSMKPTGWFQVAWSDEIGVGDVHKMKYFDQEMVAWRAESGQLTVMNAYCEHLGAHLGYGGKVVGEVLQCPFHGWQWSAEGRNVCIPYQDRPNRGRRMRTYPVVERNASVYIWHDLQRREPYFDPPDVFAAFGDGSSADDYYPQQRLYRQALEMHPQYVLENGVDFAHFKFVHNTPIVPVFTRHDFAEPVSYVDFTITFEGDDGQKIEDVNSGVQAINGGLGIAVTKSWGMIDNRTISAITPVDERTSDVRFMVYIGRTPAKDAARAQRKAAEFGDEVIRQFTQDIEIWQHQRYSDPPALAADEYQGFMAIRQWAKQFYPEFAAQEA

SEQ ID NO: 2111 - protein, 141 aa, Populus alba x Populus tremula
YVGGGMGRTHRLETTFPRLAEPLGYVPKEDILYAVKAIVVTQRENGRRDDRKYSRMKYLISEWGIEKFRSVVEQYYGRKFEPSRELPEWEFKSYLGWHEQGDGGLFCGLHVDSGRIGGKMKATLRETIEKYNLDVRLTPNQ

SEQ ID NO: 2112 - protein, 409 aa, Nostoc punctiforme
MKAVVFHGIGDIRLDNVPEPKIKESTDAIIRLTSSAICGTDLHMIRGTFTGMKPGTILGHEGVGIVEEIGSNVRNLKVGDRVVVPSTIACGYCSYCRTGYHAQCDNANPNGHNAGTAFFGGPEAAGPFDGLQAEYARIPYANAGLVKLPKEVTDDQAILLSDIFPTAYFGADIAEITPGDTVAIFGCGPVGQFAIVSARLFGAGHIIAVDTIPSRLEMARDLGAEIIDYNAEDPIEAIRELTGGIGVDRAIDAVGVDANAPDSGPAAEKARQEAQQFQQQLQQIAPKTNPQNGNWHPGNAPSLVLEWAVQALAKAGTLSIIGVYPPSHNFFPIGTAMNKNLTINMGNCNHRKYIPTLVDLVRNGTVDPTKVLTQVEPLMSVIDAYKAFDRRQPGWVKVELVPGATLANV

SEQ ID NO: 2113 - protein, 434 aa, Arabidopsis thaliana
MGFKRKKDDGDGEEMESDVRGKSTFSGGEKRNVILPSMIKNKDKRSKVYAKQKHEKKLEKQKKIRARDAAEKRALELGEEVTIWRSFFRDFLKPPQKMIPKTIENTRESDETVCRPDDEELFADIDADEFNPVLRREIAPKVLLTTCRFNSTRGPALISELLSVIPNSHYQKRGTYDLKKIVEYATKKDFTSLIVVHTNRREPAFAISYVDALLIIGLPNGPTAHFKLSNLVLRKDIKNHGNPTSHQPELVLNNFTTRLGNRVGRFFQSLFPPDPNFRGRRVVTFHNQRDFIFFRHHRYIFETKESKSDKGKEETIKPRLQECGPRFTLKLVTLQHGTFDTKGGEFEWVHKVKSPEMDTSSFIAEKVLLINSAVFRVSPSFVFILHFRIFPTSVQNCMSLKLLISFFNIAMSHRNNRKSTCFNNIGPRFLLSYI

SEQ ID NO: 2114 - protein, 489 aa, Halomonas elongata
MTAQSAQPLYIGGRPVDATSGETFTVTNPYDGSLLATIGQASQADVDSAVQAAQRGQREWAAMTGMERSRILLRAVALLRERNDELAELETRNTGKPISETASVDIVTGADALEYYAGLAPAIEGSQIPLRDTRLVYTRREPLGVIGAIGAWNYPIQIACWKAAPALAAGNAIVFKPSEVTPLTALKLAEIFTEAGLPDGVFNVVQGDGRVGAMLTEHEGIAKVSFTGEVGTGKKVMAAAGGSTLKDVTMELGGKSPLIVFADADLDRAADAAMMANFYSSGQICTNGTRVFVERSAKEAFEAKLVERVARIKAGDPMDPSVNFGPLVSFEHQEKVLSYIALGKEQGARVLAGGDAWNSGEWAKGAWAAPTVFTDCTDEMRVVKEEIFGPVMSVLAFDDEEEVIRRANNTKYGLAAGVFSESLNRAHRVIHQLEAGICWINTWGESPSEMPVGGYKESGIGRENGVETLNHYTQTKSVQIEMGPFESVF

SEQ ID NO: 2115 - protein, 451 aa, Pseudomonas aeruginosa UCBPP-PA14
MSFDFDLFVIGAGSGGVRAARFAAGFGARVAVAESRYLGGTCVNVGCVPKKLLVYGAHFSEDFEQARAYGWSAGEAQFDWATLIGNKNREIQRLNGIYRNLLVNSGVTLLEGHARLLDAHSVEVDGQRFSAKHILIATGGWPQVPDIPGKEHAITSNEAFFLERLPRRVLVVGGGYIAVEFASIFNGLGAETTLLYRRDLFLRGFDRSVREHLRDELGKKGLDLQFNSDIARIDKQADGSLAATLKDGRVLEADCVFYATGRRPMLDDLGLENTGVKLTDKGFIAVDEHYQTSEPSILALGDVIGRVQLTPVALAEGMAVARRLFKPEEYRPVDYKLIPTAVFSLPNIGTVGLTEEEALSAGHKVKIFESRFRPMKLTLTDDQEKTLMKLVVDAHDDRVLGCHMVGAEAGEILQGIAVAMKAGATKQAFDETIGIHPTAAEEFVTLRTPTR

SEQ ID NO: 2116 - protein, 171 aa, Zea mays
  unsure (1)..(171): unsure at all Xaa locations
MAATAMMASSDTAGAAFQGLKCTVSLPIVRRSFRSLXGNVSNGGRIRCMQVWPAYGNKKFETLSYLPPLSTDDLLKQVDYLLRNGWIPCLEFSKVGFVYRENSTSPCYYDGRYWTMWKLPMFGCNDATQVYKELQEAIKSYPDAFHRVIGFDNIKQTQCVSFIAYKPPGSD

SEQ ID NO: 2117 - protein, 51 aa, Phaseolus vulgaris
MKQFRVLTCQTVADMIKGKTPEEIRKTFNIKNDFTPEEEEEVRRENQWAFE

SEQ ID NO: 2118 - protein, 572 aa, Glycine max
ENDPKIDYRGWKAMPFIIGNETFEKLGAIGTLANLLVYLTTVFNLKNITATNIINIFNGSTNFATFIGAFLSDTYFGRYKTIGFCTFTSFLGLLVIQLTAVFKNLHPPHCGKEMKTCKGPTAGQMAFLVSGFGLLLIGAAGVRPCNLAFGADQFNPNTDSGKKGINSFFNWYFFTFTFAQMVSLTLIVYVQSNVSWAIGLGIPAALMLISCVVYFMGSKIYVKVEPSGSPIAGIVQVFVVAVKKRSIKLPAEHPMLSLFNYVPPMSVNSKLPYTFQFRLLDKAAIVTPKDKIKPDGSAADPWNLCSIQQVEEAKCVVRVLPIWFAAIVYHLVIVQMHTLLVFQALQSDRRLGSSNFKIPGASFNVFLMLSMTLWLPIYDRIVVPFSLSNTPEKSGGITLLQSDGIGIFISALCMIVAGVVEEHRRSLALTNPIGVQPRKGAISSMSGLWLIPQLSLAGLSESFTAVGQVEFYYKQFPENMRSIAGSLFYCGMAGSSYLSTLLISIVHNTSEKSATGNWLPEDLNKGRLDFFYYMIAALEIMNLGYFLLCSKWYKYKEIGSSDLELNQVPKHI

SEQ ID NO: 2119 - protein, 272 aa, Pseudomonas syringae pv. tomato str. DC3000
MSKTRIAFVGAGNMAASLIGGLRAQGVEASLICASAPGAETRERISTEHGIEVFADNAEAVKGADVVVLAVKPQMMKSVCQALKASLEAHQLIVSVAAGITCASLTQWLGDQPVVRCMPNTPSLLRQGASGLYATDKVSPTQREQAEQLLSAVGVAVWVEQEKHMDAVTAVSGSGPAYFFLMMEAMTAAGVKLGLPEDIAKKLTLQTALGSALIATGSNVDAGELRRRVASPGGTTEAAIKAFQAGGFEALVETALTAADHRAAELAEQLGK

SEQ ID NO: 2120 - protein, 270 aa, Geobacter sulfurreducens PCA
MLKGSTLGFIGGGNMAEAIIKGLLAGGVAAADVMVAEPVAARREYLHGTYGIDVCADNGRVAAAADALVMAVKPQVFRGMVAALGPAGLDGKLLISIMAGITTADMEEVCGSAARVIRVMPNTPALVLEGASTLCRGRNATDDDLFFATGIFDLVGTTCVVEEKLMDAVTGVSGCGPAYVFLFMEALSDAGVKNGLPRDVATRLAAQTVLGAARLLLETGDHPGVLKEKVTSPGGSTIAGIASLERDAFRGAVMAAVDAATARSAELGKK

SEQ ID NO: 2121 - protein, 197 aa, Pseudomonas syringae pv. tomato str. DC3000
MNLTQLVLASHNGGKLKELQAMLGGSVTLRSVSEFSLVEPEETGLSFVENAILKARNASRLSGLPALADDSGLAVDFLGGAPGIYSARYADGQGDAANNAKLLEALKDVPDEQRGAQFVCVLALVRHADDPLPILCEGLWHGRILHAASGEYGFGYDPLFWVPERNCSSAELGPSEKNQLSHRARAMVLLRQRLGLQ

SEQ ID NO: 2122 - protein, 513 aa, Geobacter sulfurreducens PCA
MPRPLVLMILDGWGINPDPSNNAVAIGRTPAMDRLMAEYPSVEMETSGMAVGLPDGQMGNSEVGHLNIGAGRVVYQDLTRITKSIDDGDFFTNPVLLDCMARVKAAGGRLHLGGLLSDGGVHSHNTHLYALIELARRQGVKDVFVHAFLDGRDTPPSSGAGYLAELEAEIGRIGFGRVATVMGRYWAMDRDNRWERVERAYNTIVKGEGAHRPDSAAAIEASYSAGVTDEFVEPAVIAPNGSPLGLLADGDGFICFNFRSDRAREITRALTDPAFAGFDRSPWPRLASYVCLTEYDATFPLPVAYPPESLANILGQVVSRAGLRQLRIAETEKYAHVTFFFNGGVEEPFPGEERILIPSPKEVATYDQKPEMSAPLVTDALLKRIDEGVDDVVVVNFANADMVGHTGILDAAVRAIETVDECVGRVAATVLEKGGALIITADHGNAEMMVDETGGPHTAHTNERVPLILVDDSRKGARLRPGTLADIAPTMLGLLGIPQPPEMTGKSLLVATE

SEQ ID NO: 2123 - protein, 341 aa, Oryza sativa
MAKNACKLCYRRFASPRALAGHMRSHSVAAANAAAAAAAAAAAKLQISSASSASTSFTAADEEEEEEEEEEDVGFKKPLSIYALRENPKRSLRVSEYAFSDRESEAESTPTPAAKGLRAGGGGGGGDGEPMSSLSYAGTPEEEVALALMMLSRDTWPSVERGGGGGEYSDDGSDDGYALPPPSPAPAPAPVPEKRTRFQCPACKKVFRSYQALGGHRASHVRGGRGGCCAPPVAPPPQPHPQPPLPEHDAGEEDMDGKAPPHECPYCYRVFASGQALGGHKKSHVCSAAAAAAHAQTPGGGAPPPQPKILGMIDLNFAPPVDEVELSAVSDPHFPSNPPGP

SEQ ID NO: 2124 - protein, 120 aa, Zea mays
  unsure (1)..(120): unsure at all Xaa locations
GRVNPIVGDDLLVTNPKRIADAIDKKACNALLLKLVNQIGTVTESIQAALDSKAAGWGVMVSHRSGETEDNFIADLAVGLXQIKTGAPCRSERLAKYNQLLRIEEELGNVRYAGEAFRSP

SEQ ID NO: 2125 - protein, 311 aa, Zea mays
MAASVALSSGHRMPAVGLGVWRMEKADIRGLIHTALRVGYRHLDCAADYQNEAEVGDALAEAFQTGLVKREDLFITTKLWNSDHGHVLEACKDSLKKLQLDYLDLYLIHFPVATRHTGVGTTSSALGDDGVLDIDTTISLETTWHAMEELVSMGLVRSIGISNYDIFLTRDCLAYAKIKPAVNQIETHPYFQRESLVKFCHKHGICVTAHTPLGGSTANTEWFGSVSCLDDPVIKSLAEKYGKTPAQLVLRWGLQRNTVVIPKTSKLERLQENFEVFDFDISGEDMEKMKAVDRKYRTNQPAKFWGIDLFA

SEQ ID NO: 2126 - protein, 675 aa, Corynebacterium glutamicum ATCC 13032
MAFSVEMPELGESVTEGTITQWLKSVGDTVEVDEPLLEVSTDKVDTEIPSPVAGVILEIKAEEDDTVDVGGVIAIIGDADETPANEAPADEAPAPAEEEEPVKEEPKKEAAPEAPAATGAATDVEMPELGESVTEGTITQWLKAVGDTVEVDEPLLEVSTDKVDTEIPSPVAGTIVEILADEDDTVDVGAVIARIGDANAAAAPAEEEAAPAEEEEPVKEEPKKEAAPEAPAATGAATDVEMPELGESVTEGTITQWLKAVGDTVEVDEPLLEVSTDKVDTEIPSPVAGTIVEILADEDDTVDVGAVIARIGDANAAAAPAEEEAAPAEEEEPVKEEPKKEEPKKEEPKKEAATTPAAASATVSASGDNVPYVTPLVRKLAEKHGVDLNTVTGTGIGGRIRKQDVLAAANGEAAPAEAAAPVSAWSTKSVDPEKAKLRGTTQKVNRIREITAMKTVEALQISAQLTQLHEVDMTRVAELRKKNKPAFIEKHGVNLTYLPFFVKAVVEALVSHPNVNASFNAKTKEMTYHSSVNLSIAVDTPAGLLTPVIHDAQDLSIPEIAKAIVDLADRSRNNKLKPNDLSGGTFTITNIGSEGALSDTPILVPPQAGILGTGAIVKRPVVITEDGIDSIAIRQMVFLPLTYDHQVVDGADAGRFLTTIKDRLETANFEGDLQL

SEQ ID NO: 2127 - protein, 455 aa, Oryza sativa (japonica cultivar-group)
MGAEEEEEPASAVGREGGGGGGGARAAGAGAGGDTADDDDSGESAAAVVPCSICLDAVVAGGGDRSTARLQCGHEFHLDCIGSAFNAKGVMQCPNCRQIERGNWLYANGSRPSQDVSNDDWGHDEDFYDANQPETSRSVFLPFRFQWCPIGRLAQLPSVFDEGESAPPVTFHDFMGQNFTSEHLPVSAPGATPPGPYIAYFQPLQSSASSSSSHVTERTMDGTTYHDHWNPLPGPSDGRPLATVHPIDFHHNHWTHLPNSYSQPNSNNGVAEQMAIPVVPMRVGGLDSDSQQRGSLPSVYGNGSGSRSRIPSVPPMAPQFMRPHGNINEQYQQNSSSLYAAPQRRTAVQAVQDSMNFTLFPQAPTGPNSMETEDAGGNQFYAWERDRFAPYPLMPVDSEANWWGSTPQSHGVTDHSAAPGRRLFGQWIGAGRSPPPPPPPPADNSSYRQMHIPRM

SEQ ID NO: 2128 - protein, 265 aa, uncultured bacterium
MRLKDKIALITGAGSGIGEATAKTFAREGATVVVVDLNEDGAARVVSEIRKAGGAAESLRADVGVPAEIERMIKFARDRFGRLDVLHNNAVFTTVGRIGEISLEGWQKTLDVGLTAYWYATKCALELMLPARKGAIVNTASVSGLAGDYTLGAYNAVKAGVVNITRVTGIEYARKGIRCNAVCPGPIGTPPLLRMEDSRPDIVARIREAIPMGRLGEPQEIANVVLFLASDEASFVTGAFFVADGGLWAHSGMPSLSGQGPEWQG

SEQ ID NO: 2129 - protein, 816 aa, Oryza sativa
MGAASHTCRHQVGSSSWENARWPEEQRFREDAHTLCIREQCCHDTRARITNANEEPWPLRPGGCRPRPYRRFSTREEISWRVVSVIPPAESLPRRRSSPARWFRRSWPTEEEAALGVAVEEDHDSPAAPGYQHQQGPPVAKALPFSATCVRISRDSYPNLRALRNASAMSLPDDDAAYAKLEEGDYGYLLDDVPHFTDYLSDLPTFPNPLQDHPAYSTVKQYFVNADDTVPEKVVVQKDSPRGVHFRRAGPRQRVYFESEDVKACIVTCGGLCPGLNTVIRELVCGLSHMYNVNDIFGIQVYIIGGDGTQKGAYEIYKEIRRRGLKVAVAGVPKTIDNDIAVIDKSFGFDSAVEEAQRAIDAAHVEASSAENGIGLVKLMGRYSGFIAMYATLASRDVDCCLIPESPFYLEGEGGLFEYIEKRLKENNHMVIVVAEGAGQDLIAKSIAAADQIDASGNKLLLDVGLWLTHKIKDYCKNKKMEMTIKYIDPTYMIRAIPSNASDNVYCTLLAHSAIHGAMAGYSFTVGMVNGRHAYIPFHRVTSTRNKVKITDRMWARLLSSTNQPSFLSQKDIDAAREADKLASKSPVPVNTKEHGENVKKPANGEGSSDAVVQEPFATTPTSPAALAAGAVSNPALTPAAVSMSFYDVNAGEQPSREDEAPEEVVEAAVANGAPTAVEKHNKLYSPAETPAGSGTRPHPTADAVAETAGAAPDDVDGCTTPPPRPVHDSEGSDTQSADDHGSPQREKPRTTSTAGGVKRDVAPSWSSRLLAFRSFSRDKKAKATVDARPPAHGKARDEGDEHKEKGKERRKRFWK

SEQ ID NO: 2130 - protein, 499 aa, Arabidopsis thaliana
METEDDLCNTNWGSSSSKSREPGSSDCGNSTFAGFTSQQKWEDASILDYEMGVEPGLQESIQANVDFLQGVRAQAWDPRTMLSNLSFMEQKIHQLQDLVHLLVGRGGQLQGRQDELAAQQQQLITTDLTSIIIQLISTAGSLLPSVKHNMSTAPGPFTGQPGSAVFPYVREANNVASQSQNNNNCGAREFDLPKPVLVDEREGHVVEEHEMKDEDDVEEGENLPPGSYEILQLEKEEILAPHTHFCTICGKGFKRDANLRMHMRGHGDEYKTAAALAKPNKESVPGSEPMLIKRYSCPFLGCKRNKEHKKFQPLKTILCVKNHYKRTHCDKSFTCSRCHTKKFSVIADLKTHEKHCGKNKWLCSCGTTFSRKDKLFGHIALFQGHTPAIPLEETKPSASTSTQRGSSEGGNNNQGMVGFNLGSASNANQETTQPGMTDGRICFEESFSPMNFDTCNFGGFHEFPRLMFDDSESSFQMLIANACGFSPRNVGESVSDTSL

SEQ ID NO: 2131 - protein, 557 aa, Providencia rettgeri
MILLSIEGMTCPSCVAHVKEALDAIEGVNKVEISYENARATITTNGGVSVTVLIGAIEALGYIAKESTGTAKEITSPNDCCDNENASNTESNQTQHVAIIGTGSGAFACAIKAAEGGAKVTLIEGADVIGGCCVNVGCVPSKILIRAAQLAQQQRNNPFTGLENHAPQLSRALLTQQQTARVEELRAAKYQNILETNPALSLLKGWAQFKNANTLIVRKNDGTEQAVHADKILIATGSTPTIPPIDGLTETPYWTSTEALFAQELPQHLVVIGSSVVALEIAQAYRRLGSEVTILARHTLLYREDPLLGEKLTGCFEKEGIRVLNSTQATKVTHDGSQFTLETNAGDLRCDRLLVSTGRHANTCQLNLGAVGVTTNKKGEIVVNERMETNVPGIYAAGDCCNMPQFVYVAAAAGSRSGINMTGGYAKLDLSTMPAVIFTDPQVATVGLTEEQANAQDIETDSRVLEMENVPRALANFETDGFIKLVTEKATGRLIGAQILAHEGGELIQSAALAIRNRMTVTELADQLFPYLTMVEGLKLCAQTFNKDVKELSCCAG

SEQ ID NO: 2132 - protein, 383 aa, Zea mays
MAEDRSPKPIHCKAAVCRAAGEPLTIEEIVVDPPKAYEIRIRVICTSLCHTDITFWKAKVAPVFPRILGHEAYGVVESVGEHVEGFAAGDTVVPTFLGQCERCASCASEHSNVCDAVPFVIGPGMRRDGTTRFRDARGSPLHDLLAVSSFSEYTVVDVNQVVKVDPAVPPKLACLLSCGAGTGVGAAWRSAKVEPGSTVAIFGLGSVGLAVVQGAKMCGASKIIGVDLNPDKEEVGRSFGVTDFVNPSQLDKRSVVEVIVEMTGGGVDYSFECIGVPSVMTDAFRCTKMGKGKTIVLGLGRDSDEVCLPSLELLFGRCVMGSLFGGLKPKTHIPVLAKKCMDKELQLDALVTHELGLQDINKAFDLLLQGKSLRCILWMDKDK

SEQ ID NO: 2133 - protein, 360 aa, Gloeobacter violaceus PCC 7421
MDGNKPMDVPQLMHAAVFYGVGDLRYEQVPVPEVAADEVLVQVRACGLCQSDIKKLRYPLLDPPRIFGHETSGTIVRAGEAVEHWRVGERVVVLHHIPCFHCPYCLNENYSMCRVYKEVTTTAGFAPAGGGFAEYVKVPGHIVRSGGLMAIPDGVSFEEASFVEPTNCCLKAVKKAQVQPGQWVLITGAGPIGLMFAMLCRQFGAKPIVTDLLASRVERARALGAEAALDARSADLTARIHALTGGLGVDVALLAVPSVQAFSQALDATRKGGKILFFAEFAESVQIPLDPNVLYRREIDLMGSYSSSFKVQHLAADLVFGRRIDVQALISDFYPLAELAAAVEQAVHPTPETCKILIRP

SEQ ID NO: 2134 - protein, 613 aa, Clostridium thermocellum ATCC 27405
MCGIAGWINLKSDLTNQKEILNSMIDRLTPRGPDASGSWISPNALIAHKRLIVVDPEGGIQPMVRRQGENTYVITYNGELYNTADLRNELESRGHEFLTSSDTEVLLVSYIEWGAKCVEHLNGIYAFGIWDEGKKRLFLGRDRFGVKPLFYAQRGDSLIFGSELKALLANPLVEPKLDAEGLAEIFALGPARTPGHGIFKDVYELKPAHSMIFDINGIQIRKYWSLESYPHTDSEKATISKVRDFVLDAITRQLVADVPVCTFLSGGLDSSAITAVASKTFASQGKGQLNTFSVDYVDNDIYFKPSMFQPNSDEPWIKKMSESFNTCHHYVKFDTPQLVDALIDAVKARDLPGMADIDSSLFLFCREVKKFSVVALSGECADEIFGGYPWFHNEKMLFADTFPWSVSVHERTKILSPEILNLIKPEEYIQRRYRETLSEVPHLKGENRIEARRREIFYLNINWFMATLLDRKDRMSMASGLEVRVPFCDHRLVQYVWNIPWELKMYNKREKGLLRQALKGILPDDIIERKKSPYPKTHNPSYKKAVSKWLLEILNDSSSPLHQLIDVKVVRSMAEGNSDNTDPWFGQLMAQPQMLAYLIQVDFWLRDNHISIV

SEQ ID NO: 2135 - protein, 113 aa, Lycopersicon esculentum
KPFYAIVHRVTGSLILDFEPVKPYEVPMTAAGALQSYKLAAKAITRLQSLPSGSMERLCDTMVQEVFELTGYDRVMGYKFHEDDHGEVVSEITKPGLEPYLGLHYPATDIPQA

SEQ ID NO: 2136 - protein, 389 aa, Gloeobacter violaceus PCC 7421
MTGSLLDQLRQMTIVVADTGDIQAIEQFTPRDATTNPSLITAAAQMPQYQQIVDDTLKQARAELGPEAKAAAVATLAFDRLAVAFGLKILAIVPGRVSTEVDARLSYDTEATIEKGRSLIAQYEAAGISRERVLIKIASTWEGIRAAEILEDEGIHCNLTLLFGVHQAIACAEAGVTLISPFVGRILDWYKKETGRDYEPHEDPGVVSVTTIYNYYKKFGYQTQVMGASFRNIGEIVELAGCDLLTISPKLLEQLQATDAELVRKLDPDQAAGLEIEKIDMDQATFEKRHAEDRMASEKLDEGIKGFTNALVALEKLLADRLARLEGEVALNQAFESIFRTFDLDGDGFITREEWMGTDAVFDAIDLNHDGKITAEELGAGIGAVSKLA

SEQ ID NO: 2137 - protein, 336 aa, Acholeplasma laidlawii
MSKEYEIIIVGGGPGGYVAAIKAAQYGAKVALVEKEVVGGICLNHGCIPTKTFLKSAKVFNTVKKSMDFGVSTSGEVGFDWSKIVSRKDGVVKQLTNGVAFLLKKNGVDVYNGFGDIKSANEVVVNGESLKTKNVIIATGSSAVVPPIPGVKEAYEKGIVVTSRELLNVKNYPKSIVIVGGGVIGVEFATVFNSFGSKVTIIEMMDGILPTMDDDIRVAYAKTLKRDGIEILTKAEVKKVDDHKVTYSLDGKETTIEGDLILMSVGTRANSKGLEHLGLEMDRANIKTNEYLQTNVPGVYAIGDVNGKFMLAHVAEHEGITAVQHILKIGHAKMNY

SEQ ID NO: 2138 - protein, 366 aa, Dioscorea elephantipes
SGKPFYAIVHRVTGCLIFDFEPVKLSDIPTSTTASGALQSYKLAAKAIARPQSLPGGSMDTLCETLVEEVFQFTGYDRVMVYKFHEDDHGEVYQEITKPGMVPYLGLHYPATDIPQAARFLFIKNKVRMICDCRAKHVNIHQDETLLFDITFCGSTLRAAHNCHLQYMSNMNSIASLTMAVVVNEGEEEDDHLEPGQSSQQQQQQQQQQQQQQQKRKHLWGLVVCHNESPRFLPFPMRYACQFLMQVFSVHVTKELELENQIREKNILRTQTLLCDMLLRDTAPVGIITQSPNIMDLVKCDGAALLYDDRIWRLGLTPTKEQIRSIAHWLAEHHMAPTALSTDSLQDAGYPDAQALGDLVCGMAAA

SEQ ID NO: 2139 - protein, 463 aa, Dioscorea elephantipes
SGKPFYAIMHRIDVGLVIDLEPVNPADVPVTAAAALKSYKLAAKAISRLQSLPSGNIPLLCDVLVKEVSELIGYDRVMAYKFHEDEHGEVIAECRRSDLEPYLGLHYPATDIPQASRFLFMKNKVRMICDCSAPPVKVIQDKRLPQPLSLGGSTLRAPHGCHAQYMANMGSIASLVMSVTINEDDDETGSGDQQQNGMKLWGLVGCHHTSPRFVPFPLRYACEFLLQVFGIQLNKEVELATQQREHILRTQLSCDMLLRDAPIGYLLNSPNVMDLVKCDGAALYYKNQFWLLEITPTEAQIRDIFAWLLEYHNSTTGLSTNSLTEAGYPGAVELGDAVCSMAATKITSKDFIFWFRSHTSKEIKWGGAKHDPGDRTDEGRKMHPRSSFKAFLEVVKRRSLPWEDVDMDAIHSLQLILRGSLQDEPVTDNSKTIVNATPDDAKQIQHMDELRIVTTEMVRLMET

SEQ ID NO: 2140 - protein, 602 aa, Physcomitrella patens
MQGAMQTKMWRGELISTSTHFIGGTRLQPKLNQDARKPTKSENCIVRVSMEREVKAKAAVSPPAVAADRLTPRVQERDGYYVLKEEFRQGINPQEKIKLGKEPMKFFIENEIEELAKTPFAELDSSKPGKDDIDVRLKWLGLFHRRKHQYGRFMMRFKLPNGITNSTQTRFLAETISKYGKEGCADLTTRQNWQIRGIMLEDVPSLLKGLESVGLSSLQSGMDNVRNAVGNPLAGIDPDEIVDTIPICQALNDYIINRGKGNTEITNLPRKWNVCVVGTHDLFEHPHINDLAYVPATKNGVFGFNILVGGFFSSKRCAEAIPMDAWVPTDDVVPLCKAILETYRDLGTRGNRQKTRMMWLIDEMGVEEFRAEVERRMPSGTIRRAGQDLIDPSWKRRSFFGVNPQKQAGLNYVGLHVPVGRLHAPEMFELARIADEYGNGEIRITVEQNLILPNIPTEKIDKLMQEPLLQKYSPNPTPLLANLVACTGSQFCGQAIAETKALSLQLTQQLEDTMETTRPIRLHFTGCPNTCAQIQVADIGFMGTMARDENRKPVEGFDIYLGGRIGSDSHLGELVVPGVPATKLLPVVQELMIQHFGAKRKP

SEQ ID NO: 2141 - protein, 466 aa, Hedyosmum sp. SM-2000
SGKPFYAIIHRVTASFIIDFEPVKPYEVPMTAAGALQSCKLAAKAISRLQSLPGGSMERLCETVVQEVFELTGYDRVMAYKFHEDDHGEVFSEITKPGLEPYLGLHYPATDIPQAARFLFMKNKVRMICDCHAKPVKVFQDEKLTFDLTLCGSTLRAPHSCHLQYMANMSSIASLVMAVVVNEGEDEGENVDSGQQQQQKRKRLWGLVVCHNTTPRFVPFPLRYACEFLIQVFAIHVNKEIELESQIREKNIFRTQTLLCDTLMRDAPLGIISQNPNILDLVKCDGAALLYKSKVWRLGLTPNEPQIHDISLWLSEYHMDSTGFSTDSLHEAGYQGAVALGNIVCGMAAVWITSKDMLFWFRSHTAAEVRWGGAKHDPDDTDDNRRMHPRSSFKAFLEVVKKRSIPWKDYEMDAIHSLQIILRGNFSDSEKTHANTTFDSRLNDLKLEGMEELQAVTNEMVRLIET

SEQ ID NO: 2142 - protein, 397 aa, Hedyosmum sp. SM-2000
DLEPVNPAEVPVIAAGALKSYKLAAKAISKLRSLPSGNISLLCDVLVREVSELTGYDRVMAYKFHEDEHGEVIAECRRSDLEPYLGLHYPATDIPQASRFLFMKNKVRMICDCSAPPVKVIQDKRLGQPLSLCGSTLRAPHGCHAQYMTNMGSIASLVMSITINEDDEETDNEQQLQQEKPKKLWGLVVCHHTSPRFIPFPLRYACEFLIQVFGIQLNKEVELAAQVREKHTLKTQTVLCDMLLRDAPMGILTQSPNVMDLVKCDGAALNYKNQFWLLGTTPTEAQIKDLAEWLLECHDGTTGLSTDSLTEAGYPGSYVLGDAVRGMAAVKITSKDFLFWFRSHSAKEIKWGGAKHDPIDKDDDGRKMHPRSSFKAFLEVVRQRSVPWEDIEMDAIQ

SEQ ID NO: 2143 - protein, 402 aa, Pseudomonas syringae pv. tomato str. DC3000
MADQGSPRRFARIDRLPPYVFNITAELKMAARRRGEDIIDLSMGNPDGATPPHIVEKLVTVAQREDTHGYSTSRGIPRLRRAISNWYKKRYEVDIDPESEAIVTIGSKEGLAHLMLATLDQGDTVLVPNPSYPIHIYGAVIAGAQVRSVPLVPGVDFFAELEKAIRGSIPKPKMMILGFPSNPTAQCVELDFFERVVALAKQYDVLVIHDLAYADIVYDGWKAPSIMQVPGAKDIAVEFFTLSKSYNMAGWRIGFMVGNPELVNALARIKSYHDYGTFTPLQVAAIAALEGDQQCVLDIAEQYRQRRNVLVKGLHELGWMVENPKASMYVWAKIPEAYAHLGSLEFAKKLLAEAKVCVSPGIGFGEYGDDHVRFALIENQDRIRQAVRGIRSMFRADDKLKS

SEQ ID NO: 2144 - protein, 99 aa, Glycine max
  unsure (1)..(99): unsure at all Xaa locations
ASSMISSPAVTTVNLAGAGMVAPFTGLKSLAGLPTKKTYYDITSLAYTGGXLHCMHVWPPVGRKKFDTLFYLPDLDYAQLAYVLKYLLANGWIPCYEFE

SEQ ID NO: 2145 - protein, 288 aa, Escherichia coli
IGQALALLLKTQLPSGSELSLYDIAPVTPGVAVDLSHIPTAVKIKGFSGEDATPALEGADVVLISAGVARKPGMDRSDLFNVNAGIVKNLVQQVSKTCPKACIGIITNPVNTTVAIAAEVLKKAGVYDKNKLFGVTTLDIIRSNTFVAELKGKQPGEVEVPVIGGHSGVTILPLLSQVPGVSFTEQEVADLTKRIQNAGTEVVEAKAGGGSATLSMGQAAARFGLSLVRALQGEQGVVECAYVEGDGQYARFFSQPLLLGKNGVEERKSIGTLSAFEQNALEGMLDTL

SEQ ID NO: 2146 - protein, 465 aa, Heuchera canadensis
SGKPFYAIVHRVTGSLIIDFEPVKPYEVPMTAAGALQSYKLAAKAITRLQALPSGSVERLCDTMVQEVFELTGYDRVMAYKFHDDDHGEVVSEITKPGLEPYLGLHYPATDIPQAARFLFMKNKIRMICDCRAKHVKVLQDEKLPFDLTLCGSTLRAPHSCHLQYMENMNSIASLVMAVVVNDGDDESESSNPAQPSKRKRLWGLVVCHNTTPRFVPFPLRYACEFLAQVFAIHVSKELELENQILEKNILRTQTLLCDMLMRDAPLGIVSQSPNIMDLVKCDGAALLYKDKIWRLGVVPTDSQLQDIASWLSKYHMDSTGLSTDSLYDAGFSRALSLGDVVCGMAAVKINSNDILFWFRSHTAAEIRWGGAKHETGEKDDNRKMHPRSSFKAFLEVVKTRSLPWKDYEMDAIHSLQLILRNTFKDIETVDANTNKIHTKLSDLKIEGMQELEAVTSEMVRLIET

SEQ ID NO: 2147 - protein, 288 aa, Escherichia coli
IGQALALLLKTQLPSGSELSLYDIAPVTPGVAVDLSHIPTAVKIKGFSGEDATPALEGADVVLISAGVARKPGMDRSDLFNVNAGIVKNLVQQVAKTCPKACIGIITNPVNTTVAIAAEVLKKAGVYDKNKLFGVTTLDIIRSNTFVAELKGKQPGEVEVPVIGGHSGVTILPLLSQVPGVSFTEQEVADLTKRIQNAGTEVVEAKAGGGSATLSMGQAAARFGLSLVRALQGEQGVIECAYVEGDGQYARFFSQPLLLGKNGVEERKSIGTLSAFEQNALEGMLDTL

SEQ ID NO: 2148 - protein, 252 aa, Gnetum parvifolium
MGRGRVQLRRIENKINRQVTFSKRRNGLLKKAYELSVLCDAEVALIIFSTRGKLYEFASSSMSKTLERYEKCSYSMQENASTDRDAQNWHHEVTKLKAKLESLHKAQRNLMGEDLGPLNIKELQSLEQQLEVALGHVRNRKTQLLIQTIDELRDKERTLQEVNKSLQKKLSETEGRNVIPALPHATTGSGEWESSTLTTTYALQTQQPSGIHHVDCEPTLHIGPYHQAVHHEAIPGPPATHSEPHNQYIWWV

SEQ ID NO: 2149 - protein, 288 aa, Escherichia coli
IGQALALLLKTQLPSGSELSLYDIAPVTPGVAVDLSHIPTAVKIKGFSGEDATPALEGADVVLISAGVARKPGMDRSDLFNVNAGIVKNLVQQVAKTCPKACIGIITNPVNTTVAIAAEVLKKAGVYDKNKLFGVTTLDIIRSNTFVAELKGKQPGEVEVPVIGGHSGVTILPLLSQVPGVSFTEQEVADLTKRIQNAGTEVVEAKAGGGSATLSMGQAAARFGLSLVRALQGEQGVVECAYVEGDGQYARFFSQPLLLGKNGVEERKSIGTLSAFEQSALEGMLDTL

SEQ ID NO: 2150 - protein, 330 aa, Candida albicans SC5314
MSTTATSTNELALLDKSVVVSPLVLLSVVDHYNRVAKDSKKRVVGVILGDNSTDTIKVTNSYAIPFEEDEKNPGVWFLDHNFIDSMGEMFKKINAKEKLIGWYHSGPKLKPSDLKINEVFRRYTDNPLLLIVDVQPREVGIPTDAYFAVDDIKNDGSAAEKTFIHVPSLIEAEEAEEIGVEHLLRDIRDQAAGNLSLRVSETHQSLLGLHQKLGEIANYLDKVYQKKLPMNHTILGKLQNVFNLLPNLMQQSGSDLDGGSDSSHALATAFTVKTNDELMIIYISTLVRAIIAFHDLIENKLENKKLNENKAQASVAESSLNSEKKDSIEE

SEQ ID NO: 2151 - protein, 372 aa, Rhodospirillum rubrum
MIVSRAAIAWEAGKPLSVEEVEVAPPRQGEVLVRIIATGVCHTDAYTLSGSDPEGVFPAILGHEGGGIVEEIGPGVTSVAVGDHVIPLYTPECGTCKFCRSGKTNLCQAIRATQGQGLMPDGTSRFSIKGREIRHYMGTSTFSEYTVLPEIALAKVNKAAPLEKICLLGCGVTTGMGAVLNTAKVEPGATVAIFGLGGIGLSAIIGCVMAGAGRIIGVDINPDKFEIARQLGATDVINSRDYDRPIQEVLIDMTDGGVDYSFECIGNVGVMRSALECCHKGWGQSVIIGVAGAGQEISTRPFQLVTGRVWRGSAFGGVKGRSELPALVERYLAGDFELDTFITHTMGLADINHAFELMHEGKSIRSVIHYDL

SEQ ID NO: 2152 - protein, 608 aa, Mycobacterium avium subsp. paratuberculosis str. k10
MKESFGCDGQPGSYTDVDHADVIALFGHNVAETQTVLWARMLDRLAGSDPPAIVCVDPRLTPVARHATVHLAPLPGTNVALMNGLLHEIIGNGWIDRDYIDAHTVGIDELQCRIGEFTPERVAEICGVAATDLRRAARLIGTARRLLSTVLQGFYQSHQASAAAVQVNNIHLVRGMLGRPGCGVLQMNGQPTAENTRECGADGDLAGFRNWSNDSHVAELAELWNLEPLQIPHYGPPTHAMQMFRFTEEGTLRMLWVTATNPAVSLPELPRIRDILSQQRLFLVVQDIFLTETAALADVVLPAAAWAEKTGTFTNADRTVHLSEKAVEPPGSARSDLEIFLDYARRMDFRDKDGRPFPPWTDPESAFEAWKKCSAGRPCDYTGLSYAKLRGGSGIQWPCNTDHPDGTERLYEDGRFPAAPDYCEAYGKDLITGAPLQPDEYRSLNPSGKAIIKAAQYLPPHERPGPDYPFALITGRTVYHFHTRTKTARAQQLQDAAPEVWVEVSERDARRLDIEAGDLVHVSTPRGRITCAARVGGIRDGVLFVPFHYGYWDRDGGDHQRAGNELTATDWDPASKQPSFKTAAARLDKAPSHRAAPVSEAVAAGSPS

SEQ ID NO: 2153 - protein, 398 aa, Streptococcus agalactiae
MAKLTVKDVDLKVKKVLVRVDFNVPLKDGVITNDNRITAALPTIKYIIEQGGRAILFSHLGRVKEEADKEGKSLAPVAADLAAKLGQDVVFPGVTRGAKLEEAINALEDGQVLLVENTRFEDVDGKKESKNDEELGKYWASLGDGIFVNDAFGTAHRAHASNVGISANVEKAVAGFLLENEIAYIQEAVETPERPFVAILGGSKVSDKIGVIENLLEKADKVLIGGGMTYTFYKAQGIEIGNSLVEEDKLDVAKDLLEKSNGKLILPVDSKEANAFAGYTEVRDTEGEAVSEGFLGLDIGPKSIAKFDEALTGAKTVVWNGPMGVFENPDFQAGTIGVMDAIVKQPGVKSIIGGGDSAAAAINLGRADKFSWISTGGGASMELLEGKVLPGLAALTEK

SEQ ID NO: 2154 - protein, 116 aa, Avena fatua
SQVYQKYKDQGLEILAFPCNQFGGQEPGTNEEIVEFACTRFKAEYPIFDKVDVNGKEVSPLYKFLKSSKGGLFGDSIKWNFSKFLVDKEGRVVDRYAPTTSPLSIEKDIKKLLGTS

SEQ ID NO: 2155 - protein, 438 aa, Streptococcus agalactiae
MAIITDVYAREVLDSRGNPTLEVEVYTESGAFGRGMVPSGASTGEHEAVELRDGDKSRYGGLGTQKAVDNVNNVIAEAIIGYDVRDQQAIDRAMIALDGTPNKGKLGANAILGVSIAVARAAADYLEVPLYSYLGGFNTKVLPTPMMNIINGGSHSDAPIAFQEFMIMPVGAPTFKEALRWGAEVFHALKKILKERGLETAVGDEGGFAPKFEGTEDGVETILKAIEAAGYEAGENGIMIGFDCASSEFYDAERKVYDYSKFEGEGGAVRTAAEQIDYLEELVNKYPIITIEDGMDENDWDGWKALTERLGGRVQLVGDDFFVTNTDYLARGIKEEAANSILIKVNQIGTLTETFEAIEMAKEAGYTAVVSHRSGETEDSTIADIAVATNAGQIKTGSLSRTDRIAKYNQLLRIEDQLGEVAQYKGIKSFYNLDKCGR

SEQ ID NO: 2156 - protein, 264 aa, Moorella thermoacetica ATCC 39073
MDVKIGFLGAGAMAEALIRGIIQARLVQPERLWAYDIRAARLKELEQRFGLVAAASREELAAAADIIILAVKPQNVEAALTGLQVKGDKLVISIIAGVTLSRLAGYLGDVPLVRVVPNTPALVGAGVSALAAGARVGQEDLEKALAIFRSVGEAMVLPEEQLNAVTGLSGSGPAYVYMIIEALADGGVRQGLARPVALELAARTLLGGAQMVLATGEHPGVLKDRVTSPAGTTIAGLAVLEDRGVRGALIRAVEAATLRAGELE

SEQ ID NO: 2157 - protein, 446 aa, Thermus thermophilus HB27
MRKGTLNGIAALGLSGLALAEGVDGADTAWMLVSTALVLLMTPALAFFYGGLVRSKNALNTMMMSFVALAFVGVGWALLGYTLAFGEGGPLLGGLGHLFLRGVGLEAQGTIPHVLFLAFQGTFAIITAALVSGALVERMRFPAYLAFLTLWGLFVYAPIAHWVWGGGFLGALGALDFAGGTVVHINAGVAALVGALVLGARKDYGRQAILPHNVPFTLLGAALLWFGWFGFNGGSALAANASAALAFANTMLAPAATLLVWTLLDLLRTGKATAVGAATAIVVGLVAVTPAAGFVSPLSALLIGALAAFPSYYVLLWRARTRLDDSLDVFAGHGVGGITGALLTGIFAEKAWNGVADGLLFGNPAQLGIQAAAVLAAVVYSALGTFALLKLVGLLTPLRAGPKEEGVGLDVTQHGEEAYTSGEGAILVLSEKAPAVPSLRPQGGEA

SEQ ID NO: 2158 - protein, 379 aa, Streptococcus pyogenes SSI-1
MRENTTLLHGYTVIDEFTGAASVPIYQTSTFHNSELYCPSQKHLYTRFSNPTTEALEDGLACLEKATYAVAYASGMAAISTVLMLLKAGDHVIFPLEVYGGTCQFATAILPNYQIETSFVDMADLATVKASIRPNTRMIYLETPSNPLLKICDISELVQLAKAYGVLTVADNTFMTSLYQEPLAMGVDIVVESVTKFINGHSDVVAGLAATNNEAIYNQLKLFQKNFGAIVGVEDAWLILRGMKTMGIRMEQAVKNAQQLANYLAKHPKVLKVHYPGLDSHPNHDTHLQQAKNGGAVLSFELASKEELMTFTHRIQLPILAVSLGGVESILSHPATMSHACLSSQARLEQGVVDGLLRLSCGVENIEDLLADFEQALAF

SEQ ID NO: 2159 - protein, 243 aa, Houttuynia cordata
MGRGRVELKRIENKINRQVTFAKRRNGLMKKAFELSVLCDAEVALIVFSSRGKLYEFCSSSGMMKTIERYQKCNYGAPEATVSTKEIQSSYQEYMKLKARVESLQRSQRNLLGEDLGPLTGKELEQLERQLDMSLKQIRSTRTQCMLDQLSDLQRREQMLSEANKALRRRLLQLDDGSQTNPHHSWDPNAHGVGYSRHPGQPQGEVIFDPLDCEPTLHIGYQPDQITIAAPGPNGNYMQGWLP

SEQ ID NO: 2160 - protein, 504 aa, Thermosynechococcus elongatus BP-1
MICSEEFWVLGSMVGSVLRLDQVLIPEDAPIRFGTDGWRGIIGAEFTFNRLLRAAKAAAAVLYQTYGDGRTPRIIVGYDRRFLAEHFATAVAQFLTSQGYEVWLSNCAAPTPAFSWAVKAEGAIGGLVITASHNPGIYAGLKVKGAFGGSVPTPVTEAIEAQLAQGEPPPVGEAKTDYQTFDPWPSYCAALRTHVDPSPIREAIATGKLHVCADVMHGVAAGGLERLLDWPIEEFRRDRDPLFGSGAPEPIGRYLAATQERLRQQHSATPTVCLVFDGDADRLAVIDGEGVLYTAQEMIPILIDHLAQHSPYRGAVIKSISSSDLVARVAAHHGLAVIETPIGFKYIGDRMLAGEAVLLGGEESGGIGYGHHLPERDALLSALYLLQALVTSGLSVGEYYQQLQLTTNFYSAYDRVDLTLTSLAQRQKLEALLGEHPFTQILDSPVSHWDTIDGYKFHLADGGWLLIRFSGTEPLLRLYCQGKTPEQVQHILQWASQWAVAVTG

SEQ ID NO: 2161 - protein, 303 aa, Glycine max
  unsure (1)..(303): unsure at all Xaa locations
TVTAELLPKEDTALYDRQIRVWGADAQRRLSKSHVLVYGMKGTXVDDRVATEEVLSSNFLIPPDENAYSGKTLGELCCNSLKDFNPMVRVSIERGDLSSFDVEFFSKFDVVVVSCCSLSAKKLANDKCRKLSKRVAFYAVDCRDSCGEIFVDLQDYKYSKKKQDETVKCDLKYPSFEDALSVPWRALHRRMSKLYYAMRVIEKFEEAEGRSAGEVSIADLSGVLKLKKEICTAQSLNESHVPDTLLERLVTNAIEFPPVCAIIGGILGQEVIKAISGKGDPLKNFFFFDAFDGKGIIEDLSPK

SEQ ID NO: 2162 - protein, 435 aa, Heuchera canadensis
SGKPFYAIIHRIDVGLVIDLEPVNPADVPITAAGALKSYKLAAKAISRLQSLPNGNITLLCDVLVKEVSDLTGYDRVMVYKFHEDEHGEVIAESCRPDLEPYLGLHYPATDIPQASRFLFMKNKVRMICDCLASSVKVIQDKRLPQPLSLCGSTLRSPHGCHTQYMANMGTIASLVMSVTINEEDDEMVTDQPKGRKLWGLVVCHHTSPRFVPFPLRYACEFLIQVFGVCINKEVELASQTREKHILQTQTVLCDMLLRNAPVGIVTQSPNVMDLVKCDGAALYYKKKAWLLGSTPTDAQIRDITDWLLEYHGGSTGLSTDSLVEAGYPDALNLGDAVCGMAAIKITSNDFLFWFRSHTAREIKWGGAKHDPDEKDDGRKMHPRSSFKAFLEVVKRRSLPWEDVEMDVIHSLQLILRGSLQDETVDDSKTIVNES

SEQ ID NO: 2163 - protein, 349 aa, Clostridium thermocellum ATCC 27405
MDAKADLLSMTIEELENLMAEMGEQKFRAKQIFQWTNKGIKDIDAMTNLSKDLREKLKERAYINRLEVIKKFVSKIDGTIKYLFKLNDGNIIESVLMQYLHGYSACISSQVGCKMGCKFCASTGVGFVRNLTPGEMLDQILTIQNDTKNRIGNVVIMGIGEPLDNYENVVKFLRLVNHKDGINLGARHISVSTCGLVPEILRLAEEKIPVTLSISLHAPNDEIREKIMPINKRYSIDKIIEACKIYTETTNRRITFEYAMIDGLNDSKENALELAKRIRGMLCHVNLIPVNTVSDTGFKRSSREKITAFKEILERFGVETTVRRELGSDINAACGQLRRNLVENGQLVY

SEQ ID NO: 2164 - protein, 578 aa, Houttuynia cordata
  unsure (1)..(578): unsure at all Xaa locations
SGKPFYAIVHRVTGSLIIDFEPVKPFEVPMTAAGALQSYKLAAKAISRLQSLPSGSMERLIDTMVQEVFELTGYDRVMAYKFHEDDHGEVISEVTIPHLDPYLGLHYPATDIPQAARFLFMKNKVRMICDCRAKPVKVYQDDKLSFDLTLCGSTLRAPHSCHLQYMENMGSIASLVMAVVVNEGGEEDRGGPADSSQQQLGRYRRKKLWGLVVCHNTRPRFVPFPLRYACEFLTQVFAIHVSKELELEETNSRKEILRTQTLLCDMLLRDAPMGIVNQTPNIMDLIKCDGAALFYKDKVFRLGIAPSETDIREIAQWLSAYHMDSTGLSTDSLHDAGYPKAAFLGDLVCGMAAVKITCSDMLFWFRTHTAAEIRWGGAKHDHSDRDDGKRMHPRSSFRAFLDVVKTRSLPWKDYEMDGIHSLQLILRTSVKEPEQVDSNKVIHAQLGDLKLDEMNELHAVTTEVVRLIETATVPILAVDVXGLINGWNAKISELTGMSLEQVMXKHLLTLVEDCSINVVRRMLCLALKGEEEQNIEFQVKTHGTRSDHGPVVLVVNACASRDVHGNVVGVCFVXQDVT

SEQ ID NO: 2165 - protein, 142 aa, Synechococcus sp. PCC 7002
  unsure (1)..(142): unsure at all Xaa locations
IDILLGYCQHGIRFIRLDAVGFLWKKLQTACIHLRETHLVIQLIREILAVTYPXTVVITETNVPNRENLSYFGKGNEAHMIYNFSLPPLLLNALIRGEARHLKTWMKSMPPAQDGCAYFNFTASHDGIGLRPAEGSARRQRI

SEQ ID NO: 2166 - protein, 415 aa, Hypecoum imberbe
SGKPFYAIVHRVTGSLIVDFEPVKPYEVPMTAAGALQSYKLAAKAIAKLQSLPSGSMERLCNTVVQEVFELTGYDRVMAYYFHEDDHGEVIAEVTKPGLEPYLGLHYPATYIPQAARFLFMKNRIRMICDCRAKHVKVLQDEKLPADLTLCGSTLRAPHTCHLQYMENMGSIASLVMAVVVNESNDEEESSEPPSQAPKKKKLWGLVVCHNTSPRFVPFPLRYACEFLIQVFAVHVNKEFELDNQIHEKRILRTQTLLCDMLMRDAPFGIISQSPNVMDLVKCDGAALLYKNKIYRLGLTPSEFQINDIASWLTEYHMDSTGLSTDSLYDAGFPGALSLGDAVCGMAAVRITCKDMLFWFRSHTAAEVRWGGAKHDPDERDDGRKMHPRSSFKAFLEVVKTRSLPWKDYEMDAIH

SEQ ID NO: 2167 - protein, 492 aa, Manihot esculenta
MDPCKFRPSSSNNTPFWTTDAGAPVWNNNSSMTVGTRGPILLEDYHMIEKLANFTRERIPERVVHARGMSAKGFFEVTHDVSHLTCADFLRAPGVQTPVIVRFSTVIHERGSPETLRDPRGFATKFYTREGNFDIVGNNFPVFFIRDGIKFPDVIHAFKPNPKSHIQEYWRIFDFLSHHPESLSTFAWFFDDVGIPQDYRHMEGFGVHTFTFINKAGKVTYVKFHWKPTCGVKCLMDDEALKIGGANHSHATQDLYDSIAAGNYPEWRLFIQTMDPADEDKFDFDPLDMTKIWPEDIFPLQQIGRLVLNRNIDNWFAENEMLAFDPGHIVPGIHYSNDKLFQLRTFAYADTQRHRLGPNYKMLPVNAPKCAYHNNHYDGFMNFMHRDEEVDYFPSRYDPVRHAERSPIPNAICSGRREKCVIEKENNFKQPGERYRSWAPDRQERFLCRLVNALSEPRITFEIRSIWVSYWSKCDASLGQKLASRLNVRPNI

SEQ ID NO: 2168 - protein, 177 aa, Triticum aestivum
  unsure (1)..(177): unsure at all Xaa locations
ANSARGKEGFTTSPXRGEMLAWGKNGTRSQTRYNNVGGTNGRLGKGGRFAKLVDHLRATDENKEFNLYLVLLPLDGQTMPNLEKPYLSCRPRVSIRHLLQFIALQLSRQVEELEMYIRVDLHNRSVAVKDSGSAETKLSLFDGLERLREDKLLLDLHPSFASGNGDLELIYALKRQG

SEQ ID NO: 2169 - protein, 392 aa, Hypecoum imberbe
DLEPVNPSDVPITAAGALKSYKLAAKAISRLQSLPSGNIPLLCDVLAREVRELTGYDRVMVYKFHEDEHGEVIAECRELDLEPYLGLHYPATDIPQASRFLFLKNKVRMICDCSAQPVKVIQDEKLAQPLSLCGSTLRAPHGCHSQYMTNMGSVASLVMSLTINEDDDEMETSTQKGRKLWGLVVCHHTSPRFVPYPLRYACEFLIQVFGIQLNKEVELASQLMEKHILKMQTVLCDMLLRDAPVGIVAQSHNVMDLVKCDGAALYYRNKLWLLGVTPTEAQVRDIARWLLECHYGTTGLSTDSLMEAGYPGASGLGDAVCGTAAISITSKDFLFWFRSQTAKEIKWGGAKHDPMDKDGLRKMHPRSSFKAFLEVVKCRSVPWEDIEMDAIQ

SEQ ID NO: 2170 - protein, 288 aa, Escherichia coli
IGQALALLLKTQLPSGSELSLYDIAPVTPGVAVDLSHIPTAVKIKGFSGEDATPALEGANVVLISAGVARKPGMDRSDLFNVNAGIVKNLVQQVAKTCPKACIGIITNPVNTTVAIAAEVLKKAGVYDKNKLFGVTTLDIIRSNTFVAELKGKQPGEVEVPVIGGHSGVTILPLLSQVPGVSFTEQEVADLTKRIQNAGTEVVEAKAGGGSATLSMGQAAARFGLSLVRALQGEQGVVECAYVEGDGQYARFFSQPLLLGKNGVEERKSIGTLSAFEKNALEGMLDTL

SEQ ID NO: 2171 - protein, 459 aa, Illicium oligandrum
SGKPFYAIMHRIDVGLVIDLEPVNPADVPITAAGALKSYKLAAKAISRLQSLPSGNIGILCDVLVREVSELTGYDRVMAYKFHEDEHGEVIAEYRRTDLEPYLGLHYPATDIPQASRFLFMKNKVRMICDCYAPPVKVIQDKKLAQPLSLGGSTLRAPHGCHAQYMANMGSIASLVMSVTINEDYDETSSNQQKGRKLWGLVVCHHTSPRFVPFPLRYACEFLLQVCGIQLNKEVELVAQMKEKHILKTQTLLCDMLLRDAPIGIMTKSPNVMDLVKCDGAALYYGKQLWLLGITPTEAQIRDITEWLLECHDSTTGLSTDSLMEAGYPGATTLGDTVCGMAAIKVASKDFLFWFRSHTAKEIKWGGSKHDPADKDGKKMHPRSSFKAFLEVVKRRSLPWEDVEMDAIHSLQLILRGSLQQVLESETKAIVDARLDDEQIQGPDELRIVTNEMVRLIET

SEQ ID NO: 2172 - protein, 561 aa, Arabidopsis thaliana
MNAPIIDPLQGDFPEVIEEYLEHGVIKCVAFNHRGSLLAAGCADGGCVIWDFETRGIAKEIRDNDCSAAITSVSWSKYGHRLLVSAADKSLTLWDVSTGEKIARTILQQTPLQARLNPGLSSPSLCLACPLSSAPMIVDFDIDCTTLLPVSVPEMPDVLAPPQRSKCPESNPPFSPAAACFNKCGDLVYIGNSKGEILIVDYKSVRVLALVSASGAAPVKNIVFSRNGQYLLTNSHDRTIRIYENLLPAKNVLKSLEDLGKNIDGLDGIEKMKTVGSKCLTLFREFQDSVTKMHWKAPCFSGDGEWVVGGSACKGEHKIYIWDRAGHLVKILEGPKEALIDLAWHPVHPIIVSVSLAGLVYIWAKDYTENWSAFAPDFKELEENEEYVEREDEFDLIPETEKVKVLDVNEDEEVDIDTVEKDAFSDSDMSVEELRYLPAEPIPDTNDQQDNLVESIKLIEGQISASPASEEAGQNGHHASSPQADIDALVTNTWLSIAEEMGETRGKRKRKPSEKAMELQAEKAKPLKGSGKTVRAKNRAAFDQETDDSINGGDDDDDAYY

SEQ ID NO: 2173 - protein, 339 aa, Geobacillus stearothermophilus
MKAAVVNEFKKALEIKEVERPKLEEGEVLVKIEACGVCHTDLHAAHGDWPIKPKLPLIPGHEGVGIVVEVAKGVKSIKVGDRVGIPWLYSACGECEYCLTGQETLCPHQLNGGYSVDGGYAEYCKAPADYVAKIPDNLDPVEVAPILCAGVTTYKALKVSGARPGEWVAIYGIGGLGHIALQYAKAMGLNVVAVDISDEKSKLAKDLGADIAINGLKEDPVKAIHDQVGGVHAAISVAVNKKAFEQAYQSVKRGGTLVVVGLPNADLPIPIFDTVLNGVSVKGSIVGTRKDMQEALDFAARGKVRPIVETAELEEINEVFERMEKGKINGRIVLKLKED

SEQ ID NO: 2174 - protein, 825 aa, Triticum monococcum
MAFSPRSPWSRSKKPDIYSTVVVHDDEDNARGGGAARAEDDDDDDPSALPPLLQRLPKDFGGASFDDDDDPYSSDLDDASLSATVVIKRGAPASTSSSSRSPFLDLRRSSPRAAEADPFSTFVVHGTARSGGASSPRESVSGTFIRHSGGPPSPRESVSGTFIRHTRGSSSPHESFSGTFIHHTSSASSPRDSASGAGAGFGSSFITPSSGQAEEDRQPSLLMQQQQSRRKASMSSLPDSVTREDPSTKYELLHELGKGSYGAVYKARDLRTQELVAVKIISLTEGEEGYEDIRGEIEMLQQCSHPNVVRYFGSYQGEEYLWIVMEYCGGGSVADLIGITEEPLDEPQIAYICRETLKGLAYLHTIFKVHRDIKGGNILLTEQGEVKLGDFGVAAQLTRTMSKRNTFIGTPHWMAPEVIQESRYDGKVDVWALGVSAIEMAEGMPPRSTVHPMRVIFMISSEPAPMLEDKEKWSLLFHDFIAKCLTKDARLRPPAIEMLKHKFIEKCNTGASKMLAKIKEAKIIRETAVQNQLPDSDDAMDATVRINEDYGETVPTNSQSTHETKNDGSGGDFGTMIVHPEDGDEAAESSIFPRAEFIPGLGSINSFTHDPKRAELISKFWAESTAESDASKERDLYGLPDIQEPKTMPRSTGTVKHHKGVEGTVLRHDITASPGVASTMNKLSSSPSRKAFSVQDKLWSIYAAGNTVPIPFLKAIDISPLALVSDSVAGNGPAGSSTTDALEAVRELFSGDGQAKKGRKGQNEAPLPPGVHDRLTTSPTLMNLAQALAYHKTCYEDMPLQDSQATEEQQTIQNLCDTLRTILRL

SEQ ID NO: 2175 - protein, 399 aa, Mesorhizobium loti MAFF303099
MAATVIFLTTTGAGTWTVPADWNNSNNSIETIGAGLLGGGAYSKKNNVTLTPGGSVNYSVGSASSGVANDTFFGATTFAASICAAKAGGASLGGDAASGIGDVKYSGGARGLANGGGGGAAGPHGNGAAGGSGGGSGGGGNGGGSTGAASSFPSGGAGGNNFGGTGGGAGGAATALPGAAGTNGGGGGGGSPDDSDTPGVGGNGGNGTEWDATHGSGGGAGAGGDASTAGGSGGLYGGGAGRSNLSGGQGIIVITYTPGGAPDITGTLAATLAGGYIANITGTVQPLPPVNQIDMHDGKPREDHAAARNQAKREAHYKLRNAVRKAARKANGAADEPAEQPADLKEMARAIQAEIKTDGIVARLRDIRKLVAEYQAELARLAQEAEDETVAILLLTGDI

SEQ ID NO: 2176 - protein, 288 aa, Escherichia coli
IGQALALLLKTQLPSGSELSLYDIAPVTPGVAVDLSHIPTAVKIKGFSGEDATPALEGADVVLISAGVARKPGMDRSDLFNVNAGIVKNLVQQVAKTCPKACIGIITNPVNTTVAIAAEVLKKAGVYDKNKLFGVTTLDIIRSNTFVAELKGKQPGEVEVPVIGGHSGVTILPLLSQVPGVSFTEQEVADLTKRIQNAGTEVVEAKAGGGSATLSMGQAAARFGLSLVRALQGEQGVVECAYVEGDGQYARFFSQPLLLGKNGVEERKSIGTLSAFEQNALEGMLDTL

SEQ ID NO: 2177 - protein, 278 aa, Borrelia burgdorferi B31
MKGIILAAGYGTRFLPITKTIPKEMLPILNKPAIDYIIQEFIDSGIKDILLISSRRKKVLEDYFDREIELENIFLKENKKDELEKIRSKKINISFIRQKEMLGTGNALLYAKPWINREPVVVAYPDDLCIGNPPLSLQLIKLYEKTGKNIISIIENPENINRYGVIDLYKDEIHVKNIIEKPKIGSEPSNKASIGRFLYNYEFFEHLEEGFKLHKKGEYYHIYALKKLMDQKKVLYKNIEGKRIDIGTLEGYLEAIINSAKKDKKLMGIIKKGINEND

SEQ ID NO: 2178 - protein, 397 aa, Rhizobium leguminosarum bv. viciae
  unsure (1)..(397): unsure at all Xaa locations
MTMNQSINPHDLGAHAAADDLFTPVDPAAFNAVSPPIFQTSLFTYDSYEAMEDVFAGRTRNYIYSRGDNPTVREFELLVARLEGAEDGRAFSSGTAAITSTILSLVEAGDRVVAVRHLYNDVYRLLVKLLGRLGVAVDFVDPADHDEVRKALSGAKLLYLENPTSFVFELQDIAALSAMAKEAGVTTIIDNSWATPLFQKPIQHGVDIVIHAASKYLGGHSDTVAGVVVGSKEAIARINSISYPYVGAKLSPFEAWLLLRGMXTLRVRLKEHERSGLLLAGRLKEHSAIARVRHPAFQEHPGRATLTGYAGLFAFDLYPDIDVARFVNSLRDIRLGVSWGGTETLVVPAKVALQIPDRMTSFIRFGVSEQTVRFAVGLEEPELLWSDLQQALYAAKR

SEQ ID NO: 2179 - protein, 440 aa, Desulfovibrio desulfuricans G20
MCRAFVAVVQHRDNVICLYGLPAMSNVKKIKGFADLFSPESDVFTFMENTARDVFSSYGYGELRTPILERTELFCRSIGTETDVVQKEMYTFPDRKNRSLTMRPEATAGVMRAYIEGSLHSQEQVSKLFTFGPMFRYERPQKGRMRQFHQINCECLGPQEPYADAEIILMLLMFLKRIGLSGLELQINSLGCRECRPQYHAALRAFLASLDTAELCEDCRRRMETNPLRVLDCKVPRCKELTADAPVILDHTCDACSEHHSVVLGMLERAGVVYTANPRLVRGLDYYNRTTFEVVCGEIGAQSSVAGGGRYDGLVSQLGGPDVPGIGFACGMERLALALEQKAQREVPRPDFLVAVLEQDGLERGMMLAEALRESGLKGEVSFAARSMKSQMRQAGKRNVRKVLLLGGSEIADGTVTVKDMDTGGQTTISLDAAPGAVAD

SEQ ID NO: 2180 - protein, 446 aa, Thermosynechococcus elongatus BP-1
MEAAEMGGTCVNRGCIPSKALLAAAGRVRELRQASHWQALGIQLGQVNVDRAGVAAHAANLVQKIRSDLTNSLKRLGVDILIGRGKIAGSQKVSITTPTGEKIITAKDIIIATGSVPWVPPGIEVDGKTVYTSDDAIKLDWLPQWVAIIGSGYIGLEFADIYTALGSEVTMIEALDQLMPTFDPDIAKQAQRILIAGRDIETYSGTLAKRVIPGSPVVIELADGKTQEVVDVLEVDACLVATGRIPATQDIGLESVGVSTDKRGFIPVNEYLAVTKKGKPVPHLWAIGDATGKMMLAHAASAQGIAVVETIVGRPRQVDYRSIPAAAFTHPEMSFVGLTEPQARELGEKEGFEVQVARTYFKGNSKALAETETDGLAKVIFRADTGELLGAHIFGLHAADLIQEAANAIRDRQTVSHLAFNVHTHPTLSEVLDEAFKRAHEMVTHR

SEQ ID NO: 2181 - protein, 385 aa, Thermus thermophilus HB27
MRGLSRRVQAMKPSATVAVNAKALELRRQGVDLVALTAGEPDFDTPEHVKEAARRALAQGKTKYAPPAGIPELREALAEKFRRENGLSVTPEETIVTVGGKQALFNLFQAILDPGDEVIVLSPYWVSYPEMVRFAGGVVVEVETLPEEGFVPDPERVRRAITPRTKALVVNSPNNPTGAVYPKEVLEALAKLAVEHDFYLVSDEIYEHLLYEGEHFSPGRVAPEHTLTVNGAAKAFAMTGWRIGYACGPKEVIKAMASVSSQSTTSPDTIAQWATLEALTNQEASRAFVEMAREAYRRRRDLLLEGLTALGLKAVRPSGAFYVLMDTSPIAPDEVRAAERLLEAGVAVVPGTDFAAFGHVRLSYATSEENLRKALERFARVLERA

SEQ ID NO: 2182 - protein, 405 aa, Oryza sativa (japonica cultivar-group)
MQRNGVMECSVCHSKVVAPSPRSVSRAYDKHRSKISSKYRALNFLLVSGDCILVGLQPILVFMSKVDGKFQFSPISVNFLTEVTKVIFAIVMLIIQSRKQKVGEKPLLSLSTFVQAARNNALLAVPALLYAINNYLKFIMQLYFSPATVKMLSNLKVLVIAILLKFIMRRKFSIIQWEALALLLIGISVNQLSSIPDGTKSFGLAVTTIAYIYTLIFVTVPSLASVYNEYALKSQFDTSIYLQNLFLYGYGAIFNFLGILGTVIFQGPESFDILRGHSRATMFLICNNAAQGILSSFFFKYADTILKKYSSTVATIFTGLASAAFLGHTLTVNFLLGISIVFISMHQFFSPLAKVKDDKPAGALEPEDAQNHRSSDSSFVNMTAGAADDASHLTATDERKPLLPI

SEQ ID NO: 2183 - protein, 189 aa, Lactobacillus johnsonii NCC 533
MQNSDNIDNIIDRVLFSQDDIEEICQRLGKQLTEDYAGKFPLVIGVLKGAVYFMTDLTRHMNVKMQNDFMDVSSYGDGFESTGKVRLDIDVQADVKGRDVLLVEDIVDTGHTLKFMKDLLIERGAKSVKCCALLNKTERREDDVVVDYYGSKVENEFVVGYGLDYLNAYRNLPYVGVLKPEVIQANLNR

SEQ ID NO: 2184 - protein, 464 aa, Lardizabala biternata
SGKPFYAIIHRVTGSLIIDFEPVKPYEVPMNAAGALQSYKLAAKAIARLQSLPNASMDRLCDTVVQEVFELTGYDRVMAYKFHDDDHGEVVSEITKPGLELYLGLHYPATDIPQAARFLFMKNKIRMICGCNATHVKVFQDEKLPLDLTLCGSTLRAPHSCHLQYMDNMGSIASLVMAVVVNEGDEENDGSGPAQPQKRKRLWGLVVCHNTTPRFVPFPLRYACEFLIQVFAIHINKELELENQVLEKTFYVPQTLLCDMLMRNAPLGIVSQSPNIMDLVKCDGAALLYKNKIWRLGLSPSEFHIRDIASWLYEYHMDSTGLSTDSLHDAGFPGALSLGDGVCGMAAVRITSKDMIFWFRSHIATEVRWGGAKHDPSEKDDGRKMHPRSSFKAFLEVAKTRSLAWKDYEMDAIHSLQLILRNAFKDGDTADLNSSVIHSRLDNLKIDGMEELEAVTNEMVRLME

SEQ ID NO: 2185 - protein, 394 aa, Lardizabala biternata
DLEPVNRADVPVTAAGALKSYKLAAKAISKLQSLPSGNISLLCDVLVHEVSDMTGYDRVMVYKFHEDEHGEVVSECLRSDLEPYLGLHYPATDIPQASRFLFLKNKVRMICDCSARSVEIIQDKRLTQPLSLGGSTLRAHHGCHTQYMSNMGSVASLVMSITINDDDDDDETETTKRKGRKLWGLVVCHHTSPRFVPFPLRYACEFLIQVFGIQLTKEVELATQLREKHILQIQTVLCDLLLRNAPVGIFTQSPNVMDLVKCDGAALYYKNKFWLLGVTPTEAQIREIAAWILEYHDGSTGLSTDSLMEAGYPGASVLGNAVCGMAAINITSKDFIFWFRSHTAKEIKWGGAKHDPVDKDDGRKMHPRSSFRAFLEVVQWRSLLWEDIEMDAIQ

SEQ ID NO: 2186 - protein, 466 aa, Lilium superbum
SGKPFYAIVHRVTNCLIIDFEPVNHTESPTTAAGALQSYKLAAKAIAKLQSLPGGSVRRLCETVVQEVFELTGYDRVMAYRFHEDDHGEVFTEVTKPGLEPYVGLHYPATDIPQAARFLFMKNKVRMICDCRARPVKIHQDDKLPAEITFCGSTLRAPHSCHLQYMENMNSIASLVMAVVVNDDDEVLDEQGAPSRQQSGRKKLWGLVVCHHLSPRFVPFPLRYACEFLMQVFAIHVNKEFELENQIREKNILKTQTLLCDMLLRDGDPIGIVSQSPNIMDLVKCDGAALLYNNRIWQLGMAPTGSQIHDIAFWLAESHMDSTGLSTDSLLDAGYPGALALGDTVCGMAAARITTKDIVFWFRSHTASEIKWGGEKHDPEEEDDGRRMHPRSSFNAFLQVVKNRSLPWNDYEMDAIHSSQLILRGTLDDNGKSKKGSLDSGMGDMRLDGMVELQAVTNEMVRLIIT

SEQ ID NO: 2187 - protein, 362 aa, Ferroplasma acidarmanus
MTSNRAYAAPLTYPIYQTSSYIVPEGQKYRYSREYNPTVENLGIKIKEMEGAEDYNVFSSGMGAITTTLLSLSKPGDRILTHLDTFARSYHFIRDFMGKWGIKPDIANPGTENIINGIKKGTGIVFIESVTNPILRVNDISTISEKCHDVGAILVVDSTVPTPYNVKSLKLGADIVVHSSSKFIAGHNNVISGLAAGRNDLMEKIDAMRRTLGTSLDPNSAFLTENGMKTLEIRMEKINSNAMEIAAELQKNPEISRVIYPGLPEHPDHEIAKKYMKGYSGIVCFKVKTDPEKFIGKLEKIVPANTMGGTETVISTPASMSHRSLTSEELNVLGVDSTFMRLSVGIEDPDEIVRDINRALND

SEQ ID NO: 2188 - protein, 394 aa, Lilium superbum
DLEPVNPDDIPVATAGALKSYKLAAKAISRLQSLPSGNISLLCDAMVREVSELTGYARVMAYKFHEDEHGEVIAECKRPDLEPYIGLHYPATDIPQASRFLFMKDKVRMICDCTAPSVRVIRDRQLLQPPSLCGSTLRAPHGCHAQYMANMGSIASLVMAVTVNEDDDETDSNNQPKARKLWGLVVCHHTSPRFVPYPLRYACEFLLQVFGIQINKEVELAAQAKEKHIFRIQTVLCDMLLRDAPIGIFKKSPNVMDLVKCDGAALYYKNQFWRLGTTPTEAQIKDIVNWLLECHDGTTGLSTDSLTEAGYPDASSLGDEVCGMATISITLKDFIFWFRSHTAKEIKWGGAKHEPTDKDDDGRKMHPRSSFKAFLEIVKLRSLPWEDMEMDAIQ

SEQ ID NO: 2189 - protein, 565 aa, Vibrio vulnificus YJ016
MIANSIYNKVAKLYGEASATKITDDILALMKKWQDKAPQYQSWVDQRTSYLITYGDSFSTQAEPTLATMKTFADRHLKGALSNIHILPMFPYTSDDGFSVVDYRQVDPNLGDWDQLNALSENFDLMYDCVINHISKSSDWFQGYLAGDAKYQDYFVESDPSLDYSSVTRPRALPLHTPFSKASGETVHVWTTFSDDQIDINFHSPKVLLESIDILLMYAANGGRSIRLDAIGFIWKKLGTTCIHLEEAHEIIKLWRIILDEVMPGTLLITETNVPHKENVSYFGAGDEAHMVYQFPLPPLTLHALMSENSETLTQWATSLTNEAMARLAQGDKTTYFNFLASHDGIGVRPTEGILTDEDRQMMCAQVERKGGRVNYKNNGDGTQSPYELNINYLSAITEPTDSIDDKAKKFIAAQSILLSFIGVPAIYYHSLLGSENDVQGMLDSGINRRINREKLDLSKLESELADEDSLRSKVFKSMTHLLNLRQQYAAFSPQASQQVLNLGDGIFALQRGDGEEAIRFAVNLTSQAQAVVLADSGFDLISEQLMPAEFELAPYQFVWLTQQK

SEQ ID NO: 2190 - protein, 465 aa, Pachysandra americana
  unsure (1)..(465): unsure at all Xaa locations
SGKPFYAIVHRVTGSLIIDFEPVKPYEVPMTAAGALQSYKLAAKAIARLQSLPSGSMERLCDTMVQEVFELTGYDRVMAYKFHEDDHGEVVSEITKPGLEPYLGLHYPATDIPQAARFLFMKNKVRMICDCNAKHVKVLQDEKLPFDLTLCGSTLRAPHSCHLQYMDNMGSIASLVMAVVINEGDEDGEGSDPAQPQKRKRLWGLVVCHNTSPRFVPFPLRYACEFLAQVFXIHVNKEIGLENQILEKNILRTQTLLCDMLMRDAPLGTVSQSPNIMDLVKCDGAALLYKNKIWRLGMAPGDFQINDISSWLSEYHMDSTGLSTDSLYDAGYPGALALGDVVCGMAAVRITTKDMLFWFRSHTAGEVRWGGAKHERGEKDDGRRMHPRSSFKAFLEVVKTRSLPWKDYEMDAIHSLQLILRNAFRDVETMDLDTNTIRMQLNDLKIKGMEELEAVTNEMVRLMET

SEQ ID NO: 2191 - protein, 311 aa, Pseudomonas syringae pv. tomato str. DC3000
MSSLWVFPGQGAQQAGMLHQLPDDPVVRDCLQNAADALGEDVLALDTPQALQATRAVQLCLLIAGVACARLLQARGCVPDYVAGLSIGAYPAAVICDALAFDDAVRLVALRGELMQSAWPEGYGMTAVIGLDQTQVEALIGRVHSPGSPVFLANINADNQMVISGSNEAMRQVGQLAKAAGAAAIKRLAVSVPSHCALLQAPAQQLAEAFSSIELKAPKVRYLSGSTARPVLNAEKLRDDLAFNMCRVIDWRSTVETAYERGVRLHIELPPGAVLTGLARKVFQQGTALAFQAARLDSLVALSREEGRRSP

SEQ ID NO: 2192 - protein, 246 aa, Zea mays
  unsure (1)..(246): unsure at all Xaa locations
MCGILAVLGCADDTQGKRVRVLELSRRLKHRGPDWSGMHQVGDCYLSHQRLAIIDPASGDQPLYNEDKSIVVTVNGEIYNHEQLRAQLSSHTFRTGSDCEVIAHLYEEHGENFIDMLDGVFSFVLLDTRDNSFIAARDAIGVTPLYIGWGIDGSVWISSEMKGLNDDCEHFEIFPPGHLYSSKQGGFKRWYNPPWFSEVIPSVPYDPLALRKAFEKAVIKRLMTDVPFGGLLSGXLDSSLGAAVTV

SEQ ID NO: 2193 - protein, 433 aa, Haemophilus influenzae R2846
MKSGDLNKYDLVKNTLVLVLAGGRGSRLHELTDKRAKPALYFGGNRRIIDFALSNCINSDLNRIGVVTQYAAHSLLRHLQTGWSFLPQERGEFVDMLPARQQIDDSTWYRGTADAVYQNMAIIKNHYRPKYILILAGDHIYKQDYSVMLMDHVNSGAKCTVGCIEVPRSEAHEFGVMAVNENLKVKAFVEKPKDPPAMVGKPDVSLASMGIYVFDADYLYKMLEQEVNTPQTSHDFGKDVLPKCLEEGALYAHPFSRSCMGRNTEGEIYWRDVGTLDSFWQSNIDLVSENPQLDIYDQSWPIRGNPIQAYPSKFFYKHSNVHPVDNSLIGGGCVITDASISNSVLFDHIKIDAFSKVDHCVVLPQVKIGKNCVLKNCIIDRECEIPDGMQIGVDIEEDKKRFRISSTGKVILVTPKMLKKLEGHEIEEDGHLD

SEQ ID NO: 2194 - protein, 72 aa, Oryza sativa
MGKTPVRMKAVVYALSPFQQKVMPGLWKDITTKIHHKVSENWISATLLLAPIVGTYEYAMYYKEQEKLSHRY

SEQ ID NO: 2195 - protein, 500 aa, Leptospira interrogans serovar lai str. 56601
MLKEINEPHRTLCGERIPFENIHAVSVSLPQLSDVIGYEEKRTETLSRLKSGYPRFVAHSYIARILDYNRDTKKINTPQFIISSKKAANWIVQKFSIQNFEIIEDEGITTLVIPDLKDLEKEILSFIQHTGCLASSRMAEDFLLKKGILQEIFREKVEKENPVDKILSTLSSFYGDLNPEILLSASGMNGVYSAFESLSLIQQKKGKTIWVRLGWLYVDNIRILEKYTESSYVIHNATDLEELEIFLKQNSEQVAGIITECPTNPLLLVPDYEKLKSIVDHYKIPLIVDISVAGSAIINILPYVDVIVESLTKFACGNGDLMMGAVILNKNSNWFSEILPLCKEWIEKPYFRDCERLAYEIKDYEKRVFKISENVKKLAEFFSKQPGIRKVFWTGAIDSFQNFQKVTRLPNIHSGVLSIELSTSLEKFYDRLTLLKGPSFGTEFTLNMLYVYLAHYDLVIQDEGRKFLKENGLDPNLIRISVGIEDPELLIEEYKKALEV

SEQ ID NO: 2196 - protein, 165 aa, Zea mays
PVGAETFKEALRWGVQVFAVLGKVLKERKLLSGGVGDEGGYAPNLTSNQQALDILIEAIEQAGYKPGSQIALAMDIAASEFFKNGQYEYDGGSHSPQEFIDYQAKLVSQYPIVSIEDGLHEDDWESWKGLTTSLGTKTQLVGDDLMVTNPVRLQKSIDLGVANAI

SEQ ID NO: 2197 - protein, 526 aa, Triticum aestivum
HQLSFFLLPPQLLRPLDLIAHHPRKRLDRRRSRPWDPYKHRPTSGANSGYWTTNSGAPVWNNNNALTVGQRGPILLEDYHLIEKLAQFDRERIPERVVHARGASAKGFFEVTHDVSQLTCADFLRAPGVQTPVIVRFSTVVHERGSPETLRDPRGFAVKFYTREGNFDLVGNNMPVFFIRDGMKFPDMVHAFKPSPKTNMQENWRIVDFFSHHPESLHMFTFLFDDVGIPLNYRHMDGFGVNTYTLISRDGKAHLVKFHWKPTCGVKCLLDDEAVTVGGTCHTHATKDLTDSIAAGNYPEWKLFIQTIDADHEDKFDFDPLDVTKTWPEDIIPLQPVGRMVLNKNIDNFFAENEQLAFCPAITVPGIHYSDDKLLQTRIFSYADTQRHRLGPNYLMLPVNAPKCAHHNNHHDGLMNFMHRDEEVNYFPSRFDPTRHAEQYPIPPRVLSGCREKCIIKKENNFKQAGERYRSFDPARQDRFLQRWVDALTDARVTHEIQGIWVSYWSQCDASLGQKLASRLKMKPNM

SEQ ID NO: 2198 - protein, 408 aa, Leptospira interrogans serovar lai str. 56601
MANINENYLKLKAGYLFPEISKRVKIYSEKNPSAKIIRLGIGDVTLPIVPSVVDAMVEASKEMGTVGGFHGYGPEQGYSFLLKSIADHDYGSLGIKIDESEIFVSDGSKCDCGNIQEIFSTDSKIAVADPVYPVYVDTNVMAGRTGEIGPDGRYSNLIYMPATKENGFQPEIPKEKADIVYLCYPNNPTGTVTTKESLKAWVEYAKKNNSIILYDSAYEAFISEPGVPRSIYEVEGAKEVAIEFRSFSKTAGFTGLRCAYIVIPKELKGKTRSGEEVSLNSLWNRRHTTKFNGVSYVTQKGAEACYSPQGKKEIQTSIAYYMANASKIRDGLKKAGYEVFGGVNAPYIWLKTSDNLSSWDFFDKLLNKAQVVGTPGSGFGPAGEGYFRLSAFGKKEDVEEAIARITSL

SEQ ID NO: 2199 - protein, 284 aa, Arabidopsis thaliana
MLPQELILSETEQINIQQGQASYMQTLKRQAKVDSGKRMSTNFVIRRDPTGQCIFRPIPFKGMRKVRKHVDDDEGWSGGSKKVKVRGLTSSSGDGDSLSYPFENETTIRNREKDRLMLEIFGPESTDDSDESGTEEEFMETNLMSLVSLQWGKRGKRSMRKGTWKRHILENHVGQHKNTQDEMDIQVLLVSMDASVIPNLQNPQVSCKPNVTLKSLCEMYVAPYVEAQAEKIEMYVVKELVAELTMIDPHRDRVEIVNKEDSVGGLRMYNFNNGYVIIGYMKTP

SEQ ID NO: 2200 - protein, 199 aa, Triticum aestivum
MEKYVNRGTYDLKKIVEYANNREFTSVMVVHTNRREPDALLIINLPEGPTAHFKLSKLVLRKDIKNHGNPTSHKPELVLNNFTTRLGHRVGRMIQSLFPQDPNFRGRRVVTFHNQRDYIFFRHHRYIFEEKEKKIVSKDKKSKGETKTEKQINCRLQECRPRFTLKLLTLQHGTFDTKSGEYEWVHKPDLDTSRRRFFL

SEQ ID NO: 2201 - protein, 166 aa, Datura ferox
  unsure (1)..(166): unsure at all Xaa locations
SMGGACGKGDLYSQGYGTNTAALSTALFNNGLSCGXCFELKCGGDSKWCLPGSIVVTATNFCPPNYALPNNAGGWCNPPLHHFDLSQPVFQQMAQYRAGIVPVAYRRVRCQKRGRIRFTMNGHSYSNLVLVTNVGGSGDVNAVSVKGSRTDWILMSRNWGQNWQDP

SEQ ID NO: 2202 - protein, 271 aa, Zea mays
  unsure (1)..(271): unsure at all Xaa locations
SRSRTSIEDPFDQDDWVHNCSFQELKSFLVLLDVRSKTTFVTNIRENKEGLELLKTAIEKAGYTGKVVIGMDVAASEFYSDKDQTYDLNFKEENNDGSQKISGDSLKNVYKSFVSEYPIVSIEDPFDQDDWVHYAKMTEEIGEQVQIVGDDLLVTNPXTRVAKAIKEKSCNALLXLKVNQIGSVTESIEAVKMSKRAGWGVMTSHRSGETEDTFIADLAVGLSTGQIKTGXAPCRSERLAKYNQLLRIEEELGXAIAVYAGAKFRAPVEPY

SEQ ID NO: 2203 - protein, 428 aa, Oryza sativa
MAATIVSVKARQIFDSRGNPTVEVDVCCSDGTFARAAVPSGASTGVYEALELRDGGSDYLGKGVSKAVDNVNSVIAPALIGKDPTSQAELDNFMVQQLDGTKNEWGWCKQKLGANAILAVSLAICKAGAIIKKIPLYQHIANLAGNKQLVLPVPAFNVINGGSHAGNKLAMQAEFMILPTGAASFKEAMKMGVEVYHNLKSVIKKKYGQDATNVGDEGGFAPNIQENKEGLELLKTAIEKAGYTGKVVIGMDVAASEFYNDKDKTYDLNFKEENNDGSQKISGDSLKNVYKSFVSEYPIVSIEDPFDQDDWEHYAKMTAEIGEQVQIVGDDLLVTNPTRVAKAIQEKSCNALLLKVNQIGSVTESIEAVKMSKRAGWGVMTSHRSGETEDTFIADLAVGLATLLRIEEELGAAAVYAGAKFRAPVEPY

SEQ ID NO: 2204 - protein, 401 aa, Listeria monocytogenes EGD-e
MESVFMFFCTLLVWLMTPGIALFYGGMVRRKNVLSTAMYSFSSMAIISILWVIVGYSLAFAPGNGFIGSFDWTFLHNVGFAANATYSDAIPHVLFMMFQMTFAILTVAIISGAFAERMNFSAYLIFIILWSLLVYSPVAHWVWGDGGWLRNLGALDFAGGNVVHISSGVTGLVLAIMIGRRKEADSASPHNLPLALIGGILVWFGWYGFNVGSALTIDNVAMTAFVNTNTAAAAGIIGWGLVEWLTNKKPTMLGTISGAIAGLVSITPAAGFVTVPSSLIIGFFGGALCFWAVFWLKGKVKYDDALDAFGLHGIGGIWGGIATGLFATTKVNEAGADGLFYGNASLVVKQLIAIGSTVAYVAVVTALIVVIIKLFLPIRVNEEQEYKGLDLTLHGEKAYQE

SEQ ID NO: 2205 - protein, 164 aa, Datura ferox
SMGGACGYGNLYSQGYGVNNAALSTVLFNNGLSCGACFELKCVNDGKWCLPGNPSIFVTATNFCPPNFALPNDDGGWCNPPRPHFDLAMPMFLKIGQYRAGIVPVTYRRVACRKQGGIRFTINGFRYFNLLLVTNVAGAGDLQKVLIKGTNTQWIAMSRNWGAK

SEQ ID NO: 2206 - protein, 405 aa, Burkholderia fungorum LB400
MCPFYADTALNAELWDVEGRRYIDFAAGIAVLNTGHRHPKVMAAVREQLDRFTHTCWQVVPYPSYVELAEQLNRLAPGDFQKKASLFSTGAEAVENAIKIARAFTGRAAVIAFSGSFHGRTMMGMALTGKVAPYKVGFGPFPGEVYHAPYPNTLHGVTTTNALDSVRALFKTDVDPLRVAAIIFEPVQGEGGFYEAPADFVKGLRDICDQHGILLIADEVQTGFARTGKLFAMQHHAVAADLTTVAKSLAGGLPLSGVIGRADVMDAAAPGGLGGTYAGNPLSVAAALAVLDVIESENLCERATQLGNRLKSHLTSMRESLPHIAEIRGPGAMIAAEFFEPGTLIPDADFAKRFQARALELGLILLVCGVHSNVIRFLFPLTIEEAVFEEALVLIETAMKDAAAA

SEQ ID NO: 2207 - protein, 241 aa, Treponema denticola ATCC 35405
MKKPLIGITGSCLYETSQSLFAGYERMYTNADYVNSVLAAGGVPLMLPIIDDEDAIQRQLENLSGIIIMGGHDVEPHFFNEEPLSCLGEILPKRDVYELSLIKAAKALKKPVLGICRGMQILNVAFGGSLYQDLSLIKRDIQIQHVQKARPQERTHSIKTEAASIMQKVFGKEDMVNSYHHMAVKDLAKDFKITAYAPDGVVEAIEYTGEGFIMGVQFHPEMMAAVHKASLDLFKEFINRC

SEQ ID NO: 2208 - protein, 414 aa, Thermus thermophilus HB27
MVKVEVLGMILAGGQGSRLYPLTAKRAKPAVPFGAKYRIIDFVLNNFVNSGIYAIYVLTQYKAQSLTEHIQRYWRFGAFLEDHFILLVPAQMYRYEELGPVWYRGTADAIYQNLHLVHNHAPKAVAVFGGDHIFKMNIRHMVEYHYDTRADITIAAYPVPVAEATRFGVLQVDEEWRITEFQEKPEEPKPIPGRPDTALASMGNYIFRTEALFELLEADARDETSAHDFGKDVIPRALREGYRVYAYDFHRNPIPGQEGPNLYWRDVGTLDAYYEASMDLVKVVPEFDLFNPEWPLRTANLFSPPAKFVHETGERVGRALNSLLAGGVIVSGGTVRESVLFRRVRVNSYSLVERSVLFDDVEVGRYCRIRNAIIDKNVKIPPHTEIGYDLELDRARGFTVTPEGVVVVPKGYRF

SEQ ID NO: 2209 - protein, 237 aa, Physcomitrella patens
MFLTRSEYDRGFNTFSPEGRLFQVEYAIEAIKLGSTAVGLKTKEGVVLAVEKRITSVLLEPTSVEKIMEIDEHIGCAMSGLTADARTLVEHGRVETQNHRFSYNEPMSVESTTQALCDLALRFGEFDEESMSRPFGVSLLIAGHDESGPCLYHTDPSGTFWQCDAKAIGSGSEGADTSLQEHFNKNMTLEEAETLALSTLKHVMEEKVTSCNVDIAKVAPKYHLYTPEEVEVVIQRL

SEQ ID NO: 2210 - protein, 412 aa, Pachysandra americana
SGKPFYAIMHRIDVGLVIDLEPVNPADVPVTAAGALKSYKLAAKAISKLQSLPSGNISLLCDVLVKEVNELTGYDRVMVYKFHEDEHGEVVAECRRTDLEPYLGLHYPATDIPQASRFLFLKNKVRMICDCLAPPIRVIQDKRLEQPLSLCGSTLRAPHGCHAQYMENMGSIASLVMSVTINEDDDDDDVESDQQKGRKLWGLVVCHHTSPRFVPFPLRYACEFLIQVFGIQINKEVELAAQTKEKHILRNQTMLCDMLLRESPVGIVTKSPNVIDLVKCDGAALYYKNKFWLLGVTPTEAQIRDISEWLIEYHNGSTGLSTDSLMEAGYPGASVLGDAVCGMAAIKITSKEFLFWFRSQTAKEIKWGGAKHEPFNKDDARKMHPRSSFKAFLEAVKQRCLPWEDVEMDAIQ

SEQ ID NO: 2211 - protein, 554 aa, Pleea tenuifolia
  unsure (1)..(554): unsure at all Xaa locations
DLEPVNPADVPVTAAGALKSYKLAAKAISKLQSLPTGNISLLCDVLVREVSDLTGYDRVVAYKFHEDEHGEVIAECRRSELEPYLGLHYPATDIPRASRFLFMKNKVRMICDCSAAPVKVIQDKRLAQPLSLCGSILRAPHGCHAQYMASMGSVASLVMSVTIIEDDNETGSDQQEKGRKLWGVVVCHHTSPRFIPFPLRYACEFLIQVFCMQLTKEVELADQMREKHILQTQTVLCDMLLRDAPVGIFTQSPNVMDLVKCDGAALYYRNQFWLLGISPREAQIRDIAGWLLEYHDGTTGLSTDSLLDAGYPGASALGDEVCGMAAIRITDKDFLFWFRSHTAKEXTWGGAKHDLVEKDSDGRKMHPRSSFKAFLEVVEGRSLPWEDVEMDAIHSLQLILRDSLQGERASIDSKAIVNAPLDDAKKIQGMDELSLVTNEMIRLIETAAVPILAVDVLGNVNGWNIKAAELTGLVVQQAIGMPLIDLVEGDSIDVAKNMLFLALQGKEERDVEIKLKTFGHQEKNGPKILVVNACCSRDMKEDIVGVCFVAQDVT

SEQ ID NO: 2212 - protein, 467 aa, Pseudowintera axillaris
SGKPFYAIIHRVTGSLIVDFEPVKPYESPMAAAGALQSYKLTAKAISRLQSLPGGSLKRLIDTVVQGVFELTGYDRVMAYKFHEDDHGEVISEVTKPDLEPYLGLHYPATDIPQAARFLFMKNKVRMICDCNAKPMKVYQDEKLTFDLTLCGSTLRAPHSCHLQYMENMGSIASLVMAVVINEREEKDENSGSEQQQEQPKRKRLWGLVVCHNTTPRFVPFPLRYACEFLAQVFAIHVNKELELENQIQEKNILRTQTLLCDMLMRAAPLGIVTQSPSILDLVKCDGAVLLYQNKIWRLGIAPTESQILDIALWLSEYHMDSTGLSTDSLHDAGYPGALSLGDVVCGMAAVRINSKDTLFWFRSHTAAEIRWGGAKHDPNQKDDGRKMHPRSSFKAFLDVVKTRSSPWADYEMDATHSLQLILRGSLKEAEKVDTGTMIHSRLNDLKLEGVVELQAVTNQMVRLMET

SEQ ID NO: 2213 - protein, 395 aa, Pseudowintera axillaris
  unsure (1)..(395): unsure at all Xaa locations
DLEPVNPADVPVTAAGALKSYKLAAKAISKLQSLPSGNISLLCDVLVREVSELTGYDRVMTYKFHEDEHGEVIAECRRNDMEPYLGLHYPATDIPQASRFLFMKNKVRMICDCTARPVEVIQDKKLAQPLSLCGSTLTAPHGCHAQYMANMGSXASLVMSVTISEDDDEASSEEHRQKGRKLWGLVVCHHMTPRFVPFPLRYACEFLIQVFGIQLNKEVELAAQLREKNMLRTQTMLCDMLLRDAPVGIVTQSPNVMDLVKCDGAALYYRNQFWLLGTTPTEVQIRDIAEWLLEYHNNTTGLSTDSLMEAAYPGASILGDAVCGMAAVKITNKDFLFWFRSHTAKEIKWGGAKHDPSDKDGDGRKMHPRSSFMAFLDVVKRRSLPWEDVEMDAIQ

SEQ ID NO: 2214 - protein, 217 aa, Oryza sativa (japonica cultivar-group)
MGGRVDHEYSYLFKMVLIGDSGVGKSNILSRFTRNHFSLDSKSTIGVEFATKSLQMEGKTIKAQIWDTAGQERYRAITSAYYRGAVGALLVYDITKRQSFDNVHRWLRELRDHADSSIVIMMVGNKSDLIHLRAVSEDEGKALAEKEGLFFLETSAMEAVNVEEAFQTIITEVYGIVNRKALAAKEAAAASAPLPSQGKTISIDSAAGNTKRACCSA

SEQ ID NO: 2215 - protein, 441 aa, Pteridophyllum racemosum
  unsure (1)..(441): unsure at all Xaa locations
PYEVPMTAAGALQSYKLAAKAIAKLQPLHSGNMERLCDTVVQEVFDLTGYDRTMAYKFHDDDHGEVISEVTKPGLEPYLGLHYPATDIPQAARFLFMKNKIRMICDCNAKQVKVLQDEKIPFDLTLCGSTLRAPHTCHLLYMKNMGSAASLVMAIVXNEGDEEEEASGPSQPQKKKRLWGLVVCHNTTPRFVPFPLRYACEFLLQVFAIHVNKEFELENQILEKNILRTQTLLCDMLMRDAPLGILSQSPNIMDLVRCNGAALLYKNKIHRLGLTPSDFQIHDIASWLSEHHMDSTGLSTDSLYDAGFPGALSLGDQVCGMAAVRITSKDMLFWFRSHTAAEVRWGGAKHNPSEEDDGRKMHPRSSFKAFLEVVKTRSSPWRDYEMDAIHSLQLILRNAFKDAETADLNATVIHSGLNNLKIEGMEELEAVTNEMVRLIET

SEQ ID NO: 2216 - protein, 333 aa, Streptomyces hygroscopicus
MSAALTDGTVQGQQQCDTRLVGLYEADEAGSDLTLALSLAHGRAEAAARGIPLHTHLWQLYGGRTAPGLPRLMVNVFSGGIHRTGPPRGFQQVMVLPATGGLHTDIEVADRVFTAAHRNVERRFGPVPLSASSGLMVPLDSAGQLDLLQAAVAETGHTEVCTLGVDVAAEHLLTEPGRYRFGDRVLTAPDFADHLADLAHRFRMSFLEDPFDAADEAGWARLRGALPATTSVVGDDLFATDATRIEPGRADGILLKLSQAGTVTATLAAAAAARRAGMLLSVSHRSGETEDTAMCDLAVAVGAELIKVGGPRRGDRLAKYNQLLRLDESVAAP

SEQ ID NO: 2217 - protein, 464 aa, Saccharomyces cerevisiae
NTKHYDYLVIGGGSGGVASARRAASYGAKTLLVEAKALGGTCVNVGCVPKKVMWYASDLATRVSHANEYGLYQNLPLDKEHLTFNWPEFKQKRDAYVHRLNGIYQKNLEKEKVDVVFGWARFNKDGNVEVQKRDNTTEVYSANHILVATGGKAIFPENIPGFELGTDSDGFFRLEEQPKKVVVVGAGYIGIELAGVFHGLGSETHLVIRGETVLRKFDECIQNTITDHYVKEGINVHKLSKIVKVEKNVETDKLKIHMNDSKSIDDVDELIWTIGRKSHLGMGSENVGIKLNSHDEIIADEYQNTNVPNIYSLGDVVGKVELTPVAIAAGRKLSNRLFGPEKFRNDKLDYENVPSVIFSHPEAGSIGISEKEAIEKYGKENIKVYNSKFTAMYYAMLSEKSPTRYKIVGAGPNEKVVGLHIVGDSSAEILQGFGVAIKMGATKADFDNCVAIHPTSAEELVTMR

SEQ ID NO: 2218 - protein, 466 aa, Zea mays
  unsure (1)..(466): unsure at all Xaa locations
MAGLLHLQSTLLPSASALRRRAGVPVPSSSRRRCRIEAKIREIFMPALSSTMTEGKIVSWTAAEGDRLAKGDPVVVVESDKADMDVETFYDGFLAAVLVPAGDSAPVGSAIALLAESEEDIPVAQSQAASFSSTSPLPSPPQETAAQEASPSPPPPPPPGPVSVSAPTPPLPATQGERVVASPYAKKLAKDLGVDLFSVTGSGPGGRIVAKDVEAALAAPKKAAPVTAARPDVPLGSTVPFTSMQGAVSKNMVESLAVPTFRVGYTITTDALDQLYKKIKSKGVTMTTLLAAATAMALVQHPVVNCSCRDGKSFTYNKSINIAVAVAIDGGLITPVLQDADKLDIYSLSRKWKELVDKARAKQLQPXEYNSGTFTLSNLGMFGVDRFDAILPPGTGAIMAVGASEPTVVGTKDGRXIGIKSQMQVNVTADHRVIYGADLAALLQNTCXIIEDPKDLTFYSSLSAGF

SEQ ID NO: 2219 - protein, 369 aa, Methylococcus capsulatus str. Bath
MSRSIRNQDVPELPRRRQVRTVGMSGNYWYVVEIDGRLKPRQVKRVRFWGQDIALFRDAAGELHAVEDRCPHRQLPLSQGFVEGGNLVCTYHGWKFDGCGRCTEIHHELGKGRTRLPRIRIRTYPVKAQWGLIWLFPGDPALADGTPLPTIPQLEGGRPWPFFPIDVTIKAHFSMIVENVCDFNHEYLHRHKRPFLQPILREWKQDADSVRVYYDTRFDGSPVAKLFMEGGARDLNEIEIWYQYPYQGSDIGGKYIHWLFMLPEDERTTRCFFVFLFGPIHVPIVNWKMPEFLRKPILWFTNKWYIEPLLGEDKWALELEQDGFERHPDAPQIELNPAISSFQRLSLEKWKAYQQSMERAGPKPAADPA

SEQ ID NO: 2220 - protein, 198 aa, Zea mays
  unsure (1)..(198): unsure at all Xaa locations
MEISSSVDCGQEKEQPTNKRPRSESTTESSTKASREKIRRDKLNERYGSXFLELGAILEPGKTPXKMDKTAILSDAIRVVGELRSEAKKLKDSNENLQEKIKELKAEKNELRDEKQRLKAEKESLEQQIKFLNARPSLVPHHPVIPASAFPAPQGPAAAARHKLMMPVIGYPGFPMWQFMPPSDVDTSDDPRSCPPVA

SEQ ID NO: 2221 - protein, 242 aa, Antirrhinum majus
MGRGRVELKRIENKINRQVTFAKRRNGLLKKAYELSVLCDAEVALIIFSNRGKLYEFCSSTSMLNTLERYQKCNYGPPETNVSTREALELSSQQEYLKLKARYEALQRSQRNLLGEDLGPLNSKELESLERQLDMSLKQIRSTRTQAMLDTLTDLQRKEHALNEANRSLKHRLMDGSQISLQWNPNAEDHVGYGRQPSQPSADGFYHPLECEPTLHIGFQSDQITVAGAGPSVNNYISGWLP

SEQ ID NO: 2222 - protein, 425 aa, Listeria monocytogenes EGD-e
MDLQLPRGTRDILPEEVSKWHFLETEFKNVCENYQYEEIRTPVFEHTELFERGVGDSTDIVSKEMYTFQDKGGRSLTLRPEGTASVVRAFVEHKLYGEVSQPIKMYYNEPMFRYERPQGGRQRQFTQMGIEALGSDDPSIDVEVISLAMEFFRKIGLTNIKLVINSLGDKESRLKHREALVAHFEPHIDEFCAECQVRLHKNPLRILDCKKDHDNPLIQSAPSILDFLNEESVAYFENVKNYLNALEIPFEIDPTMVRGLDYYNHTTFEIMSVEEGFGAKTTLCGGGRYHGLVREFGGPDTPGMGFGIGVERILLALEKADIEIPAKKPLEVYVITAQPEAELKGVTLVNKLRQNGISAEKDYLKRKFKAQLKDANRKNAVYTIILGEEELQTGNYQLKNMETGEQEAVSETTILEKLSNTKGEK

SEQ ID NO: 2223 - protein, 557 aa, Listeria monocytogenes EGD-e
MTWKHYLSAWQNADLSNEWRRELQRVEEEQERFDGYLTFGTGGMRGKMGIGTKRINLFTIRRVAKGLGDYVVANEGAEMGVAIAFDSRHHSGAFAQETAKVLAAQGINVYLSDSIRPTPALSFCVREKGAFAGVVITASHNPSIYNGFKVYDKNGCQITLGVAQEIAGYLEKITDIFTIPVRELPNPLVTPLGKEMDDAYLNALTAVVSRPDLLADYGNELRICYTPLHGAGKELVMRGLLENGFSETTIIAEQSEPDGDFPTVISPNPEEENSFDLAKKLAKEIQADIILATDPDADRLGVAVLNKQATYQILTGNQLGALLLNYILEAKTPVTGADTMINTIVTGDLGGKIAYDFGINHIQTLTGFKFIGEKIAEMEGTEKNFLFGYEESYGYLIAPFVRDKDAVQAALLTAEMALFYKKEGTTLLGKLTNLFEKFGYHKEYLHTITLDDSDGITKMIQVIDALRKEPIFMPEITVVEDFLTSKRTNFVTMEVTNIELPKENVLKFYLMDSSWFAIRPSGTEPKCKIYFQTSGETEEIATKAMNELRKRVLAVWD

SEQ ID NO: 2224 - protein, 390 aa, Moorella thermoacetica ATCC 39073
MQEARRIRELPPYLFARIEKKIAEARERGVDIISLGIGDPDMPTPSHVIDKLVAEAHNPENHRYPTSEGLLAFRQAVADWYQRLYGVDLDPRREVVTLIGSKEGIAHISLCYVDPGDINLVPDPGYPVYNIGTLLAGGESYFMPLTAANGFLPDLGAIPSDVARRAKLMFINYPNNPTGAVADLKFFQEVVEFARSYDLIVCHDAAYSEITYDGYRAPSFLQAPGAKEVGIEFNSVSKPYNMTGWRLGWACGRADVIEALARIKSNIDSGAFQAVQYAGIAALTGPQEGLAEVRRVYQERRDIIVEGFNSLGWHLEKPKATFYVWAPVPRGYTSASFAEMVLEKAGVIITPGNGYGNYGEGYFRIALTISKERMQEAIERLRRVLGKVEF

SEQ ID NO: 2225 - protein, 300 aa, Streptococcus pyogenes SSI-1
MMTKVRKAIIPAAGLGTRFLPATKALAKEMLPIVDKPTIQFIVEEALKSGIEEILIVTGKSKRSIEDHFDSNFELEYNLQAKGKIELLKLVDETTSINLHFIRQSHPRGLGDAVLQAKTFVGNEPFVVMLGDDLMDITNPNVKPLTKQLIDDYEETHAATIAVMRVPHEDVSNYGIIAPQAKAVKGLYSVDTFVEKPQPQDAPSDLAIIGRYLLTPEIFSILEKQEPGAGNEVQLTDAIDTLNKTQRVFAREFKGKRYDVGDKFGFMKTSLDYALKHPQVKDDLKAYIIQLGKALEKTKP

SEQ ID NO: 2226 - protein, 362 aa, Zea mays
VGAPIALLAESEEEVPLALAKAQELSNGQPQQAPPAPTEDAAATPPPPSAPATAPTPVAVGTKGIASPHAKKLAKQHRVDLAKVTGTGPYGRITSADVEAAAGIQPKSKPAPAAAAAPPPVAAPSVGAVPQAAVLPPVPGATVVPFTTMQAAVSKNMVESLAVPAFRVGYPIVTDKLDELYEKVKPKGVTMTVLLAKAAAMALAQHPVVNGSCRDGKSFTYNSNINIAVAVAIDGGLITPVLQDADKLDIYLLSQNWKDLVKKARAKQLQPNDYNSGTFTLSNLGMFGVDRFDAILPPGQGAIMAVGASKPTVVADKDGFFSVKSKMLVNVTADHRIVYGADLAAFLQTFAKIIEDPESLTL

SEQ ID NO: 2227 - protein, 461 aa, Pteridophyllum racemosum
SGKPFYAILHRIDVGFVIDLEPVNPLDVPVTAAGALKPYKLAAKAISRLQSLPSGNISLLCDVLAREVSELTGYDRVMVYKFHEDEHGEVVSECRKIDLESYRGLHYPATDIPQASRFLFMKNRARIICDCSATPVKVIQDEKLAQPLSLCGSTLRAPHGCHAQYMANMGSIASLVMFVTINDDDDDIKIETHKGRKLWGLVVCHHTSSRFVPYPLRYACEFLIQVFGIQLNKEVELAVQSREKRILRTQTLLCDMLLRDSPVGIVTQSPNVMDLVRCDGAALYFRNKFWLLGVPPTEKQIRDIVGWLMEHYVGTTGLSTDSLMEAGYPDSSVLGDAVCGMAAINFTSKDFLFWFRSQTAKELKWGGAKHDPVDMDDVRKMNPRSSFNAFLEVVKWRSLPWEDVEMDAIHSLQLILRESMKNEIVNDVKTIVNTTPVIDARLRGMDQLCVVTGEMVSLMET

SEQ ID NO: 2228 - protein, 180 aa, Chromobacterium violaceum ATCC 12472
MPNIAEARGLINSSDVLFTAEQVSAAVDRMAVEITEKLGEEYPLVLSVMGGAVVFTGQLLPRLAFPLDFDYVHVSRYGDKTHGGELVWKQAPKEDVRDRVVLVLDDILDEGHTMAAIRDKVMSMGAKAFYSGVFANKLISKEKPLAADFVGLDVPDRYVFGYGMDVRGAWRNLPAIYALK

SEQ ID NO: 2229 - protein, 464 aa, Sarcandra glabra
SGKPFYAIIHRVTASLIIDFEPVKPYEVPMTAAGALQSYKLAAKAIARLQSLPGGSMEKLCDTVVQEVFDLTGYDRVMAYKFHEDDHGEVISAITKPGLEPYLGLHYPATDIPQAARFLFMKNKVRMICDCDAKPVKVFQDEKLVFDLTLCGSTLRAPHSCHLQYMANMNSIASLVMAVVVNEGEEDDSLEPGQQQQRKRKRLWGLIVCHNTTPRFVPFPLRYACEFLMQVFAIHVNKELELESQIQEKNIFRTQTLLCDMLMRDTPLGIVSQNPNVMDLVKCDGAALLYKKKIWRLGLTPSETQIHDISFWLSEYHMDSTGFSTDSLNDAGYPGALAIGDAVCGMAAVWITSKDMLFWFRSHTAAEVRWGGAKHDPDDKDDNRGMHPRSSFKAFLEVVKTRSLPWKDNEMDAIHSLQLILRGTFKDVENSHTKTMIYSQLNDLKLEGMEELQAVTNEMVRLIE

SEQ ID NO: 2230 - protein, 175 aa, Triticum aestivum
MAPAVMASSATTVAPFQGLKSTAGLPVSRRSGSAGLSSVSNGGRIRCMQVWPIEGIKKFETLSYLPPLSTEALLKQVDYLIRSKWVPCLEFSKVGFVFREHNSSPGYYDGRYWTMWKLPMFGCTDATQVLSEVEEVKKEYPDAYVRVIGFDNMRQVQCVSFIAFRPPGCEESGKA

SEQ ID NO: 2231 - protein, 290 aa, Chromobacterium violaceum ATCC 12472
MKKITKAVFPVAGLGTRFLPATKASPKEMLPVVDKPLIQYAVEEAIAAGMTELIFITGRNKRSIEDHFDKAYELETELEYKNKQKLLQLVQEIIPPSVSCIYIRQTEALGLGHAVLCARPVVGDEPFAVILADDLIEGAPGAMEQMVRLFDETHSSILGVETVAPEETGSYGIVKVAANAQGHQRVEHIVEKPRPEEAPSNLAVVGRYILTPRIFDKLVNTAAGAGGEIQLTDGIAALMKNEPVLALPFKGTRYDCGSKLGYLKATVNYGLKHNEVAGDFAAFLRELKLD

SEQ ID NO: 2232 - protein, 465 aa, Sarcandra glabra
SGKPFYAIMHRIDVGPVIDLEPVNPADVPVTAAGALKSYKLAAKAISRLQSLPSGNISLLCDVLVREVSELMGYDRVMAYKFHEDEHGEVIAECRRSDLEPYLGLHYPATDIPQASRFLFMKNKVRMICDCSAAPVKVIQDKRLGQPMSLCGSALRAPHGCHAQYMANMGSIASLVMSVTINEDDDETESDPQQQQEKPRKLWGLVVCHHTGPRFVPFPLRYACEFLIQVFGIQLNKEVELAAQLREKHMLKTQTVLCDMLLRDAPMRIVTQSPNVMDLVKCDGAALYYRNQFWLLGTTPTEAQIRDIAEWLLDYHDGSTGLSTDSLMEAGYPGASVLGDAVCGMAAVKITSKDFLFWFRSHSAKEIKWGGAKHDPINKDDDGRKMHPRSSFKAFLEVMKQRSLRWEDVEMDAIHSLQLILRGSLQEESENDSKAIVNASLDVAKIQGMDELRFVTNEMVRLIET

SEQ ID NO: 2233 - protein, 452 aa, Geobacter sulfurreducens PCA
MQTFDVVVIGGGPGGMTAGMMLKQAGKSVAIIQENHDSFGGVCLNRGCMPTKSMLKAAKVYRDAQNSEKYGLDLSVNPVDLTRLRAVADADLNMLRHMVQGKLTDARIAVFRGKGSFLSEHELQICQADGSSEQIRGEKIIIATGSVPAELPCAPFDGHSILSSDQILKNTDLPHKLLIIGGGAIGCEFATLYNTFGSRVTLVEAMDSLLPREDKEAGKTLQSTFEQQGITVKTGAAIKSISVEAGTVHVHYDGSCATEEFDKVLVGIGRTANIAGLNLDAAGVATEQGAVKVNEMMQTTVPHIYALGDVIGGMTLAHAAEKEGYLLAQNLIQGTRHPLDHRAVPRVVFCHPEVAAVGTHEARAGIKAFTMPQAPNGRAVVDKVAPAFVKLFIEEDTSQIAGAIIIGEGATEMIHEMAVAVENRLTLEQIGKTVHAHPTHSKNVLLAVQHFN

SEQ ID NO: 2234 - protein, 423 aa, Smilax rotundifolia
SGKPFYAIVHRVTGCLIIDFEPVTPTEVPMPAAGALQSYKLAAKAIAKLQSLPGGSMEGLCSTVVQEVFELTGYDRVMAYKFHEDDHGEVFAEITKPGLEPYRGLHYPATDIPQAARFLFMKNKVRMISDCRAKPVKVYQDEKLPFDITFCGSTLRAPHSCHLQYMENMNSIASLVMVVVINEGEEDEEQGQQQHNRKRLWGLVVCHHESPRFVPFPLRYACEFLMQVFAIHVNKEFELENQIREKNILRTQTLLCDMLLRDSDPLGIVTQSPNIMDLVKCDGAALLYENEIWQIGLTPTESQIREIAFWFAEFHADSTGLSTDSLYDAGYPGAVALGDTVSGMAAARITSTDILFWFRAHTAAEIRWGGAKHDPSDKDDGKRMHPRSSFNAFLEVVKGRSLPWNNYEIDAIHSLQLILRGTL

SEQ ID NO: 2235 - protein, 445 aa, Mortierella alpina
MATPLPPSFVVPATQTETRRDPLQHEELPPLFPEKITIYNIWRYLDYKHVFGLGLTPLIALYGLLTTEIQTKTLIWSIIYYYATGLGITAGYHRLWAHRAYNAGPAMSFVLALLGAGAVEGSIKWWSRGHRAHHRWTDTEKDPYSAHRGLFFSHIGWMLIKRPGWKIGHADVDDLNKSKLVQWQHKNYLPLVLIMGLVFPTVVAGLGWGDWRGGYFYAAILRLVFVHHATFCVNSLAHWLGDGPFDDRHSPRDHFITAFVTLGEGYHNFHHQFPQDYRNAIRFYQYDPTKWVIAICAFFGLATHLKTFPENEVRKGQLQMIEKRVLEKKTKLQWGTPIADLPILSFEDFQHACKNDNKKWILLEGVVYDVADFMTEHPGGEKYLKMGVGKDMTAAFNGGMYDHSNAARNLLSLMRVAVVEYGGEVEAQKKNPSMPIYGTDHVKAE

SEQ ID NO: 2236 - protein, 329 aa, ASPERGILLUS NIDULANS FGSC A4
MSFKVFKGSEKGVIESTTKKPALEGDRVLVKVSHSGVCGTDLHYKAADMVLGHEGVGYVEEVGPDVKDLKKGDRVGWGYEHDCCGRCKHCLSGFETFCPERAMYGFADLDQGSFASHAVWREAFLFKLPDGLDNESAAPLMCGGSTVYNALVGAEVTPTDTVGIVGIGGLGHLAIQFAAKMGCYVIVFSGTDSKKEEAMKLGAKEFVATKDAKELKTSRKLNNLIVTTSFLPEWELFLNVLDNRATISPLTVSDKPFTIPNQEMLVKGLRVQGGIVAARQVHREMLQFAAFHGVKPIVMRYPMNEKGINECMKTLEEGKMRYRGVLAAE

SEQ ID NO: 2237 - protein, 334 aa, Oryza sativa
MPRSHHLLAAAVAAVVVVVMGWSARPCEASLYQPPPPAMAYHDGAVLEGAVPVSVLYYGAFPPHHRAVVADFLMSLSPRGRDHQPHTFGAPGPAPPPTVARWWGTVERYVRKAGRGGGAGVARVVLASQVDDEGCSLGRRLSRAQVERLAARLGVAPGGVAVVLTAADVAVEGFCSSACGAHGSSAPGGGAVHVWVGDASAQCPGRCAWPFHAADYGDADAGRHRRAHGHDVALRAPNGDAGVDGVVINLAALMAGAVTNPYGRGYFQGDAAAPVEVAGACPGVYGRGAYPGYPGAVRVDAATGAGYNVVGRNGRRYLVPALVDPDNYSCLIMT

SEQ ID NO: 2238 - protein, 394 aa, Smilax rotundifolia
DLEPVNPADVPVTAAGALKSYKLAAKAISRLQSLPSRNISLLCDVLVREVSELTGYDRVMAYKFHEDEHGEVISECRRSDLEPYLGLHYPATDIPQASRFLFMKNKVRMICDCSAASVKVIQDKKLAQPLSLGGSTLRAPHGCHAQYMANMGSIASLVMSVTINEDDEEMDGDQQQKGRKLWGLVVCHHTSPRFVPFPPRYACEFLLQVFGIQLNKEVELAAQAKGKHIFWMQTLLCDMLLRDAPIGIFTQSPNVMDLVKCDGAALYYRKQFWLLGITPTEAQIKDIVAWLLECHDGTTGLSTDSLTEAGYPGSSALGNAICGMAAIKITSKDFIFWFRSHTSKDIRWGGAKHEPADRDDESQKMHPRSSFKAFLEVVKLRSLPWEDMEMDAIQ

SEQ ID NO: 2239 - protein, 229 aa, Candida albicans SC5314
MVKSNVESAWETMEDTFSEIQNKFHQIYKPIDTGKPDEDDETTKKESLDITDDSTLSVSPITQLLYLARSKFYDLTPLDNQKSPFPFKNLRGKVVLIVNVASRCGFSFQYNGLEQLNKRFANDDFVLLGVPCNQFLWQEPGTNDQIVTKCKKKYDVSFQILDKINVNGEQADPVYKFLKAQKEGLWGTNRVKWNFEKFLIDKNGRVVERYSTFTRPVAIIPKIEQLLES

SEQ ID NO: 2240 - protein, 217 aa, Zea mays
MGGRVDHEYSYLFKMVLIGDSGVGKSNILSRFTRNHFSLDSKSTIGVEFATKSLQIDGKTIKAQIWDTAGQERYRAITSAYYRGAVAALLVYDITKRQSFDNVHRWLRELRDHADSSIVIMMVGNKSDLIHLRAISEDEGKALAEKEGLFFLETSAMEAINVEEAFQTIITEVYGIVNRKALAAKEAAATAAPLPSQGKTISIDSNAGNTKKACCST

SEQ ID NO: 2241 - protein, 243 aa, Antirrhinum majus
MGRGRVELKRIENKINRQVTFAKRRNGLLKKAYELSVLCDAEVALIIFSNRGKLYEFCSNSGTMLKTLERYQKCNYGAPEANVSTREALELSSQQEYLKLKARYEALQRSQRNLLGEDLGPLNSKELESLERQLDMSLKQIRSTRTQAMLDTLTDLQRKEHALNEANRSLKHRLMEGSQISLQWNPNAHDMGYGRQAAAQPQGDGFFHPLECEPTLQMGFQSEITVGAAGPSVNNYNMTGWLP

SEQ ID NO: 2242 - protein, 170 aa, Gossypium hirsutum
MASQSSKPQSIYDFTVKDAKGNDVDLSIYKGKVLIIVNVASQCGLTNSNYTDLTEIYKKYKDQGLEILAFPCNQFGGQEPGSIEESIQNMVCTRFKAEYPIFDKVDVNGDNAAPLYKFLKSSKGGFFGDSIKWNFSKFLVDKEGNVVDRYSPTTTPASMEKDIKKLLGVA

SEQ ID NO: 2243 - protein, 95 aa, Methylococcus capsulatus str. Bath
MGSKLYVGNLNYRVGDADLERTFAAYGTVKSAQVVMDRATGRSRGFGFVEMGSDQEAQAAIAGLNGKEMDGRNLMVNEARPPERRGGSGGGGRRY

SEQ ID NO: 2244 - protein, 254 aa, Borrelia burgdorferi B31
MNYTKFQEFISEFLGTFILLALGTGSVAMTVLFSSSPEIPGEIIKGGYTNIVFGWGLGVTFGIYTAARMSGAHLNPAVSIGLASVGKFPVSKLLHYIVAQILGAFTGALMTLVVFYPKWIEMDPGLENTQGIMATFPAVPGFLPGFIDQIFGTFLLMFLISVVGDFTKKHSDNPFIPFIVGAVVLSIGISFGGMNGYAINPARDLGPRILLLFAGFKNHGFNNLSIVIVPIIGPIIGAILGATIYEFTLKNNKD

SEQ ID NO: 2245 - protein, 248 aa, Raphanus sativus
MAGVAFGSFDDSFSLASLRAYLAEFISTLLFVFAGVGSAIAYAKLTSDAALDTPGLVAIAVCHGFALFVAVAIGANISGGHVNPAVTFGLAVGGQITLITGVFYWVAQLLGSTAACFLLKYVTGGLAVPTHSVAAGVGAIEGVVMEIIITFSLVYTVYPTAADPKKGSLGTIAPLAIGLIVGANILAAGPFSGGSMNPARSFGPAVAAGDFSGHWVYWVGPLIGGGLAGVTYGNVFMTSEHVPLASEF

SEQ ID NO: 2246 - protein, 296 aa, Escherichia coli
  unsure (1)..(296): unsure at all Xaa locations
GSHXKGIILAGGSGTRLHPITRGVSKQLLPIYDKPXIYYPLSVLXLAGIREILIITTPEDKGYFQRLLGDGSEFGIQLEYAEQPSPDGLAQAFIIGETFLNGEPSCLVLGDNIFFGQGFSPKLRHVAARTEGATVFGYQVXDPERFGVVEFDDNFRAISLEEKPKQPKSNWAVTGLYFYDSKVVEYAKQVKPSERGELEITSINQXYLEAGNLTVELLGRGFAWLDTGTHDSLIEASTFVQTVEKRQGFKIACLEEIAWRNGWLDDEGVKRAASSLAKTGYGQYLLELLRARPRQY

SEQ ID NO: 2247 - protein, 506 aa, Acinetobacter calcoaceticus
MNDDTKKCPFSQLTTDFGAPVVDNQNSMTAGARGPLLAQDLWLNEKLANFVREVIPERRMHAKGSGAFGTFTVTHDITQYTRAKIFSEIGKKTEMFARFTTVAGERGAADAERDIRGFALKFYTEEGNWDMVGNNTPVFFLRDPRKFPDLNKAVKRDPKTNLRSATNNWDFWTLLPEALHQVTIVMSDRGIPASYRHMHGFSSHTYSFINSVNERFWVKFHFRTQQGIKNLTDAEAGELVGHDRESHQRDLFDAIERKDFPKWTLYVQVMPEQDAEKVPYHPFDLTKVWPHGDYPLIEVGEFELNRNPENFFLDVEQSAFAPSNLVPGISASPDRMLQARLFNYADAQRYRLGVNYQQIPVNAARCPVHSNHRDGQGRIDANYGGLPHYEPNSFGQWQEQPQYKEPPLKINGDADFWNYREDDNDYFSQPRALFELMTPEQQQALFDNTERAMGDALDFIKYRHIRNCYACHPAYGEGVAKALGLTVENAQAARETDPARGLPSFI

SEQ ID NO: 2248 - protein, 272 aa, Listeria monocytogenes EGD-e
MIDTSLATQFLGEVIGTAILIILGAGVVAGVSLKRSKAENGGWVVITLAWGLGVTMGVYVSGYMSMAHLNPAVTIGMALAGAFPWNYVLPYILAQFIGAFIGATLIWLHYYPHWKQTEDKPTKLGVFATAPAIRHFTSNFFGEALGTFILVFGLLSLGANSFSDGLNPLVVGALIVAIGMSLGGTTGYAINPARDLGPRIAHFVWPISGKGGSDWGYSWVPVIGPIMGGALGALGYNAIINGELGMWFWVFAVLFVLILILTMQLDKKKDLA

SEQ ID NO: 2249 - protein, 147 aa, Triticum aestivum
MRGVGGPLLTVSDLLSDLAVEGGDDHLDGGGDASVPSSPLAAHQVEEADPSELQRLFAEDYDNLMKSLQENDPSWPSLMLKLCRTLKTSDKLLSYANMKAEQLLEKAEKLEHVLERGDREVGSIIEVLQSMQLTEDHQISKTNPPSK

SEQ ID NO: 2250 - protein, 392 aa, Spathiphyllum clevelandii
PYEVPMTAAGALQSYKLAAKAISRLQSLPGGSMQKLTDTVVQEVFELTGYDRVMAYKFHEDDHGEVVSEITKPGLEPYLGLHYPATDIPQAARFLFMKNKVRMICDCHAKPVKVYQDEKLTFDLTFCGSTLRAPHSCHLLYMKNMNSIASLVMAVVVNEGDEEDEPLEHGQQLQQKRKRLWGLVVCHNTTPRFVPFLLRYACEFLMQVFAIHVNKEFELENQIREKNILRTQTLLCDMLLRDAPLGIISRSPNIKDLVKCDGAALLYQNKIWRLGSTPTESHIRDIASWLSEYHMDSTGLSTDSLYDAGYPGALTLGDAVCGMAAARITSKDILFWFRSHTAAEIRWGGAKHDPADEDDGRRMHPRSSFKAFLEVVKTRCLPWKDYEMEAIH

SEQ ID NO: 2251 - protein, 465 aa, Spathiphyllum clevelandii
SGKPFYAIMHRIDMGLIIDLEPVNPADVPVTAAGALKSYKLAAKAISRLQSLPSGNISLLCDVLVREVRELTGYGRVMAYKFHEDEHGEVVSECRRPDLEPYLGLHYPATDIPQASRFLFMKNKVRMICDCSAQPIKVIQDKRLAQPLSLCGSTLRAPHGCHAQYMANMGSIGSLVMSVTINEDEDDDSSGEQQQKGRKLWGLVVCHHTSPRFVPFPLRYACEFLMQVFAIQLNKEVELAAQTREKHILRTQTLLCDMLLRDTPVGIFTQSPNVMDLVKCDGAALYYQNQFWLLRVTPTEAQIRDIAAWLIDCHNSTTGLSTDSLSEAGYPSASTLGDAVCGMAAIKITSRDLIFWFRSHTAKEIKWGGAKHDPVDRDDDGRKMHPRSSFKAFLEVVKRRSLPWEDVEMDAIHSLQLILRSSLQDENVRDNSKGIVNVISDDAKKIQGVDELRTVANEMVRLMET

SEQ ID NO: 2252 - protein, 467 aa, Tacca chantieri
SGKPFYAIIHRVTACLIVDFEPVKPSELPMTAAGALQSYKLAAKAIARLQSLPGGSMERLCDTVIEEVFELTGYDRVMVYKFHEDDHGEVFREITKPGLEPYQGLHYPATDIPQAARFLFMKNKVRMICDCRAKPVKIYQDDKLPLDLTFCGSTLRAPHSCHLQYMENMNSIASLVMAEVVNEGEEDDENLEPGQTQQQKKKRLWGLVVCHHESPRFVPFPLRYACEFLMQVFAIHVNKEFELENQIREKNILRTQTLLCDMLLRDTTPVGIMNQSPNIMDLVKCDGAALLYQNKVWRLGLTPTEAQIRDIAYWLAEYHMDSTGLSTDSLHDAGYPGALGLADVVCGMAAARITSKDMLFWFRSHIAAEIRWGGAKHDPADKDDGRRMHPRTSFKAFLEAVKMRSLPWKDYEMDAIHSLQLILRGTFSDSRNVNSRASLDARVNDLKLEGMVELQAVTNEMVRLMET

SEQ ID NO: 2253 - protein, 195 aa, Zea mays
MQIKIGMDVAASEFLTKDGNYDLNFKNQPNDGAHILSAQHLGDLYRDFVKDFPIVSIEDPFDQDDWSSWASLQSSVDIQIVGDDLLVTNPKRIADAIDKKACNALLLKVNQIGTVTESIQAALDSKAAGWGVMVSHRSGETEDNFIADLAVGLASGQIKTGAPCRSERLAKYNQLLRIEEELGNVRYAGEAFRSP

SEQ ID NO: 2254 - protein, 465 aa, Tetracentron sinense
SGKPFYAIVHRVTGSLIIDFEPVKPYEVPMTAAGALQSYKLAAKAIARLQSLPSGSIERLCDTVVQEVFELTGYDRAMVYKFHEDDHGEVVSEITKPGLEPYLGLHYPATDIPQAARFLFMKNKVRMICDCRAKHVKVLQDEKLPFDLTLCGSTLRAPHSCHLQYMENMNSIASLVMAVVVNEEDEEGESSSSEQSQKRKKLWGLLVCHHTTPRFVPFPLRYACEFLAQVFAIHVNKELELENQILEKNILRTQTLLCDMLMRDAPLGIVSQSPNIMDLVKCDGAVLLYKNRIWQLGSTPSEFHIHDITSWLSEYHMDSTGLSTDSLYDAGFPGALALGDGVCGMAAVRITSKDMLFWFRSHTAAEVRWGGAKHEPGEKDDGRKMHPRSSFKAFLEVVKTRSLPWKDYEMDAIHSLQLILRNAFKDVENEGLNTSTIRTQLNDLSIEGTEELEAVTNEMVRLMET

SEQ ID NO: 2255 - protein, 489 aa, Glycine max
SSTQQILLFLTKLLSKNSSGDSISTMSNSEHNIITGHAGYVLEDVPHLSDYIPHLTTYPNPLQDNPSYSVVKEHSVDVDDTIAQKAIVHKNSPRETHFRRAGPRQKVYFESEDVYACIVTCGGLCPGVNTVIREIVCGLYHMYGVHKVLGIEGGYRGFYSCNTIPLTPKVVNDIHKRGGTILGTSQGEGGNDTLKIVDSIQDRGINQVYILGGDGTQRGASVIFEEIRRRGLKVSVVGIPESVDNDIPVIDKSFGFDTAVEEAQRAINAAHVEAESTENGIGVVKLMGRHSGFISMYATLASRDVDCCLIPESPFYLEGPGGLFEFIRKRLAENGHMVIVISEGAGHELISESLSATNKQEASGNKLLQDVGLWLSQKIKDHFTKSQKMDITLKYIDPTYMIRAVPSIASDNVHCTLLAQSAVHGAMAGYTGFAVGTVNGKHAYIPFYRINEIEKKVVITDRMWARLLSSTNQPSFLNPKDITTHQTGN

SEQ ID NO: 2256 - protein, 744 aa, ASPERGILLUS NIDULANS FGSC A4
MATSITAGLQKAQQAVQDTATKNKKIVDISHDTVNVHTDQEQRTDFGVAITDPDHWLRVTNETHSGPSLLEDHIARERIHRFDHERIPERVVHARGTGAYGNFTLKESIEDLTYAGVLTDTSRNTPVFVRFSTVQGSRGSADTVRDVRGFAVKFYTDEGNWDIVGNNIPVFFIQDAIKFPDFVHAVKPEPHNEVPQAQTAHNNFWDFVYLHPEATHMFMWAMSDRAIPRSYRMMQGFGVNTFSLVNKEGKRHFVKFHWIPHLGVHSLVWDEALKLAGQDPDFHRKDLMEAIDNKAYPKWDFAIQAIPEEDQDKFEFDIFDATKVWPEEQVPLRVVGELELNRNIDEFFPETEQVAFCTSHIVPGIDFSDDPLLQGRNFSYQDTQISRLGVNWEEIPINRPVCPFLNHNRDGAKRHRITKGTVNYWPNRFEANPPASDKGFKSHPAPITGRKRRDLTPKFKEYHNQAQLFYNSLSEVEKVHVKKAFSFELDHCDDPIVYERLAGQRLAEIDLPLAQAVAEMVGAPIPTKALRDNHGKTSVRLSQFDFTPKAPGIISRRIAIIIGDGYDKIAFNGMKAAILAAQALPFVIGTKRSAIYAQGEDKNSSKGVIPDHMYDGMRSTMFDATFIPGGSHIETLQKNGQIRYWIAETFGHLKALGAMGEAAQLVKEVLGNVMGVQIAGADSAEPVEWYGVVTARGPESAESLSEGFKVLKDAGDFTSKFFYQISQHRNWQRELDGLASTVAF

SEQ ID NO: 2257 - protein, 157 aa, Glycine max
  unsure (1)..(157): unsure at all Xaa locations
INSARADICGILPRILIVSRRTVRKNKFVDFVGEYHLDLIVSYGGVPVIVPRVSGVHTLLNSFEPIHGEDIEACWYDHNDDHDSDGLDLSQEELEEIRRLXASDTFIDKEKDSIELSLAKLCLERNIPYLGICRGSQVLNVACGGTLYQDIGKELSK

SEQ ID NO: 2258 - protein, 390 aa, Tetracentron sinense
DLEPVNPADVPVTAAGALKSYKLAAKAISRLQSLPSGNLSLLRDVLVQEVSDLTGYDRVMVYKFHEDEHGEVVAECLISDLEPYLGLHYPATDIPQASRFLFMKNKIRMICDCLAPPVKVIQDKRLVQPLSLCGSTLRAPHGCHAQYMENMGSIASLVMSVTINDDDDEIESDKRGRKLWGLVVCHHTSPRFVPFPLRYACEFLIQVFGIQLNKEVELVAQLREKQTLRTQTVLCDMLLRDAPVGIVTQSPNVMELVKCDGAALYYRSTFWLLGVTPTEAQIRDIAEWLLEYHNGSTGLSTDSFMEAGYPGAAVLGDAVCGMSAVKITSKDFLFWFRSHTAKEIKWGGAKHDPFDKDDGKKMHPRSSFKAFLEVVKWRSLPWEDMEMDAI

SEQ ID NO: 2259 - protein, 120 aa, Glycine max
TDTTVNQDDTGKIAPFTDLKSMAGFPTTKTNNDITSIASNGGRAQCMYVLPPVAKKKFETLSYLPKLDDAQLANEGEYHLRNGWIPCLEFEMEHGFVYREHNRSPGYYYGRYRTMRKQPM

SEQ ID NO: 2260 - protein, 431 aa, Rhizobium etli
MNVLRKETSQPPASVSIIGAGGICDLIGNSVLDFHRIQRLPPYVFEQVNRLKASARAGGADIIDLGMGNPDLPTPQSIVDKLCEVVQDPRTHRYSSSKGIPGLRRAQAAYYARRFGVKLNPDTQVVATLGSKEGFANMAQAITAPGDVILCPNPTYPIHAFGFLMAGGVIRSMSVEPDESFFPPLERAVRHSIPKPLALILNYPSNPTALVATLDFYKDVVAFAKKHDIIVLSDLAYSEIYFDGAPPPSVLEVPGAMDVTVEFTSMSKTFSMPGWRMGFAVGNERLIAALTRVKSYLDYGAFTPIQVAATHALNGDGSDIAEVRNVYKRRRDVMVESFGKAGFDVPPPAATMFAWAKIPEKFRHLGSLEFSKLLVEKADVAVAPGIGFGEMGDDYVRLALVENEHRIRQAARNIKRWLSGDEKFEINVMNQ

SEQ ID NO: 2261 - protein, 365 aa, Saccharum officinarum
MGSLASERKVVGWAARDATGHLAPYTYTLRSTGPEDVVVKVLYCGICHTDIHQAKNHLGASKYPMVPGHEVVGEVVEVGPEVTKYGVGDVVGVGVIVGCCRECKPCKANVEQYCNKKIWSYNDVYTDGRPTQGGFASTMVVDQKFVMKIPAGLAPEQAAPLLCAGVTVYSPLKAFGLTTPGLRGAILGLGGVGHMGVKVAKAMGHHVTVISSSSKKRAEAMDHLGADAYLVSSDAAAMAAAADSLDYIIDTVPVHHPLEPYLALLKLDGKHVLLGVIGEPLSFVSPMVMLGRKAITGSFIGSIDETAEVLQFCVDKGLTSQIEVVKMGYVNEALDRLERNDVRYRFVVDVAGSNVEEVAADAPSN

SEQ ID NO: 2262 - protein, 444 aa, Triticum aestivum
  unsure (1)..(444): unsure at all Xaa locations
FVDEDDTVPQKVVVQKNSRRGVHFRRAGPRQRVNFESDEVKACIVSCGGLCPGLNTVIRELVCGLAHMYNVNNIFGIQNGYKGFYSSNYVAITPKTVNDIHKRGGTVLGTSRGGHDTKKIVDNIQDRGINQVYIIGGDGTQKGAYEIYKEIRKRGLKVVVAXGLPRTIDNDITIIDKPXGFDSADEAAQRGVHPAPDEGLQCLGXLGWVKLIGRYSGFIAMYATLASRDVDCCLIPESPFYMDGEGGWLQYVERRLKENKHMVIVVAEGAGQDIIAKSIPASDQLDASGNKLLLDIGLWLTHKIKDHFKSKKMEMTIKYIDPTYMIRAIPSNAADNVYCTLLAHSAIHGAMAGYSFTVGMVNGRHAYIPFYRVTSTRNKVKITDRMWARLLSSTNQPSFLRQKDIDEAREADRLTNKPPLPPVANQNVAKAFDQSASASSNGEI

SEQ ID NO: 2263 - protein, 248 aa, Daucus carota
MVKLAIGSVGDSFSAVSLKSYLAEFIATLLFVFAGVGSAIAYGHLTADAALDPAGLVAIAIAHAFALFVGVSMAANISGGHLNPAVTLGLAIGGNITIITGLFYWIAQCLGSTVACFLLKFVTAGKAIPTHGVGAGLGAAEGVVFEIVITFALVYTVYATAADPKKGSLGTIAPIAIGFIVGANILAAGPFSGGSMNPARSFGPAVASFDFSGHWIYWVGPLIGGGLAGLVYGDVFIGSYAPIAEDYA

SEQ ID NO: 2264 - protein, 84 aa, Zea mays
PMGVFEFDKFAVGTEAVAKKLAELSGKGVTTIIGGGDSVAAVEKVGVADVMSHISTGGGASLELLEGKELPGVVALNEAATVTV

SEQ ID NO: 2265 - protein, 396 aa, Exiguobacterium sp. 255-15
MKHLSERVERLAPSGIRRFFDLAGSMEDVISLGVGEPDFVTPWNVREASFAALEQGYTAYSANAGLVELRQEIKLYMQEKFSIDYRVADEIIVTTGASEGLDLAFRTLINPGDEVIVVEPAFVSYAPLIELAGGIPVAAACRAEDGFTIQPETIEAVMTERTKAIIFCFPSNPTGSVMTRDQLADLALLAKKHDLYVISDEIYAELSYEDEPTCFATLPDMRERTIVINGFSKAFAMTGWRLGFTCAPPAISQAMLKVHQYGMMCAPTLVQFAGIEALRSRHKTVPDMVRSYRQRRNYFVKALNDAGLPTHSPGGAFYAFPYIGGTGLTSEEFAEQLLLAERVAVVPGSVFGASGEGYVRASYASSIEQLQQAIHRINRFMQHLNQKQVELSNPSR

SEQ ID NO: 2266 - protein, 550 aa, Zea mays
MAAHATLPFSCSSTLQTLTRTLSSRGAHQLRGGFLRLPSLAALPRLAHPYRRHVSASAAAAPNGASVEGEYDYDLFTIGAGSGGVRASRFASALYGSRVAICEMPFATIASDELGGLGGTCVLRGCVPKKLLVYASKYSHEFEESRGFGWTYETDPKHDWSTLIANKNTELQRLVGIYRNILNNAGVTLIEGRGKIVDPHTVSVNGKLYTAKHILVSVGGRPSMPDIPGIEHVIDSDAALDLPSKPEKIAIVGGGYIALEFAGIFNGLKSEVHVFIRQKKVLRGFDEEVRDFVAEQMSLRGITFHTEQSPQAITKSNDGLLSLKTNKENFGGFSHVMFATGRRPNSKNLGLEAVGVEMDKNGAIVVDEYSRTSVDSIWAVGDVTNRVNLTPVALMEGGAFAKTVFGNEPTKPDYRAIPSAVFSQPPIGQVGLTEEQAIEEYGDVDVFVANFRPLKATLSGLPDRVLMKILVCATSNKVVGVHMCGDDAPEIIQGIAIAVKAGLTKQDFDATIGIHPTSAEEFVTMRSPTRKIRKSSTDQVESKDEVVSKQ

SEQ ID NO: 2267 - protein, 261 aa, Saccharomyces cerevisiae
AQSFAEAMRMGSEVYHHLKILAKEQYGPSAGNVGDEGGVAPDIDTAEDALDMIVEAINICGYEGRVKVGIDSAPSVFYKDGKYDLNFKEPNSDPSHWLSPAQLAEYYHSLLKKYPIISLEDPYAEDDWSSWSAFLKTVNVQIIADDLTCTNKTRIARAIEEKCANTLLLKLNQIGTLTESIEAANQAFDAGWGVMISHRSGETEDPFIADLVVGLRCGQIKSGALSRSERLAKYNELLRIEEELGDDCIYAGHRFHDGNKL

SEQ ID NO: 2268 - protein, 261 aa, Oryza sativa (indica cultivar-group)
MGDSQYSFSLTTFSPSGKLVQINHALTAVGSGQTSLGIKAANGVFVATEKKLPSILVDETSVQKIQSLTPNVGVVYSGMGPDFRVLVRKSPKQAQQCCRLYKETMPVTQLVRETAAVMQEFTQSGGVRPFGVSLLIAGYDDNGPQLYQVDPSGSYFSWKASAMGKNVSNAKTFLEKRHTEDMELDDAIHTGILILKEGYEGQISANNIEIGIIRSDREFKVLSPAEIKVSWKRWNNLSQQSHVSNQWTPEQLPRSYIPFHS

SEQ ID NO: 2269 - protein, 610 aa, Pseudomonas aeruginosa UCBPP-PA14
MCGITGWTDWSRDLGEQRSILERMTRTLAPRGPDAEGLWLSRHALLGHRRLAIIDLENGAQPMLAEAGGRVALTYSGEVYNFRELRAELETLGQVFRTRSDTEVVLRAYLQWGEASFARLRGIYGFALWDEREQSLWLVRDRFGVKPLYYYPTAGGVLFASEPKAIFANPEANPVLDASGIAELFALTTAPTPGHGLYKGLRQVRPGQALRFDRNGVRELVYWALRAERHEEGAEDSAERAGQLLREAVAEQLVADVPLGSLLSGGLDSSAISAFAVAALDGDARRLPTFSVDFPGEGRGFVPTPWQSSWDEPYAQLAANFLGTPHRTVLVAPEEVLEQDEAVLQARDLPGWGELDASLYLLFRQVREHTTVALSGESADEVFGGYPFFHDPSALAHDGFPWLAGKSGPWQLLRREVAERVAAPEYIRARYREALAEVPRLDGEDAAQRRQREVAYLALSRWLPAMLERKDRMSMAVGLEVRVPFCDHRLVEYVWNLPWALKSVAGESKSLLRRALRGHLPQAILERRKSGFPANPDPRYLALLRERVGRLLADGRSPLFELVDAGRVRQALEQGTPLPSPRASASPTAGLAYLLNLDRWLTRHGVDISL

SEQ ID NO: 2270 - protein, 837 aa, Bradyrhizobium japonicum USDA 110
MTSPKLDRRQMLKLEAAAIAAAAAGLPVPALAANLATEREVSELKWDKAACRFCGTGCSVMVATKENRVVATHGDIKAEVNRGLNCVKGYFLSKIMYGHDRLTQPMLRKANGKYDKNGDFTPVSWTEAFDIMEVKWKEAMKKRGPNGVAMFGSGQWTIWEGYAASKLFKAGFRTNNIDPNARHCMASAVAGMMRTFGIDEPPGCYDDIEATDAFVLWGSNMAEMHPILWTRLTDRRLSAPHVRVAVLSTFEHRSFDLADIGMVFKPQTDLYLLNAIANHIIKTGRVNKDFVAAHTVFRRGQTDIGYGLRPEHPLQKKATGAAKANDSTDMSYDEYVKFVSEYTLEKAAEMSGVPLNRLEALAELYADPKTKVVSFWTMGFNQHTRGVWCNNLVYNIHLLTGKISSPGNSPFSLTGQPSACGTAREVGTFSHRLPADMVVTNKEHRTKAEHIWQLPEGTIPDKPGAHAVLQSRMLKDGLINAYWVQVNNNLQAGPNANEETYPGFRNPDNFIVVSDAYPSVTALAADLILPTAMWVEKEGAYGNAERRTQFWHQLVPAPGESKSDLWQLMEFSKRFKIEEVWPEELIAKKPEVRGKTLFDVLYKNGQVDKFPVSDIEQGYLNDESKAFGFYVHKGLFEEYASFGRGHGHDLAPFDAYHKERGLRWPVVNGQETRWRFREGSDPYVKQGTDVQFYGYPDGKARIFALPYEPAAESPDGEYPFWLSTGRVLEHWHSGTMTRRVPELYKAFPEAVCFMHPDDAQEAKIRRGDEVKVVSRRGFIRVRVETRGRDRPPRGLVFVPWFDESKLINKVTLDATDPISLQTDFKKCAVRIERVNVS

SEQ ID NO: 2271 - protein, 571 aa, Bacillus subtilis subsp. subtilis str. 168
MVTKILKAPDGSPSDVERIKKESDYLRGTLKEVMLDRISAGIPDDDNRLMKHHGSYLQDDRDLRNERQKQKLEPAYQFMLRVRMPGGVSTPEQWLVMDDLSQKYGNGTLKLTTRETFQMHGILKWNMKKTIQTIHSALLDTIAACGDVNRNVMCASNPYQSEIHSEVYEWSKKLSDDLLPRTRAYHEIWLDEERVAGTPEEEVEPMYGPLYLPRKFKIGIAVPPSNDIDVFSQDLGFIAIVEDGKLIGFNVAIGGGMGMTHGDTATYPQLAKVIGFCRPEQMYDVAEKTITIQRDYGNRSVRKNARFKYTVDRLGLENVKEELENRLGWSLEEAKPYHFDHNGDRYGWVEGIEDKWHFTLFVEGGRITDYDDYKLMTGLREIAKVHTGEFRLTANQNLMIANVSSDKKEEISALIEQYGLTDGKHYSALRRSSMACVALPTCGLAMAEAERYLPTLLDKIEEIIDENGLRDQEITIRMTGCPNGCARHALGEIGFIGKAPGKYNMYLGAAFDGSRLSKMYRENIGEADILSELRILLSRYAKEREEGEHFGDFVIRAGIIKATTDGTNFHD

SEQ ID NO: 2272 - protein, 465 aa, Xanthorhiza simplicissima
SGKPFYAIVHRVTGSLIIDFEPVKPYEVPMTAAGALQSYKLAAKAIARLQSLPSGSIERLCDTVVQEVFELTGYDRAMVYKFHEDDHGEVVSEITKPGLEPYLGLHYPATDIPQAARFLFMKNKVRMICDCRAKHVKVLQDEKLPFDLTLCGSTLRAPHSCHLQYMENMNSIASLVMAVVVNEGDEEGESSSSEQSQKRKKLWGLLVCHHTTPRFVPFPLRYACEFLAQVFAIHVNKELELENQILEKNILRTQTLLCDMLMRDAPLGIVSQSPNIMDLVKCDGAVLLYKNRIWQLGSTPSEFHIHDITSWLSEYHMDSTGLSTDSLYDAGFPGALALGDGVCGMAAVRITSKDMLFWFRSHTAAEVRWGGAKHEPGEKDDGRKMHPRSSFKAFLEVVKTRSLPWKDYEMDAIHSLQLILRNAFKDVENEGLNTSTIRTQLNDLSIEGTEELEAVTNEMVRLMET

SEQ ID NO: 2273 - protein, 391 aa, Xanthorhiza simplicissima
DLEPVNPADVPVTAAGAMKSYKLAAKAISRLQSLPSGNITVLCDVLVQEVSDLTGYDRVMVYKFHEDDHGEVVAECRVPELEPYLGLHYPATDIPQASRFLFMKNKVRMICDCSAAPVKVIQDNKLAQPLSLGGSALRAPHGCHALYMANMGSVASLVMSVTINEDDDQMETDQQKGRKLWGLLVCHHTRPRFVPYPLRYACEFLIQVFGMQINKEVELATQFREKHILQTQTVLCDMLLRDAPIGIVTQSPNIMDLVKCNGGALYYRSRFWLLGVTPTEAQIKDIAEWLLQYHNASTGLSTDSLMEAGFPGASVLGNEVCGMAAIKITTKDFLFWFRSHTAKEVKWGGAKHNPTEKDDGWKMHPRSSFKAFLEVVKHRSLPWEDVEMDAI

SEQ ID NO: 2274 - protein, 477 aa, Pseudomonas fluorescens
SQKFDVVVIGAGPGGYVAAIRAAQLGLKTACIEKYIGKEGKVALGGTCLNVGCIPSKALLDSSYKYHEAKEAFKVHGIEAKGVTIDVPAMVARKANIVKNLTGGIATLFKANGVTSFEGHGKLLANKQVEVTGLDGKTQVLEAENVIIASGSRPVEIPPAPLSDDIIVDSTGALEFQAVPKKLGVIGAGVIGLELGSVWARLGAEVTVLEALDKFLPAADEQIAKEALKVLTKQGLNIRLGARVTASEVKKKQVTVTFTDANGEQKETFDKLIVAVGRRPVTTDLLAADSGVTLDERGFIYVDDHCKTSVPGVFAIGDVVRGAMLAHKASEEGVMVAERIAGHKAQMNYDLIPSVIYTHPEIAWVGKTEQTLKAEGVEVNVGTFPFAASGRAMAANDTTGLVKVIADAKTDRVLGVHVIGPSAAELVQQGAIGMEFGTSAEDLGMMVFSHPTLSEALHEAALAVNGHAIHIANRKKR

SEQ ID NO: 2275 - protein, 274 aa, Rhizobium etli
MTDCLLKCLLRHPKMRRWSMDLNQRVCIVTGGGSGIGRATAELFAKNGAYVVVADVNEDAAVRVANEIGSKAFGVRVDVSSAKDAESMVEKTTAKWGRVDVLVNNAGFGTTGNVVTIPEETWDRIMSVNVKGIFLCSKYVIPVMRRNGGGSIINTTSYTATSAIADRTAYVASKGAISSLTRAMAMDHAKEGIRVNAVAPGTIDSPYFTKIFAEAKDPAKLRSDFNARAVMDRMGTAEEIAEAMLFLASDRSRFATGSILTVDGGSSIGNHLVK

SEQ ID NO: 2276 - protein, 497 aa, Emericella nidulans
MSDLFTTIETPVIKYEQPLGLFINNEFVKGVEGKTFQVINPSNEKVITSVHEATEKDVDVAVAAARAAFEGPWRQVTPSERGILINKLADLMERDIDTLAAIESLDNGKAFTMAKVDLANSIGCLRYYAGWADKIHGQTIDTNPETLTYTRHEPVGVCGQIIPWNFPLLMWSWKIGPAVAAGNTVVLKTAQQTPLSALYAAKLIKEAPFPAGVINVISGFGRTAGAAISSHMDIDKVAFTGSTLVGPTILQAAAKSNLKKVTLELGGKSPNIVFDDADIDNAISWANFGIFFNHGQCCCAGSRILVQEGIYDKFVARFKERAQKNKVGNPFEQDTFQGPQVSQLQFDRIMEYINHGKKAGATVATGGDRHGNEGYFIQPTVFTDVTSDMKIAQEEIFGPVVTIQKFKDVAEAIKIGNSTDYGLAAAVHTKNVNTAIRVSNALKAGTVWINNYNMISYQAPFGGFKQSGLGRELGSYALENYTQIKTVHYRLGDALFA

SEQ ID NO: 2277 - protein, 199 aa, Zea mays
MGAKAAHRRGVLDLEAQFAFFRSQHRHPVNAAAHVLLTWPILFTNLLILHFLPLPLPVSPALALALAYAAAYLAVDRRAGAVAGLLFLAAWAASRALAARLGFALSWKLVLVTQLFCWTWQFLGHGLFEKKGPSVSDLPEVFLMEPFLIFLQVTTGTADKHILNKLFGYEPYPGFCKNVDRKIEADLRASESSSRGKTT

SEQ ID NO: 2278 - protein, 412 aa, Bifidobacterium longum NCC2705
MTRFNTQLVHGLPVGDNNTGAVNPPIYNSTTYAFEKVDAMPRYDYARSGNPTRDFLEQQIAQLEQGTRGFAFASGLAAIHAVLSIFKPGDRIVVGDNIYGGSYSQLNEFFTRWGILVEAVDTQDIAALEAAVKGDRANGIVPAQAVYFETLTNPLLKVNDVRAISTVAHRFGALSIVDNTFVTPYLQKPLALGADVVIHSATKYLAGHSDVNAGLVVVSGEDLASRVYFAQNRLGGVLAPAECDAVRRGIQTLALRMDRQQENANAIARYLLVHPLVKAVHYPGLPGAGDQRLAAKGLKGAGGVLSFEVVPGVDPADVLNNLHLFRLAVSLGAVESLAELPCRMTHFELPREERLKIGITDELVRLAVGIEDANDLIEDLGQAFDIAYARYIDRHADFDVFQQLTSGGVCLI

SEQ ID NO: 2279 - protein, 375 aa, Rhizobium etli
MQMRSVILRESGLPKPYSNSKPLKIELVELTPPGPMEVLVKIKAAGVCHSDLSAINGDRPRPLPVALGHEASGVVAAIGPSVEKVEVGDHVVMSFLPVCGHCSYCAEGRASLCEPGYQANAAGTLLSGGKHIRLRGYEINHHSGVSAFSEYAVVSASSVVKVTKDIDLATAALFGCAVMTGVGAVMNTCGVRPGRSVAVIGLGGVGLSAILGAVASGASDIVAIDLIQAKLDLAKELGATKTFLATSPNIVAQVKGATSGGVDYAIEMAGSKKAFELAYEITRRGGMTATAGLASANSRFEVSPLPLVGEERTIKGSYMGSCVPSRDIPRYIDLYLKGKLPVDKLLSSTGPLDEINEVFDRLDRAEINRHLVLMD

SEQ ID NO: 2280 - protein, 197 aa, Oceanobacillus iheyensis HTE831
MKKIIVATKNKGKAKEFKEFFASFDIEAISLLDLPESIPDIEETGTTFEENAALKAEQISERFNTAVIADDSGLLIDALDGRPGLYSARYAGEPTNDQANIEKVLKEMQDVPDNDRSARFICVLAIAQPGKETNFCTGYCEGHIHSKQKGDHGFGYDPIFIPKKYDVTMAELDPAKKNQISHRKNAIDQLEKWLHTI

SEQ ID NO: 2281 - protein, 429 aa, Escherichia coli
MTTDDLAFDQRHILHPYTSMTSPLPVYPVVSAEGCELILSDGRRLVDGMSSWWAAIHGYNHPQLNAAMKSQIDAMSHVMFGGITHAPAIELCRKLVAMTPQPLECVFLADSGSVAVEVAMKMALQYWQAKGEARQRFLTFRNGYHGDTFGAMSVCDPDNSMHSLWKGYLPENLFAPAPQSRMDGEWDERDMVGFARLMAAHRHEIAAVIIEPIVQGAGGMRMYHPEWLKRIRKICDREGILLIADEIATGFGRTGKLFACEHAEIAPDILCLGKALTGGTMTLSATLTTREVAETISNGEAGCFMHGPTFMGNPLACAAANASLAILESGDWQQQVADIEVQLREQLAPARDAEMVADVRVLGAIGVVETTHPVNMAALQKFFVEQGVWIAPFGKLIYLMPPYIILPQQLQRLTAAVNRAVQDETFFCQ

SEQ ID NO: 2282 - protein, 522 aa, Oryza sativa
MDSGLGRSSETSLKALPSMASNATRNTDPDQQGVRFSSTDQPPCFARPGQSFPAFPPLFGVQSSSLYLPDDIEAKIGNQFESNPSPNNPTMDWDPQAMLSNLSFLEQKIKQVKDIVQSMSNRESQVAGGSSEAQAKQQLVTADLTCIIIQLISTAGSLLPSMKNPISSNPALRHLSNTLCAPMILGTNCNLRPSANDEATIPDISKTHDYEELMNSLNTTQAESDEMMNCQNPCGGEGSEPIPMEDHDVKESDDGGERENLPPGSYVVLQLEKEEILAPHTHFCLICGKGFKRDANLRMHMRGHGDEYKTAAALAKPSKDSSLESAPVTRYSCPYVGCKRNKEHKKFQPLKTILCVKNHYKRSHCDKSYTCSRCNTKKFSVIADLKTHEKHCGRDKWLCSCGTTFSRKDKLFGHVALFQGHTPALPMDDIKVTGASEQPQGSEAMNTMVGSAGYNFPGSSSDDIPNLDMKMADDPRYFSPLSFDPCFGGLDDFTRPGFDISENPFSFLPSGSCSFGQQNGDS

SEQ ID NO: 2283 - protein, 232 aa, Prunus avium
MDMIYSQLSDLASMENPDTSSFSDASVTARRASLSDEEVILASSCPKRRAGRRVFKETRHPVYRGVRRRNNNKWVCELRAPNNKKARIWLGTYPTAEMAARAHDVAVLAFRGKLACLNFADSAWRLPVPASTDAAEIRRAATEAAEAFRQAEDGGVDEKESKAVVSEEKGCVGMEGSSNLFYLDEDEIFEMPRLLDDMADGIMLCPPQCLDGYMDWNDVETVDDLKLWSFSI

SEQ ID NO: 2284 - protein, 421 aa, Chromobacterium violaceum ATCC 12472
MSQQQLMQRKSDATPRGVGVMCSFFADRAKNAEVWDTEGRRYIDFAGGIGVLNTGHLHPKVEAAVAEQLSRFSHTCYQVVPYESYISLAEKLNALAPGKHAKKTAFFTTGAEAVENAVKIARAATGRPGVIAFGGAFHGRTLMGMALTGKVAPYKLGFGPFPSDVYHAPYPNTLHGVSVQDSLVGLEKLFKFDIDPARVAAIIYEPVQGEGGFYAAPAEWVKALRELCDRHGILLIADEVQSGFARTGKLLASEHFDAVPDLITMAKSLAGGFPLSAVTGRAEVMDAPAPGGLGGTYAGNPLALAAAHAVLDVIDSEKLAERAQRLGDALKEKLNGLKSAVPQIAEVRGLGAMIAVEFNQPGSHQPDPDFAKKVQQHALANGLILLTCGIYANVVRFLFPLTIEDEIFAEALGKLEAALKA

SEQ ID NO: 2285 - protein, 486 aa, Chromobacterium violaceum ATCC 12472
MLNLQDPSLLRQQCYLGGEWLDADGGQHIAVHNPATGEKIGQVPKMGAAEAERAVAAAARAFPAWKAKSAKERAAILRRWFDLIIAHQQDLAIILTSEQGKPLAEAKGEIAYGASYIEWYAEEAKRVYGDIVPGPAGDRRVLVTKEPIGVTAAITPWNFPSAMITRKAAPALAAGCTMVVRPASQTPLSALALAELAERAGIPAGVFSVITGGSSEIGAVLTGSDTVKKFSFTGSTEVGRKLIAQCAGTVKKVSMELGGNAPFIVFDDADLDAAVEGALISKYRNAGQTCVCANRIYVQDGVYDAFAEKFAAAVATLKVGNGLEAGVSQGPLIDHNAVAKVEEHIADALAKGGRLIAGGKRHALGHTFFEPTLIADVTRDMKVAREETFGPLAPLFRFKTEEEAIRLANDTEFGLASYFYARDVGRIFRVAEGLEYGMVAVNSGLLSNEAAPFGGVKQSGLGREGSKYGIEDYLEIKYVLLGGLDR

SEQ ID NO: 2286 - protein, 455 aa, Mycobacterium tuberculosis CDC1551
MSTTQLINPATEEVLASVDHADANAVDDAVQRARAAQRRWARLAPAQRAAGLRAFAAAVQAHLDELAALEVANSGHPIVSAEWEAGHVRDVLAFYAASPERLSGRQIPVAGGVDVTFNEPMGVVGVITPWNFPMVIASWAIAPALAAGNAVLVKPAELTPLTTMRLGELAVEAGLDEDLLQVLPGKGTVVGERFVTHPDIRKIVFTGSTEVGKRVMAGAAAQVKRVTLELGGKSANIVFHDCDLERAATTAPAGVFDNAGQDCCARSRILVQRSVYDRFMELLEPAVHSIVVGDPGSRATEMGPLVSRAHRDKVAGYVPDDAPVAFRGTAPAGRGFWFPPTVLTPKRGDRTVTDEIFGPVVVVLTFDDEADAISLANDTAYGLSGSIWTDDLSRALRVARAVESGNLSVNSHSSVRFNTPFGGFKQSGVGRELGPDAPLQFTETKNVFIAVGEEM

SEQ ID NO: 2287 - protein, 266 aa, Mycobacterium tuberculosis CDC1551
MSDGGDPLRPASPRLRSPLGASRPVVGLTAYLEQVRTGVWDIPAGYLPADYFEGITMAGGVAVLLPPQPVDPESVGCVLDSLHALVITGGYDLDPAAYGQEPHPATDHPRPGRDAWEFALLRGALQRGMPVLGICRGTQVLNVALGGTLHQHLPDILGHSGHRAGNGVFTRLPVHTASGTRLAELIGESADVPCYHHQAIDQVGEGLVVSAVDVDGVIEALELPGDTFVLAVQWHPEKSLDDLRLFKALVDAASGYAGRQSQAEPR

SEQ ID NO: 2288 - protein, 457 aa, Escherichia coli
MQKYISEARLLLALAIPVILAQIAQTAMGFVSTVMAGGYSATDMAAVAIGTSIWLPAILFGHGLLLALTPVIAQLNGSGRRERIAHQVRQGFWLAGFVSVLIMLVLWNAGYIIRSMENIDPALADKAVGYLRALLWGAPGYLFFQVARNQCEGLAKTKPGMVMGFIGLLVNIPVNYIFIYGHFGMPELGGVGCGVATAAVYWVMFLAMVSYIKRARSMRDIRNEKGTAKPDPAVMKRLIQLGLPIALALFFEVTLFAVVALLVSPLGIVDVAGHQIALNFSSLMFVLPMSLAAAVTIRVGYRLGQGSTLDAQTAARTGLMVGVCMATLTAIFTVSLREQIALLYNDNPEVVTLAAHLMLLAAVYQISDSIQVIGSGILRGYKDTRSIFYITFTAYWVLGLPSGYILALTDLVVEPMGPAGFWIGFIIGLTSAAIMMMLRMRFLQRLPSAIILQRASR

SEQ ID NO: 2289 - protein, 230 aa, Oryza sativa
  unsure (1)..(230): unsure at all Xaa locations
MAGADVDVGTELRLGLPGGGGGAAEAAAKAAKRGFEETIDLKLNKSSQFFHSANKLEQDVKKLSKRKKNRCSSXFPMLHIRAQAVGWPPVRSFRRNIMTQPAANASGSNSSAFVKVSMDGAPYLRKVDLKMYNSYKDLSLALQKMFGTFTATGKSLATGTCRNRLSRNNMNEVNGSDAVTTYEDKDGDWMLVGDVPWQMFVESCKRLRIMKGSEAIGLAPRAKDKYKNKS

SEQ ID NO: 2290 - protein, 150 aa, Zea mays
FVADKAGVFGVGLHAPNEKLQETIVPSAKSYPLGALMDDCKSYFLETGRRVSFEYTLLAGINDEKEHAEELAELLRMCGGGYHVNLIPYNPIEGSEYKRPYRKVVQAFVDALEARKITVSVRQTRGLDANAACGQLRNEFQKNPLLAIEA

SEQ ID NO: 2291 - protein, 342 aa, Methylococcus capsulatus str. Bath
MKAWVIDRIGPLDSSRTLLRATDLPVPEPGPGEILLQVAVCGVCHTEIDEIEGRTAPPRLPVVPGHQAVGRIAALGSGVAEFALGDRVGVAWIFSACGECEFCRSGRENLCFAFCATGRDVDGGYAQYMTVPAAFAFRIPEGFTDAEAAPLLCAGAIGYRSLNLSGLKNGQPLGLTGFGASAHLVLMMARYRFPDSEVYVFARHPEERAFALQLGAVWAGDTADIAPAPLAAIIDTTPAWKPVVAALANLAPGGRLVVNAIRKAPDDRACLAELDYARHLWMEREIKSVANVARSDVAGFLALAAEMGIRPETEEYPFEDADRALLDLKQRRIRGAKVLRVT

SEQ ID NO: 2292 - protein, 585 aa, Magnaporthe grisea 70-15
MLGGKSIRVNGAECGVESLFLGAVTSLGGFLFGYDTGQISGMLIFEDFQRRFATGPVGENGIREWVPIIQSTMVSLMSIGTLIGALSGAYTADWWGRRRSLAFGVILFIIGNIIQITAMESWIHMMMGRLIAGFGIGNLSVGVPMFQSECAPREIRGAVVASYQLLITFGILISNIINYGVRNIQGSDASWRIVIGLGIFFSVPLGIGILLVPESPRWLAGRQDWDGARMSIARLRGMKHDPNNVLVETDISEMYKIIKEESSVGVGSWAECFTGKGGSEGIPKVVYRTILGMFMHFTQQWTGVNYFFYYGATIFQSAGVDDPIVTQLILGAVNVAMTFLGLYIVEKFGRRGPLFIGGAWQAVWLAVFAAIGTALPPTENRVSGIVMIVSACMFIASFASTWGPICWVVIGETFPLRTRAKQASLSTAGNWLGNFMISFLTPIATDGISFSYGFVFAAVNLCGALGVYFFLYESRMLSLENVDRMYGDPSIKPWNSRKWTPPGYINRRTKDEKYVPEGEHVQGGVRGSVGSDNTAVPGEADVNHDHAKQRPGSDGVPTTEQHEQAVLRNAKLTGLAASESIYIQT

SEQ ID NO: 2293 - protein, 329 aa, Acinetobacter sp. ADP1
MTQSALDQLKKLTTVVADSSDIEAIRKFLPLDATTNPSLITAAASIPENKALIEDAFNQAHQEGYENDLLIERTIDILTVKFGVEILKLIQGRVSTEVDASLSYNTEATIEKARELSKLYKEYGIDQSRILIKIASTWQGIQAAKVLEAEGIPCNLTLLFGLHQAQACADAKVTLISPFVGRILDWYKKAENVDHYPIEKDPGVVSVKKIFTYYKQQGTPTQVMGASFRSIDQVLGLAGSDLLTISPALLSELEQDHRTVEATLTIEEAKQAEIIHRAAQTEQSFKDELEHDLMAFQLLQSGIDGFIKAREQLSTLLRQSYGIDAEIQP

SEQ ID NO: 2294 - protein, 449 aa, Listeria monocytogenes EGD-e
MEKHYDYIAIGGGSGGIASINRAAMHGAKCALIEPKFLGGTCVNVGCVPKKVMWYGAQIKEAMDLYADAYGYQVDASFNFQKLVENREAYIERIRGSYKNGLDNNNVDWIKGYAEFVDEKTLRVNGELVTADHILIATGGEPALPSIPGAEFGITSDGFFALKELPKKVAVVGAGYIAVELAGVLQQLGSETHLFVRKHAPLRNFDPLLTDTLTEIIEQSDMTLHKHAIPQKVEKNPDGSLTLSLEDGRTETVDTLIWAIGRKPVIKGLQIEKSGVELLESGHIAVDKFQNTNVAGIYAVGDVTGHYELTPVAIAAGRRLSERLFNNKKDAHLNYENIPTVVFSHPAIGTVGLTEPEAIEKYGKENIKVYTSSFTSMYTAITDHREPCRMKLICEGKTERVIGLHGIGYGVDEMIQGFAVAINMGATKADFDNTVAIHPTGSEEFVTMK

SEQ ID NO: 2295 - protein, 299 aa, Thermosynechococcus elongatus BP-1
MLMLIGSQEGTAHLPLAVMNPQEYALVLDPGYPSHVGGVYLAGGQVYPLPLRSEDHFLPDLAAIPLAVREQAKLLILSYPHNPTTAVAPLDFFKTAVEFCDRHGILLVHDFPYLDLVFDGERAPSIFEVDRDRQVGIEFYSLSKSYNMGGFRIGFAIGRADIIAALRQIKSVIDFNQYAGILRGAIAALTGDQTCVQQTREIFRQRRDVFVQALGDHGWPVPLPPATMYVWAQLPAPWQRDSLGFCQALVQATGIAAAPGSGFGQGGEGYVRFALVRDRPCLEVAAAQIAAFSQTVPKV

SEQ ID NO: 2296 - protein, 180 aa, Helianthus annuus
MATQTVFDFPDDVLQQPPMPADNAFSDKDVKGQDVELSKYKGKVLLIVNVASQCGFTNSNYPELTTLYQKYKDQGFEILAFPCNQFGGQEPGSNEEIQVFACTRFKAEYPVFSKVNVNGKEADPLYKFLKSSKGGFLGDSIKWNFTKFLVDREGKVVDRYAPTTSPLSIEKDIKKLLNVA

SEQ ID NO: 2297 - protein, 149 aa, Prunus persica
VMVYKFHDDEHGEVVAESKRPDLEPYLGLHYPATDIPQASRFLFKQNRVRMIVDCHATPVHVIQDEGLMQPLCLVGSTLRAPHGCHSQYMANMGSIASLALAVIINGNDEEAVGGRNSMRLWGLVVCHHTSARCVPFPLRYACEFFTQA

SEQ ID NO: 2298 - protein, 256 aa, Rhodopseudomonas palustris CGA009
MDARVKPAHDAGKPNHLMTIHLDSQADLEDAITTLVKRDPRLKPVLQVAGMPALRRREPGFAGLAAIVCGQQLSTASAAAIWGRVSAAFEPFEHDAIKRARADRLARLGLSTAKIKTLKALAKELAAERLNLDVLAEEDADAAHATLTALHGIGPWTADIYLLFCLGHGDAWPAGDLAVQEAMRIGLGLKARPTVKQMAPLAEPWRPLRGAAAHLWWAYYHAVKRREGVIGDDKAAKVVAKKVTAKTPRARKSPSR

SEQ ID NO: 2299 - protein, 403 aa, Lactobacillus johnsonii NCC 533
MAKLIVSDLDLKGKKVLVRVDFNVPIKNGVIGDDNRIVAALPTIKYIIDHGGKAILLSHLGRVKSDADKKELSLRPVAERLSELLEKPVTFVPENEGKEVEEAIDNMKDGDVVVLENTRFQDIDNDFGKRESKNDPKLGEYWASLGDVFVNDAFGTAHRSHASNVGIATAMKKAGKPAAAGYLLEKEIKFLGDAVENPVHPFVTILGGAKVSDKIGVIENLIPKSDHILIGGGMAYTFLAAQGHKIGKSLFEADKVELAKSLLEKAGDKIVLPVDNVAATEFSNDAPHEIVGDDIPDNEMGLDIGPKTVEKFRDILKDAKTVVWNGPMGAFEMPNYAEGTLEVGRALADLKDAVTIIGGGDSTAAAKQLGIAPKISHISTGGGASLNYLEGKELPGIACVSDK

SEQ ID NO: 2300 - protein, 506 aa, Shewanella oneidensis MR-1
MIYAQPGTAGALVNFKEKYANFIGGKWVAPVNGKYFDNRSPVNGQNFCKIPRSDAQDIELALDAAHAAKDAWGKTSVTERSNILLRIADRVEQNLEYLAVAETWENGKAVRETLNADLPLFVDHFRYFAGCIRAQEGSAADIDGNTVSYHFPEPLGVVGQIIPWNFPLLMAAWKIAPALAAGNCVVLKPAEQTPVSILVLLELIEDLLPPGVLNVVNGFGAEAGQALATSKRIAKLAFTGSTEVGFHILKCAAESLIPSTVELGGKSPNLYFADVMDQEDEYLDKAVEGMLLAFFNQGEVCTCPSRVLIQESIYDRFIEKVLARAQTIKQGNPLDTATQVGAQASQEQFDKILSYLAIGKDEGAQVLLGGSLCQLEGEQSKGYYISPTIMKGHNKMRIFQEEIFGPVISVTTFKDEAEALAIANDTEYGLGAGVWTRDMNRAQRMGRGIQAGRVWINCYHAYPAHAAFGGYKKSGIGRETHKMMLNHYQNTKNLLVSYDINPLGFF

SEQ ID NO: 2301 - protein, 238 aa, Zea mays
VSCWVAVDWLIDLIGSVCACSVILGFDAPRKEDGVQDNPGAKKRQSFSSSFLSVDPQHKRRSRPESSAPPGTKACREKLRRDRLNERFNELCAILEPGKPPKADKVAILSDAARLLNQLQGEAQKLKQSNESLQESIKSLKAEKSELRDEKTRLKAEKERLEQMLKGVVSHAAVAAPGPFVPHPAAVAPSFHHHPAAFAQAGKFVPYPSYPPPAAFWQWIPPTSLDTTKDPAHWPPVA

SEQ ID NO: 2302 - protein, 451 aa, Alnus glutinosa
MTSLQYFSLNRPVFPATHLHRPGIRHLQVSACANVEVQAPSSVKKQGVSKEVMEAAGRVLVGTYARVPVVLSRGKGCKLYDPEGREYLDLSAGIAVNVLGHADSDWLRAVTEQAATLTHVSNVFYSIPQVELAKRLVASSFADRVFFSNSGTEANEAAIKFARKFQRFTRPDEKQPATEFVSFSNSFHGRTMGSLALTSKENYRSPFEPVMPGVTFLEYGNIEAATQLIQRRKIAAVFVEPIQGEGGVYSATKEFLYALRKACDDSGTLLVFDEVQCGLGRTGYLWAHEIYDVFPDIMTLAKPLAGGLPIGAVLVTERVASAITYGDHGTTFAGGPLVCKAALTVLDKILRPGFLASVSKKGHYFKEMLINKLGGNSHVREVRGVGLIVGIELDVSASPLVNACLNSGLLVLTAGKGNVVRIVPPLIITEQELEKAAEILLQCLPALDRHG

SEQ ID NO: 2303 - protein, 351 aa, Oryza sativa
MVSAAAQAGVVAACVVLFVPMGLAGWHLSRNKVLFFSGALFVSLAVGVHLSPYLPSLPHLLLAASFHPHPISSSSSSSAASSSCVPLLHRVSWADAGGESGVGRAWAWPPSLASTCGLARLSRDDASLLLNGSWVMVAGDSQARLLVLALLRLLLDPAAAAAAEPELFRRHSDYRATVPARGISVDFVWAPFESNLTRLLHEDLRLAPRTPDVLVLGSGLWHMLHVTDAARYGDALASVVDAAKSLRSPLPVPPPHMFWLGLPLLVNHMLNTDAKKVHMNDTILQAYDLEVEQRGLLQRDGGPFLLLDVGKLSRGCGQQCTADGMHYDGDVYDAVLHIMLNALVIESQQRI

SEQ ID NO: 2304 - protein, 321 aa, ASPERGILLUS NIDULANS FGSC A4
MFTHLNWGLPLRTALFFPDGPNSELNKTENSQPAIMATSVLILRILETEFGFDTKSRVDVTLGHSLGEFSALVAGGYIHFSDALRLVRRRAEIMSQCTQQAAVRSGERYGMVALVCEPEHMDDLLSTIHEFLSPSLSDTHDNSSSDNHKEVAVANINSRNQIVLSGSIERIKTLLIQLRQFSGHDPRAVRLKSESPFHSPIMTPAAEYMRSALEKITVNFPADMPCVSNVSNLPFTSAHRLKELLSRQCVDTVRWWDSIRYLDQERGVKRWIGIGPGKVGRNLVGKEVGRVMAKGGGVWAICDPRDVNETLIALEDTDKDI

SEQ ID NO: 2305 - protein, 495 aa, Rhizobium etli
MAISSTLLGRLKDQTLVREQMLVGGKWSSEGVNGTRINVLNPSTMDVLASLPSAGLAEVRASIDAAKAAQKKWAKVSAKERSLIMRKFYEEVVANAEDLAVILTSEMGKPLAEARGEIAYGASYIEWFGEEAKRVYGDTIPGHQADKRLLVIKQPVGVVAAIAPWNFPSAMVCRKIAPALASGCAIVFKPAAETPLSALALAILAERAGIPDGLFSVLPTDNARMFGEEVCSNPVVKKLTFTGSTEVGRILMAQGAQKIMKLSLELGGNAPFIVFDDADLDQAVEGAMLSKFRNAGQTCVCANRIYVQSGIHDRFVEKLAMRVSALQVLDGFESGATIGPLINDEAVAKLYGHIDDAVTKGATVVVGGDRDARGGTFVQPTLLSGATKDMKVAREETFAPLAPVFKFDTVEEVIELANDTEFGLAAYFFANDLRNVWKVTEALEYGMVGVNTGLISTELAPFGGVKQSGFGREGSKYGMDDFLSMKYVCMGGIGA

SEQ ID NO: 2306 - protein, 286 aa, Oryza sativa (japonica cultivar-group)
MAGGEHGVNGQHEETRAMEEGSRDHQARCENSEQDGGSKSSSNNHPMFSVQFAQKVIAEILGTFFLIFAGCAAVAVNKRTGGTVTFPGICITWGLAVMVMVYSVGHISGAHLNPAVTLAFATCGRFPWRRVPAYAAAQVAGSAAASAALRALFGGAPEHFFGTAPAGSDVQSLAMEFIITFYLMFVVSGVATDNRAIGELAGLAVGATVLVNVLFAGPISGASMNPARTIGPAIILGRYTGIWVYIAGPVFGAVAGAWAYNLIRFTDKPLREITMTASFIRSTRRN

SEQ ID NO: 2307 - protein, 426 aa, Aquifex aeolicus VF5 [sequence omitted]

SEQ ID NO: 2308 - protein, 624 aa, Gossypium hirsutum
MATTGVQNQEKVPMNLKQQLALAVRNIQWSYGIFWSISAKQPGVLEWGDGYYNGDIKTRKTVQSFEPKADDQLGLQRSEQLRELFESLSAGETSPHTKRPSVALSPEDLTATEWYYLVCMSFVFNIDQGLPGRTLSIGQPIWLCNAQYADSKVFSRSLVAKSASIQTVVCFPYAGGVIELGVTDLVSKDPGLIHRVKSLLLDAPETITGNINDVACPGLGPNEIESELSPFLGCEQLERGSPNEISDGFEPNQPAEDPFVNGGASQVQSWQFMDDHHSLNTSDCISQTFSDHEDVVPLCQGENDNDNDFRDVEECDRINRAAFDPISDDMHYRTVVSVLLKSSHQFILGPHFGNSNKESGFISWKMNSSVKYRKAKVEIPQKLLKKMLFEVPRMHDKGLLKSPQGGDGVGDAVWRPEADELCKSHVLSERRRREKINERLMILKSLVPTNSKADKVSILDDTIEYLQDLERRVEELECCRELTESETKTKQKHHRDRAERTSSNKVTNGNKSASSNKRKAYDIEETKQDIDHVASKDGSTENLTVSTNNKDLTIEFKCRWRDGILFEIMDALSVLDLDCHSVQSSTIEGILSVTIKSKYKGSSVAKPGTIKQALLQKVQSLTFV

SEQ ID NO: 2309 - protein, 442 aa, Chlamydophila caviae GPIC
MIENDFQGYSPSYQASHFYRDKVGVIVLCGGEGKRLSPLTYWRCKPTVSFGGRYKLIDVPISHAIASGFSKIFVIGQYLTYTLQQHLVKTYFYHGVLQDRIHLLAPEGREGSQVWYQGTADAIRQNLLYLEDTEIEYFLVLSGDQLYNMDFRKVVDYAIAMQSDMVIVAQPIQEKDASRMGVLQIDKDANLVDFYEKPQEEEILNRFRLSSEDCRKHKLDPQYGNFLGNMGIYLFRRESLFQLLLEEQGDDFGKHLIQAQKQRGSIKTFLYDGYWTDIGTIESYYEANIALTQRPKPQVRGLNCYDDAGMIYSKNHHLPGTIVTDSMISSSLLCEGAVIDSSNVSHSVVGIRGVIGKNSIIDHSIVMGNDRYGNPQQNALGIGDNCEIYKTIIDENCRIGNGVKLTNIQGHKDYNSPDGKLVVRDGIIIIPRGTRIPDNYTF

SEQ ID NO: 2310 - protein, 385 aa, Oryza sativa (japonica cultivar-group)
MIPGGGGGGGGGGISPYLVQSQHGHGGGVDGMEMEEGGGFMGEQPQCHPLLYNLSVLKDRVQQLHPLVGLAVAHNAHAHGPLDVSAADAIIQEIVAAASSMMYAFQLLCDLGTAPTTAPSQETAAASAVVVKNNDHAADAGQMEDDHLMQQQWQQNGSRQHDYSSHAHAPPVFHSETAAPAGATSATDTIIELDAAELLAKYTHYCQVCGKGFKRDANLRMHMRAHGDEYKSKAALSNPTKLLAKGGDETMAAAARKYSCPQEGCRWNRRHAKFQPLKSVICAKNHYKRSHCPKMYVCNRCGRKHFSVLSDLRTHEKHCGDHRWLCSCGTSFSRKDKLIGHVSLFAGHQPVMPLDAPRAGKRQRSSSASVAGNIDDTTGIGMGAA

SEQ ID NO: 2311 - protein, 296 aa, Oryza sativa
  unsure (1)..(296): unsure at all Xaa locations
NKKEFHEETCRKIKALHLYDCLRANKSTSAWGVEARVPFLDKNFINVAMDIDPEWKMIKRDLGRIEKWVLRNAFDDEEKPYLPKHILYRQKEQFSDGVGYSWIDGLKDHANEHVSDSMMMNASFVYPENTPVTKEAYYYRTIFEKFFPKNAARLTVPGGPSVACSTAKAVDWDAAWSKNLDPSGRAALGVHXAAYEDTLQKFPASANPVLDNGFGPALGESMVKTVCFSHCRLIFYRRIKLRSLLFLVQSQLLSDVVSFFKHVMEMRAFPGLLVTVCLSSCMFSFLFQYANCLVVD

SEQ ID NO: 2312 - protein, 488 aa, Listeria monocytogenes EGD-e
MSIKETALPKVQTKLFINGKWTDGDNKETKDIVNPANGDVIAKIAQAGPSETKKAIKAAKDAFPDWAKMELADRVKLLHKIADLMEEKADTLAKIMTLEQGKPLKESKGEVLTGVENFRFAAEEARRLYGETIPAPNNHAFIVKKQPIGVVAAITPWNFPGGMVTRKLAPALATGNTIVLKPSGDTPLSALAIFEIFEEAGLPKGVANIVMGSSKEIGETLTDSDDVRKLTFTGSTKVGQTLFKQSADTLKKISLELGGHAPFIVFDDANLDAAVNDLVAAKFRNNGQVCVSPNRIFVAKEIKEKFTKALVAKVEQLKVGNGLDDVNVGPLIREDAIDKIDKQLKNATEKGAKVLTGGGRLTGSDYDKGNFYKPTVLDNVTRKMDIFYEETFGPVIPLITFETEDEAIEMANDSEFGLASYFYTKDLARVEKVGAALEYGMVGANEIAISNPETPFGGVKHSGFGRENGHYGMEEYIQVKFINLKYRD

SEQ ID NO: 2313 - protein, 498 aa, Mesembryanthemum crystallinum
MTLDSIPGSSGYLDSYPERRITYFGNKFVLALTVTAGIGGLLFGYDTGVISGALLYIKDEFPAVKNSSFLQETIVSMALVGAMIGSATAGWINDVYGRKKATLLADFIFAIGAVVMAAAPDPYILIVGRFLVGLGVGLASVCAPVYIAEASPTEVRGGLVSTNVLMITFGQFVSYCVNLAFTEVPGTWRWMLGVSGVPAVLQFGFMLLLPESPRWLYLKHEKSKAAAVLAKIYDPFRLEDELDLLAAAEEEEKNKPAVHISDVFTKRELRYAFIAGGGLLAFQQLAGINTVMYYSPTIVQMAGFSSNQLALLISLIVAAMNAVGTVLGIYLIDHMGRRKLALTSLSGVFVALVMLTISFMLRSSGPTSALYSWLAVLGLALYIAFFAPGMGPVPWAINSEIYPQAYRGLCGGMGATICWIVNLFVSETFLSIADAIGTGPTFLIIAGIVIVAFVFVVCFVPETKALTFEEVDQMFMDRAYGTEENTQSLLESSNRSGN

SEQ ID NO: 2314 - protein, 309 aa, Gossypium hirsutum
MGRSPCCEKVGLKKGPWTPEEDQKLLAYIEQHGHGSWRALPLKAGLQRCGKSCRLRWINYLRPDIKRGKFSLQEEQTIIQLHALLGNRWSAIATHLPKRTDNEIKNYWNTHLKKRLTKMGIDPVTHKPKTDALGSTTGNPIDAANLSHMAQWESARLEAEARLVRESKLVPSNPPQSNHFTAVAPSPTPATRPQCLDVLKAWQGVVCGLFTFNMDNNNLQSPTSTLNFMENTTTLPMSSSSSVNGMFNENFGWNSSINPCESGDILKVEYGSDQIPELKERLDHPMELHEMDCSSEGTWFQELFGFNGL

SEQ ID NO: 2315 - protein, 323 aa, Candida shehatae
MSPSPIPAFKLNNGLEMPSIGFGCWKLDKSTAADQVYNAIKAGYRLFDGAEDYGNEQEVGEGVKRAIDEGIVTREEIFLTSKLWNNYHDPKNVETALNKTLKDLKVDYVDLFLIHFPIAFKFVPIEEKYPPGFYCGDGDNFVYEDVPILETWKALEKLVKAGKIRSIGVSNFPGALLLDLFRGATIKPAVLQVEHHPYLQQPKLIEYAQKVGITVTAYSSFGPQSFVEMNQGRALNTPTLFEHDVIKAIAAKHNKVPAEVLLRWSAQRGIAVIPKSNLPERLVQNRSFNDFELTKEDFEEISKLDINLRFNDPWDWDNIPIFV

SEQ ID NO: 2316 - protein, 569 aa, Bacillus halodurans
ERLKAPEGPPSDVERIKEESNYLRGTLKESMLEPISAGISDDDNRLMKHHGSYLQDDRDLRNERQKQKLEPAYQFMLRVRMPGGVATPEQWLVMDELAQKYGNGTMKLTTRETFQLHGILKWNMKKTIQAIHSALLDTIAACGDVNRNVMCTSNPYQSEIHQEVYEWSKKLSDDLLPRTRAYHEIWLDEEKVAGTPEAEEVEPMYGPLYLPRKFKIGIAVPPSNDIDVFSQDLGFIAIVEDDKLVGFNVAIGGGMGMTHGDKATYPQLAKVIGFCKPEQIYDVAEKIITIQRDYGNRSVRKNARFKYTVDRLGLETVKNELENRLGWSLDEAKPYHFDHNGDRYGWVKGVKGRWHFTLFVEGGRVTDYADYKLMTGLREIAKIHTGDIRLTSNQNLIIANVTSQKKKKINELIEQYGLTDGKHYTALRRSSIACVALPTCGLAMAEAERYLPKLIDKIDEIIEENGLKNEEITIRMTGCPNGCARHALGEIGFIGKAPGKYNMYLGAAFDGSRLSKMYRENIGEEEILKELREILPRYAKERKEGEHFGDFVIRAGIIKETTDGTNFHD

SEQ ID NO: 2317 - protein, 630 aa, Escherichia coli O157:H7 EDL933
MAIEIKVPDIGADEVEITEILVKVGDKVEAEQSLITVEGDKASMEVPSPQAGIVKEIKVSVGDKTQTGALIMIFDSADGAADAAPAQAEEKKEAAPAAVPEAAAAKDVNVPDIGSDEVEVTEILVKVGDKVEAEQSLITVEGDKASMEVPAPFAGTVKEIKVNTGDKVSTGSLIMVFEVAGEAGAAAPAAKQEAAPAAAPAPAAGVKEVNVPDIGGDEVEVTEVMVKVGDKVAAEQSLITVEGDKASMEVPAPFAGVVKELKVNVGDKVKTGSLIMIFEVEGAAPAAAPAKQEAAAPAPAAKAEAPAAAPAAKAEGKSEFAENDAYVHATPLIRRLAREFGVNLAKVKGTGRKGRILREDVQAYVKEAIKRAEAAPAATGGGIPGMLPWPKVDFSKFGEIEEVELGRIQKISGANLSRNWVMIPHVTHFDKTDITELEAFRKQQNEEAAKRKLDVKITPVVFIMKAVAAALEQMPRFNSSLSEDGQRLTLKKYINIGVAVDTPNGLVVPVFKDVNKKGIIELSRELMTISKKARDGKLTAGEMQGGCFTISSIGGLGTTHFAPIVNAPEVAILGVSKSAMEPVWNGKEFVPRLMLPISLSFDHRVIDGADGARFITIINNTLSDIRRLVM

SEQ ID NO: 2318 - protein, 140 aa, Glycine max
  unsure (1)..(140): unsure at all Xaa locations
QQRDVAHTVGPAHHECICTVSXGIGAIEHVLYHSVTYEVTTIXASSPRFLMSRKTXSLGVXWVIFAEGLDQIFGGYMYLYEAPHKALFHQMTIGMVXALAKHDCLRDNRSTSAWGLEARVPMLVKQCVRVAMIFGPEYNM

SEQ ID NO: 2319 - protein, 485 aa, Porphyromonas gulae
MEKNKLTTAAGAPVADNQNVATAGKRGPMLLQDVWFLEKLAHFDREVIPERRMHAKGSGAFGTFTVTHDITKYTKAAIFSEIGKQTELFVRFSTVAGERGAADAERDIRGFAIKFYTEEGNWDLVGNNTPVFFLRDPLKFPDLNHVVKRDPRTNMRSPQNNWDFWTLLPEALHQVTITMSDRGIPASYRHMHGYGSHAFSFINAEGVRHWVKFHLHTQQGIKNLTDAEAEALIGKDRESHQRDLFESIERGDYPRWTLKVQIMTEEEAKALPYNPFDLTKVWSQKDFPLIEVGVMELNRNPENYFADVEQSAFNPANVVPGISFSPDRMLQGRLFSYGDTQRYRLGVNHHQIPVNRSRCPFLNMYHRDGAMRVDGNFGSRLGYEPNSYGHWQDQNEYKEPPLELDGAAYQWDFREDDSDYYSQPRKLFHIMSPDQQQVLFDNTARAMGDIPKEIKLRHIANCYKADPDYGKGVAKALGLDVNEAL

SEQ ID NO: 2320 - protein, 151 aa, Arabidopsis thaliana
MSYLLKTLTTKEEIDRVIRDTIDEVLVLRFGRSSDAVCLQHDEILAKSVRDVSKFAKVALVDVDSEDVQVYVKYFDITLFPSTIFFFNAHHMKLDSGTADHTKWVGAFHIKQDFIDVVEAIYRGAMKGKMIVQCPIPPERIPKYQLVYKDV

SEQ ID NO: 2321 - protein, 145 aa, Triticum aestivum
  unsure (1)..(145): unsure at all Xaa locations
WPRPXTSVAPFQGXLKSTAGLPVKPPAPTGLASXGVSNGGRIRCMQVXWPIEGIKKFETLSYLPPLXSTEALLKXXSDYLIRSXWGAXPSEFSKGLGFIFREAQTQSPGVLTMGRVLQMWELALCFGADGHGESERWAEGKGSNP

SEQ ID NO: 2322 - protein, 394 aa, Wigglesworthia glossinidia endosymbiont of Glossina brevipalpis
MKIIKVTDLNLKDKKVLIRSDLNVPIKNGKIMCNMRIIKSLETINFVIKNEAKCVIVASHLGNPIEEKYDYNFSLTHIVNHMKKIIKYPIRLIQNYLNGFEAKEKEIIVLENVRFNPGERKNDKNLSKKYANLCDILVMDSFGSSHRSESSTTGIIKFAPISCIGLLFLKEIKYLKKALFNSKRPIVTIFGGSKISTKLGVIEKLSNISENVLVGGGIANTILFSKGHNIGKSLHDKNNISKIKKFLYKKNIIIPKDFIVTDNINKFSSYKEKSIKEIKNEDYIVDIGKKSCECFIKIIKKAKTIFWNGPLGLIEIKQFRNGTKEIANSVIHSSAKSIIGGGETVLAMRMFNFIDRFSYISTGGGAFLSFIEKQELPVLSELKKFKKYTNFKQN

SEQ ID NO: 2323 - protein, 384 aa, Rhodococcus sp. DK17
MSNATQTDPASRTTGTATAMVLEGFGRAMAPRTFPRVDPDAGAVVVDVTHAGICGTDIHLQQGRLAIPVPVILGHEAVGRVHALGEGVTTDARGEELRVGDAVSWASNIPCGHCYYCEDQQEPSLCETRKVYGINQSSADWPHLSGGWSEQIYLQPGSTIVRIPSSVTPQQVIALGCAGPTAVHAVNRIAKPDAGNVVVVQGSGPVGLACAMYATLAGAAKVIIVGGPANRLEVARTAGIGDIHIDIFAETDRAARLDRILAETTGGRGADVVIEAAGVPTAVSEGIDIARRGGKYLVVGQYTDHGTTPINPHYITKKQLQVLGSWAFSPHNHLEYVESLPRLAARFDLASMVTEYPLGKAEEAMGDMRDGRSLKSVLVTGGQS

SEQ ID NO: 2324 - protein, 335 aa, Triticum aestivum
MATPATTPATMRAVQYDACGGGAAGLKHVEVPVPSAKKNEVLLKLQAATINPVDWKIQKGDLRPLLPRRLPFIPVTDVAGVVVDVGPGVKGLTAGDQVVAMLNSFNGGGLAEYAVASANLTVKRPAEVSAAEGAGLPIAAGTALQALRSIGAKFDGTGKPLNVLVTAASGGVGLYAVQLAKLANLHVTATCGARNMDLVKSLGADEVMDYRTPEGASLQSPSGRKYDGVVHCTIGVSWSSFQPLLSDAGRVIDITPNFSAILTSALHRVTFSKKRLVPLLLSPNKADLEFLVGLLKEGKLKTVIDSKFPLSDAGKAWQSSIDGHATGKIAVEMES

SEQ ID NO: 2325 - protein, 361 aa, Lolium perenne
MGSVDASEKTITGWAARDATGHLSPYTYNLRRTGAEDVVLKVLYCGICHTDLHQTKNHLGASKYPMVPGHEVVGEVVEVGPEVSKYSVGDVVGVGVIVGCCRDCRPCKANVEQYCNKKIWSYNDVYTDGKPTQGGFAGSMVVDQKFVVKIPAGLAPEQAAPLLCAGVTVYSPLKHFGLMTPGLRGGILGLGGVGHMGVKVAKSMGHHVTVISSSDKKRAEAMDDLGADDYLVSSDEAQMAAAMDSLDYIIDTVPVKHPLEPYLALLKMDGKLVLMGVIGEPLSFVSPMVMLGRKTITGSFIGSIEETEEVLRFCVDKGLTSQIEVVKMDYLNQALERLERNDVRYRFVVDVAGSNIDDTAA

SEQ ID NO: 2326 - protein, 458 aa, Pseudomonas putida
QQTIQTTLLIIGGGPGGYVAAIRAGQLGIPTVLVEGQALGGTCLNIGCIPSKALIHVAEQFHQASRFTEPSPLGISVASPRLDIGQSVAWKDGIVDRLTTGVAALLKKHGVKVVHGWAKVLDGKQVEVDGQRIQCEHLLLATGSSSVELPMLPLGGPVISSTEALAPKALPQHLVVVGGGYIGLELGIAYRKLGAQVSVVEARERILPTYDSELTAPVAESLKKLGIALHLGHSVEGYENGCLLANDGKGGQLRLEADRVLVAVGRRPRTKGFNLECLDLKMNGAAIAIDERCQTSMHNVWAIGDVAGEPMLAHRAMAQGEMVAEIIAGKARRFEPAAIAAVCFTDPEVVVVGKTPEQASQQGLDCIVAQFPFAANGRAMSLESKSGFVRVVARRDNHLILGWQAVGVAVSELSTAFAQSLEMGACLEDVAGTIHAHPTLGEAVQEAALRALGHALHI

SEQ ID NO: 2327 - protein, 327 aa, Chlamydia muridarum
MSSQFDQLKLWSVLVGDSGDPDLIKTLDVQDATTNPSLILKVAQEPKYQSMLTEAISWGIRQNGDDVQTLTFVLDKIQVNLGLEILKYVPGRVSLEIDARLSFNTEAMVQRAIFLSQLFEKMGGDKKRLLIKIPGTWEGIRAAEVLENQGIACNVTLIFSLVQAIAAAKAKVTLVSPFVGRIYDWWIAAYGAEGYSIEADPGVASVANIYSYYKKFDIPTQIMAASFRTKEQVLALAGCDFLTISPKILEELKKEQQPVERKLSVEEAKKLDIQPVELSESVFRFLMNEDAMATEKLAEGIRIFSGDTQILESAVTEFIRQIAAQEA

SEQ ID NO: 2328 - protein, 364 aa, Mycobacterium tuberculosis CDC1551
MVPELMFDEPRPGRPPRHLADLDAAGRASAVAELGLPAFRAKQLAHQYYGRLIADPRQMTDLPAAVRDRIAGAMFPNLLTASADITCDAGQTRKTLWRAVDGTMFESVLMRYPRRNTVCISSQAGCGMACPFCATGQGGLTRNLSTAEILEQVRAGAAALRDDFGDRLSNVVFMGMGEPLANYARVLAAVQRITARPPSGFGISARAVTVSTVGLAPAIRNLADARLGVTLALSLHAPDDGLRDTLVPVNNRWRISEALDAARYYANVTGRRVSIEYALIRDVNDQPWRADLLGKRLHRVLGPLAHVNLIPLNPTPGSDWDASPKPVEREFVKRVRAKGVSCTVRDTRGREISAACGQLAAVGG

SEQ ID NO: 2329 - protein, 429 aa, Mycobacterium bovis AF2122/97
MPIIEQVGAREILDSRGNPTVEVEVALIDGTFARAAVPSGASTGEHEAVELRDGGDRYGGKGVQKAVQAVLDEIGPAVIGLNADDQRLVDQALVDLDGTPDKSRLGGNAILGVSLAVAKAAADSAELPLFRYVGGPNAHILPVPMMNILNGGAHADTAVDIQEFMVAPIGAPSFVEALRWGAEVYHALKSVLKKEGLSTGLGDEGGFAPDVAGTTAALDLISRAIESAGLRPGADVALALDAAATEFFTDGTGYVFEGTTRTADQMTEFYAGLLGAYPLVSIEDPLSEDDWDGWAALTASIGDRVQIVGDDIFVTNPERLEEGIERGVANALLVKVNQIGTLTETLDAVTLAHHGGYRTMISHRSGETEDTMIADLAVAIGSGQIKTGAPARSERVAKYNQLLRIEEALGDAARYAGDLAFPRFACETK

SEQ ID NO: 2330 - protein, 153 aa, Zea mays
SFDPLNLTAMACPALPLCPLAQTEAERGILPILKRIRAVFNKVGIKDSESVVVRITGCPNGCARPYMAELGFVGDGPKSYQIWLGGTPNQSTLAESFMDKVKLDDIEKVLEPLFTYWNGTRQEGESFGSFTNRTGFDKLKEVVNKWAESPSAA

SEQ ID NO: 2331 - protein, 475 aa, Nostoc sp. PCC 7120
MSHEFDYDLVIIGAGVGGHGAALHAVSCGLKTAIIEAADMGGTCVNRGCIPSKALLAASGRVRELRDAHHLKSLGIQIGNVEFDRQAIANHANNLVSKIQGDLTNSLKRLGVDIIRGWGKIAGTQKVTVTGDGGEKTITAKDIILSPGSVPFVPPGIEVDGKTVFTSDQGVKLETLPEWVAIIGSGYIGLEFSDIYSALGCEITLIEALDQLMPGFDRDIAKLAERVLITPRDIETKVGIYAKKVIPGSPVVIELADFKTKEVVDVIEVDACLVATGRIPATKNLGLESIGVELDRRNFIPVDDRMAVLSAGEVVPHLWAIGDANGKMMLAHAASAQGIVAVENIIGRERTVDYRSIPAAAFTHPEVSYVGLTETGAKELGQAEGFEVATSRSYFKGNSKALAENEADGIAKVIYRKDTGEVLGVHIFGLHASDLIHEASAAVANRQTVQTLAHLVHAHPTLSEVLDEAYKRAIV

SEQ ID NO: 2332 - protein, 623 aa, Glycine max
  unsure (1)..(623): unsure at all Xaa locations
MKFMKLGSKPDTFQTDGNNVRYVASELAADIVAARGDIKFYLHKFPLLSKSSHIQTLISLNNEENVDEVQISDIPGGANTFEICAKFCYGMTVTLNAYNVIATRCAAEXSGMHEAIEKGNLTYKIDVFLSSSIFRSWKDSIILLQTSKSMLPLVEDLKVVSHCIESIANKACVDVSKVDWSYTYNRKKLPKENGIESNQNGLRTRLVPKELWVEDLCELEVDLYKSVITNIKSKAVQSNEVIGEALKAYAYRRLPNFSKGMIQCGDVSKHRLIVETIVWLLATEKGSVPCRFLLKLLKAAIFVESGDRTKEELVKRIGQQLEEASVSDILIQAPDGATIYDVSIVQNIVREFFMKNGNAEIESVGGDELEGIRKPGILSDASKLMVAKLIDEYLAEIAKDPNLPLPEFVNLAELVSSISRPAHDGLYRAIDTYLKEHPAINKGEKKRICKLMDCRKLSVDACLHAVQNERLPLRVVVQVLYFEQLRTAASSGTSTPDIPRGIKDLNNESNGSSRSGTTNPEDELDAVATAEELKALRKELASLRLSNGVGNNDKDGDTKPSMDKAVMGKVKGLLKSKKSFIKLWASKGGQGENSGSDSSESMSSANPEEAKSTPSRNRRHSVS

SEQ ID NO: 2333 - protein, 390 aa, Zea mays
MQSAAAIGLLRPCAARPLAAYTSPRRGAGACSGGTQPIITPRGIRLSARPGLVPASPLEEKENRRCRASMHTAASAGEEAGGGLAKTLQLGALFGLWYLFNIYFNIYNKQVLKVLPYPINITTVQFAVGSAIALFMWITGIHKRPKISGAQLFAILPLAIVHTMGNLFTNMSLGKVAVSFTHTIKAMEPFFSVLLSAIFLGELPTPWVVLSLLPIVGGVALASLTEASFNWAGFWSAMASNVTFQSRNVLSKKLMVKKEESLDNINLFSIITVMSFFLLAPVTLLTEGVKVSPAVLQSAGLNLKQVYTRSLIAACCFHAYQQVSYMILARVSPVTHSVGNCVKRVVVIVTSVLFFRTPVSPINSLGTGIALAGVFLYSQLKRLKPKPKTA

SEQ ID NO: 2334 - protein, 499 aa, Aquifex aeolicus VF5
MEQGYRTISRKTLRPLQKDIRKITFLCKAECSRKRIIQYSIMIKFGTDGWRARIAEEFNFDNVRRVAKAHAEVLKEKGVKRVIVGYDWRFRSEDFAKAVYDVFRSEGLEAKLVGSACTTPMVSFAVKYLGYENGVMITASHNPPAYNGYKIKESFGGSATPEFVKNVEEKVKDIESVEIKEFEPEYQEVRKKYVEKIREFFDMDLFKEKKTLVVHDSMHGTSSGLLDFVLRDTKVSVINIRKDRDPLFGGHPPEPIEKYMEITKEKVRALGAELGIANDGDGDRIALVDDKGNYVNTQLIYAMLLLHLLENKGKRGKVVKTVSTTYLADRICKEFGVPLIEVGVGFKNINEIILKEGGVIFGGEESGGYGIPEYLPERDGIFSALNILELLYLKDKKVSEVVAEIFERFGEAYYKRVDLRVKEKIKGRIKELKENPPERIGEFKVREVKTIDGVKFVFEDDSWLLMRPSGTEPLIRVYAETPTKEEVEKIIQKGLELLK

SEQ ID NO: 2335 - protein, 431 aa, Acinetobacter sp. ADP1
MFMSQIVDIRAREILDSRGNPTIEADVILASGVVGRACAPSGASTGSREALELRDGDKARYLGKGVKTAVNNVNTIIRDALVGKSVFEQKDIDNTMIELDGTENKEKLGANATLAVSLAAARAAADEKKIPLFQYIADLRGQTILTMPVPMMNIINGGSHADNNVDIQEFMIEPVGFTSFSEALRAGAEIFHSLKSVLNKKGLNTAVGDEGGFAPNLRSNEEAITVILEAIGQTGYKAGSDIMLALDCASSEFYKNGQYILAGEGNKAFTSNQFSDYLAGLVNQYPIISIEDGLDESDWEGWSYLTSILGDKIQLVGDDLFVTNPKILQRGINEKVGNSILIKYNQIGTLTETLDAIYLAKDNGYSTVISHRSGETEDSTIADLAVGTAAGQIKTGSLCRSDRVAKYNQLLRIEELTKAAYRGKAEFKGLN

SEQ ID NO: 2336 - protein, 332 aa, Prochlorococcus marinus str. MIT 9313
MISVLPSNDTSATAFRSEVFPELHRDNLRTLQVNLGYRCNQSCAHCHVNAGPTRLEMMDPQTMALIPKVLDQYQLECLDLTGGAPELHPGFKDLVIQASCLGVEVIDRCNLTILTEPGQENLAAFLAKHRVTVVASLPCYEAENVDQQRGKGVFERSLIGLRQLNQLGYGKNDEQLILNLIFNPQGPQLPPPQAQLEEAYRKELKQRYGIEFTRLFTIANMPIQRFATQLTMSGQRESYQQLLEGAHNPDNLKTVMCRSLISVNWQGQLFDCDFNQQLSLHLKGPVQHLRDLLDVEIQWPGQPITVGPHCFGCTAGNGSSCGGALQSEGEVG

SEQ ID NO: 2337 - protein, 66 aa, Glycine max
RQGTRGKANAESKVTTPSRKPNDFPSCIQSVPPSSVPITIHAKPGAKSASITDISRQAVGVQIDAP

SEQ ID NO: 2338 - protein, 422 aa, Synechocystis sp. WH 8501
MRNLSLNDYKKYENFDFRYPGSIQPHGVLLVIDIKTFTIIQVSENTKRFLGVKPKTLLGKPLTYLMYLKQIKNIKNILENNNHFVDIIKLKKKKYDTQFKGIFHRVQDSIIGELETFKLNDNNKNIDYYKLFQDAIINTGKTNDLKKLSAKITEEIRKITKFDRVLIYRFENDDSGVVIAENKREDIESYLGLHYPYYDIPNPARQFFSKKLLRMIPNIHDEPIPILPRKHPLKKKKLDLQNAFLRSIAPCHIEYLKNMGVTASFNISLLKENKLWGLIACHHYSPKYVIYEIRKICELLGEIFSLKLMYEEEKSFRQYRQTIKEIKKRIKEELSKNKNKHDFIDNIIQKNGDSFLKLISARGIAICLDNKIYVKGNTPKKKQIKALINDFLLPKKKDVFLQIFSQSHILFPEKLKKLLQEF

SEQ ID NO: 2339 - protein, 477 aa, Listeria monocytogenes
MAKEYDVVILGGGTGGYVAAIQAAKNGQKVAVVEKGKVGGTCLHRGCIPTKALLRSAEVLQTVKKASEFGISVEGTAGINFLQAQERKQAIVDQLEKGIHQLFKQGKIDLFVGTGTILGPSIFSPTAGTISVEFEDGSENEMLIPKNLIIATGSKPRTLSGLTIDEEHVLSSDGALNLETLPKSIIIVGGGVIGMEWASMMHDFGVEVTVLEYADRILPTEDKEVAKELARLYKKKKLNMHTSAEVQAASYKKTDTGVEIKAIIKGEEQTFTADKILVSVGRSANTENIGLQNTDIATENGFIQVNDFYQTKESHIYAIGDCIPTIQLAHVAMEEGTIAANHIAGKAAEKLDYDLVPPLYLYFTSTEIASVGITEEQAKERGHEVKKGKFFFRGIGKALVYGESDGFIKIIADKKTDDILGVSMIGPHVTDMISEAALAQVLNATPWEVGNTIHPHPTLSESFREAALAVDGNAIHG

SEQ ID NO: 2340 - protein, 417 aa, Deinococcus radiodurans R1
MADIKVPVFSESVSEGTLLTWHKKPGEAVKRGELLAEIETDKVVLEVTAQQDGVLQSIAKNEGDTVLSEEVLGTMGEGDAAAPAPAAQDQASGPVASETTAGGTAQQPDSTGTQPAAQSGERREDLSPAVRKIVEEKGLDVSQVPATGPKNNITKADAMGASAPAPAAQPAPQAAKSAVVLPSGPRPEERVPMTRIRARIAERLKEVQNTAALLTTFNEVNMQPTMELRKKYQDQFVKKHGVKLGFMSLFVRAATEALKAFPMVNASVDGKDVIYHGYYDIGIAVASERGLVVPILRDTDNMSLADIEKQIAEFATRARAGKLTMEDMSGGTFSITNGGTFGSMMSTPIINAPQSAILGMHNIIERPIAQNGQVVIAPMMYLAVSYDHRLIDGKEAVQFLVMIKNLLEDPARMLLDL

SEQ ID NO: 2341 - protein, 465 aa, Oryza sativa
  unsure (1)..(465): unsure at all Xaa locations
CNTVCYYSGRSPAGDENGTPMDKWNGYVNSDDRALLKVIKYSSPNSAGAECIDPDCSWVEQWVHRAGPRKEIYYEPEEVKAAIVTCGGLCPGLNDVIRQIVFTLETYGVKNIVGIPFGYRGFFEKGLKEMPLSRHLVENINLAGGSFLGVSRGGAKTSEIVDSIQARRIDMLFVLGGNGTHAGANAIHEECRKRKLKVSVVAVPKTIDNDILLMDKTFGFDTAVEEAQRAINSAYIEARSAYHGIGLVKLMGRSSGFIAMHASLSSGQVDVCLIPEVCKXLHCIMFETTNSLMYDLPIKXTNXMKVPFTLDGEYGVLRHLEHLLKTKGFCVVCVAEAAGQRSLQKSGATDASGNVILSDIGVHMQQKIKMHFKDIGVPADVKYIDPTYMVRACRANASDAILCTVLGQNAVHGAFAGFSGITSCICNTHYVYLPITEVITVPKRVNPNSRMWHRCLTSTGQPDFH

SEQ ID NO: 2342 - protein, 1130 aa, Solanum tuberosum
MASGSRTKHSHHSSSQAQSSGTSNVNYKDSISKAIAQYTADARLHAVFEQSGESGKFFDYSQSVKTTTQSVPERQITAYLTKIQRGGHIQPFGCMIAVDEASFRVIAYSENACEMLSLTPQSVPSLEKCEILTIGTDVRTLFTPSSSVLLERAFGAREITLLNPIWIHSKNSGKPFYAILHRVDVGIVIDLEPARTEDPALSIAGAVQSQKLAVRAISHLQSLPGGDIKLLCDTVVESVRELTGYDRVMVYKFHEDEHGEVVAESKRSDLEPYIGLHYPATDIPQASRFLFKQNRVRMIVDCHATPVRVTQDESLMQPLCLVGSTLRAPHGCHAQYMANMGSIASLTLAVIINGNDEEAVGGGRNSMRLWGLVVGHHTSVRSIPFPLRYACEFLMQAFGLQLNMELQLASQLSEKHVLRTQTLLCDMLLRDSPPGIVTQSPSIMDLVKCDGAALYYQGKYYPLGVTPTEAQIKDIVEWLLAYHGDSTGLSTDSLPDAGYPGAASLGDAVCGMAVAYITSKDFLFWFRSHTAKEIKWGGAKHHPEDKDDGQRMHPRSSFKAFLEVVKSRSSPWENAEMDAIHSLQLILRDSFKDAEASNSKAIVHAHLGEMELQGIDELSSVAREMVRLIETATAPIFAVDVEGRINGWNAKVAELTGVSVEEAMGKSLVHDLVYKESQETAEKLLYNALRGEEDKNVEIKLRTFGAEQLEKAVFVVVNACASKDYTNNIVGVCFVGQDVTGEKVVMDKFINIQGDYKAIVHSPNPLIPPIFASDENTCCSEWNTAMEKLTGWSRGEIVGKMLVGEIFGSCCRLKGPDAMTKFMIVLHNAIGGQDTDKFPFSFFDRNGKYVQALLTANKRVNMEGDTIGAFCFIQIASPELQQALRVQRQQEKKCYSQMKELAYICQEIKSPLNGIRFTNSLLEATNLTENQKQYLETSAACERQMSKIIRDIDLENIEDGSLTLEKEDFFLGSVIDAVVSQVMLLLREKGVQLIRDIPEEIKTLTVHGDQVRIQQVLADFLLNMVRYAPSPDGWVEIQLRPSMMPISDGVTVVHIELRIICPGEGLPPELVQDMFHSSRWVTQEGLGLSMCRKMLKLMNGEIQYIRESERCYFLIILDLPMTRKGPKSVG

SEQ ID NO: 2343 - protein, 416 aa, Listeria monocytogenes
MAVDKITMPKLGESVTEGTISSWLVKPGDTVEKYDAIAEVLTDKVTAEIPSSFSGTIKEILAEEDETLEVGEVICTIETEEAGSSEPVAEAEQTEPKTPEKQETKQVKLAEAPASGRFSPAVLRIAGENNIDLSTVEGTGKGGRITRKDLLQVIENGPVAPKREEVKSAPQEKEATPNPVRSAAGDREIPINGVRKAIAKHMSVSKQEIPHAWMMVEVDATGLVRYRNTVKDSFKKEEGYSLTYFAFFIKAVAQALKEFPQLNSTWAGDKIIEHANINISIAIAAGDLLYVPVIKNADEKSIKGIAREISELAGKARNGKLSQADMEGGTFTVNSTGSFGSVQSMGIINHPQAAILQVESIVKRPVIIDDMIAVRDMVNLCLSIDHRILDGLLAGKFLQAIKANVEKISKENTALY

SEQ ID NO: 2344 - protein, 354 aa, Stylosanthes humilis
MASSKAFGWAAKDASGHLSPFHFTRRQNEADDVTLKILYCGVCHSDLHTVKNDWGFTTYPVVPGHEIAGIVTKVGSNVTKFKEGDRVGVGVIVDSCQECECCQQDLESYCPKPVFTYNSPYKGTRTQGGYSDFVVVHQRFVLQFPDNLPLDAGAPLLCAGITVYSPMKYYGMTEPGKHLGVAGLGGLGHVAIKFGKAFGLKVTVISSSPNKESEAIDVLGADSFLLSSDPEKMKAATGTMDYIIDTISAVHSLVSLLGLLKLNGKLVTVGLPSKPLQLPIFPLVAGRKLIGGSNFGGLKETQEMLDFCGKHNIAANIELIKMDEINTAIERLSKADVKYRFVIDVANSLSSSNM

SEQ ID NO: 2345 - protein, 662 aa, Chromobacterium violaceum ATCC 12472
MCGIAGALLDRHAHDGDVAEARRMILRQTHRGPDGLAARRVGPALLASSRLAIVDVANGSQPFSDESRAIHAVFNGEIYNHLELRENLSRRGHSLSGGSDGEVIVHLYEEYGTDCFQWLDGQFAIAIFDSRDDSLHLARDRMGICPLHWARLDGALYFSSEIKGLLAVAGMPRRAEPRAMLQLAYFGAVCAPLTPFGGIHQLPAAHRLSFRAGRLEIGRYWSLDFPLAGEHARLSEAQAAEGLAARLERAVASHAQGEFEPTCFLSGGIDSAVIAALLQRRSQASIAAFCAASEHGRMDEGGAAARTAEWLGVDLKRVRIDEAGIADAFPRLIWHGETPVISTEASALMRLAGEAGKRSKIVLTGEGADEAFAGYLAFRQYRQLGALTGRGLSPLRTMVRPWLRGHYGSECLLPGEDRLGVLAEHFGCVPAQAYEWEFYREALTPLFSPELRAMAAAGGCWDGFEFDRGAVRGRHWLDRSLYVSYQVMLPNYLLGAHGDRIYAAHSVEGRYPFLDRALVEYAAALDPALKLRRGREKHILRVAAARWLPDEVAWRPKTRFVMPFGTPFVGPRAAPLYAELLSPGKLAEYGYFDPERVRSLFRALASPPSAGGKARRYLERLALGLGATFVVSAQLWHHLHLADGGSAVSGEAARRSAPATIA

SEQ ID NO: 2346 - protein, 308 aa, Zea mays
MCIYAADCSEIGLVQVRGYDKMRTLKRFYIKRVQDLHKEVQVFEEKDLMKSLSKSTCVPEVLSTCADQSYLGILLNCCLCCSLASILHTPLNETSARFFAASVVVALEELHQKSIIYRGVSADILMLDRSGHLQLVDFRFAKKLEGQRTYTICGIADSLAPEIVLGRGHGFPADWWALGVLIYFMLQSDMPFGSWRESELEPITKIAKGHLVMPVSFSAEVVDLITKLLVVDENARLGTSGAEAVKKHPWFDGTDWERIASGTCAVPEEITERINYCIETLNEDLSASPSVPIEDPDDLTAPEWIQDW

SEQ ID NO: 2347 - protein, 399 aa, Triticum aestivum
  unsure (1)..(399): unsure at all Xaa locations
PFYLLLSLYSSALPLSEGRRGDETKAEFPRSLARSPQIPRPLCAALHDEENAPMYKESDCEFLTEQVTCMRNGRRSDEYQKWRWQPDACDLPRFDAKLLLEKLRNKRMMFVGDSLNRNQWEAMVCPVQSVAPWDKKKLVKNGSLNVFRLHEYNATIEFYWAPFLVESNSDDPDIRSITDRMITPTSIAKHAANGIGVDYLIFNTYIWWRNTPKMKIVPDGSSTRKPVKYDELDRVVAYRQILETWSGWVEENVDPKRTMVLFMSVSPVHMQSEGWGSPDNIKCFSETQPVLNYTKTLDVGTDWDLFTESHEVTKAMKKVPVXFMNIXQCSETRKDAXHTSVHTLRQGKLLTKEQQANPRKFAACIHWCLPGLPDTWNEFIYGHIVSSPPQRQIENQSAR

SEQ ID NO: 2348 - protein, 238 aa, Ceratopteris richardii
MVRRKIKIKRIENATTRQVTFSKRRGGLLKKAHDLSVLCDAEVAVIIFSSKGKLFQFANPSMETVLGRYVKASRDPEAGDNGSSTDNVEADRLTVFTEKLKMLQSNVIGDDLERLSLRDLIHLEQQVHESLGHIRAKKDELILEQIDEFKQKMADTRRTTNANTSMLDRLVDFCSSGITGSQNIVESEPGYVVGVPRTDTLRAGWIATSDQSNDGPEYVPCAKRFRITEDLNESPASE

SEQ ID NO: 2349 - protein, 308 aa, Candida albicans SC5314
MSSISNVYHDYSSFSNATTFSQVYQNFNQLDNLNVFEKLWGSYYYYMANDLFATGLLFFLTHEIFYFGRCLPWAIIDRIPYFRKWKIQDEKIPSDKEQWECLKSVLTSHFLVEAFPIWFFHPLCQKIGISYQVPFPKITDMLIQWAVFFVLEDTWHYWFHRGLHYGVFYKYIHKQHHRYAAPFGLAAEYAHPVEVALLGLGTVGIPIVWCLITGNLHLFTVSIWIILRLFQAVDAHSGYEFPWSLHNFLPFWAGADHHDEHHHYFIGGYSSSFRWWDFILDTEAGPKAKKGREDKVKQNVEKLQKKNL

SEQ ID NO: 2350 - protein, 449 aa, Streptomyces globisporus
MRIDPPGPPLRALPGLLRKLAVDRLGMMRDAAGLGDAVRVSMGPKKLYIFNRPDYAKHVLADNSDNYHKGIGLVQSRRVLGDGLLTSDGETWREQRRIVQPAFKPGRINQQAAAVAEEAAKLVALLRGHEGGGPVDVLQEVTGLTLGVLGRTLLDSNLTAHESLAHSFEEVQDQAMLEMVSQGTVPAWLPLPPQARFRRARRELYRVADLLVADRRSRMADGGPGDDALSRIIVAADRRRDDPARARNRLREELVTLLLAGHETTASTLGWTLHLLERHPEVRDRVRAEARAALGDGVPGPEDLHRLTYTTMVVQEAMRLFPPVWILPRVAQQRDVVGGYTVSAGSDVLVCPYIMHRHPGLWEDPERFDPERFEPRQTADRPRYAYIPFGAGPRFCVGSNLGMMEAVFVTALVTRDLDLRTVAGHRAVAEPMLSLRMRGGLPMTVSTAR

SEQ ID NO: 2351 - protein, 184 aa, Xanthomonas campestris pv. campestris str. ATCC 33913
MSTLTISQALAQADLLVDRPAIDAAVATIADAIARDYAGEVPVYLTIMHGALPFSGQLALELGARGQDLQFDYLHATRYRGETTGGELVWKHRPATALFGRRVILVDDILDEGYTLQGVRQWCLEQGATDVRVAVLTVKRHDRCVPGVTADYVGVEVADRYVFGFGMDVNEQLRGIPAIYAMKQ

SEQ ID NO: 2352 - protein, 429 aa, Corynebacterium glutamicum ATCC 13032
MSQNKSKSEKLQSFAAPKGVPDYAPPKSAAFLAVRDAFVNQAHKAGFEHIELPIFEDTGLFARGVGESTDVVSKEMYTFADRGERSVTLRPEGTAGVMRAVIEHSLDRGQLPVKLNYAGPFFRYERPQAGRYRQLQQVGVEAIGVDDPALDAEIIALADRSYRSLGLQDFRLELTSLGDRHCRPEYRQKLQDFLFALPLDEETRKRAEINPLRVLDDKRPEVQEMTADAPLMLDHLDAECREHFETVTGLLDDMGVPYVINPRMVRGLDYYTKTCFEFVHDGLGAQSGIGGGGRYDGLMAQLGGQDLSGIGYGLGVDRTMLALEAEGVTVGAERRVDVYGVPLGKDAKKALAGIVNTLRAAGISTDMSYGDRGLKGAMKGADRSNALYTLVLGEQELENNTIAVKDMRAHEQHDVALDEVVAFLQGKLI

SEQ ID NO: 2353 - protein, 209 aa, Triticum aestivum
MGFPLVCYCVAIPKPVIAFCKLVAAVRDAFLLLLSLVGLCRSPRRSVDDAPLPEEVKERLPAVEFSLLARPAKQGCHDGDDDVAAAAATCIVCLERLRAADEVRRLGNCAHAFHRGCIDGWIDLGRTTCPLCRSHLLPRARRDGPARQPLPRVWVTTNRATRSLAPHPRLSLSQRGGGRHRDSRSRPAARIFIVGLHRLKIGILFSNLV

SEQ ID NO: 2354 - protein, 131 aa, Triticum aestivum
MAFAVSDELLGTFVPIAVYWLYSGLYIVMDRMEIDDYRLHPKGEEEVKNVVSKWTVVKGVLVQQGFQIAVSLLLFTIIGDDSGTVRKQPSALVIALQFIIAMVVMDTWQYFMHRYMHINKVLVKHIHSKHH

SEQ ID NO: 2355 - protein, 685 aa, Saccharomyces cerevisiae
MTDITPVQNDVDVNGNNVNDDVSSNLKRPIDQGDPSNGLAEEENPANNQLHLKKARLDGDALTSSPAGLAENGIEGATLAANGENGYNATGSREDEQQGLKKEEGGQGTKQEDLDENSKQELPMEVPKEPAPAPPPEPDMNNLPQNPIPKHQQKHALLAIKAVKRLKDARPFLQPVDPVKLDIPFYFNYIKRPMDLSTIERKLNVGAYEVPEQITEDFNLMVNNSIKFNGPNAGISQMARNIQASFEKHMLNMPAKDAPPVIAKGRRSSAQEDAPIVIRRAQTHNGRPKRTIHPPKSKDIYPYESKKPKSKRLQQAMKFCQSVLKELMAKKHASYNYPFLEPVDPVSMNLPTYFDYVKEPMDLGTIAKKLNDWQYQTMEDFERDVRLVFKNCYTFNPDGTIVNMMGHRLEEVFNSKWADRPNLDDYDSDEDSRTQGDYDDYESEYSESDIDETIITNPAIQYLEEQLARMKVELQQLKKQELEKIRKERRLARGSKKRGKRSKGRSGSKNASSKGRRDKKNKLKTVVTYDMKRIITERINDLPTSKLERAIDIIKKSMPNISEDDEVELDLDTLDNHTILTLYNTFFRQYESSSGASNGLDGTSGVTRDASSLSPTSAGSRKRRSKALSQEEQSRQIEKIKNKLAILDSASPLSQNGSPGQIQSAAHNGFSSSSDDDVSSESEEE

SEQ ID NO: 2356 - protein, 507 aa, Saccharomyces cerevisiae
MTMTHQQDLKGVFTAKDLDFKPAGKITKKDLNTGVTKAEYAVRGAIPTRADELKEELKKNPEVLPFDDIINANIGNPQQLDQKPLTFTRQVLAILEYPEILRVGHNELASLNLFSRDALERAERLLNDIGGSIGAYSHSQGVPGIRQTVADFITRRDGGEPATPEDIYLTTGASSAATSLLSLLCKDSQTGLLIPIPQYPLYTASASLFNAQVLPYYLDEESNWSTNSDEIEKVVQDALKKQIRPSVLIVINPGNPTGAVLSEETIARICLIAAKYGITIISDEVYQENIFNDVKFHSMKKVLRKLQHLYPGKFDNVQLASLHSISKGFMDECGQRGGYMEIIGFSQEIRDALFKLMSISICSVVTGQAVVDLMVKPPQPGDESYEQDHDERLKIFHEMRTRANLLYETFKELEGIECQEPQGAMYLFPRLVLPKKALCESERLGIEPDEFYCTSLLESTGICTVPGSGFGQRPGTYHVRTTFLAPGTKWIQDWKEFHQDFFSKYRN

SEQ ID NO: 2357 - protein, 563 aa, Glycine max
MNLSLCNSSNLNTSRKPLMALPHSISALATTLTLSSPTTKPQKVNPFPFFSNQKTRFLTKQTRPRSRRSLSLTPARVAAPPSTVEADQSYPETENNETEEEFNDESSYSKFTWRDHWYPVSLIEDLNPLLPTPFQLLGREIVLWYDKSISQWVAFDDKCPHRLAPLSEGRIDEDGKLQCSYHGWSFDGCGSCVKIPQAASEGPEARAIGSPKACATRFPTMVSQGLLFVWPDENGWEKAKASKPPMLPDDFDKPEFATVNIQRDLFYGYDTLMENVSDPSHIEFAHHKVTGRRDRAKPLPFKMDSRGSWGFSGANEGNPQISAKFVAPCYMMNKIQIDTKLPVVGDQKWVVWICSFNVPMAPGKTRSIVCSARNFFQFSVPGPAWWQVVPRWYEHWTSNKVYDGDMIVLQGQEKIFLSETKEGGDINKQYTNITFTPTQADRFVLAFRNWLRRHGNGQPEWFGNSSDQPLPSTVLSKRQMLDRFEQHTLKCSSCKAAYEGFQTWQKVLIGTTVVFCATSGIPSDVQLRVLLAGLAIVSAAITFALNQLQKNFEFVDYVHAEID

SEQ ID NO: 2358 - protein, 476 aa, Wigglesworthia glossinidia endosymbiont of Glossina brevipalpis
MKENKINTEVLVIGSGPGGYSAAFRCADLGLKTVLVERFSSLGGVCLNVGCIPSKSLLHIANNLNSINKLKKIGIKFNEREIDMNQIRKWKCDVVLKLTNGLNMMSKARNVKIIHGYGEFIDPYTVNVKSLKENTKIKFEHAIIAVGSSPIKNHFMLQPDEKIWDSTDALKIKFIPKKLLIVGGGVIGLEMATVYNSFGSEVYIAEMSNQLIPAVDTDIINIFYKSIKNNFNIMLNTELKSVYLEDNNIYAELVNNDKKIEKICCNAVLFSTGRKSNGDLIKAKEIGIKLNNLNFIEVNNQMRTNIPHIYAIGDVTGHPMLAHKASYQSHIAAEVISGENHFFDPRVIPSVAYTNPEISWVGITEKEAINLNIPYETALFPWNALGRAIASDHHEGGMTKLIFNKENKKIIGGSIVGYNSSELLGEISLAIEMGCDVDDISLTIHAHPTLYESIGRASEIFSGTITDFLNKKSKNK

SEQ ID NO: 2359 - protein, 380 aa, Lotus corniculatus
MSSTAGQVIKCRAAVSWEAGKPLVIEEVEVAPPQAGEVRLKILYTSLCHTDVYFWEAKGQTPLFPRIFGHEAGGIVESVGEGVTHLKPGDHALPVFTGECGECPHCKSEESNMCDLLRINTDRGVMISDNQSRFSIKGKPIYHFVGTSTFSEYTVLHAGCVAKINPAAPLDKVCILSCGICTGFGATVNVAKPKPGSSVAIFGLGAVGLAAAEGARVSGASRIIGVDLVSSRFEGAKKFGVNEFVNPKDHDKPVQEVIAEMTNGGVDRAVECTGSIQAMISAFECVHDGWGVAVLVGVPNKDDAFKTHPVNFLNERTLKGTFYGNYKPRTDLPNVVEMYMRGELELEKFITHTVSFSEINKAFDYMLKGESIRCIIRMEE

SEQ ID NO: 2360 - protein, 496 aa, Wigglesworthia glossinidia endosymbiont of Glossina brevipalpis
MSEIIKVPDIGPDEVEVTEILVKIGDSVDIEQSLITIEGDKASMQVPSPKPGIIKEIMIKIGDKIKTNQSIILIKNFEKEICISSKKNKDSKYDKNYKEIYSADLGIINTKIIKIFFSINDYLEVNNPILIVKDFEKTKTILSPLNGTVSFINVKNKDFIKSNKLVFSLKNISSKIKSNKVILEKKLNIENKIINENIYSSPFVRRIASKFNIDLSKIDGSGRKGRILPEDIKNSINIDCMENKFIDNNSKLKNVNSFEDSKEILYGESELIEIGKIKKISGSNLYKNWISIPHVTQFEQVDISELESFRKNQNNTLKYKVKITILSFIIKSVFFALKEYPLFNSSLSKDKNKLILKKYFNIGIAVSTDYGLVVPVIFDVDKKGIIEISHELFNISNKARNKKLISRDMTGGCFTISNLGGIGGREFTPIINYPEVAILGVSQASIQPMWNGSSFSPKLMLPLSLSYDHRVIDGSEGAKFIIFLKKIISDIRLLTL

SEQ ID NO: 2361 - protein, 276 aa, Medicago truncatula
MANDNSARIETHEVVLDTNKDSSDTCKGSGSFVSVPFLQKLIAEMVGTYFLIFAGCASIVVNKDNDNVVTLPGIAIVWGLTLLVLIYSLGHISGAHFNPAVTIAFATTRRFPLLQVPAYISAQLLGATLASGTLKLIFSGAHDHFSGTLPSGSNLQAFVLEFITTFYLMFTISGVATDTRAIGELAGIAIGSTLLLNVMIAGPVTGASMNPVRTLGPAFVHNEYRGIWIYLLSPILGAIAGAWVYNTVRYTNKPLREITQSASFLKEAGRGGHQIV

SEQ ID NO: 2362 - protein, 140 aa, Nicotiana tabacum
KEEFHKETCRKIKALHQYDCLRANKSTSAWGLEARVPFLDKEFINVAMSIDPEWKLIKPEQRRIEKWALRRAFDDEEHPYLPKHILYRQKEQFSDGVGYSWIDGLKAHAEQHVTNRMMLNASHIFPHNTPITKEAYYYSM

SEQ ID NO: 2363 - protein, 949 aa, Shewanella oneidensis MR-1
MRLTRKTDPVVEPKVPALGLNRRQFLKSAGLATGGIAAASMLGTGMMRKAEAKDIPHNAPTEVKRTICSHCSVGCGVYAEVQNGVWTGQEPAFDHPFNQGGHCAKGAALREHGHGEKRLKYPMKLEGGKWKKISWDQAINEVGDKMMAIRQESGPDSIYFMGSAKFSNEQAYLYRKFAALWGTNNVDHSARICHSTTVAGVANTWGYGAQTNSVNDIRHSKCILFVGSNPSEAHPVAMQHILVAKERGAKIIVVDPRFTRTAAKSDEYVHIRPGTDIPFIYGLLWHIFENGWEDKDFIKRRVYGMERIREEVKKYTPEEVENVVGAPKAQMYRVAKMMAETKPGSIVWCMGGTQHHVGNANTRSYCILQLALGNMGVTGGGTNIFRGHDNVQGASDFGLSFDDLPGYFGLTSGSWAHWANVWDLDPKWVTSRFDQGEYLGQSPQTSPGIPCSRWHDGVLEDKTKIAQKDNIRLAFFWGQSVNTETRGREVRQALDKMDTVVVVDPFPTMAGVMHQRKDGVYLLPAATQFETYGSVSATNRSIQWRSKVIEPLFESLPDHVIMCKLAKKVGIDKELFKHIKVNGEEPLIEDIVREYNRGMWTIGYTGQSPERLKMHQENWGTFNVDSLEAPGGPAKGETYGLPWPCWGTPEMKHPGSHILYNETKHVKDGGGSFRARFGVERNGVNLLSEEAYSAGSEIQDGYPEFTADMLKQLGWWDDLTEDEKKYAEGKNWKTDISGGIQRVVIKHGCIPYGNGKARAVVWNFPDDIPLHREPLYTPRRDLVAKYPTYEDRMVARLPTLYKSIQDKDFAKDFPLALTSGRLVEYEGGGEETRSNPWLAELQQEMFIEISPADAADRGIRDGDNVFVHSPEGAKITVKAMVTPRVVPGECFMPYHFAGVFEGESLAKNYPEGTVPYVIGESANTILTYGYDVVTQMQETKSSLCQISKA

SEQ ID NO: 2364 - protein, 242 aa, Zea mays
  unsure (1)..(242): unsure at all Xaa locations
MASLFKDPSKLSAYRDRXFKGTQEEYEATLHASTTLYIGNMSFYTTEEQAYELFSRAGEIKKIIMGLDKNSKTPCGFCFVLYYSREDAEDAVKYISGTMLDDRPIRVIFDWGFEEGRQWGRGRSGGQVRDEYRTDYDPGRGGYGKMVLRELEAQRELVDYGGSFQPNAPPPYERSERKRGHGDSHRNDRGDYQRKRYRNDDRSAPEESKRAPDSDPAEKNPRFREKGDSDEEEDDYDGKRRR

SEQ ID NO: 2365 - protein, 378 aa, Fagus sylvatica
MCGGAIISDFIAPTGSRRLTADYLWGDRKKPISGKRFSKPVVDLDDEFELDFQGFKDEEESDIDEEEVLVQDVKPFTFSAPPSSGSKPVKSVEFNGQAEKSAKRKRKNQYRGIRQRPWGKWAAEIRDPRKGVRVWLGTFNTAEKAARAYDAEARRIRGKKAKVNFPDETPRASPKRSVKANLQKPLAKANLNSVQPNLNQNFNFMNNSDQDYTMGLMEEKPFTNQYGYMDSIPANADVGLKPFASNNTTPYFNSDQGSNSFDCSDYGWGEQGSKTPEISSVLSATLEGDESQFVEDAMPTKKLKSDSGNAVFIENNTAKTLSEELSAFESQMNFQMPFLEGSWESNMEALFSGDTTQDGNSMDLWSFDDLPVMAGGVL

SEQ ID NO: 2366 - protein, 464 aa, Pseudomonas fluorescens
MAVYNYDVVVLGSGPAGEGAAMNAAKAGRKVAMVDSRRQVGGNCTHLGTIPSKALRHSVRQIMQFNTNPMFRAIGEPRWFSFPDVLKSAEKVISKQVASRTGYYARNRVDLFFGTGSFADEQTVEVVCANGVVEKLVAKHIIIATGSRPYRPADIDFHHPRIYDSDTILSLGHTPRKLIIYGAGVIGCEYASIFSGLGVLVELVDNRDQLLSFLDSEISQALSYHFSNNNITVRHNEEYDRVEGLDNGVILHLKSGKKIKADALLWCNGRTGNTDKLGMENIGVKVNSRGQIEVDENYRTCVTNIYGAGDVIGWPSLASAAHDQGRSAAGSIVDNGSWRYVNDVPTGIYTIPEISSIGKNEHELTKAKVPYEVGKAFFKSMARAQIAGEPQGMLKILFHRETLEVLGVHCFGYQASEIVHIGQAIMNQPGEQNTLKYFVNTTFNYPTMAEAYRVAAYDGLNRLF

SEQ ID NO: 2367 - protein, 514 aa, Lycopersicon esculentum
MASAMTCSAAELFPHLGSSANATAAAEFICSRFSAVSEYLTNTTYAVDTTYLLFSAYLVFAMQLGFAMLCAGSVRAKNTMNIMLTNVLDAAAGGFSYYLFGFAFAFGAPSNGFIGKHFFGLKEFPSQAFDYSYFLYQWAFAIAAAGITSGSIAERTQFVAYLIYSSFLTGFVYPIVSHWFWSGDGWASASKTDGNLLLRFGVIDFAGSGVVHMVGGIAGLWGAFIEGPRIGRFDRSGRSVALRGHSASLVVLGTFLLWFGWYGFNPGSFLTILKSYDHTIRGTYYGQWSAIGRTAVTTTLAGCTAALTTLFCKRLLVAHWNVVDVCNGLLGGFAAITSGCAVVEPWAAIVCGFIAAWVLIGFNALAAKLKYDDPLEAAQLHGGCGSWGIIFTGLFAKKEYVNEVYPGFPNRPYGLFMGGGGKLLGAQVIQVVVIIGWVSVTMGPLFYLLHKFKLLRISRDDETAGMDLTRHGGFAYIYHDEDEGSSMPGFKMTRVEPTNTSTPDHQNRSVNVVV

SEQ ID NO: 2368 - protein, 165 aa, Triticum aestivum
MGFPVGYTEVFLPKLFVQTLSILSFFRTVVFYLFRFLGLSGFLETDQTWPDYTSYPTRIPELRSPFSALLIREILPVIKFEDVTSSGEELPGNCAVCLYEFEGEEEIRRLRNCRHIFHRSCLDRWMDHDQKTCPLCRTPFVPDEMQEEFNQRLWAASGVHDFHIE

SEQ ID NO: 2369 - protein, 184 aa, Thermococcus ferrithioreducens
MRLAFITSNPGKVEEAKKYFEPLGVEVYQLRVEYPEIQADSLEEVALFGLEWLARKIDGPFFLDDSGLFIDALGGFPGVYSAYVYRTLGIGGILKLMDGLEDRNAHFRSVIAYWDGEAHIFTGRVDGEITTSPWGSGGFGFDPIFRPRGFNITFAEMTTEQKNVISHRGRALKAFADWLKENLK

SEQ ID NO: 2370 - protein, 779 aa, Mycobacterium tuberculosis CDC1551
MYVEAVRWQRSAASRDVLADYDEQAVTVAPRKREAAGVRAVMVSLQRGMQQMGALRTAAALARLNQRNGFDCPGCAWPEEPGGRKLAEFCENGAKAVAEEATKRTVTAEFFARHSVAELSAKPEYWLSQQGRLAHPMVLRPGDDHYRPISWDAAYQLIAEQLNGLDSPDRAVFYTSGRTSNEAAFCYQLLVRSFGTNNLPDCSNMCHESSGAALTDSIGIGKGSVTIGDVEHADLIVIAGQNPGTNHPRMLSVLGKAKANGAKIIAVNPLPEAGLIRFKDPQKVNGVVGHGIPIADEFVQIRLGGDMALFAGLGRLLLEAEERVPGSVVDRSFVDNHCAGFDGYRRRTLQVGLDTVMDATGIELAQLQRVAAMLMASQRTVICWAMGLTQHAHAVATIGEVTNVLLLRGMIGKPGAGVCPVRGHSNVQGDRTMGIWEKMPEQFLAALDREFGITSPRAHGFDTVAAIRAMRDGRVSVFMGMGGNFASATPDTAVTEAALRRCALTVQVSTKLNRSHLVHGATALILPTLGRTDRDTRNGRKQLVSVEDSMSMVHLSRGSLHPPSDQVRSEVQIICQLARALFGPGHPVPWERFADDYDTIRDAIAAVVPGCDDYNHKVRVPDGFQLPHPPRDAREFRTSTGKANFAVNPLQWVPVPPGRLVLQTLRSHDQYNTTIYGLDDRYRGVKGGRRVVFINPADIETFGLTAGDRVDLVSEWTDGQGGLQERRAKDFLVVAYSTPVGNAAAYYPETNPLVPLDHTAAQSNTPVSKAIIVRLEPTA

SEQ ID NO: 2371 - protein, 458 aa, Oryza sativa
MATGQCMQALPMEVWNSWLLEKAVLPALDVAPPVKIGGPRRTSVLRNPNMEKLQKGYLFPEISIKREEHLKKYPDAKVISLGIGDTTEPIPSIVTSAMAEDVPFPFCRYALALSTPEGYQGYGPEQGHKNLRKEIADKVYPDMGIKESEVFISDGAQCDIARLQTLFGPNVTIAVQDPTFPGYVDNGVIMGQTGKADDGGRYAGIEYMRCAPENAFFPDLSRVRRTDVIFFCSPNNPTGHAASREQLRQLVELARRNGSIIVFDSAYSSYISSSSSSSTPRSIYEIPGAREVAIEVSSFSKFAGFTGVRLGWAVVPDELLYSDGVPVARDFDRVVCTCFNGASGIAQAGGVACLSTEEGRGAVARVVGVYRENARVLVETFRSLGKEVHGGGDAPYVWVRFPGRRSWDVFAEILEKTHVITVPGSGFGPGGEGFIRVSAFNSRDKVLEACQRLKSFLA

SEQ ID NO: 2372 - protein, 92 aa, Triticum aestivum
  unsure (1)..(92): unsure at all Xaa locations
RALFFKTVKKKKIGSTKKEYYFLSINPPKQIFKFSSPKKLQQXFPKEPPKWDLKDGRVFFQKGKKSHPSKKIPGGRVINQTLGYPRELKRNG

SEQ ID NO: 2373 - protein, 503 aa, Acinetobacter sp. ADP1
MRYIDPNQPGSKVQFKAQYENFIGGQWVPPVKGEYFGNSSPVDGKVFTQIPRSSVEDIELALDAAHKAKADWNKASPTVRSNVLLKIADRLEENLELLAVAETWENGKPIRETLAADIPLAIDHFRYFAGCIRAQEGGISEIDEDTIAYHFHEPLGVVGQIIPWNFPILMAAWKLAPALAAGNCIVLKPAEQTPSSILVLAELIQDLLPPGVLNIVNGYGAEVGRPLATNPRISKIAFTGSTKVGQMIMQYATENIIPVTLELGGKSPNIFFEDILDKEDDYLEKTLEGFAMFALNQGEVCTCPSRALVQESIADKFLEMAVERVKRIKTGHPLDTETMIGAQASKQQFDKILGCIDTGRNEGAQLLTGGDARHDVDGGFYIEPTIFKGNNSMKIFQEEIFGPVLSVTTFKDFDDAMRIANDTIYGLGAGVWSRSAHTSYRAGRAIEAGRVWTNCYHLYPAHAAFGGYKQSGIGRENHRMMLDHYQQTKNLLVSYSTKPMGFF

SEQ ID NO: 2374 - protein, 393 aa, Exiguobacterium sp. 255-15
MLSKRVQQLTPSTTLAITAKAKALREEGQDIIGLGAGEPDFNTPEFIIQAAFAAAEAGDTKYTPSGGTVALKDAIIEKTRRDLWVSYDRSEVMVASGAKHALSTLFQAILDPGDEVIVPAPYWVSYPEQIKLSDGVPVILETTEASRFKVTRDLLEQHITPKTKALVLNSPSNPTGMVYTKEELEMVAEVAIAHNLLVISDEIYEKLLYNGVTHLSIATLPDMRERTVIINGVSKSHAMTGWRIGYAIGPKDIISAMTNLASHSTSNPTSIAQAASVAAYAEGDAPVEAMRVVFEERLEQIYDRLIQIPGLTCLKPEGAFYLFPHALQAAKMCGFSNVDDWCTAVLSEAKVALIPGSGFGAPEYVRLSYATDPKRVLEALDRIEGFITAHTAV

SEQ ID NO: 2375 - protein, 390 aa, Zea mays
MDEFMLVKLAEIRKEVQCPICLGIIRKTRTVMECLHRFCRDCIDKSMRLGNNECPACRTHCASRRSLRDDPNYDALIAALYPDIDKYEEEEFAFSEQERIRNKKIQETIEETFRRQSDAIGKKRSMAKATATAFARKYRRTRGRVRTIPPDIAPTGSSEEESGEGNSKETIREQSSADDHSPDLRQKRCRKRSGPQGSPAGTIGSIDYSFEENDELVGGKEILATSPLQGEMLAWGKNGARSQNRHGSVGSNGRTGRSGRIAKLVDYLHTADEMDKEFQLFLLLLPVDGQTIPNLEKPYLSCRPTLSIKHLAQFVALQLSCEVEELEMYIRMDRHRVSVGSRPSSTGEAKSRPFDDLERLNEEKLVSELHPSFVSSNGDMELRYALRTRE

SEQ ID NO: 2376 - protein, 280 aa, Pleurotus djamor
MERYNTRTASNFPGLVFDCAEEAQSGYKHIDTAYNYHTEKYVGNAVRESGIPREELFITTKLPWHHYARVAESFQESLDALGLGYIDLYLIHWPQPILYDPNDPLPKNPDGTPKTTNYPFTKIWADMERLLDTGKVRAIGVSNFSIKNLEILLESAKVVPAVNQVELHPYLAQPELVDYCKQKGIAITAYTPTGYQTVRDDPVIVELASKYRVSPAQVILAWHMSRGVIVTPKSANAERQRENINVSFLHFPINSFDVLFLASTAATCPGACRSSAYISS

SEQ ID NO: 2377 - protein, 306 aa, Pleurotus djamor
MSAYPPIVLNTGARMPALALGGWAGLTEEERTQAKEWFLTALKSGYRHIDTAQIYYTEKSVGNAIRESGIPREELFITTKLPWNHHSRVAESFQKSLENLGTEYIDLYLVHFPQRVFYDETTDFPRNPDGSIKVVNSPTLNDVWADVETLLDTGKVKAIGVSNYSIKTLEELLKTAKVVPAVNQVELHPFLAQSKLLAYCKEKGIAVTAYTPTGYQTVLTDPTIVELAGKYGVSPAQIVLAWHLSRGVAAAPKSANESRQKENLNLPFLQPEDVAKISALDRGQRIANKADERGQVWGLTLEELGW

SEQ ID NO: 2378 - protein, 658 aa, Pleurotus djamor
MAFNLTSTSLTPSRPAPQAPRRGTEDSFGSSSTLNSSGYSSSFSFTPASPSSSSYAASYSGIGGSPNRHPENNMYGGNQIVRNGVVSVKEDGTFASWMWKAKWLVLTDSELSIHKSEHAPKQTVVNLGDISSIERTDLKPYCLLLETKDKRFYFSLKNDEELYGWQDDVYARSPLMGVSNPTNFVHKVHVGFDPVSGAFTGMPEQWSKLLTKSAITREDYAKDPQAVLDVLEFYTDHQKREMEEMGAKESLPIQAPPPLQPSQSKDRERERERERAEREREREKDLARPGMGAPSKSSPATTQPATQPASGPAGATAGPPPVKPLQPTKKVQIQAEEKPKTTGVAAAAAALEKPKEKEKRISTMTEVQIMEKLRQVVSDEDPKTIYSKIKKVGQGASGHVYVAKTLATGKKVAIKEMDLSHQPRKELIVNEILVMKESQHPNIVNFLESYLVKSNELWVVMEYMEGGALTDIIENNTLEEDQIASICFETCKGLGHLHSQSIIHRDIKSDNVLLDAQGRVKITDFGFCAKLTDQKSKRATMVGTPYWMAPEVVKQKEYGAKVDIWSLGIMAIEMIENEPPYLDEEPLKALYLIATNGTPTLKKPEALSRELKGFLAVCLCVDVSSRATASELLDHEFLKKSCALSGLAPLLRFKTKQQ

SEQ ID NO: 2379 - protein, 451 aa, Deinococcus radiodurans
MTTLPAPTISTTAELRALLRLAGPVVVSQFAANALALIATAVIGRLGERELAAAAYANAAYYLVFIMVVGVMLSVAPRVAQAHGAGDARGVARALGGGLRLALLLSAVMLPLMWALSFVLPNFAPAGVSRDLVAAYLRVYSLGMLPNLAFIALRGTLEGTGKPGAVTGVALTGVVWALLVAPALAFGWGPLPRLGLAGAAGASASAAWIMAALLWPLARRRVAYAGPLGPLGDEVRALFRLGWPIGLTLGAEGGMFSVTTLLMARFGPEVLAAHNVTMQTITAFFMVPLGIASATGVRVGTEAGAGRLAQARRAGLVGLGLSSAVMLTFAVIELAAPRTVFSVFVNVNDPANAGLIAAATGFLSIAALFQLMDGLQVTANGALRGLQDTRVPLLVSLVAYWVVGLGLGSVLSSVAGLGARGLWFGLTAGLTLAGLSLVGRFLYRTRAGRAA

SEQ ID NO: 2380 - protein, 542 aa, Lotus corniculatus
MAARTLSYLLSRSRSLSSSSGAASLLPSLGGKSGGWRNSNNRYSTAAVVEELITPQVSINYTQHLINGKFVDAASGKTFPAYDPRTGDVIAHVAEGDAEDVNRAVAAARKAFDEGPWPRMTAYERSRILLRFADLVEKHNDEIAALETWNNGKPYEQAAKAEVPTFVRLFRYYAGWADKIHGLTVPADGNYHVQTLHEPIGVAGQIIPWNFPLLMFAWKVGPALACGNTIVLKTAEQTPLTALVVAKLLHEAGLPPGVLNIVSGYGPTAGAPLASHMDVDKLAFTGSTDTGKVVLGLAAKSNLKPVTLELGGKSPFIVCEDADVDKAVELAHFALFFNQGQCCCAGSRTFVHERVYDEFLEKSKKRALRRVVGDPFKKGVEQGPQIDTEQFEKILRYIKSGIESNATLECGGDRLGSKGFYVQPTVFSNVQDDMLIAQDEIFGPVQTIFKFKEIDEVIRRANSTRYGLAAGVFTQNLATANTLMRALRAGTVWINCFDVFDAAIPFGGYKMSGIGREKGIYSLHNYLQVKAVVTPLKNPAWL

SEQ ID NO: 2381 - protein, 950 aa, Shewanella oneidensis MR-1
MKLTRKSDVAQVANKPTLGISRRQFMKQAGIATGGIAAASLMGTGMMRRAEAKDVPYDAPIEIKRTICSACAVGCGLYAEVQNGVWTGQEPAFDHPFNAGGHCAKGAALREHGHGEKRLKYPMKLVDGKWKKISWEDAINEVGDQMLNIRKESGPDSVYFMGSAKFSNEGCYAYRKLAAMWGTNNVDHSARICHSTTVAGVANTWGYGAQTNSFNDIQNANAIFLIGANPAEAHPVSMQHILIAKEKNNAKIIVVDPRFSRTAAHSDLHCAIRPGTDIPFIYGMLWHIFENGWEDKTFIQHRVFEMETIRAEVKKFPPKEVANITGVSEEVVYQAAKLMAENRPGTVIWCMGGTQHHVGNANTRAYCILQLALGNMGVSGGGTNIFRGHDNVQAATDLGLLFDNLPGYYGLTTAAWEHWTNVWELDMEWMKSRFDHGTYLGREPMTTPGMPCSRWFDGVLLEKDKLAQKDNIRMAFFWGQSVNTGTRQRDVRDALDKLDTVVVVDPFPTIAGIMHSRKNGVYLLPACTQFEASGAVSNSGRSIQWREQVIQPLFESKNDIEIMYMLAKKVGISEQWAKRWNIAGNMPVVEDISREINRGMWTIGYTGQSPERIKQHTQNWGTFSNKTLEAAGGPCKGETYGLPWPCWGTPEAKHPGTQILYNQDKHVKDGGGNFRARYGVEYNGKNLLAEGTFSKGAEIQDGYPEFSDKLLKQLGWWDDLTAEEKAAAEGKNWKTDLSGGIVRVAIKHGCIPFGNAKARCIVWTFPDQAPVHREPIYTARRDLVAKYPTYDDMQVHRLPTLYKTLQENDLSGKYPLVMTSGRLVEYEGGGEESRCNPWLAELQQEMFIEISPADAADRAIRNGEFVWVEGAEGGRIKVQAMVTPRVAPGVTFMPYHFAGVMHGESLAANYPEGTVPYVIGESCNTALTYGYDPVTQMQETKASLCQIVKA

SEQ ID NO: 2382 - protein, 301 aa, Klebsiella pneumoniae
MKGIVLAGGSGTRLYPITQGVSKQLLPIYDKPMIFYPVSVLMLAGIRDILIISTPDDMPSFQRLLGDGSQFGVNFSYAIQPSPDGLAQAFIIGEKFIGNDACALVLGDNIYFGQSFGKKLEPAAAKTSGATVFGYQVLDPERFGVVEFDENFKALSIEEKPLKPKSNWAVTGLYFYDNNVVEMAKDVKPSARRELEITTLNQMYLERGDLHVELLGRGFAWLDTGTHDSLMDASQFIHTIEKRQGMKVACLEEIGYRNKWLSAEGVAAQAERLKKTEYGAYLTAPAERALMPSSSTTGYIE

SEQ ID NO: 2383 - protein, 379 aa, Ferroplasma acidarmanus
MVSSRVNGINESATVSMSNKAAELKAAGKTIYSFGIGEPDFTTPEEIIDYAFKEAREGKTHYTPSAGIMELREKIAEKMKKKNNIDATASNVLVTPTKFSLNLALYSIIDPGEEVLLPAPYYVSYPDIIKLNQGKMITVPTDENYEFDFQEMKKYISPKTKAFMFNNPVNPTGKVYSEKSLRALADFILENDLYLISDEIYEDLIYKGRMFSPGSIEEMKDKTVTLSGFSKSYAMTGWRIGYMVAPLDIIKAANKVQQQTLTCAPSISQYGAMKALEDEESVAKMRQEFAKRRDLTVSLLKEIDGITLYEPEGAFYAFPGYSTEKADDKLSMELLEKYNVIVTPGSPFGAPGHFRISYATSQDVIREGIGRIEKYFNNL

SEQ ID NO: 2384 - protein, 749 aa, Oryza sativa
MSAAAAAAAAAAIPTSLGRLFHLRPTPNPSRNLSGSSAQPLLRLSYHPRLTLSRRMEAPAAIADSHGGGDLSASAVGAEALGAVAAPDFDVEMKEPSVATILTSFENSFDGFGSMSTPLYQTATFKQLYKNHDMQLRMIKIHLLLQVNLQPSATDNGPYDYTRSGNPTRDVLQRRIDTTKISEVTSAIGPLTKLVWLESPTNPRLQITDIKKIAEIAHYHGALVLVDNSIMSPVLSRPLELGADIVMHSATKFIAGHSDLMAGILAVKGERLLKIEADGNCDVIPVSFVSSLAKEIAFLQNAEGSGLAPFDCWLCLRGIKTMALRVEKQQANAQKIAEFLASHPRVKKVNYAGLPDHPGRSLHYSQAKGAGSVLSFLTGSLALSKHVVETTKYFNVTVSFGSVKSLISLPCFMSHASIPSAVREERGLTDDLVRISVGIEDADDLIADLDHALRSEVRTLMLGLEYKNYAEIHRELTVIPTRINAKFQVKPIDRSACRGDRRRAHRSTPPRRRRRRRGRERKMGKTPVRMKAVVYALSPFQQKVMPGLWKDITTKIHHKVSENWISATLLLAPIVGTYEYASPILFPPLPPPLARMRFRRIWADLGLLGMVSFGGSGWIGLLVAVSVDSLGLRCGDEFLCICSHFVGIIVQISRELMRVNVASGCHLTRETRAPSIQLGPLTCQRIRFSSFNHKTRYNGSLNYQNRCRLGPSAVLKAVLADMAPTWGLDLTWRLRGNSIRKNIKLVGPT

SEQ ID NO: 2385 - protein, 461 aa, Rubrobacter xylanophilus DSM 9941
MVDPATGEEVDSVPVCGEAEVDAAVRGAAGAFPGWSGTPASRRGELLARAAEAVLGARDELAGLLTAEQGKPLREARLEIRRFVHTLEHYAGLAKNIRGGYVPDLDEGAYGLILRRPVGVVGAIVPWNFPTTLLANKLGPALVAGNVVVAKPAETTPLTTLRIAEIMHGAGLPAGVFNVVTGDGPTTGQALAGHPSVRKVAFTGSTPVGKKLAALAAGDLKRVTLELGGSDPMIVCDDADLDRAASAASVGRFFNCGQACLAVKRLYVFESVAEEFVEKLVGKAKRLRVGPGRAEGTIIGPLHTPEGRELLEGQVRDAVESGARVLAGGRRPEGEVFERGNFYEPTLLLEPSHESRVATEEVFGPALPIWRVGDLEEAIERANGSIYGLGSSVWTADLDRATEAAERIEAGYTWINSPQVIYDELPFGGWKQSGYGKEHGMEAIEYYTETKSVVVRRAYQG

SEQ ID NO: 2386 - protein, 515 aa, Saccharomyces cerevisiae
MSKLGQEKNEVNYSDVREDRVVTNSTGNPINEPFVTQRIGEHGPLLLQDYNLIDSLAHFNRENIPQRNPHAHGSGAFGYFEVTDDITDICGSAMFSKIGKRTKCLTRFSTVGGDKGSADTVRDPRGFATKLYTEEGNLDWVYNNTPVFFIRDPSKFPHFIHTQKRNPQTNLRDADMFWDFLTTPENQVAIHQVMILFSDRGTPANYRSMHGYSGHTYKWSNKNGDWHYVQVHIKTDQGIKNLTIEEATKIAGSNPDYCQQDLFEAIQNGNYPSWTVYIQTMTERDAKKLPFSVFDLTKVWPQGQFPLRRVGKIVLNENPLNFFAQVEQAAFAPSTTVPYQEASADPVLQARLFSYADAHRYRLGPNFHQIPVNCPYASKFFNPAIRDGPMNVNGNFGSEPTYLANDKSYTYIQQDRPIQQHQEVWNGPAIPYHWATSPGDVDFVQARNLYRVLGKQPGQQKNLAYNIGIHVEGACPQIQQRVYDMFARVDKGLSEAIKKVAEAKHASELSSNSKF

SEQ ID NO: 2387 - protein, 366 aa, Zea mays
FGSSNNTPVFFLRDPTKFPVFIHTQKRNPQTNLKDATMFWDYLSTHQESAHQVMHLFSDRGTPYSYRHMNGYSGHTFKWIKPDGTFNYVQIHCKTDQGNKTLTNEEAGELAKSNPDWHTQDLFQAIERGENPSWTCYVQTLSPEQAEKFRWNVFDLTKVWPQSEVPLRRFGRFTLNKNPENYFAEIEQAAFAPSHLVPGVEPSADPVLQARLFSYPDTHRHRLGVNYQQIPVNCPLHAFNPYQRDGAMAVNGNYGANPAYPSSFRAMNFEPVKASQEHEKWVGAVTSQQIPVTDEDFVQANALWRVLGRTPGQQENFVKNVSVHLCNANERVRKQTYGFFTRINAILGEKIKKATEKNVSREQARL

SEQ ID NO: 2388 - protein, 597 aa, Zea mays
MASSASLQRFLLPSPHAAATAASPSSRLRRTGRARAAVSVPPPAAAGEQVPTERLEPRVEERAGGYWVLKEKYRAGLNPQEKVKLEKEPMALFMEGGIQDLARVPMEQIDAAKLTKDDVDVRLKWLGLFHRRKHQYGRFMMRLKLPNGVTTSEQTRYLASVIEAYGADGCADVTTRQNWQIRGVTLPDVPAILDGLRAVGLTSLQSGMDNVRNPVGNPLAGVDPHEIVDTRPYTNLLSSYVTNNSQGNPTITNLPRKWNVCVIGSHDLYEHPHINDLAYMPAVKDGEFGFNLLVGGFISPKRWAEALPLDAWVAGDDVVPVCKAILEAYRDLGSRGNRQKTRMMWLIDELGMEVFRSEVEKRMPNGVLERAAPEDLVDKRWERRDYLGVHPQKQEGLSYVGLHVPVGRLQAADMFELARLADEYGTGELRLTVEQNIVLPNVSNERLDALLAEPLLQEQRLSPRPSMLLRGLVACTGNQFCGQAIIETKARALQVAREVEKRVAVPRPVRMHWTGCPNSCGQVQVADIGFMGCLTKDSDGKIVEAADIFVGGRVGSDSHLADVYRKSVPCKDLVPIVADLLVERFGAVPREREEDEE

SEQ ID NO: 2389 - protein, 251 aa, Brassica oleracea var. botrytis
MPIRNIAVGRPDEATRPDALKAALAEFISTMIFVFAGSGSGMAFNKLTENGATTPAGLVAASLAHAFGLFVAVSVGANISGGHVNPAVTFGAFVGGNITLLRGILYWIAQLLGSVVACLLLKFATGGLVVPAFGLSAGVGVSNALVFEIVMTFGLVYTVYATAVDPKNGSLGTIAPIAIGFIVGANILAGGAFSGASMNPAVAFGPAVVSWSWNNHWVYWAGPLVGGGLAGLIYEVFFINTTHEQLPTADY

SEQ ID NO: 2390 - protein, 175 aa, Brassica oleracea var. botrytis
ANISGGHVNPAVTFGAFVGGNITLLRGILYWIAQLLGSVVACLLLKFATGGLVVPAFGLSAGVGVSNALVFEIVMTFGLVYTVYATAVDPKNGSLGTIAPIAIGFIVGANILAGGAFSGASMNPAVAFGPAVVSWSWNNHWVYWAGPLIGGGVAGLIYEVFFINTTHEQLPTTDY

SEQ ID NO: 2391 - protein, 398 aa, Actinobacillus pleuropneumoniae serovar 1 str. 4074
MSMFNHIQAAPADPILGLGEAFKAEQRAGKINLGIGVYMNAEGKTPIVKAVKKAEALLLEQETNKNYLTIDGVQAFNAYTQELLFGKGAEIIASGRAKTAQSLGGTGALRIAAEFIKRQTSAKNIWISNPTWPNHNAIAEAVGLNVKGYRYYNPETHGLDWDNLLADLSQAEAGDVVLLHGCCHNPTGIDPTPEQWDALAKLSAEKGWLPLFDFAYQGFGNGLGQDAYGLRAFVKNHKELLIASSYSKNFGLYNERVGAFTLVAENADVANKAFTQIKSIIRVLYSNPAAHGANAVARVLGDETLRAEWVAELDEMRDRIKGMRNRMVQLLKEKGAKQDFDFIAKQNGMFSFSGLTPEQVDRLREEFAIYAVRSGRINVAGITDQNIDALCEAIVKVL

SEQ ID NO: 2392 - protein, 559 aa, Malus x domestica
MGSSGIDWKLPDHPKLPKGKVIGLIVLDGWGEANADQYNCIHVAETPVMDSLKKGAPERWRLVRAHGTAVGLPTEDDMGNSEVGHNALGAGRIFAQGAKLVDAALASGKIFEGEGFKYVKESFETNTLHLIGLMSDGGVHSRLDQLLLLLKGASEQGAKKIRVHILTDGRDVLDGSSVGFAEILENDLAKLREKGVDAQIASGGGRMYVTMDRYENDWSVVKRGWDAQVLGEAPYKFKNAVEAIKTLRAEPNANDQYLPPFVIVDDSGKPVGPIVDGDAVVTFNFRADRMVMIAKALEYADFDKFDRVRVPKIRYAGMLQYDGELKLPSHYLVEPPEIDRTSGEYLTYNGVRTFACSETVKFGHVTFFWNGNRSGYFNDKMEEYVEIPSDSGITFNVQPKMKAVEIAEKARDAILSGKFEQVRVNLPNGDMVGHTGDIEATIVACKAADEAVKIILDAIEKVGGIYVVTADHGNAEDMVKRNKTGQPLLDKSGNIQILTSHTLQPVPIAIGGPGLAPGVRFRKDLPSGGLANVAATVMNLHGFQAPSDYEPSLIEVVDN

SEQ ID NO: 2393 - protein, 482 aa, Wolbachia endosymbiont of Onchocerca volvulus
MSQNKTLTTASGPPVADNQNSRSAGPRGPLLLDDFHLIEKLAHFNRENIPERRVHAKGSGAYGTFTVTQDITQYTSAKLFDSVGKQTPTFLRFSTVGGERGSADTERDPRGFALKFYTEEGNWDIVGNNTPVFFIRDPLKFPDFIHTQKRLPQSNLKSAQMMWDFWSHSPEALHQVTILFSDRGIPDGYRHMHGFGSHTYSLINAKGERHWVKWHYKTKQGIKNLAPADAARLAGTDPDYAQRDLFGAIERGDFPKWRVCIQIMTEAQANAHYENPFDVTKTWSQKEFPLIEVGELELNRNPLNYFAEVEQAAFGPSNMVPGVGLSPDRMLQGRVFAYADAHRYRVGTNHQQLPVNAPRSPVNSYQRDGSMAFGSNGGAAPNYEPNSYADAPKQAPQYAEPALALSGAADRYDHREDTDYYSHAGALFRLMNDEQKALLINNIAGAMAGVSSDVVQRQLQYFFKADPAYGEGIASALGVSLN

SEQ ID NO: 2394 - protein, 287 aa, Phaseolus vulgaris
MAATAAGIASLFSSSINSVKCLRSKHCSMMDPLMTAMLSNRIFAPVSHLVVEPLSIGGTTSHRLWGPRISAAVAQEEVVVVDDAGLVEEEKVEENEGEEVVAEQDSDESFASTKLYFGNLPYSVDSAKLAGLIQDYGSAELIEVLYDRDTGKSRGFAFVTMSCIEDCNAVIENLDGKEYLGRTLRVNFSNKPKAKEPLYPETEHKLFVGNLSWSVTNEILTQAFQEYGTVVGARVLYDGETGRSRGYGFVCFSTKEEMEAALGALNDVELEGRAMRVSLAEGKRAQG

SEQ ID NO: 2395 - protein, 312 aa, Pseudomonas syringae pv. tomato str. DC3000
MSASLAFVFPGQGSQSLGMLAEQGAQHPLILDTFEQASEALGYDLWALTQSGPAELLNQTDKTQPAILTASIALWHVWLAEGGAVPAFVAGHSLGEYSALVAAQSLSLADAVKLVERRGQLMQEAVPAGQGGMAAILGLDDADVIAACAEAAQGEVVSAVNFNSPGQVVIAGSAEAVKRAMELCKARGAKRALPLPVSVPSHCELMRPAAERFVEAVEAIEWQAPSIALVQNVSASAVSDLATLKRDLLEQLYKPVRWVESIQCLASHGATRLVECGPGKVLAGLNKRCAEGVITYNLDTPDAFAAARAALA

SEQ ID NO: 2396 - protein, 292 aa, Streptomyces venezuelae
MKGIVLAGGSGTRLHPATSVISKQILPVYNKPMIYYPLSVLMLGGIREIQIISTPQHIELFQSLLGNGRHLGIELDYAVQKEPAGIADALLVGAEHIGDDTCALILGDNIFHGPGLYTLLRDSIARLDGCVLFGYPVKDPERYGVAEVDATGRLTDLVEKPVKPRSNLAVTGLYLYDNDVVDIAKNIRPSPRGELEITDVNRVYLERGRAELVNLGRGFAWLDTGTHDSLLRAAQYVQVLEERQGVWIAGLEEIAFRMGFIDAEACHGLGEGLSRTEYGSYLMEIAGREGAP

SEQ ID NO: 2397 - protein, 477 aa, Mycobacterium tuberculosis CDC1551
MDQFPIMGVPDGGDTAWMLVSSALVLLMTPGLAFFYGGMVRSKSVLNMIMMSISAMGVVTVLWALYGYSIAFGDDVGNIAGNPSQYWGLKGLIGVNAVAADPSTQTAAVNIPLAGTLPATVFVAFQLMFAIITVALISGAVADRLKFGAWLLFAGLWATFVYFPVAHWVFAFDGFAAEHGGWIANKLHAIDFAGGTAVHINAGVAALMLAIVLGKRRGWPATLFRPHNLPFVMLGAALLWFGWYGFNAGSATTANGVAGATFVTTTIATAAAMLGWLLTERVRDGKATTLGAASGIVAGLVAITPSCSSVNVLGALAVGVSAGVLCALAVGLKFKLGFDDSLDVVGVHLVGGLVGTLLVGLLAAPEAPAINGVAGVSKGLFYGGGFAQLERQALGACSVLVYSGIITLILALILKFTIGLRLDAEQESTGIDEAEHAESGYDFAVASGSVLPPRVTVEDSRNGIQERIGQKVEAEPK

SEQ ID NO: 2398 - protein, 671 aa, Mycobacterium bovis AF2122/97
MSFVLVSPSQLMAAAADVAGIGSAISAANAAALAPTSVLAAAGADEVSAAVAALFSAHAGQYQQLGARAALFHEQFVQALTGAASAYASAEATNVEQQVLGLINAPTQALWGRPLIGNGADGTAANPNGGAGGLLYGNGGNGFSQTTAGLTGGTGGSAGLIGNGGNGGAGGAGANGGAGGNGGWLYGSGGNGGAGGAGPAGAIGAPGVAGGAGGAGGTAGLFGNGGVGGVGGDGGQGGNGAGAGASGTKGGDAGAGGAGGAGGWIHGHGGAGGDGGAGGAGGQASPGAPGPPSQPGGAGGAGGAGGRGGDGGSAGWLSGNGGDAGNGGGGGTAGGAGNGGQFGGDGGTGGTGGTAGAGGNGGRGAVLFGHGGNAGHGGAGGNGAAAGAGGEHVMATAGKGGTGGVGGDGGGGAGGGGGLLYGNGGAGGNGGAGGAGNSGGDGGTGLNAALGGNGGGGGVGGNAGAGGTGGSAGWLSGNGGAGGSGGSAGAGGAGGKGGDTPNGLAINPGIGGNGGDTGNAGNGGNGGSAARLFGGGGAGGAGGTGSTAGSGGSGGTNPPTGLQAAGGNGGSGHAGGHGGNGGGAGLLGGGTGGNGGGGGQGGLGAAAGGVDGNGGNGGNGGKGGDAQLVGDGGNGGNGGKGGAGLIAGLDGAGGAGGTRGLIFGNAGTPGQ

SEQ ID NO: 2399 - protein, 763 aa, Mycobacterium bovis AF2122/97
MSYMIAVPDMLSSAAGDLASIGSSINASTRAAAAATTRLLPAAADEVSAHIAALFSGHGEGYQAIARQMAAFHDQFTLALTSSAGAYASAEATNVEQQVLGLINAPTQALWGRPLIGNGADGTAANPNGGAGGLLYGNGGNGFSQTTAGLTGGTGGSAGLIGNGGNGGAGGAGANGGAGGNGGWLYGSGGNGGAGGAGPAGAIGAPGVAGGAGGAGGSAGLFGNGGAGGAGGAGGQGGAGIGGADGTKGGDAGAGGAGGAGGWIHGHGGVGGDGGTGGQGGDGVQGEPGDTGAAGGAGGAGGRGGDGGSAGWLSGNGGDAGTGGGGGNAGAGGEGGIFGGNGGNGGTGGTAGGGGNGGRGAALFGHGGNAGHGGAGGNGAAGGNGADTQLGISGKGGTGGGGGGAGAGGTGGDGGLLYGNGGAGGNGGNGGAAGKGGIGAPGLSTAQGGDGGNGGSGGNAGNGGNGGRGSVLFGHGGNAGHGGAGGNGAVSGNGGSSITAVGGKGGTGGGGGGGAGGTGGDAGLLYGNGGAGGTGGSGGAGARGGDGGAGSGTAQGGDGGAGGVGGNAGNGGNGGSAGWLSGNGGTGGGGGTAGAGGQGGNGNSGIDPGNGGQGADTGNAGNGGHGGSAAKLFGDGGAGGAGGMGSTGGTGGGGGFGGGTGGNGGNGHAGGAGGSGGTAGLLGSGGTGGDGGNGGLGAGSGAKGNGGNGGDGGKGGDAQLIGNGGNGGNGGKGGTGLMPGINGTGGAGGSRGQISGNPGTPGQ

SEQ ID NO: 2400 - protein, 420 aa, Ralstonia metallidurans CH34
MKNAELVRRKDAATPRGVGVMCNFYADRAENSEIWDVEGKRYIDFAAGIAVLNTGHRHPRLVAALQAQLNRFTHTAYQIVPYASYVELAEKINQRAPGRSARKTAFFTTGAEAVENAVKIARAATGRPGVIAFSGGFHGRTMMGMALTGKVAPYKTGFGPFPGEVFHAPYPSALHGVTVEDSRRALEHLFKADIDPRRVAAIIFEPVQGEGGFNVAPPEFVRMLRAVCDEHGILLVADEVQTGFGRTGKLFAMEHYDVAPDLTTMAKSLAGGMPLSAVCGRAEIMDAPAPGGLGGTYAGNPLAVASALAVLDVLESENLIARGAELGERLTARLNSLKPRVPQIAEVRGIGAMVAVEFRRADGSPDAEFTREVQNRALERGLLLLSCGVYGNVIRFLFPLTIQDAVMNEGLDILADVLTR

SEQ ID NO: 2401 - protein, 320 aa, Escherichia coli O157:H7 EDL933
MIKKIGVLTSGGDAPGMNAAIRGVVRSALTEGLEVMGIYDGYLGLYEDRMVQLDRYSVSDMINRGGTFLGSARFPEFRDENIRAVAIENLKKRGIDALVVIGGDGSYMGAMRLTEMGFPCIGLPGTIDNDIKGTDYTIGFFTALSTVVEAIDRLRDTSSSHQRISVVEVMGRYCGDLTLAAAIAGGCEFVVVPEVEFSREDLVNEIKAGIAKGKKHAIVAITEHMCDVDELAHFIEKETGRETRATVLGHIQRGGSPVPYDRILASRMGAYAIDLLLAGYGGRCVGIQNEQLVHHDIIDAIENMKRPFKGDWLDCAKKLY

SEQ ID NO: 2402 - protein, 579 aa, Glycine max
MCGILAVLGCSDSSQAKRVRVLELSRRLKHRGPDWSGLHQYGDNYLAHQRLAIVDPASGDQPLFNEDKTVVVTVNGEIYNHEELRKQLPNHTFRTGSDCDVIAHLYEEHGENFVDMLDGIFSFALLDTRDNSFIVARDAIGVTSLYIGWGLDGSVWISSELKGLNDDCEHFESFPPGHLYSSKERAFRRWYNPPWFSEAIPSAPYDPLALRHAFEKAVVKRLMTDVPFGVLLSGGLDSSLVAAVTARYLAGTNAAKQWGTKLHSFCVGLEGAPDLKAAKEVADYIGTVHHEFHYTVQDGIDAIEDVIYHIETYDVTTIRASIPMFLMSRKIKSLGVKWVISGEGSDEIFGGYLYFHKAPNKDEFHQETCRKIKALHKYDCLRANKSTFAWGLEARVPFLDKDFIRVAMNIDPEYKMIKKEEGRIEKWVLRRAFDDEEHPYLPKHILYRQKEQFSDGVGYGWIDGLKAHAEKHVTDRMMLNAANIFPFNTPTTKEAYYYRMIFERFFPQNSARLSVPGGPSVACSTAKAVEWDAAWSNNLDPSGRAALGVHASAYGNQVKAVEPEKIIPKMEVSPLGVAI

SEQ ID NO: 2403 - protein, 293 aa, Nitrosomonas europaea ATCC 19718
MTRRGLILAGGSGTRLHPATLALSKQLLPVFDKPMIYYPLSTLMLAGIRDILIISTPQDTPRFQQLLGDGEQWGLNLQYAVQPSPDGLAQAFLIGEDFIGNHPSALVLGDNIFYGHDLQRLLTHAMMRTEGASVFAYHVHDPERYGVVEFNAQGKVLSLEEKPIQPRSSYAVTGLYFYDTQVVDHAKALKPSARGELEITDLNRLYLEQGNLSVEIMGRGYAWLDTGTHATLLDASQFIATLENRQGLKVACPEEIAYRQGWIDAARLEMLAQLLAKNGYGQYLLKILRENVF

SEQ ID NO: 2404 - protein, 420 aa, Bradyrhizobium japonicum USDA 110
MSAVGNEPLARQALAFVLAGGRGSRLLELTDRRAKPAVYFGGKSRIIDFALSNAVNSGIRRIAVATQYKAHSLIRHLQMGWNFFRPERNESFDILPASQRVSENMWYVGTADAIYQNIDIIESHNARFIVVLAGDHIYKMDYEVMLRQHVDSGADVTVGCLEMPRAESSGFGIMHIDENGWIQEFLEKPADPPPMPGKPDVSLASMGIYVFDAKFLFDQLKRDAEDPSSNHDFGKDIIPYIVKNGRAIAHQFSTSCVRSGDDPRAYWRDVGTVDAYWAANIDLTDVVPELDLFDRAWPIWSYSEITPPAKFVHDEESRRGQAVSSLVSGGCIISGASLRRSLLFTGVRINSYANVENAVIMPYVNVGRGARLKNVVIDRGVEIPEGLVIGEDPELDAKRFRTTEQGISLITQPMIDRLNT

SEQ ID NO: 2405 - protein, 312 aa, Oceanobacillus iheyensis HTE831
MKKVAFMFPGQGSQTVGMGKELYDAHPMIQELYSEANQILDKDIQELMFEGPEKELTQTENTQPALLLSSVAVQKLLEERGVTPAMTVGHSLGEYSALVASGAFTWQDALTLVQIRGRLMEAAFPKGQGTMAAVLGLDATTIESTLSEIKDQVVDIANLNCPGQVVISGSVKGVEQATILLKDKGAKRVLPLNVSGPFHSKLMKAANDEFATYLDDVEISDAKPPVYANVSASATSDSGELKELLLKQLYSPVRFEESINHMIESGVDAFVEIGTGKVLSGLVKKINRRMPTFAIQDQASLDKFMEWYEEEV

SEQ ID NO: 2406 - protein, 499 aa, Ralstonia metallidurans CH34
MSELKDLEYWRGRARALPIPAHAYIDGQWTSAADGATFDCINPATGEQLARVAACGAADVDRAVAAARRAFEAGVWSAMPRRERKAVLLRLAALIETHREELALLETLDMGKPIGDTMLYDIPEAARTYAWYAEAIDKVYDEIAPTDAGVLATITREPLGVVAAVVPWNYPLLMASWKVAPALAAGNSVVLKPAEQSPLTAIRLAALAEEAGVPPGVFNVVPGLGAEAGQALGRHPDVDCLAFTGSTATGKRFMEYSGQSNLKRVWLECGGKSPHIVFDDCPDLDRAALAAAIGIFNNQGEICIAGSRLYVQRGIYDTFMAKLEAHAAAMQPGDPLDPRSAMGAIVDGRQFDRVMSYVEAGQREGARLRAGGQAARADSGGWFVQPTIFECPTQSLSIVKEEIFGPVLAVTVFDTEAEAVAMANDSAYGLGAGLWTSDLSRAHRVSRRLRSGLVWVNCYMDGDITVPFGGVKQSGFGRDKSLHALEKYQDLKTTWIRLE

SEQ ID NO: 2407 - protein, 152 aa, Oryza sativa
MATEEDVKQRQIIESRARNISHNVRCTECGSQSIEDSQADIAILLRKLIRDEIKSGKSDKEIYKKLQADYGETILYTPKFDLQTAAIWLSPVIVGGVAAGVWAYQKHRQRTNVHIMALNLVRGVPLTPREKETMLDVLTPPPPANKWWWPGK

SEQ ID NO: 2408 - protein, 634 aa, Methanococcoides burtonii DSM 6242
MCGICGYAGFDDEDLLGKMCDAIVHRGPDDSGSFTDKGIGLGHRRLSIIDLEGGHQPVCNEDGTIYVVYNGEIYNFLSLRDELEKRGHRFQTSSDTEVIVHLYEEYGKDLVHHLRGMFAFALWDSNTRTLLLARDRLGVKPLYYTTIDNRLLFASEIKSIVQYSGYEKAVDIGTLHDYLTFRHALGTETMFAGIKKLLPGHVMTYREGEVNISEYWDVPLVTVGNESEDFYIKKTRLLLEESVKMRLMSEVPLGIYLSGGIDSGIVTGLMSKMVDEPIETFSVGFGERGEIGELSQAQEAADFFGTNHHEIIVDQGAFKQNLKDIIWHNDEPIADPSALAMFQLSKMASKHVTVVLNGAGGDEVFGGYISYKVGLANQKYHKIVPKVIRQGLVRPFVNAISPHLSSKMYVGIQSATQEVEEHGFLFTKSVFSEEDKEDIYTDKIKDKIHHNTFEKATTSLFRGKRYSGAIDERSSAKNTDLLSKMMYADTKSYLVDHILLETDKLTMSSSIEARVPIIDHKVVEFAASIPQELKLRGMTEKYILKKVGQGMLPPAAQNRKKRPFRIPIDTWFKDELHEMSQQVLDESSIVEQGYFRPEVVKDIMKKHERAELLYNHQMYALLVFEMWHERFMKM

SEQ ID NO: 2409 - protein, 642 aa, Saccharomyces cerevisiae
MSHSGAAIFEKVSGIIAINEDVSPAELTWRSTDGDKVHTVVLSTIDKLQATPASSEKMMLRLIGKVDESKKRKDNEGNEVVPKPQRHMFSFNNRTVMDNIKMTLQQIISRYKDADIYEEKRRREESAQHTETPMSSSSVTAGTPTPHLDTPQLNNGAPLINTAKLDDSLSKEKLLTNLKLQQSLLKGNKVLMKVFQETVINAGLPPSELWSTRIPLLRAFALSTSQKVGPYNVLSTIKPVASSENKVNVNLSREKILNIFENYPIVKKAYTDNVPKNFKEPEFWARFFSSKLFRKLRGEKIMQNDRGDVIIDRYLTLDQEFDRKDDDMLLHPVKKIIDLDGNIQDDPVVRGNRPDFTMQPGVDINGNSDGTVDILKGMNRLSEKMIMALKNEYSRTNLQNKSNITNDEEDEDNDERNELKIDDLNESYKTNYAIIHLKRNAHEKTTDNDAKSSADSIKNADLKVSNQQMLQQLSLVMDNLINKLDLNQVVPNNEVSNKINKRVITAIKINAKQAKHNNVNSALGSFVDNTSQANELEVKSTLPIDLLESCRMLHTTCCEFLKHFYIHFQSGEQKQASTVKKLYNHLKDCIEKLNELFQDVLNGDGESMSNTCTAYLKPVLNSITLATHKYDEYFNEYNNNSN

SEQ ID NO: 2410 - protein, 181 aa, Lycopersicon esculentum
MASSIVSSAAAATRSNVAQASMVAPFTGLKSAASFPVTKKNNNVDITSLASNGGRVRCMQVWPPINMKKYETLSYLPDFSDEQLLSEIEYLLKNGWVPCLEFETERGFVYRENNSSPGYYDGRYWTMWKLPMFGCTDATQVLAEVQEAKKAYPQAWVRIIGFDNVRQVQCISFIAYKPEGF

SEQ ID NO: 2411 - protein, 180 aa, Lycopersicon esculentum
MASSVISSAAVATRSNVTQASMVAPFTGLKSSATFPVTKKQNLDITSIASNGGRVSCMQVWPPINMKKYETLSYLPDLSDEQLLSEVEYLLKNGWVPCLEFETEHGFVYRENNKSPGYYDGRYWTMWKLPMFGCTDATQVLAEVQEAKKAYPQAWVRIIGFDNVRQVQCISFIAYKPEGY

SEQ ID NO: 2412 - protein, 392 aa, Oryza sativa
MWWDQIPTWTVHVQSSTTTTTGRTPSCVHIQTQTPTLAHQTHTPRASAAMATTPSPPPSATTMRAVQYDGYGGGAEGLKHVEVPIPSPKKGEVLIKMEAASINPIDWKIQKGMLRPFLPWKFPSIPACDLAGKVAAVGGGVRRFELGDKVIAINFPLSSVFECDLSEQSGGGFAEYAVAQASLTVERPPEVSAAEGACLPLAAVTALQALRAAGAGLDDAPPPKNVLVTAASGGVGHFAVQLARLGGHRVTATCGARNLALVAGELGADEALDYATPDGAALRSPSGRRYDAVVHCAPHLPWQVFDRVLAEGDTGGVVVDITPSPAALATALLHRVTFSKKRLTPFMFSPSKADMELLVAMARQGKLKPAVDSCHPLSDATGKVVVKIGEEE

SEQ ID NO: 2413 - protein, 239 aa, Asparagus officinalis
MGRGRVELKRIENKINRQVTFAKRRNGLLKKAYELSVLCDAEVALIIFSNRGKLYEFCSSSSMLKTLERYQKCSYGAPDTSVQIRESQMLQSSHQEYLRLKARVEALQRSQRNLLGEDLGPLSSKELEQLERQLDSSLKQIRSTRTQYMLDQLADLQRREQMLCEANRSLRKRLEESSQANQQQVWEDANAMGYNRQPNQPHGDQFFHPLECQPTLQIGFQPDQMPGPSVSNYMPGWLA

SEQ ID NO: 2414 - protein, 400 aa, Nostoc sp. PCC 7120
MSKKTVASLSAADISGKRALVRVDFNVPLDDQGNITDDTRIRAALPTIQDLTQKGAKVILASHFGRPKGVDEKLRLTPVAKRLSELLGQEVIKTDDSIGDEVAAKVATLQNGQVLLLENVRFYKEEEKNDPEFAKKLAANADFYVNDAFGTAHRAHASTEGVTKFLSPSVAGYLVEKELQYLQSAIENPQRPLAAIIGGSKVSSKIGVIETLLEKCDKLIIGGGMIFTFYKARGLNVGKSLVEEDKLELAKSLEAKAKERGVSLLLPTDVVLADNFAPDANSQTVSIENIPDGWMGLDIGPDSVKVFQAALADTKTVIWNGPMGVFEFDKFAAGTEAIAHTLAEIGKTGTTTIIGGGDSVAAVEKVGLADQMSHISTGGGASLELLEGKVLPGIAALDEA

SEQ ID NO: 2415 - protein, 319 aa, Agrobacterium tumefaciens str. C58 (Cereon)
MRTIYRYDICLRLKPIAPTPVKERLLPLTGLFRRPCFQQTGETPMYDVSANGANIPALGFGTFRIPEDDVRRILPEALKLGFRHVDTAQIYKNEGAVGEVIAQSGISRHDIFLTTKVWVDRYRHDDFLASVDESLAKLKTDYFDLLLLHWPKSDVPLAERMGALNAVRKAGKARNIGISNFNVALTEEAVKLSDTPLATNQIEYHPYLDQTKVISAARKHGMSVTAYYLMADGKVPNDPVLKDIGAKHGKTAAQVTLRWAVQQPDIVALSKTATESRLKENFDIFDFALSEEEMQAIHALAKPNGRIVSPGHLAPDWDD

SEQ ID NO: 2416 - protein, 224 aa, Asparagus officinalis
MGRGRVELKRIENKINRQVTFAKRRNGLLKKAYELSVLCDAEVALVVFSTRGKLYEFCSSPSMLKTLDRYQKCSYGAPDTSVQIRENQMLQSSHQEYLKLKARVEALQRSQRNLLGEDLGPLSSKELEQLEKQLDSSLKQIRSTRTQYMLDQLGDLQRKEQMLCEANRSLRKRYAQLEEASQANQQQVWEANANAMGYSRQPSQPQGEEFFHPLECQPSLGGQC

SEQ ID NO: 2417 - protein, 161 aa, Zea mays
  unsure (1)..(161): unsure at all Xaa locations
AGGGGFFFFFLLFPRAASFGGRCCPLSVLLFPARALFGSRRSPSAXVYLGGGGGLFFAAVPLGASSGVCDALALRALGXTRSLGKGVSLAVERFLSPVAPALVSWRRCVVVRVLFVPLLIAMGGSGNTSKFGASAVLGVSLAVCRAGAVVKXCPLYRRIAD

SEQ ID NO: 2418 - protein, 388 aa, Exiguobacterium sp. 255-15
MRKKTALIHGGTGVDRATGAVTPPIYQTSTYKQEKIGQLKEGYEYSRTANPTRTSIERLIADLEGGARGFAFGSGMAAIHAVFNLLESGDHIVMTDDVYGGTFRLMQRVLPKFNIQVTFVDTTDLAATEAAVQDNTKMLYVETPTNPLLKVTDIAAVAEIAKRNNLKLVVDNTFATPYLQQPLALGADIVLHSATKYIGGHSDVVAGLVVVNSDELGEDLHFIQNSTGGILGPQDSFLLVRGLRTLGIRMDAIEETSHDLVHFLQEQDVVSNIFYPGLPTHPGHATQQKQATGFGGMISFDVGSAENAEKLVEATHFFTLAESLGAVESLISVPARMTHASIPAERRAELGITDGLVRISVGLEDAEDLKEDLARAFSLLQPVSEKTV

SEQ ID NO: 2419 - protein, 644 aa, Thermosynechococcus elongatus BP-1
MEDKNTMVASPPSADAALKRSKIEALKERSQHLREPVATELLEPTNRFSEEGAQILKFHGSYQQDNRDNRVKGQEKDYQFMLRTRSPAGYIPPQLYLTLDRLAEEYGNRTLRATTRQGFQLHGILKKNLKAAIAAIVRSMGSTLGACGDLNRNVMAPPAPFRDRPEYTLAYEYAHRIADLLTPQTGAYYEIWLDGEKVISAEEHPDVKAARQRNGNGTIFPNNEEPIYGDHYMPRKFKCCVTVPGDNSVDLFSQDLTLVVITNPQGQLEGFNIYAGGGLGRTHNKEETFARLADEIGFVRAADVYDAVKAIVATQRDYGDRYNRRHARLKYLIHDWGVEKFKAKVEEYFGKPLEPFRPLPPWRYQDFLGWHPQGDGKFFYGLSIANGRILDQGNFKLKSALKKIVEDFHLPLRVTPHQNLLLCDISPEQQDAIQHLLEEHGVRDVSAIDPLERYSMACPALPTCGLAITESERAIPGVLERIRRLMDRLGLKDEHFVIRMTGCPNGCARPYLAELGFVGIVPGAYQTWLGGSPDQTRLAEVYIERLPIAELETVLEPLLVFYRDRRQQGESFGDFCHRVGFAALRQFAANYVPTAPPKRYRVDVRADQYQQLKELAAAEGRSLAAVTREAIQHYLEQSRQNKQG

SEQ ID NO: 2420 - protein, 85 aa, Glycine max
  unsure (1)..(85): unsure at all Xaa locations
MASSMISSPAVTTVNRAGAGMAAPFTGLKSMAGFPSXKTNDDSTSIATNGGXVQCIHVWPPIGNTKFETPSDLPDLDDAQVAKEI

SEQ ID NO: 2421 - protein, 349 aa, Xanthomonas campestris pv. campestris str. ATCC 33913
MSAASVKGPIHHGEPCVPSSGLDPRVAPTPHPATPPQRAGKARRFGSLRRWVDSQTDEPLDEARADRIDWLRALPFIALHLACFAVFWVGVSWFAVSMAVALYALRMFALTGFYHRYFSHRAFKTSRVVQFVFAAIAATCVQRGPLWWAAHHRNHHRHTDTGRDPHSPAQHGFWWSHTGWFLTPRNFRTDWEVIPDLRRFTELRFLDRFDIVMPVLLALGLYLLGDWLAAAAPGLHTSGAQLLVWGFVLSTVALFHATFTINSLAHRFGSRRFDTRDDSRNNWLLALLTFGEGWHNNHHFFPGSARQGVRWWEYDMTWYGLTVMSWVGLVWDLKPMPAMLTRRAGRVAR

SEQ ID NO: 2422 - protein, 281 aa, Escherichia coli O157:H7 EDL933
MSQTSTLKGQCIAEFLGTGLLIFFGVGCVAALKVAGASFGQWEISVIWGLGVAMAIYLTAGVSGAHLNPAVTIALWLFACFDKRKVIPFIVSQVAGAFCAAALVYGLYYNLFFDFEQTHHIVRGSVESVDLAGTFSTYPNPHINFVQAFAVEMVITAILMGLILALTDDGNGVPRGPLAPLLIGLLIAVIGASMGPLTGFAMNPARDFGPKVFAWLAGWGNVAFTGGRDIPYFLVPLFGPIVGAIVGAFAYRKLIGRHLPCDICVVEEKETTTPSEQKASL

SEQ ID NO: 2423 - protein, 497 aa, Ferroplasma acidarmanus
METYKMFIGGEWVESSENQVLKVLNPSTGLPVASVQSASRDDVGKAIDAARNSFDSGIWSRATPGDRSNVLLKVADLIEKNQDKFIKVETENSGKSIKQISGYDIPYTVDNIRFLAGACRTLEGKAMNEYVADGTSAIRREPIGAIGIITPWNYPLMMVVWRAFPALAMGNSVVVKPASYTPLTTLMLADILKEAGVPDGVFNVITGPGSSVGEEMAKSEKLDMIAFTGSTEVGKRLSVLAASNLKKVSLELGGKAPFIVFKDANIDAAVESAIVGGLVNNGQDCANSTRYYIQEEVFDKFVSLLKKRIQKLRIGDPMDPSTDMGPLISETQRERVEGYIEKGIKEGGKLLSGGERPEIPGHKKGYYINPALIYTENEDSAIVKEEIFGPVFTILKFKDYNDAIRRSNDVTYGLGSSVWTSDITTAMRATRDLRFGTVWVNEHVVVPSEMPWAGYKESGHGASLSPYSLEEFTYIKHVYFDLTGKVRKDWYDQIFKG

SEQ ID NO: 2424 - protein, 375 aa, Brucella melitensis 16M
MKFKAAVLDRHGVERPYNQTKPLVIREVELREPKADEVLVKLAASGLCHSDLSVINGDRSRQIPMVLGHEAAGVVEKIGEGVTDLVPGDHVVCVFVPNCGHCQPCAEGRPALCEPGAAANGKGEMLSGGLRLFCDDGDVYHHCGVSAYAEYAVMSRYSIIRIEKDIPLHIAALMGCAVLTGTGSIFNTGLVKPGSRVAIAGLGGVGLAAVMGAVAAGATEIIALDMFDDKLALAEQLGATKTFNVQSEGVVEAVKEYTKGGVDAAFEYAGSGAALAMCYALTKRGGEVVTAGLPNPKNMLSIPAVSLVAEEKSIRGSYLGSGVPTRDIPLFLDLYRKGKLPVEKLLTHRIKLEEINEGFERLAAGKAIRQVVEFN

SEQ ID NO: 2425 - protein, 167 aa, Oryza sativa (japonica cultivar-group)
MASAAVAADGAADGKKMILLVSSDGVKFELSEAAASLSKTLGNMIEDDCATNGAIPLANVAADILAMVVEYCNRHAAAAANASGQEELIRKFDAEFVNIDRKKLFGLINAANFLNMPCLLELTCQRTADLIKDMMPEQVREVFGIENDFTPEEEAEVRNENAWAYEM

SEQ ID NO: 2426 - protein, 1399 aa, Vibrio vulnificus YJ016
MIQIVIDGKYRIVEAGQTVLQAAKVCGVEIPSLCGMNRSGEKIPCDLCVVEVESGGTRRACELEVYNGLTVNTQSEALSAHRKQALNRIMSDHYADCEAPCKTACPAGVDIQSYLYHIAQNDHQKAIEVIKRTLPMPLSIGRVCPAFCESECRRSLVDDAIAIRQLKRHAADADLAAQEAYTPEKKADKNKRIAIVGSGPGGLTAGYYLTNEGYQVDVFEAMPQAGGWLRYGIPEYRLPKSILDKEIALMCRNGMAIHTDKKLGRDISLSQLSQDYDAVCLAVGASKAVAMDYPGSDLDGCYLGVDYLKDFVTEQRFTTGKKVAVIGGGNTAIDCARTAVRTGADTTLIYRRTRDEMPAEDYEIEEAEHEGVKFHFLTNPAQNIADEHGRVCSVKLEKMALGAPDASGRRRPEATGEYFTEAFDTVIAAVSQQADLSFMQGEALTLPLTRWNTADANPETMHSGTGNIFSIGDFRRGPATAVEAVADGRIAAQAIDRFFDGDMENIPLKPFNSRKEQKLKQVDPLHFSHLQKVARTIMPELTSQQREQSFEEVELGFDNAEAMAEAARCLECGCQVNTSCDLRDYATEYGAEQHFHYSVNIKSHDEWQALRQNDPRHKYPIDHSSEFIVFDANRCISCGQCIQACREQSVQGVLSFMNLEKGRPVVRPDCRPNFGGQGVRMGDSRCVQCGACVQACPVGAMTDARDRSQGRETPLKKVDTICTYCGVGCKLTMHVDEAANRIRYVEGAHSPVNEGMLCVKGRYGFDFVASEERLTTPLIRKDGWLQPASWQEAIRLVADKFSTIKQDFGGRALAGFSSAKTTNEDNYAFQKFMRRELGTNNVDHCARLCHASTVTGLEASLGSGAMTNDIPSIKHSDVIFIIGSDTSAAHPVIASHIKQAVRHHGARLIVADPKRIGMADHAELYLAHRPGTDVMLINGVMQQIIKNGWYDMEYIEERVDGFDTMLQEVMSPAYALDKVELVTGVKADDIFAMARMIGTAKRTAVYYSMGITQHTTGHDNVRSIANLQLLCGNIGIEGGGINPLRGQSNVQGACDMGALPNNYPGYQKVYNPLVREKFVIEWDAPNLSAEPGLTLTEIIDGACRRDVRALYVMGENPVLSDPNQAHVIEGLEALDFLVVQDIFLTETAQYADVVLPSCSFAEKSGHFTNTERRVQRIYPAVNPPGEAKEDWRIIQEIANAMGSDWHYRSVVDITNEITRVTPQYAGLKWDNITREGVQWPSNKNNPAGTRIMHQTQFTRGKGQMEAIPFRYAAELPDEEYPLVLTTGRVLEQFHTGTMTRKTQGLNNLAGPRAMISVQDAEALGIGNGDMLKVSTRRGEIEIAAFVTKRMQAGVVFIPFHFVESPVNRLTTTATDPHAKIPEFKVAAVRVEKLHTALVE

SEQ ID NO: 2427 - protein, 215 aa, Capsicum annuum
MNIFRSYYSDPLTESSSSFSDSSIYSPNRAIFSDEEVILASNNPKKPAGRKKFRETRHPVYRGVRKRNSGKWVCEVREPNKKSRIWLGTFPTAEMAARAHDVAAIALRGRSACLNFADSAWRLPVPASSDTKDIQKAAAEAAEALRPLKLEGISKESSSSTPESMFFMDEEALFCMPGLLTNMAEGLMLPPPQCAEIGDHVETADADTPLWSYSI

SEQ ID NO: 2428 - protein, 507 aa, Chromobacterium violaceum ATCC 12472
MKSIKPVLLLILDGFGHRTEGDDNAILHARMPVWSRLREQYAYGTINASENFVGLPSGQFGNSEVGHLNIGAGRIVQQDISRIDCDIEDGRFSSNDTLQQAMSKAQGSALHILGLLSDGGVHSHENHIHALIRAAQAAGVPKIYVHAFLDGRDTPPRSAETYLKRLDAALAECPNARLVSVTGRYWAMDRDKRWERVEPAYRLLVDGEGLFHAETGLDALKAAYERDENDEFVKATGIGAPVKMQDGDALIFMNFRADRARQLTSALTDPAFDGFKARQPKFGYYATLTSYGEAYSALPVAYAPQKIHNGMGEYLSSKGLKQLRIAETEKYPHVTYFFNGGEEQVYPGEDRILVPSPKVATYDLQPEMSAGEVTDKIVAAIQSGQYQAIFCNYANGDMVGHSGVFDAAVKAVEALDGCIERCVDAMLAAGGEVLITADHGNCEQMYDGEHHQPHTQHTTNQVPFLYIGRPAKIRAGGSLRDISPSLLAMMGLEQPAEMTGQSLIDFQ

SEQ ID NO: 2429 - protein, 303 aa, Populus tremula
DVYFWEAKGQTPLFPRIYGHEAGGIVESVGPGVTDLQPGDHVLPVFTGECGDCRHCKSEESNMCDLLRINTDRGVMLTDGKSRFSINGKPIYHFLGGSTFSEYTVCHIGTVAKINPAAPLDKVCILSCGISTGLGAALNVAKPQKGHSVAVFGLGAVGLAAAEGARLSGASRIIGVDLNPSRFKEAKKFGVTELINPKDHDKPVQQVIIEMTDGGVDRSIECTGNVQAMISAFECVHDGWGVAVLVGVPSKDDVFKTHPMNLLNERTLKGTFFGNYKPRTDLPGVVEKYMNKELEVEKFITHS

SEQ ID NO: 2430 - protein, 303 aa, Populus tremula
DVYFWEAKGQTPLFPRIYGHEAGGIVESVGPGVTDLQPGDHVLPVFTGECGDCRHCKSEESNMCDLLRINTDRGVMLTDGKSRFSINGKPIYHFLGGSTFSEYTVCHIGTVAKINPAAPLDKVCILSCGISTGLGAALNVAKPQKGHTVAVFGLGAVGLAAAEGARLSGASRIIGVDLNPSRFKEAKKFGVTELINPKDHDKAVQQVLIEMTDGGVDRSIECTGNVQAMISAFECVHDGWGVAVLVGVPSKDDEFKTHPMNLLNERTLKGTFFGNYKPRTDLPGVVEKYMNKELEVEKFITHS

SEQ ID NO: 2431 - protein, 303 aa, Populus tremula
DVYFWEAKGQTPLFPRIYGHEAGGIVESVGPGVTDLQPGDHVLPVFTGECGDCRHCKSEESNMCDLLRINTDRGVMLTDGKSRFSINGKPIYHFLGGSTFSEYTVCHIGTVAKINPAAPLDKVCILSCGISTGLGAALNVAKPQKGHTVAVFGLGAVGLAAAEGARLSGASRIIGVDLNPSRFKEAKKFGVTELINPKDHDKPVQQVLIEMTDGGVDRSIECTGNVQAMISAFECGHVGWGVAVLVGVPSKDDEFKTHPMNLLNERTLKGAFFGNYKPRTDLPGVVEKYMNKELEVEKFITHS

SEQ ID NO: 2432 - protein, 261 aa, Persea americana
QVHPNSYALVVSTENMTLNWYSGNNRAMLVTNCLFRMGGAAILLSNRWSDRRRSKYQLVHTVRTHIGADDRAFNCVSQEEDEAGKVGVSLSKDLMVIAGEALKSNITTLGPMVLPMSEQLLFFATLAARKVFKMKIKPYIPDFKLAFEHFCIHAGGRAVLDELQKNLELSDWQMEPSRMTLYRFGNTSSSSLWYELGYSEAKGRVMKGDRMWQIAFGSGFKCNSAVWRALRSVNPAKEKSPWMDDIDSFPVHVPKVTTIQS

SEQ ID NO: 2433 - protein, 774 aa, Mycobacterium bovis AF2122/97
MSFVVVAPEVLAAAASDLAGIGSTLAQANAAALAPTTAVLAAGADEVSAAIASLFGAHGQAYQAVSAQMSAFHAQFMQALTGAGGAYAAAEAVNVSAAQSVEQDLLAAINARFERIFGRPLIGDGANGGPGQDGGPGGLLYGNGGNGGTSTTVGMAGGNGGAAGLIGNGGFGGGGGPGAAGGNGGAGGWLFGNGGAGGAGGLGVAPGVPGGAGGAGGAGGVGGPAGLWGHGGAGGAGGAGVAGAGGFEGTIGAGGAGGVGGAGGVGGAGGAGGWLYGDAGAGGDGGVGGAGGTGGLGNRGGAGGAGGAGGVGGAGGAAGLWGGGGAGGVGGTGGGAGLGAQSVTFSSSLSGLSGGDGGAGGAGGAGGAGGTGGWLYGGGGAAGSGGDGGTGGQGGAGGAGVFSLFGSGGGPGGNGGVGGVGGVGGAGGRAGLFGVGGLGGAGGDAGDSGEGGFGGPGLAGGLFGNPGNGGVGGIGGDAAAGGAGGAGGNGGWLFGNGGAGGSGGDGGAAGRGGAGNLGSAGGINAPAGNPGSGSVGIGGAGGAGGTAGLFGDGGAGGAGAAGGFGGISAATPSAGSEGAMGGAGGVGGNARLLGTGGAGGVGGGGGAGGDGGRGGVATPGGQGGDAGDGGAGGAGGNGGGGASGAGGWLLGTGGAGGAGGNGGNGGKAGFSPGPTNFGLNGAGGGGGVGGNGATGPWLFGDGGAGGGGGAGGIGGDGGPTPGSTGAGAAGGHGGDAQLIGNGGHGGAGGTGVPNGSGGAGGLSGLLFGEPGANG

SEQ ID NO: 2434 - protein, 162 aa, Zea mays
VGLNQPAEVLLQTRIFSYADTQRHRLGPNYLMLPVNAPKCAHHNNHHDGFMNFMHRDEEVNYFPSRFDPARHAEKVPIPPRVLTGCREKCIIQKENNFKQAGERYRSFDPARQDRFIQRWVDALTDPRVTHEHRTIWISYWSQCDAALGQKLASRLNLKPSM

SEQ ID NO: 2435 - protein, 724 aa, Bradyrhizobium sp. ORS278
MPVPLTTPAFGHATLANCEREQIHLAGSIQPHGILLAVKEPDNVVIQASINAAEFLNTNSVVGRPLRDLGGDLALQILPHLNGPLHLAPMTLRCTVGSPPRRVDCTVHRPSNGGLIVELEPATKTTNVAPALDGAFHRITSSSSLIGLCDETATIFREITGYDRVMVYRFDEEGHGEVLSERRRPDLEAFLGNRYPASDIPQIARRLYERNRVRLLVDVNYTPVPLQPRISPLNGRDLDMSLSCLRSMSPIHQKYLQNMGVGATLVCSLMVSGRLWGLIACHHYEPRFVPFDIRAAGEALAETCAIRIAALESFAQSQSELVVRRLEQRLVEAVSRDGEWQAALFDGSQSLLQPLGASGAALLFEGQVMTAGDVPSTQRIRDLATWLDRRRKAPDAPPQGLTVTASLTLDDPSFADIRSIASGLIAAPLSASEGEYLLWFRPEQVRTVTWGGDPLKAVIIGDDPSDLSPRRSFAQWHQLVEGKSEPWSPAELASARLVSETVADVALQLRSVRMVIAQDQLATISAQVLRSEQPVIIADVEGRILLLNEAFEQQLRASHPHIPHLRDLGAYCTAPAEFRANLDDLMRNKRSWRGELTLTGGATPQRPLMVRADPVIAPHDRVLGFVLIFSDLTERKTAEAARARFQEEIDGARRPSLRLDQSASLIYKELAASTVENAQLAALEVTHGAEAGSMPEMLESIRNSTARTLGILEHLVWYRSQSEE

SEQ ID NO: 2436 - protein, 430 aa, Chlorobium tepidum TLS
MTQFQGVKGTRDIFPDEISRWHYVEGVVHSVAALYGFSEIRTPVFEYTELFQRGIGATTDIVGKEMFTFLPDPNGRSLTLRPEMTAGVMRACLQKNLLSQAPVHKLWYISDLFRKERPQAGRQRQFTQFGAELLGVSNPAAVAEVLTLMMQVFETLGLHGLRLRINSLGDLDDRARYREALRAYFQPYEADLDELSKERLKKNPLRILDSKNPALQEMIMGAPRLYHSLKPESVAEFEQVLAYLDDRQIAYNVDHLLVRGLDYYCHTAFEVTSSELGAQDAIGGGGRYDGLARELGASADLPAVGFAVGMERLMIVMEKQGLFATLNPHGPLVSVIIQQKELAGHAMQVAFHLRKAGIKTEIDLAERSMKAQMRDANRMGSAYALFVGQSEFESGIYALKNLVTSEQTSLDLDAIIEVLREPAARESLRP

SEQ ID NO: 2437 - protein, 333 aa, Saccharomyces bayanus
MSEHEDKKQKVGGSSLDQLKNAGTHVVADSGDFESISKYEPQDSTTNPSLILAASKLEKYEKLIDAAVEFGRKHGKTDHEKVENAMDKILVEFGSQILKIVPGRVSTEVDARLSFDKKATVKKALHIIKLYKDMGVPKERVLIKIASTWEGIQAAKELEAKHGIHCNMTLLFSFTQAVACAEANVTLISPFVGRIMDFYKERSGEDYTGETDPGVLSVRKIYSYYKRHGYKTEVMAASFRNLDELKALAGIDDMTLPLNLLQQLHESTDPIENKLNAETAKQEGVEKVSFINDEPHFRYVFNEDQMATEKLSDGIRKFSVDIEALYELVEKKM

SEQ ID NO: 2438 - protein, 335 aa, Saccharomyces bayanus
MSEPAQKKQKVANNSLEQLKAAGTVVVADTGDFNSIAKFQPQDSTTNPSLILAAAKQPAHAKLIDVAVAYGKKHGKTTAEQVESAVDRLLVEFGKEILKIVPGRVSTEVDARLSFDTQATIDKARHIIKLYEQEGVSRERVLIKIASTWEGIQAAKELEEKDGIHCNLTLLFSFGQAVACAEAQVTLISPFVGRILDWYKASTGKEYAGETDPGVVSVKSIYNYYKKYGYKTIVMGASFRSTDEIKNLAGVDYLTISPQLLDTLMNSTEPFPRVLDPATAKKEAGDKISYINDEPKFRFDLNEDAMATEKLSEGIRKFSADIVTLFDLIEKKVTA

SEQ ID NO: 2439 - protein, 494 aa, Thermobifida fusca
MTETNEALSTASNATGSTLDSGAPAASDRNSLSVGSNGPLLLHDVRLVETLAHFNRERVPERNPHAKGAGAFGVFETTEDVSQYTKAALFQKGARTEMLARFSTVAGEQGSPDTWRDVRGFALKFYTSEGNYDLVGNNTPIFFVRDPMKFPHFIRSQKRMPDTGLRDNNMQWDFWTLNPETAHQVTYLMGDRGLPRTWRHMNGYGSHTYMWINAKGEKFWVKYHFKTDQGIENMTNEEAERLAGVDADFHRRDLVEAIERGDYPSWTLYVQVMPYEDAKTYRFNPFDLTKVWPHSDYPLIKVGKMTLNRNPENFFAEIEQAAFAPSNLVPGIGVSPDKMLLGRVFAYADAHRARIGTNYFQLPVNKPRVKVNSYTFDGHMTYEHSGKAPVYAPNSYGRPWSDQTGPVEDSWEADGELVRSAYELHAEDDDFSQAGTLVREVFDDAQRDRLVETVADHLSKGVVEPVLSRAFQYWKNIDETIGERIEKRYHEIAR

SEQ ID NO: 2440 - protein, 351 aa, Brassica napus
MPHKRIAMISAHLQPSFTPQMEAKNSVMGLESCRAKGGNPGFKVAILGAAGGIGQSLSLLMKVNPLGSLLHLYDVVNAPGVTADVSHMDTGAVVRGFLGAKQLEDALTGMDLVIIPAGVPRKPGMTRDDLFKINAGIVRTLCEGVGGCCPNAIVNLISNPVNSTVAIAAEVFKKAGTYDPKKLLGVTTLDVARANTFVAEVLGLDPREVDVPVVGGHAGVTILPLSSQVTPPSSFTPSEIEYLTNKIQHGGTDVVEAHAGVGSSPLPIILAAPFADACLRGLRGDANVIECSFVASQVTDYFLCTKVRLGRTGAEEVFQLGPLNEYERVGLEKAKEELAGSIQKGVDFIRK

SEQ ID NO: 2441 - protein, 241 aa, Nicotiana sylvestris
MGRGRVELKRIENKINRQVTFAKRRNGLLKKAYELSVLCDAEVALIIFSNRGKLYEFCSSSSMLKTLERYQKCNYGAPETNISTREALEISSQQEYLKLKARYEALQRSQRNLLGEDLGPLNSKELESLERQLDMSLKQIRSTRTQLMLDQLTDLQRKEHALNEANRTLKQRLMEGSQLNLQWQQNAQDMGYGRQTTQTQGDGFFHPLECEPTLQIGYQNDPITVGGAGPSVNNYMAGWLP

SEQ ID NO: 2442 - protein, 355 aa, Anabaena variabilis ATCC 29413
MSATPVTQLTPSSQPQQPCLPLLGASVTELTSWVQQQGQPAYRGKQLHDWIYHKGVRSLTDISVFSKQWRAAVADVPIGRSTIHHRSVASDGTVKYLLQLSDGEIVETVGIPTDKRLTVCVSTQVGCPMACDFCATGKGGYKRNLERHEIVDQVLTVQEDFQQRVSHVVFMGMGEPLLNTENVLAALRSLNQDVGIGQRSLTLSTVGIRDRISQLAEHHLQVTLAVSLHAPNQALREQLIPSARSYHIEDLLAECREYVAITGRRISFEYILLAGVNDLPEHALELSKHLRGFQNHVNLIPYNPISEVDYKRPSGDRIQAFLTVLQQQHIAVSVRYSRGLEADAACGQLRTKTSR

SEQ ID NO: 2443 - protein, 529 aa, Neurospora crassa
MAMSTVAAALGKLLFVAVVTLVISVANALSSVPELSDWEQDQYLTLQLTVPLGSGDAKPIRHRVVPLTEAVGMNQSVIARESITIKGTMVPTEESGWLEFIDSNSIAYLNCDNSNSTSFFDQLMSKAPKAILLFSLAGAGCRRDSTDDWNYTTLFTMTDQIDARDTLNLTMSGSLATITGDYEEPDDDDDEDRTGHGSPIAMNILYSITGVITLLFLAIIATGAIRAHRYPERYGPRPGYGGRPSQSRAKGLARAVLETLPIVKFGEKSPAKPDPDFQLEQQPSRSSQDPTPRAKLSAIQEAVPSIAKSQGPMTVASVEASEQASSATVYGAQTGMTNTAGDIENTTPDDINLGCPICTEDFTIGEDVRVLPCNHRYHPACVDPWLVNISGTCPLCRLDLRPHSSTESTTGPGDNHSVSLPTAAGDNAQQPGTSGSPMPSTTPRERRRSLRILDLHRLRAASIEERMEILRRHRSQQQQRRHVTGSSLTGDPDTGESADPTHRARLAERFRGRFRASRPPGRRSHNQQR

SEQ ID NO: 2444 - protein, 352 aa, Xylella fastidiosa Temecula1
MNVMGFAALSATGPLERFAFGRRAPRPDDVVIDILYCGVCHTDLHLARNHSGFTTYPIVPGHEIIGCVREIGKTVTRFKRGDLVGVGCMVDSCQHCQPCLKGWEQDCIEGSTFTYNSIDRRDGSITYGGYSDVIVVRDKFVLLLPDGLDPAGAAPLLCAGITTWSPLRRWNVGKDSKVAVVGLGGLGHMALKLAKALGADVTLFTRSSGKEGDAFRLGADRVVLSSDLEQMKAVYSRFDVIIDTAPYDHDVNPYMPTLVLEGVLVLVGYMGPLSTPVNAGGVVRGRRAISGSFIGGVPETQQMLDFCGQHGIVSDVEIIPIQKINEAYERMLKSDVKYRFVIDMTSLTSSGA

SEQ ID NO: 2445 - protein, 524 aa, Chlamydia muridarum
MGKSFLDCESLIALQEIATNPVDLTLPGTLSQDRIQQYALSAEGFTYSYATERVDDRSLNALRMLAEERELIKQMESMQQGAVMNYIEGFQSESRSVLHTATRAWVRDHDLKDEAASIANHSEREAHRLAEFLYAARSKFSTLVQIGIGGSELGPKAMYFAMQGICPSDKRIFFVSNIDPDNAAEVLKEVDLKQTLIVVVSKSGTTLEPSVNEELFKRAYQDKGLSVADHFVAVTAEGSPMDDKTHYLEVFHLWDSVGGRFSATSMVGGVVLGFAFGYEVFFEFLQGAASMDAHALTPIMEKNLPLLSAMLGIWNRNVLKYPTTAVIPYATGLKYFTAHLQQCGMESNGKSISRQGKEVHFATSPIIWGDVGTNCQHSFFQSLHQGTDIVPVEFIGFLQNQRGIDCVLSGSSSSQKLFANLVAQSLALAQGRDNDNPNKRFKGNRPSSILVAQQLSPRIAGGLLAFYEHKFAFQGFCWGINSFDQEGVSLGKELATQIIGLMSGAAPIEFPEARELLRLFNVLQ

SEQ ID NO: 2446 - protein, 416 aa, Glomus mosseae
MSLSNKLSIRDLNVKDKRVLIRVDFNVPLDGTTITNNQRIVAALPTIKYALEQKAKTVVLMSHLGRPDGKKVDKYSLAPVAKEVERLLGKKVTFLEDCVGEGVENYVKNACDGEVILLENLRFHAEEEGSSKGPDGKKVKADLEKVKEFRRSLTALGDVYINDAFGTAHRAHSSMVGVELPQKAAGFLVKKELEYFAKALESPERPFLAILGGAKVSDKIQLIDNLIAKVDSLIICGGMAFTFKKTLENVKIGNSLFDADGAKTVGEVMEKAKKHDVEVVLPVDYITADKFAKDAQVGYATDQEGIPDGWMGLDCGEKSVELYKQTIAKAKTILWNGPAGVFEFDNFAKGTKATLDCAVEAAQSGKIVIIGGGDTATVAAKYGVEDKLSHVSTGGGASLELLEGKDLPGVSALSSK

SEQ ID NO: 2447 - protein, 850 aa, Mycobacterium bovis AF2122/97
MSFVIAAPEALVAVASDLAGIGSALAEANAAALAPTTALLAAGADEVSAAIAALFGAHGQAYQTVSAQASAFHAQFVQALTGGGGAYAAAEAANVSAAQSTDQRLLDLINGPTQALLGRPLIGDGANGGPGQDGGPGGLLYGNGGNGGTSTTAGVAGGNGGAAGLIGNGGAGGGGGAGAAGGNGGAGGWLYGNGGAGGAGGTSVIPGVAGGNGGAGGSAGLWGTGGAGGDGGNGRSGPVNVAGSAGGNGGAGGAAGLFGDAGAGGNGGKGGAGGAAFSINFTAGDGGAGGAGGSGGHALLWGAGGAGGNGGSGGTGGAGGSTAGAGGNGGAGGGGGTGGLLFGNGGAGGHGAAAGNGLAAGNGVSSSGGGGAGGTGGAGGDGGAGGAGGNARLWGVGGAGGAGGDGGAGGAGGKGGSGLSGNANGGAGGDSGRGGTGGAGGEGGAAGLLVGTGGHGGDGGAGGAAVKGGDGGAAAGTGIAGAGGRGGAGGSGGSGGDGGGGAAGPAGWLFGDGGAGGNGGAAAAGGAGGQAGGGGGNGGNGGNGGNGGNGGNGATGGWLYGNGGAGGQGATAGAGGAGANGVSSTNGGGNGGIGGTGGSGGAGGNAGLLGVGGAGGHGASGGAGDRGGAGGTGFISSDGGAGGDGGDGGNGGAGGTGGLLFGAGGNGGPGGSGGAADIGGNGGAGNGGGTDGNGGNGGSGGGAGSGGDGGGAGGNGAWLFGNGGAGGGGGKGGNGAGGGLGGGSFGLPGLNGSGGDGGDGGNGAPGGVLYGNGGAGGQGSSGGIGGPGATGGAGGKGGDGGDAQLIGDGGNGGNGGAGGTGGTPGPGGPGGSGGLGGLLFGQTGTAGVSP

SEQ ID NO: 2448 - protein, 197 aa, Zea mays
MDVKCRRLEGKVAVVTASTQGIGLAIAERLGLEGAAAVVSSRKQKNVDEAVEGLKAKGITVVGAVCHVSDAQQRKNIIETAVKDAAPHLRAGSSVILISSIAGYNPEQGLTMYGVTKTALFGLTKALAGEMGPDIRVNCIAPGFVPTRFASFFIDNETIRKKLNERTMLKRLGSVEDMAAAAAFLASDDASFITAET

SEQ ID NO: 2449 - protein, 480 aa, Ralstonia metallidurans CH34
MNTNQNAQTAQTVQTVQTDVAIIGAGTAGLAAYRAAIAAGKRAVIIEGGAYGTTCARVGCMPSKLLIAAAEAAHEARHTAAFGVHVDGPVRIDGREVMQRVRSERDRFVGFVVRGVESIPQDDRLIGRARFIDNTILQVDDHTVVRASRVVIATGSRPAVPPSFGVFGDRLIVNDDVFSWEDLPQSVAVFGPGVIGLELGQALSRLGVRVRVFGVGGGVGPLSDPEIRAYAAKSFNQEFSLLADARVLEMRREGDDAVITFEDADGQTVTERFAYVLAATGRRPNVDTLALGNTALELDGRGVPTFDPVTLQCGESPIFIAGDANNVLPLLHEAADEGKIAGENAALWPKVGPLTRRAPIAVVFSDPQIAMVGKRFAELTPGSFVTGEVSFEDQGRSRVMLKNRGLMHVYADRATGRFIGAEWIGPRAENIAHLLAWSYQQGLTIAAMLAMPFYHPVVEEGLRTALRDAQAKLAQLQEAA

SEQ ID NO: 2450 - protein, 80 aa, Glycine max
MLEFNFMQHILYRQKEQFSDGVGYGWIDGLKAHAEKHVTDRMMLNAANIFPFNTPTTKEAYYYRMIFERFFPQVNLINHA

SEQ ID NO: 2451 - protein, 390 aa, Chlamydophila caviae GPIC
MFEFRFPKIGETGSGGFVVRWLKQVGENVAKDEPIIEVSTDKIATELASPKAGKLIRCLVSEGDEVASGEILAEIAIESGMQEEVLEEASSKTSCSHSQDCGNSPGWFSPAVLSLAHREGVSIQQLQQISGTGNEGRVTRKDLENYISEMRAPSSPKTTNANENRIPMSPLRRAIASSLSKSSDEVPHASLIVDIDVTDLMNLISEEKDRFFATHGVKLTITSFIIQCLAKALEQFPLLNGSLDGDTIVVKKSINVGVAVNLNKEGVVVPVIHNCQDRGLVSIAKTLADVSTRARSNKLDPSETQDGSITVTNFGMTGALIGMPIIRYPEVAILGIGTIQKRVVVRDDDSLAIRKMVYVTLTFDHRVLDGIYGSEFLTSLKNRLESVTMS

SEQ ID NO: 2452 - protein, 390 aa, Chlorobium tepidum TLS
MHIGVLTGGGDAPGINACIKTIVTISTEKGYRVTGIRRGWNGLLAFDPDDPASRTEHIVDLDSELVRRIDRTGGTLLHTSRINPGNLKKKEIPPFLRNSPHLLRTGLHHSGNFDLTDHVLRSIDALGLDVIIVIGGDDTIGYADHLAKAAVKVIGVPKTMDNDVYGSDYCIGFGTAVTRSVQYIHQLRTSSGSHERITIVELFGRSTGETCLVSAYLAGVDRALIPEVPFDPETLADYVIQDKAANPSQYAMIAISEGARMIGSKMIEYCGRRYDEDGHEPAGIGQLTRETISMLTGQDVICQQLGYLMRSGIPDALDLMVGFNFAQLAVELIAEGTFGVMVALQKGIYTCLPLAEVSSNTKQVDISELYDPRYYRPKMRSVMGKPMFLY

SEQ ID NO: 2453 - protein, 386 aa, Escherichia coli O157:H7 EDL933
MTRKQATIAVRSGLNDDEQYGCVVPPIHLSSTYNFTGFNEPRAHDYSRRGNPTRDVVQRALAELEGGAGAVLTNTGMSAIHLVTTVFLKPGDLLVAPHDCYGGSYRLFDSLAKRGCYRVLFVDQGDEQALRAALAENPKLVLVESPSNPLLRVVDIAKICHLAREVGAVSVVDNTFLSPALQNPLALGADLVLHSCTKYLNGHSDVVAGVVIAKDPDVVTELAWWANNIGVTGGAFDSYLLLRGLRTLVPRMELAQRNAKAIVKYLQTQPLVKKLYHPSLPENQGHEIAARQQKGFGAMLSFELDGDEQTLRRFLGGLSLFTLAESLGGVESLISHAATMTHAGMAPEARAAAGISETLLRISTGIEDGEDLIADLENGFRAANKG

SEQ ID NO: 2454 - protein, 199 aa, Oryza sativa
MRRGGAAEEDAEAARFRGVRKRPWGRYAAEIRDPAKKARVWLGTYDSAEDAARAYDAAARALRGAKAKTNFPLSLPHAQPQLHHHHHHHLTYPAAAVVAARPATSSLSSTGESFGTRPRPVLPPRPPPPPPIPDGDCRSDCGSSASVVDDDCADAAASPSCRLPFQFDLNLPPGGGGGGGGGFGCAYDDEELRLTALRL

SEQ ID NO: 2455 - protein, 270 aa, Pimelobacter simplex
MSANRFVGKVAFITGAARGQGRAEAVRLASEGADIIAIDACADFDSTAYDGATEADLAETVAQVEAQGRKIVATKTDVRDFAAVSEALATGIAALGRLDVVVANAGICSGAMSWEITPEQWQETLDVNLTGVFHTCKAAIPHLIEQGEGGSIVIASSVAGLRGLPFLGHYVASKHGVTGLAKTLAVELGAHNIRVNTVHPNGVDTGMQVNDMHALVQEYATTLAPIFMGSLPDQISRPEDIANAVAWLASDEARHVTGIQLPVDLGTLIR

SEQ ID NO: 2456 - protein, 78 aa, Glycine max
  unsure (1)..(78): unsure at all Xaa locations
TCLRCDVWVCELPTECPVCGFTLXSSPHLARSYHHLCPIVMVDDVTPSQKDSSRSVPNTCFGCQQSLLSHGNKPGLSV

SEQ ID NO: 2457 - protein, 352 aa, Staphylococcus xylosus
VSNDITQYTSASIFSEVGKQTEMFARFSTVAGERGAADAERDIRGFALKFYTDEGNWDLVGNNTPVFFFRDPKLFASLNHAVKRDPRTNMRSAQNNWDFWTSLPEALHQVTILMSDRGIPKGYRNMHGFGSHTYSMYNDKGERVWVKFHHRTQQGIENLQPDEAAKIIADDRESSQRDLFEAIENKDYPKWKTYIQVMTEEQARNHKDNPFDLTKVWYKGDYPLIEVGEWELNRNPDNYFQDVEQAAFAPTNIVPGIDFSPDKMLQGRLFSYGDAQRYRLGVNHWQIPVNQPKGVGVENICPFSRDGQMRILDNNQGGGTHYYPNSDGSFEDQPEFKKPGLKVEGEAYEYDS

SEQ ID NO: 2458 - protein, 486 aa, Pseudomonas stutzeri
MKEIKHFINGAFVDSASGRTFEDINPVNGQVIGRVHEAGRAEVDAAVRAARAALKGPWGKMTVAERAEILHRVADGVTARFDEFLEAECLDTGKPKSLASHIDIPRGAANFKVFADLIKNVPTEAFEMATPDGAGALNYGVRRPKGVIGVISPWNLPLLLMTWKVGPALACGNCVVVKPSEETPLTATLLGEVMQAAGVPAGVYNVVHGFGGDSAGAFLTEHPDVDAYTFTGETGTGETIMRAAAKGVRQVSLELGGKNAGIVFADCDLDKAIEGTLRSAFANCGQVCLGTERVYVERPIFDAFVARLKAGAEALKIGEPNDPEANFGPLISHKHREKVLSYYQQAVDDGATVVTGGGVPEMPAHLAGGAWVQPTIWTGLTDDSAVVTEEIFGPCCHIRPFDSEEEAIELANSLPYGLASAIWTENASRAHRVAGQIEAGIVWVNSWFLRDLRTAFGGSKQSGIGREGGVHSLEFYTELKNICVKL

SEQ ID NO: 2459 - protein, 507 aa, Brucella melitensis 16M
MKLQEDYSMTDRPIMTTSAGAPIPDNQNSLTAGERGPILMQDYQLIEKLSHQNRERIPERAVHAKGWGAYGTLTITGDISRYTKAKVLQPGAQTPMLARFSTVAGELGAADAERDVRGFALKFYTQEGNWDLVGNNTPVFFVRDPLKFPDFIHTQKRHPRTHLRSATAMWDFWSLSPESLHQVTILMSDRGLPTDVRHINGYGSHTYSFWNDAGERYWVKFHFKTMQGHKHWTNAEAEQVIGRTRESTQEDLFSAIENGEFPKWKVQVQIMPELDADKTPYNPFDLTKVWPHADYPPIDIGVMELNRNPENYFTEVENAAFSPSNIVPGIGFSPDKMLQARIFSYADAHRHRLGTHYESIPVNQPKCPVHHYHRDGQMNVYGGIKTGNPDAYYEPNSFNGPVEQPSAKEPPLCISGNADRYNHRIGNDDYSQPRALFNLFDAAQKQRLFSNIAAAMKGVPGFIVERQLGHFKLIHPEYEAGVRKALKDAHGYDANTIALNEKITAAE

SEQ ID NO: 2460 - protein, 458 aa, Glycine max
MSITHSLTTPLSSSSSAFLAPSSFNCRGQVSLPVKSVSICKCVATPEAETAYKTGVNRNPNMGKLQAGYLFPEIARRRSAHLLKYPDAKVISLGIGDTTEPIPEVITDAMSKRSHALSTIEGYSGYGAEQGEKPLRRALASTFYSDLGIEEDDIFVSDGAKCDISRLQIVFGSNVKMAVQDPSYPAYVDSSVIMGQTGLFQKNVEKFANIEYMRCNPENGFFPDLSSISRPDIIFFCSPNNPTGAAATREQLTQLVQFAKDNGSIVIHDSAYAMYISGDNPRSIFEIPGAKEVAIETSSFSKYAGFTGVRLGWTVVPKQLLFSDGFPVAKDFNRIVCTCFNGASNISQAGGLACLSPEGLKAMRDVIGFYKENTNIIMETFDSLGFKVYGGKDAPYVWVHFPGRSSWDVFAEILEKTHVVTTPGSGFGPGGEGFIRVSAFGHRENVLEACRRFKQLYK

SEQ ID NO: 2461 - protein, 144 aa, Allium sativum
QVEYAMEAIGNAGSAIGILAKDGVVLVGEKKVTSKLLQTSKSTEKMYKIDDHLACAVAGIMSDANILINTARVQAQRYAFSYQEPMPVEQLVQSLCDTKQGYTQFGGLRPFGVSFLFAGWDKNYGFQLYMSDPSAIMVDGKPPP

SEQ ID NO: 2462 - protein, 393 aa, Chlamydia muridarum
MKRNPNFTSLTQNYLFSDLRNRIAQFHSENPQHQVINLSIGDTTQPLDTSVAEAFSQAIARFSSPSTYCGYGPDFGLPSLRQKLSEKLYHGCVNAEEIFISDGAKVDLFRLLSFFGPNQIVAVQDPSYPAYIDIARLTGAKEIVSLPCLQENDFLPVFPENTHIDILCLCSPNNPTGTALNKNQLRAIVRYAIEHNILILFDAAYSAFISAPSLPKSIFEIPDARFCAIEINSFSKSLGFAGIRLGWTVIPKELTYEDGQPIIRDWKRFLSTTFNGASIPAQEAATAGLSTLSKLEAVHYYKENSHLLKTSLLKAGFQVFGGEHAPYLWVKPTIETVPYRDLFDFFLQEYHIAITPGIGFGLCGSGFVRFSSLGKREDVLVACERLQMTPALQ

SEQ ID NO: 2463 - protein, 443 aa, Pichia pastoris
MPSHFDTLQLHAGQTEAPHNARAVPIYATSSYVFRDSEHGAKLFGLEEPGYIYSRLMNPTQNVFEERIAALEGGAAALAVGSGQAAQFLAIAGLAHTGDNVISTSFLYGGTYNQFKVALKRLGIESRFVHGDDPAEFERLIDDKTKAIYVESIGNPKYNIPDFEALAGLAHKHGIPLVVDNTFGAGGYYVRPIELGADTVTHSTTKCINGHGNTIGGVVVDSGKFPWKDYPEKYPQFSKPSEGYHGLILNDAFGPAAFIGHLRTELLRDLGPASSPFGNFLNIIGLETLSLRAERHAENALKLAKYLETSPYVSWVSYPGLESHDYHEAAKKYLKNGFGGVLSFGVKDHGKPALTPFEEAGPKVVDSLKVFSNLANVGDSKSLIIAPYYSTHQQLSHEEKLASGVTKDSIRVSVGTEFIDDLIRDLEQAFAFVYEERNTKFVS

SEQ ID NO: 2464 - protein, 231 aa, Streptomyces coelicolor A3(2)
MTRASLNKQPHEVASMFDHVAERYDLTNAVLSLGQDRAWRKAVARAVDARPAQKVLDLAAGTATSSLPFARTGAYVVPCDFSQGMLQVGKERHSWLPFTAGDATRLPFKDDVFDAVTISFGLRNVQDTDAALREMYRVTRPGGRVVICEFSHPTWAPFRTVYTEYLMRALPPVARAVSSNPDAYVYLAESIRAWPDQPALAGRLGRAGWSRVAWRNLTGGVVTLHRGFKAS

SEQ ID NO: 2465 - protein, 539 aa, Zea mays
  unsure (1)..(539): unsure at all Xaa locations
MSATQLLRRSRKLQSLQNAVGCENFFLFXHFSSGSGSFIAKENGVGKRTRGTRFSQQYQPTKELEPFSLGVNGNCTWRRASNSLTPSAASWLNGSFSCGQVVSARTFSSSADLPPHQEIGMPSLSPTMTEGNIAKWLKKEGDKVSPGEVLCEVETDKATVEMECMEEGYLAKIIHGDGAKEIKVGEVIAITVEEEGDIEKFKDYKPSSSAEPVAPAESKAQPEPSQPKVEEKKLTQAPEVKAPKIEEASQSGDRIFASPLARKLAEDNNVPLSSVKGTGPDGRIFKADIEDYLAKGGLREAFAAPGLGYVDIPNAQIRKVTANRLLASKQTIPHYYLTVDARVDKLVKLRGELNPLQDASGGKKISINDLVIKAAALALRKVPQCNSSWMNDFIRQYHNVNINVAVQTEHGLFVPVIRDADKKGLGTIAEEVKQLAQKARDNSLKPADYEGGTFTVSNLGGPFGIKQFCAIINPPQSAILAIGSAEKRVIPGSADGLYEFGSFMSATLSCDHRVIDGAIGAEFLKAFKGYIENPTSMLL

SEQ ID NO: 2466 - protein, 387 aa, Bordetella bronchiseptica RB50
MKPDTRLVHLGRDPERFEGLVNIPPCRTSTFLHASVADYQAAASRKQDSLYYGRFGSQTSRALEAACTELDGGHGAMLFPCGLAAITRVLGSLLEPGQHLLMADTVYGPARAFCEQELARLGVETTWYAPDADLDALVRPATRVIYGEAPGSLTFEMQDLRALAEVARRHGLVSVVDNTWATSWFCQPLALGIDISIQSASKYIVGHSDAMLGVAVANEAQFPALRRAAAQYGNAVSPDDCYMALRGLRTLGVRLERHQASALRVAQWLRTRAEVEQVLHPALPDSPGHALWRRDFSGASGLFGVAFRAGDDAALARFVDDLRLFGIGVSWGGFESLALPSHPVRNTSAAALGGRPLVRLHIGLEDPDDLIADLARALDRHMAAARG

SEQ ID NO: 2467 - protein, 548 aa, Morganella morganii
MTEITVNGMTCTSCATHVKDALEKIPGVNAAVVSYPESRAQVMADTAVSHNQLLAAIAALGYQGSIRVGDFKDEPKIRDALEGAGLHIAIIGSGGAAMAAALKAVEQGATVTLIERGTIGGTCVNIGCVPSKIMIRAAHIAHLRRESPFDGGIAATVPAIDRSKLLAQQQARVDELRHAKYEGILDGNPAITVLHGEARFKDDQSLVVRLNEGGEREVTFDRCLVATGASPAVPPIPGLKESPYWTSTEALVSDTIPARLAVIGSSVVALELAQAFARLGSQVTILARGTLFFREDPAIGEAVTAAFRAEGIEVLEHTQASQVAHVNGEFVLTTGHGELRADKLLVATGRAPNTRSLALDAAGVTVNAQGAIVIDQGMRTSNPNIYAAGDCTDQPQFVYVAAAAGTRAAINMTGGDAALNLTAMPAVVFTDPQVATVGYSEAEAHHDGIETDSRTLTLDNVPRALANFDTRGFIKLVIEEGSGRLIGVQAVAPEAGELIQTAVLAIRNRMTVQELADQLFPYLTMVEGLKLAAQTFNKDVKQLSCCAG

SEQ ID NO: 2468 - protein, 167 aa, Eremothecium gossypii
  unsure (1)..(167): unsure at all Xaa locations
MAREGLVRDLVFYKTYHNNSANVAIHAVFVPGILLATLRLLHEVRAGGVSVADGVAAAYTAYYVRLHAGAGAVAGAVLAGVCWALHAGAVPLSAGQXXALFCAGWGFQFVGHGVFEGRRPALVDNLGGALATAPFFVLWELLFALGLYPALHAQVQAAVDAELARGK

SEQ ID NO: 2469 - protein, 506 aa, Rhodospirillum rubrum
MLYAAPGTADAIFAFKPRYDNFIDGTWQPPVRGEYFDNVTPITGKVFCKAARSTEEDITLALDAAHAAADRWGRTTAAERALILNRIADRLQDNLETLAYVESIDNGKPIRETLAADIPLAIDHFRYFAACIRAQEGSLSQIDETTIAYHFNEPLGVVGQIIPWNFPILMATWKLAPALAAGNCIVLKPAEQTPISILVLTELIADLLPPGVLNVVNGFGLEAGKPLASSKRIAKIAFTGETATGRLIMQYASQNLIPVTLELGGKSPNVFFDDIASADDSFFDKAVEGFVMFALNQGEICTCPSRALIHESLYDRFIERALARVAVIKQGSPLDTETMIGAQASTEQMDKILSYMDIGREEGATVLAGGARAELGGELDGGYYVQPTVFKGNNSMRIFQEEIFGPVVAVTTFKDEDEALHLANDTHYGLGSGVWTRDGNRAFRFGRGIKAGRVWTNCYHLYPAHAAFGGYKQSGIGRENHHMMLDHYQQTKNLLVSYDPKAMGFF

SEQ ID NO: 2470 - protein, 466 aa, Pseudomonas putida KT2440
MKSYDVVIIGGGPGGYNAAIRAGQLGLSVACVEGRSTLGGTCLNVGCMPSKALLHASELYEAASGDEFAHLGIEVKPTLNLAQMMKQKDESVTGLTKGIEYLFRKNKVEWIKGWGRLDGIGKVVVKAEDGSETALQAKDIVIATGSEPTPLPGVTVDNQRIIDSTGALSLPQVPKHLVVIGAGVIGLELGSVWRRLGSQVTVIEYLDRICPGTDTETAKTLQKALAKQGMVFKLGSKVTQATAGADGVSLTLEPAAGGTAESLQADYVLVAIGRRPYTKGLNLESVGLEADKRGMLNNEHHRTSVPGVWVIGDVTSGPMLAHKAEDEAVACIERIAGKPHEVNYNLIPGVIYTRPEMATVGKTEEQLKAEGRAYKVGKFPFTANSRAKINHETEGFAKVIADAETDEVLGVHLVGPSVSEMIGEFCVAMEFSASAEDIALTCHPHPTRSEALRQAAMNVDGMAMQI

SEQ ID NO: 2471 - protein, 400 aa, Chlamydia muridarum
MSLFEQLPSFSPDSILGLAQAFQEDPREDKINLLLGTYEREKSRYGGFSSVRKAQTVFFGDEKDKNYLPIRGSSVFLDQMAALCFGEIDANRWTGVQAVGGTGALHLGALVYAKSSLAGKVYIPAQTWGNHSRIFSRLGLSLEHYPYYDQEKKDLDLQGLKASLRDAPEASLILLHCCCHNPTGKDIPLSEWPEIIAIIKDRGLIPFFDMAYLGFANGIVEDRRPVRLCIEAGVATFVAGSCSKNFSLYGSRVGFFGVVHQDKTDLSRILSFLEEQIRGEYSSPAREGVAIVTSILENPYLRQEWGLELNGIRQSLEEIRANFVIAMREVAGHSFDFIASQKGFFGYPGFSKEQVVFLREELGIYTTAGGRFNLNGITDKNINRVIHGFAKAYEYSRSVS

SEQ ID NO: 2472 - protein, 341 aa, Amycolatopsis methanolica
MRVGVLTGGGDCPGLNAVIRAVVRKGIEAHGWEIVGFRSGWRGPLTGDSRPLGLDDVEEILIRGGTILGSSRTNPYKEEGGVEKIRAVLADQGVDALIAIGGEDTLGVAKKLTDDGIGVVGVPKTIDNDLAATDYTFGFDTAVHIATEAIDRLRTTAESHYRAMVVEVMGRHAGWIALHAGLAGGANVILVPERPFSVEQVVEWVERRFEKMYAPIIVVAEGAVPEGGAEVLRTGEKDAFGHVQLGGVGTWLADEIAERTGKESRAVVLGHTQRGGTPTAYDRVLATRFGLHAVDAVADGDFGTMVALRGTDIVRVKLAEATAELKTVPPERYEEAEVFFG

SEQ ID NO: 2473 - protein, 80 aa, Triticum aestivum
MAPTVMGSKDTYDAPFQGLKSTDGLPVRRRSNGASLGSVSNGGRIRCMQVWPMEGIKKFETLSYLTPLSTEALLKQVEYL

SEQ ID NO: 2474 - protein, 386 aa, Mycobacterium avium subsp. paratuberculosis str. k10
MKCRAAVIRGVGRDWEIAEIELDPPRSGEVLVRMAVAGICHSDDHLFTGDVVPTPEVVAASGQPAPDWFPLLGGHEGAGVVAEVGPNVTSVRPGDHVALSFIPACGSCRFCVNGQSYICDIGASLFQREMPTDGTCRRHLGAENLLAYGQLGTFAEYAVLSERSVIKIDEAIPFHAASLVSCGVSTGWGSATVSAGTEPGDTVVVIGAGGVGMNALQGARAVGAKYVVAVDPVAAKRDSAKIFGATHTAASARDAIPLVREITAGLMADRVVVCPGVVHVDLIPLALALLRKGGVCVLTGITPFTEPPVPLVLQEMTLSAKQLRGALYGGMNPRTSVPMLLSLYQAGDLKLDELVTRHYRLDEINEAFADLREGRNIRGVIDFASR

SEQ ID NO: 2475 - protein, 589 aa, Chlamydomonas reinhardtii
MQSRQCLNRKASGARPCANSRSLTARVLATAAPVAPSATPASAPLPLPDGVGEHSGLKHLPEAARTRALDKKANKFEKVKVEKCGSRAWNDVFELSSLLKEGKTKWEDLNLDDVDIRLKWAGLFHRGKRTPGKFMMRLKVPNGELTAAQLRFLASSIAPYGADGCADITTRANIQLRGVTMEDSETVIKGLWDVGLTSFQSGMDSVRNLTGNPIAGVDPHELVDTRPLLRDMEAMLFNNGKGREEFANLPRKLNICISSTRDDFPHTHINDVGYEAVAKPNGEVVYNVVVGGYFSIKRNIMSIPLGCSITQDQLMPFTEALLRVFRDHGPRGDRQQTRLMWLVEAVGVDKFRQLLSEYMGGATFGEPVHVHHDQPWERRNLLGVHRQRQAGLNWVGACVPAGRLHAADFEEIAAVAEKYGDGTVRITCEENVIFTNVPDAKLEAMKAEPLFQRFPIFPGVLLSGMVSCTGNQFCGFGLAETKAKAVKVVEALDAQLELSRPVRIQFTGCPNSCGQAQVGDIGLMGAPAKHEGKAVEGYKIFLGGKIGENPALATEFAQGVPAIESVLVPRLKEILISEFGAKERATATA

SEQ ID NO: 2476 - protein, 188 aa, Saccharum hybrid cultivar
SSVVTAAAAIQADPAEKPRAPKAQVVGWPPVRSFRKNIMSVQSDKGAGGSKDADKSSPPPAAAAAVGGAAFVKVSLDGAPYLRKVDLKMYKMYKSYQELSKALEKMFSSTIGSCGSQGMNGMNESKLVDLLNGSEYVPTYEDKEGDWMLVGDVPWEMFVESCKRLRIMKGSEAIGLAPRAMEKCKNRS

SEQ ID NO: 2477 - protein, 148 aa, Oryza sativa
  unsure (1)..(148): unsure at all Xaa locations
MSGAAAAAARALPKAVTFVTGNAKKLEEVRAILGSSIPFQSLKLDLPELQGEPEDISKEKARMAASQVNGPVLVEDTCLCFNALKGLPGPXHGKIVPARGPADFGWDPXYAEMPKSVKNQISHRGKALALVKEHFAAANYKVQNDGSA

SEQ ID NO: 2478 - protein, 410 aa, Chlamydia muridarum
MPSLHVELKNTKTFTSSEIRGFMFEFRFPKIGETASGGIVVRWLKQVGDSIQKDEPLIEVSTDKIATELSPSQAGVLEECLVQEGEEVSPGDVLARLREISPVDTSVPTSVEESPIKEESLVNRENQWLSPAVLGIVQREGLDLQELQKISGTGENSRITRKDVERYLSDKREARAPICSKEENRIPMSPLRRAIASSLRQSSEEVPHASLVVDVDVTDLMNLISLERERFAAAHGVKLTITSFIIQCLAKSLEQFPLLNGSLDGDTIVLKKAVNVGVAVNLNKEGVVVPVIHNCQDRGLVSIAKALADLSSRARASKLDASEAKGGSVTLTNFGMTGALIGMPIIRYPEVAILGIGTIQKRVVVREDDSLAIRKMMYVTLTFDHRVLDGIYGGEFLTALKNRLESVTMS

SEQ ID NO: 2479 - protein, 235 aa, Chloranthus spicatus
  unsure (1)..(235): unsure at all Xaa locations
MGRGRVQLKRIENKINRQVTFSKRRSGLLKKAHEISVLCDAEVALIVFSAKGKLSEYSTDSRMDRILERYERISYAERELRSTDHRPDGNWNLEYSKLKAKLEGLQRXQRHYMGEDLEKLSLKELQPLENQLDNALKHIRTRKTQVMMDSIAELQAREKLLQEQNSMLEKKIQEKNALAHQAHWEQQNQTQSPPPFLLTHQHPTINNSTYQARGEEDRVRTNSLMPPWMLRHVNG

SEQ ID NO: 2480 - protein, 232 aa, Guillardia theta
MSFNIFLSPEGRLKDLEYAQEAANLGSTSCGIKTKDFIFILSERKKKKSLDYLNDQKIYVLDKNKGCCVSGLISDSRKIIDNVRIYCENKYFLINSYPSIEECSNLINNLITSYNTNNDVNKISPRPLGTSFLLFGKSNKKLELIKVDPSGRYIKDKILAIGEGSKDVLIILQEGYRSNMKKIEAKTLAFKTLRAISESILNEKNVEAAQISESNTLRILFKEEINQILKLI

SEQ ID NO: 2481 - protein, 411 aa, Bordetella bronchiseptica RB50
MNTIYDSAAVAAGRRVAARMARVTTSKIYLAIAKVADMQAQGMQVASLTAGEPDFDTPAHVIEAAVQAMRGGDTHYTPVRGSLAMREAVRQKFQRENGLAFRDEEVMVGTGSKQVIANALAVTLETGDEVLLPVPYWAAYTGMVYAAGGVPTFVGTRAEDGYKLTPQALRAALGPRTRWVILNTPSNPSGLVYGSDELRALGEVLRERPDVLILTDEIYEHLNYTAEPPASLRKLCPDLAERIVVVNGVSKAYAMTGWRLGFAGGPADIIEAMANLQAQTTLAPCSISQAAAVAALNGPRESIDAMAAAYRRRRDLVMQIAGGQPGVRLQRPDGAFYAMLDLSEALAGGERFRGDPEPDQAFCEWLLETRHVAAVPGSVFGAPGSVRISFATDEQTIERGLTGLLDAAAHC

SEQ ID NO: 2482 - protein, 454 aa, Neurospora crassa
MSHHFETLQVHAGQEPDPATKSRAVPIYATSSYVFNDSAHGARLFGLKEFGNIYSRIMNPTVDVFEKRIAALEGGLAAIATASGQAAQFMAISGVACAGDNIVSTSNLYGGTYNQLKVMLPRYGIQTKFVTGDKPEDLAAAIDDKTKAVYLESIGNPRYNIPGFEAITKLAHEKGVPVIVDNTFGAGGYFVQPLQYGADIVVHSATKWIGGHGTTVAGVIVDSGRFDWGKHADRFPQMVEPSEGYHGLKFWETFGPMAYITRVRVEILRDLGACLNPFAAQQLLLGLETLSLRCERHTQNALALARYLEKSPYVSWVSYPGLESHGSHENAKKYLKRGFGGVLSFGVKGGASAGSQVVDGFKLISNLANVGDCKTLAIHPWSTTHEQLTDEEKISSGVTEDLIRISVGIEHIDDIIADFDQSFANAAATSAKEEGEKGLVVGQGKVEEAAPTVI

SEQ ID NO: 2483 - protein, 292 aa, Photorhabdus luminescens subsp. laumondii TTO1
MDNQPIIRLADGNHMPQLGLGSWASDDQQIAETIHAALDIGYRAIDTAAIYNNEKGVGNALQETDIPREDIFVTTKLWNDRHLDARAALTESLEKLQLDYVDLYLIHWPAPPQDQYVGAWQQLIELQKEGLIRSIGVSNFQPEHIQRLINETGVHPVINQIELHPLLQQRQLHAWNATHNIVTESWSPLAQGGENVFDNQLVQHLTQKYGKTPAQVVIRWHIDNGMIVIPKSTTLSRIKENFDVFDFKLEKEDLTAMTTLDIGKRLGPTPEIFVDFSEFIQLLEQNSANNQC

SEQ ID NO: 2484 - protein, 396 aa, Triticum aestivum
MALSISAPTSSPFLPAPRQVGRWSSSPSSAKPAVFSLRRPVVVARAAAGNAPSSPAGAVVTELDVVSSFSEIVPDTVVFDDFEKFAPTAATVSSSLLLGIAGLPDTKFKSAIDTALVDGECNTMEKPGDRMSCYLTKALGNVGAELAHQVPGRVSTEIDARLAYDTQGIVQRVHELLQIYNEHDIPSERLLFKIPATWQGIEASRLLESEGTQTHLTFVYSFAQAAAAAQAGASVVQIFVGRIRDWAKNHSGDPEIDEALKKGEDAGLALVKKAYVYIHKNGYKTKLMAAAVRNKQDVFSLLGIDYIIAPLKILQSLDESVTDSDEKYGYVQRLTPSLDKMYNFSQEELVKWDQLSLAAAMGPAAEELLASGLEGYANQARRVEELFAKIWPPPNV

SEQ ID NO: 2485 - protein, 477 aa, Methanococcoides burtonii DSM 6242
MNMKEYDLIVIGSGSGMNYVSLIIQQYPEMKIAVIDKDKPGGICLTRGCIPSKMLLYPAELVREIGKANRFGIDAEIKSIDFKFVMERMRSSIDKDIEMIHHGLSSDPNLDYYEHVAKFVEPYVLEIGEELITSKMIFLSIGSKPMIPPVKGLDDISYLTSDTVLELTTLPKSLAIIGGGYIAAEYGHFFSAMGSKVTIIGRSPRIVDNEEPEISELARKKMARYVDIITDHEVSEIHPSGRQKKIVAKDRNSENEMEILVDEVLVATGRSPNTDILHPEKGGIETDERGWIKVNDHLETTCSNVWAFGDANGQYLFKHVGNYESTLVYENAILNEGIKIDYNAVPYAIFSYPEIAGVGIGESAAIEQYGEDNISIGFHRFEDTGKGMAMGLDSYFVKVILGDSGNTLLGAHIIGPQASILIHQLITLMNTPGSNVGPVVNGMDIHPSLSEVVKRALYSRMSVEEYHSVLKSLELEY

SEQ ID NO: 2486 - protein, 233 aa, Spinacia oleracea
CVAQTSEWEQEGSTNAVLEGESDPEGAVSWGSETQVSDEGGVEGGQGFSEPPEEAKLFVGNLPYDVDSEKLAGIFDAAGVVEIAEVIYNRETDRSRGFGFVTMSTVEEAEKAVELLNGYDMDGRQLTVNKAAPRGSPERAPRGDFEPSCRVYVGNLPWDVDTSRLEQLFSEHGKVVSARVVSDRETGRSRGFGFVTMSSESEVNDAIAALDGQTLDGRAVRVNVAEERPRRAF

SEQ ID NO: 2487 - protein, 444 aa, Escherichia coli O157:H7 EDL933
MGLVKQGARVAVIERYQNVGGGCTHWGTIPSKALRHAVSRIIEFNQNPLYSDHSRLLRSSFADILNHADNVINQQTRMRQGFYERNHCEILQGNARFVDEHTLALDCPDGSVETLTAEKFVIACGSRPYHPTDVDFTHPRIYDSDSILSMHHEPRHVLIYGAGVIGCEYASIFRGMDVKVDLINTRDRLLAFLDQEMSDSLSYHFWNSGVVIRHNEEYEKIEGCDDGVIMHLKSGKKLKADCLLYANGRTGNTDSLALQNIGLETDSRGQLKVNSMYQTAQPHVYAVGDVIGYPSLASAAYDQGRIAAQALVKGEATAHLIEDIPTGIYTIPEISSVGKTEQLLTAMKVPYEVGRAQFKHLARAQIVGMNVGTLKILFHRETKEILGIHCFGERAAEIIHIGQAIMEQKGGGNTIEYFVNTTFNYPTMAEAYRVAALNGLNRLF

SEQ ID NO: 2488 - protein, 80 aa, Glycine max
  unsure (1)..(80): unsure at all Xaa locations
NTTSSNRNASFTSLKSIAGYPTIKTNKHITFIASNGGRMQCMHVWPQFGKKKXENIYYLPDLEDAHXANEVXYLLTKGWI

SEQ ID NO: 2489 - protein, 493 aa, Anabaena variabilis ATCC 29413
MQLNHNGVHSEGHSFVVPQICPSQSSVGSDFPSNRVHSLPGEASSQYLERQQARESNARSYPRRIPIAISEAQGIYIKDADGNVYIDCLAGAGTLALGHNHPVAIEAMRKVLDGGLPLHTLDLTTPVKDKFVEELFASLPPEFAQNVKIQFCGPSGADAVEAAIKLVKTATGNRSVLSFHGGYHGMTHGALSLTGNLNPKQAVTGLMPDVHFLPYPYHYRCPFGLGGEAGQRTSSRYIESILDDPESGIVTPAAMILEVVQGEGGVIPAPDDWLREMRRITRDRHIPLIVDEIQTGLGRTGKLYAFEHSGIMPDVLLLSKAIGGSLPLSVVLYNKELDKWSPGAHAGTFRGNQMAMAAGTATLQYILENSLTEHAAAMGDRLLKHLHQIQGETYCIGEVRGRGLMVGVEIINPQASADRRGKYPAHPQLASRIQAECLRRGLIVELGGRFGSVVRFLPPLIVTPAQIDSICEIFASAVQAAEKQVLSVLSQVS

SEQ ID NO: 2490 - protein, 178 aa, Zantedeschia aethiopica
MASSMMVSTAAVSRTSPAQSNMVVPFAGLHSSAAFPVTRKFADSSKLPSNGLRVRCMQVWPPEGKKKFETLSYLPPLTREQLGQEVDYLIRNGWIPCIEFCKVGFVYREYHNSPGYYDGRYWTMWKLPMFGCTDSSQVLKEVDECSKAYPDYFNRIIGFDNTRQVQCISFLTYKPEGN

SEQ ID NO: 2491 - protein, 324 aa, Arabidopsis thaliana
MHSLNETVIPDVDYMQSDRGHMHAAASDSSDRSKDKLDQKTLRRLAQNREAARKSRLRKKAYVQQLENSRLKLTQLEQELQRARQQGVFISSSGDQAHSTGGNGALAFDAEHSRWLEEKNRQMNELRSALNAHAGDTELRIIVDGVMAHYEELFRIKSNAAKNDVFHLLSGMWKTPAERCFLWLGGFRSSELLKLLANQLEPMTERQVMGINSLQQTSQQAEDALSQGMESLQQSLADTLSSGTLGSSSSDNVASYMGQMAMAMGQLGTLEGFIRQADNLRLQTLQQMLRVLTTRQSARALLAIHDYSSRLRALSSLWLARPRE

SEQ ID NO: 2492 - protein, 445 aa, Acinetobacter baumannii
MSVTSVNPATNATNEYYLTRQSQMESNVRSYPRKLPLAIAKAQGCWVTDVEGTQYLDCLAGAGTLALGHNHPAVIQSIQDTLASGLPLHTLDLTTPLKDAFTEALLAYLPGGKEEYCLQFCGPSGADATEAAIKLAKTYTGRSSVISFSGGYHGMTHGSLAMTGNLSAKNAVNGLMPGVQFMPYPHEYRCPLGLGGEAGVDALTYYFENFIEDVESGVTKPAAVILEAIQGEGGVVTAPVKWLQKIREVTEKHNIVLILDEVQAGFARSGKMFAFEHAGIEPDVVVMSKAVGGGLPLAVLGIKRKFDAWQPAGHTGTFRGNQLAMGTGLVVLETIKEQNLAQNAQERGEFPCIGNVRGRGLMIGVEIVDERKPADRIGSHPADSQLAAAIQTACFNNNLLLEKGGRNGTVIRLLCPLIITQEECVEVIARFKKAVAEALVAVRGA

SEQ ID NO: 2493 - protein, 399 aa, Archaeoglobus fulgidus
MIIEDVHYRVVFDSRGNETVECEVVAGEVVAKAMAPSGASTGSGEAVVVSPYRYEEIEEEVSKAIIGMSVFDQESVDEALRELDGTDNFSRIGGNFAITASLAVAKAAAEILGLPLYAYVGGVFAKELPYPLGNVIGGGRHAEGSTSIQEFLVIPVGAKTFFEAQRANAAVHKQLKKIFKERGIFAAKGDEGAWAAQISDEQAFEILSEAIQRVEDELGVKVRMGIDVAATELWDGERYVYSDRKLTTEEQIAYMAELADRYDLLYIEDPLHEKDFEGFAELTKQVKCMVCGDDIFVTNPEIIKKGIEVGAANTVLIKPNQNGTLSGTAKAVKIAKDNGYSVVVSHRSGETEDETLAHLAVAFNAKLIKTGVVGGERISKLNELIRIEELMDKPRMVMI

SEQ ID NO: 2494 - protein, 1399 aa, Vibrio vulnificus CMCP6
MIQIVIDGKYRIVEAGQTVLQAAKVCGVEIPSLCGMNRSGEKIPCDLCVVEVESGGTRRACELEVYNGLTVNTQSEALSAHRKQALNRIMSDHYADCEAPCKTACPAGVDIQSYLYHIAQNDHQKAIEVIKRTLPMPLSIGRVCPAFCESECRRSLVDDAIAIRQLKRHAADADLAAQEAYTPEKKADKNKRIAIVGSGPGGLTAGYYLTNEGYQVDVFEAMPQAGGWLRYGIPEYRLPKSILDKEIALMCRNGMAIHTDKKLGRDISLSQLSQDYDAVCLAVGASKAVAMDYPGSDLDGCYLGVDYLKDFVTEQRFTTGKKVAVIGGGNTAIDCARTAVRTGADTTLIYRRTRDEMPAEDYEIEEAEHEGVKFHFLTNPAQNIADGDGRVCSVKLEKMALGAPDASGRRRPEATGEYFTEAFDTVIAAVSQQADLSFMQGEALTLPLTRWNTADANPETMHSGTGNIFSIGDFRRGPATAVEAVADGRIAAQAIDRFFDGDMENIPLKPFNSRKEQKLKQVDPLHFSHLQKVARTIMPELTSQQREQSFEEVELGFDNAEAMAEAARCLECGCQVNTSCDLRDYATEYGAEQHFHYSVNIKSHDEWQALRQNDPRHKYPIDHSSEFIVFDANRCISCGQCIQACREQSVQGVLSFMNLEKGRPVVRPDCRPNFGGQGVRMGDSRCVQCGACVQACPVGAMTDARDRSQGRETPLKKVDTICTYCGVGCKLTMHVDEAANRIRYVEGAHSPVNEGMLCVKGRYGFDFVASEERLTTPLIRKDGWLQPASWQEAISLIADKFSTIKQDFGGRALAGFSSAKTTNEDNYAFQKFMRRELGTNNVDHCARLCHASTVTGLEASLGSGAMTNDIPSIKHSDVIFIIGSDTSAAHPVIASHIKQAVRHHGARLIVADPKRIGMADHAELYLAHRPGTDVMLINGVMQQIIKNGWYDMEYIEERVDGFDTMLQEVMSPAYSLDKVELVTGVKANDIFAMARMIGTAKRTAVYYSMGITQHTTGHDNVRSIANLQLLCGNIGIEGGGINPLRGQSNVQGACDMGALPNNYPGYQKVYNPLVREKFVIEWDAPNLSAEPGLTLTEIIDGACRRDVRALYVMGENPVLSDPNQAHVIEGLEALDFLVVQDIFLTETAQYADVVLPSCSFAEKSGHFTNTERRVQRIYPAVNPPGEAKEDWRIIQEIANAMGSDWHYRSVADITNEITRVTPQYAGLKWDNITREGVQWPSNKNNPAGTRIMHQTQFTRGKGQMEAIPFRYAAELPDEEYPLVLTTGRVLEQFHTGTMTRKTQGLNNLAGPRAMISVQDAEALGIGNGDMLKVSTRRGEIEIAAFVTKRMQAGVVFIPFHFVESPVNRLTTTATDPHAKIPEFKVAAVRVEKLHTALVE

SEQ ID NO: 2495 - protein, 434 aa, Desulfovibrio vulgaris (strain Miyazaki) [sequence omitted]

SEQ ID NO: 2496 - protein, 533 aa, Nostoc sp. PCC 7120
MTKAPVAPVVLVILDGWGYCEETRGNAIAAAKTPVMESLWTAYPHTLIHTSGKAVGLPEGQMGNSEVGHLNIGAGRVVPQELVRISDAVEDGSILSNSALVKICQEVRNRNGKLHLVGLCSEGGVHSHITHLFGLLDLAKEQRISEVCIHAITDGRDTAPTDGINAISALEDYINHVGIGRIVTVSGRYYAMDRDRRWDRVQRAYDVMTQDGVGDGRKAVDVLQASYAEGVNDEFIVPVRIAPGTVEPGDGVIFFNFRPDRSRQLTQAFVSPEFTGFARQQIKPLSFVTFTQYDSDLSVSVAFEPQNLTNILGEVIANQGLNQFRTAETEKYAHVTYFFNGGLEEPFAGEDRELVSSPMVATYDKAPAMSATAVTDTAIAAIQKGIYSLIVINYANPDMVGHTGQIEPTIKAIETVDRCLGRLLEGVSKAGGTTIITADHGNAEYMLDEAGNSWTAHTTNPVPLILVEGEKVKIPGYGTNVELRSDGKLADIAPTILDILQLPQPPEMTGRSLLQPAEYEVELSRTPIPVGLN

SEQ ID NO: 2497 - protein, 122 aa, Mycobacterium smegmatis
MTSTEKPEVEFQAGPPPSELTMTDLIVGEGAEAVRGGVVDVHYVGVDYETGEEFDSSWDRGQSANFPLDRLIPGWQEGIPGMKVGGRRQLTVPPELAYGPAGAGHRLSGRTLVFVIDLLGVA

SEQ ID NO: 2498 - protein, 167 aa, Nicotiana tabacum
DSRTTIFSPEGRLYQVEYAMEAIGNAGSAIGILAKDGVVLVGEKKVTSKLLQTSTSTEKMYKIDDHVACAVAGIMSDANILINTARVQAQRYTFSYQEPMPVEQLVQSLCDTKQGYTQFGGLRPFGVSFLFAGWDKNYGFQLYMSDPSGNYGGWKAAAIGANNHAAQ

SEQ ID NO: 2499 - protein, 450 aa, Escherichia coli CFT073
MTKHYDYIAIGGGSGGIASINRAAMYGQKCALIEAKELGGTCVNVGCVPKKVMWHAAQIREAIHMYGPDYGFDTTINKFNWETLIASRTAYIDRIHTSYENVLGKNNVDVIKGFARFVDAKTIEVNGETITADHILIATGGRPSHPDIPGVEYGIDSDGFFALPALPERVAVVGAGYIAVELAGVINGLGAKTHLFVRKHAPLRSFDPMISETLVEVMNAEGPQLHTNAIPKAVVKNADGSLTLELEDGRSETVDCLIWAIGREPANDNINLEAAGVKTNEKGYIVVDKYQNTNVEGIYAVGDNTGAVELTPVAVAAGRRLSERLFNNKPDEHLDYSNIPTVVFSHPPIGTVGLTEPQAREQYGDDQVKVYKSSFTAMYTAVTTHRQPCRMKLVCVGPEEKIVGIHGIGFGMDEMLQGFAVALKMGATKKDFDNTVAIHPTAAEEFVTMR

SEQ ID NO: 2500 - protein, 523 aa, Bordetella pertussis Tohama I
MPENAQPHAVIPAADLQLSAQSPQWRVFAAAAAGAPLVARPLRVIEAAGIYVDLSMQRHSSALAQAGLALLQARDVLGARAALFAPGAQDAAHGRYPVLRAGYGAHPEEQCDIEVEIEYARMLEFVRELDRGGAYPAVLYLGGGAGQWALRLALQAFGGPAQRRQLRLVSGGDAAALHEALAGLDPRRTLVVAASRGFEPSETLDNARAAIDWLRRAGIDDVSAHLVAVTGNESAARALGVAAARVFRLPSWLQPRHELWSVGALPVALALGVDMLKALRSGAAAMDQHFLQAASAVNAPMQMALAAVANTSAMHWPTHALAVYSARLAALPACVQQLEMTLAGRAPASLPAYPVVWSPAGAPGPGAFFEWLHRAPAGAPVDFIAGLDEYPASPPAHRALLANCLAQREALLRGLPAGPGQPAAGGGRPSTLVVLRQVDPRAVGALLALYEHKAFVQAALWGAALGGADEAQACQRLAQDIARQLAVPPEAGPVDWGHDSSTAFWIDRYREQGGAGAAAGRTA

SEQ ID NO: 2501 - protein, 421 aa, Bordetella pertussis Tohama I
MKNRDLNTRRTLATPRGVGVMCDFYAVRAENSTLWDAEGKEYIDFAGGIAVLNTGHRHPKVKAAIAAQLDNFTHTAYQIVPYEGYVSLAERINAVAPIEGLKKTAFFTTGVEAVENAVKIARAYTGRSGVVAFSGAFHGRTMMGMALTGKVAPYKLAFGPMPGDVFHVPFPNATQAISVADSLKALDLLFKVDIDPKRVAAIIIEPVQGEGGFNVTPPELMQALRKVCDEHGILLIADEVQTGFARTGKLFAMQHHSVQADLITMAKSLGGGMPISGVVGRAEVMDGPAAGGLGGTYAGNPLAVAAAHAVLDVIAEEKLCERAVELGKRLMDRLEGLRAKCPAIADVRGLGSMVALELNDPATGKPDAEAVKRIQQQAIERGLILLSCGVYGNVLRFLYPLTIPDDQFARALDILAEIIAA

SEQ ID NO: 2502 - protein, 396 aa, Methanococcoides burtonii DSM 6242
MKAVILAAGEGTRMRPLTSSIPKVMLPVANKPMLEHIVDSAIEAGIDGFVFITGYHEEVIEQYFGNGDRWNVTIDHVHQEEQLGTANAIGYAKGHVKEKFIVLNGDVLVSSDHIEHMIERKEDAVITVKRVDNPSDFGVIETDGNKVINIIEKPEFPPTDLANAGIYLFSEAIFDLIEQTTLSPREEYEITDSLQMLINSDADVGYEILEEEWIDIGRPWDMLDANAVLLNQMEPSVKGVIEPNATLIGDVSVGRGTLIRNGAYIIGPVIIGNDCDIGPNCFIRPSTAIGNDVHIGNAVEVKNSIIMDGTNIGHLTYLGDSIIGRKCNFGAGTKVANLRHDGKNIKVKIKGKLTDSGRRKLGVIMGDDVHTGINSSINVGTVMESGSYTRPGEVVR

SEQ ID NO: 2503 - protein, 293 aa, Photorhabdus luminescens subsp. laumondii TTO1
MKGIILAGGSGTRLHPITQGVSKQLLPIYDKPMIYYPLSVLMLAGIRDILIISTPEDLPSFRRLLGDGNRFGIHLSYKEQPSPDGLAQAFLIGEEFINGGPCCLVLGDNIYFGQGFSPKLKNVVSRGKGATVFGYQVMDPERFGVVEFDDVFRVLSIEEKPEKPKSNWAVTGLYFYDNQVVDFAKQVKPSARGELEITSINQMYLERGELNIELLGRGFAWLDTGTHDSLIEASTFVQTVEKRQGFKIACLEEIAWRNGWLDDAQLRETVKSLSKTGYGQYLLDLLHVRARQY

SEQ ID NO: 2504 - protein, 327 aa, Azotobacter vinelandii
MRAMLLERVGHPLVLRELPTPQPGPGEVRVRVGACGVCRTDLHVVDGELPAVNPPVIPGHEIVGRVDAVGPGVEGFALGQRVGIPWLGHTCGHCWYCRHEAENLCDAPQFTGYTRPGGYAEQVVADARFTFALGEDGDDVALAPLLCAGLIGWRSLVKAGPARRLGLYGFGAAAHIVMQVARWQGREVYAFSRPGDLAAQDFARSLGAAWAGGSDQLPPEPLDAAILYAPAGELVPTALRALRKGGRVVCAGIHMSDIPSFPYDILWEEREVVSVANLTRQDGLDFFAVAEQAGIRTETHRYALEDANRALDDLRHGRFQGAAVLVP

SEQ ID NO: 2505 - protein, 511 aa, Oryza sativa (japonica cultivar-group)
MAAMDLRVAAPASVAAAARCGTSLARPWPARAVGGGGGGGGRGRRLSVRTSVATTEAAAAAVGASEDAALEARDSKTVVAVILGGGAGTRLFPLTKRRAKPAVPIGGAYRLIDVPMSNCINSGINKVYILTQFNSASLNRHLSRAYNFSNGVAFGDGFVEVLAATQTPGSEGKRWFQGTADAVRQFDWLFDDAKAKDIDDVLILSGDHLYRMDYMDFVQSHRQRGADISICCLPIDDSRASDFGLMKIDDTGRVIAFSEKPKGDDLKAMQVDTTVLGLPQDEAKEKPYIASMGVYIFKKEILLNLLRWRFPTANDFGSEIIPASAKEINVKAYLFNDYWEDIGTIKSFFEANLSLAEQPPRFSFYDANKPMYTSRRNLPPSMINNSKITDSIISHGCFLDSCRIEHSVVGIRSRIGSNVHLKDTVMLGADFYETDLERGELLAEGKVPIGIGENTKIQNCIIDKNARIGKNVTISNSEGVQEADRTSEGFYIRSGITIVLKNSIIADGLVI

SEQ ID NO: 2506 - protein, 509 aa, Zea mays
MMIARRLLRPNAPAQASSLLKHVTGTASLQGYADSLLDATVRHFGSAPSAQPEENGFKGHGMLAPFTAGWQSNDLHPLIIERSEGSYVYDINGNKYLDSLAGLWCTALGGSEPRLVKAATEQLNKLPFYHSFWNRTTKPSLDLAQEILSMFTAREMGKVFFTNSGSEANDSQVKLVWYYNNALGRPNKKKFIARSKAYHGSTLVSASLTGLPALHQKFDLPAPFVLHTDCPHYWRYHLPGETEEDFATRLATNLENLILKEGPETIAAFIAEPVMGAGGVIPPPKTYFDKVQAVVKKYDILFIADEVITAFGRLGTMFGCDYYNIKPDLVSLAKALSNAYVPIGATLVSPEISDVIHSQSNKLGSFAHGFTYSGHPVACAVAIEALKLYRERDIPGHVKQIAPKFQDGIRALADSPIIGEIRGLGMIMGTEFTNNKSPTDLFPAEWGVGAIFGEECQKRGMLVRVAGDAIMMSPTLIMTPGEVDELVRIYGEALKATEERVAALQSKKN

SEQ ID NO: 2507 - protein, 423 aa, Methanocaldococcus jannaschii [sequence omitted]

SEQ ID NO: 2508 - protein, 591 aa, Zea mays
MCGILAVLGVAEVSLAKRSRIIELSRRLRHRGPDWSGLHCHEDCYLAHQRLAIIDPTSGDQPLYNEDKTVVVTVNGEIYNHEELKAKLKTHEFQTGSDCEVIAHLYEEYGEEFVDMLDGMFSFVLLDTRDKSFIAARDAIGICPLYMGWGLDGSVWFSSEMKALSDDCERFITFPPGHLYSSKTGGLRRWYNPPWFSETVPSTPYNALFLREMFEKAVIKRLMTDVPFGVLLSGGLDSSLVASVASRHLNETKVDRQWGNKLHTFCIGLKGSPDLKAAREVADYLSTVHHEFHFTVQEGIDALEEVIYHIETYDVTTIRASTPMFLMSRKIKSLGVKMVISGEGSDEIFGGYLYFHKAPNKKEFHEETCRKIKALHLYDCLRANKATSAWGVEARVPFLDKSFISVAMDIDPEWKMIKRDLGRIEKWVIRNAFDDDERPYLPKHILYRQKEQFSDGVGYSWIDGLKDHASQHVSDSMMMNAGFVYPENTPTTKEGYYYRMIFEKFFPKPAARSTVPGGPSVACSTAKAVEWDASWSKNLDPSGRAALGVHDAAYEDTAGKTPASADPVSDKGLRPAIGESLGTPVASATAV

SEQ ID NO: 2509 - protein, 344 aa, Arabidopsis thaliana
MPASKKISDRNHLGQVFDKLLNQIGESEEFELPEWLNKGKPTPYIFIRRNIYLTKKVKRRVEDDGIFCSCSSSSPGSSSTVCGSNCHCGMLFSSCSSSCKCGSECNNKPFQQRHVKKMKLIQTEKCGSGIVAEEEIEAGEFIIEYVGEVIDDKTCEERLWKMKHRGETNFYLCEITRDMVIDATHKGNKSRYINHSCNPNTQMQKWIIDGETRIGIFATRGIKKGEHLTYDYQFVQFGADQDCHCGAVGCRRKLGVKPSKPKIASDEAFNLVAHELAQTLPKVHQNGLVNRHIDAGKSWNNLSQRDTCSRDVRGWCYRVCRHVERRLGDCLILFSDCFEVEKPK

SEQ ID NO: 2510 - protein, 419 aa, Treponema denticola ATCC 35405
MIKTVKDVNLKDKRIIMRVDFNVPMKDGVVQDDTRIRAALPTIKYILEQGARSLVLMSHLGDPSKDAKKAKEKAEKDGKPFDEEAYINGKHRMKPVAEYLSGLLKLPVDFAPSCMGQLERVKALPQGGILMLENTRFHKEETSKEKAEQQILAKELSLYGDIYVNDAFGTAHRSHASTAEIANFVNTRVAGFLMEKEIKYLEPMLNNPAKPMTAIIGGAKVSSKIAVLESLLKNASSLIIGGGMAYTFLKVQGKKIGKSLFEEDFMDTAKNLLDKAEKQGVKIILPVDHICSETFSPNAEAVLVESTDIPDNLMGMDVGPKTLALYKEIILSSKSIVWNGPVGVFEFEAFSKGTEETARLVAAATEKGALTIVGGGDSVAAVNKFNLADKMSHVSTGGGASLEFLEGKVLPGIACLDTI

SEQ ID NO: 2511 - protein, 470 aa, Methylobacterium extorquens
NSLTAGSRGPVLMQDYHLIEKMAHFNRERIPERVVHAKGYGAYGTFRLTRSLSEFTRAKVLTEVGKDVPMVARFSTVGGESGSADTARDPRGFALKFYTEEGNWDLVGNNTPIFFVRDAIKFSDFIRTQKRDPRTHLKPHWRRWDFWSLSPEAIHQVMFLYSDRGTPKSARFMNGYGSHTFSLWNDRGERHWVKFHFHTKQGIQNFSADEADEVAGKDPDYSSADLSTAIEQGDFPKWKVSVQLMPELDADTYRINPFDLTKVWPHGDYPLIEIGEMELNRNPENYFAEIEQSAFEPSNVVPGIGFSPHKMLQNRVLSYADAHRYRLGVNYQQIPVNQAKNADVQTYHRDGAMRTDGNHGAQVDYEPNSFGGPKQDPSFSEPPLRIQGDAGRYGWPGDDEDLYGQPKLFWTKVLDEGGRKRLVENIVTSMGDSPRHIQERMIAHWFKVHEDFGRGVAQGLGIDTAQAAAE

SEQ ID NO: 2512 - protein, 617 aa, Saccharomyces cerevisiae
MSKQFSHTTNDRRSSIIYSTSVGKAGLFTPADYIPQESEENLIEGEEQEGSEEEPSYTGNDDETEREGEYHSLLDANNSRTLQQEAWQQGYDSHDRKRLLDEERDLLIDNKLLSQHGNGGGDIESHGHGQAIGPDEEERPAEIANTWESAIESGQKISTTFKRETQVITMNALPLIFTFILQNSLSLASIFSVSHLGTKELGGVTLGSMTANITGLAAIQGLCTCLDTLCAQAYGAKNYHLVGVLVQRCAVITILAFLPMMYVWFVWSEKILALMIPERELCALAANYLRVTAFGVPGFILFECGKRFLQCQGIFHASTIVLFVCAPLNALMNYLLVWNDKIGIGYLGAPLSVVINYWLMTLGLLIYAMTTKHKERPLKCWNGIIPKEQAFKNWRKMINLAIPGVVMVEAEFLGFEVLTIFASHLGTDALGAQSIVATIASLAYQVPFSISVSTSTRVANFIGASLYDSCMITCRVSLLLSFVCSSMNMFVICRYKEQIASLFSTESAVVKMVVDTLPLLAFMQLFDAFNASTAGCLRGQGRQKIGGYINLVAFYCLGVPMAYVLAFLYHLGVGGLWLGITSALVMMSVCQGYAVFHGDRRRILGAARKRNAETHTS

SEQ ID NO: 2513 - protein, 176 aa, Oryza sativa (japonica cultivar-group)
MGFPSVCYCVILPQPLVLVLQLLDLLRHAFLLCLSALGLAAPPLPDEHPAYAPPPPPPASMAALPADLVWAFQPAPEPAAIKARLPAVRYADFVRCRRAAAAAAASCVVCLGALEARHRVRELGNCAHAFHKACIDKWVDKGQATCPLCRAALLPSADDADAAAIAATTRHHLPSF

SEQ ID NO: 2514 - protein, 501 aa, Pisum sativum
MAMANLARRKGYSLLSSETLRYSFSLRSRAFASGSDENDVVIIGGGPGGYVAAIKAAQLGFKTTCIEKRGALGGTCLNVGCIPSKALLHSSHMYHEAKHSFANHGVKVSNVEIDLAAMMGQKDKAVSNLTRGIEGLFKKNKVTYVKGYGKFVSPSEISVDTIEGENTVVKGKHIIIATGSDVKSLPGVTIDEKKIVSSTGALALSEIPKKLVVIGAGYIGLEMGSVWGRIGSEVTVVEFASEIVPTMDAEIRKQFQRSLEKQGMKFKLKTKVVGVDTSGDGVKLTVEPSAGGEQTIIEADVVLVSAGRTPFTSGLNLDKIGVETDKLGRILVNERFSTNVSGVYAIGDVIPGPMLAHKAEEDGVACVEYLAGKVGHVDYDKVPGVVYTNPEVASVGKTEEQVKETGVEYRVGKFPFMANSRAKAIDNAEGLVKIIAEKETDKILGVHIMAPNAGELIHEAAIALQYDASSEDIARVCHAHPTMSEAIKEAAMATYDKPIHI

SEQ ID NO: 2515 - protein, 353 aa, Neurospora crassa
MSKAADIPKEQWAQVTEKDGVITYKKIPVPTPGHDEVLVNIKYSGVCHTDLHALDNDWPLPRKTPVIGGHEGAGVVVQKGELVTNVDIGDKVGVKWLMSTCFHCTFCQQALESLCPKAQLSGYTKDGTFQQYCVANAAHLARFPPQTDLSAVAPIMCAGLTVYKGLKESDTRPGQYVAIVGAGGGLGTIGIQYAHAMGLNVIAIDGGKEKGEACKKLGASMYIDFKESKDLVADVKKATHDGLGPQGVVLLAPQEQPFQQATGYVRSHGTVVCIGMPAGAKVSMPVFDTVVRMIKVKGSYVGNREDTAEALDFFLRGKVHAPYKVIGLSQLQSVFDEMRANRVIGRYVMDMSK

SEQ ID NO: 2516 - protein, 435 aa, Candida albicans SC5314
MEARFFRIFKGGSLTTTTAAASFTATATAGATTAKTLSGSTVLRKSYKRTYSSSVLSSPELFFFHQFNNNKRYCHTTTTTNTKTIMSEQIPKTQKAVVFDTNGGQLVYKDYPVPTPKPNELLINVKYSGVCHTDLHAWKGDWPLATKLPLVGGHEGAGVVVGMGENVKGWKIGDFAGIKWLNGSCMSCEFCQQGAEPNCGEADLSGYTHDGSFEQYATADAVQAAKIPAGTDLANVAPILCAGVTVYKALKTADLAAGQWVAISGAGGGLGSLAVQYARAMGLRVVAIDGGDEKGEFVKSLGAEAYVDFTKDKDIVEAVKKATDGGPHGAINVSVSEKAIDQSVEYVRPLGKVVLVGLPAHAKVTAPVFDAVVKSIEIKGSYVGNRKDTAEAIDFFSRGLIKCPIKIVGLSDLPEVFKLMEEGKILGRYVLDTSK

SEQ ID NO: 2517 - protein, 480 aa, Eremothecium gossypii
MLRCREVYNICKGAMSNEVKHYDYLVIGGGSGGVASSRRAASYGAKTVLIEGKALGGTCVNVGCVPKKVMWYASDLAHRLLHARDYGLLQEVDISKEKLHFNWKEFAGKRNAYVERLNGIYERNLAKEGVEYVHGWARFNSEGQVEVTRPDQTTEKYTADHILIATGGEPVLPEGIPGAEYGVDSDGFFRLEEQPKKVVISGSGYIATEFAGVFNGLGTETHIVIRKDHVLTKFDPSIQEIVTEHYEKEGVNIHKKESIQRVEKDPNTGKLTVHLSGKIIEDVDQLVWAIGRKSLLGIAPENVGVKLGETGHVVVDEYQNTSTKGIYALGDVVGNMELTPVAIAAGRKLANRLFGPEQMRAQKQDYDNVPSVVFSHPEAGSIGLTEPQAIERYGKENIKIYQTKFTAMYYAMLEDKSPTKYKLICAGPEEKVVGLHIVGDGSAEILQGFGVAIKMGATKADFDSCVAIHPTSAEEIVTLK

SEQ ID NO: 2518 - protein, 441 aa, Pseudomonas syringae pv. syringae B728a
MGALAFGYDTGIIAGALPFMTLPADQGGLGLDAYSEGMVTASLIVGAAFGSLASGYISDRFGRRLTLRLLSVLFIAGALGTAIAPSIPFMIAARFVLGIAVGGGSATVPVFIAEIAGPSRRARLVSRNELMIVSGQLLAYVLSAVMAALLHTPGIWRYMLAVAMVPGVLLLVGTFFVPASPRWLASKGRFDEAQDVLEQLRPSKQDAQREVDEMKAQDEEARHRPKARELLRQRWVIKLLLIGVGLGFTAQFTGVNAFMYYTPIILKNTGMGTNAALTATIGNGVVSVIATLLGIWAIGRYGRRHLLMTGLVIVILMQAALGCVLQFMPQNMTQSYTALACILVFLLFMQMCISPVYWLLMSELFPMQVRGLLTGTAVSMQWLFNASVAFTFPIAVDTIGNPTFFIFAAINIGSLIFVFLCLPETKGKSLEQIEKHLKKEL

SEQ ID NO: 2519 - protein, 385 aa, Oryza sativa
  unsure (1)..(385): unsure at all Xaa locations
MYGVGGGGGGFNAPYTASARRRNHEDDDDEEEEESGEGRVLEAWERAYADDRSWEALQEDESGLLRPIDTKTLVHAQYRRRLLLRSAASAAARIQKGLIRYLYIVIDLSRVVNKILFGTAPDLRSMAASEMDYRPSRMAVVAKYAEVFIREFFDQNPLSHVGIVTMKDGISHRLTEIGGSPESQIKALMGKLECSGEPSLQNALELVHGYLDQVPSYGHKEVLFLYSALNTCDPGDIMETIAKCKKSKIRCSVIGLAAEIFICKYLCEETGGSYTVALDESHFKELLLEHAPPPPAIAEYAAANLIKMGFPQRGAEDLISICSCHKKIKSGAEGYICPRCKVNXSQSSLHVRCPKCNQHFCLDCDIYIHESLHNCPGCESQRSSS

SEQ ID NO: 2520 - protein, 197 aa, Nicotiana tabacum
MSASRFIKCVTVGDGAVGKTCLLISYTSNTFPTDYVPTVFDNFSANVVVNGSTVNLGLWDTAGQEDYNRLRPLSYRGADVFILAFSLISKASYENVSKKWIPELKHYAPGVPIVLVGTKLDLRDDKQFFIDHPGAVPITTAQGEELRKTIGAPAYIECSSKTQQNVKAVFDAAIKVVLQPPKTKKKKGKSQKSCSIL

SEQ ID NO: 2521 - protein, 192 aa, Triticum aestivum
  unsure (1)..(192): unsure at all Xaa locations
MAATIQSVKARQIFDSRGNPTVEVDVCCSDGTFARAAVPSGASTGVXEALGTEGMVDSDYLGKGCIQSCLDNVNSXIAPVWIGKXDPNSSNWSSDNYMVQXQLDGTKNEWXLCKQELXANATWLCQQLFCKAGSXVQEDPPXQHXQPGWNNGLPVLHQTMVQAGNNCIRISTRPSGGRNGLCQTSYRLSQGK

SEQ ID NO: 2522 - protein, 511 aa, Arabidopsis thaliana
MNAAVFSPSALSLPISFSKTRSSFLSRKKGVKGEFRVFAVFGDESGLVEKKSQWRPLFDVEDPRSKAPPYKGKFLDVNQAIEVARFDIQYLDWRARQDLLTIMILHDKVVDVLNPLAREYKSIGTVKKELAGLQEELSKAHQQVHISEARVSTALDKLAHMEELVNDRLLPGRVVTELDKPSSSTTASAVELDREKTNTGAKSLNVSGPVPPYSPHLKNFWYPVAFTADLKHDTMVPIECFEQPWVIFRGEDGKPGCVRNTCAHRACPLDLGTVNEGRIQCPYHGWEYSTDGECKKMPSTKLLKVKIKSLPCLEQEGMIWIWPGDEPPAPILPSLQPPSGFLIHAELVMDLPVEHGLLLDNLLDLAHAPFTHTSTFAKGWSVPSLVKFLTPTSGLQGYWDPYPIDMEFKPPCIVLSTIGISKPGKLEGKSTQQCATHLHQLHVCLPSSKNKTRLLYRMSLDFAPILKNLPFMEHLWRHFAEQVKVHHKWIDHLQPSSQSCFLSYRFYISRS

SEQ ID NO: 2523 - protein, 433 aa, Arabidopsis thaliana
MNAAVFSPSALSLPISFSKTRSSFLSRKKGVKGEFRVFAVFGDESGLVEKKSQWRPLFDVEDPRSKAPPYKGKFLDVNQAIEVARFDIQYLDWRARQDLLTIMILHDKVVDVLNPLAREYKSIGTVKKELAGLQEELSKAHQQVHISEARVSTALDKLAHMEELVNDRLLPGRVVTELDKPSSSTTASAVELDREKTNTGAKSLNVSGPVPPYSPHLKNFWYPVAFTADLKHDTMVPIECFEQPWVIFRGEDGKPGCVRNTCAHRACPLDLGTVNEGRIQCPYHGWEYSTDGECKKMPSTKLLKVKIKSLPCLEQEGMIWIWPGDEPPAPILPSLQPPSGFLIHAELVMDLPVEHGLLLDNLLDLAHAPFTHTSTFAKGWSVPRFLLTLITLFSAKMKLGLSFLFLVLQFGEVFNTYLGSPRILGSISNRYGI

SEQ ID NO: 2524 - protein, 126 aa, Oryza sativa
MSKSAGAAAGPTAAAAAAAVQKQKTLLQKADADVSSLVDNFAAFINIARIHSADSLLKLVSELKRTAIFSGLASLTENVDRRIEILSQQAEGTERMLERIGQEAAGSLKELEAHYYSSVVRTPPDE

SEQ ID NO: 2525 - protein, 173 aa, Anabaena variabilis ATCC 29413
MLTTAEFLKYTQWSGIATVVFAVLAILAFLFKWGIRFRLVGTTGFMLVLTAGLFGLSIVPLSRTVIPGAVKYTLVYDNGSNQAVISLSPKISPAEVEATLLQVASNLNSFGRSGGRNDDKVTIRARTLIHPEPGLTVPIYLGEVKRSLASREDTQISVEIYPEKFAQLPPTEA

SEQ ID NO: 2526 - protein, 403 aa, Anabaena variabilis ATCC 29413
MSFDWITPADRIQQLPPYVFARLDELKAKAREQGIDLIDLGMGNPDGATPQPVVDAAIQALQNPANHGYPPFEGTASFRRAITNWYNRRYGVVLDPDSEALPLLGSKEGLSHLAIAYVNPGDVVLVPSPAYPAHFRGPVIAGGTVHSLILKPENDWLIDLTAIPEEVARKAKILYFNYPSNPTGATAPREFFEEIVAFARKYEILLVHDLCYAELAFDGYQPTSLLEIPGAKDIGVEFHTLSKTYNMAGWRVGFVVGNRHVIQGLRTLKTNLDYGIFAALQTAAETALQLPDIYLHEVQQRYRTRRDFLIQGLGELGWDVPKTKATMYLWVKCPVGMGSTDFALNLLQQTGVVVTPGNAFGVAGEGYVRISLIADCDRLGEALGRIKQAGIRYRPEALVSTPE

SEQ ID NO: 2527 - protein, 254 aa, Oryza sativa
ELDYLVGAVSSPKRPFAAIVGGSKVSSKIGVIESLLEKCDILLLGGGMIFTFYKAQGLSVGSSLVEEDKLELATSLLAKAKEKGVSLLLPSDVIIADKFAPDANSQVVPASAIPDGWMGLDIGPDSVASFSSTLETTQTVIWNGPMGVFEFDKFAVGTEVMACANALIRFDYRWNCQNKLNGIAKTSLTKLADLSGKGVTTIIGGGDSVAAVEKVGVADVMSHISTGGGASLELLEGKELPGVIALDEAVTVAV

SEQ ID NO: 2528 - protein, 425 aa, Zea mays
MDASAATPAPGPSFSGAESSAAAAQPPAEAPQLRVHGAGSGSGVARACRHHAYSRKQKSLGLLCSNFVALYDREDVEVIGLDDAAKRLGVERRRIYDIVNVLESVGILVRRAKNRYTWLGFGGVPAALKELKERALRKMSGSPVLLSMEDSSTANLSDDEDDEKLGDADEDAESEKLSQPVDNTSDKPDAPSCRLRSDHRKEKSLGLLTQNFVKLFLNMEVGTISLDEAARLLLGEGHADSNMRTKVRRLYDIANVLSSLNLIEKTQQADTRKPAFRWLGQAKRKQDNNVMVSVPPSMKAMPNKRAFGTDLTNIDNKRGKLDSAAENKVKLMQGAGNIVKTFERQLVQGKRSDFVYGPFHPAGAKKHETDDQTVKQQERKNIQDWENLAVSFRPQYQNQALNDLFGHYVEAWKSWYVDLTQETAS

SEQ ID NO: 2529 - protein, 155 aa, Treponema denticola ATCC 35405
  unsure (1)..(155): unsure at all Xaa locations
MGIYNYTVKDSLGNDFSFNDYKDYVILIVNTACEXGLTPHFQGLEALYKEYRDKKFLVAAFPCNQFGGQDPGTNEEIRNFAQSKYGVSFPIMAKIEVNGENTEPIFSFLKKASNGEDIKWNFAKFLVDKTGERVTAYAPTVAPEDLKKDIEKLLN

SEQ ID NO: 2530 - protein, 129 aa, Nicotiana tabacum
GGSYGSTIRYKSVERLKSVGKHSLLGASGEISDFQEISRKLDELILYDNMWDDGNSLGPKEVHNYLTRMMYNRRNKFNPLWNSLVLGGVKNGQKYLGTVSMIGVHYEDDHVATGFGNHLARPILRDEWH

SEQ ID NO: 2531 - protein, 177 aa, Buchnera aphidicola str. Sg (Schizaphis graminum)
MKHTIKVIISEKELDIRVRELGEEITKKYKNSKNKIILIALLRGSFVFIADLCRRIKIEHEIDFMTTSSYGRGMISTGDVKIIKDLDEDIYNKNVLIVEDIIDSGKTLSKVLGILKLRNPKSLSICTLLDKPECREVNINIDFVGFSIPDEFMVGYGIDYAQSYRYLPYIGKVIFKK

SEQ ID NO: 2532 - protein, 372 aa, Ralstonia eutropha JMP134
MNVPQDDAGNITEDTRIRASVPAIEACLAAGAAVMVTSHLGRPTEGEFKPADSLAPIATRLSELLGKPVKLVQNWVDGVEVAPGQVVLLENCRVNKGEKKNSDELAQKMAKLCDVYVNDAFGTAHRAEATTHGIAKYAPIACAGPLLAAEIDALGKALGQPARPLVAIVAGSKVSTKLTILKSLADKVDNLIVGGGIANTFMLAAGLKIGKSLAEADLVADAKTIIDIMAKRGASVPIPVDVVCAKAFSATAAATVKDVKDVADDDMILDIGPKTAAQLADQLKAAGTIVWNGPVGVFEFDQFGNGTKVLAEAIADSKAFSIAGGGDTLAAIAKYGIADRVGYISTGGGAFLEFLEGKKLPAFEVLEQRAAG

SEQ ID NO: 2533 - protein, 323 aa, Oryza sativa
MDLMGGYGRVDEQVAIQEAAAAGLRGMEHLILQLSQTGTSERSPAPAQEQQQQVDCREITDMTVSKFKKVISMLNRTGHARFRRGPVVAQSSGPAASEPAPVRSSPSAVSRPMTLDFTKAASGYGKDAGFSVSGISAASSSFLSSVTGDGSVSNGRGGGSSSLMLPPPPATSCGKPPLSSAAAAMSAGAGHKRKCHDHAHSENVAGGKYGSTGGRCHCSKRRKHRVKRTIRVPAISSKVADIPADDFSWRKYGQKPIKGSPFPRGYYKCSTLRGCPARKHVERDPTDPSMLIVTYEGEHRHSPSAAGQDHPPAPPPPLALPLA

SEQ ID NO: 2534 - protein, 216 aa, Triticum aestivum
  unsure (1)..(216): unsure at all Xaa locations
SDFESDEVNACIGSCGGLCXGVNTVMRELECGLAHMYNVNNIFGIQNGYKGFYSSNYVAITPKTVTDIHKRGGTVLGTSRGGHDTKKIADNIQDRGINXVYIIGGDGSQKGAYEIYKEIRKRGLIVAVAGVPKTIDNDIAIIDKSFGFDSAVEEAQRAINSAHVEACSAENGIGLVKLMGRYSGFIAMYATLASRDVDCCLIPESPFYMDGEGGLL

SEQ ID NO: 2535 - protein, 482 aa, Bradyrhizobium japonicum USDA 110
MTAILKNFIGGEWVDGSGVTRNINPSNTNDLVGEYAKADKAQTEKAIAAAKAAFPGWAQSTPQVRYDALNKISLEILARKEELGRLLAREEGKTLPEGIGEVARAGQIFAFFAGEALRLIGEKGASVRPGLDVELTREPMGVVGMITPWNFPIAIPAWKIAPALCYGNTVVFKPAELVPGSAHALSEIITRSGIPAGVFNLVVGSGSVVGQTLLDHPDVAAISFTGSVQTGRKIAQACVLSNPMKKFQLEMGGKNPLVVLDDADLKTAVEVAVNGSYFSTGQRCTASSRLIVTEGIHDRFVAAMAERLKGLSVDDALKAGVHIGPVVDQSQLDQDLRYIKIGQDEGAKLAFGGELLQRETPGHYLQPALFTEANNNMRIAREEIFGPVAAVIRAKNYEEALAISNDTEFGLASGICTTSLKYASHYKRNSESGMVMVNLPTAGVDYHVPFGGRKGSSYGAREQGSYAREFYTTVKTAYTYPG

SEQ ID NO: 2536 - protein, 282 aa, Neurospora crassa
MPGRLAGKNAIITGAAGGIGLETSILFAKEGANVLMADISAEAIQRAEAKVKQLVPNASRVESIVCDVSKEDQVEKMVSHLDSWGGLDIIFNNAGIMHSQDDDAVATPESIWDLTHNINVKGVWFGCKHAVLSLRKHKKTKGSIINTASVVALVGSATPQLAYTASKGAVLAMTRELAMVHAREGFRFNSLCPAPLNTPLLQDWLGDDKAKRLRREIHFPTGRFGEAVEQAQAVVFLASDEASFVNGHDMVVDGGMTKAYVTPEGPATAAPVNNALKESLEE

SEQ ID NO: 2537 - protein, 505 aa, Arabidopsis thaliana
MASLARRKAYFLTRNLSNSPTDALRFSFSLSRGFASSGSDENDVVIIGGGPGGYVAAIKASQLGLKTTCIEKRGALGGTCLNVGCIPSKALLHSSHMYHEAKHSFANHGIKVSSVEVDLPAMLAQKDNAVKNLTRGIEGLFKKNKVTYVKGYGKFISPNEVSVETIDGGNTIVKGKHIIVATGSDVKSLPGITIDEKKIVSSTGALSLSEVPKKLIVIGAGYIGLEMGSVWGRLGSEVTVVEFAGDIVPSMDGEIRKQFQRSLEKQKMKFMLKTKVVSVDSSSDGVKLTVEPAEGGEQSILEADVVLVSAGRTPFTSGLDLEKIGVETDKAGRILVNDRFLSNVPGVYAIGDVIPGPMLAHKAEEDGVACVEFIAGKHGHVDYDKVPGVVYTHPEVASVGKTEEQLKKEGVSYRVGKFPFMANSRAKAIDNAEGLVKILADKETDKILGVHIMAPNAGELIHEAVLAINYDASSEDIARVCHAHPTMSEALKEAAMATYDKPIHI

SEQ ID NO: 2538 - protein, 302 aa, Schizosaccharomyces pombe
MALGTKHVLHLTKPSSRSSPLNIVIEPAVLFSILDHSTRKSENNQRVIGTLLGTRSEDGREIEIKSCFAVPHNESSEQVEVEMEYHRAMYHLHLKANPREVVVGWYATSPDLDAFSALIQNLYASPAEPGTAPLGTYPHPCVHLTVNTDVSSPLAIKTYVSSPVGITERLADSCAFVPTPFTIRDDEAVRSGLKAVAAPKNDPSRLASLFTDLQQLRRSTLELLSMIERVSDYVQNVIDGSSPANVAVGRYLMKCFSLIPCVEGQDFEKIFSSHLQDVLVVVYLANTLRTQVDIASRLNLLP

SEQ ID NO: 2539 - protein, 434 aa, Schizosaccharomyces pombe
MVYIKCRYVCFCCAFISNTTSKSIFNELRCPVTLTFLQFGFVAFFSAVCLLFRKQFLGGTGIQKPSKYVLYTTLPLSIFQIGGHVFGSLATTKIPVSTVHTVKALSPLFTVLAYRFMFRHVYSAMTYFSLVPLTFGVTLACSFELSADIVGLLYALISTCIFVSQNIFGSKIFMEAKSHSTHTKKHYNKLNLLLYSSGVAFIVMIPVWLYQEGFAYLPEVGSPVFLNLIYNGLSHFFQNILAFTLLSIISPVAYSIASLIKRIFVIVVSIIWFQQATNFTQGSGIFLTAIGLWLYDRSKKGNLYESCKVKEFEKDALELEEQTMEDEKSYPSSGTQSPFYGKNFLPQITPRLDSVVPLISDSPMTPNSVYSNEGVTSSVSGNATPASVRQSTQNDFSNSNIHDRRSSYTFQLNNFKAPQPSRLWATETVPTLKI

SEQ ID NO: 2540 - protein, 337 aa, Streptococcus pyogenes M1 GAS
MKRIAVLTSGGDAPGMNAAIRAVVRKAISEGMEVYGINRGYAGMVDGDIFPLGSKEVGDKISRGGTFLYSARYPEFAQLEGQLAGIEQLKKHGIEGVVVIGGDGSYHGAMRLTEHGFPAVGIPGTIDNDIAGTDYTIGFDTAVNTAVEAIDKLRDTSSSHGRTFVVEVMGRNAGDIALWAGIASGADQIIVPEEEFDIEKVASTIQYDFEHKGKNHHIIVLAEGVMSGEAFAQKLKEAGDKSDLRVTNLGHILRGGSPTARDRVIASWMGSHAVELLKDGKGGLAVGIHNEELVESPILGTAEEGALFSLTEEGKIIVNNPHKARLDFAALNRSLSQ

SEQ ID NO: 2541 - protein, 480 aa, Oryza sativa (japonica cultivar-group)
MVLSVRAVSGKSDLDFSDPSWKEKYQEDWNRRFSLPHITDIYDLKPRLTTFSLKKNRTDGGSLSADKWNGYVNKDDRALLKVIKYASPTSAGAECVDPDCSWVEHWIHRAGPRKEIYYEPAEVKAAIVTCGGLCPGLNDVIRQIVFTLEIYGVKNIVGIQFGYRGFFEKGLKEMPLSRKVVENINLSGGSFLGVSRGGAKTSEIVDSIQARRIDMLFVIGGNGSHAGANAIHEECRKRKLKVSVVAVPKTIDNDILFMDKTFGFDTAVEEAQRAINSAYIEARSAYHGIGLVKLMGRSSGFIAMQASLSSGQIDVCLIPEVSFTLDGEHGVMRHLEHLLEKKGFCVVCVAEGAGQDLLQKSNATDASGNVILSDFGVHMQQKIKSHFKDIGVPADVKYIDPTYMVRACRANASDAILCTVLGQNAVHGAFAGFSGITSGICNTHYAFLPITEVITKPKRVNPNSRMWHRCLTSTGQPDFH

SEQ ID NO: 2542 - protein, 295 aa, Mycobacterium bovis AF2122/97
MLFGMARIAIIGGGSIGEALLSGLLRAGRQVKDLVVAERMPDRANYLAQTYSVLVTSAADAVENATFVVVAVKPADVEPVIADLANATAAAENDSAEQVFVTVVAGITIAYFESKLPAGTPVVRAMPNAAALVGAGVTALAKGRFVTPQQLEEVSALFDAVGGVLTVPESQLDAVTAVSGSGPAYFFLLVEALVDAGVGVGLSRQVATDLAAQTMAGSAAMLLERMDQDQGGANGELMGLRVDLTASRLRAAVTSPGGTTAAALRELERGGFRMAVDAAVQAAKSRSEQLRITPE

SEQ ID NO: 2543 - protein, 359 aa, Mesembryanthemum crystallinum
MGAEAEIVCPKSVPNLDTVLSCSQLDIMTPDAVSDNSLASTMLQFVPNIRSGSFADIGPRKYMEDEHIRIDDLSVQLGSLFRCPKPSAFYGVFDGHGGSEAAAYVRENVMRFFFEDVSFPEASELDEIFLEGVENCLRRAFFLADLALADDCSISTSSGTTALTALVLGRLLLVANAGDCRAVLCRKGEAIDMSQDHRPTYPSEKRRVEELGGYVDDGYLNGVLSVSRALGDWDMKLPKGSASPLISEPELRQIILTEDDEFLIIGCDGIWDVISSQQAVSIVRWGLKRHDDPEQSAKDLVNEALRRHTIDNLTVIIVCFSSIDHQREQTGPRPRRFRCSLSAEALSSLRSLLEGNESH

SEQ ID NO: 2544 - protein, 411 aa, Buchnera aphidicola str. Sg (Schizaphis graminum)
MKKVHIEVKMPDIGLEEVEVTEILVKIGEEIKLDQGLITVEGDKASMEIPSPISGIVKDITIKIGEKVKTSSIIMIFKVNNLNSIKNEKDLNYIKTEKKLNENFLEEKKDIKKIVLVHATPVVRRLARHLNVDLKNITPSGPKNRILKEDIELYIRNNTSNKSSFNIEKNNTTNFHKDLFNEIPITNIQQIIGKNLHQNWVNIPHVTQFDEVNITLLEEFRHKYNTEKKQKNNMCSKITILPFIIKSVAYGLLEFPIFNSSLSVNKKTIFLKKYVNVGIAVDVQNALFVPVLKNVDKKNIANLSSELIFLSKKAHENKLDASDMKDGCFTISNLGGIGGSWFSPIINSPEVAILGVSKALIKPLWNGKEFIPSLMLPLSLSYDHRVINGADAARFLTFIGKMLSDIRFLIM

SEQ ID NO: 2545 - protein, 476 aa, Buchnera aphidicola str. Sg (Schizaphis graminum)
MHQEIQSEVVIIGSGPAGYSAAFRCADLGLETVLIEHQERLGGVCLNVGCIPSKSLLHIAKIIKDASELSESGVFFNKPIIDIKKINNWKEKIIKKLTTGLSNMGEKRKVRIVQGKALFNTDHSVLVKNKKNDFTIFFKHAIIATGSKPIKIPSLPNEDNRIWNSTDALSLKSIPNRFLIIGGGIIGLEMATIYSALGSKVDIVDRFNAFLPSVDKDITDIYIKSIKKRFKLLLNTHVKSVEKSKDNDLIVKIAEENSDENVCCYDNILVAIGRSPNVDFLGLEKIGLKLNESGFIEINQQLKTNISHIYAIGDVTGFPMLAHKAVQQAHIAAEVISGKKHYFEPKVIPSVAYTDPEIAWVGLSEKEAENNDIDYEVSLFPWSASGRAHASNCTLGMTKLIFNKNTNKIIGGSIIGTNASELISEIGLAIEMGSDAEDISLTIHPHPTLSESISLASEVFQGTITDLLNLKKSLLN

SEQ ID NO: 2546 - protein, 490 aa, Mesorhizobium loti MAFF303099
MTVMAKPEQTNARTLVSAPALSPAAIAKPDLISVEQAKAMDVAGMTDLFKAHLNPGQLHFMKLLGFHKIKIERAEGMFYIDQNGRKILDFFGGFGSLAFGHNHPRILDARKKFQEEKRQEIAIAFMSQYAAALAHNLAKCSPGDLDMVFLGSSGSEAMEAAVKLAERAAGPKRPKVVYAENSFHGKTKGVLGITDGQLYRADFKVADNTVRIPFGDIEAVERLFRSDPEVGVIVLETIQGGGGIIQAEAQYWQKLRALCDQYGVLWVADEVQCGYGRSGRFYAFEHYGVVPDVTALAKSLGGGKAAVGAMIARREIYMKAYGTPKTAMIHAMATFGGMGEACVTSIEALNVLYDEGLIDNAAVTGDYLLQRLRALKEKYPKIIKDVRGKGLMVGLEFHDFSQTLPMVLRPIVSVLDDKLKGSLSGFVGALLLRDYDVLVAFTEYNRNVIRLEPPLICQREHVDRFVDAFDSLLSRGIVSIVKDFVKSQVR

SEQ ID NO: 2547 - protein, 482 aa, Vibrio fischeri
MSKKLTTAAGCPVAHNQNVQTAGKRGPQLLQDVWFLEKLAHFDREVIPERRMHAKGSGAYGTFTVTHDITKYTKAKLFSEIGKQTELFARFTTVAGERGAADAERDIRGFALKFYTEEGNWDLVGNNTPVFFLRDPLKFPDLNHAVKRDPRTNMRSAKNNWDFWTSLPEALHQVTIVMSDRGIPATYRHMHGFGSHTFSFINSDNERFWVKFHFKSQQGIKNLSDAEAAQVIGQDRESHQRDLLESIDNQDFPKWTLKVQIMPEADAATVPYNPFDLTKVWPHKDYPLIEVGEFELNRNPQNFFAEVEQSAFNPANVVPGISFSPDKMLQGRLFAYGDAQRYRLGVNHQHIPVNAPRCPVHSYHRDGAMRVDGNFGSTLGYEPNNEGQWAEQPDFAEPALNLDGAAAHWDHREDEDYFSQPGDLFRLMTAEQQAILFDNTARNLNGVPKEIQLRHLRHCYKADPAYGEGIGKLLDIDVSEFN

SEQ ID NO: 2548 - protein, 551 aa, Xylella fastidiosa Dixon
MTEIKEAFVPDIGDYSNVPVIEVLVAVGDTVSKGQSLITLESDKATMEVPSSTTGIIKEIKVKVGDTLSQGHVVALIEVSEETAEITTPMTVNTPTTRAHNTAPPEDGGSLIEVRVPDIGDYTNVPVIEVLVAVGDTVSKDQSLITLESDKATLEVPSSATGVIKQLKVNIGDTLSQGDIVVVLQSAESIPLTPATNKPALPPNSSPARDAISAPASPAGTPSTPPITFDANTVLPSKVPYASPAVRLLARQLDVDLSRIKGSEKNGRITREDVQKFVNATLGTGMAEGRTPSASITTNGGLNLLPWPNVDFSKFGEIETQPLSRIKKISGANLARNWAMIPHVTQFDQADITQLEALRVQINKENAASNKNGTGIKLTVLAFLIKASAAALKKFPTFNASLDATGETLTLKKYFHIGFAADTPNGLVVPVIRNVDQKGIVEIAQETSDLAKKARDGKLTPADMSGGCFSISSLGGIGGTAFTPIINAPEVAILGVSKSLIQPIWDGTQFAPKMLLPLSLSYDHRVIDGALAAHFTTYLSQILADMRRVLL

SEQ ID NO: 2549 - protein, 102 aa, Glycine max
MDPKLKEVSQLFDRFKASFIRNDFDTCSNLLSQLKVLLTGFRSLPPLFADTPNAVHELTIARDIYEHAVVLSVKNEDQDAFERDFFQLKPYYTDACNASRAG

SEQ ID NO: 2550 - protein, 512 aa, Brucella melitensis 16M
MKIRAQIGMVLNLDKCIGCHTCSITCKNVWTNREGVEYAWFNNVETKPGVGFPKEWENQKKWNGGWVRKKNGKIEPKMGAKWRILAKIFANPDLPEIDDYYEPFDFDYGHLQTAGESRTMPTARPRSLISGERMEKIEWGPNWEEILGGEFAKRSKDYNFEGVEKEIYGQFENTFMMYLPRLCEHCLNPTCVAACPSGAIYKREDDGIVLIDQEKCRGWRMCVSGCPYKKIYYNWSSGKSEKCIFCYPRIESGQPTVCSETCVGRIRYLGVMLYDADRISEAASTANEQDLYQEQLNIFLDPNDPAVIEQARKDGVPDAWLEAAKHSPVYKMAMDWKIAFPLHPEYRTLPMVWYVPPFSPLQSAAQAGKLGMDGPLPDVRSMRIPVRYLANLLTAGKEEPVISALERMLAMRAYMRAKTIDGVIDEAIADRVGMSGAMIEEMYNIMAIANYEDRFVIPTSHREITEDAYDVRGSCGFTFGNGCSGGTSTEDLFGAKRQKVVQTPTDIFREQV

SEQ ID NO: 2551 - protein, 292 aa, Triticum aestivum
MAAPETSACGAGPALLFPSSSSSSSSARVEAVVVFTICDSFVRRPDQAERVIGTLLGSVLPDGTVHVRNAYVVPHSESADQVALDIEYHHNMYASHQKVNPKEVLVGWFSTGFGVSGGSTLIHEFYSREVQSPIHLTVDTGFTMGEASIKAYVSSNLSLGDRHLAAQFQEIPLDLKMLDAEKVGFEMLKSTMVEKLPNDLEGMESSMQKLYALIDEIYKYVDDVVEARVAPDNKIGRFIADTVSSMPKLSPASFDRLFNDKIQDNLALVYLSSITRTQIAVAEKLNTAAQVL

SEQ ID NO: 2552 - protein, 431 aa, Brucella suis 1330
MAHFAIKLPDVGEGVAEAELVEWHVKVGDIVREDDLLAAVMTDKATVEIPSSRAGKVIAINGEVGEKIAVGSELVRLEIEGGATEKAEEPQPQAAEPTAPAAAVPEAPVLLQTPVPEKPAAPKRENAGRPFTGAGPLRPEGEKPLATPSVRLRARDAGIDLRRVRGTGPAGRITHEDLDAFFQMESGAAPALSGYAADTSINEIKVIGLRRKIAERMAEAKRHIPHITIVEEVDVTQLEELRNGLNHEKKEGRPRLTLLPFIIRTIVKAVKEQPGLNAHFDDEADIIRQFGGVHVGIATQTPNGLIVPVVRHAESMSVFAAATELSRVTEAARNGTAKREELTGSTITITSLGPLGAIATTPIINRPEVAIVGINKMAVRPMWDGTQFVPRKMMNLSCSFDHRVIDGWDAAVFVQKLKSLLETPAMIFVEG

SEQ ID NO: 2553 - protein, 464 aa, Brucella suis 1330
MSEISCKLLIIGGGPGGYVCGIRAGQLGIDTVLVEKTRLGGTCLNVGCIPSKALIHAADEFHRLTTFAAKSPLGITTQNPAIDFARTLEWKDGIVHRLNSGVAGLLKRSRVRMFQGQARFQDGKTVLVDTDTGRQTIHAENIVIATGSVPVEIQALPFGGNIISSTEALSLEKIPERLAVVGGGYIGLEIGTAFAKLGSRVTVVEATDRILPQYDAELTRPVMARLKTLGVEVLTGTSAKGLSADGKALEIRTQDGAVKAIEADKILVTVGRKPQTDGWGLSEIRLDMDGRFIRIDDRCRTSMRGIYAIGDVTGEPMLTHRAMAQGEMVAEIIAGGKHAWDKRCIPAVCFTDPEIVTVGLSPDEARKAGHNIQTGLFPFQANGRAMTMERDDGIVRVVARADNHVILGIQAVGAGISELSAAFAQAVEMGARLEDIAATIHAHPTLGEGFAEASMKALGHALHV

SEQ ID NO: 2554 - protein, 118 aa, Glycine max
  unsure (1)..(118): unsure at all Xaa locations
MELVAECERTLYPYITGSSVLPIKYKDGILMTADMRCSYGSTLRYKTVXRIKPIIKHSLLGATCEISYYHEIFRYLDELILYDNMYNDRNSLGPNDVHNYVTRVMYNTHNKFNPLSNS

SEQ ID NO: 2555 - protein, 462 aa, Glycine max
  unsure (1)..(462): unsure at all Xaa locations
LGAFFLKDLKGRFRVFAVFGEEEKKNAWAALFDVEDPRSKFPQNKGKVLDIYQALEVARHDIQYLDWRARQDVLTIMHLHEKVVEVLNPLAREYKSIGTLKKELAGLQDELAQAHRQVHISEARVTTALDKLAYMEELVNDRLLQEGSTAEVAQTSSSPSTSANSLVTEKRRQPRKSLNVSGPVQSYHPHLKNFWYPVAFSNDLKDDTMIPIFFLEEPWVIFRGKDGKPGCEQNTCAHRACPLHLGSVNEGRIPCPYHGWEYTTDGKCEKMPSTRQLNVKIKSVPCFEKEGMIWIWPGNDPPAATLPSILPPSGFEIHAEIVMELPIEHGLLLDNLLDLAHAPFTHTSTFAKGWSVPSLVNFLTPASGLQGYWDPYPIDMEFRPPCMVLSTIGISKPGKLEGQSTRECSTHLHQLHVCLPSSKXKTRLLYRMSLDFAXLLXHIPFMKYLWRHFAEQVLNEDL

SEQ ID NO: 2556 - protein, 251 aa, unidentified bacterium
MNTGDLAWVLISAALVWLMTPGLALFYGGLGERRNLLHTMFVPILIIGIATMVWFTVGYSLAFGGAGDIIGNFKHLFLSGVSFTHSTKSLTIPDGAFALFQGMFPIITAAIITGSVIGRVRIKAMIVFITLWLIFIYTPLAHMVWGGGLLAKLGAIDFAGGTVVHISSGVTGLVLALMIGHRHNDKHVPVRPSYVLIGGALLWVGWFGFNSGSALAANGIAVLALVNTWLASAAGVLTWGLAEYKMHGPGI

SEQ ID NO: 2557 - protein, 445 aa, Zea mays
  unsure (1)..(445): unsure at all Xaa locations
MTASFSSVAEVAVPAAAAVMASALPQEQQQARPRPRPMHAGGGGGGGGGANGRHHAYSRKDKSLGLLCSNFVVLYNRDDVESIGLDEAAKCLGVERRRIYDIVNVLESVGILVRKAKNRYTWIGFGGVSISLRELKERALREKSGLAPLQTEQQSAATISEDEDDDTLANPGAYIETERLSQTVDKPSGKPGASGCRLRSDHRKEKSLGLLTQNFVKLFLTMEVDTISLDEAAKLLLGEGHEETNMRTKVRRLYDIANVLSSLNLIEKIHQGDSRKPAFRWLGRATLNTENGVTVAVPXTREDRESKKRAFGTELTNIDMHRSNLDSKNKKKAKLVQSGGDVLTNCKLAVRSRLGQGKQSGFVYGPFHPSGARKHGLDGGNKPGQRERAEDWESLSASFRPQYQNQALSDLFVHYVDAWKTWYSEFAQGSSIMQQHFGHPVNHFL

SEQ ID NO: 2558 - protein, 730 aa, Pelobacter acetylenicus
MASKKHVVCQSCDINCVVEAEVKADGKIQTKSISEPHPTTPPNSICMKSVNADTIRTHKDRVLYPLKNVGSKRGEQRWERISWDQALDEIAEKLKKIIAKYGPESLGVSQTEINQQSEYGTLRRFMNLLGSPNWTSAMYMCIGNTAGVHRVTHGSYSFASFADSNCLLFIGKNLSNHNWVSQFNDLKAALKRGCKLIVLDPRRTKVAEMADIWLPLRYGTDAALFLGMINVIINEQLYDKEFVENWCVGFEELKERVQEYPLDKVAEITGCDAGEIRKAAVMFATESPASIPWAVSTDMQKNSCSAIRAQCILRAIVGSFVNGAEILGAPHSDLVPISKIQMHEALPEEKKKLQLGTETYPFLTYTGMSALEEPSERVYGVKYFHNMGAFMANPTALFTAMATEKPYPVKAFFALASNALMGYANQQNALKGLMNQDLVVCYDQFMTPTAQLADYVLPGDHWLERPVVQPNWEGIPFGNTSQQVVEPAGEAKDEYYFIRELAVRMGLEEHFPWKDRLELINYRISPTGMEWEEYQKQYTYMSKLPDYFGPEGVGVATPSGKVELYSSVFEKLGYDPLPYYHEPLQTEISDPELAKEYPLILFAGLREDSNFQSCYHQPGILRDAEPDPVALLHPKTAQSLGLPSGEWIWVETTHGRLKLLLKHDGAQPEGTIRIPHGRWCPEQEGGPETGFSGAMLHNDAMVLSDDDWNLDPEQGLPNLRGGILAKAYKC

SEQ ID NO: 2559 - protein, 603 aa, Xylella fastidiosa Dixon
MTVIEIKVPDIGDYSKVPVIEVLVTVGDHVVKNQGILTLESDKATLEVPSMNNGVVKELKVNVGDLLSQGDVILLLETEDTTAPPSPSNAATSDTTSPPPPSPQPAASKPTAPDQQHSDIKCRMVVLGAGPGGYTAAFRAADLGLDTVLVERYPNLGGVCLNVGCIPSKALLHAAAVIDEAAHASTFGIDFGKPKITLDTLREYKQNVVNKLTAGLAVMAKQRKVRTVTGIAHFVSPNTLDITAADGSTQRLHFQQCIIATGSHPVKLPNFPWDDPRIMDSTDALELAEVPKKLLVVGGGIIGLEMATVYNALGSHVTIVEFMDQIIPGTDKDLVKPLADRMKKQGIEIHLNTKASHVKADKKGITVSFEAPTQGTQPALKTSTYDRVLVAVGRTPTGNNISAEKAGVNVTERGFIPVDRQMRSNVPHIFAIGDIVGNPMLAHKATHEGKLAAEVAAAETESGKHREWVARVIPSVAYTNPEIAWIGMTETEAKAKGLNIGVAKFPWVASGRAIGIGRTEGFTKLIFDEDTHRIIGGAIVGVHAGDLLAEIGLAIEMGAEAEDISHTIHAHPTLSESIAMSAEVYDGTITDLYLPKKSATSAK

SEQ ID NO: 2560 - protein, 405 aa, Xylella fastidiosa Dixon
MSIHDVHEGTCHVTTSAVRAGIDSDTAHGAVTPPIVLSSNFSFERFGHKRKYDYTRSANPTRDLLGEALAELEGGAGGVVTATGIAAITLVLHALLRPGDRLVVPHDAYGGSWRLFNALAQKGHFELITVDLTDARSLVEALALPPKLVLIETPSNPLLRITDLGAVIEAAHRVGALTVVDNTFMSPVLQRPLEFGADLVLHSTTKYINGHSDVVGGVVVARDVAHYQQLVWWANALGLTGSPFDAFLTLRGVRTLDARLRVHQENAQMIAALLEGHGVVKHVHYPGLASHPGHVLAGRQQKGFGAMLSFELQGGEEAVRAFVSGLRYFTLAESLGGVESLIAHPASMTHAAMTPEARAKAGISDGLLRLSVGIEAGEDLIVDLVAGLRRAQAVCDGAAREECNV

SEQ ID NO: 2561 - protein, 611 aa, Pantoea agglomerans
IYHLRALGVDVRLTRSDVTKGHPEYYQDYARRLAEETPGAYYIDQFSNPANPLAHATTTAPELFDQLAGRVDAVVVGVGSGGTLGGLQAWFAKHSPHTEFVLADPVGSILADQVETGQHGEAGSWRVEGIGEDFIPPLAQLENVRQAYRVTDAEAFATARQLLQTEGVLAGSSTGTLLAAALRYCQAQTTPKRVVTFACDSGNKYLSRMFNDEWLRQQGLQDDDRPAPAAPASALATLSVHSGAFNDQHGAVMPPIYATSTFAQPAPGQHTGYEYSRSGNPTRHALESAIAELEGGTRGYAFASGLAAISTVLELLDKDSHIVAIDDVYGGTYRLIENVRRRSTGLQVSWVKPDDLAGLEAAIRPDTRMIWVETPTNPLLKLADLAAIAEIARRHNVISVADNTFASPLIHRPLTLGFDIVVHSATKYLNGHSDVVAGLAVVGDRPALAEKLGYLQNAVGGVLDPFSSFLTLRGIRTLALRIERHSSNALALARWLEQQPQVEKVWFPWLTSHPQYALARQQMAQPGGMISIVIKGDDQRAAEVISKLKLFTLAESLGGVESLVSQPFSMTHASIPLAQRLANGITPQLIRLSVGIEDEKDLLADLQQALA

SEQ ID NO: 2562 - protein, 543 aa, Pirellula sp. 1
MVLTFMTATRRRPVVLIVRDGWGQNPDPKWNESNAVHLANTPVDDKLTQEYPSVLIHTSGEDVGLPAGVMGNSEVGHQNIGAGRIVDQEVMRITRAIRDDSFFSNPVVTGAIDHVKKSGGRLHLLGLMSDGRVHSDLQHGIAVIDLAKRNGLTGDQLAIHAITDGRDTSPRGGLKFVSQLTDHCEASGVGVVASVIGRFYAMDRDLRWERVEAAYNLMTQGTGQTFPSASAAIESYYANPTESSRDGDEFITASSIVPEGGSPITVQPGDAVLFMNYRGDRTREITKAFTFDDAAWKDIPGGGFDRGKKIDNLYFATMTGYETGLPVKVIFEKPAKMPNILGEYVASKGLHQFRCAETEKYPHVTFFFNDYRDNPFEEEEWGMAPSPRDVSTYDQKPEMSAEDITEKVLKQIKSGKCDMIIVNYANGDMVGHTGVLEAAIKAVEKVDACVGRVVDATLAAGGSLVVTADHGNCEQMIDPETGGPHTAHTTYQVPLIVVDPEFVGKPLREGGRLADIAPTVLALMGLEVPPEMTGRPLMETQTA

SEQ ID NO: 2563 - protein, 280 aa, Triticum aestivum
RSGVLGFGHRLIQMAFAVSDELLGTFVPIAVYWLYSGLYIVLDALGTADCYRLHPKEDEETRNIPSKRTVLKGVLLQQAVQVAVSLIVFKITGDGSHDTREQPPAPVIALQFVVAMFAMDTWQYFVHRYLHTNKFLYKHVHAQHHTILVPYAFGALYSHPLEGLLMDTASGAVGFLASGMTPRTAIFFISFGAIKTVDDHCGLWLPGNVFHAVFANNSAFHNIHHQLYGNKHNFSQPFFVVWDKILGTYMPFTLQSREGGGVEARPVKHALAAHEQHKSD

SEQ ID NO: 2564 - protein, 711 aa, Pseudomonas putida
MPSKKTDAPKQSEAAGTQTPDRANTNAKLQSLETFRSDATGQALRTNQGVKIADNQNSLKAGARGPSLLEDFIMREKITHFDHERIPERIVHARGTGAHGYFQSYGNHADLTKAGFLQDPDKITPVFVRFSTVQGPRGSGDTVRDVRGFAVKFYTDEGNFDLVGNNMPVFFIQDAIKFPDFVHAVKPEPHNEIPTGGSAHDTFWDFVSLVPESAHMVMWAMSDRAIPRSLRMMEGFGVHTFRLINAEGVASFVKFHWKPRQGVHSLLWDEAQKLAGKDTDFQRRDLWEAIENGDYPEWELGVQIVPEADEHKFDFDLLDPTKIIPEELVPVTPLGKMVLNRNPDNFFAEVEQVAFCPGHIVPGIDFTNDPLLQGRLFSYTDTQISRLGGPNFHQIPINRPVAPNHNNQRDALHQHVVHKGRASYEPNSIDGGWPKETPAAAQDGGFESYQERIDAHKIRQRSESFGDHFSQARLFFQSMSPTEQQHIIKAYSFELGKVEREHIRAREVNEILANIDLKLAAAVAANLGLPAPKAGTVQVKGSQLAQSPALSQMNHPGSVGIKGRKIAVLVANGVDAASVDKLIKALEAHSARPMLLGPTSAPVKATDGKQLPVEASMEGMPSIMFDGIVVPSGKASTDALAASGLAKHFLLEGYKHLKAMVLTKELATGLGLKEDKGLLLADDQKAVDAFVKAVEGHRVWEREAAAEAVPA

SEQ ID NO: 2565 - protein, 386 aa, Haemophilus influenzae R2866
MSVIKMTDLDLVGKRVFIRADLNVPVKDGKVTSDARIRATIPTLKLALEKGAKVMVTSHLGRPTEGEFKPEDSLQPVVDYLKNAGFNVRLEQDYLNGVEVKEGEIVVLENVRVNKGEKKNDPELGKKYAALCDVFVMDAFGTAHRAQASTYGVAEFAPIACAGPLLAAELDALGKALKEPARPMVAIVGGSKVSTKLEVLNSLSKIADQIIVGGGIANTFIAAAGHNVGKSLYEADLMPVAKELAANTDIPVPVDVRVGLEFSETAAATEKAVNEVKDDESIFDIGDKSAEQLAEIIKNAKTVLWNGPVGVFEFPHFRKGTEIISHAIANSDAFSIAGGGDTLAAIDLFGIADKISYISTGGGAFLEFVEGKVLPAVEILEKRAKN

SEQ ID NO: 2566 - protein, 511 aa, Cylindrotheca fusiformis
MAEFDNTFILDFCSGGNESSSDVQALCQVAGLANGTSASAAGLVEGINTFFLLFAGALVFLMQAGFAMLCAGSVRQKNVKNIMLKNMLDACGGAIGFWTIGYAFAYADNSSGDKTFIGGKNFFVNQLDESGGAWIGFFFQFAFAATAATIVAGTVAERCKMSAYLCYSVFLTGFVYPVVVHSIWSADGWLTAFRDDPWKGVGVIDFAGSGVVHMTGGATALVAAIVLGPRKGRFYDEDGNALETPASFPAHSVALQVLGTFLLWFGWYGFNPGSALVIDNAASASTSALCAVTTTLAAASGCVCAMFTDTIIEMMATGEASYDLTMAMNGALGGLVAITAGCSVVTPWASIIIGIIAGWVYIAFSKLLVKLKIDDAVDAVPVHFANGMWGVLAVGFFAEPDAMVTAGYNDVPGVFYKGDGKLLLCQFVAIIWICAWIFFLMTPFFVVLNILGMFRVDPLEEEVGLDISHHRGAAYDMTSAKKEDVEELMEHRSSKHGKVEVPKEVQKEDTA

SEQ ID NO: 2567 - protein, 460 aa, Thermobifida fusca
MTKVVIIGGGPGGYEAALVAAQLGADVTVIERDGIGGASVLTDCVPSKTLIATSVRTSYVKEAATLGINVGNEPEDKDLVRVELKTVNARVKRLAQAQSVDTANRLRTEGVEIIIGEARLVDPHIVAVGDERIRADVVLIATGAHPRELPTARPDGERILTWRQLYDLNELPEKLIVVGSGVTGAEFANAYQALGSDVTLVSSRDRVMPTQDADAARVLEDVFARRGMTVLGNSRAESVTRTDAGVLVRLTDGRVIEGSHCLMTVGMVPNTANLGLEEAGIRLDERGFVQVDRVSRTSTPGVYAAGDCTGVNMLASVAAMQGRIAMWHALGAAVSPLRLSTVASTVFTHPELAAVGATEDDVVSGRVDGRIVKLPLATNPRAKMHNTRDGFVKLICRQHTGIVLGGVIVGPRASELILAVSLAVQQRLTVDDVAHTFAVYPSLSGSVTEAARSLMQGFPE

SEQ ID NO: 2568 - protein, 1119 aa, Cuscuta pentagona
MSSSRPSQSSSNSARSKHSARIIAQTSIDAKLHAEFEESGDSFDYSSSIRVTSVNTGEQKPRSDKVTTAYLHQIQKAKFIQPFGCLLALDEKTFRVIAFSENAPDMLTMVSHAVPSVGDLPVLGIGTDIRTIFTAPSGAALQKALGFGEVSLLNPILVHCKTSGKPFYAIVHRVTGSLIVDFEPVKPYEAPMTAAGALQSYKLAAKAIARLQSLPSGSLERFCDTIVQEVFELTGYDRVMAYKFHDDDHGEVVSEITKPGLEPYLGLHYPATDIPQAARFLFMKNKVRMICDCQAKHVKVVQDEKLLFDLTLCGSTLRAPHTCHLQYMENMNSIASLVMAIVVNDGDDEEEEERSGSGKRKRLWGLVVCHNTTPRFVPFPLRYACEFLAQVFAIHVNKELELENQIVEKNILRTQTLLCDILLRDAVLGIVSQSQSPNMMDLVKCDGAVLLYKSKIHRLGITPTDFQLQDIVYRLNEHHMDSTGLSTDSLYDAGFPGALSLGLCGMASVRISEKDWLFWFRSHTASEVRWGGVKHEPDDGRKMHPRSSFKAFLEVVETRSLPWKDYEMDGIHSLQLIMRNAFFNEADTVATNVIHAKLNDLRIDGLQELEAVTSEMVRLIETAMVPIIAVGVDGLVNGWNTKIAELTGLSVDEAIGNHLLTLVEDSSVHTVKKMLNLALQGEEEKNVQFEIMTHGIRSECGPISLVVNACASRDVQESVVGVCFIAQDITGQKTVMDKFTRIEGDYRAIIQNPNPLIPPIFGTDEFGWCSEWNSAMTKLSGWRRDEVIDKMVLGEVFGTQKACCRLKSHEAFVTLGVVLNNAITGHESDKTVFGFCTRNGKYVECLLSVTKRLNQDGAVIGLFCFLQLASQELQQALHFQKLSEQTATKRLKVLAYLRKQVKNPLSGIMFSRKMLEGTELGNDQQNILHTSAQCQQQLSKVLDDTDLDCIIEGYLDLEMVEFKLDEVLLASISQVMTKSNGKSLRVINDVAENVLCETLYGDSLRLQQVLAEFLSVAVNFTPSGGQLAVSSSLTKDHLGQSVQLAHLEFRVTHSGGGVPEELLTQMFGSDVDALEEGISLLVSRNLVKLMNGDVQYHREAGRSAFIISVELAVATKPRA

SEQ ID NO: 2569 - protein, 487 aa, Berberis stolonifera
MDYIVGFVSISLVALLYFLLFKPKHTNLPPSPPAWPIVGHLPDLISKNSPPFLDYMSNIAQKYGPLIHLKFGLHSSIFASTKEAAMEVLQTNDKVLSGRQPLPCFRIKPHIDYSILWSDSNSYWKKGRKILHTEIFSQKMLQAQEKNRERVAGNLVNFIMTKVGDVVELRSWLFGCALNVLGHVVFSKDVFEYSDQSDEVGMDKLIHGMLMTGGDFDVASYFPVLARFDLHGLKRKMDEQFKLLIKIWEGEVLARRANRNPEPKDMLDVLIANDFNEHQINAMFMETFGPGSDTNSNIIEWALAQLIKNPDKLAKLREELDRVVGRSSTVKESHFSELPYLQACVKETMRLYPPISIMIPHRCMETCQVMGYTIPKGMDVHVNAHAIGRDPKDWKDPLKFQPERFLDSDIEYNGKQFQFIPFGSGRRICPGRPLAVRIIPLVLASLVHAFGWELPDGVPNEKLDMEELFTLSLCMAKPLRVIPKVRI

SEQ ID NO: 2570 - protein, 823 aa, Rhodobacter capsulatus
MTKFSGNELRAELYRRAFLSYSVAPGALGMFGRSLLAKGARAEALANGTVMSGSHWGVFTATVENGRATAFTPWEKDPHPSPMLAGVLDSIYSPTRIKYPMVRREFLEKGVNADRSTRGNGDFVRVSWDQALDLVAAEVKRVEETYGPQGVFGGSYGWKSPGRLHNCTTLLRRMLTLAGGYVNGAGDYSTGAAQVIMPHVVGTLEVYEQQTAWPVLAENTEVMVFWAADPIKTSQIGWVIPEHGAYPGLEALKAKGTKVIVIDPVRTKTVEFFGAEHITPKPQTDVAIMLGMAHTLVAEDLYDKDFIANYTSGFDKFLPYLDGETDSTPKTAEWAEGISGVPAETIKELARLFESKRTMLAAGWSMQRMHHGEQAHWMLVTLASMLGQIGLPGGGFGLSYHYSGGGTPSTSGPALAGITDGGAATKGPEWLAASGASVIPVARVVDMLENPGAEFDFNGTRSKFPDVKMAYWVGGNPFVHHQDRNRMVKAWEKLETFVVHDFQWTPTARHADIVLPATTSYERNDIETIGDYSNTGILAMKKIVEPLYEARSDYDIFAAVAERLGKGKEFTEGKDEMGWIKSFYDDAAKQGKAAGVEMPAFDAFWAEGIVEFPVTDGADFVRYASFREDPLLNPLGTPTGLIEIYSKNIEKMGYDDCPAHPTWMEPLERLDGPGAKYPLHIAASHPFNRLHSQLNGTVLREGYAVQGHEPCLMHPDDAAARGIADGDVVRVHNDRGQILTGVKVTDAVMKGVIQIYEGGWYDPSDVTEPGTLDKYGDVNVLSADIGTSKLAQGNCGQTVLAEVEKYTGPAVTLTGFVAPKAAE

SEQ ID NO: 2571 - protein, 498 aa, Oryza sativa (japonica cultivar-group)
MATCLDSLGPLLGGAANSTDAANYICNRFTDTSSAVDATYLLFSAYLVFAMQLGFAMLCAGSVRAKNSMNIMLTNVLDAAAGALFYYLFGFAFAFGTPSKGFIGKQFFGLKHMPQTGYDYDFFLFQWAFAIAAAGITSGSIAERTRFSAYLIYSAFLTGFVYPVVSHWFWSTDGWASAGRLTGPLLFKSGVIDFAGSGVVHLVGGIAGLWGAFIEGPRIGRFDAAGRTVAMKGHSASLVVLGTFLLWFGWFGFNPGSFTTISKIYGESGTIDGQWSAVGRTAVTTSLAGSVAALTTLYGKRWLTGHWNVTDVCNGLLGGFAAITAGCSVVDPWASVICGFVSAWVLIGCNKLSLILKFDDPLEATQLHAGCGAWGIIFTALFARREYVELIYGVPGRPYGLFMGGGGRLLAAHIVQILVIVGWVSATMGTLFYVLHRFGLLRVSPATEMEGMDPTCHGGFGYVDEDEGERRVRAKSAAETARVEPRKSPEQAAAGQFV

SEQ ID NO: 2572 - protein, 235 aa, Zea mays
MPSQSTHTSSSLSSSTAPILPCSSAAALFRSVMAAVATETPFHVLAVDDSLPDRKLIERLLKTSSFQVTTVDSGSKALQFLGLHDQDSTVPPVHTHQLDVAANQDVAVNLIITDYCMPGMTGYDLLKKIKESSSLRDIPVVIMSSENIPSRINRCLEEGADEFFLKPVRLSDMNKLKPHILKSRCNQEQHQQSDSHSGERRNPPISSSDSINNRKRKGAGTEEILPQLANRSRHS

SEQ ID NO: 2573 - protein, 403 aa, Chlamydia muridarum
MDKLSIKDLSPEGKKVLVRVDFNVPIKDGKILDDVRIRSAMPTINYLLKRDAAIILVSHLGRPKGDMFEEAYSLAPIVPVLEGYLGHHVPLSPDCVGEVARQAVAQLSPGRVLLLENVRFHRGEEHPEEDPSFAVELAAYADFYVNDAFGTSHRKHASVYRVPQMFPDRAAAGFLMEKELEFLGQHLLVEPKRPFTAILGGAKVSSKIGVIEALLSRVDNLVLAGGMGYTFLKAMNQQVGNSLVEETGIPLAKRVLEKARTQGVKIYLPVDAKVARRCETGEDWQELSIQEGIPEGFSGFDIGSKTIALFSEVIQDSATVFWNGPVGVYEVPPFDQGSKAIAQCLASHSSAVTVVGGGDAAAVVALAGCTSQISHVSTGGGASLEFLEKGYLPGTEILSPARS

SEQ ID NO: 2574 - protein, 277 aa, Glycine max
MSSENLIFIFIFIILISISSGNCVDRNRKKHYVLVHGACHGAWSWCKLKPRLESEGHKVTVLDLAASGINMKRIADVDTFSQYSEPLLQLMTTIPSNEKVVLVGHSFGGMNIALAMEKFPEKVAVGVFLTAFAPDTEHRPSYVLEQNTSSEDLDNEFAPSGNKTSVLFGPEYLSKKQYQLSPVEDLELAKTLVRPSSLFIEDLSKQKNFSKHGYGSVPRAYIVCTEDLAIPLEYQLWMIQNAGINDVLMIKGADHAAMFSKPRELFNSLQKIATKYD

SEQ ID NO: 2575 - protein, 228 aa, Oryza sativa (japonica cultivar-group)
MSAHYAFGPQEDDAIIKHRLLTRTTTTRGEPPLKKLQKKFMSFATEVEKDADNISDCERLYKAFLQEINTFELPLLKSKAVVDANLREKESFNELQDEIQRQILQAQTDIEDLKKQLEQSKIERQHKEECEAIRKMISLQPPRSETEKLIADLEKEIANLEAENTACIRTLELRKKQFALLLHVVEELQISIDDEQRSIADELRAATEEQKMSIEEVSGGASDAMAVD

SEQ ID NO: 2576 - protein, 500 aa, Neisseria gonorrhoeae
MTTSKCPVTHLTMNNGAPVADNQNSLTAGTRGPLLTQDLWLNEKLADFVREVIPERRMHAKGSGAFGTFTVTRDITKYTRAKIFSEVGKKTEMFGRLATVAGERGADAYTRVRGFALKFYTEEGNWDVVGNNTPVFYPDLRKFPDLNKAVKRSAHQYSSATNNWDFWALLPEALHQVTIVMSDRGIPASYRHMHGFGSHTYSLWNEAGERFWVKFHFRSQQGIKNLTNEEAAKIIADDRESHQRDLYEAIERGEFPKWTMYIQVMPEADAAKVPYHPFDLTKVWPKKDYPLIEVAEFELNRNPENFFADVEQSAFAPSNLVPGIGASPDKMLQARLFNYADAQRYRLGVNFRQIPVNRPRCPVHSNQRDGQGRATELRQPAHYEPNSFGQWSQQPDFAEPPLKINGDAAHWDYRQDDDDYFSQPRALFNLMNDAQKQALFDNTAAAMGDAPDFIKYRHIRNCYRCDPAYGEGGSKALGLTVEEPQAARATDPALGQGGLL

SEQ ID NO: 2577 - protein, 479 aa, Pseudomonas putida
MSKILTTASGAPVADNQNSRSAGPRGPLLLDDFHLIEKLAHFNRENIPERRVHAKGSGAYGTFTVTRDITGYTSAKLFEQVGKQTETFLRFSTVGGERGSADTERDPRGFAVKFYTEEGNWDIVGNNTPVFFIRDPLKFPDFIHTQKRHPQSNLKNAQIFWDSWSHSPEALHQVTILFSDRGIPDGYRHMHGFGSHTYSLINAQGERTWVKWHFKTQQGIKNLAPADAARLAGTDPDYAQRDLFEAIERGDYPRWTVCIQVMSEAEAASRDENPFDVTKTWSQKDYPLIEVGVLELNRNPLNYFAEVEQAAFGPSNMVPGVGLSPDRMLQGRVFAYADAHRYRVGTNHQQLPVNAPRCPVNSYQRDGSMATGSYGSAPNYEPNSYAAAPKQSPRHAEPALALNGSADRYDHREDADYYSHAGALFRLMSDEQKALLISNIAGTMAGVSENVIQRQLQYFFKADPAYGEGIAKGLGINLA

SEQ ID NO: 2578 - protein, 369 aa, Pseudomonas syringae pv. syringae B728a
MKSRAAVAFEPGKPLQIVEIDVEPPRKGEVLIKITDTGVCHTDAFTLSGDDPEGLFPVVLGHEGAGIVMEVGEGVTSVKVGDHVIPLYTAECGECLFCKSGKTNLCTAVRATQGKGVMPDGTSRFSYNGQPLYHYMGCSTFSEYTVVAEVSVAKINPDANPEHVCLLGCGVTTGIGAVHNTAKVQPGDTVAVFGLGGIGLAAIQGARQAKAGRIIAIDTNPAKFELARSFGATDCVNPKDHEQPIQQVIIEMTGWGVDHSFECIGNVHVMRAALECAHRGWGQSIVIGVAGAGQEISTRPFQLVTGRTWKGSAFGGVKGRSQLPKMVEDAMKGEIELAPFVTHTMGLDRINEAFDLMHEGKSIRTVIKY

SEQ ID NO: 2579 - protein, 479 aa, Desulfovibrio vulgaris (strain Miyazaki)
MTKHKLTTNAGAPVPDNQNAMTAGPRGPMLLQDVWFLEKLAHFDREVIPERRMHAKGSGAYGTFTVTHDITSYTKAALFSKIGKKTDLFVRFSTVAGERGAATAERDIRGFAIKFYTEQGNWDLVGNNTPVFFLRDPLKFPDLNHAVKRDPRTNMRSAKNNWDFWTSLPEALHQVTVVMSDRGIPASYRHMHGFGSHTFSFISPDNQRYWVKFHLRTQQGIKNLTDAEAEAIVARDRESHQRDLYDSIERGDFPRWTMYVQVMPEKDAEKLPYHPFDLTKVWFHKDCPLIEVGVLELNRNPENYFAEVEQAAFNPANVVPGISFSPDKMLQGRLFSYGDAHRYRLGVNHHLIPVNAARCPVHSYHRDGAMRVDGNHGSTLAYEPNSYGEWQEQPDFAEPPLAIRGDAAHWNFREDADYYDQPGRLFRLMTPQQQDELFQNTARAMGDAPEEIKRRHVGNCAKADPAYGAGVARALGLKM

SEQ ID NO: 2580 - protein, 419 aa, Pseudomonas syringae pv. syringae B728a
MNDILPEQTPLWRHFEGTVARLLDNYGYRQIRMPIVEFTELFKRSIGEVTDIVEKEMYTFADRNGDSLTLRPEGTAACVRAVLEHGITGGGQVQKLWYIGPMFRHERPQKGRYRQFHQIGVEVFNLDGPDIDAELIVMTWRLWGLLGIRDAVKLELNSLGTSEARARYREALVEYLSARLDQLDEDSQRRLKTNPLRVLDTKHPETQAVLVDAPKLADYLDDESRVHFEGLKARLDAAGIPYVINPKLVRGLDYYSKTVFEWVTDQLGAQGTVCAGGRYDGLVEQMGGKPTAGVGFAMGIERLVLLLETLEQVPEEIARQVDVYLCAFGEAAELAALALTEKVRDQLPTLRLQVNAGAGSFKSQFKKADKSGALYALILGEEELAAKVIGVKPLRGQGEQQNIAWDALSEHLASCVVQG

SEQ ID NO: 2581 - protein, 588 aa, Zea mays
  unsure (1)..(588): unsure at all Xaa locations
MCGILAVLGCSDWSQAKRARILACSRRQEHPGPDWSGLYQHEGNFLAQQRLAVVSPLSGDQPLFNEDRTVVVVANGEIYNHKNVRKQFTGTHNFSTGSDCEVIIPLYEKYGENFVDMLDGVFAFVLYDTRDRTYVAARDAIGVNPLYIGWGSDGSVWIASEMKALNEDCVRFEIFPPGHLYSSAGGGXRRWYTPHWFQEQVPRTPYQPLVLREAFEKAVIKRLMTDVPFGVLLSGGLDSSLVASVTKRHLVETEAAEKFGTELHSFVVGLEGSPDLKAAREVADYLGTIHHEFHFTVQXGIDAIEEVIYHDETYDVTTIRASTPMFLMARKIKSLGVKMVLSREGSHELLGGYLYFHFAPNKEEFHRETCRKVKALHQYDCLRANKATSAWGLEVRVPFLDKEFINVAMGMDPEWKMYDKNLGRIEKWVMRKAFDDDEHPYLPKHILYRQKEQFSDGVGYNWIDGLKSFTEQQVTDEMMNSAAQMFPYNTPVNKEAYYYRIIFERLFPQDSARETVPWGPSIACSTPAAIEWVEQWKASNDPSGRFISSHDSTAIDHTXAVSRRWPTAAATXANGTVNGKDVAVAIAV

SEQ ID NO: 2582 - protein, 382 aa, Pseudomonas syringae pv. syringae B728a
MIDSKLPNVGTTIFTVMSQLAAETGAINLSQGFPDFDGPQALRDAVCRHVTQGHNQYSPMTGLPALRQQVAAKIARSYGRTVNPDSEITITPGATQAIFCAIHSVIRAGDEVIIFDPCYDSYEPAVELAGGRCVHVQLGLDDFSIDWQKLSDALSPRTRMIVINSPHNPSGALISRAELDRLAALIADRDIYLLSDEVYEHLVFDGARHVSVLDHEALYQRAFVVSSFGKTYHVTGWKTGYVVAPPALSAELRKVHQYVSFCGVTPLQYALADFMAEHPEHVDELPGFYQAKRDFFCGHLAESRFSFRPVGGTYFQLVDYSQIRPDLNDVDMALWMTREHGVASIPISVFYQSPPAGQRLIRLCFAKQEETLRQAAEKLCAI

SEQ ID NO: 2583 - protein, 412 aa, Escherichia coli K12
MADTRPERRFTRIDRLPPYVFNITAELKMAARRRGEDIIDFSMGNPDGATPPHIVEKLCTVAQRPDTHGYSTSRGIPRLRRAISRWYQDRYDVEIDPESEAIVTIGSKEGLAHLMLATLDHGDTVLVPNPSYPIHIYGAVIAGAQVRSVPLVEGVDFFNELERAIRESYPKPKMMILGFPSNPTAQCVELEFFEKVVALAKRYDVLVVHDLAYADIVYDGWKAPSIMQVPGARDVAVEFFTLSKSYNMAGWRIGFMVGNKTLVSALARIKSYHDYGTFTPLQVAAIAALEGDQQCVRDIAEQYKRRRDVLVKGLHEAGWMVEMPKASMYVWAKIPEPYAAMGSLEFAKKLLNEAKVCVSPGIGFGDYGDTHVRFALIENRDRIRQAIRGIKAMFRADGLLPASSKHIHENAE

SEQ ID NO: 2584 - protein, 424 aa, Bacillus subtilis subsp. subtilis str. 168
MGYNIPRGTQDILPGESDRWQFVEQIMRDTCRTYQYKEIRTPIFEHTELFARGVGESTDIVQKEMYTFEDRKGRSLTLRPEGTAAAVRAFNENKLFANPVQPTKLYYVGPMFRYERPQTGRYRQFYQFGIEAIGSKDPAIDAEVMALAMSIYEKAGLENVKLVINSLGDQDSRKSYREALVKHFEPRIEEFCSDCQSRLHTNPLRILDCKKDRDHELMKSAPSILTYLNEESAAYFEKVKQYLNDLGISYEIDPNLVRGLDYYNHTAFEIMSNAEGFGAITTLAGGGRYDGLVEQIGGPEAPGIGFAMSIERLLAAIDAEKRELPVDKGIDCYIVTLGEKAKDYSVSLVYKLREAGISSEIDYENKKMKGQFKTADRLKARFIAILGEDELAQNKINVKDAQTGEQIEVALDEFIHVMKANQKG

SEQ ID NO: 2585 - protein, 197 aa, Brassica rapa
MGRKKLEIKRIENKSSRQVTFSKRRSGLIEKARQLSVLCDASVALLVVSSSGKLYSFSAGDNLVRILDRYGKQHAGDLKALNLQSKALSYGSHNELLELVDSKLVESNVGGVSVDTLVQLEGVLENALSLTRARKTELMLKLVDSLKEKERLLKEENQALAGQKEKKNLAGTEADNMEMSPGQISDINLPVTLPLLN

SEQ ID NO: 2586 - protein, 289 aa, Streptococcus pneumoniae
MKGIILAGGSGTRLYPLTRAASKQLMPVYDKPMIYYPLSTLMLAGIKDILIISTPQDLPRFKDLLLDGSEFGIKLSYAEQPSPDGLAQAFLIGEEFIGDDSVALILGDNIYHGPGLSTMLQKAAKKEKGATVFGYQVKDPERFGVVEFDTDMNAISIEEKPEYPRSNYAVTGLYFYDNDVVEIAKQIKPSARGELEITDVNKAYLNRGDLSVELMGRGFAWLDTGTHESLLEASQYIETVQRMQNVQVANLEEISYRMGYISREDVLELAQPLKKNEYGRYLLRLIGEA

SEQ ID NO: 2587 - protein, 472 aa, Photorhabdus luminescens subsp. laumondii TTO1
MSQNVYQFIDLQRVDPPKKPLKIRKIEFVEIYEPFSTSQAQTQADRCLSCGNPYCEWKCPVHNYIPNWLKLANEGRIMEAADLSHQTNSLPEVCGRVCPQDRLCEGACTLNDEFGAVTIGNIERYINDKAIAMGWKPDMSHVQPTGKQVAIIGAGPAGLACADVLTRNGVQAVVFDRHPEIGGLLTFGIPAFKLEKEVMIRRREIFSEMGIEFRLNTEIGKDIALSELTEQFDAIFLGVGTYQSIRGGLANEDADGVYDALPFLTANTRHLMGYPALPSQPFINMQGKRVVVLGGGDTAMDCVRTAIRQKAASVTCAYRRDETNMPGSQREVKNSKEEGVEFLFNLQPVRIEINHSGQVCGINMVRTQLGQPDENGRRQAEIIAGSEHLLKADAVIMAFGFKPHTMNWLSAHQVTLDKQGRIVAPEYSDIPFQTSNPQIFAGGDAVRGSDLVVTAIAEGRKAAQGILDYLNI

SEQ ID NO: 2588 - protein, 496 aa, Oryza sativa (japonica cultivar-group)
MATCADTLGPLLGTAAANATDYLCNQFADTTSAVDSTYLLFSAYLVFAMQLGFAMLCAGSVRAKNTMNIMLTNVLDAAAGALFYYLFGFAFAFGAPSNGFIGKHFFGLKQVPQVGFDYSFFLFQWAFAIAAAGITSGSIAERTQFVAYLIYSAFLTGFVYPVVSHWIWSADGWASASRTSGSLLFGSGVIDFAGSGVVHMVGGVAGLWGALIEGPRIGRFDHAGRSVALRGHSASLVVLGSFLLWFGWYGFNPGSFLTILKSYGPPGSIHGQWSAVGRTAVTTTLAGSTAALTTLFGKRLQTGHWNVIDVCNGLLGGFAAITAGCSVVDPWAAIICGFVSAWVLIGLNALAARLKFDDPLEAAQLHGGCGAWGVIFTALFARKEYVDQIFGQPGRPYGLFMGGGGRLLGAHIVVILVIAAWVSFTMAPLFLVLNKLGLLRISAEDEMAGMDQTRHGGFAYAYHDDDASGKPDRSVGGFMLKSAHGTQVAAEMGGHV

SEQ ID NO: 2589 - protein, 357 aa, Leuconostoc mesenteroides subsp. mesenteroides ATCC 8293
MTSVKKIVVLKGDYIGPEIMTAGLAVLDAATKDTTFAYELIDAPFGGDGIDRAGDPLPQSTIDVSKQADAVLLSAIGGPKWDNAPRRPEQGLLEIRSKLNLFANIRPTKVTAAQIDRSPLKPEYVENTDFVIVRELTSGAYFGKPRKLEAHQAIDTMYYSEEEVTRIMHQGFKMAQKRNKHVTIVDKSNVLATSKFWRKIANEVGKSYQDVTIDYYYVDAMTMAIMAKPTTFDVVIIPNLFGDILSDEAAQITGSIGQIPSMSVGESGPNLYEPIHGSAPDIAGQGIANPISMVNTVAMMLTESFDEKRIADKITAAVDYIIENHCVTPDMGGTMTTDEVTQKMVDYIKNYESADIK

SEQ ID NO: 2590 - protein, 420 aa, Streptomyces avermitilis MA-4680
MSTFKAPKGTYDLIPPDSAKYLAVREAIAAPLRNSGYGYIETPGFENVELFARGVGESTDIVTKEMYAFETKGGDRLALRPEGTASVLRAALEANLHKAGNLPVKLWYSGSYYRYERPQKGRYRHFSQVGAEAIGAEDPALDAELIILADQSYRSLGLRNFRILLNSLGDKECRPVYRAALQDFLRGLDLDEDTLRRAEINPLRVLDDKREDVQKQLGGAPLLRDYLCDACKAYHEEVRELITAAGVSFEDDAKLVRGLDYYTRTTFEFVHDGLGSQSAVGGGGRYDGLSEMIGGPALPSVGWALGVDRTVLALEAEGVELELPSSTSVFAVPLGEEARRILFAKVTELRKVGIAADFAYGGKGLKGAMKNANRSGARYTVVAGERDLAEGVVQLKDMESGEQTAVGVNEIVAELEARLG

SEQ ID NO: 2591 - protein, 315 aa, Zea mays
MDPKFPPPPPLNKTEPTTATTTTTSTAQQQQQQLDPKDYQQQQQQPAQHLQIQIDQSQQDGGGGGKEQQQLQVVAQPGERRQQALAPKRSSNKDRHTKVDGRGRRIRMPALCAARIFQLTRELGHKSDGETVQWLLQQAEPAIVAATGTGTIPASALASVAPSLPSPTSGLARPHHHMWAPSAGFSSPSFLNSAAAGTGDAAGIMQRMGIPAGFELPGASAAGATLGAGGHIGFAPMFAGHAAAMPGLELGLSQDGHIGVLAAQSISQFYHQVGAAAAGGGQMQHAHGHHHHHHQQQEDGEDDREDGESDDESGQ

SEQ ID NO: 2592 - protein, 300 aa, Brucella melitensis 16M
MNPNIKKSSRPLVAVPTDVKPFENYVWHAAPEQYLAAAIEVAQVTPLLVPSFGDKMDFDAILDAVDSLLVTGSRSNVHPSLYGVEPSEAFEPYDDARDATSLPLIRAAIEKGVPVLAICRGLQELNVALGGTLATEIQGLAGRMDHRATDSESQAERFAIRHPVKLNPNSCLAEILKEESVRVNSVHRQAIDKLAPRLEVEAVAEDGTVEAVSVKNARGFVVGVQWHPEYWVQSDAPSRRIFEAFGDAVREHRAVGQWGSGAVGQWGSGAVKNMVAALMRNQNILPYPIPLTYCLTALPL

SEQ ID NO: 2593 - protein, 284 aa, Zea mays
  unsure (1)..(284): unsure at all Xaa locations
STPSTGERHRIPSRIPPRSASWTASPKPIGGGGPNVPAGSHPAGGSQAAAGGGATQRTQYPYVTGTSVIALKYKDGVIMACDTGASYGSTLRYKSVERIKAVGKHSIIGASGEFSDFQEILRYLDELTLSDHMWDDGNSLGPKEIHSYLTRVMYNRRNKFDPLWNSLVLGGVKKGPKGDEKYLGMVNMIGTHFEENHVATGFANHLAIPILRXEWREDMTFEEAVKLVEKCLLVLLYRDRSSINKFQIAKITTEGSTIYPPYSLKTHWGFSHFENPAQGPVGSW

SEQ ID NO: 2594 - protein, 528 aa, Halomonas halodenitrificans
MKIRSQVGMVLNLDKCIGCHTCSVTCKNVWTSREGVEYAWFNNVETKPGIGYPKEWENQDKWKGGWMRRRDGKIEPRIGGKWRVLANIFANPDLPEIDDYYEPFTFDYEHLHNAKQGEHQPTARPRSLISGQRMKKIEWGPNWEEILGTEFAKRRKDMNFEKVQADIYGQFENTFMMYLPRLCEHCLNPTCVASCPSGAIYKREEDGIVLIDQDKCRGWRMCISGCPYKKIYYNWKTGKSEKCIFCYPRIEAGQPTVCSETCVGRIRYLGVLLYDADRIEEVASSPDERDLYHRQCEIFLDPNDPEVIAQAKKDGITDNVIKAAQASPVYKMAMDWGLALPLHPEYRTLPMVWYVPPLSPIQSAAEAGKVEFDGVMPKIESLRIPVKYLANMLTAGEEAPVVLALKRLMAMRLYMRGKHVDGQANTEVLEDVGLTEQQVEDMYRYLAIANYEDRFVIPTSHREIATEAFPERGGCGFSFGDGCHGDSSESLFGGRKTTATLVKPVETFDPQAQSEGQRDKTTEEARHG

SEQ ID NO: 2595 - protein, 397 aa, Clostridium thermocellum ATCC 27405
MISESVVNSLKKASWIRAMFEEGEKLRKIHGADNVYDFTLGNPDHEPPSSVKETLKKIVTEDKPGIHRYMNNAGYEDVRQKVADYLNRTSGLSSISSQHIIMTCGAAGALNVVLKTLLNPGEEVIILAPYFAEYIFYVGNHGGKVVIVPPEKDSFKPDLKILENSITEKTKAIIINSPNNPSGYIYSEETLKEIFEVLEKKEKEYNSSIYAISDEPYYKLVYDNVKLPFLFRLYKKSFIVNSFSKSLALAGERIGYIAVNPEIPELELILESLIFCNRTLGYVNAPALFQKAIADSLDADIDVESYKQRRDLIYDTLTRLGFSCIKPQGTFYIFPKSPIEDDIQFIKHAVKYNILLVPGTGFGLPGHFRLSYCVSMDIIKKSLPAFEALAKDFNLIK

SEQ ID NO: 2596 - protein, 368 aa, Zea mays
  unsure (1)..(368): unsure at all Xaa locations
FCRGPRAPRPIGCTALVVCTPLVTHTLPHIPFSPTALLAARNNMSNRATHWCYACRRPIRLRGQDIICPNCNDGFIQEISEMGGVLNTYGLIEPDFEERQARRFGMMDAISSLMRQRLSEIGRDSLFDIHGRQGTGTEYGRRSTAIPTLVFGGIPSPAVGSSDVNVVIREGRRAGAARPNFSSLVVGPSLEALFEQLLLQNNRQGPPPAPQSAIDSMPVVKINRRHLDEDPQCAVCKDKFEVGAEAREMPCKHLYHTDCIIPWLVQHNSCPVCRHPLPSQRSGSXSSARPSAYYNEAADPPGVTRADLEPASRDGGRESQERRRYFSXLWPYGAPEXRSSYYKYEQNXDESVVYDXNQIXYVEWNYDH

SEQ ID NO: 2597 - protein, 443 aa, Anabaena variabilis ATCC 29413
MQPEFNFFQHWYPVSPIEDLDPKRPTPVTLLGIRLVIWKPKSSDSFRIFIDQCPHRLAPLSEGRIDDKTGNLMCSYHGWQFDTEGVCTRIPQAENPEIVTKNQKDFCVNSLPVRQENDLLWVWPDVNSQELAHQTPLPLSPQVDASKGFVWTSFVRDLEYDWQTLVENVADPSHVPFAHHGVQGNREQGRARPISIMQSTPGLIEAVADGLVTAKITFEPPCRLEYAISVGNDGKQLGLVTYCLPVSPGKSRIVAQFPRNFAKTLHRLTPRWWDHIKTRNLVLDGDMILLNQQEHLIQQRQLSASWKTAYKMPTSADRLVIEFRKWFDKYCDGGLPWKEVGIPIPEAAAINDNRDVLLDRYKQHTRHCSSCRNTLKNIERLQLILLGYFALVISGVAVLPDSLRVRLGLPLIITAILGLGLYSWLKFWLVPKFYFVDYVHAEK

SEQ ID NO: 2598 - protein, 514 aa, Zea mays
MASPRGRMSFPLRSFLMICLMAQLGASNVVLMANNTTLSFDDVEAIFTPAVKGSGVNGVLYAVEPMDACSPLKTKAIGGSVSPFALVIRGGCHFDDKVRNAQNAGFKAAVVYDTEDNGVLVSMAGSSSGVHIYAVFVSKASGEELKKYSGQTDAELWIIPTYENSAWSIMAISFISLLVMSAILAACFFARRHQIRRDRARLPQTREFHGMNSRLVKAMPSLIFTKVQEDDCTSATCAICLEDYSAGEKIRVLPCRHKFHAACVDLWLTSWRTFCPVCKRDANAGTPEPPVSESTPLLSSSAIRLPEPTASVSFRSTVAEAAAASPPRPISRHPSPSRSISRKHSVSGSSIPGTPIPRFHASSSSPTCTSGSSLDLANMPSSPWPRASHLASAHSSCSGRLSPPIHIRNTSAAHVSRSAYGSPSRYVRSSHMSRGSPSCYYLGSSSGQQHPYLRHCTLSGTSLFTMVPQSPQQNQLQHGGDSEKDLSAAAPFRQLYYLQHCPDSGTSSQSLPGC

SEQ ID NO: 2599 - protein, 827 aa, Ustilago maydis
MSGFRGTSNGPQGAPQGGSFGSLTPSRPAPPVPSSKHNDPFLPPLSQYNAASAGMGAGGGSYTGPLRPAGPGATASSGAPANHLAGNNSGWQQAGPNATTSGAAVVRKGWVSVKEDGIRSWIWSKRWLALREQTLTFHKNETTYQAVALVFLKDISNVSRTDLKPYCIEVETKEKTFYLQLKSDEELYGWMDDIYSRSPLMGVSSPTNFVHQVHVGFDPISGAFTGLPEQWSKLLTTSAITREDYEKNPQAVLDVLEFYTDIQKRERDDFGLGTPTMNVQAGRKPNEIPSASSAPRFKAGTGFAGSAGADSASNLSKDAPQYPAASKPPSDAFRSSSAAAASSSSASSLRPAQPAMTRRPSDDGRQGASSPALSQASSSRLGGSNDSKYVRATPSSSASPANAYQDLVPSRKAPTAPGSVKPPTPSSSLASTRPAPPPPNSSTPSSRTANDAGVQGLNVKTKELKLGSDSSSASASTTGAAKAATVAKQPSPVAAAPNAAAAAPVKPLQMAKKETNAKTAQQKEAERRISTMSEAQIMDKLRSVVSQDDPNMLYSKIKKVGQGASGSVFVAKTLATGQRVAIKTMDLSQQPRKELIVNEILVMKESQHPNIVNFLNSFLVRNNELWVIMEYMEGGALTDVIDNNTLEEDQIAAICLETCKGLEHLHSQSIIHRDIKSDNVLLNASGQVKITDFGFCAKLTDQKSKRATMVGTPYWMAPEVVKQKEYGAKVDIWSLGIMAIEMIENEPPYLDEEPLKALYLIATNGTPTLKKPETLSKNLKSFLAVCLCADVKSRASADELLHHPFLQSACPLSSLAPLLRFRNKPDR

SEQ ID NO: 2600 - protein, 398 aa, Streptococcus agalactiae 2603V/R
MAKLTVKDVDLKGKKVLVRVDFNVPLKDGVITNDNRITAALPTIKYIIEQGGRAILFSHLGRVKEEADKEGKSLAPVAADLAAKLGQDVVFPGVTRGAKLEEAINALEDGQVLLVENTRFEDVDGKKESKNDEELGKYWASLGDGIFVNDAFGTAHRAHASNVGISANVEKAVAGFLLENEIAYIQEAVETPERPFVAILGGSKVSDKIGVIENLLEKADKVLIGGGMTYTFYKAQGIEIGNSLVEEDKLDVAKDLLEKSNGKLILPVDSKEANAFAGYTEVRDTEGEAVSEGFLGLDIGPKSIAKFDEALTGAKTVVWNGPMGVFENPDFQAGTIGVMDAIVKQPGVKSIIGGGDSAAAAINLGRADKFSWISTGGGASMELLEGKVLPGLAALTEK

SEQ ID NO: 2601 - protein, 829 aa, Vibrio vulnificus CMCP6
MKMTRRAFVKANAAASAAAVAGITLPASAANLIASSDQTKITWDKAPCRFCGTGCSVLVGTQNGKVVATQGDPEAPVNKGLNCIKGYFLSKIMYGQDRLTQPLLRMKDGKYDKEGDFTPVSWDVAFDTMAEKWKASLAKKGPTSIGMFGSGQWTVMEGYAAAKMMKAGFRSNNIDPNARHCMASAVVGFMRTFGIDEPMGCYDDFEHADSFVLWGSNMAEMHPVLWTRITDRRLSHPHVKVNVLSTYYHRSFELADSGYIFKPQSDLAIANFIANYIIQNDAVNWDFVNKHTNFKQATTDIGYGLRDDDPLQKQAKNPNSGNMTSISFEEYKKSVAPYTVEKASEMSGVAQDKLIELAKQYADPNTKVMSLWTMGMNQHTRGVWMNSLVYNIHLLTGKISTPGNSPFSLTGQPSACGTAREVGTFAHRLPADMVVANPKHRAIAEKIWKLPEGTIPPKPGFHAVLQDRMLHDGVLNCYWVQCNNNMQAGPNINGERLPGYRNPENFIVVSDPYPTATAQAADLILPTAMWIEKEGAYGNAERRTQAWYQQVGTVGEAKSDLWQVMEFSKRFKMEEVWPEELLAKAPQYRGKTMYDMLFANGQVDKFPLSEARQLNDDSHHFGFYVQKGLFEEYAEFGRGHGHDLAPYDVYHTVRGLRWPVVDGKETLWRYKEGSDPYAKKGSGWDFYGKPDGKALIISAPYEAPPESPDAEYDMWLCTGRVLEHWHTGTMTRRVPELYKAVPDAVCYIHPEDAKARGLRRGDEVLISNKRGEVRVRVETRGRNRPPQGLVFVPFFDARILINKLILDATDPLSKQTDFKKCPVKITKVA

SEQ ID NO: 2602 - protein, 246 aa, Mycobacterium avium subsp. paratuberculosis str. k10
MGRVDGKVALISGGARGMGAEHARLLAAEGAKVVIGDILDDEGKAVADEIGDSVRYVHLDVTQPDQWDAAVETAVGEFGKLNVLVNNAGTVALGPLKSFDLAKWQKVIDVNLTGTFLGMRVAVEPMIAAGGGSIINISSIEGLRGAPMVHPYVASKWGVRGLAKSAALELAPHNIRVNSVHPGFIRTPMTKHLPDDMVTVPLGRPAESREVSTFVLFLASDESSYATGSEFVMDGGLVTDVPHKQF

SEQ ID NO: 2603 - protein, 168 aa, Xylella fastidiosa Dixon
MTSIYTFTFTRLDGRPQALADWRGQVLLLVNVASHCGFTPQYAGLEMLWQRYRDAGLIVIGFPCDQFAGQEPGDEAKIAEFCTLTYGVDFPMAAKIKVNGADAHPLWQWLKHRRRGLFGVAAIKWNFTKFLIGRNGQPIARYSPIKSPEQLEVHIVRALGEEGGGNTH

SEQ ID NO: 2604 - protein, 395 aa, Tropheryma whipplei str. Twist
MRTLGGFTFPCDAPVFVRVDFNVPMDEVGTITDDLRIRASLPTIESLLGRGAPLILISHLGRPVKNEQQGFSLKPCAERLSEYIGVNVPLVDFLDLDTKLYGELTRHLDKSGIVLFENIRFFAEETSKAQADRRILAEQLAPFAGAYVNDAFGASHRRHASVYELAQAFSNKAAGFLIESEMQAFSHLASEAKRPYTVILGGAKLSDKLRLIENILPTVDRLLLCGGMAFTFLAAQGCETGKSLLEESFIPEANKIIDFAKQNNVELILPVDVIEARSLTSPLGVVSKAESISYMGLDIGPETQSIFRNVIQDSKTVFWNGPAGLFENPSFSNGTRALLDALSSSSAFTFIGGGDTAAAVSLLGFDYGDFSHVSTGGGACLELLEGKILPALEVL

SEQ ID NO: 2605 - protein, 92 aa, Glycine max
  unsure (1)..(92): unsure at all Xaa locations
VGFPTSKTYNDITSIVSNGGRLQCMHVWPPLGKKKSETLFYLPYLYDAQSAXKYXYLLKKGWIPXWEFQLDHSLVYHDHYRLPRYYDGRYWT

SEQ ID NO: 2606 - protein, 277 aa, Bordetella pertussis Tohama I
MKNDLSIAFIGGGNMAAALASGLAGKVCPAANIHVVDINADSHAGWRARGMSAAAAPDATLAGCRVWVYAVKPQHMREAVAGTRPWLRPDTLIVSVAAGIRADTLAGWLGEPGQPWQRLVRCMPNTPALVGAGMTGLAALPGVTPQDRELAGQLLTSVGEVVWVDGDAGLDAVTALSGSGPAYVFLFIEALIAGGRAVGLTDEQARQLALGTLAGATRLAAQSDEPPAVLRERVTSKGGTTAAALDVYAQGDFAGLVERAMQAAARRSRELAEEFGR

SEQ ID NO: 2607 - protein, 83 aa, Rhodospirillum rubrum
PERVVHARGFGAHGTFETYEDLSALTSADIFQRAGEKTPAFVRFSTVAGNLGSSDVARDVRGFAVKLYTKQGNWDIVGNNTPV

SEQ ID NO: 2608 - protein, 452 aa, Pseudomonas syringae pv. syringae B728a
MAFDFDLFVIGAGSGGVRAARFAAGFGARVAVAESRYLGGTCVNVGCVPKKLLVYGAHFSEDFDHAKGFGWSLGEAEFDWATLIANKDREINRLNGIYRKLLVDSGVTLLEGHARLTGPQQVEINGQTYSAERILVATGGWPQVPDVPGREHAITSNEAFYLKTLPKRVVVVGGGYIAVEFASIFNGLGADTTLVYRRELFLRGFDGGVRTHLHEELLKRDMTIRFNSDIERIDKQADGSLLLSMKGGGTLETDCVFYATGRRPMLDNLGLDSVDVKLDEHGYIKVDEHYQSSEPSILAIGDVIGGVQLTPVALAEGMAVARRLFKPEQYRPVDYNHIPTAVFSLPNIGTVGLTEEDAIKAGHDVQIFESRFRPMKLTLTDDQERTLMKLVVDAKTDRVLGCHMVGPDAGEIVQSLAIAIKAGATKQVFDDTIGVHPTAAEEFVTMRTPVKR

SEQ ID NO: 2609 - protein, 486 aa, Streptomyces avermitilis MA-4680
MADPKGFLTHGREVARTRPVEERVKDWNEVYVPGSLLPIISKQAGRCMDCGIPFCHNGCPLGNLIPEWNDYAYREDWTSASERLHATNNFPEFTGRLCPAPCESACVLGINQPAVTIKNVEVSIIDKAWDTGDVKPQAPERLSGKTVAVVGSGPAGLAAAQQLTRAGHTVAVYERADRIGGLLRYGIPEFKMEKRHINRRIEQMRAEGTKFRTGVEIGRDIDAAKLRRRYDAVVVAAGSTTARDLPVPGRELKGVYQAMEYLPLANKVQEGDFVAPPITAEGKHVVVIGGGDTGADCVGTAHRQGAASVTQLEILAKPGEERAAHQPWPTFPMLYKVTSAHEEGGERVYSVSTTHFEGDEDGNVQWLHLVEVEFVDGKLTQKPGTERRIPAQLVTLAMGFTGTDQDNGLVTQFGLGLDERGNIARDADFQTNVPGVFVAGDAGRGQSLIVWAIAEGRSAAKGVDRFLTGASELPAPIRPTDRSLMV

SEQ ID NO: 2610 - protein, 416 aa, Pseudomonas putida KT2440
MNQESISQSIAIVHPITLSHGRNAEVWDTDGKRYIDFVGGIGVLNLGHCNPAVVEAIQAQATRLTHYAFNAAPHGPYLALMEQLSQFVPVSYPLAGMLTNSGAEAAENALKVARGATGKRAIIAFDGGFHGRTLATLNLNGKVAPYKQRVGELPGPVYHLPYPSADTGVTCEQALKAMDRLFSVELAVEDVAAFIFEPVQGEGGFLALDPAFAQALRRFCDERGILIIIDEIQSGFGRTGQRFAFPRLGIEPDLLLLAKSIAGGMPLGAVVGRKELMAALPKGGLGGTYSGNPISCAAALASLAQMTDENLATWGERQEQAIVSRYERWKASGLSPYIGRLTGVGAMRGIEFANADGSPAPAQLAKVMEAARARGLLLMPSGKARHIIRLLAPLTIEAEVLEEGLDILEQCLAELN

SEQ ID NO: 2611 - protein, 501 aa, Candida albicans SC5314
MIKRLLMTATKPKKGKAQDFVLKTPKGTKDWADKDMVLREAIFGTLSTLFKKHGGVTIDTPVFELREILTGKYGEDSKLIYNLEDQGGELTSLRYDLTVPFARFVACNNIASIKRYHIAKVYRRDQPAMTKGRMREFYQCDFDIAGNYDTMVPDSEILALLCDGLNGLGIQDFKVKLNHRKILDGIFQACGVKEEDVRKISSAVDKLDKSPWEVVKKEMVVEKGQPEEVADKIGEFVKHNGSIREVLEYLQSSEILKSNDSAQKGIEEMQILADYVDAFDITQYLSFDLSLARGLDYYTGLIYEAVTAASAPPENATELKAKSKDDDASAYVGVGSIAAGGRYDNLVGMFSNGKSIPCVGVSFGVERLFSIIKNRANLNNISANHTDVFVMAFGGGEGWNGFLKERMEITNKLWKAGINAEYLYKSKANIRKQFDAAEKAGAKLAVILGKEEYPQGQLRIKVLGQGEENEGELVTKDELLAAVQAKLSSDIDDISRIIKGL

SEQ ID NO: 2612 - protein, 253 aa, Listeria monocytogenes EGD-e
MGKLNGKVAVVTGAASGMGQQIAILFAKEGAKVVVADLNLEAAQKTVELVEKEHGTGLAVVANVTKQEDIENMINQAIEAFGTLDILVNNAGIMDNFVPAGELTDELWDKVFAINTTGVMRATREALHIFEEKGQGVIVNIASAGGLFGSRAGAAYTASKHAVVGFTKNVGFQYANKNIRCNAIAPGAVNTNIGTTIYAPDEFGQERAMIGMGINPRAGDASEIAKVALFLASDDSSFVNGTVITADAGWTAY

SEQ ID NO: 2613 - protein, 302 aa, Streptococcus equi subsp. zooepidemicus
MTKVRKAIIPAAGLGTRFLPATKALAKEMLPIVDKPTIQFIVEEALKAGIEEILVVTGKAKRSIEDHFDSNFELEYNLQAKGKTELLKLVDETTAINLHFIRQSHPRGLGDAVLQAKAFVGNEPFVVMLGDDLMDITNPSAKPLAKQLIEDYDCTHASTIAVMRVPHEEVSNYGVIAPQGKAVKGLYSVETFVEKPSPDEAPSDLAIIGRYLLTPEIFAILENQAPGAGNEVQLADAIDKLNKTQRVFAREFKGERYDVGDKFGFMKTSLDYALKHPQVKDDLTDYIIKLGKALESTQQQAK

SEQ ID NO: 2614 - protein, 263 aa, Acinetobacter sp. ADP1
MAKHIVLVHGAWQGSWSFDLIKPWLQQKGWTVHAVDLPDNGWNSDTQITASQQSYCDYVVQMIHNIGEPVVLLGHSGGGLTISAVAEQIPELISHLVYLVGMMLPSNMSFLDFKKLCEQHFPDEDFSGISPYLTFTDDGYSIVSSEGAKKIFLQDCEPALAEQLIEKLRPQPEAGRDLKPVLTPERFGCVPRIYVEALNDQSLSINMQRLMQQLQPNKLQIIAMQTGHVPQAVQPDLLVEKLNQILSPDKTKIQIDTGEKAAD

SEQ ID NO: 2615 - protein, 397 aa, Salmonella enterica subsp. enterica serovar Typhi Ty2
MFQKVDAYAGDPILSLMERFKDDSRHDKVNLNIGLYYNEDGIIPQLKTVAEAEARLNAQPHGASLYLPMEGLNTYRHTIAPLLFGADHPVLQQQRVATIQTLGGSGALKVGADFLKRYFPDAGVWVSDPTWENHIAIFAGAGFEVSTYPWYDDATNGIRFNDLLATLNTLPARSIVLLHPCCHNPTGADLTPSQWDAVIEIVKARDLIPFLDIAYQGFGAGMDEDAYAIRAIASAGLPALVSNSFSKIFSLYGECVGGLSVVCEDAEIAARVLGQLKATVRRIYSSPPCFGAQVVATVLGDEALKASWLAEVDAMRTRIISMRQTLVKELKAEMPDRNFDYLLQQRGMFSYTGLSAEQVDRLRDEFGVYLIASGRMCVAGLNASNVHRVAKAFAAVM

SEQ ID NO: 2616 - protein, 253 aa, Xylella fastidiosa Dixon
MSESSEKTSTTHFGFRQVAAKDKKTLVAEVFTSVSRRYDLMNDLMSLGIHRAWKRYFVATAQVKSGDRVLDLAGGTGDIAMLLKNRVGAEGSIVLGDINASMLSVGRDRLIDRGVVARLEYVQCNAEALPFQDKCFDLVTMSFGLRNVTDKDTALREMFRVLKVGGQARVLEFSTVTAEWFKPIYDFHSFQVLPRLGWLFARDAASYRYLAESIRKHPPQEELQAMMGAAGFERCGYRNLTGGIVAIHSGYKY

SEQ ID NO: 2617 - protein, 377 aa, Bacillus cereus ATCC 14579
MKAVTYQGPNQVQVKQVDDAKLEKKDDIIVKITSTAICGSDLHLYQGNMPLPQGYIIGHEPMGIVEEVGPDVTKVKKGDRVVIPFNVSCGHCFYCQHEMESQCDNSNPHYDSGGYFGYTEKFGNHPGGQAEYLKVPFGNFTPFVIPESCELEDESLLFLSDVLPTAYWSVINAGVRPGDTVIVLGCGPVGLMTQKFAWMQGAKRVIAVDYLDYRMNYAKKINNVEVFEFTKFPDMGEHLKEITHGGADVVIDCVGMDGKKSPLEFLEQKLKLQGGTLGPIQIATKAVRKYGTVQMTGVYGGNYNAFPLGAFWVRNINLKMGQAPVIHFMPELFEKITNKEFDPKEIITHKIPLEEASYGYQIFNNREDDCIKVILKP

SEQ ID NO: 2618 - protein, 189 aa, Magnaporthe grisea 70-15
MTTSAPRKTVNFITGNQNKLAEVQAILEPTIEVQSQKLDLIEVQGTLEEVTLDKVRRAAEQVEGPVLVEDTCLCFNALKGLPGPYIKWFMESIGHDGLNNLLAAYEDKSAQAVCTFGYSAGPGSEPILFQGITEGKIVPPRGPPFFGWDAIFEYEGQTYAEMDKAEKNKISHRGKALEKLQAWFAQREN

SEQ ID NO: 2619 - protein, 347 aa, Clostridium perfringens str. 13
MKNILDFTLEELKEWMKENGESAFRAKQIFDWIYKKEVFNFEEMKNISKALIGKLSENFYIGIPEVIDYLSSSEDGTRKILLGLGDGNIIECVIMRYKYGNSICVSTQIGCRMGCKFCASTLEGMVRNLTAGEILSEVLIGQKLLGERISNIVLMGSGEPLDNYDNVMKFLELVNADYGLNIGQRHITLSTCGLVPKIREMADKEMQVTLAISLHAVSDEKRKTIMPIANKYSISEILDACNYYIEKTGRRITFEYSLVSGVNDTKEDAKSLGRLLKGMLCHVNLIPVNEIKENEFKKSTKKDIETFLNTLKTYGVEATVRREMGSDINAACGQLRRSYIKSKGLKL

SEQ ID NO: 2620 - protein, 1230 aa, Candida albicans
MSILSENNPTPTSITDPNESSHLHNPELNSGTRVASGPGPGPEVESTPLAPPTEVMNTTSANTSSLSLGSPMHEKIKQFDQDEVDTGETNDRTIESGSSDIDDSQQSHNNNNNNNNNNNESNPESSEGDDEKTQGMPPRMPGTFNVKGLHQGDDSDNEKQYTELTKSINKRTSKDSYSPGTLESPGTLNALETNNVSPAVIEEEQHTSSLEDLSLSLQHQNENARLSAPRSAPPQVPTSKTSSFHDMSSVISSSTSVHKIPSNPTSTRGSHLSSYKSTLDPGKPAQAAAPPPPEIDIDNLLTKSELDSETDTLSSATNSPNLLRNDTLQGIPTRDDENIDDSPRQLSQNTSATSRNTSGTSTSTVVKNSRSGTSKSTSTSTAHNQTAAITPIIPSHNKFHQQVINTNATNSSSSLEPLGVGINSNSSPKSGKKRKSGSKVRGVFSSMFGKNKSTSSSSSSNSGSNSHSQEVNIKISTPFNAKHLAHVGIDDNGSYTGLPIEWERLLSASGITKKEQQQHPQAVMDIVAFYQDTSENPDDAAFKKFHFDNNKSSSSGWSNENTPPATPGGSNSGSGSGGGGAPSSPHRTPPSSIIEKNNVEQKVITPSQSMPTKTESKQSENQHPHEDNATQYTPRTPTSHVQEGQFIPSRPAPKPPSTPLSSMSVSHKTPSSQSLPRSDSQSDIRSSTPKSHQDVSPSKIKIRSISSKSLKSMRSRKSGDKFTHIAPAPPPPSLPSIPKSKSHSASLSSQLRPATNGSTTAPIPASAAFGGENNALPKQRINEFKAHRAPPPPPSAPPAPPVPPAPPANLLSEQTSEIPQQRTAPSQALADVTAPTNIYEIQQTKYQEAQQKLREKKARELEEIQRLREKNERQNRQQETGQNNADTASGGSNIAPPVPVPNKKPPSGSGGGRDAKQAALIAQKKREEKKRKNLQIIAKLKTICNPGDPNELYVDLVKIGQGASGGVFLAHDVRDKSNIVAIKQMNLEQQPKKELIINEILVMKGSSHPNIVNFIDSYLLKGDLWVIMEYMEGGSLTDIVTHSVMTEGQIGVVCRETLKGLKFLHSKGVIHRDIKSDNILLNMDGNIKITDFGFCAQINEINSKRITMVGTPYWMAPEIVSRKEYGPKVDVWSLGIMIIEMLEGEPPYLNETPLRALYLIATNGTPKLKDPESLSYDIRKFLAWCLQVDFNKRADADELLHDNFITECDDVSSLSPLVKIARLKKMSESD

SEQ ID NO: 2621 - protein, 516 aa, Neurospora crassa
MSSNDAPVYTLAEGRPVQDPSAATVLMGSKPRGGALSLLADTQLIETLAHFPRERIPERVVHAKAAGAWGEFECTEDVSDFTSVDFLNKVGKKTKVLARISTVAGEKGSADTVRDIRGFAVKFFTEEGNWDFVGNDLPVFFIRDPVKFPSLNRSHKRHPQTNVPDSTMFWDFHNNNQEGVHCLMQLFGGRGIPASLRNVNAFGNHTYKFGKPEDGTFKYVKIHLKPDAGIKNLESDEALRLAGEEPDFHIKDMYNAIERGDYPTWTMYFQIMDPKDAETYRYNIFDITQTWSHRDYPLRPIGKLRLNKNPENHFQDIEQAAFSPSTMVPGIGPSADPMLQARMFSYPDAARYRVGPNYQQLPCNRALHVYSPYQRDGPMRVDGNYGGDPDYVRSSFRPMRFGPPDVAHDEWAGKVALFTSEVTDLDFEQPRDLWKIFKETGEDKRFAKNVAAHVGKALPEVQKKTIEMFSKVDQEVGEAIQRELDELEKKGGAGIEHDKAPVKGKGMRCKDSKDDE

SEQ ID NO: 2622 - protein, 479 aa, Pseudoalteromonas haloplanktis
MSTNSCCSSDNSQPEQLHVAIIGSGSGAFASAIKAAEGGARVTIIEGADVIGGCCVNVGCVPSKILIRAAQLAHQQRTNPFDGLENIQPQLSRSLLAHQQTARVEELRGAKYQSILENNPALSLLKGYARFKNENTLLVQMADGSEEELVADRILIATGSTPSIPPIDGLVDTPYWTSTEALFSDVLPSSLVVIGSSVIALEIAQAYARLGSSVTVLARHTLLYAEDPLLGEKLTECFEKEGIRVLNNTQANHVSYSNNGFPLETNEGTLTAEKLLISTGRHANTDKLGLENVGVETDKSGAIVVNSMMETSTANIYAAGDCSNMPQFVYVAAAAGSRAGINMTGGNAQLDLSTMPAVIFTDPQVATVGLTEEQAITGGFEVISRVLDMENVPRALANFETDGFIKLVADKSTGKILGAQILAHEGGELIQSAALAIHNKMTVEELAGQLFPYLTMVEGLKLCAQTFSKDVKELSCCAG

SEQ ID NO: 2623 - protein, 492 aa, Oryza sativa
MDPCKFRPSSSFDTKTTTTNAGAPVWNDNEALTVGPRGPILLEDYHLIEKVAHFARERIPERVVHARGASAKGFFECTHDVTDITCADFLRSPGAQTPVIVRFSTVIHERGSPETIRDPRGFAVKFYTREGNWDLLGNNFPVFFIRDGIKFPDVIHAFKPNPRSHVQEYWRVFDFLSHHPESLHTFFFLFDDVGIPTDYRHMDGFGVNTYTFVTRDAKARYVKFHWKPTCGVSCLMDDEATLVGGKNHSHATQDLYDSIAAGNFPEWKLFVQVIDPEEEERFDFDPLDDTKTWPEDEVPLRPVGRLVLNRNVDNFFNENEQLAFGPGLVVPGIYYSDDKMLQCRVFAYADTQRYRLGPNYLMLPVNAPKCAHHNNHYDGAMNFMHRDEEVDYYPSRHAPLRHAPPTPITPRPVVGRRQKATIHKQNDFKQPGERYRSWAPDRQERFIRRFAGELAHPKVSPELRAIWVNYLSQCDESLGVKIANRLNVKPSM

SEQ ID NO: 2624 - protein, 205 aa, Triticum aestivum
  unsure (1)..(205): unsure at all Xaa locations
MAPTVMASSATSVAPFQGLKSTAGLPVSRRSNGASLGSVSNGGRIRCMQVWPIEGIKKFETLSYXPPLSTEALLKQVXDYLDSAPKWVPCLRVQQGGFIFPLSTTHPLGYYDGRYWXTMXETAYFRCTDPPSVQRSGGVKKEYLDPYSASSVRQLRKSMRQIALSHGLQESARLNTHHTGNIKCNAVAPTFCGGSFTSLPKLSRK

SEQ ID NO: 2625 - protein, 259 aa, Agrobacterium tumefaciens str. C58
MMTDARTTAEGGMETSYGFHKVDEGKKQGLVNEVFHKVAKRYDIMNDVMSAGLHRLWKDAMVSALSPRKDPSYKILDVAGGTGDVAFRIIEASNRLAHATVLDINGSMLAVGEERAAKKKLSDNLTFVEANAEELPFEANTFDAYTVAFGIRNVPRIDVALKEAYRVLKRGGRLLVLEFSEVDMPLLDRVYDAWSFNAIPQFGKMITGDAEPYQYLVESIRKFPNQEDFATMIRTAGFSRVTYTNYTGGIAALHSGWKL

SEQ ID NO: 2626 - protein, 328 aa, Burkholderia fungorum LB400
MRAMVFDGSSALLREQEVPDPKPGPGQLLIQIHACGVCRTDLHLVDHELEHPKQPVIPGHEIVGTVAGLGAGVTGFAVGDRVGVPWLGHTCGHCRYCLSARENLCDEPGFTGYTIDGGYAERTVADSQYCFHLPAQYPDIEAAPLLCAGLIGYRTLKMAGDAQRIGIYGFGAAAHIVAQVALHQKRTVYAFTRPGDHAAQQLALRLGAAWAGGSDEAPPAELDAALIFAPVGALVPQALRAVAKGGTVVCGGIHMSDIPSFPYAFLWGERRVVSIANLTREDGLAFMRIATERRLEIDTTTYALTDANRALSDLRDGRLTGAAVLVVR

SEQ ID NO: 2627 - protein, 301 aa, Zea mays
  unsure (1)..(301): unsure at all Xaa locations
MAVDLMGCYAPRRANDQLAIQEAAAAGLRNLELLVTSLSTQAAAPHRAADQPFGEIAGQAVSKFRKVISILDRTGHARFRRGPVEPPPPTPTPPTPPVVPGPAPLAPVSVAQPPQSLTLDFTKPNLAVSAATSVTSTSFFSSVTAGDGSVSKGRSLMSSGKPPLSGHKRKPCAGAHSEATTNGSRCHCSKRRKNRVKRSIRVPAISSKVADIPPDEYSWRKYGQKPIKGXSPYPRGYYKCSTVRGCPARKHVERATDDPAMLVVTYEGEHRHTPGAVQGPSPLATASPVPVAVSAGNGLVV

SEQ ID NO: 2628 - protein, 234 aa, Agrobacterium tumefaciens str. C58
MQRTGCPSETGNRLSRQENVMRKLDTRTIVVASHNKGKIAEIADLIGPFGFSAKSAAELNFSEPEETGTTFEENAAIKALASAKASGLPALSDDSGLVIDALDGAPGVYTANWAETADGTRDFAMAMQKVEDALAERGASKPEDRTARFVSVLCLAWPDGHVEYFRGEVEGTVVWPPRGTSGFGYDPIFKPDGYDTTFGEMSADEKHGWKHGDAFALSHRARAFKKFVETCLEA

SEQ ID NO: 2629 - protein, 731 aa, Desulfovibrio desulfuricans G20
MSDIRQPRLTRRGFFKAAGLAAAAGAGAPVLGSLTPAVRSAKAADPGFTSHYSACDMCFNKCGVIARVQDGVVTKLDPNPKFLKSRGMLCARGNAGIAQLYDSDRLKYPLLRAGKRGEGRWKRIPWDEALDMAAERMQEVRSKYTPCGMLFTAGADLQSQFVSRFAEVFGSYNITSHESLCLLSNNRAYLDTFGETPYADVLNSRYIIMAGANRFEALVTPDSMDMMTALRSGCKLVVLDPRHTKTAALASEWHPIRPGTDMAFMLAVAHVIIAEKLYDEEWIREKTYGLEQLAGHVRPYTPQWAEQECGIPAQDIARMARELAAAAPAAMVYPGRRTSDYSNSTQIRRSFAIVNALLGNWDKPGGLLAARAVGLKGVPYDAPWYDENPFERVDAGIVPGLFEHDGSFVLTREAVLSAEPYPLKGWFVYKTNPMVNAPDRARTIEMCNAMDFMVVVDIAMSDTACMADLVLPAPGYLERQDPASGLQGSSACACVVQRDPVVPALYESRPVFEIVKELAGRLDLAEYFDFTIEEYRAKQLADLPDAPQALERDGVYYNPSKVYGIYEDRIYKTFSHKIELYNQRYESMGLDPMPVYTPPAAAPQGRFRLIIGRNACVTHGSTNNNALIHELVPENTLWIHPQSATPLGIRDGDMVEVSSPAGKGTIKAEVTERIRPDCVYMLTGFGTISDGLSRIKGVGASIAALLEGHYDSVSGNAAMHETFVSVSGRAS

SEQ ID NO: 2630 - protein, 461 aa, Bacillus subtilis subsp. subtilis str. 168
MKKDTRKYMIYFFGALGGLLYGYDTGVISGALLFINNDIPLTTLTEGLVVSMLLLGAIFGSALSGTCSDRWGRRKVVFVLSIIFIIGALACAFSQTIGMLIASRVILGLAVGGSTALVPVYLSEMAPTKIRGTLGTMNNLMIVTGILLAYIVNYLFTPFEAWRWMVGLAAVPAVLLLIGIAFMPESPRWLVKRGSEEEARRIMNITHDPKDIEMELAEMKQGEAEKKETTLGVLKAKWIRPMLLIGVGLAIFQQAVGINTVIYYAPTIFTKAGLGTSASALGTMGIGILNVIMCITAMILIDRVGRKKLLIWGSVGITLSLAALSGVLLTLGLSASTAWMTVVFLGVYIVFYQATWGPVVWVLMPELFPSKARGAATGFTTLVLSAANLIVSLVFPLMLSAMGIAWVFMVFSVICLLSFFFAFYMVPETKGKSLEEIEASLKKRFKKKKSTQNQVLNERTL

SEQ ID NO: 2631 - protein, 253 aa, Zea mays
MDVKCRRLEGKVAIVTASTMGIGLAIAERLGLEGAAVVISSRKQKNVNEAVEGLRAKGITAVGAVCHVSDAQQRKSLIETAVKSFGHIDILVSNAAANPSVDSILEMKESVLDKLWDINVKASILLIQDAAPHLRKGSSVIIISSIAGYNPEQGLTMYGVTKTALFGLTKALAGEMGPDTRVNCIAPGFVPTRFASFLTENETIRKELNERTKLKRLGTVEDMAAAAAFLASDDASYITAETIVVAGGVQSRL

SEQ ID NO: 2632 - protein, 248 aa, Mycobacterium avium subsp. paratuberculosis str. k10
MTGGSAQPPRVALVTGAAGGQGRAIAERLRGNGYAVAACDRRIDELAATVAASGDDRLIAVELDVTSEQQWRSAVERVVDRFGALSALVNCAGVLHRTPLPQETADAFENAWRVNCFGAFLGMRAALERLRGTPGASIVNICSTGAIHPFPQHCAYGSSKWALRGLTQTAAAELAPAGIRVNAVFPGPIATPMLDQATQTRLAAAASFGRIGQPREVADAVAFLVSAEASFITGAELIVDGGQCLQIR

SEQ ID NO: 2633 - protein, 273 aa, Nostoc sp. 36
MTIATSTKPQINWVNTLFFIGLHIGALFAFVPGNFSWTAVGVGFLLYWVTGGLGVTLGFHRLVTHRSFQTPKWLEYLLVFFGTLSCQGGPIEWIGTHRIHHLHSDTDADPHDSTKGFWWSHMDWLIHYCPAHADVPRFTKDIAEDPVYQFLEKYFILIQVALGVLLLLLGGWPFVIWGIFVRIVWVYHCTWLVNSATHKFGYRSYDSGDQSTNCWWVAVLVFGEGWHNNHHAFQYSARHGLEWWEIDLTWMTVQLLQAVGLATNVKLAPTKSS

SEQ ID NO: 2634 - protein, 633 aa, Phycomyces blakesleeanus
MEPYGGVWMNPDMEFVDQSNMPDYEKVIEASGNGRYSKLNTVLGKGAYKVVYKAIDREEAINDNEITNVKVTRQEFKDLGHEIDILKSVRHPNIITFHDAWYNETEFVFITELMTSGTLREYIRKLTPLPNIKIVKRWCRQILKGLAYLHGHEPPIIHRDIKCDNIFINGAHGEIKIGDMGTAEMKNGKKYTVIGTPEFMAPEMYEEQGYNEKVDIYAFGMCLLEMATGEYPYGECTNAVQVFKKVTQTIKPECLSRVQDPELLTLVNICLTPEDERMTAQEILEHRFLAVEPEVVLVSKDMTMKLLTLQVVFKGMDKLSVKFEFNADTDTAADVVAEMIEEQVLQNCYQQLITCEINRILRDIARNQGPPDKGEDEKIVWRRENDIRSELERAKKDLALAVERVFEAEKKCELLEQHNIIAEERCKETIFALEQAKFQIPDLLQPQPQPQPQPQPQPQPQPQFQLQPQLQYLSPQSTTSPGPTSDDNSTNSTMLSSLESELSKLCVSGDEQVETTTHSALMENVLAGKAKYYEYSNDTSIDKFVMDTAGATNRSKDKQKQWAAKLQDQDIMTVGDLRDLHDEDWSGIGLTVFALRALKNMLAGKKAAVTQRGLQGTRSGASTPVEEQEQELM

SEQ ID NO: 2635 - protein, 540 aa, Prochlorococcus marinus subsp. pastoris str. CCMP1986
MSKFSSKNINKTKVPESPVVLAILDGWGHREENLDNAIKNANTPIMDSLWHAYPHTLINASGADVGLPNGQMGNSEVGHLTIGSGRIIQQELVRITNVVKNNQLTQVNELKEMANSIKKKKGTLHITGLCSDGGVHSHIDHLLGLIKWASEEHIEKVAIHIITDGRDTPAKSAYKYIRQIEDCIKKFKVGEIASICGRYWIMDRNLIWERTEKAFVNLTDPNGKKIDISPADYLNKSYNANITDEFLEPIRISKDFLKDEDSLICFNFRPDRARQIIKALSEKEFDNFKRKSIPDVDILTFTQYEANLPVKIAFPPESLNNFIGQIVSENGLKQYRTAETEKYPHVTYFFNGGVEVPSPGEQRHLIPSPRVATYDMAPEMSAEELTISCSNAIKTGQYSFVVINFANPDMVGHTGNMAAAIKAIETVDRCIGKIVNATGEMGGSILITADHGNAELMKGPDGEPWTAHTINKVPLIFIEGEKRKIPNMGNEIYLRENAGLADIAPTLLQLLNLPIPKEMTGKSLIKEIELKGFNKVVQHV

SEQ ID NO: 2636 - protein, 117 aa, Glycine max
  unsure (1)..(117): unsure at all Xaa locations
MASSMIFSPADTTVNRAGAGMAGPFTGLKYMAGFPTXRKTNNDLTWIARHGGKRPCMHVWPTIGKKKFETLSYLPDLDDXPLAKEGQYPLKKGWDPLLGITLEHRFAYPEHKKAPGY

SEQ ID NO: 2637 - protein, 568 aa, Xylella fastidiosa Dixon
MSSSSIEDIKGKSHRLRGSLLESLANPTTGALRESDQTLIKYHGSYQQDDRDLREERRRQKLEPAYQFMIRTRTPGGVITPQQWLQLDAIATRYANHSLRVTTRQAFQFHGVIKRELKTTMQAINAALIDTLAACGDVNRNVQVAANPLISRAHADLYTDAAHLSEHLLPNTRAYYEIWLDEKKVAGAGEEEEPIYGPHYLPRKFKIGFAAPPINDVDVFANDLGFIAVIVDKTLLGYNVTIGGGMGTTHGDPDTWPRIGNIIGFITRADLITISTAIVTTQRDFGNRTLRKRARFKYTIDDRGLDCIVGEIQQRAGITLQPARPFVFEHNGDRYGWIEGEDGHWHLTLLLPAGRIADTEGSTLLSGFREIAQLGIGEFRMTPNQNVVIAGISPGQRAAIDALVTQYGLDTGNRAPTALARHAMACVALPTCGLAMAEAERYLPDFNAKLQPILEKYGLAETPILLRISGCPNGCSRPYLAEIALVGKAPGRYNLMLGGDQRGQRLNTLYRENITETEILAALEPLLGRYQQKRLPSEGFGDFLHRTGIIALPPYPTHRHVISSTLQA

SEQ ID NO: 2638 - protein, 836 aa, Geobacter sulfurreducens PCA
MKAVIMAGGFGTRIQPLTSSIPKPMIPLLNRPIMLHIVELLKKYEITDLVMLLYHQPAVIKNFFRDGTDFGVKITYVTPLQDMGTAGAVKCAEKYLDERFIVISGDLLTDFNLQKIIDFHEEKEALATITLTSVKDPLQFGVVITDKEKRISQFLEKPGWGEVISDTINTGIYVLEPEIFSHIPAEENYDFSQDLFPKLLEKQQSLFGYTAKGYWRDIGNTDSYREAHHDIFKGKVNVRIDEPKQDLVGKDLRLGSDVNLDEHVTLEGTVVIGDNSQVFESAHIKDTVIGRNCTIEAGVRLSRCVIWDNVYVKRGAKLNDSVLCGNVRVGNGVVMEEGVIVADDTSIGEESYIKRDVKIWPRKVIEAGATVTGNLIWGEKWKKALFEGALIKGLTNMELTPEFVAKLGCAYGTTLPKGSFVISGRDAYRSSRMLKRSFIGGLLSSGVNVRDLTMVPMPVLRYKLRSFGEVGGIQFRQALDDPASTEIIFLDGDGLDFSSSMGKNVERIFFKENFRRAHHTEPGGLTEIPQQVMDFYREGFLHAIGKTPLQKKAFKVVIDFNHSPASQLLPGILTQMGCEVISLNAYVDEERGVQALSDRGQSLSQLSKIVATLEANAGFWLDPTVEGVIMVDETGTVHEGADILLLMVGLALKAGEKGVFAIPVSAPSAIERMAQERGCAVTRTKSADRSMIEAALSSEVILAGSMDGRFAFPRFQAAFDGMFAIAKSIEMAARSGASISATAAEIPRRAFLHTRVPCVWDMKGGIMRKMSEDSLDKEASFIDGIKVHFGEDWALVLPDQYQPHVHIVAEARDPKAAQKLLTEYQKKVEQWKKELS

SEQ ID NO: 2639 - protein, 346 aa, Lycopersicon esculentum
  unsure (1)..(346): unsure at all Xaa locations
MRTSMLKSIVRRSSTAGASYVSRRGFASGSAPERKVAVLGAAGGIGQPLSLLMKLNPLVSSLSLYDIAGTPGVAADVSHINTRSEVAGFAGEEQLGQALEGADVVIIPAGVPRKPGMTRDDLFNINAGIVKSLCTAIAKYCPNALVNMISNPVNSTVPIAAEVFKKAGTYDEKKLFGVTMLDVVRAKTFYAGKAKVNVAEVNLPVVGGHAGITILPLFSQATPKANLSYEEIVALTKRTQDGGTEVVEAKAGKGSXTLSIAYAGAIFADACLKGLNGVPDVVECAFVQSNVTELPFFASKVRLGKNGVEEVLGLGPLNDYEKQGLEALKPELLSSIEKGIKFAKEN

SEQ ID NO: 2640 - protein, 285 aa, Nostoc sp. 36
MTANFGAIAPERGNSPQLRWINVVFFGVFHALALLSPWFFSWSALGLLVFLHWLFGSIGICLGYHRLLSHKSFQVPKWLEYAIALIGALALQGGPIFWVGGHRQHHAHTEDIDLDPYSAQKGFWWSHILWIFYPRPEFFDYDTYKKYAPDLARQPFYCWLDRYFLLLQIPFALLLYVLGGWPFVFYGVFLRCVLLWHSTWFVNSASHLWGYRTFDADDGARNLWWVSIVTYGEGWHNNHHTYPHMAKSGLFWWEIDVTWWSIQLLQTLGLAKKVVSSPPQGATHG

SEQ ID NO: 2641 - protein, 959 aa, Sinorhizobium meliloti
MSLIHEIDYGTPASKSEKLVTLTIDGREITVPEGTSIMRAAMEAGIEVPKLCASDMMDAFGSCRLCLVEIDGRAGMPASCTTPVAAGISVSTQTQRLKDVRRGVMELYISDHPLDCLTCAANGDCELQDLAGAVGLRDVRYGYDGENHVTARNNGEINAKWAPKDESNPYFTYDSAKCIVCSRCVRACEEVQGTFALTISGRGFDSRVSAGMNEDFVSSECVSCGACVQACPTATLTEKSVIEIGQPEHSVVTTCAYCGVGCSFKAEMRGEELVRMVPWKDGQANRGHSCVKGRFAYGYSNHRDRILNPMVREKVTDPWREVTWEEAFAHVASEFRRIQYQYGRDSVGGITSSRCTNEETFLVQKLVRAGFGNNNVDTCARVCHSPTGYGLNQTFGTSAGTQDFDSVEHTDVAVIIGANPTDGHPVFASRLKKRLRQGAKLIVIDPRRIDLVRSAHVEASYHLPLKPGTNVAILTAIAHVIVTEGLANEAFIRERCDWSEFEDWAAFVAEPHHSPEATEAYTGVPPELVRGAARLYATGGNGAIYYGLGVTEHSQGSTTVMAIANLAMLTGNIGRPGVGVNPLRGQNNVQGSCDMGSFPHELPGYRHISDDATREIFEKLWGVTLNHEPGLRIPNMLDAAVEGTFKGLYVQGEDILQSDPDTKHVAAGLAAMECVVVHDLFLNETANYAHVFLPGSTFLEKDGTFTNAERRINRVRRVMRPKNGYADWEVTQKMAQAMGLAWNYRHPSDIMDEIAATTPSFAMVSYDYLDKMGSVQWPCNEKAPLGSPIMHVDGFVRGKGKFIRTEYVATDERTGPRFPLLLTTGRILSQYNVGAQTRRTENVVWHAEDRLEIHPHDAEQRGIRDGDWVRLASRSGDTTLRALITDRVAPGVVYTTFHHPSTQANVITTDFTDWATNCPEYKVTAVQVSPSNGPSDWQRDYDEQARQSRRIAGKLEAAE

SEQ ID NO: 2642 - protein, 1121 aa, Ceratodon purpureus
MSAPKKTYSSTTSAKSKHSVRVAQTTADAALEAVYEMSGDSGDSFDYSKSVGQSAESVPAGAVTAYLQRMQRGGLIQTFGCMVAVEEPNFCVIAYSENASEFLDLMPQAVPSMGEMDVLGIGTDIRTLFTPSSGAALEKAAATQDISLLNPITVHCRRSGKPLYAIAHRIDIGIVIDFEAVKMNDVSVSAAGALQSHKLAAKAITRLQALPGGDIGLLCDTVVEEVRELTGYDRVMAYKFHEDEHGEVVAEIRRMDLEPYLGLHYPATDIPQASRFLFMKNRVRVIADCCASPVKLIQDPDIKQPVSLAGSTLRAPHGCHAQYMGNMGSIASLVMAVIINDNEEDSRGAIQRGRKLWGLVVCHHTSPRTVPFPLRSACEFLMQVFGMQLNMEVELAAQLREKHILRTQTLLCDMLLRDAPIGIVSQTPNIMDLVKCDGAALYYGKRFWLLGTTPTENQIKDIAEWLLEYHKDSTGLSTDSLADRNYPGAHLLGDAVCGMAAAKITAKDFLFWFRSHTAKEVKWGGAKHDPAEKDDGRKMHPRSSFKAFLEVVKRRSLPWEDVEMDAIHSLQLILRGSFQDIDDSDTKTMIHARLNDLKLHGMDELSVVANEMVRLIETATAPILAVDSTGMINGWNAKIAHVTGLPVSEAMGRSLVKDLVLDESVVVVERLLYLASQGEEEQNVEIKLKTFGTQTEKEAVILIVNACSSRDVSDSVVGVCFVGQDVTGQKMFMDKFTRIQGDYKTIVKNPHPLIPPIFGGDEYGYCFEWNPAMEALTGWKHDELVGKLLVGEIFGMEMMCCRLKSQDSMTKFMISLNNAMDGTNTDKFSFSFCNREGKFVEALLSTNKRTNADGVITGVFCFLQIASSELQQALTVQRATEKVAIAKLKELAYIRQEIKNPLCGITFTRQLLEDTDLSDDQKQFLDTSAVCEQQLQKVLNDMDLESIEDGYLELDTAEFEMGTVMDAVISQGMTTSREKGLQIIRETPREISTMRLFGDQIRLQQVLSDFLINAIRFTPSSEGWVKIKVVPTRKRLGGNVHVMHLEFRVSHPGGGLPDELVLEMYDRGKGMTQEGLGLNMCRKLVRLMNGDVQYVRENAQCYFVVYVELPMAQRDDAASQM

SEQ ID NO: 2643 - protein, 166 aa, Bordetella pertussis Tohama I
MNTMYDFSAPTITGAERALADFRGQVALVVNVASRCGFTPQYSGLEELYRSYRNEGFVVLGFPCNQFGRQEPGDEAAIAQFCETQYAISFPLFAKIDVNGAHAHPLYRWLKARKPGLLGTRAIKWNFTKFLVGRDGLPLRRYAPAHTPESLRHDIARACAAPGPTP

SEQ ID NO: 2644 - protein, 473 aa, Arabidopsis thaliana
MSSSVPNSDRKIVTGPAGYILEDVPHFSDDFPDHPTYPNPLQDNAAYSVVKQYFVDEDDTVPQKIVVHPDSPRGTHFRRAGPRQRVYFESDDVLACIVTCGGLCPGLNTVIREIVCGLSYMYGVKRILGIDGGYRGFYARNTIHLDLKTVNDIHRSGGTILGTSRGGHNTTKIVDSIQDRGINQVYIIGGDGSQKGAAAIFEEIRKRKLKVAVAGIPKTIDNDIPIIDRSFGFDTAVEEAQRAINAAHVEATSFENGIGLVKLMGRYSGFIAMHATLASRDVDCCLIPESPFFLEGSGGLFEFIDKRLKESGHMVIVIAEGAGQDLLSESMKESTTLKDASGNKLLQDIGLWISQRIKDHFAKKMTLTLKYIDPTYMIRAVPSNASDNVCCTLLAQSAVHGVVAGYNGFTVGLVNGRHTYIPFNRITEKQNKVVITDRMWARLLSSTNQPSFMKQADKIHSNQLVGEPGTMKW

SEQ ID NO: 2645 - protein, 224 aa, Zea mays
  unsure (1)..(224): unsure at all Xaa locations
MQSPRELVSLDFLSSGSTLHYNPTRKKKPAAEKRSRRDRELQSTPPPQPPTMDPKMTEVTQMFARFKAAYARNDLNTCVTLLSQLKVHLTQFPSLPPLFQQTPNIVEELKLARDIYEHAVVLSVKLEDQDAFERDFCQLKPYYMDTXWSLGIIPASPEEYPILGLNLLRLLVQNRIAEFHTELELLPVKALEHPCIKHAVELEQSFMGGCXYTRVLSARQAVPH

SEQ ID NO: 2646 - protein, 156 aa, Oryza sativa
  unsure (1)..(156): unsure at all Xaa locations
MGRPPCCVKAEVKKGPWTPEEDXMLVAYVQEHGPGNWRAVPTNTGLMRCSKSCRLRWTNYLRPGIKRGNFTDQEEKLIVHLQALLGNRWAAIASYLPERTDNDIKNYWNTHLKKKLKKMRTPDGSTVTSKTKDEETAGAPSSNVSNHQLISLLPQI

SEQ ID NO: 2647 - protein, 196 aa, Oryza sativa
RGYYLTSSIRIDALSKLRAQVNETLAASDGGKLSLNDFIIKASALALRKVPACNSSWHGDFVRQYNVVDCSVAVQTPIGLMVPVVRDADTKGLAQIAAEVKQLAAKAKDGKLQPDEFTGGTFTVSNLGMYGVTQFAAIVNPPQACILAVGGAEKRVVSGPSGFEEGTFMQVTLSCDHRVVDGAVGAQWVQAFKSYL

SEQ ID NO: 2648 - protein, 492 aa, Glycine max
MDPYKLRPSSAFNSPFWTTNSGAPVWNNNSSLTVGARGPILLEDYHLVEKLANFDRERIPERVVHARGASAKGFFEVTHDISHLTCADFLRAPGVQTPVIVRFSTVIHERGSPETLRDPRGFAVKFYTREGNFDLVGNNLPVFFVRDGMKFPDMVHALKPNPKNHIQENWRILDFFSHFPESLHMFTFLFDDLGVPQDYRHMDGFGVNTYTLINKAGKAVYVKFHWKTTSGIKCLLEEEAIKVGGANHSHATQDLHDSIAAGNYPEWKLFVQTIDPEHEDKFDFDPLDVTKTWPEDIIPLQPVGRLVLNKNIDNFFAENEQLAFCPAIVVPGVYYSDDKMLQTRIFSYADSQRHRLGPNYLQLPANAPKCAHHNNHHEGFMNFIHRDEEVNYFPSRYDPVRHAETFPIPPAICSGRREKCGIEKENNFKQPGERYRSWAPDRQDRFNRRWVDALSDPRVTHEIRSVWISYWSQADRSLGQKIASRLSMRPNI

SEQ ID NO: 2649 - protein, 360 aa, Rhodospirillum rubrum
MLYQEHPPLSIPTLGFAAQSATTPLAPFSFERRDPRPDDVTIDILYCGVCHSDIHQARNEWHNSLFPMVPGHEIIGTVSAVGAKVSGFKVGDRVGVGCMVDSCRECAPCKADLEQYCEDGATLTYNGRDRHDHSLTFGGYSERIVVSEAFVLRLPDALDAKSAAPLLCAGITTYSPLRHWQVGPGSRVAVIGLGGLGHMGLKLAKAMGAEVSLFTRSPGKEDEAKRLGADHVVLSTDEARMKAVAGHFNLIIDTVPHPHDLNPYVSTLALDGTLVLVGLLGPIEPVIDSVPLVIGRRAVAGSAIGGIAETQEMLDFCAAKGVTADVEMLDINNINAAYDRMLKSDVRYRFVIDMATLRGA

SEQ ID NO: 2650 - protein, 317 aa, Streptomyces coelicolor
HMLVLVAPGQGAQTPGFLTDWLALPGAADRVAAWSDAIGLDLAHFGTKADADEIRDTSVAQPLLVAAGILSAAALGTQTSVADATGPGFTPGAVAGHSVGEITAAVFAGVLDDTAALSLVRRRGLAMAEAAAVTETGMSALLGGDPEVSVAHLERLGLTPANVNGAGQIVAAGTMEQLAALNEDKPEGVRKVVPLKVAGAFHTRHMAPAVDKLAEAAKALTPADPKVTYVSNKDGRAVASGTEVLDRLVGQVANPVRWDLCMETFKELGVTAIIEVCPGGTLTGLAKRALPGVKTLALKTPDDLDAARELVAEHTQA

SEQ ID NO: 2651 - protein, 610 aa, Pseudomonas aeruginosa PAO1
MCGLAGWVDYTRKLDDEFPAIFAMTDTLALRGPDAEGIWKHRNALLGHRRLAVIDLSGGVQPMSYRFPTGQEVTLVYTGEVYNHDALRERLRRAGHEFRTRSDTEVVLHAYLQWGERCCEYLTGMFAFAVFDGRDGHLLLVRDRLGIKPLYYARHREGLLFGSEIKSILAHPEFAARLDAVGLVDLLTLSRGTSQTPFREVQELLPGHLLSWRPNSQAKLRRYWEVRRQEHADDLQSTVQRTRELVTRALGAQLHADVPVCSLLSGGLDSTALTGIAQRIAKAEHGGDINSFSVDFVGQAEQFRSDDLRPDQDQPFALLAAQYIGSRHRTVLIDNAELVCERAREEVFRAKDVPFTFGDMDTSLHLMFGEIRRHSTVAISGEGADELFGGYGWFRDPQAVAAARFPWASRVRLPAGFIDAGFNRRCDLLQYQQASYDDGLRQVEHLAGDSPEERRMREFSHLHLKRWMVLLLERKDRLSMCNGLEVRVPYTDHELVEYVYNVPWSIKSRDGEEKWLLKRACADYVPEAVLKRRKSPYPTSANLGYERFLRGSVRRLLEDAVNPVFGIVSREFLAAELEHPEGYFNTQVSRHNLETALALEGWLRLYGLSA

SEQ ID NO: 2652 - protein, 341 aa, Oryza sativa (japonica cultivar-group)
MVRPPCCDKDGVKKGPWTPEEDLVLVSYVQEHGPGNWRAVPTRTGLMRCSKSCRLRWTNYLRPGIKRGNFTDQEEKLIVHLQALLGNRWAAIASYLPERTDNDIKNYWNTHLKRKLQGGGAGGDGDGGAAGDAVSPKPAAQRPASSSKGQWERRLQTDIDMARRALREALTSLDDVKPPHQPDAANAAAGGGGATTGAAASAGADSPAASSTSGASQCSPSSAGYVLTTENISRMLDGWARKKGGGGGRRAAGSGPATPGATESASGSSEASEVSYGGTALSAAAAPASAFEYETKPTVTAAAAADAGDETQLSAIESWLFADADGIESGSLLDAAMDYTF

SEQ ID NO: 2653 - protein, 84 aa, Phytophthora citricola
YISTIGVDFKIRTIELDGKTIKLQIWDTAGQERFRTITSSYYRGAHGIIVVYDVTDQESFNNVKQWLHEIDRYACENVNKLLVG

SEQ ID NO: 2654 - protein, 485 aa, Zea mays
  unsure (1)..(485): unsure at all Xaa locations
MTSAVLAGRNEVHQAHQHHRQWAGARVPLMPKPSSNPNPRRHRAGPNPIPSGSPPEPRAAPAVAAEPSPSPSGHLNFRPSEMTPAEARHLRARLTSELCRVRAFLSRIDSWQDAAAAGAGAPSPPRAXPSPPPALVEAMRKRCADILMRLRRSKKSVWFNSPVDVEGLKLHDYRAIIRSPMDLGTVKQNLTAGRYPSHEAFAGDVRLTFNNALRYNPPDHHVHRYAGNLLASFEGMYKEAVSWFEQQRQQLEPPMQPDLPPPPQLPVVSVPVQAPPRMGGGGRRPKPKAREPNKREMDEEEKQKLRVEIENLPEEKMLNVLQIVQKRNSDPAFTGEVVELDFDELDMETLWELDRFVVNWRKALKKSQRNSMVNGDAAAAVNGDAIDVTVVPDDDDMVEVAVNPSVAVEIGESADVPEKEMEAEMVDDYVDIGDEMPTVNYQSVEIERDSPAAASSSSGSGSGSSSSSDSDSDSDSDGDDASAPH

SEQ ID NO: 2655 - protein, 747 aa, Bacillus subtilis subsp. subtilis str. 168
MCGLAGIINLAAPRSQECTFHILKGMADAISYRGPDDEQYHIDSKVGFAFRRLSILDLVNGQQPFLNEDGSIVVMVNGEIYNYKELKASLHNHMFKTTSDCEVIVHLYEEKGIGFVDDIIGMFSIAIWDKNKNKVFLVRDRFGIKPLFYTELKHELIFASEIKSLFSHPHCPRQFNWKEALSDICLSGEAASNHKETTSFFVNIQNLDAGHYLEINLTTNERKTASYWSLQDILLRQGYRENLHPDDLIEGYRELLADSVHRCLQSDVEVGLFLSGGIDSAAVAHFAAEKQDLHTFTVLSQSTFTNEDAKYAHWLAKDLHLPNHQVLYQLGNDELLQPESYKHLLWICETPFCGPEQLYKFHLHKYAKAIRPNLKVMLTGQGSDEFNGGYSTTLSPAENPSWEGFIESVNTMEMNRLHRLQGNIFRVWEEHFGLSPINLSYLKSNDSSQADPWQSYVLTKYRDLQMYNCWHEDRIAAANHIENRVPFLDHRLVEWVCGIPDGLRKDLLWDKSVLRKSLTNELHTSYTHRPKVPFFYGKDVRYTHKMMFHLLKKNNYQLIEEAFSHSDASSIIQVEHIHAIMTYLEDDPEFTNFEFLLRLVNMGLLSKMTKETPSVQLDITSHLESITIKDWHSQEGDIASRLNISANKCEGQDILALNPGVTLLRPESDSEHCIYIAEEGFIQFIVSEEDVGAWLHILCDINGKDTLHTILDRHGVSLEEVAKYIQEAIEHNIILIKQKNLPEGAYR

SEQ ID NO: 2656 - protein, 388 aa, Arabidopsis thaliana
MRSSDHMAFAGVLPIVFLLILSSADLAASQSQPGPTNQPYNYGRLSPAMAVIVVILIAALFFMGFFSIYFRHCSGVPDAGVSPAGGARSRATVNAAARGLDVSVVETFPTFLYSDVKTQKLGKGELECAICLNEFEDDETLRLLPKCDHVFHPHCIDAWLEAHVTCPVCRANLAEQVAEGESVEPGGTEPDLELQQVVVNPEPVVTAPVPEQLVTSEVDSRRLPGVPVDLKRVKFSRSHTTGHSVVQPGECTERFTLRLPEDVRKRIMKDWKLNRTNSLLVLPRGGSSRRGKPIDRSRARSDRWLFRKTPSFLWRSRDDGSIRLGATGSVRASAVPNSTGSDSVRAGDRWAFLRNASFLWRNSSVHVPRGGVNKDGEGTSVKSTGASG

SEQ ID NO: 2657 - protein, 357 aa, Lycopersicon esculentum
MQPSGAEVHQRIARISAHLYPSNPQMGDGSILERTNCRAKGGAAGFKVAILGAAGGIGQPLAMLMKMNPLVSVLHLYDVVNAPGVTADISHMDTGAVVRGFLGQSELEGALTGMDLVIIPAGIPRKPGMTRDDLFKINAGIVRTLCEGIAKCCPNAIVNLISNPVNSTVPIAAEVFKKAGTYDPKKLLGVTSLDVVRANTFVAEVLGLDPREVEVPVVGGHAGVTILPLLSQVKPPCSFTHEETEYLTKRIQDGGTEVVEAKKGAGSATLSMAYAAVKFADVCLKGLRGDAGVVACAFVASQVTELPFFASKVRLGRTGAEEVYQLGPLNEYERIGLEKAKKELAESIQKGISFIRN

SEQ ID NO: 2658 - protein, 547 aa, Oryza sativa
  unsure (1)..(547): unsure at all Xaa locations
MRRFVADRARRAVTSSAASMRAAATRSAAPSAGAAPSAPSPPPAAAAALAMASAMVRAMSTAAAGAAPVSLDTINPRVWKCEYAVRGEIVTHAQNLQQELQKNPDSLPFDEILYCNIGNPQSLGQQPVTFFREVLSLCDHPALLDKSETHALYSSDAIERAWQILDKIPGRATGAYSHSQGIKGLRDEIAAGIAARDGFHASGDNIFLTDGASPAVHMMMQLLIRSENDGILCPIPQYPLYSASIALHGGSLVPYFLDEETGWGLEVDELKKQLEEAQSKGITGRALVGINPGNPTGQXVLAEENQKKIGEFCKNEGLGLLADEVYPETIYVRGQESLPFKRIARSLGRXDDXLPLVSFQSVSKGYYGECGKRGGYMEVTGFSADVREQIYKVASVNLCSNVSGQILASLIMNPPKAGDESYESFMVEKDGILSSLARRAKALEEAFNSLEGITCNKAEGAMYLFPRIYLPQKAIGAAQAAGTAPDAYYARRLLEATGIVVVPGSGFGQVPGTWHFRCTILPQEDKIPAIISKFKEFHEKFMDEFRD

SEQ ID NO: 2659 - protein, 357 aa, Tropheryma whipplei str. Twist
MVRMKALVYHGPGKRSLDTVDDPTIKLGTDVILEMETTTICGSDLHILKGDVAAVKPGTVLGHEGIGKIVEVGKDVKSHSVGDRVIVSPMSSCGVCRFCRANNNGHCLGDSEGPGGWRLGGLINGVQAQFARIPLADNSLHKLPSGLDPKVGILVSDVLPTGHEVGAQAGQVTLGSVVAVIGCGPVGLGAIVTSLLYSPSKVIAVDADSNRLELARKLGATDTVRVNRERPLDAIEDVKKLTEGGFGVDVAIEAVGVPVTFSMALGIAAPGGRVANIGVHGAPVDFPLQDLWDKNIAVTLGIVSTHTIPLLLAALSEGKIDASQFVTHEFDLSDLERAYDVFSAAAQHNVVKVAIRA

SEQ ID NO: 2660 - protein, 170 aa, Pirellula sp. 1
MTALDKQRRKKLQAVVDKDYSYRSYYDDDIEVKSTGRCGFGVYAARQFQPGELVFEVTGQLINKKHYEGSEYVMDLDEDWYLEPSTPGAFMNHSCSPNCELVQLTEFSLGVVAICNIEAETEISFDYAWEAFDWNPKCQCGARNCRGWVVSEDEVKKMKRLAKGRKKKPR

SEQ ID NO: 2661 - protein, 272 aa, Bacillus cereus ATCC 14579
MNKQIGFIGCGNMGIAMIGGMIKKNIVSPDQIICSDLNVINLKNASNEYGITITTNNNEVANSADILILSIKPDLYSSVINQIKDQIKNDVIVVTIAAGKSIKSTENEFGRKLKVVRVMPNTPALVGEGMSALCFNEMVTEKDIKEVLNIFNIFGQTEVINEKLMDVVTSISGSSPAYVYMFIEAMADAAVLGGMPRKQAYKFAAQAVLGSAKMVLETGIHPGELKDMVCSPSGTTIEAVVTLEEKGLRTAIISAMKRCTQKSMEMSSLTSK

SEQ ID NO: 2662 - protein, 102 aa, Glycine max
  unsure (1)..(102): unsure at all Xaa locations
SNISSTVHLQPAVLYDAGCTNLKSMAVFPTRKTNNYITSIASNCGRVQCMQVWPPIVKKNFETLSYLPDLYDAQFAYEVXYLLMKVCIPFLEFVLEHIFLFP

SEQ ID NO: 2663 - protein, 497 aa, Vibrio vulnificus CMCP6
MGLASISVHAQTLTRDNGAPVGDNQNSITAGENGSVLLQDVHLIQKLQRFARERIPERVVHARGTGAHGEFVVSGDFSDLTLSSPFAQSGKVTPVFVRFSTVIHSKGSPETLRDPRGFATKFYTDQGNWDLVGNNLPVFFIRDSIKFPDMVHSLKPSPVTNLQDPNRFFDFFSSQPSATNMLTWVYTNLGTPASYRTMDGFGVHAYKWINRKGEVNYVKFHWKSQQGVKSLRPAEVTKVQGEDFNHLTNDLYTQINAGNFPKWDLYVKVLSPKALSKLDYNGLDATKVWLDVPEKKVGTMTLNRVPDNFFLETEQSAFAPSNIIPGIEPSEDRLLQGRLFAYADTQLYRLGANLFQLPVNSPKSPVANHNQDGPSNNSTGLGNVDSLDVNYEPSRLVNLTVDKQARAVETPLSGHVQQQAIRNPRDFFQAGVLYRSLSEQDKADLIHNLSGDLNKVNDAEVKAIMVSYFYRADKEYGTRLAKATDVNLKQVTKLASM

SEQ ID NO: 2664 - protein, 184 aa, Xylella fastidiosa Dixon
MSNFTISQILARADLLVDRPSIDGAIAHIADDIARDYQGDVPLFVTIMHGGLPFAGQLALELGQRGQDIELDSLHATRYRGEQTGGSLVWRHYPVSAMSGRRVILVDDILDEGHTLSEIRQWCLKQGATDVSLVVLMIKCHDRCIPNMRADYYGVEVPDRYVFGFGMDIAGQLRGIPAIYAMRQ

SEQ ID NO: 2665 - protein, 510 aa, Pseudomonas syringae pv. syringae B728a
MTATPKPLVLIILDGFGHSESHKGNAILAAKMPVMDRLYQTMPNGLISGSGMDVGLPDGQMGNSEVGHMNLGAGRVVYQDFTRVTKAIRDGEFFENPTICAAVDKAVSAGKAVHIMGLLSDGGVHSHQDHLVAMAELAVKRGAEKIYLHAFLDGRDTPPRSAKKSLELMDATFARLGKGRTATIVGRYFAMDRDNRWDRVSSAYNLIVDSTADFHADSAVAGLEAAYARDENDEFVKATRIGEAARVEDGDAVVFMNFRADRARELTRVFVEDDFKDFERARQPKVNYVMLTQYAASIPAPSAFAAGSLKNVLGEYLADNGKTQLRIAETEKYAHVTFFFSGGREEPFPGEERILIPSPKVATYDLQPEMSAPEVTDKIVDAIEHQRYDVIVVNYANGDMVGHSGIMEAAIKAVECLDVCVGRIAEALEKVGGEALITADHGNVEQMTDDSTGQAHTAHTSEPVPFVYVGKRQLKVRQGGVLADVAPTMLHLLGMEKPQEMTGHSILVAE

SEQ ID NO: 2666 - protein, 623 aa, Pirellula sp. 1
MVKNWNCRYKEPNTNLRSFDRRKSHRIFDSMSTDASETNAAPTDAPAKPIKLSPVEKIKQESGFLKGSIDVELADPVDHFDNANIQLLKFHGTYQQDDRDKRAELKKSGGGKAYSMMIRCRIPGGRLSSDQLVAHLDMCDELGDSTLKITTRQTLQLHGILKGDLRETIRRINEVELSTLAACGDVNRNIMCCPAKRVGGIHAQLNEFTDELTEALAPQTPAYHELWLTDPDTGEKTLAGGGEPEASSAPVIDEPLYGPTYLPRKFKVGIALPDDNCIDIYTQDLGFLAVIRDGQIIGYNVSVGGGMGRTPSAKKTFPALAKRMAFVTPEQAIDVAKAVIIVQRDNGNRSDRKVARLKYLIADWGIEKFRAEVEKVFGGPLADCTEDDVHEFDDHMGWQEQGDGKLSYGLNIENGRLYDNEQVQVKAAIRAVCARFNREIRLTSHQSMIFCDIDPSEKEELIEILKSHGLRTTEETSTVRRWSIACVALPTCGLAITESERRLPSIIDSIEEPLAKLGLSNERFTIRMTGCPNGCARPYNADLALVGRAVGKYTLFAGGGWLGNRLAYIYKDQVKDEDVTAELTGIFAAFKANREEGESLGTFCDRVGAEKLAELAEAAPLPA

SEQ ID NO: 2667 - protein, 152 aa, Glycine max
VAVAALYFLPRDGLLLDSVGRPIPSLLPGLAAPSAAGALCFPPVEALLLHSGRGAPAYLVPALSARTAVVFFCFAIVKTVDDHCGLWLPGNIFHIFFQNNTAYHDIHHQLQGLKYNYSQPFFSIWDKLLGTYMPFNLVKRPEGGFEARLAKE

SEQ ID NO: 2668 - protein, 456 aa, Xanthomonas campestris pv. campestris str. ATCC 33913
MSARYDYDVVVLGGGSGGLAAAFRAAKHGARVAIMEPGELGGTCVNLGCVPKKAMWLAADLASKIELAGALGFDVVRPTLTWQELVTHRQGYIGNIHASYRRRLDDDGVVLIPQRGVLQDRHTLMGADGVPVTAEHIVIATGAHPLRPHVEGAEHGHVSDDFFNLCHAPDHVAIVGGGYIAVEIAGLLQALGSRVHLFVQGERLLERFDAELTLQLADNLRHLGVRLHFGFRTTGVQRDDTGKLRMRGHSAHPGELGNDVFDQVFFAIGRRANTAGLGLEALGVELGKKGEIVVDDGQTTNVPNIHAVGDVDGKVGLTPVAIAAGRKLMDRLFGGQPDARMDYDNVPSVVFSHPPLGAVGLTEEQARERYDGAVRVYRSNFRPMLHALADAPQRSVFKLVCVGEEERVVGVHLLGESADEMLQGFAVAVKMGATKRDFDETVAIHPTSSEEIVLMH

SEQ ID NO: 2669 - protein, 496 aa, Mycobacterium tuberculosis H37Rv
MSLLITSPATVAAAATHLAGIGSALSTANAAAAAPTTALSVAGADEVSVLIAALFEAYAQEYQALSAQALAFHDQFVQALNMGAVCYAAAETANATPLQALQTVQQNVLTVVNAPTQALLGRPIIGNGANGLPNTGQDGGPGGLLFGNGGNGGSGGVDQAGGNGGAAGLIGNGGSGGVGGPGIAGSAGGAGGAGGLLFGNGGPGGAGGIGTTGDGGPGGAGGNAIGLFGSGGTGGMGGVGGMGGVGNGGNAGNGGTAGLFGHGGAGGAGGIGSADGGLGGGGGNGRFMGNGGVGGAGGYGASGDGGNAGNGGLGGVFGDGGAGGTGGLGDVNGGLAGIGGNAGFVRNGGAGGNGQLGSGAVSSAGGMGGNGGLVFGNGGPGGLGGPGTSAGNGGMGGNAVGLFGQGGAGGAGGSGFGAGIPGGRGGDGGSGGLIGDGGTGGGAGAGDAAASAGGNGGNARLIGNGGDGGPGMFGGPGGAGGSGGTIFGFAGTPGPS

SEQ ID NO: 2670 - protein, 253 aa, Leuconostoc mesenteroides subsp. mesenteroides ATCC 8293
MVKVAVVTGGGQGIGEGIVKQLASDGFTVAVADLNKDNAVKVAEEVGNDSKGYYVDISSHEDMFKLVDDVVNDFGQLDVFVNNAGIAQIAAIVDAKPDEITKIFNINVNGTIYGIQAAAKQFKKQGRGGKIINACSIAGHQAVELLGIYSATKFAVRGITQAAAKELAKDKITVNAYCPGIVLTPMWDQIDAAMAKIYDRPLGETKQEYIDGIALGRGEEPADVANLVSFLADDKSNYITGQSILVDGGINYV

SEQ ID NO: 2671 - protein, 305 aa, Zea mays
  unsure (1)..(305): unsure at all Xaa locations
ITMDPTKFRPSSSHDTTVTTTNAGAPVWNDNEALTVGPRGPILLEDYHLIEKVAHFARERIXPERVVHARGASAKGFFECTXHDVXTSLTCADFLRAPGVRXRPVIVRFLDGDPPSGVPPETIREPARGFPPGKFYXTREGQLGNLLGATNFPRLLQSAKGIKFSPDVIHAFKPNPRSHVQEYWRVFDFLSHLPESLHTLFFLFDDVGVPSDYRHMEGFGVNTYTFVSAAEKATIRKPNDFKQPGERYRSWDADRQDRFVRRFADSLGHPKVSQELRSIWIDLLAKCDASLGMKIATRLNMKPNM

SEQ ID NO: 2672 - protein, 613 aa, Arabidopsis thaliana
MGAVELMSDPSSLCTVENYVDNVDLSDTQLVQTVRKALTSVKTGDSDLYSEMVGVMARDIKEFKDPDVVAQLETVLKALSGAVACIDVLHHQKLLSALFRMKLWDHRPDVMDALVNLVISLAVTSGKYLDSCLNMLVSNFVPPPWVVNNLSHSRILNKKIDVLSRVHAALLKISILVPLTPSRLVPMLFQQMPKMHKKDHSIVIYVESLLKLENSSIGQVGGSMILGMVMERLRDLDLEIEWDDIPQDDSSRGMFDMELEDAAEGTMNDGDELPVGPLKQDTSDGSIVSKLLDKLMVVAFEHLESCQNDGRLDQVFESLFKSFENFILNTYKSKFTQFLIFYACSLDPENCGVKFASKLVEIFLSSNKHVATRMSAVAYLASFLARGKFLPVSFVASMLKRLIDECVGYCRTCNDDTRPEAHQIFFSGCQAIMYVLCFRMRSILDVPRFRSQLTPLESILMHKLNPLMVCLPSVVAEFLRQAKEGGLFIVSDSFIFDDLLESELSRAFGGFERLDTFFPFDPCLLKSSNSFISPNFIYWSMVKATYDEDDDDNDAEVIVNGDEDSDEDDEADLDYALNKMSITPKHSFKNKMERDRLLRMPSRIRPSTSPESL

SEQ ID NO: 2673 - protein, 233 aa, Moorella thermoacetica ATCC 39073
MTKEEYVRGIFDTIAHRYDLLNTLLSFNCDRGWRRFTVARTGLKPGDRALDVCCGTGMLSLELARAVTPGGRVVGVDFSPAMLQVARRRLAASPYGAAVELVEGNAMNLPFADNTFDCATIAFGLRNLPDVKGGLAEMQRVVRPGGRVVSLELAKPSRPIFKQVYYLYFDHLVPLLGRLGIGQDGPYSYLPRSLKGYPHQEEVLQYFHDLGFTGARYFELTGGIVAVHVGVKV

SEQ ID NO: 2674 - protein, 278 aa, Actinidia deliciosa
MAAAAFVPIPTDTYKLGFIGAGKMAESIARGVVKSGVLPASRIRTAHLGSARREAFESFGVKVLDRNDQVVEDSDVIIFSVKPQIVKEVVLQLRPLLSEKQLLVSIVAGVKLKELEDWAGHSRFIRVMPNTPAAVGEAASVMSLGATATGEDGELITKLFGAIGKIWKADEKLFDAVTGLSGSGPAYIFLAIEALADGGVAAGLPRELALGLASQTVLGAASMVARGGKHPGQLKDDVASAGGTTIAGIHELEKGGFRGTLMNAVVSATKRSQEIFKR

SEQ ID NO: 2675 - protein, 485 aa, Burkholderia fungorum LB400
MSESATVFKNLIAGEWTESVSGKTFANINPADTRDVVGQFQASVVADAQAAIQAASSAFAQWRRTPVTARARIVNKAADWLESHADTFAQELTREEGKPLAQSRDEILRSAQVLRFYAVEAQSFTGETFPSDDPEQHVYTQREPLGVVTVITPWNFPISIPARKIAPALMAGNTVIFKPSSDAPLIGYRLAEAFAQAGIPAGVLNFITGRASDIGAAITESPVVRAISFTGSTAAGEHIHRSVPITTRTQMELGGKNPLIVMDDADLDRAVDLAVKGGLSLSGQACTGTSRILVMESVRETFTAKLVERVKSLKIGSGVTPGMDLGPLANRKQLESVLGYVASGKEQSTHLIGGEQLTGEGFEHGYYVTPAVFSDVPESARIYREEIFGPVLAITSVTGYDDAIAKANDTEYGLSAAIATSNPRYMHRFADEIEAGTVKINRTTTGNVINAPFGGLKRSSTSTFRESGRAGLEFYTQIKTVYRGL

SEQ ID NO: 2676 - protein, 412 aa, Rickettsia rickettsii
MPIKILMPALSPTMTEGNLARWLKKEGDKVNPGEVIAEIETDKATMEVEAVDEGILAKIVIPQNSQNVPVNSLIAVLSEEGEEKTDIDAFIAKNNSVSPSPKTDANLLKPHESITNVEEQVTVIKHDASKIFASPLAKRLAKMRNIRFESVKGSGPHGRIVKQDILSYTPSTAHNKIVSRNPEEYRLVPNNNIRKIIAKRLLESKQTVPHFYLSIECNVDKLLDIREDINKSFSEDKSTRISVNDFIILAVAKALQEVPNANASWGEDAIRYYNNVDISVAVAIENGLVTPIVKNANQKNILELSREMKALIKKAKDNKLTPEEFQGGGFTISNLGMYGIKNFNAIINPPQSCIMGVGAIAKRAIVKNDQITIATIMDVTLSADHRVVDGAVGAEFLAAFKKFIESPVLMLI

SEQ ID NO: 2677 - protein, 196 aa, Zea mays
  unsure (1)..(196): unsure at all Xaa locations
SHRQPWIHTSNSSFWTTNSGAPVWNNNSALTVGQRGPILLEDYHLIEKLAQFDRERIPERVVHARGASAKGFFEVTHDVSHLTCADFLRAPGVQTPVIVRFSTVVHERGSPETLRDPRGFAVKFYTREGNFDLVGNNMPVFFIRDGMKFPDMVHAFKPNPKTNLQENWRXIVDFFSHHPEXLHMFTXLXFDDXGIP

SEQ ID NO: 2678 - protein, 802 aa, Rhodobacter sphaeroides
QPVTGGAEALRIRWSKAPCRFCGTGCGVMVGTRDGQVVATHGDTQAEVNRGLNCVKGYFLSKIMYGEDRLTTPLLRMKDGVYHKEGEFAPVSWDEAFDVMAAQAKLVLKEKAPEAVGMFGSGQWTIWEGYAASKLMRAGFRSNNLDPNARHCMASAATAFMRTFGMDEPMGCYDDFEAADAFVLWGSNMAEMHPILWSRLTDRRLSHEHVRVAVLSTFTHRSSDLSDTPIIFRPGTDRAILNYIAHHIISTGRVNRDFVDRHTNFALGATDIGYGLRPEHQLQLAAKGAADAGAMTPTDFETFAALVSEYTLEKAAEISGVEPALLEELAELYADPDRKWMSLWTMGFNQHVRGVWANHMVYNLHLLTGKISEPGNSPFSLTGQPFACGTAREVGTFAHRLPADMVVTNPEHRAHAEEIWKLPAGLLPDWVGAHAVEQDRKLHDGEINFYWVQVNNNMQAAPNIDQETYPGYRNPENFIVVSDAYPTVTGRAADLVLPAAMWVEKEGAYGNAERRTHFWHQLVEAPGEARSDLWQLMEFSKRFTTDEVWPEEILSAAPAYRGKTLFEVLFANGSVDRFPASDVNPDHANHEAALFGFYPQKGLFEEYAAFGRGHGHDLAPFDTYHEVRGLHWPVVEGEETRWRYREGFDPYVKPGEGLRFYGKPDGRAVILGVPYEPPAESPDEEFGFWLVTGRVLEHWHSGSMTLRWPELYKAFPGAVCFMHPEDARSRGLNRGSEVRVISRRGEIRTRLETRGRNRMPRGVVFVPWFDASQLINKVTLDANDPISRQTDFKKCAVKIEAV

SEQ ID NO: 2679 - protein, 463 aa, Mesorhizobium loti MAFF303099
MAGYDYDLFVIGGGSGGVRAARVAATLGKRVGIAEEYRFGGTCVIRGCVPKKLYVYASQFPEHFADAAGYGWTVPEASFNWQTLVANKDREISRLEAIYKKNVEGAGGETFPSRAMIVDPHVVHLLDDDRTVTADQILIATGGRPAAHPALPGHEHCIFSNEAFDLKELPKAIMIEGGGYIAVEFANIFHGLGVDTTLVYRGKEILSRFDMDLRRTLHETMEKKGIKILCHAVSERVHKRPDGRLDALLTSGQTLTVDQVMLAIGRIPNTENMGLEGIGLEMTQAGAIKVDEYSRTNIDNIWAIGDVTNRVQLTPVAIHEAMCFVETAFKGNPTAPDHDTIATAVFSQPEIGTVGLSEDEAVKRFADVEIYRASFRPMRHTLSGRDEKMLIKLVVDGASRKVLGAHILGPDAGEMAQLLGIPLKAGLSKDDFDRTMAVHPTAAEELVTMYKPTYRVKDGQRVQ

SEQ ID NO: 2680 - protein, 388 aa, Phormidium lapideum
MKLAARVESVSPSMTLIIDAKAKAMKAEGIDVCSFSAGEPDFNTPKHIVEAAKAALEQGKTRYGPAAGEPRLREAIAQKLQRDNGLCYGADNILVTNGGKQSIFNLMLAMIEPGDEVIIPAPFWVSYPEMVKLAEGTPVILPTTVETQFKVSPEQIRQAITPKTKLLVFNTPSNPTGMVYTPDEVRAIAQVAVEAGLWVLSDEIYEKILYDDAQHLSIGAASPEAYERSVVCSGFAKTYAMTGWRVGFLAGPVPLVKAATKIQGHSTSNVCTFAQYGAIAAYENSQDCVQEMLAAFAERRRYMLDALNAMPGLECPKPDGAFYMFPSIAKTGRSSLDFCSELLDQHQVATVPGAAFGADDCIRLSYATDLDTIKRGMERLEKFLHGIL

SEQ ID NO: 2681 - protein, 391 aa, Actinoplanes sp. A40644
MSADFAIGLHDFSAATGQYVLTHETLAAENGADVAKYHKGIGQRSMSVPAVDEDIVTMAAAAAAPVVARHGADQIRTVLFATESSIDQAKAAGIYVHSLLGLPAGARVVELKQACYSGTAALQFALGLVHRDRSEQVLVIASDVSKYERGTPGEATQGAAAVAMLVSAEPALMRIENPSGMFTADIMDFWRPNYRTTALVDGQESISAYLQAVEGAWKDYTERGGRSLDEFTAFCYHQPFTKMAYKAHRHLLDHCGYDVDDGEITRAIGQTTGYNAVIGNSYTASVYLALASLLDNADDLTDRTVGFLSYGSGSVAEFFGGTVVPGYRSHLRTDMHREAIDRRQEIDYAKYREIHDHSFPVDGGNHSVPRETTGPYRLAGIAGHKRLYEQR

SEQ ID NO: 2682 - protein, 322 aa, Psychrobacter sp. 273-4
MGSVPDMIKKQPTRIAILFPGQGSQVVGMTSELAEIYPEIIETFTEASAALGEDLWAICQDEDKLNQTQYTQPALLTASIAIWRILQQKIESKPCYLAGHSLGEYSALCAAGVLSLADAVKLVHKRGQLMQDAVVGIDTAMAAVLGLEDHRVENLCEQATEHVDNAIVGAANFNSPGQVVVSGNAAGVNAVIDKVQNTGKKAIPLKVSVPSHCALMEPASKALAAELATIKFDQATIPVIQNRHARVETSAIGIKEALTEQLSQPVLWSKTMQALADKQINILIECGSGNVLSNLAKRQAHPIISYPTDKPARLDKLLEVLS

SEQ ID NO: 2683 - protein, 557 aa, Schizosaccharomyces pombe
MGRTLTSVLVVFISMAGWLGGADTGSISGILGMRDFQSRFADRYNPITNSYSYSAWRQALLTGTVNAGCLFGAMLSSPFTEAIGKKYSIAFFSGCYIIGQILLVTAVPSWVQIMVGKLFTGLTIGALSVLSPGYQSEVAPPQIRGAVVSTYQLFQTCGTLIAACINMGTHKLRKTASWRTSFGINILWGIFLMVGVLFLPESPRYLIYKGRDEEALRIMCQTAELDPESEIIQTNFNTIKSDIEMEMAGGKARWPEVFGKEVRYRTVLGFLTMLLRELIGNNYYFYYATQVFKGTGMTDIFLPAVILGAINFGTTFGALYTIDNLGRRNPLIFGAAFQSICFFIYAAVGDRKLIYKNGTSDHRAGAVMIVFSCLFLFSYCCSWGPMGWVIVGETFPIRYRSKCAAVATSGNWLGNFMVSFFTPFISNSIGFKLGYIYACINMTSAFQIFLMAKETKGLTLEEVNELYESDIKPWDSYKYVRQIESRRIHFSKEEEKREREKSKGYRGQEERFIENADGADNDDSSASSESFASAGAHSRSVFPRRSNVSEESHPTWV

SEQ ID NO: 2684 - protein, 808 aa, Yersinia pestis CO92
MNNNKTPLTGSLSRREFIQTSAVVTGAAAIAGSIALPFSVHAAASEHAPTAAEESIKYSACLVNCGSRCPLKVHVKNGEIIKIANEAIYDDSTFGLHQIRPCLRGRSVRWKTYNPDRVKYPMLRVGKRGEGKFKRISWDEATTIVADNLKKTIVQYGNEAIYYQYGTGSTGANLQGRNACKRMLSLIGGYLDQHGTYSTAQINTVMPYVYGNLDETLLDEIKNSDLVVMFGHNLAETRMSGGGQYIETVQALGQSRAKVIIIDPRMTDSVTTLNAEWIPIFPGTDAALVAALGHVLIKENLTDERFLQQYCVGWDATTLPSSAPANGSYKDYILGLGADETEKTPEWASEITGISPTRIIQLARELGNARAAWISQGWGIQRTANGEQASRSIMMLPLMTGNIGRAGTNTGAWGGNVKYPVPGFSIPNPVKTAIPCFMWTDAIFRGTEMTAKNAHVKNKEKLDTNIKFLWNYASNVIANQHSDLNKTNTILQDESLCEFILVWENHMTNSAKYADLLLPDVTSVESNDLIDNSYASGAYHYVTRMQNTIEPLWECRPSYDVLAEIATKLGVGDAFTEGHTQQEWIEISYNKMRDNNPALPPFSDTHNKGIIDRIFADSSQYIALKDFRDDPLNNPLKTPSGKIEIYSEALATLAHEWQLTPGDRITAVAEYCPTPEGVSDQETLKSYPLQMTGFHVKGHTHSTYYNVAMLREAVPHQFWMNPIDAQARGIQQGERVEIFNSRGRIHIAVKITERVLPGVIAVPQGAWRNLNKDGIDVGGCINTLTTQRPSPLAKGNPQHTNLVEVKRA

SEQ ID NO: 2685 - protein, 305 aa, Streptomyces bikiniensis
MFETPLKRPGVRGIILAGGSATRLQPLTGALSKQQLPVYDKPMIYYPLSVLMLAGIQDILIISSHQHVETFQVMLGDGSRLGIQLDYAVQDEPRGVADAFLVGDKHIGNDRVALILGDNVFHGPGFSTVLKHSLRRLDGCELFGYPSKSPERYGVAEIDEQGHLLSLEEKPSRPRSNLAVTGLYFYDNDVVELAKDLKPSARGELEITDINLSYLEQGRARLTQLGRGFAWLDMGTHDSLLQAGQYVQLLEQRQGVRIACLEEIALRMGFIDADTCYRLGEELSASSYGDYLMEVASGLGATRTG

SEQ ID NO: 2686 - protein, 487 aa, Mycobacterium tuberculosis H37Rv
MSFVSVAPEIVVAAATDLAGIGSAISAANAAAAAPTTAVLAAGADEVSAAIAALFSGHAQAYQALSAQAAAFHQQFVQTLAGGAGAYAAAEAQVEQQLLAAINAPTQALLGRPLIGNGADGAPGTGQAGGAGGILYGNGGNGGSGAAGQAGGAGGPAGLIGHGGSGGAGGSGAAGGAGGHGGWLWGNGGVGGSGGAGVGAGVAGGHGGAGGAAGLWGAGGGGGNGGNGADANIVSGGDGGLGGAGGGGGWLYGDGGAGGHGGQGAIGLGGGAGGDGGQGGAGRGLWGTGGAGGHGGQGGGTGGPPLPGQAGMGAAGGAGGLIGNGGAGGDGGVGASGGVAGVGGAGGNAMLIGHGGAGGAGGDSSFANGAAGGAGGAGGHLFGNGGSGGHGGAVTAGNTGIGGAGGVGGDARLIGHGGAGGAGGDRAGALVGRDGGPGGNGGAGGQLYGNGGDGAPGTGGTLQAAVSGLVTALFGAPGQPGDTGQPG

SEQ ID NO: 2687 - protein, 309 aa, Arabidopsis thaliana
MEITLNSGFKMPIIGLGVWRMEKEELRDLIIDAIKIGYRHLDCAANYKNEAEVGEALTEAFTTGLVKREDLFITTKLWSSDHGHVIEACKDSLKKLQLDYLDLFLVHIPIATKHTGIGTTDSALGDDGVLDIDTTISLETTWHDMEKLVSMGLVRSIGISNYDVFLTRDCLAYSKIKPAVNQIETHPYFQRDSLVKFCQKHGICVTAHTPLGGATANAEWFGTVSCLDDPVLKDVAEKYKQTVAQIVLRWGIQRNTVVIPKTSKPERLEENFQVFDFQLSKEDMEVIKSMERNYRTHQTAKFWGIELYA

SEQ ID NO: 2688 - protein, 751 aa, Anabaena variabilis ATCC 29413
MNINDITIPFHVDLSNCNKEPIHIPGLIQPHGVLLALQEIDLTILQVSNNTFNLLGRHPEQLLNQHLSCLLEAEQINLLQDCLTQEDLQIINPLEFIIKSHNQSINFDVIAHRSNGLLILELEANLSDKNYSFFRFYHLVKLAMLKLQGAATTTEISQILAQEVRKITGFDRVMVYRFDEQWNGKVIAEVRPEYLTSYLGLHYPASDIPQQARKLYSQNWLRLIPDAKYQPVPIVPTNHPLNNQPLDLSRSVLRSVSPLHIEYMQNMGVTASMSISIMKNQKLWGLIACHHQSPKYIPYEIRSACEFLGQMTSVEMSAKEDSEDTEDKIRVKSVHSKLVQYMSAENDFINALIDHQPNILDLVNAQGAAVCFNGNFRTVGQVPPIPDIQVLVEWMSQNIHEEIFATDSLATVYPDAEKLREVASGLIALSISRSQKNYVLWFRPEVVRTVDWGGNPHKPVEVIANGGIRLSPRKSFELWKETVLLKSHPWKSYEVNAALELRSAIIGIVLQKADELAQLNIELKRSNQELDAFAYIASHDLKEPLRGIHNYSNFLMEDYGEIIDAQGKEKLLTLIRLTQRMEDLIDSLLHFSRLGRVDLSMQDTDLNEIVHRILDMLSGRIEETGVEIRIVQLLPVVYCDRIQIGEVFSNLIANSIKYNDKANKWIEIGYIDNQPLPPTFYVRDNGIGIREKHFEAIFRIFKRLHSPNKYGGGTGAGLTIAKKIVERHGGKIWVESTYGEGSTFYFTLQGV

SEQ ID NO: 2689 - protein, 292 aa, Dechloromonas aromatica RCB
MMSAYGDAPVVRATFDEASAALGDDLWSMVANGPAELLTQTVNTQPVMLTAGIAVWRLWQEKGGRKPAVVAGHSLGEYSALVAAGVIDLKDAVPLVRLRAAAMQEAVPVGTGAMAAVLGLDNAGIAAACAEAAQGEVVEPVNFNANGQTVIAGHKAAVERAMEACKARGAKMAKALPVSAPFHSSLIRPAADKLAARLAELSLNAPLIPVINNVDVSIENDPGRIKDALVRQAYNPVRWVETIQVMASLGVSTVAECGPGKVLAGLTKRCADGVVGVALADAASIEANLGLE

SEQ ID NO: 2690 - protein, 245 aa, Bacteroides thetaiotaomicron VPI-5482
MDYPQQHIKPYNEDGKKTEQVERMFDNIAHAYDKLNHTLSLGIDRSWRRKAIAWLRPFRPQHIMDVATGTGDFAILACRELNPDELIGTDISEGMMNVGREKVKKEGLSDKISFAREDCTSLSFADNRFDAITVAFGIRNFEDLDKGLSEMCRVLKPGGHLVILELTTPDRFPMKQLFAIYSKVVIPLLGKLLSKDNSAYHYLPDTIKVFPQGEVMKGVISKTGFGEVHFRRLTFGICTLYTATK

SEQ ID NO: 2691 - protein, 158 aa, Streptococcus pneumoniae TIGR4
MTSLYDFSVLNQNNQATPLDSYRGKVLLIVNTATGCGLTPQYQGLQELYERYQDQGFEILDFPCNQFMGQAPGSAEEINAFCSLHFQTTFPRFAKIKVNGKEADPLYVWLQDQKSGPLGKRVEWNFAKFLIGRDGQVFERFSSKTDPKQIEEAIQTLL

SEQ ID NO: 2692 - protein, 282 aa, Atriplex canescens
MSKEVISEEGQVHQHGKDYVDPPPAPFFDMGELKLWSFWRAAIAEFIATLLFLYITVATVIGYKKETDPCASVGLLGIAWSFGGMIFVLVYCTAGISGGHINPAVTFGLFLARKVSLLRALVYMIAQCAGAICGVGLVKAFMKGPYNQFGGGANSVALGYNKGTAFGAELIGTFVLVYTVFSATDPKRSARDSHVPILAPLPIGFAVFMVHLATIPITGTGINPARSFGAAVIYNKKRVWDDHWIFWVGPFVGALAAAAYHQYVLRAAAIKALGSFRSNPTN

SEQ ID NO: 2693 - protein, 340 aa, Actinoplanes sp. A40644
MEAVTIVGPGRLKTASVPVPEPLPGTVLVAPRYAGICGTDLELFHGTSSYLADGRAATPLIFGHEWCGRVVSADPGTGWRPGDRVAGQTMVPCGGCARCRAGRRGLCRRMREVGLYGLDGAAAQYIRVPGHALARLPDTVPDRTAALVEPAVTVVESFARTGCGFDDRVAVLGTGTIGLLAVQFARRVAGRVDAVGVDPAGLALAVRCGADRAIPVGETTAGSYSLVVEASGAPEAFAHALDLVEPGGRVGVIGVANEPTAGVVAGSVALRGVSVLGIQHGLDHYDRTIELFATGALTADPLIGATFPAGAAAEAFAFMESARSGPPKVLLDLTEWKGDR

SEQ ID NO: 2694 - protein, 423 aa, Schizosaccharomyces pombe
MEYLTNLKTNIMDKQLGHREVSEGSTQPKPDPSGATMKACVWDGPLNVKIAEVPKPTITHPKDVIVKTTACTICSGSDSHIFSGEMPGIEKGAILGHESCGIVAEKGDEVNNLEIGDRVVIAFDLACGQCSFCKRHEYAACDTTNDSKLMDVNYGSHHSAIFGYTKLLGDVPGCQAEYIRVPFAEINCCKLPDDIPDSEGLFMSDVLCTSLHACTLGEVKKGDTVAIWGMGPIGLYAGRWAQILGASKVIGIEVVPERIELARQKFGFTVIDRNEVSDVPKKIMELVSNGVDCAIEASGFRFSTSILHKVERAVGLETDSPDMITECLNAVRKYGHVSIIADYVGTSNQFPIGHVVMKHLTIRSGQCPCQNYFGYVIDNIRSGKIDPRWMVTNKIKFDDLPDAYNKLFYKEDGYVKVYCDMTE

SEQ ID NO: 2695 - protein, 825 aa, Haemophilus influenzae R2846
MKKNNVNEQRRDFLKKTSLGVAGSALSGGMVGVVSKSAVAKEAEMKTVVTAAHWGSLGVVVQDGKVVKSGPAIEPAVPNELQTVVADQLYSEARVKYPMVRKGFLANPGKSDTTMRGRDEWVRISWDEALDLVHNQLKRVRDEHGPTGIFAGSYGWFSCGSLHASRTLLQRYMNATGGFVGHKGDYSTGAAQVIMPHVLGTIEVYEQQTSWESILESSDIIVLWSANPLTTMRIAWMSTDQKGIEYFKKFQASGKRIICIDPQKSETCQMLNAEWIPVNTATDVPLMLGIAHTLVEQGKHDKDFLKKYTSGYAKFEEYLLGKTDGQPKTAEWAAKICGVPAETIKQLAADFSSKRTMLMGGWGMQRQRHGEQTHWMLVTLASMLGQIGLPGGGFGLSYHYSNGGVPTATGGIIGSITASPSGKAGAKTWLDNTSKSAFPLARIADVLLNPGKKIHYNGTEITYPNIKAVYWAGGNPFVHHQDTNTLVKAFQQPDVVIVNEVNWTPTARMADIVLPATTSYERNDLTMAGDYSMMSVYPMKQVVPPQFEAKNDYDIFVELAKRAGVEEQYTEGKTEMEWLEEFYNAAFSAARANRVAMPRFDKFWAENKPLSFEAGEAAKKWVRYGEFREDPLLNPLGTPSGKIEIFSDVVEKMNYNDCKGHPSWMEPEEFAGNVTEEYPLALVTPHPYYRLHSQLAHTSLRQKYAVNDREPVMIHPEDAAARGIKNGDIVRIHSKRGQVLAGAVVTENIIKGTVALHEGAWYDPMYLGESEKPLCKNGCANVLTRDEGTSKLAQGNSPNTCIVQIEKFTGVAPEVTVFKQPKQVA

SEQ ID NO: 2696 - protein, 498 aa, Glycine max
  unsure (1)..(498): unsure at all Xaa locations
MDPYKHRPXSAFNSPFWTTNSGAPIWNNNSSLTVGARGPILLEDYHLVEKLANFDRERIPERVVHAXRGASAKGFFEXVTHDISHLTCADFLRAPGVQTPVIVRFSTVIHERGSPETLRDPRGFAVKFYTREGNFDLVGNNLPVFFVRDGMKFPDMVHALKPNPKNHIQENWRILDFFSHFPESLHMFTFLFDDLGXVPQDYRHMDGFGVNTYTLINKAGKAVYVKFHWKTTSGIKCLLEEEAIKVGGANHSXHATQDLHDSIAAGNYPEWKLFVQTIDPEHEDKFDFDPLDVTKTWPEDIIPLQPVGRLVLNKNIDNFFAENEQLAFCPAIVVPGVYYSDDKMLQTRIFSYADSQRHRLGPNYLQLPANAPKCAHHXNHHEGFMNFIHRDEEVNYFPSRYDPVRHAERFPIPPAIXSGRREKCGIEKENNFKQPGERYRSWAPDRQDRFARRWVDALSDPRXVTHEIRSVWISYWSQADRSLGQKIASXHLSTRPNI

SEQ ID NO: 2697 - protein, 411 aa, Yersinia pestis CO92
MAELPAKRRFTRIDRLPPYVFNITSELKMAARRRGEDIIDFSMGNPDGPTPPHIVEKMCSVAQREDTHGYSTSRGIPCLRRAISRWYADRYQVDIDPENEAIVTIGSKEGLAHLMLATLDHGDTVLVPNPSYPIHIYGAVIAGAQVRSVPLTEGIDFFGELERAIRETIPKPKMMILGFPSNPTAQCVELDFFERVVALAKQYDVLVVHDLAYADIVYDGWKAPSIMQVPGAKDIAVEFFTLSKSYNMAGWRIGFMVGNPELVSALARIKSYHDYGTFTPLQVAAIAALEGDQQCVRDIAEQYRQRRNALVRGLHEAGWMVDNPKASMYVWAKIPEPYAHLGSLEFAKRLLAEAKVCVSPGIGFGDYGDTHVRFALIENQDRIRQAVRGIKSMFRADGLLKPGKSSPNEMA

SEQ ID NO: 2698 - protein, 273 aa, Leptospira interrogans serovar lai str. 56601
MILLGLEVRFLEKEIDMKYTIGIAGCGNMGGAIYFSLKERYPTQVLGYDPYIISNQKIELISSWDEFVSKSDLILVCVKPGKVIELLRQIKVPKKIISVAAGIHIDTILKNLPTGSNVVRVMPNLPLLVSEGAIGFFGDEELYETVSEIFQPLGHSVKLGSETLMDAVTGLSGSGPAYVFKFIQALAEGGVLSGLGYQEALDLSIQTVIGSAQLLRKEREKDPTTHPEVWKNKVTSPGGTTIAGLVELEKNGFSNAVLEAVKAAANRSKELGV

SEQ ID NO: 2699 - protein, 456 aa, GIBBERELLA ZEAE PH-1
MTSSAKLGENPISTLANGQPTENPGSTQQIRYGQSNGGLVVLSDTQTIEILAHFARERIPERSVHAKAAGATGEFEVLEDLSDITDANFLSEKGKKTPMLMRISTVGGEKGSADTVRDVRGWSTKLYTEEGIQDFVFNDLPVFFIREPIKFPSMNRSHKRHPRTNVPDNAMFWDYHVNNPEGIHALMHLFGQRGIPASLRHISGFGVHTYTLNKADGSYVYVKWHYKPEGGIETMDSETAARLAGTDPDYHVKDLFNAIEKGDYPSWIVYIQVMRPEEVMAAPIDIFDCTYTWPHEKYPLRRVGQMTLKKNPDNYFQDIEQACFSPSNMVPGIGPSADPVLQARMFSYPDAHRYRVGPNYFQLPPNRPRNQVYAPCVRDGPGTMNGNYGGDPDYVFSQLRPVSARELWKIICGEDKGKRQFFNNIAPTIKDLPVKLQDYLSGVDPEIKTILTAHMN

SEQ ID NO: 2700 - protein, 517 aa, Staphylococcus epidermidis ATCC 12228
MKIKAQVAMVLNLDKCIGCHTCSVTCKNTWTNRPGAEYMWFNNVETKPGVGYPKRWEDQGQYKGGWVLNKKGKLELKSGNRWSKIALGKIFYNPDMPLIQDYYEPWTYNYEHLTNAKQGQHSPVATAHSLISGDRLNLKWGPNWEDDLAGGHITGPEDPNIQKIEEDIKFQFDETFMMYLPRLCEHCLNPSCVASCPSGAMYKRDEDGIVLVDQEACRGWRYCMTGCPYKKVYFNWKTNKAEKCTFCFPRIEAGMPTVCSETCTGRMRYLGVLLYDADRVQEAASAKDEKDLYEKQLDLFLDPFDEEVIAQAEKDGINQEWITAAQNSPVYKLAIEYKMAFPLHPEFRTMPMVWYCPPLSPIMSYFEGENAGQNPDMIFPAIEEMRLPIQYLANLLTAGDTKPVKEGLQKMAMMRSYMRSQITNQPFDTSKLERLGLTERQMTEMYRLLGIAKYEDRFVVPSSHKETYLDTYKAQGSQGYGGEYFGSNCEGCGVAVQSGKTGQEIYNENFYGGIFRD

SEQ ID NO: 2701 - protein, 420 aa, Listeria monocytogenes EGD-e
MSQKIQVENGVLKTPNNPVIPFIEGDGTGPDIWAAAKRVLDAAVKKAYNGEKEIAWKEVLAGEKAFKQTGEWLPQATLDTIDEYLIAIKGPLTTPIGGGIRSLNVALRQELDLYVCLRPVRYFKGVPSPVKRPEDTDMVIFRENTEDIYAGIEFKEGSIESKKLIDFLKSEFGVDKIRFPETSGIGIKPISKEGTERLVRSAIEYAIKEGRKSLTLVHKGNIMKFTEGAFKNWGYDLCEREYGDKVFTWNEYDRIKEAEGTEVADAKQNEALAAGKILVKDSIADIFLQQILTRPAEFDVVATMNLNGDYISDALAAQVGGIGIAPGANINYLTGHAIFEATHGTAPKYAGLDKVNPSSVILSGTLLLEHIGWGEAAALINQSMEKTIAAKTVTYDFARLMDGATEVKCSEFADELIKNF

SEQ ID NO: 2702 - protein, 613 aa, Moorella thermoacetica ATCC 39073
MCGITGWVDWELDLTGQKNILEAMTATLACRGPDAAGTWVAPRVALGHRRLVVVDPAGGGQPMVRRRGNQTFVLTYNGELYNTGEIREELLSRGYTFRGHSDTEVLLTAYMEWGVECVRRFNGIFAFAIWDEARERLFLARDRLGVKPLFYATLPHSFLFGSELKALLAHPAIKPEVDAEGLAEVFVLGPARTPGHGVFHNLAELKPGYYMTYDRQGLRLHQYWALQSHPHTDNLETTIAKVRQLLQDTVERQLVADVPVCTLLSGGLDSSAVTVFAARAFQGRGQGHIHTWSVDYIDNDRYFQPSHFQPNPDAPWVKLVSEHLETIHHYVYIDTPELVDSLKAAMRARDLPGMADVDSSLLLFCREVKREATVALSGEAADEVFGGYPWFRSEKALAANTFPWNRAGQERIRLLSPELKAMVRPEEYVARRYREALAEVPALPGEEARAARLREISYLSLTRFMPVLLDRKDRMSMAVGLEVRVPYCDHRLVEYVWNIPWEMKFVGQMEKGILRRALAGILPAEVINRRKSPYPKTYNPAYLEAVRNWMLDILADPASPLLPFIDVAAVKALTQSREVFNLPWFGQLMSGPQLFAYLAQIDTWMREYGVSVR

SEQ ID NO: 2703 - protein, 382 aa, Corynebacterium glutamicum ATCC 13032
MNFYPPSVPINPAWRPPTVTVQAGRPARTPGAPMNPPITLSSTYVHDSEKAYGRDGNDGWGAFEAAMGTLDGGFAVSYSSGLAAATSIADLVPTGGTVVLPKAAYYGVTNIFARMEARGRLKVRTVDADNTEEVIAAAQGADVVWVESIANPTMVVADIPAIVDGVRGLGVLTVVDATFATPLRQRPLELGADIVLYSATKLIGGHSDLLLGVAVCKSEHHAQFLATHRHDHGSVPGGLEAFLALRGLYSLAVRLDRAESNAAELSRRLNAHPSVTRVNYPGLPDDPQHEKAVRVLPSGCGNMLSFELDATPERTDEILESLSLLTHATSWGGVETAIERRTRRDAEVVAGVPMTLCRVSVGIEDVEDLWEDLNASIDKVLG

SEQ ID NO: 2704 - protein, 330 aa, Synechococcus elongatus PCC 7942
MTTPALMQAMTSDRYGPPEVLQARQVARPPLTDNGVLVRVRASSVNAGDWHLLRGEPWLVRLIYGGLLTPKIPILGTDLAGQVEAVGQQVTLFQPGDDVVGELSACGFGAFAEYVCVPESALVAKPVHISYEQAAAVPAAGMAALQGLRDLGQLQPGQRLLVGGASGGVGSLAVQIGKALGAEVTALARPEKMEMLRGLGADDVVDVNRLEVLIDSGQHYDVILDAAAFRPVADYRPLLSPGGAYILVGGSIARLFQVMLFGQWMSWRQQRRIRCLSSTPTQADLTTLCDWLEAGILTPFIDRTFPLSQLSEAIRYVERRQVRGKVVVLI

SEQ ID NO: 2705 - protein, 506 aa, Corynebacterium glutamicum ATCC 13032
MTVYANPGTEGSIVNYEKRYENYIGGKWVPPVEGQYLENISPVTGEVFCEVARGTAADVELALDAAHAAADAWGKTSVAERALILHRIADRMEEHLEEIAVAETWENGKAVRETLAADIPLAIDHFRYFAGAIRAQEDRSSQIDHNTVAYHFNEPIGVVGQIIPWNFPILMATWKLAPALAAGNAIVMKPAEQTPASILYLINIIGDLIPEGVLNIVNGLGGEAGAALSGSNRIGKIAFTGSTEVGKLINRAASDKIIPVTLELGGKSPSIFFSDVLSQDDAFAEKAVEGFAMFALNQGEVCTCPSRALVHESIADEFLELGVKRVQNIKLGNPLDTETMMGAQASQEQMDKISSYLKIGPEEGAQTLTGGKVNKVDGMENGYYIEPTVFRGTNDMRIFREEIFGPVLSVATFSDFDEAIRIANDTNYGLGAGVWSRDQNTIYRAGRAIQAGRVWVNQYHNYPAHSAFGGYKESGIGRENHLMMLNHYQQTKNLLVSYDPNPTGLF

SEQ ID NO: 2706 - protein, 182 aa, Arabidopsis thaliana
MASSMLSSATMVASPAQATMVAPFNGLKSSAAFPATRKANNDITSITSNGGRVNCMQMQVWPPIGKKKFETLSYLPDLTDSELAKEVDYLIRNKWIPCVEFELEHGFVYREHGNSPGYYDGRYWTMWKLPLFGCTDSAQVLKEVEECKKEYPNAFIRIIGFDNTRQVQCISFVAYKPPSFTG

SEQ ID NO: 2707 - protein, 201 aa, Chlamydomonas reinhardtii
  unsure (1)..(201): unsure at all Xaa locations
MLLTRKNVAVRPARAARRDVRAMSLLGNLFGGGSKPTSSTSNFHQLSALDIDKKNVDFKSLNNRVVLVVNVASKXGLTAANYKEFATLLGKYPATDLTIVAFPCNQFGGQEPGTNAEIKAFASARGFSGAGALLMDKVDVNGANASPVYNFLKVAAGDTSDIGWNFGKFLVRPDGTVFGRYAPTTGPLSLEKYIVELINSR

SEQ ID NO: 2708 - protein, 418 aa, Clostridium thermocellum ATCC 27405
MMLTQAPKGTKDILPSEVYKWHYIEKEIAKLCHDFGYKEIRIPVFEHTELFQRGVGDTTDIVQKEMYTFLDKGQRSITLRPEGTAGVVRSYIENGMASLPQPVKLYYNITAYRYENVQKGRYREFHQFGVEAFGAPGPSIDVEIISMVKLFFDRLGIKEISLNINSIGCPVCRAEYNKKLMDYLRPNLSKLCATCNTRFERNPLRIIDCKEESCKKITANAPALVENLCDDCKNHFEGLKAGLENLGIDYKIDKNIVRGLDYYTKTVFEFVSDNIGAQGTVCGGGRYDGLVEACGGKPTPGIGFAMGLERLLMVMENQGIKFPESKKPDIFIAAIGDKANSYAEKMVYELRKEGLSAEKDLMGKSLKAQMKYADKLGAKYSIALGDDEIESGKAVLKNMETGEQKEISLDTLISRLKM

SEQ ID NO: 2709 - protein, 408 aa, Bacillus subtilis subsp. subtilis str. 168
MGGMALTGNKAVVYKGKGTVAVEDIGYPELILRDGPGVPKANVNRKCEHGVILKVITTNICGSDQHMVRGRTTAPEGLVLGHEITGEVIETGRDVEFIKKGDIVSVPFNIACGRCVMCKTQKTHVCLNVNPDRPGSAYGYVDMGGWVGGQSEYVMVPYADFQLLVFPDKEQALEKILDLTMLSDIFPTGFHGAYTAGVQTGSTVYIAGAGPVGLAAAHSAQLLGASTVIVGDLNEDRLAQARSFGCETVNVQKHDRLGEQIEQILGEPTVDAAVDCVGFEASGHGNQGEAPAAVLNSIMDVTQVGGSLGIPGLYVTEDPGAKDADAKTGSLKIRFGLGWAKAHTFVTGQTPAMTYNRNLMKAILSGRAQIAKAVNATVISLDDAPKGYSDFDKGAAKKFVIDPHGTLK

SEQ ID NO: 2710 - protein, 109 aa, Zea mays
MFEFKKKKKKKKGPKSLPPSPQQPAHISLWRIEGRKEEMGGGMEVHKNRWIEEWNAGRENLEFNFRWTRRSLAVDGLFGLAVPILVYKGIVREFHMQDEDDSRPYRKFL

SEQ ID NO: 2711 - protein, 421 aa, Emericella nidulans
MSLTSKLSITDVDLKDKRVLIRVDFNVPLDKNDNTTITNPQRIVGALPTIKYAIDNGAKAVILMSHLGRPDGKKNPKYSLKPVVPKLKELLGRDVIFTEDCVGPEVEETVNKASGGQVILLENLRFHAEEEGSSKDADGNKVKADKDAVAQFRKGLTALGDITINDAFGTAHRAHSSMVGVDLPQKASGFLVKKELEYFAKALEEPQRPFLAILGGSKVSDKIQLIDNLLPKVNSLIITGGMAFTFKKTLENVKIGSSLFDEAGSKIVGNIIEKAKKHNVKVVLPVDYVTADKFAADAKTGYATDEQGIPDGYMGLDVGEKSVESYKQTIAESKTILWNGPPGVFEMEPFAKATKATLDAAVAAVQNGATVIIGGGDTATVAAKYGAEDKISHVSTGGGASLELLEGKELPGVAALSEKSK

SEQ ID NO: 2712 - protein, 336 aa, Neurospora crassa
MFAASRIQTRAFSASARQLTKVSVLGAAGGIGQPLSLLLKLNPRVSELALYDIRGAPGVGADLSHINTKSTVKGYEPTASGLADALKGSEIVLIPAGVPRKPGMTRDDLFNTNASIVRDLAKACAESCPEANILVISNPVNSTVPIVSEIFKKAGVYNPKRLFGVTTLDVVRASRFVSEIKGTDPKDENITVVGGHSGVTIVPLFSQSKHPELSKNEQLIHRVQFGGDEVVKAKDGAGSATLSMAMAGARMAESLLRAAQGEKGVIEPTFVDSPLYKDQGIDFFASKVELGPNGVEKIYPVGPVDEVEQKLLDACLVDLKKNIQKGKDFVAANPGK

SEQ ID NO: 2713 - protein, 233 aa, Zea mays
MMAEAWTPVLLPATAPCFWQQDTHSVLWRRGDAWTVEENKLFEKALAQIDRNAPDRWEKVAAVLPWKTVDDVRSQYHALEKDVGVIEAGGLVPFPRYSGSVPPPSGFALEDWGGGDRGFRRARGSEEMQERKKGVPWTEEEHKLFLMGLRKYGRGDWRNISRKYVTTRTPTQVASHAQKYFIRLSSGGKDKRRSSIHDITTVNLPGDAPRSSPPAATTNPSAGALVVDVKPFV

SEQ ID NO: 2714 - protein, 186 aa, Triticum aestivum
  unsure (1)..(186): unsure at all Xaa locations
MMREMYMDVLPPVDHIAARSNWFPAAARLWTAEENKRFESALAGLDLCHPDWEKVAQAIPGRTVREVVSHFKNLQLDVQQIESGQVPLPVYGSGASSFTLQWDGNGGYGPGDFRHGYRFGGGCGKRHHGRTPEQERKKGVPWTEEEHKLFLLGLKKYGKXGDWRNISRNFVQTRTPTQVASHAQKY

SEQ ID NO: 2715 - protein, 248 aa, Holcus lanatus
VFLGSAHGIAKVPPGPNITATYGDEWLDAKSTWYGKPTGAGPKDNGGACGYKDVDKPPFSGMTGCGNTPIFKDGRGCGSCFEIKCSKPESCSGEPVTVHITDDNEEPIAPYHFDLSGHAFGSMAKKGEEQKLRSAGELELKFRRVKCKYPDGTKPTFHVEKGSNPNYLALLVKYIDGDGDVVAVDIKEKGKDKWIELKESWGAVWRVDTPDKLTGPFTVRYTTEGGTKGEAEDVIPEGWKADTAYEAK

SEQ ID NO: 2716 - protein, 692 aa, Clostridium perfringens str. 13
MKRIQSTCNYCALACNLDFYTEDGKIKRVVPTPHYPVNKGFSCIKGLNLDKQCTKFNGSKKPLLKMKDGERKAIEWKEAFDLFASKMTAIQEKYGKESVAYISTGQLPTEEMALLGHVGRSYMGINGDGNTRLCMASAVVAYKQSFGFDAPPYTLKDLELSDTIFFIGANPVIAHPIAWGRVRKNKDAKIITIDPRKSETAMNSDMWIDIKTKGDLALFYTLANVLIEKGWIDQDYINNYTEGFEDFKAHVKKYTLEDVEERTGISKMRVLELAKIIHEGKRVSFWWTMGVNQSYEAVRTAQAIINLALITGNMGREGTGANSLTGQCNAMGSRMFSNTTALYGGGEYNNKERRKVVADILGMDENMLPSKPTLDYEQIIKGINKEEIKGLWVICTNPRHSFSNNEEFKKAMKNLDFFVVQDIYEDTDSSKECDLYLPSVPAIKKEGFLINTERRLSAMVPVLEKEEDELSDYEIFLGIGEALGMGSLLDKWRTPKDAFNLLRECSKGMPCDITGVTYERLRGSKGIQWPCREGEELEADERRLFEDGKYYTPSGKAKFIFEDVTENPNATNEEFPFNLNTGRGTVGQWHTHTRTREIQAVTNIVSQKAYVDINRKDAERLDIKENDEVLIHSSNGHTSKFIARLTDNLKEKDLYAPIHYIETNLLTPSVFDPYSKEPSYKTVQVNIEKVRK

SEQ ID NO: 2717 - protein, 319 aa, Listeria monocytogenes EGD-e
MKRIAILTSGGDAPGMNAATRAVVRKAIYEGLEVYGINYGFLGLVNGDIRKLELGSVGDLLHRGGTFLYSARYPEFATEEGQLKGIEQLKKHQIDGLVVIGGDGSYHGAEALTKRGFPTIGIPGTIDNDISGTDFTIGFDTALNTVLDALDKIRDTATSHERTFIIEVMGRDAGDIALWSGLAGGAEAIIVPEESFNMDDVVDRLNKGRERGKKHSIIVVAEGVMSGNEFAKQLAEYGDYHARVTVLGHVQRGGSPTAFDRVLASRLGARSVELLLENRGGLAVGIRENRIVENDISEILKEKHTLDQKLFDLASILSI

SEQ ID NO: 2718 - protein, 306 aa, Corynebacterium glutamicum ATCC 13032
MSKVYVSNEYGGPENQELITRNTPQPGPGELGVKVHAAGVNPLDWKVRSGVAGTPRELPAPLGEEASGIVTAVGDGVEGFAVGDPVLGLVAPGVGGYAEDTLLVAESTVLKPEEISFTDAAAIPVAGASAYAGTHQVELEPGQSLLINGAGGGVGLMAAQIGRVHKFQVVGVDHEDKRELIESTGAIFVATGDAVAEQVRALLPDGVDVVFDLVGGEALRVVAPLAKNPAHVISAADAATVGELGGQVLRRTPEMVGQITGVVQYGLVDPKVDTTYPLEQAGKALAHVEQGHARGKIVLELITSQD

SEQ ID NO: 2719 - protein, 273 aa, Schizosaccharomyces pombe
MSVYQTREGLPSGWVAQWDAEYGTYFYVNESAQNPQPQWEPPVENLKLAPPPGATSVNTAVYNNNNNTSAANTNAAYNANTAANANANTATTTNAAATTSAAYNPNAPANTNAAYYPNAAATTTTNADGSDKGLFSGLTSSNGYTTGNSYSRPSYVAPVAAGLGGLALGGLASHALGNLFHHRGHNGGGFGGFGGGSGGPPPGPGGFGGFGGFGGEGHHHGGHGGFGGGPGGFEGGPGGFGGGPGGFGGGLGGFGGGPGGFGGGPGGHGGPGW

SEQ ID NO: 2720 - protein, 398 aa, Sinorhizobium meliloti 1021
MEAAKVSKPDVSTVYAVDLSQRPVPQGDAAREKAALLQLARRMHDAPGEMLPRFVELAMELTGGISAGISLLEQTEPSPVFRWHHLKGILSPFNGATTPRDFSPCGITLERSATTLTIHPERVYDWIPPGLSLPEVLLVPLYIGRTEPLGTLWIVADRIGHFHCGHGATMQELAGFIGIALKMVRSEQELQQALEQQELLTREMSHRLKNLFTIVDGMIRISARSTDNKDDLVALLSGRLHALAAAHSLVRPSFSDVQGAASNLAELLSIVTEPHEPPATGGRRRLSLRGPSVLCGEQSVNGLALVFHELATNAAKYGALCSENGRVDVLWQIDGDDLSITWSEDRGTQISIPPASKGFGSTLVEATVTHQFGGTLSYDWRPVGLSVNIVMPLSILAR

SEQ ID NO: 2721 - protein, 293 aa, Pseudomonas aeruginosa
  unsure (1)..(293): unsure at all Xaa locations
XKRKGIILAGGSGTRLHPATLAISKQLLPVYDKPXIYYPLSTLXLAGIREILIISTPQDTPRFQQLLGDGSNWGLDLQYAVQPSPDGLAQAFLIGESFIGNDLSALVLGDNLYYGHDFHELLGSASQRQTGASVFAYHVLDPERYGVVEFDQGGKAISLEEKPLEPKSNYAVTGLYFYDQQVVDIARDLKPSPRGELEITDVNRAYLERGQLSVEIXGRGYAWLDTGTHDSLLEAGQFIATLENRQGLKVACPEEIAYRQKWIDAAQLEKLAAPLAKNGYGQYLKRLLTETVY

SEQ ID NO: 2722 - protein, 539 aa, Arabidopsis thaliana
MAYASRIINHSKKLKDVSTLLRRENAATIRYYSNTNRAPLNREDIFNSRLGYPPLERISICSTSTLPVSIIFSTTRSNLSSAMGRPIFGKEFSCLMQSARGFSSGSDLPPHQEIGMPSLSPTMTEGNIARWLKKEGDKVAPGEVLCEVETDKATVEMECMEEGYLAKIVKAEGSKEIQVGEVIAITVEDEEDIGKFKDYTPSSTADAAPTKAEPTPAPPKEEKVKQPSSPPEPKASKPSTPPTGDRVFASPLARKLAEDNNVPLSDTEGTGPEGRIVKADIDEYLASSGKGATAKPSKSTDSKAPALDYVDIPHSQIRKVTASRLAFSKQTIPHYYLTVDTCVDKLMALRSQLNSFKEASGGKRISVNDLVVKAAALALRKVPQCNSSWTDDYIRQFKNVNINVAVQTENGLYVPVVKDADRKGLSTIGEEVRLLAQKAKENSLKPEDYEGGTFTVSNLGGPFGIKQFCAVVNPPQAAILAVGSAEKRVVPGNGPDQFNFASYMPVTLSCDHRVVDGAIGAEWLKAFKGYIENPKSMLL

SEQ ID NO: 2723 - protein, 396 aa, Moorella thermoacetica ATCC 39073
MQLAQRAAGISPSPTLAIDAQAKAMKAKGVKVINFSAGEPDFGTPEHIKQAAIDALAAGFTRYTPVAGIPELRQAICASLAARGVTYEPADIVVSCGAKHSLYNAMQVLLNAGDEVILSAPYWVSYYEQVKLAGGVPVVVTTGPDTGFKLTPGLLEAAITPRTRLLILNSPCNPTGAVYSREELAALAEVIVARDLIVISDEIYAALLYDGLTHTSIASLAPEVKERTILIDGVSKTYAMTGWRIGYAAAPRPVAKAMTDLQSHSTSNPTSIAQKAAVAALTGSQEAVEMMRREFEQRRNRILAGLRELPGIECNQPGGAFYVFPYIGKLFGRKFRGRVLGNSTDVATALLNEFQVAVVPGVAFGAEPYLRLSYATSMDQIEAGLERLRAFVTELE

SEQ ID NO: 2724 - protein, 316 aa, Clostridium thermocellum ATCC 27405
MLEIMFFSDKIEIVNELFKRMKRGVNILRVRKAIIPAAGLGTRFLPATKAQPKEMLPIVDKPTIQYIVEEAIKSGIEDIIIISGRSKRAIEDHFDKSYELEQELEKKGNHDLLKLVQDISNLANIHYIRQKEAKGLGHAIYCAKSFIGNEPFAVLLGDDIVDSEVPCIKQLMDVYDKYRTTVLGVQKVPEDQVSKYGIVGGEIVSDRVYKVKDLVEKPDTASAPSNIAILGRYIITPRIFDYLENAKPGKGGEIQLTDALRELMGEEEMYAYDFIGKRYDVGNKLGFLQATVEFALARDDLKEEFEAYLKEIICKL

SEQ ID NO: 2725 - protein, 432 aa, Lactobacillus johnsonii NCC 533
MSVITDIHAREVLDSRGNPTVEAEVYTELGGFGRAIVPSGASTGEHEAVELRDGDKSRFLGQGVLTAVENVNGEIAKAVIGLDVTDQRLIDQTMIDLDGTPNKGRLGANAMLAVSLASARAAADELGLPLYEYLGGPNAHVLPTPMMNVINGGKHADNNVDIQEFMIMPVGAKSLHEAVRMGAETFHTLKSLLQERGESTAVGDEGGFAPNLKNNEEPFEILVEAIQRAGYKPGQDISIAFDCAASEFYNKDTKKYVTVADGREYTAEEWTSLMEDIVDKYPVISIEDPLDENDWEGWKVFTERLGDKVQIVGDDLFVTNTNYLEKGIKMGVANSILIKLNQIGTLTETFEAIEMAKEAGYTAVVSHRSGETEDTTIADLVVATNAGQIKTGSMSRTDRIAKYNQLMRIEEALGSTAQYKGIHSFYNLHKQF

SEQ ID NO: 2726 - protein, 428 aa, Moorella thermoacetica ATCC 39073
MTTNHQYRFATLAVQAGQEPDPATGARAVPIYQTTSYVFRDADHAAALFGLREEGNIYTRIMNPTTDVFEKRMAALEGGVGALATASGQAAITLAIANIATAGQEIVASTSLYGGTFSLFNSTLPKFGIKTRFVDSAEPEDFRAAITDRTRALYVEILGNPKLDVPDLEALAAIAHEAGIPLIVDNTFATPYLCRPFEFGADIVVHSATKFIGGHGTSIGGIIVDSGKFNWDNGKFPGLVEPDPSYHGLSYVQSFGPAAYIVKARVQLLRDLGPALSPFNAFLFLQGLETLHLRMERHVQNATRIAGWLAEHPAVAWVSYPGLPGHPYYERARKYLPKGAGAILTFGIKGGKEAGKKFINSVKLFSLLANVGDAHSLVIHPASTTHQQLTPEEQLASGVTEDLVRISVGLEDVEDLIADLDQALNRSR

SEQ ID NO: 2727 - protein, 554 aa, Haemophilus influenzae R2846
MKGNTMKNINPTHTQAWKSLEAHKAELSNTTIQDLFKQEKNRFDDYSLTFNNQILVDFSKNNINQTTLSHLRQLAQECALDSAKEAMFTGEKINRTENRAVLHTALRNRTNTPVLVDGKDVMPEVNAVLAKMKDFCQRIISGEWKGYTGKAITDVVNIGIGGSDLGPYMVTEALRPYKNHLNMHFVSNVDGTHIAETLKKVNPQTTLFLVASKTFTTQETMTNAQSARDWLLKAAKNESAVAKHFAALSTNAKDVEKFGIDTNNMFEFWDWVGGRYSLWSAIGISIALSIGFENFEELLNGAHEMDKHFRSAPIEQNIPTTLALVGLWNTNFLGAQTEAILPYDQYLHRFAAYFQQGNMESNGKYVDRDGNVINNYQTGPIIWGEPGTNGQHAFYQLIHQGTTLIPCDFIAPAQTHNPLADHHNKLLSNFFAQTEALAFGKTKEEVEAEFIKAGKSLDDVKNIVPFKVFTGNKPTNSILVQKITPFILGALIAMYEHKIFVQGVIFNIFSFDQWGVELGKQLANRILPELTDSEKVASHDSSTNGLINQFKAWR

SEQ ID NO: 2728 - protein, 328 aa, Geobacter sulfurreducens PCA
MKAVLLDGFGGLDVLKVGEAERPKPAEGQVLVKVVATSVNRPDLVQREGKYPPPPGDSEILGLEVSGTIEELGPGVTGWQVGDRVMSLVGGGGYAEYAVAYASHLMRIPESMSFEEAACVCESYITAFLNVFMIGGLKDNNSVILHGGGGGVNTAGIQLCKALVPNTKIVATAHPSKIDRVKALGADLVVDFTQTPDFSEAVKEFTNKKGVDVILDHVGAKYLAPNMNSLAYAGRLVIIGVISGIKAELNLALMMVKRQQIIGSVLRSRPVKDKGEIVAEFTRTALPKFADRTIVPIIEKVFPMDQVVEAHRMMEEDKHFGKIVLKIS

SEQ ID NO: 2729 - protein, 531 aa, Glycine max
MGFQENGNGEMGLSGIPLGAKNKYKRMTSELPDDNDDVFLHQQQVEERRSSTRKYVIACAIFASLNNVLLGYDVGVMSGAVIFIKEDLKISEVQVEFLIGILSIISLFGSLGGGRTSDIIGRKWTMALAAVVFQMGGLTMTLAPSYAVLMVGRFLAGIGIGFGVMISPIYIAEISPNLNRGSLTAFPEIFINVGIMLGYVSNYAFSGLSAHISWRVMLAVGILPSVFIGFALFVIPESPRWLVMQNRIDEARSVLLKTNEDEKEVEERLAEIQQAAGFANSDKYDDKPVWRELLFPPPPLRRMLITGLGIQCFQQISGIDATVYYSPEIFQAAGIEDNSKLLAATVAVGISKTIFILVAIILIDKLGRNTAARRRQKGMTVCLFCMGATLALLGKGSFAIALSILFVCGNVAFFSVGLGPVCWVLTSEIFPLRVRAQASALGAVANRVCSGLVAMSFLSVSEAISVAGTFFAFSAISALAIAFVVTLVPETKGKSLEQIEMMFQNEYEIQGKETELGDVEQLVQNQTDLTN

SEQ ID NO: 2730 - protein, 246 aa, Oryza sativa (japonica cultivar-group)
MCMNKNLLILAEILGTYFMIFAGCGAVVVNQSTGGAVTFPGICAVWGLVVMVLVYTVSHISGAHFNPAVTVAFATCGRFRWKQVPSYVVAQVLGSTMASLTLRVVFGGGGGGARGEHLFFGTTPAGSMAQAAALEFVISFFLMFVVSGVATDNRAIGELAGLAVGATVAVNVLFAGPVTGASMNPARSLGPAMVAGRYGGVWVYVAAPVSGTVCGAWAYNLLRFTDKPLRDIANTASFLRRSSRRS

SEQ ID NO: 2731 - protein, 276 aa, Zea mays
MEWVDRTKASAAAAAAAADERAGGAEGLAGYVKVMTDEQMEVLRKQISIYATICEQLVEMHRALTEHQDTIAGELRIRFSNLYCDPQIIPGGHKITARQRWQPTPMQLQILENIFDQGNGTPSKQRIKEITAELSHHGQISETNVYNWFQNRRARSKRKQAASLPNNAESEAEVDEESLTDKKPKSDRSLQDNKAMGAHNADRISGMHHLDTDHDQIGGMMYGCNDNGLRSSGSSGQMSFYGNIMPNPRIDHFPGKVESSRSFSHLQHGEGFDMFG

SEQ ID NO: 2732 - protein, 472 aa, Glycine max
MSMASLPNSPALSFSSSLSTTANLLPCRRFTAFPRRRASSFSVQAKIREIFMPALSSTMTEGKIVSWIKSEGDMLSKGDSVVVVESDKADMDVETFYDGILAAIVVADGETAPVGAPIGLLADSPEEVAEAKAKAAKSVPSGSPAPASPSDPSPATPPPPPPPAKSVSEGPAKIVATPQAKKLAKQHKVDIATVAGTGPFGRITPADVEAAAGIAPSKRNVAPAAIPAPATPAPPSKAASGSAAPAPIPGSSVVPFTTMQSAVAKNMMESLSVPTFRVGYPVTTDALDALYEKVKPKGVTMTAILAKAAAMALVQHPVVNATCKDGKNFVYNGNINVAVAVAINGGLITPVLQDADKLDLYLLSQKWKELVEKARAKQLQPHEYNSGTFTLSNLGMFGVDRFDAILPPGQGAIMAVGASKPTVLADKDGFFSVKNKMLVNVTADHRIIYGADLAAFLQTFSKIIENPESLTL

SEQ ID NO: 2733 - protein, 301 aa, Lactobacillus johnsonii NCC 533
MKVRKAVIPAAGLGTRFLPATKAMPKEMVPIVDKPTIQFIVEEAKKSGIEDILIVTGKNKRSIEDHFDANPELEQDLEEKGKTELLHLTQSITNLGVNLYYTRQPHPAGLGDAILRARSFVGDEPFAVMLGDDLMEDKVPLTKQLIDRYDKTHASTIAVMPVPHEEVSKYGVIDPDSEIEPGLINVKAFVEKPDVDKAPSDYAIIGRYLLTPEIFDILAHQKPGRGGEIQLTDAIDTMNKTQRVFAHVFNGERHDVGNKEGYLETSIEYGLSHPQIKDDLREYIINMAQKLQKEDKNSKKK

SEQ ID NO: 2734 - protein, 253 aa, Glycine max
MASAASPTTFSLLHSATPSSSSTATSASPSPSRVQLTSSLRARPLRRLGFAAADPLLAASVAARVAAVRGGGKGARGVVSMAKKSVGDLSAADLKGKKVFVRADLNVPLDDNQNITDDTRIRAAIPTIKHLIQNGAKVILSSHLGRPKGVTPKYSLAPLVPRLSELIGIQIVKAEDSIGQDERWRHVLHMQVGREWCFLCSGGRLTTIIGGGDSVAAVEKVGVASVMSHISTGGGASLDVIGRQRASRSPCSR

SEQ ID NO: 2735 - protein, 213 aa, Xanthomonas oryzae pv. oryzae
DNTFASPMLQRPLSLGADLVVHSATKYLNGHSDMVGGIAVVGDNAELAEQMAFLQNSIGGVQGPFDSFLALRGLKTLPLRMRAHCENALALAQWLETHPAIEKVIYPGLASHPQHVLAKRQMSGFGGIVSIVLKGGFDAAKRFCEKTELFTLAESLGGVESLVNHPAVMTHASIPVARREQLGISDALVRLSVGIEDLGDLRGDLERALVNQN

SEQ ID NO: 2736 - protein, 169 aa, Oryza sativa (japonica cultivar-group)
MASMKRKCPDDETACGSGAGAAMCVTGCGFFGSEATNNMCSRCYREHSADNDAVEEAAAANSDLELVGVAETTTKKARMSAVVPVAVASSSSAAAEQPAAKAATAPNRCAACRKKVGLTGFKCRCGGNFCGGHRHADAHGCGFDYKSAGKEQIAKQNPLVVADKLATRI

SEQ ID NO: 2737 - protein, 71 aa, Oryza sativa
  unsure (1)..(71): unsure at all Xaa locations
GLLGGLVGWRFFIRDGIKFPDVIHAWKPNPXSHVQEYWRVCDFLSHHPESLHIFFFRWGGGGILTDHGRMD

SEQ ID NO: 2738 - protein, 389 aa, Nostoc punctiforme PCC 73102
MKAVCWNGANDVRVQSVPDPTILNPRDAIIKITSTAICGSDLHIYGGYIPTVQQGDIIGHEFMGEVVEVGRGVNNLKIGDRVVVPSTIGCGNCHYCQHDMWSLCDNSNPKGWIEEKLFGNITSAIYGYSHMLGGYAGAQAEYIRVPFADVGVVKVPPDLPDEMLLFISDAIPTGYMGAELCDIQPGDTVAVWGCGAVGQFAMISAYMMGAEKVIAIDRFPERLEMAKKFAKAEVINYEEVNAGEALKEMTGGRGPDACIDAVGLEAHGVGLEDFYDQTKQKLRLETDRPHVLREMMVACRKGGTLSIMGVYGGFVDKIPFGAAFNKGLTFRMGQMHGQKYMHLLLQMILDGKLDPSFVVTHQLPLEQAPHAYHIFQQKKDNCIKVVLKP

SEQ ID NO: 2739 - protein, 256 aa, Pseudomonas syringae pv. tomato str. DC3000
MNDQRKGSDAEPTTHFGYKNVPESQKAEKVAEVFHSVAAKYDLMNDLLSGGMHRLWKRFAIELSGVRTGNRVLDIAGGTGDLTRKFSNLVGPTGQVVLADINASMLKVGRDRLLDLGVSGNVEFVQADAEKLPFPDNHFDCVTIAFGLRNVTHKEDALRSMLRVLKPGGRLLVLEFSKPTNKLMSKAYDAYSFAFMPLMGKLVTNDSESYRYLAESIRMHPNQETLKSMMVDAGFDRVTYHNMTAGVVALHRGIKP

SEQ ID NO: 2740 - protein, 162 aa, Glycine max
LSLRKSRKSRWSCVLPSVNAYCEIHEGYCFVNSTFCLVKAGAVSPLIQLLEDTEREVVEAALHALSTLLQDEIWEGGVNSIAKLSGVQAIIKSLQVEDAKVQEKAIWMLERIFKVAEHRLKYGESAQVVLIDLAQKSDSRLKSTVAKVLAELELLQSQSSYF

SEQ ID NO: 2741 - protein, 145 aa, Zea mays
  unsure (1)..(145): unsure at all Xaa locations
ERNQSRINPSRESMDASAAAAGGGDGTQRTLNPYVTGNSVIAMKYKDGVIMACDTGASYGSTLRYKSVERIKEVGKHSLIGGSGEFSDFQEILRYLDELTLNDHMWDDGNSLGPKEIHAYLTRVMYNRRNKFDPLWNSXVLGGVK

SEQ ID NO: 2742 - protein, 492 aa, Bordetella bronchiseptica RB50
MRISMGKITGFMEFQRLQEAAEAPQKRLKHWREFVLHLNDEQAKQQAARCMDCGIPFCSNGCPVNNIIPDWNDLVYRQDWRRALDVLHSTNNFPEFTGRICPAPCEAACTLNINSDAVGIKSIEHAIIDKGWAEGWVTPQVPVRKTGKKVAVVGSGPAGLACSQQLARAGHSVTLFEKSDRIGGLLRYGIPDFKLEKSQIDRRIAQMEAEGVEFAPSTYIGNPDDAAADGLTVRTPQSLLADFDAVVMTGGSETPRDLPVPGRELSGVYYAMDFLRQQNKAVAGDRLSGQTLAKDKHVVVIGGGDTGSDCVGTSNRHGAASVTQFELLPQPPECEDKPMVWPYWPLKLRTSSSHDEGCERDWSVATKALAGSDGQVEKLVGVRVEWFKDEATGQMKMREVEDSEFEIPADLVLLAMGFVSPVATVLDAFGVDRDARGNVRANTDDYRTNVDKVFAAGDMRRGQSLVVWAIREGRQCARSVDEYLMGTSELPR

SEQ ID NO: 2743 - protein, 469 aa, Bordetella pertussis Tohama I
MASTMETDLLVLGGGPGGYTAAFRAADLGLSVVLVEQRPTLGGVCLNVGCIPSKALLHCAKALDEARAMSELGIEFSEPRIRLDKLRAHKEALVAKLCGGLGGLARQRKVEVVTGTGRFDGPHSLAVSDGSRVAFKQAVIAVGSRPVRLPFLPDDPRIMDSTGALELKEIPRRLLVIGGGVIGMELATVYAALGARVTVVELTDGLLPGCDRDLVKPLAQRVASRYEAVLLGTRVSAAQARDDGIHVSFDGPQAPGPQVYDQVLVAAGRRPNGAAIDAERAGARVDEGGFIRVDAQQRTNVGHIYAIGDVVGEPMLAHKAAHEGKVAAETAAGMRVANDARVIPAVAYTDPEVAWVGLTETAAQRDGIAYEKAAFPWAASGRALSLGRGEGLTKILVDPATHALLGVGMVGPQAGDLIAEAALAIEMGAEPGDIALTIHPHPTLSETLAFAAEAYEGTLTELYLTRKKS

SEQ ID NO: 2744 - protein, 207 aa, Candida albicans SC5314
MNNEYDYLFKLLLIGDSGVGKSCLLLRFADDTYTPDYISTIGVDFKIRTIELDGKTIKLQIWDTAGQERFRTITSSYYRGAHGIIIVYDVTDQESFNNVKQWLQEIDRYATGGVMKLLVGNKADLSDKKIVEYTAAKEFADALDIPFLETSALSSTNVEQAFYTMARQIKAQMTNNANAGNAANAKGKSNVNLRGESLTSNQSNSCC

SEQ ID NO: 2745 - protein, 438 aa, Geobacter sulfurreducens PCA
MTPITPIEAPLPKGVTDFLPEKADKIGYIEGKIRKVFELWGFRRIITPLLEFEDVIAAGLGDDLKAKTFRFDDRQSGKLIAVPSDITPQIARIVATRLRGYPLPHRICYSGRVLRHAELQSGRSREIFQSGVELIGLDSPEADAEMVTMAVEALKGLGFRDFKIDLGHVGFIRGIMTASGLEVAVRNRLQEAIGKKDVSAVRSILAESPLSDAAKDELAALPRLFGGREVLDEAGRVATNDTSRRALDNISQVLDLLDIHGVSDHLTIDLGEVRGLDYHTGLTFEGFVTGMGEAVCSGGRYDTLTARYGFPAPATGFTFNVLALLSALEKRPDVEASKTRDILIFNQQDDRREALEIAQQLRRRGYTTARDIIRRNFDDSLDYARRMNILHMMVVGGDQCGPDEVYLVRVADGQGQRIKKAEVFSERFSLDAGPDKES

SEQ ID NO: 2746 - protein, 584 aa, Vicia faba
MGSVEDDSSRLEEALIQDEESKLYTGDGSVDFKGRPVLKKNTGNWKACPFILGNECCERLAYYGIATNLVKPILLAKLHEGNVSAARNVTTWQGTCYLAPLIGAVLADSYWGRYWTIAIFSMIYFIGMGTLTLSASIPALKPAECLGAVCPPATPAQYAVFFIGLYLIALGTGGIKPCVSSFGADQFDDTDSRERVKKGSFFNWFYFSINIGALISSSFIVWIQENAGWGLGFGIPALFMGLAIGSFFLGTPLYRFQKPGGSPLTRMCQVVAASFRKRNLTVPEDSSLLYETPDKSSAIEGSRKLQHSDELRCLDRAAVISDDERKRGDYSNLWRLCTVTQVEELKILIRMFPVWATGIVFSAVYAQMSTMFVEQGTMMDTSVGSFKIPAASLSTFDVISVIFWVPVYDRFIVPIARKFTGKERGFSELQRMGIGLFISVLCMSAAAIVEIKRLQLAKELDLVDKAVPVPLTIFLQIPQYFLLGAAEVFTFVGQLEFFYDQSPDAMRSLCSALSLLTTSLGNYLSSFILTVVLYFTTRGGNPGWIPDNLNKGHLDYFSGLAGLSFLNMFLYIVAAKRYKSKKAS

SEQ ID NO: 2747 - protein, 428 aa, Geobacillus stearothermophilus
MAFEFKLPDIGEGIHEGEIVKWFVKPGDEVNEDDVLCEVQNDKAVVEIPSPVKGKVLEILVPEGTVATVGQTLITLDAPGYENMTFKGQEQEEAKKEEKTETVSKEEKVDAVAPNAPAAEAEAGPNRRVIAMPSVRKYAREKGVDIRLVQGTGKNGRVLKEDIDAFLAGGAKPAPAAAEEKAAPAAAKPATTEGEFPETREKMSGIRRAIAKAMVHSKHTAPHVTLMDEADVTKLVAHRKKFKAIAAEKGIKLTFLPYVVKALVSALREYPVLNTSIDDETEEIIQKHYYNIGIAADTDRGLLVPVIKHADRKPIFALAQEINELAEKARDGKLTPGEMKGASCTITNIGSAGGQWFTPVINHPEVAILGIGRIAEKPIVRDGEIVAAPMLALSLSFDHRMIDGATAQKALNHIKRLLSDPELLLMEA

SEQ ID NO: 2748 - protein, 472 aa, Klebsiella aerogenes
MSQNVYQFIDLQRVDPPKKPLKIRKIEFVEIYEPFSEGQAKAQADRCLSCGNPYCEWKCPVHNYIPNWLKLANEGRIFEAAELSHQTNTLPEVCGRVCPQDRLCEGSCTLNDEFGAVTIGNIERYINDKAFEMGWRPDLSDVKPTGKTVAIIGAGPAGLACADVLTRNGVKAVVFDRHPEIGGLLTFGIPAFKLEKEVMTRRREIFTGMGIEFKLNTEVGRDVQLDDLLKEYDAVFLGVGTYQSMRGGLDNEDAPGVYDALPFLIANTKQIMGFGETADEPYVSMEGKRVVVLGGGDTAMDCVRTSVRQNAAHVICAYRRDEENMPGSKREVKNAREEGVEFQFNVQPLGVEVNANGKVCGVKMARTEMGQPDAKGRRRAEIVPGSEHVVPADAVVMAFGFRPHSMEWLAKHSVELDSQGRIIAPEGSENAFQTSNPKIFAGGDIVRGSDLVVTAIAEGRKAADGILNYLEV

SEQ ID NO: 2749 - protein, 353 aa, Leptospira interrogans serovar lai str. 56601
MISENLGENQTEKIPLKGRTLKELSEIMITLGEKPFRAKQIYHGLYVNRYETWDQFTTFSKIFKEKLEELCSLTHLQVVKQLKSVDGTQKFTFTSESGNGKEFEAVWIPSGDGGRKTICISSQIGCTLNCKFCATAKLEFQGNLKAHEIVDQILQVEKIVGDKATNVVFMGMGEPLHNYFNVIRAASIFHDPDAFNLGAKRITISTSGVVNGIRRFIENKEPYNFAISLNHPDPKGRLQIMDIEEKFSLPELLQAAKDFTRELKRRITFEYVMIPGVNMGFENANKLVKIAKSLDCKINVIPLNTEFFGWRRPTREEIAEFIALLEPAGVPILNRRSPGKDIFGACGMLASKS

SEQ ID NO: 2750 - protein, 385 aa, Leuconostoc mesenteroides subsp. mesenteroides ATCC 8293
MAIGIDKLSFYTSEYVLDLVELAQRRGVDPNKYTIGIGQDKQSVIPNYEDVVTMGANAAAKIIDNDDRQQIDLIIFATESGIDNSKSSALYVQKLLNLSEFSRTIEIKQACYAGTFGLMQARDYVASHSGKRVLVIASDIARYGLNTPGEVTQGGGAVAMIVSESPHIATINSDSVYMSRDVADFWRPIDRTEAIVDGHLSTDIYKEMFLTLWQRYKDQSGRTIADFAGFTFHLPYTKMGKKAFDQIIDEADERTQGRLLKNLKASQKFSREVGNLYTGSVYLSLLSLLSYAQDLVAGEQLAIFSYGSGAEAELYSITLQENFFKYVPANETKNELADRKKVSVDQYEQIFNSQLLDSHENVSSDHPDADHFQFLGWQNGERQYK

SEQ ID NO: 2751 - protein, 411 aa, Triticum aestivum
  unsure (1)..(411): unsure at all Xaa locations
MPVFSLRAMASLFGHVEPAPKDPILGVTEAFLADPSPDKVNVGVGAYRDDNGKPVVLDCVREAERRIAGNLNMEYLPMGGSMHMIEESLKLAYGEDSEFIKDKRIAAVQALSGTGACRLFADFQKRFLPDSQIYIPTPTWSNHHNIWRDAQVPQRTFSYYHPESRGLDFAGLMDDIKNAPNGSFFLLHACAHNPTGVDPTEEQWGEISDXGKANRHIPFFDMLYQRFASVDPERDSKAIRKLLENGHQIGXTHEYAKNLXLHGHRHGWLSMICDDADAGKLLLRVNYCILGVQXSNPPVYGXALVGFNSLLGNASEVDFYVLGKVVGYGXRIIGTRKALREXLQELGSPSSWEHVTNQIGMFCYSGMTPEQVDRLTSEYHIYMTRNGRISMAGVTTGNVAYLANAIHDVTK

SEQ ID NO: 2752 - protein, 548 aa, Gloeobacter violaceus PCC 7421
MTSTFAPTPLTQRAAWQALAAHYEQIREIHLRALFAEDPSRGERFALEAEGFYLDYSKNRLTDETLRLLSVLAEESDLRGRIEAMFSGEKINTTEQRSVLHTALRAPRGATVIEDGENVVPEVHAVLDRMAEFADRVRGGEWRGYTGRRIRTVVNIGIGGSYLGPDMAYDALKHYSDRDLKVRFAANVDGSNFAEVIHDLEPDETLFIVCSKTFTTLETMTNAHSARQWCLAALGDEQAIAKHFVAVSTNAAEVEKFGIDTAHMFGFWDWVGGRYSMDSAIGLSTMIAVGPEHFRAMLAGFHAMDEHFRTAPFERNLPVLMALIGLWYNNFFGAQTLAVLPYDYYLGKLPAYLQQLDMESNGKHVDIDGQPVTYQTGPIIWGQPGTDGQHSFYQLIHQGTKLIPCDFIGFCQTLNPIAPHHDQLMANFFAQTEALAFGKTEAEVRAEGVADWLLPHRVFEGNRPTNTLLAERLTPEVLGKLIALYEHKVFTQGVIWNLDSFDQWGVELGKVLAGRIIPELESAEEPELAHDSSTNALIRRYRRAKRQN

SEQ ID NO: 2753 - protein, 461 aa, Thermosynechococcus elongatus BP-1
MTYDYDLFVIGAGSGGLAASKRAASYGARVAIAEGDKVGGTCVIRGCVPKKLMVYGSKFSHLFEDAVGYGWHPVKAKLNWERLIRAVDQEVNRLSQLHISYLEKAGVELLPFFARFADPHTLELVDRQGQVQGRVTAAKILIAVGGEAIKPNVPGIEHSITSREMFLLPKQPKRLAILGGGYISVEFAGIMQGLGTEVIHFLRGDRPLRGFDQDIQDGVYGGMIRHGIDVRPQCHITGLKLTKKGNIRIRYEQQGQTRETKVDTVLCAVGRAPNLQGLGLDRAGVHLRTNRQGIVAIAVDEYYRTNQEHIFAVGDCTNRVNLTPVAIAEGRAFADTQFGNLPRTLSYENIPSAVFSQPEAASVGLSEAQAKAKLGEENVKIYRAAFRPMYHSLTGRPEQVIVKLVVENNTERVLGAHMVGDNAAEVIQGIAIALKMGATKKDFDATLGIHPSTAEEFVTLR

SEQ ID NO: 2754 - protein, 159 aa, Streptococcus pyogenes M1 GAS
MPNLYDFTVKAQDGSDISLVDYKEKVVLVVNTATKCGLTPQYQALQALYDTYHDKGFEVLDFPCNQFLNQAPGDAEEINHFCSLTYHTTFPRFAKIKVNGKDADPLFTWLKEEKSGPLGKRIEWNFTKFLIDQNGQVIKRYSSKTDPKLIEEDLKALLG

SEQ ID NO: 2755 - protein, 478 aa, Pseudomonas putida KT2440
MTQKFDVVVIGAGPGGYVAAIKAAQLGLKTACIEKYTDAEGKLALGGTCLNVGCIPSKALLDSSWKYKEAKESFNVHGISTGEVKMDVAAMVGRKAGIVKNLTGGVATLFKANGVTSIQGHGKLLAGKKVEVTKADGTTEVIEAENVILASGSRPIDIPPAPVDQNVIVDSTGALEFQAVPKRLGVIGAGVIGLELGSVWARLGAEVTVLEALDTFLMAADTAVSKEAQKTLTKQGLDIKLGARVTGSKVNGNEVEVTYTNAEGEQKITFDKLIVAVGRRPVTTDLLASDSGVTIDERGYIFVDDYCATSVPGVYAIGDVVRGMMLAHKASEEGIMVVERIKGHKAQMNYDLIPSVIYTHPEIAWVGKTEQALKAEGVEVNVGTFPFAASGRAMAANDTGGFVKVIADAKTDRVLGVHVIGPSAAELVQQGAIAMEFGTSAEDLGMMVFSHPTLSEALHEAALAVNGGAIHVANRKKR

SEQ ID NO: 2756 - protein, 386 aa, Listeria monocytogenes EGD-e
MKHVFPTYKRFPIDLVNGTGTVVTDKNGKTYLDFTSGIAVCNLGHCPTNVAEAVQQQLGNIWHTSNLYECALQDSVAELIADGKERLVFFCNSGTESNEAALKLARKYTGKEKIITFEKSFHGRTFGSMSATGQAKIHQGFGELVPGFTYVPYNDIEAFRAEIDENTAAVMLEVIQAEGGVIPANAAFLLEVQLLCKKMGALLIIDEVQTGLGRTGTLYGFEQIGLDPDIFTLAKGLGNGLPIGAMVGKSDLISAFGPGSHGSTFGGNKLALAAAKEILLTMKQTGFLEEVNAKADYFRNLLEANLEVLDNVSDIRGGGFLIGIELENAAEPVITELRDKGLLILTAGTNVLRILPPLTVSYAEIDQAIYLLKSVLENQLIGSEEG

SEQ ID NO: 2757 - protein, 310 aa, Zygosaccharomyces rouxii
MVTLQNSTSTLKLNTGQTIPQVGLGTWRSKENEGYKAVIEALKAGYRHIDGAAVYGNEGEVGKAIQDSGVPRNEIFLTTKLWCTHQRNPQEALDQSLQRLGLDYVGLYLVHWPVPLRTENIKDGNLFQFAEKPDGSKDVDLEWNFIKTWELMQKLLESGKTKAIGVSNFSVNNLKDLLAAPTTKVTPAVNQVEFHPLLPQEELIQYCSEKGIVIEAYSPLGGENAPILSDPTVQEIAKANGVEAGHVVISWAVQKGLVTLPKSVTPSRIVGNLKVLTLSDSDVAKVDGLLKAKGERRTCYQDFSPFPIFQ

SEQ ID NO: 2758 - protein, 471 aa, Desulfovibrio desulfuricans G20
MFFSSLRARWGMPNGYRDVLGVGLPLVISMASSTVMQFTDRLFLSHYSVDAIAAALPAAIVNLLFLLFFTGVAGYANVFIAQYCGSAAPARVGAALWQAIHFSLMGGVLLALLWFVAPFMFSFAGHPAPVVRLEVIYFRVLTVGAVFMLLSSALSCFFSGRGLTRPVMVANIAAMIINIPLDYALIYGAWGLPELGIAGAGIATVAGWALTFFFLALATFTRRHDAMFGVLRNWRFERALFLRMMRYGLPSGVNYFFEIFAITFFVFVIGRLGRVELAATNIVFSIDSLAFLPMLGLNIAVSTMVGQAIGAGKPDAAGTAAMNTLHLALAWMLCIGVMFIIFPGVLLDMFRPQDVSVQEYVPIREAGVVLMRFVAFYCLFDALSLVFFGAVKGAGDTYFVMWAMVVGCACMVAVIVIMRLWFDAGLIALWVVLTCYAVALSLSALLRYRGGKWRSMKVVETVRRSPDAGPC

SEQ ID NO: 2759 - protein, 389 aa, Nostoc punctiforme PCC 73102
MKAVCWHGANDVRVETVPDPKILNPRDAIVKITSTAICGSDLHIYDGYIPTMQKGDILGHEFMGEVVELGSAVKNVNVGDRVVVPFTISCGSCFFCNRDLWSLCDNSNPNAWLVKKQMGHSPAGLFGYSHLFGGYAGGQAEYARVPFADVGLFKIPDGLTDEQVLFLTDIFPTGYMAAENCNIKPGDIVAVWGCGPVGQFAIKSAYMLGAERVIAFDRIPERLQMAKEYGKAEVLNYEEVNIGEALKEMTGGRGPDACIDAVGMEAHGTDFMAFYDQVKQAVRLETDRPTALRQVIVSAAKGGHVSLVGVYGGFLDKIPMGAAMNKGLTFKMGQTNVHKYLKPLLEHIQNGEIDPTFIITHTLPLEQAPHGYEIFKHKKDNCIKVVLKP

SEQ ID NO: 2760 - protein, 273 aa, Nostoc punctiforme
MTIATSTKPQINWVNTLFFIGLHIGALFAFVPGNFSWTAVGVGFLLYWVTGGLGVTLGFHRLVTHRSFQTPKWLEYLLVFFGTLSCQGGPIEWIGTHRIHHLNSDTDTDPHDSNKGFWWSHMGWLTHYCPAHADVPRFTKDIAEDPVYQFLEKYFILIQVALGVLLLLLGGWPFVIWGIFVRIVWVYHCTWLVNSATHKFGYQSYDSGDKSTNCWWVAVLVFGEGWHNNHHAFQYSARHGLEWWEIDLTWMTVQLLQAVGLATNVKLAPAKSS

SEQ ID NO: 2761 - protein, 531 aa, Neurospora crassa
MSGATPSRSADLLKPRPDETASLVRKPPSLQSSSTQVEESEVPNLPEYKLWLSELWLLTKNAIPVIFAYTLQNSLQTGSILIVGRLSPEALATAAFSYMFAMSTAWLIALGGSTALDTLASSSYTGSSNKHDLGILLQRGLAVLSALYAVMALIWTFSEPLFRVLGQEEYICVQSAMFLRRLIPGGLGYIWFECMKKFLQAQEVYRPGTYVLLITSPLNALLNYFLIHKLGLGLHGAPLATGISYWCSFFLLVAYATFVRGHECWGGLSPHRALSNIGPFIRLALLGIIHVGTEWWAFEIVALAAGQLGTIALAAQSVIMTADQIINTIPFGLGVAASSRVGNLLGARKVKEASRASHCAVVLSIVAGALILTVLMSVKDVFGRLFNDDERVIRLVADVMPFVALFQIADGLNGSCGGVLRGTGRQWVGAAVNLVSYYGGALPTGIYLAFHGWGLRGLWIGQCVALYLVGVLEWLIVGMSNWEDEVKRAISRLDDGGFGDSSAHVYAYGAIGEGQADEALGERHREGREPV

SEQ ID NO: 2762 - protein, 164 aa, Candida albicans SC5314
MSSPKVIIVSSDNEKFPVEPKIAEKSILIKNMINDLHPDGLEEDFEIPTPNVRANVLCKVLEWCEHHKNTVFQDDEDEDAKKSVPVEEWDRNFLKVDQEMLYEIILAANYLNIKPLLESGCKMVAEMIKSKSPEELRRTFNIINDFSPEEEAAIRKENEWAEDR

SEQ ID NO: 2763 - protein, 430 aa, Staphylococcus aureus
MAFEFRLPDIGEGIHEGEIVKWFVKAGDTIEEDDVLAEVQNDKSVVEIPSPVSGTVEEVMVEEGTVAVVGDVIVKIDAPDAEDMQFKGHDDDSSSKEEPAKEEAPAEQAPVATQTEEVDENRTVKAMPSVRKYAREKGVNIKAVSGSGKNGRITKEDVDAYLNGGAPTASNESADSATNEEVAETPAAPAAVSLEGDFPETTEKIPAMRRAIAKAMVNSKHTAPHVTLMDEIDVQALWDHRKKFKEIAAEQGTKLTFLPYVVKALVSALKKYPALNTSFNEEAGEIVHKHYWNIGIAADTDRGLLVPVVKHADRKSIFQISDEINELAVKARDGKLTADEMKGATCTISNIGSAGGQWFTPVINHPEVAILGIGRIAQKPIVKDGEIVAAPVLALSLSFDHRQIDGATGQNAMNHIKRLLNNPELLLMEG

SEQ ID NO: 2764 - protein, 670 aa, Penicillium janthinellum
AAAQRRQNDSSVFLAIMVAAAVESESSLTDGDAGALLLQDISEWDEVFRFDRLEAVERAAHAAAAAAFGAFVARGDWTASAAAAFQAAGKQIAFMAAFSTVAGAKGSATVRDADAFAAKFASAAALQELVGNNSPISFFIFDLLFAAILFASKAKAANQAAFAAAAELAAESLFVRLPSLHQVSFFALAGFAAVAAHRHMNGYGSHTFKLVAKDGSVYCSKFWYKADQGQAAEVWKDAEEVAAEDVDYFRDLNFQAEAAGRYPLWELASQVMTFSDFEIDPFNENIPTKVVPRESVPLIVDAELLLNRNPLNMFAEVEQVFMDVAAASKGADEVEDPLIQRQFAYIDTHLSELTASYGIPVCRPYATVLNDQEDGARYDDVQDVLVIAPNAFSASAVEVQIPAAAAFNLAAARVAAAGDVRVNAVVEADQRKQSRQFWASDVNAQKKRLVDAFRMEVASAVSASIQVDVTVEFSFVAAAAAARIAAAVGSAAAGALANRRQIKVIASLAVLAKADAKVRQKNALESSSQAVAVDAKAAAQDIVDSSDAANVVTVAREFAVLPQTAAADAAEFVAAASAKAFSSFPAMEVISVAAAAGAVAEPARASLDLNMAMFFSRIVASRGAAANAIAALVKASRDGVFVAAVLAKAAANNRAAEAIFKFEVRQAVDA

SEQ ID NO: 2765 - protein, 264 aa, Oryza sativa
MPQGDHIELHQKRHGRRLDYEERKRKRAAREVHKRSRDARQLLGAKGKRFAKKRYAEKAQMKKTLKMHDESTSRQKVDDVQEGALPPYLLDRDQTQRAKVLSNTIKQKRMEKAGKWEVPLPKVRPVAEEEMFKVLRTGKRKTKQWKRMVTKATFVGPGFTRKPPKYERFIRPTGLRFTKAHVTHPELKCTFNLDIISVKKNPNGQMYSTLGVLTRGTIIETLSFQVNVSELGLVTPAGKVVWGKYAQVTNNPENDGCINAVLLV

SEQ ID NO: 2766 - protein, 331 aa, Crocosphaera watsonii WH 8501
MIALNTNKITPFFQKIKTSLSKQQITILQINLGRRCNLACTHCHVEASPKRTEELSSKICQQLIQLINLFPQLETVDLTGGAPEMNYGFQPIVEAARKAKKEVIVRSNLTIFFEEGFKHLPEYFAKNELRVVASLPCYLEDNVDRQRGKGVYDASIRAIEKLNQLGYGHDPNLVLDLVYNPPIPSNKKFSLTPEQIKLEKDYKNFLKDNFNICFNQLFTITNLPIGRVKNYLQNKELYVPYLEFLESHYNEQTLDHVMCRNQLSIDYLGNIYDCDFNQMENIPATLPNGEALTIENLLKIGNLDVINDIKTADYCYGCTAGSGSSCGGSLI

SEQ ID NO: 2767 - protein, 176 aa, Gossypium barbadense
LFSFILILTHFLLKSSIRIQVLGWICVAISVSVFAAPLNIMARVIRTESVEFMPFTLSFFLTLSAVMWFAYGLFIKDLCVALPNVLGFILGMLQMLLYAIYRHSEKVNIEEKKLPAEQMKSINVVLTTLGASEVHPVVLDIHTDDTKEEDNKNNEPTGEPDKQTDVKMEDANESPV

SEQ ID NO: 2768 - protein, 387 aa, GIBBERELLA ZEAE PH-1
MPRLPFPAFKSLVIQPLRITPTAINRSYYSTMMRAARYYGREDIRVEQVPQPSVKAGQVKVAPAFVGICGTDLHEYLGGPNFCPTTPHPITKESIPVTLGHEFSGIITEVGPDVEGFEVGQPCAIQPTLFCGHCAACHNHAENVCHSGGFIGLSGSGGGLSESVCVNATHVHPLPQDLPLEIGALVEPLSVSWHAMTAAPDINPDSRVVILGGGPIGLAMILCLKAKGVDEIIVSEVATSRQKFARELGATWVVNPIEENLNEIVLALTEGKGADVVFDCAGVPMSIKSACEVVRPKGTVVNLAIWEKEIPFNPNWITMKESSYKSVLGYTHKDFQAVIANLASGAIKPSQMITRKIKLENIVEDGIKALIHDKNNQVKVLVDMSDR

SEQ ID NO: 2769 - protein, 659 aa, Arabidopsis thaliana
MAAAVLNPGFFLLILLLSFSISPSLQYVSESEPLVRFKNSVKITKGDLNSWREGTDPCSGKWFGIYCQKGLTVSGIHVTRLGLSGTITVDDLKDLPNLKTIRLDNNLLSGPLPHFFKLRGLKSLMLSNNSFSGEIRDDFFKDMSKLKRLFLDHNKFEGSIPSSITQLPQLEELHMQSNNLTGEIPPEFGSMKNLKVLDLSTNSLDGIVPQSIADKKNLAVNLTENEYLCGPVVDVGCENIELNDPQEGQPPSKPSSSVPETSNKAAINAIMVSISLLLLFFIIVGVIKRRNKKKNPDFRMLANNRENDVVEVRISESSSTTAKRSTDSSRKRGGHSDDGSTKKGVSNIGKGGNGGGGGALGGGMGDIIMVNTDKGSFGLPDLMKAAAEVLGNGSLRSAYKAVMTTGLSVVVKRIRDMNQLAREPFDVEMRRFGKLRHPNILTPLAYHYRREEKLVVSEYMPKSSLLYVLHGDRGIYHSELTWATRLKIIQGVAHGMKFLHEEFASYDLPHGNLKSSNVLLSETYEPLISDYAFLPLLQPSNASQALFAFKTPEFAQTQQVSHKSDVYCLGIIILEILTGKFPSQYLNNGKGGTDIVQWVQSSVAEQKEEELIDPEIVNNTESMRQMVELLRVGAACIASNPDERLDMREAVRRIEQVKT

SEQ ID NO: 2770 - protein, 511 aa, Bifidobacterium longum NCC2705
MGDPRGFLKVRTRRELAERPVEERIKDWFDVHAETGLQPWTQAQAARCMDCGTPFCMTGCPLGNLIPEWNDLVRQGKWEDAYNRLSMTNNFPEVTGRICPALCEQACVLGIHQPPTMIKLDEQTIIDQAWDLDYVKPLPPQRLTDQTVAVVGSGPAGLAAAQQLTRAGHTVVVYEKDDAIGGLMRYGIPNFKLEKGLLDRRVKQMEAEGTRFRTNVEIGKDITWDDLRDRYDAVVVAIGSRVPRDMKIPGRELDGIHFALDFLPDATRRIFGVKPVHDITAKDKHVIVIGGGDTGSDCLGTSIRQGAKDVTVLQIMPKEPSSRPDNSPWPTFARTYQKTSSMEEGGEYIYSTDSVNFEGTEEEKAKVTIDNSTTAEGFVADERGHVTGLKVVSVAPGENGPFTRQPGTERVLPADLVLISVGFLHPDTETILDQLPVELDKRGNIARNDKFATSQDGVFVCGDAGRGQSLVVWAIAEGRSCAAAVDEYLSKEKSELPAPIKASQRPMMLPR

SEQ ID NO: 2771 - protein, 389 aa, Bifidobacterium longum NCC2705
MTTQHPDTPETGITPGGTSGAFRDVLSKDHARRGKPPLHFVDMTPEQRVEKAAELGLPKFRVKQLANHYFGHFDVNAAEFTDFPAAKRSEAAAAFFPQLITEVTRQVADEGTTIKTLWKLFDGSLIESVLMRYPTRTTLCISSQVGCGMDCPFCATGKLGLTRNMSTGEIIEQVRVAAKMMRDGEVAGGEGRLSNIVFMGMGEPMGNYNSVLSAVRQISAMPPEGFGISARNITVSTVGVVPGIKKLTAEGIPVRLAVSLHAPSDELRDELVPMNKRFNTKQVLDAAHDYWLASKRRVSIEYALMRGINDQAEHAQLLAKRLNHYGDNWAHVNPIPLNPIEGSKWTASKPEDEQRFLEILHRAGITATLRDTRGQDIDGACGQLAAKER

SEQ ID NO: 2772 - protein, 407 aa, Pseudomonas putida KT2440
MAIEIKAPTFPESVADGTVATWHKKPGEAVKRDELIVDIETDKVVLEVLATADGVLGDIVKGEGDTVLSDELLGSIVEGGAAAAPAAAAAPAAAPAAAAADAGEDDPIAAPAARKLAEENGIDLATVAGTGKGGRVTKEDVVAAVAKKKSAPAAAPAAKPAAAAAAPVVVAAGDRTEKRVPMTRLRAKIAERLVEAQSNMAMLTTFNEVDMTEVMALRSKYKDLFEKTHNGVRLGFMSFFVKAATEALKRFPAVNASIDGNDIVYHGFADVGVAVSSDRGLVVPVLRNAESMSLAEIENGIATFGKKARDGKLSIEEMTGGTFTITNGGTFGSMMSTPIVNPPQAAILGMHNIIQRPMAINGQVVIRPMMYLALSYDHRLIDGKEAVTFLVTIKNLLEDPSRLLLDI

SEQ ID NO: 2773 - protein, 311 aa, Glycine max
  unsure (1)..(311): unsure at all Xaa locations
MAEKHNLKNPAVKRILQELKEMQSNPSDDYLSLPLEENIFEWQFAIRGPRDTEFEGGIYHGRIQLPSEYPFKPPSFMLLTPSGRFETQTKICLSISNHHPEHWQPSWSVRTALVALIAFMPTNPNGALGSLNYKKEDRRALAIKSREAPPKFGTPERQRLIDEIHEYMLSKSSPVPQLAPSQVSEETFQTEEAEAEAQVNXIILELYLRXVEIPDQAGDRVVEEQELPVNVNSNPAGVEASMDNSSSGSSNQLLQKSDARVQNLKPETRIQKSDDRLFTLAAIGLTIAIVVLLLKKFIKSTEYGAVFMDES

SEQ ID NO: 2774 - protein, 430 aa, Bacillus subtilis subsp. subtilis str. 168
MPYIVDVYAREVLDSRGNPTVEVEVYTETGAFGRALVPSGASTGEYEAVELRDGDKDRYLGKGVLTAVNNVNEIIAPELLGFDVTEQNAIDQLLIELDGTENKGKLGANAILGVSMACARAAADFLQIPLYQYLGGFNSKTLPVPMMNIVNGGEHADNNVDIQEFMIMPVGAPNFREALRMGAQIFHSLKSVLSAKGLNTAVGDEGGFAPNLGSNEEALQTIVEAIEKAGFKPGEEVKLAMDAASSEFYNKEDGKYHLSGEGVVKTSAEMVDWYEELVSKYPIISIEDGLDENDWEGHKLLTERLGKKVQLVGDDLFVTNTKKLSEGIKNGVGNSILIKVNQIGTLTETFDAIEMAKRAGYTAVISHRSGETEDSTIADIAVATNAGQIKTGAPSRTDRVAKYNQLLRIEDQLAETAQYHGINSFYNLNK

SEQ ID NO: 2775 - protein, 381 aa, Candida maltosa
MSESTVGKPITCKAAVAWEAAKPLSIEDVTVAPPKRHEVRIKLYDTGVCHTDAYTLSGVDPEGAFPVILGHEGAGIVESIGEGVTNVKVGDHVIALYTPECGECKFCKSGKTNLCGKIRATQGKGVMPDGTSRFTCKGKEILHFMGCSTFSQYTVVADISVVAINPKAEFDKACLLGCGITTGYGAATITANVQKGDNVAVFGGGIVGLSVIQGCAERGAAQIILVDISDKKEEWGQKLGATAFVNPTKLPEGTTIVDKLIEMTDGGCDFTFDCTGNVGVMRNALEACHKGWGTSVIIGVAAAGKEISTRPFQLVTGRTWKGAAFGGVKGRSQLPGIVNNYLDGKLKVEEFITHREPLAAINKAFEEMHAGDCIRAVVDLS

SEQ ID NO: 2776 - protein, 511 aa, Bacillus subtilis subsp. subtilis str. 168
MSKKPAALIILDGFGLRNETVGNAVALAKKPNFDRYWNQYPHQTLTASGEAVGLPEGQMGNSEVGHLNIGAGRIVYQSLTRVNVAIREGEFERNQTFLDAISNAKENNKALHLFGLLSDGGVHSHINHLFALLKLAKKEGLTKVYIHGFLDGRDVGPQTAKTYINQLNDQIKEIGVGEIASISGRYYSMDRDKRWDRVEKAYRAMAYGEGPSYRSALDVVDDSYANGIYDEFVIPSVITKENGEPVAKIQDGDSVIFYNFRPDRAIQISNTFTNKDFRDFDRGENYPKNLYFVCLTHFSETVDGYVAFKPINLDNTVGEVLSQHGLKQLRIAETEKYPHVTFFMSGGREAEFPGEERILINSPKVATYDLKPEMSAYEVKDALVKEIEADKHDAIILNFANPDMVGHSGMVEPTIKAIEAVDECLGEVVDAILAKGGHAIITADHGNADILITESGEPHTAHTTNPVPVIVTKEGITLREGGILGDLAPTLLDLLGVEKPKEMTGTSLIQK

SEQ ID NO: 2777 - protein, 197 aa, Castanea sativa
DIEYHHNMLVSHQKVNPKREVIVGWYSTGLGVTGGSALIHEFYSREVPNPIHLTVDTGFNNGEGTIKAYVSANLSLGDRQLAAQFQEVPLDLRMVEAERVGFDILKTTMVDKLPNDLEGMEASMERLLALIDDVYKYVDNVVEGHVAPDNSIGRFISETVSSLPKLSPPAFDKLVNDSLQDNLLLLYLSSITRTHST

SEQ ID NO: 2778 - protein, 387 aa, Lactobacillus johnsonii NCC 533
MKVGIDQIGYFTPNKYVDMVDLAHARNQDPNKFLIGIGQKKMSVADPTQDAVSMGINATLRYIDKIDKSKVGLLIFGTESSVDQSKSGSLFVKSALGLDPTVRAFEVKEACFGLTAGLMIAQDFVRLHPDQTAIVIGSDIARYGVNTAGEVTQGAGSVSLLISSNPRILELNEGHSAYSEDINDFWRPNYSKTAKVDGKYSTQVYLDFFKHTFSAYKEQKNLETKDFAAIVYHLPFTKMGLKANRLAVEGTDEETNARLMDSFTAAKELNANVGNIYTGSLYLSLLSLLENGRLKAGDLVGLFSYGSGAMAEFYSANVVEGYEKQLDKVGDKALLDNRSKLSVAEYEEIFSAGLEDPENNVELISDEETGRYYFAGIRNDIRQYQVK

SEQ ID NO: 2779 - protein, 394 aa, Bacillus subtilis subsp. subtilis str. 168
MNKKTLKDIDVKGKVVFCRVDFNVPMKDGEVTDDTRIRAALPTIKHLADQGAKVLLASHLGRPKGEVVEELRLTPVAARLGELLGKEVKKADEAYGDAVKAQISEMKDGDVLVLENVRFYPGEEKNDPELAKAFAELADVYVNDAFGAAHRAHASTAGIAEHLPAVAGFLMEKELDVLGKAVSNPDRPFTAIIGGAKVKDKIGVIESLLDKVDNLIIGGGLAYTFVKALGYEVGKSLLEEDKIELAKSFMDRAKEKGVNFYMPEDVLVADDFSNDANVKIVPISEIPSDLEAIDIGTKTRETYADVIKNSKLVVWNGPMGVFEIDLFAQGTKAVAEALAEAKDTYSVIGGGDSAAAVEKFGLADKMSHISTGGGASLEFMEGKELPGVAALNDK

SEQ ID NO: 2780 - protein, 392 aa, Geobacter sulfurreducens PCA
MPYDFKLPDLGEGITEAELRRWLVKEGDTVAEHQPVVEVETDKAVVEVPSPRAGRVITRARLEGETVMVGETLLTIAEEEATPPVRKPSVGIVGELPEAEEAVGTQQPAILATPLVRKLARERGIDLATVRGSGPRGSITPEDVAGAGAPARPDAGEFGPAERIPLRGVRRSIARNVMTSQRNTAFVTGMEEADITELWHLREREQQAVEQRGTHLTFLPFFIKAVQHALREHPYLNAAIDDVAGEIILKKHYHFGIAVETPDGLMVPVIRNVDAKSIIELASELQELGRKARERTITLDEMRGSTFTLTNFGHFGGVFATPVINWPDVAILGFGRIADRPWVHAGQIVVRTILPLSLTFDHRVTDGADAAQFLSKVVRYLEDPALLFIESI

SEQ ID NO: 2781 - protein, 432 aa, Oryza sativa (japonica cultivar-group)
MYGVGGGGGGFNAPYTASARRRNHEDDDDEEEEESGEGRVLEAWERAYADDRSWEALQEDESGLLRPIDTKTLVHAQYRRRLLLRSAASAAARIQKGLIRYLYIVIDLSRAASEMDYRPSRMAVVAKYAEVFIREFFDQNPLSHVGIVTMKDGISHRLTEIGGSPESQIKALMGKLECSGEPSLQNALELVHGYLDQVPSYGHKEVLFLYSALNTCDPGDIMETIAKCKKSKIRCSVIGLAAEIFICKYLCEETGGSYTVALDESHFKELLLEHAPPPPAIAEYAAANLIKMGFPQRGAEDLISICSCHKKIKSGAEGYICPRCKVNVCELPTECRTCGLTLVSSPHLARSYHHLFPVQPFDEVSSVHPNRLGQKGGQKCYGCQQSFINPDSQSSLHVRCPKCNQHFCLDCDIYIHESLHNCPGCESQRSSS

SEQ ID NO: 2782 - protein, 401 aa, Glycine max
MEGKLSRAAKKITSSSIQELSQLAQRCNAINLAEGFPDFPSPPHLKNAAVSAINSDFNQYRHVQGVCDLLAKMVKQMHGLDIDPVTDVAICCGQSEAFAAAIFATIDPGDEVILFDPSYETYEGCVAMAGGVPIHVPLDPPQWTLDPSKLLRSFTEKTKAIVLNSPHNPTGKVFTKEELEIIAGECCSRNCLAITDEVYEHITYDNLKHISLASFPGMLERTVITSSLSKSFSVTGWRVGWAIAPAFLASAIRNIHGRVTDSAPAPFQEAALTALRSPPEYFESLRRDYQSKRDYIIKLLDGVGFKIVFIPQGSFFLFAELPDNWLLSDVEFVKKLIIEAGVVAVPGQGFFHTNLSSNEVSSLNYQKRYVRFAFCKSDTTLTTVAERLGKLLDAAGHLALH

SEQ ID NO: 2783 - protein, 230 aa, Ferroplasma acidarmanus
MVNTDEAVIARFEYDSYKFEILVDPDAASRIRAGKIDIENDLALPEIFKDARKGERTNEEILKRVFKTTDIGQIAIEIVKRGQIQLTTEQRKEMLELKRKQVINEIVREAINPQTNTPIPVTRIEAAMEEAKVRIDPFKSVDEQVQAVLKAIRPLIPIRMEKARMAIRLTGDAYGRLYGDISRMGTILKEEWSNAGDYICVIEIPAGMQGDLIDLVNRKTSGDADVKLLK

SEQ ID NO: 2784 - protein, 171 aa, Candida albicans SC5314
MGNELLSTARIYTFKIPDAYNNVIDFDQFKNKVILIVNVASLCGFTPQYKELQLLYEKYHERGLEILGFPCNQFGNQEPLQEEEIVESCRRNFGVSFPIMKKTKVNIDCDGHESELYKYLKSEKPGEVGFKGVRWNFEKFIVNRKGEVVARFNSLITPLQLEGFIEQLLSE

SEQ ID NO: 2785 - protein, 855 aa, Rhizobium leguminosarum
MSGTHEPVDLTNCDREPIHQLGSVQPFGFLLAVSSDWIVIRASANLAEFLGVTEANALGRPVISLISPEALHAIRNKLTTLRGSDVVERIFGIALTPDQNSFDLAVHLNEGQVIIEGERCQEDRHDAASLSMRSMMSRLDHTETLEAFFREGARQARALTGFDRVMVYRFDESGSGEVVAEAARAGIGSFLGLHYPASDIPVQARALYLRNLFRIIADVDAVPVPILPPLDEHGQPLDLSMSVLRSVSPIHIEYLKNMGVGASLSISIVVDGKLWGLFACHHYGPRLPSAQSRSTAELFGQMFASRLESRERRLALDYETKARRIADRLLTSVADNASLLDDPAWLIEALADAIPADGIGVWINGRLALAGIGPDERSFAALVRHLNRNAAGRIYAVDRLAETYPDLEVDDAVAGMLAIPISRSPRDYVVLFRQELVRTVRWGGDPHKPVEYGPNGPRLTPRKSFEAWSELVRGRSLPFTEAERRVAETIRVTLIEVVLRLTDEVSMARQTANERQELLIAELNHRVRNILSLITGIIRQSQATSVSLGDYIRQLEGRIQSLARAHDQITRDHWAPASLRQLLLAETAAYLGKNAQRIQMGGEDVLLEPQAFSTAALVFHELMTNSAKYGSLSGTGSGTVQLRWHRDDEGNLRIGWREKDGPPVVEPKRHGFGSTIIRRSIPYDLGGKAEVRYVEDGLEADFSIPARHVVGPTSERSNPLPVGATGRKTIPDDQPLSGLNVLLVENNLIIAMDGEDILRRLGADVATAPSVTEAMEILAGQSFDLALLDVNLGDETSFGIADRLAADGVPFVFATGYGEGIAQANSHSDAPVLQKPYTMEGVTDILARVPLPRRE

SEQ ID NO: 2786 - protein, 546 aa, Arabidopsis thaliana
MASRIINHSKKLKHVSALLRRDHAVAVRCFSNSTHPSLVGREDIFKARLNYSSVERISKCGTGNVTMLSGISTTSTKLSSPMAGPKLFKEFIRYLPDAISERIFIQFRYLVLYYLPPHQEIGMPSLSPTMTEGNIARWLKKEGDKVAPGEVLCEVETDKATVEMECMEEGFLAKIVKEEGAKEIQVGEVIAITVEDEDDIQKFKDYTPSSDTGPAAPEAKPAPSLPKEEKVEKPASAPEAKISKPSSAPSEDRIFASPLARKLAEDNNVPLSSIKGTGPEGRIVKADVEDFLASGSKETTAKPSKQVDSKVPALDYVDIPHTQIRKVTASRLAFSKQTIPHYYLTVDTCVDKMMGLRSQLNSFQEASGGKRISVNDLVIKAAALALRKVPQCNSSWTDEYIRQFKNVNINVAVQTENGLYVPVVKDADKKGLSTIGEEVRFLAQKAKENSLKPEDYEGGTFTVSNLGGPFGIKQFCAVINPPQAAILAIGSAEKRVVPGTGPDQYNVASYMSVTLSCDHRVIDGAIGAEWLKAFKGYIETPESMLL

SEQ ID NO: 2787 - protein, 405 aa, Thermoplasma acidophilum
MAYIQVKDDGTLQVPDRVTIGYIEGDGIGPDISKTTINVLNAALEIAYGGKRSIEWKKILAGDEAYDKTGDRLPQSSLDELKKCVVALKGPLTTPIGEGFRSLNVTLRQYLDLYANIRPVRYFPGVPSPVVHPEYMNMVVFRENTEDLYAGIEWRYDSDGPKKVREFLASTFNINLTADTGIGIKPISKFKSTRLVRKAIQYAIANKRKSVTLVHKGNIMKYTEGAFKEWGYEVAKTEFGNYTVTETEYLQDPEKYSNKIVIKDRITDNMFQQVLTRTQEYDVIATPNLNGDYLSDALAAQVGGIGLAPGANIGDHYAVFEAVHGTAPKYAGMDVANPTSLILSGEMMLQHIGWNEAANILDEAIMQTYKDQKLTQDIARLLNVKALKCSEFGEEIINRMKKPVH

SEQ ID NO: 2788 - protein, 546 aa, Methylococcus capsulatus str. Bath
MLKKHPTFPGISGPVVTVVMDGFGYSPKTTGNAIAQAYTPTLDRLLATCPHTLLKAHGKAVGMPSDDDMGNSEVGHNALGSGQIYHQGAALVAEAIASGALFEGTAWREIMDNARQHGSTLHFIGLLSDGNVHSHIDHLKAMIVRAKAEGQRRVRIHILLDGRDVPETSALEYVGPFEAFLAELRDETFDARIASGGGRMNITMDRYEADWGMVERGWHTHVLGEARHFESATQAIETLRAEHTGIIDQDLPPFVVAHDGEPVGQIFDKDSVIFFNFRGDRAIEISRAFEEEEFAPFDRVRHPGVTYAGMLQYDGDLGIPRRYLVAPPAIHGTVGEYLAAEGITQLAISETQKYGHVTYFWNGNRSGKFNESLETYVEIPSDRVPFEQRPWMKSAEITDELIRQIKTGRHRTVRVNYANGDMVGHTGHYQATIIAVEAVDLALSRLLPVIDALGGVALITADHGNADEMYELDKKTGEPQRTPSGAPKAKTSHTLNSVPFIYYDRLNRAVIQNPGDAGLSAVAATTVNLLGYEAPDLWDRGLLAFG

SEQ ID NO: 2789 - protein, 397 aa, Streptomyces coelicolor A3(2)
MLGIVLAGGEGKRLMPLTAARAKPAVTFGGTYRLVDFVLSNLVNGDILRICVLTQYKSHSLDRHITTTWRMSSLLGNYVTPVPAQQRLGPRWFLGSADAILQSLNLVHDEQPEYVAVFGADHVYRMDPRQMLAQHIESGAGVTVAGIRVPRAESPSLVITPGSDGQTVTGFLEKPPNPPGLGHDPGCVFPSMGNYVFTTKALVEALHRDAEDPDSVHDMGGSILPQLTDRGEAALYDFSANHVPGETTRDQGYWRDVGTLDAYYDAYMDLIAERPAFNLYNRDWPVYTHSTQLSPARFNAGGIASESIISAGCLIRGQVTRSVLSPGVVVDPGAVVQGSVLHNVHIGRGAVVRGAVLDKNVQVPPGATIGVNPQRDGELYTVSKGGVIALGKGQRVP

SEQ ID NO: 2790 - protein, 184 aa, Candida albicans SC5314
MSEDKLQKLQDSGLVDWAVFSEIVTMDEDEEGFSKSLVEVFVSQVEETFEEIDKYLKEKNLEKLSSSGHFLKGSAAALGLTKISNQCERIQNYGHKINFDNFQLEDIKTKGDSAVSAENVAVNDGETNPENGSNGNETSNNKTNTSNIPDESSDDFWIALIEDALAKARDGFDQSRRALDEYYE

SEQ ID NO: 2791 - protein, 534 aa, Candida albicans SC5314
MSAEEVIQYISRRKLFTENNEYNESYLLLFTIASSMIWIMIPGLAFLYSGLARRKSALSMIWIVIMSSFVGIFQWYFWGYSLAFSDTSKNSFIGDLHFFGFKNLLGASDDKTTYPDIAYSLFQLQFLLVTLAIIAGGCIAERGRFLPALVFMFCWATVVYCPVVYWIWGGGWASSYRSGALDYAGGGPVEILSGMSAFVYSAFLGRRNETLMINYRPHNISTIFLGTSLLYVGWLFFNGFSCGNPSLKVAYSMMNTHLCGAFGAISWCLLDFRLENKWSMVAVCSGCISGLVAATPSSGMIPLWASVILGITAGIVCNLSTKIKYLLHVDDSLDVWAEHGMAGVVGLIFNALFGSATVIGYDGVTDHQGGWIDHNWKQLYIQIVYILATMAYSGVVTAILCFVINKIPGLHLRIDYNGEEAGVDEDQIGEFAYDYVEVRRDFLDWGIPTVNPTYQNSINDQQQQQQPEVPEITSQQKRGGGLSGIEEAEEKQVQGIPIKRQTQIIDGTTTQSNSDTTSNTSIQEKHDPVEYRPS

SEQ ID NO: 2792 - protein, 470 aa, Pirellula sp. 1
MPQITSRIGRRLGETRWMLRIWALNRNAIVFGNSSSPGSVIVAELAHHNLDIKRVAILFAGGPAPAANAVISTAAFSFLEEGAQVFGIKHGYSRLAEYTAAGPLQEGTDYIRFTHDSLTHARSSRGIMIGTARTNPGKHVSSPEHLKDPELVAPLRRVYEGLCSLEVDALISIGGDDTLKTANKLKMFQDNLPGDARRFPVVHLPKTIDNDYSGIDFTFGFFTAVETLAEEIRNLNYDAAAGRAYFLCEAMGRSAGWLAYGAAIAGEASMVLSVEDITGALADEEVVNQETGETRKIMAMDRVIDRMVDMMLAREREGRQYGTIVIAEGMAEYLPAKYLEGVTRDDHGHINISLVNLSAVMSRLLAARYNERTGRTRKVNGLQMGYESRCAPPHAYDVMLGSQLGVGAYRALVEEKLNGVMVSVSGQFDLHFVPFEELVDPQTLVTKVRFIEQNSDFHRLARFLETCVDN

SEQ ID NO: 2793 - protein, 96 aa, Glycine max
QLYLSCLNLNSQIHYVAKWKGITFMTSRQGMGVGGGTPYGFDVGQSERGTVLKGLDLGVQGMRVGGQRLLIDPPELAYGIKGVQEIPPSSTTNLEI

SEQ ID NO: 2794 - protein, 375 aa, Saccharomyces cerevisiae [sequence omitted]

SEQ ID NO: 2795 - protein, 498 aa, Mycobacterium leprae
SSWPISDGQAGPRRAAVSSFGLGGTNAHVVIEQGPELTPVTECSSNTAVSTLVVTGKTASRVAAMAGMLADWVEGPGAEVALADVAHTLNHHRSRHAKFGTVVARDRIQAVAGLRALAAGKQAPGVVGQQDGTPGSGTVFVYSGRGSQWAGMGRQLLADEPAFTAAVAELEPVFVVHAGFSLHDVLANGKELVGIEQIQLGLIGMQLTLTELWRSYGVQPDLVIGHSLGEVAAAVVAGALTAAEGLRVTATRSRLMAPLSGQGGMALLELDAVETEALIVDYSQVTLAIYNSPRQTVIAGPTEQIDELIDRVRAQNRFASRVNIEVAPHNPAMDALQPQMRSELADVAPRTPTIPILSTTYADLGSCPVFDAQHWATNMRNPVHFQQAIMTAGTDHRTFIEISAHPLLTQAITDTLHGTRCISIGTLQRDADDTVTFHTNLNNVHTVHPPHTPHPAEPHVTIPSTPWQHTRHWITTPLASTTALQHLDRNRVTTHATG

SEQ ID NO: 2796 - protein, 323 aa, GIBBERELLA ZEAE PH-1
MSSALDQLKATGTTVVSDSGDFASIGKYKPQDATTNPSLILAASKKEEYAKLIDVAIDYAKQKGGSVDQQVDDALDRLLVEFGKEILKIIPGKVSTEVDARYSFDTEASVNKALHLIELYGEQGISKDRILIKIAATWEGIKAAEILQRDHGINTNLTLMFSLVQAIGAAEAGAYLISPFVGRILDWFKASTKKEYTKEEDPGVLSVKQIFNYYKKFGYNTIVMGASFRNTGEITELAGCDYLTISPNLLEDLLNSSDSVPKKLDASQASSLDIEKKSYIKDEALFRFDFNEDQMAVEKLREGISKFAADAVTLKGILKEKLS

SEQ ID NO: 2797 - protein, 499 aa, Mycobacterium leprae
KHMEWPDTGHLRRAAVSSFGFGGTNAHVVIEQGPELTPVTECSSNTAVSTLVVTGKTASRVAAMAGMLADWVEGPGAEVALADVAHTLNHHRSRHAKFGTVVARDRIQAVAGLRALAAGKQAPGVVGQQDGTPGSGTVFVYSGRGSQWAGMGRQLLADEPAFTAAVAELEPVFVVHAGFSLHDVLANGKELVGIEQIQLGLIGMQLTLTELWRSYGVQPDLVIGHSLGEVAAAVVAGALTAAEGLRVTATRSRLMAPLSGQGGMALLELDAVETEALIVDYSQVTLAIYNSPRQTVIAGPTEQIDELIDRVRAQNRFASRVNIEVAPHNPAMDALQPQMRSELADVAPRTPTIPILSTTYADLGSCPVFDAQHWATNMRNPVHFQQAIMTAGTDHRTFIEISAHPLLTQAITDTLHGTRCISIGTLQRDADDTVTFHTNLNNVHTVHPPHTPHPAEPHVTIPSTPWQHTRHWIPRKRSVNSIGLAPQVGTLLGQHTAVS

SEQ ID NO: 2798 - protein, 381 aa, Arabidopsis thaliana
MGKKKKRATEKVWCYYCDREFDDEKILVQHQKAKHFKCHVCHKKLSTASGMVIHVLQVHKENVTKVPNAKDGRDSTDIEIYGMQGIPPHVLTAHYGEEEDEPPAKVAKVEIPSAPLGGVVPRPYGMVYPPQQVPGAVPARPMYYPGPPMRHPAPVWQMPPPRPQQWYPQNPALSVPPAAHLGYRPQPLFPVQNMGMTPTPTSAPAIQPSPVTGVTPPGIPTSSPAMPVPQPLFPVVNNSIPSQAPPFSAPLPVGGAQQPSHADALGSADAYPPNNSIPGSIPSGTNAHSYASGPNTSGPSIGPPPVIANKAPSNQPNEVYLVWDDEAMSMEERRMSLPKYKVHDETSQLAIVGSEKHSMNSINAAIDRRISESRLAGRMAF

SEQ ID NO: 2799 - protein, 373 aa, Thermosynechococcus elongatus BP-1
MGSWPSWDCSASSCNGWPNPWGSAMKAAVLYGKEDVRIETVPDPTPGPGEVVIRVRAATTCGTDLKVWRRGGHARMLTPPILFGHEAAGEIVALGAGVTGWQVGDRVVANNSAPCGQCFYCQRQAFSLCPHLEFNNGTFAEYLKLPASIVRQNLLPIPESLPFALAALTEPLACVLHGVARSGFDPAMVATWPSPPQIVVLGDGAIGLMFVGVLAQQGARVLAFGGSNQRLAIATTFGAEQTINHHQCGDIPAVVKDWTEGRGADIVIEATGVPEVWETAIACGRPGATINLFGGCPRETTIRVDTERLHYEELTLKGVFHNTPSFVRQALQLIASGTLPFEKLISGQAPLMEIETVLQAMKARQVIKVALQP

SEQ ID NO: 2800 - protein, 398 aa, Streptococcus pyogenes SSI-1
MAKLTVKDVDLKGKKVLVRVDFNVPLKDGVITNDNRITAALPTIKYIIEQGGRAILFSHLGRVKEEADKEGKSLAPVAADLAAKLGQDVVFPGVTRGSKLEEAINALEDGQVLLVENTRFEDVDGKKESKNDEELGKYWASLGDGIFVNDAFGTAHRAHASNVGISANVEKAVAGFLLENEIAYIQEAVETPERPFVAILGGSKVSDKIGVIENLLEKADKVLIGGGMTYTFYKAQGIEIGNSLVEEDKLDVAKDLLEKSNGKLILPVDSKEANAFAGYTEVRDTEGEAVSEGFLGLDIGPKSIAKFDEALTGAKTVVWNGPMGVFENPDFQAGTIGVMDAIVKQPGVKSIIGGGDSAAAAINLGRADKFSWISTGGGASMELLEGKVLPGLAALTEK

SEQ ID NO: 2801 - protein, 490 aa, Zea mays
MAREQLEESIVADGNGKEEEVGVMGIGAADGADDQHGGGKLSMKSLLWHGGSVWDAWFSCASNQVAQVLLTLPYSFSQLGMLSGVLLQIFYGFLGSWTAYLISVLYVEYRSRKEKEGVSFKNHVIQWFEVLDGLLGPYWKAAGLAFNCTFLLFGSVIQLIACASNIYYINDRLDKRTWTYIFGACCATTVFIPSFHNYRIWSFLGLGMTTYTAWYLAIAALLNGQAEGVAHSGPTKLVLYFTGATNILYTFGGHAVTVEIMHAMWKPAKFKYIYLLATLYVFTLTLPSSAAMYWAFGDELLTHSNAFSLLPKTRWRDAAVILMLIHQFITFGFACTPLYFVWEKVIGMHDAKSIFKRALARLPIVVPIWFLAIIFPFFGPINSAVGALLVSFTVYIIPALAHVLTYRTASARMNAAEKPPFFLPSWTGMFVLNMFIVVWVLVVGFGLGGWASMVNFVRQIDTFGLFAKCYQCPKPPVPAAAQSPAPLPHH

SEQ ID NO: 2802 - protein, 266 aa, Clostridium sticklandii
MDKKIGFIGCGNMAQAMISALVKSKLIESNQIIVSNRSKNILEKMNKEYGITIAANNIEVAEKCDIVFLAVKQNLYEMVMKEIKDSVTKDKIFVSIAPGKTMEFLEAHLGAYAKILRTMPNTPSMVSEGMTAICPNSNIASEELELLVKLIESFGAVEIIEEKLFDAVVAVSGSSPAYVFMFIEAMADAAVIQGMPRAQAYRFAAQAVLGSAKMVLESKSHPGELKDMVCSPGGTTIEAVAVLEERGMRSAVIEAMRKCAQKSKEM

SEQ ID NO: 2803 - protein, 373 aa, Chlamydomonas reinhardtii
MSLQSSIRADSNCTLPNNPVCVLLPVDFIVAAMASSTSSAMAKWAAQAARGFAAAAPSSGKGRKVAVLGAAGGIGQPLSMLMKMNSQVSSLSLYDIAGTPGVAADVSHINTKAQVKGFDKDGLAEALRGCDLVIIPAGVPRKPGMTRDDLFKINAGIVRDLVTAVGQHCPGAVLNIISNPVNSTVPIAAEQLKKMGVYDKRKVMGVTTLDVVRAKTFYAEKNGLDVASVDVPVVGGHAGVTILPLFSQATPKATMSAEVLDALTKRTQDGGTEVVQAKAGKGSATLSMAYAAALFADSCLRGLNGAPVVECTYVESTVTDAPYFASKVKLSTEGVDKIHDLGPLSDYEKAGLKAMMPELLASIEKGVQFVKGA

SEQ ID NO: 2804 - protein, 243 aa, Azotobacter vinelandii
IPPIPPVDFAKYGEIEEVPMTRLMQIGATNLHRSWLNVPHVTQFESADITELEAFRVAQKAVAEKAGVKLTVLPLLLKACAYLLKELPDFNSSLAPSGQALIRKKYVHIGFAVDTPDGLLVPVIRNVDQKSLLQLAAEAAELAEKARSKKLGADAMQGACFTISSLGHIGGTAFTPIVNAPEVAILGVSKASMQPVWDGKAFQPRLMLPLSLSYDCRVINGAAAARFTKRLGDLLADIRAILL

SEQ ID NO: 2805 - protein, 243 aa, Azotobacter vinelandii
IPPIPPVDFAKYGEIEEVPMTRLMQIGATNLHRSWLNVPHVTQFESADITELEAFRVAQKAVAEKAGVKLTVLPLLLKACAYLLKELPDFNSSLAPSGQALIRKKYVHIGFAVDTPDGLLVPVIRNVDQKSLLQLAAEAAELAEKARSKKLGADAMQGACFTISSLGHIGGTAFTPIVNAPEVAILGVSKASMQPVWDGKAFQPRLMLPLSLSYDHRVIDGAAAARFTKRLGDLLADIRAILL

SEQ ID NO: 2806 - protein, 386 aa, Digitalis lanata
MKNILFSTMRNFMVYVVVLMEVSVRSSESKCDFKAIFNFGDSNSDTGGFWAAFPAENPPNGMTYFKRPAGRVTDGRLIIDFLAQGIGIPFLSPYLLSIGSDFRHGANFATAASTVLLPRTSLFVTGVSPFSLGIQLNQMKQFKLQVDRLHHSPGKLNLPAPDIFRKSLYTLYIGQNDFTGNLGSLGISGVKKKIIPQVVSQISSTIKKLYELGGRTFLVLNLAPIGCYPLFLVDLPHNSSDIDSFGCMISYNKAVVEYNYMLKEALAQTRKDIQDADVIYTDIHSVMLQLFQHPTSNGLKYGTKACCGYGGGAFNFNQQVFCSYSKLINGKNVTANACKDPQNYVSWDGIHATEAANKHVAHAILEGSHFDPPFSLHKLCDIQPIG

SEQ ID NO: 2807 - protein, 177 aa, Plantago major
MASSMLSTSSTAVAGRAQATMVAPYAGLKSTSVFPATRKTGNAKLARNAGKVRCMQVWPPLGKKKYETLSYLPDLTVEQLAKEIDYLLRSKWIPCLEFELEHGFVYRENNRSPGYYDGRYWTMWKLPMFGCTDASQVIAELEECKKEYPNAWVRIIGFDNVRQVQCISFIAAKPPGL

SEQ ID NO: 2808 - protein, 709 aa, Oryza sativa
MVAGAEVMHQVVPLLEASFHRRCSVKGVDEVSPPVEEMSPEAASEAAIEVPELVSSFFFMVKAPVESLQFSPNIRSGSFADIGPRRYMEDEHIRIDDLSGHLGSLLMCPAPNALFGVFDGHGGPDAAAYMKRHAIRLFFEDSEFPQALEEDESFYESVEKSIHNAFLSADLALADDLAISRSSGTTALAALIFGRQLLVANAGDCRAVLCRKGVAVEMSRDHRPTYDAEHERITECGGYIEDGYLNGVLSVTRALGDWDMKMPQGSRSPLIAEPEFQQTTLTEDDEFLIIGCDGIWDVMSSQHAVTIVRKGLRRHDDPERCARELAMEAKRLQTFDNLTVIVICFGSELGGGSPSSEQAPIRRVNLSRHINLFDCCAKDLSTSDSGDRGRVTANVWTGGSANSSSAITDRGLGHATAGARRLAWLELGRMGRDGAPFICCKQRQQPVRTPDTTPTGQIVKCYALCFAIVAGAIAASLWAMLSSRKRPPSDGSSPPHAVDDAAAASIGSAGASAMWSSRWSGVRPAWLLLASRAAAAVALAGVLLWDALTYDLTIMVYYTEIGFFLVQSEYDSIDARVELADSYALFCIRMLHVLNAPPPCHHATRDRRELGRTQRQPNGDQPWRRSEGRSWTEPAGALHADCLPGQQLYILTLIVCAGCRSAAAAQLHPVDAAANQLFCVDLCWLAAAAAASTTDQTLCLSFNFGVTRR

SEQ ID NO: 2809 - protein, 243 aa, Azotobacter vinelandii
IPPIPPVDFAKYGEIEEVPMTRLMQIGATNLHRSWLNVPHVTQFESADITELEAFRVAQKAVAEKAGVKLTVLPLLLKACAYLLKELPDFNSSLAPSGQALIRKKYVHIGFAVDTPDGLLVPVIRNVDQKSLLQLAAEAAELAEKARSKKLGADAMQGACFTIASLGHIGGTAFTPIVNAPEVAILGVSKASMQPVWDGKAFQPRLMLPLSLSYDHRVINGAAAARFTKRLGDLLADIRAILL

SEQ ID NO: 2810 - protein, 248 aa, Schizosaccharomyces pombe
MSRSYDSRTTIFSPEGRLYQVEYALEAINHAGVALGIVAKDGIVLAAEKKVTSKLLEQEESAEKLYHIGDNMLCAVAGLTADANILINYARRVGQQYLQTFNEEMPCEQLVRRVCDLKQGYTQYGGLRPFGVSFLYAGWDHIRGYQLFQSNPSGNYGSWQANSIGGNSTSVQSLMRQEYKDDINLDEASAMAVKFLSKTLDSNSLTHEKIEFATITKDTTKNKMVCKIWKSDEINEVLNKYQETQRQS

SEQ ID NO: 2811 - protein, 325 aa, Rhodovulum sulfidophilum
MVKRQISMVLDLNKCIGCQTCTSACKLQWTNRNGREYMYWNNVETHPGPGYPRNYEHSGGGFDEEGALKIGITPSAEDYGIPWEYNYEEALMTGTDPWLRPNVKPTWGANWNEDEGRGEYPNSYYFYLPRICNHCANPGCLAACARNAIYKRQEDGIVLVDQERCRGYRYCITACPYKKVYFNEQISKAEKCIFCYPRIEKGLPTACAKQCVGRIRFIGYLDDEAGPVHLLVERYKVAIPLHPEWGTKPSVFYVPPLAPPRIGDDGEPTEETRVPLAYLKELFGEAVVPALETLKTERAKKQSGAESELMDTLIGYRHPEMFKLS

SEQ ID NO: 2812 - protein, 498 aa, Oryza sativa (japonica cultivar-group)
MATCAADLAPLLGPVAANATDYLCNRFADTTSAVDATYLLFSAYLVFAMQLGFAMLCAGSVRAKNTMNIMLTNVLDAAAGALFYYLFGFAFAFGTPSNGFIGKQFFGLKHMPQTGFDYDFFLFQWAFAIAAAGITSGSIAERTQFVAYLIYSAFLTGFVYPVVSHWIWSADGWASASRTSGPLLFGSGVIDFAGSGVVHMVGGVAGLWGALIEGPRIGRFDHAGRSVALKGHSASLVVLGTFLLWFGWYGFNPGSFTTILKTYGPAGGINGQWSGVGRTAVTTTLAGSVAALTTLFGKRLQTGHWNVVDVCNGLLGGFAAITAGCSVVDPWAAIICGFVSAWVLIGLNALAARLKFDDPLEAAQLHGGCGAWGILFTALFARQKYVEEIYGAGRPYGLFMGGGGKLLAAHVIQILVIFGWVSCTMGPLFYGLKKLGLLRISAEDETSGMDLTRHGGFAYVYHDEDEHDKSGVGGFMLRSAQTRVEPAAAAASNSNNQV

SEQ ID NO: 2813 - protein, 307 aa, GIBBERELLA ZEAE PH-1
MTGLRNATLTILGTGNITKPIVKNLLPAIKNGKTDLPFTKIIACVRSEASEKKLNEQFSEYSTALTVSRGDNVTAVQQGHVIILGVDPADIESVLTQDGIRDALSGKLLISVAAGWTREKIEATIYGSETTKDNWSGRSWVIRTLPNIACMVSEGLIAIEKSPSKPEVPKEHRDLAKAIFTTIGETVEVPPRLMNATTAVGGSTPAFWAIICDAFIDASVAVGVPRADAQKMIYQSMKGSAAMLQSGLQPGDLRDQGTSPEGCTIGGIMVLEEAGVRGHLGRALREAVTTARLMETTAHVNDTRPTS

SEQ ID NO: 2814 - protein, 938 aa, GIBBERELLA ZEAE PH-1
MSTHQHSAFASAQYISPDPIFEVTKRFNADQDPQKVNLGQGTYRDESAKPWVLPSVREAEKLIANSGHEYLPIEGLQSFRDAAKDRIATCQSISGTGSLLLAGLVLKKANSGIENIIITDPTWSNHDLLFHEIGFNVIKAPYYKDRSFDFKGYLDTIKAADKRSAVVLHACAHNPTGCDPTRDQWKQIAEVIKENGIFPIIDSAYLGFNSGNYDEDAWAVKYIIEELGLEAAICLSFAKNMGLYGERVGLTAIVTKSEETKKAVFSLLQQSQRQTVSNPPVHGARIAAAVLSNPDTLKQWHQDLVTMSSRIKSMRSKLFDELVRLETPGDWSHIVNQTGMFGYTGISKPQIECLEEKYHIYMADTSRISLAGLNEHNVDVTQRAERHATPVVALTSRCTIPRRRHPTTANSLDNPASDLKIGVEQKNGAIPDARRNQAPYNVRVTSSDTTPLPQTPRVINGGNRSIGWGTDGVMVAFGQHHSQVPGSPELDSHTQGRWAKTSGNAAAALEATRTNTPVVNGAETPLSELPPLILYRSLFINAVSSRPWLLIPSLHLLQKLSHAGNPYLFNVSRNPLLRTILKHTFYKQFCAGETGAEAQATMKELQDMGFKGTILTFAKETVFDSKTGKEQGHGIETSTTNECQWCDNIEAWRDGTLKTVELLREGDQLATKLTGAGPGVCEALHNDAQLPKQFVDACYEISQKVKDRGAYILIDAESQHYQWGIFRLGMELQQKFNTDGNVVLYNTYQAYLKSTQESLEKHLQIASDKGFTLGVKVVRGAYMSSDPRSLIHDTKQDTDDNYNQIAQGVLRQDFRGFGGSNAKPFPSAQLLLASHNKESLVKAHEMHQERTKANLPTVPVKFAQLHGMSDEVSFGLLKLKDDNGVAPEVYKCTTWGTLGECMAYLTRRAIENRDAASRTLDEYTALKNEAWRRLAFWR

SEQ ID NO: 2815 - protein, 496 aa, Triticum aestivum
MARKMLKDGEAPVVADDGGSYDYDLFVIGAGSGGVRGSRTAAGFGAKVAICELPFHPISSEWLGGHGGTCVIRGCVPKKILVYGASFRGEFDDAKQFGWEINGDINYNWKKLLENKTQEIVRLNGVYKRILGGSGVTMIEGAGSIVDAHTVEVTQPDGSKQRHTTKHILIATGSRATLVDIPGKELAITSDEALSLEELPKRAVILGGGYIAVEFASIWKGLGAEVDLFYRKELPLRGFDDEMRTVVASNLEGRGIRLHPGTNLTELSKTADGIKVVTDKGDELIADVVLFATGRAPNSNRLNLEAVGVEVDQIGAIKVDEYSRTSVPSIWAVGDVTNRINLTPVALMEATCFAKTVFGGQTVKPDYKDVPCAVFCIPPLSVVGLSEQEALAETKNDLLIYTSSFNPMKNSISKRVEKSTMKLVVDAETDKVLGAAMCGPDAAEIMQGIAVALKAGATKATFDSTVGIHPSAAEEFVTMRTLTRRVSPPSKPKTNL

SEQ ID NO: 2816 - protein, 464 aa, Arabidopsis thaliana
MMLRAVFRRASIRGSSSASGLGKSLQSSRVAVSAQFHSVSATETLVPRGNHAHSFHHRSCPGCPDCSRTIINGYQGTALQRWVRPFSSDSGDVVEAVVPHMGESITDGTLAAFLKKPGDRVEADEAIAQIETDKVTIDIASPASGVIQEFLVKEGDTVEPGNKVARISTSADAVSHVAPSEKAPEKPAPKPSPPAEKPKVESTKVAEKPKAPSPPPPPPSKQSAKEPQLPPKDRERRVPMTRLRKRVATRLKDSQNTFALLTTFNEVDMTNLMKLRSQYKDAFLEKHGVKLGLMSGFIKAAVSALQHQPVVNAVIDGDDIIYRDYVDISIAVGTSKGLVVPVIRDADKMNFADIEKTINGLAKKATEGTISIDEMAGGSFTVSNGGVYGSLISTPIINPPQSAILGMHSIVQRPMVVGGSVVPRPMMYVALTYDHRLIDGREAVYFLRRIKDVVEDPQRLLLDI

SEQ ID NO: 2817 - protein, 651 aa, GIBBERELLA ZEAE PH-1
MSLPTTSPFNPDGTQRGRRHSIFADFIPDDLAFPPPFIDPAPNVDEILNRDIDECSSGDEHRDEEAVEDPRYVDESDLQLAFHPNGIAYGSGFSTVPPTSIDIPAPNPHDFEQSYRAEVSLLRDNDVIPSKNPPTKWHSTYWGRVYRHLFSTRVRDHDKPLFAAEDSGETTPLLRDRIVRFDGIPPTPGPDEVHKRWEEALAAKKLETTWQRETKTLIQYAAPLIVTFLLHYSVTVASVLTVGRLGMEELAAVNLATMTASITYYVPVQGLATCLDTLCAQAYGSGHKHLVGLQAQRMTWLLWILMLPIAVLWWFSEPILAAAVGPGRTTALAAMYMRILIIGMPGVSAFESAKRFVQSQGLFHATTYTLLVGAPLSFLQNWLFVFKFGWGFNGAAIAMAVTHNLLPLLLILYVRLFEGSECWKGFNRKAFSNWGPMIKLALPGMIMIEAQFSVLEILTIAAGRFGTAQLAAQGVLVTITSTSFNIPFPLAIATSTRVANLIGANLSGAARVTAKVAIFAGLFVGLFNLTMFITLRKQLPNIFTDDEQIFDALAAVSHGLLRGIGRQAIGGYANLFSYYVVALPIALGTSFGLGWNLAGLWVGLTAGLAVVSGLEAIYLYFTDWEAAVAQAEARMRTETHRRRSSISARSQ

SEQ ID NO: 2818 - protein, 430 aa, Schizosaccharomyces pombe
NTSSTEQIEVLENEYAAHNYHPLPVCFSKAKGAKVWDPEGREYLDFLAAYSAVNQGHCHPKIIEALVEQAQRVTLSSRAFYNDKFGPFAKYITEYFDYEMVIPMNTGAETVETACKLARLWGNKAKKIPTDEAIILSCVDNFHGRTMGIISMSTDPDARDNYGPYLPNVGPKISGADRVLRYNNIEDLKYYLDTFGPKVAAFLVEPIQGEAGVMVPDDGYLEEAYKLCKAHNVLFIADEVQTGVARTGKMLCIEHSNVKPDVVILGKAISGGVYPVSAVLSSREIMLNFEPGTHGSTYGGNPLGAAVSIAALEVVKEEKLTERAAVLGEKFRTALIECKSPIVQKVRGRGLLNAVVIDESKTNGRTAWDLCLIMRSRGVLAKPTHGNIIRFSPPLVITEEDLMKGIEVIKKSLNDLPTIDMTPYAEKPIH

SEQ ID NO: 2819 - protein, 570 aa, Glycine max
MVKSIGVCKRLSGSSSCLSTSTATRDNDIARRLQFHICTCILSLSLHNLTSRVRITRDSLSRHNTNMVIIIKYYTYIYIPTIEKSEQNPTKAAMAAMQRPLKRTIAIAKQRACFSSLLPSAAAAAAADTVAPPQLPPFDHQPHPYNGPSADEVFAKRKTFLGPSVFHYYKKPLNIVEGKMQYLYDDSGRRYLDAFAGIVTVSCGHCHPEILNAITEQSKLLQHATTIYLHHTIGDFAEALAAKMPGNLKVVYFVNSGSEANELAMMMARLYTGNLGMISLRNAYHGGSSSTLGLTALNSWKYPIPEGHVHHVMNPDPYHGAFGTDAASYANDVQDHIDYGTSGKVAGFIAESIQGVGGAVELAPGYLKLVYDIIHKAGGVCIADEVQTGFGRTGSHYWGFETQGVIPDIVTMAKGIGNGLPLGAVVTTPEIASVMAQKIQFNTFGGNPVCSAGGLAVLRVLDKEKRQAHCADVGSYLLERLRFLMERHDIIGNVRGRGLMVGLELVTDRTNKTPAKAETAVVFEKLRELGVLVGKGGLHGNVFRIKPPMCFSKDDADFLVDALDYSLSKL

SEQ ID NO: 2820 - protein, 553 aa, Zea mays
MFLQTQLAVTTEQRREPHRISAPKPLANATSPPPPDPTKRHDDLYLYLAATVTVARRHISKPSPRPPPRLATLRLRHMAHPHLVLPSPKSLLPAAATPSRRAVAIRAALSTALSPAKAAAGAEAVRSIRARQIVDSRGNPTVEVDLVAGDGRLHRSAVPSGASTGIYEALELRDGDKAVYGGKGVLQAVRNINEVIAPKLIGVDVRNQSDVDAVMLDIDGTQNKSKLGANAILGVSLSVCRAGAGAKGVPLYKHIQELAGIKELVMPVPAFNVINGGSHAGNNLAMQEFMILPVGATTFAEALRMGSEVYHVLKSIIKSKYGQDACNVGDEGGFAPNVQDNREGLILLMDAIEKAGYTGKIKIGMDVAASEFLTKDGNYDLNFKNQPNDGAHILSAQHLGDLYRDFVKDFPIVSIEDPFDQDDWSSWASLQSSVDIQIVGDDLLVTNPKRIADAIDKKACNALLLKVNQIGTVTESIQAALDSKAAGWGVMVSHRSGETEDNFIADLAVGLASGQIKTGAPCRSERLAKYNQLLRIEEELGNVRYAGEAFRSP

SEQ ID NO: 2821 - protein, 1384 aa, Mycobacterium tuberculosis CDC1551
MSFVLVSPETVAAVATDLKRIGASLAHENASAAASTTAVVSAAADEVSTAVAALFSQHAQGYQAAAAQVAAFHSRFVQALTAGAGAYAFAEAANASPLQSAMGAVSASAQTLLSRPLIGNGANATTPGGNGGDGGWLFGSGGNGAPGAAGQSGGNGGSAGLWGNGGAGGAGGSGGAAGGNGGNGGWLFGAGGTGGIGGTGAPGAMGGTGGNGGNGALLIGGGGLGGAGGMGGTGGGTGGTGGNGGNGALLIGAGGVGGAGGIGGQGTGAGGAAGAGGTGGNGGAGGLFMNGGDGGAGGQGGDGAAGDAAASAGGTGGKGGQGGDGGTGGAGGAGPVLFGHGGAGGMGGQGGTGGMGGAGGDGTTVIAAGTGGEGGTGGAAGAGGAAGARGALTSGGLAGGVGAGGTGGTGGTGGNGADAAAVVGFGANGDPGFAGGKGGNGGIGGAAVTGGVAGDGGTGGKGGTGGAGGAGNDAGSTGNPGGKGGDGGIGGAGGAGGAAGTGNGGHAGNTGDGGDGGTGGNGGNGTGGVNGADNTLNPDTPGGAGEPGGAGGAGGAAGGPGGTGGTGGNGGNGGNGGNGGNGGNGGNGGNAGNNSTNAPVGGEGGAGGDGGAGGAGGAANGGTAGSQGTGGVGGDGGAGGNGGGGKAGTGNSGNFGVDGEAGFSGGAGGNGGVGGAAGANGGTGGSGGNGGDGGAGGIGGAGGNGIPGTGTEPAGGTGAKGGDGGDGGAGGAGGNAGGAGGNGGAGGQGGNAGQGGAGGAGGNAVIPGDGVGKAPHGDAGGSGGDGGKGGQGGSGGTGGSGAPIGGGAGGTGGSGGHAGKGGAGGIGAQGTTITVPGNGGNAGDGGNAGAGGNGGSGDFGGNTTSGASGSGGNGGNAGTAGSGGAGGTGGTGLSGGNGGNGGNGGNGGDGGNGAHGTVGAQFVPATSLPTPNGGAGGNGGTGSNGGAPGPAGAPGPTTGGNAGSQGIGGDGGNGGDGGKGGDGADAVNVVFMPTEPQAATGTAGSAGDPTGGNGGPGTPGSPMVAPPPPTPITQVQQGGDGGAGGTGSTNANDGTATGGKGGEGGVGSILGGPGGNGGTGGNASATGTNGVANAGNGGKGGDGGQFGAGGNGGAGGSVTDGSAGSTAGNGGNGGNATNGTIAGQPAGGNGSAGGKGGDGGNIAAGATGTAGNGGNGGNGNDGAVNAGTGGSGGNGGNAGGGGANGGDGGAGGAGGAGGRGGKGIDGGFGGDGGNGGSNNGTGAGGNGGNGGTGGVGSVGAAGGDGGNGGTGGFAGFGGTAGNGGSGGTGGAGGDGGTGGDGGNGGTGVIAGGGGTGGNGGASGAGGAGGTGGFAGNGNAGGNGGTGGASEDGDNGNAGSGATGGTGGNGGTGGDGGAAGLGGVA

SEQ ID NO: 2822 - protein, 426 aa, Aquifex aeolicus VF5
MNKTTFENVYYWEGKAQIPQEGQFIKLKEDKTLEVPDNPIIPFIEGDGIGPEITQAMLLIINTAVEKTYNGSKKIYWVELLAGDKAEEKTGERLPQETLDVLKESIVGIKGPLGTPVGKGVRSINSALRRAFDYYSAVRPVYWMGQATPIPNPERVDLVVFRENTDDVYAGVEFFAGTPEAKKVREFLIKEMGAKEEGFPEDVGITVKPMSEFKTKRHVRKALRYALENNKKNVAVIGKGNIMKATEGAFINWAFEVAEEPEFKGKVVTDPEAEPGEGQVKLTKVITDQMLMQLVLKPEAWDVIIAQNLNGDYVSDLAASLIGGPGFVPSGNIGDGYALFESTHGTAWDIAGKGIANPLSLTLSGAMMLEYIGWKEAAQKVYDAVRRTLAEHIGTPDIASGFQKQGIEAKAVGTMEFAEEISKRIE

SEQ ID NO: 2823 - protein, 337 aa, Corynebacterium glutamicum ATCC 13032
MSAQMDTPDPTMSAVAMLDSIPSDQPDFLIDVEVDRPTPGPHDLLVHIEAVSINPVDTKVRMRAGKQKHPKILGFDAAGEVVAVGSQVTLFNVGDKVFYAGSNQRPGSNAEYQVVDERLVGHAPQSLGAHDAAALPLVALTAWESLFDRLGVTQSTTGTLLVLGGSGGVPSALIQLARALTGLKVVATASRPESQEWVTKLGAHEVIDHSKDLSEQISDVDFVFSSWTTGREVELATLMKPQSHLVLIDDPVDPNLGAFKQKAIALHWEFMFTRAMFNTPDMGEQGKILNKIADMVDRGQFESVTATVLDGLNAANIMEGHRLVEQGKTSGKIVVRV

SEQ ID NO: 2824 - protein, 487 aa, Xanthomonas campestris pv. campestris str. ATCC 33913
MHTAMPDRTHCDCARLARDARFDGLFFTAVRSTGIYCRPVCPAPPPKPSNISYYPTAAAATAAGYRPCLRCRPELSPQAQQHLGEESVQRALAMIAEGALQEQPVQTLADAVGMSARQLQRQFVQQLGATPIQVHGTRRLLLAKQLLTETALPVTEVALAAGFNSLRRFNAAFLQGCGMPPSALRKQRSDVPGGDLCLRLGYRPPLDLPAMLTFLQRRAIPGIEQVDADGYRRVIGAPGQATLIHVSAAPTRDELLLRIGATDPRQIPQIVRRVRRIFDLDADLHAVHATLAQDPLLEQAITRRPGLRVPGGWDGFEVAVRAVLGQQISVAGAATLAARLVDRHGGHLPDMPPGLDRSFPTPAQMADAPLEQLGLPRARAATLRALASACAQGRLHFGAGQRLPDFVAACTALPGIGPWTAHYIAMRALSHPDAFPAGDLILQQVLGAPERLSERATEARSQAWRPWRAYAVLHLWHLAVDRKDTRS

SEQ ID NO: 2825 - protein, 422 aa, Oceanobacillus iheyensis HTE831
MTQAEKIVVENGKMNVPDTPIIPFIEGDGTGPDIWASAQKVIEAAVDKAYDGKKSIEWMEVYAGQKAYDKTGEWLPKDTLDKINEYKIAIKGPLTTPIGGGIRSLNVALRQELDLFTCLRPVRYFEGVPSPVKRPEEVDMVIFRENTEDIYAGIEWQKGSDEVKKVINFLKEEMGVKNIRFPETSGIGVKPVSEEGTKRLVRSAIDYALNEGRKNVTLVHKGNIMKFTEGAFKNWGYEVAEQEYGDKVFTWAEYDRIVEAEGKDAANKAQDEALASGKILVKDAIADIFLQQVLTRPKEFDVVATMNLNGDYISDALAAQVGGIGIAPGANINYDTGHAIFEATHGTAPKYAGLDKVNPSSVILSAVLMLEHLGWREAADLITKSMDKTIGSKVVTYDFARLMDGAKEVKCSEFGQELIKNM

SEQ ID NO: 2826 - protein, 174 aa, Plantago major
MASAMMSSAATVTAQTSMVGQFSGLKFGSTFPIAKKTGRVSSPSSGLKVRCMQVWPPTGKKKYETLSYLPDLTVEQLAKEIDYLLRSKWIPCLEFELEHGFVYRENARSPGYYDGRYWTMWKLPMFGCTDASQVIAELEECKKEYPNAWVRIIGFDNVRQVQCISFIASKPPGL

SEQ ID NO: 2827 - protein, 181 aa, Oryza sativa (japonica cultivar-group)
MIFTFYKAQGLSVGSSLVEEDKLELATSLLAKAKEKGVSLLLPSDVIIADKFAPDANSQVVPASAIPDGWMGLDIGPDSVASFSSTLETTQTVIWNGPMGVFEFDKFAVGTEAIAKKLADLSGKGVTTIIGGGDSVAAVEKVGVADVMSHISTGGGASLELLEGKELPGVIALDEAVTVAV

SEQ ID NO: 2828 - protein, 319 aa, Oceanobacillus iheyensis HTE831
MKRIGVLTSGGDSPGMNAAIRAVVRKAIYHDLEVYGIKNGYQGLMDGNIEKMTLGSVGDIIHRGGTILFSARSEEFKTDEGQFRAIEQLNKHNIDGLVVIGGDGSFQGAKKLTEKGFPCIGVPGTIDNDIAGTDYTIGFDTSLNTIIDAVDKVRDTATSHERTYIIEVMGRDAGDLALWAGLAVGAESILIPEEKEDFSSIVQRLKNGHDRGKKHSIILLAEGVGSGFEFGKRIEEVAELETRVTVLGHIQRGGSPTGQDRVLASRLGARAIELLIDNQGGRMVGIQKNVLVDYTFDEVFNVEHTIDKGMYKLSKELSI

SEQ ID NO: 2829 - protein, 155 aa, Desulfovibrio desulfuricans G20
MVRVMPNTPAMVGRGIYGMCLDDPALSAEAATAVRNLFAAIGKVIVLPEQKFEAFTAVAGCGPAYVFHMMEAVIEAAVTVGFTRQQATEMVTELFSGSCALAEQTGIHPSLLREMVTSPAGTTIAGTNHLDRTAVRGHIIDAVLAAYEKGLAMRR

SEQ ID NO: 2830 - protein, 709 aa, Pseudomonas aeruginosa UCBPP-PA14
MSEQNNEQRSQAAGTDTVDRGNSNAKLEQLEAYREDATGEALSTNTGTRIADNQNTLKAGERGPSLLEDFIMREKITHFDHERIPERVVHARGSAAHGYFEAYEDLSDLTKAGFLAEAGKRTPVFVRFSTVQGPRGSADTVRDVRGFAVKFYTDEGNFDLVGNNMPVFFIQDAIKFPDFVHAVKPEPHNEIPTGASAHDTFWDFVSLTPESAHMVMWLMSDRAIPIAYRNMQGFGVHTFRLVNAAGESVLVKFHWRPKSGTCSLVWDEAQKLAGKDPDFNRRTLWEDIEKGDYPEWELGLQVIPENQQDSFDFDLLDPTKLVPEELVPVRVVGRMVLNRNPDNFFAETEQVAFHVGHLVPGIDFTNDPLLQGRLFSYTDTQLLRLSGPNFNEIPINRPLCPFHNNQRDAPHRQTINRGRASYEPNSIDGGWPKETPPAARNGGFSSYHEPVSGSKLRKRADSFADHFSQAALFWHSMSEAEQAHIVAAYSFELSKVERQSIREREVNQILLNIDPQLAARVAANVGVQLAAPANPAPQPKPSPALSQMNLLSGDIRSRKVAILIADGVAESDVSDLRDALRQEGADAKLIAPSASPVQAENGAELNPEGTWDGLPSVAFDAVFVPGGAASSQAIGADGRGLHYLLEAYKHLKPVAFAGDAQALASQLSLPGDPGVLLGATATDVFPGLRQALMQHRIWQREAATKAIPA

SEQ ID NO: 2831 - protein, 506 aa, Oryza sativa (japonica cultivar-group)
MTIDLSMPGSSGLLDDVGGKKHMNFFSNRYVLALTGAAGIGGFLFGYDTGVISGALLYIRDDFPAVRDNYFLQETIVSMALVGAIIGAAGGGWINDTYGRRKSTLVADMLFALGSLVMCAAGGPYILILGRLLVGLGVGIASVTAPVYIAEAAPSEIRGGLVSTNVLMITGGQFFSYLINLGFTEVPGTWRWMLGVAAVPAILQFVLMLFLPESPRWLFWKDEKAKAISVLEKIYDSDRLEEEVELLASSSMHEFQSDGTGSYLDIFKSKELRLAFFAGAGLQAFQQFTGINTVMYYSPTIVQMAGFTSNKLALLLSLIVAGMNAAGTIVGIYLIDRCGRRRLALTSLAGVVVSLAILAMAFILQSSSDICSNALNGACQGALGWFAVAGLALYIAFFSPGMGPVPWAVNSEIYPEAYRGMCGGMSATVNWVSNLIVAQTFLSIVGLVGTGLTFLIIAGIAVLAFIFVALYVPETKGLSFEQVELLWKERAWGNQGNRQSLLGAAP

SEQ ID NO: 2832 - protein, 277 aa, Triticum aestivum
  unsure (1)..(277): unsure at all Xaa locations
MGMDRTLYLWRSSEERAADMSTRRTEDGAVKCALRHFRRELVTRGLRFMAAAWGGLSPLPGAAAARVLRRPRVRPRVRGRVGKLYTYIVQPWAPTVMASSATSVAPFQGLKSTAXGLPVSRRSNXASLGSVSNGGRIRCMQVWPIEGIKKFETLSYLPPLSTEALLKQVDYLIRSKWVPCLEFSKVGFIFREHNASPGYYDGRYWTMWKLPMFGCTDATQVINEVEEVKKEYPDAYVRIIGFDNMRQVQCVSFIAFXPPGCEESGKGLNSSLTTGHI

SEQ ID NO: 2833 - protein, 178 aa, Glycine max
  unsure (1)..(178): unsure at all Xaa locations
MASSMISSPAVTTVNRAGPGMVAPFTGLKSMAGFPTRKTNNDITSIASDGGRVQCMQVWPPVGKKKFETLSYLPDLDDAQLAKEVEYLLKXGWIPYLEFXLKHNFVYHKHNKSPIYYNKRYXTICKRAIFICTNTSHILNKRARTNTTXGNNCIRMITCGRHRQLQYISCISYERPSY

SEQ ID NO: 2834 - protein, 204 aa, Chloranthus spicatus
LCDAEVALIVFSNRGKLYEFCSSSSMLKTLERYQKCNYGAPDTTVSTREMQSSQQEYLKLKARVEALQRSQRNFLGEDLGPLSGKELEQLERQLDMSLKQIRSTRTQYMLDQLTDLQRREQMLCETNKALKRRLDEVTPANPHQGWDPNPHGVSYGRQAAQQQGDGFFHPLECEPTLQIGYQHDQITIAAPGPSVSNYMPGWLA

SEQ ID NO: 2835 - protein, 392 aa, Bacillus subtilis
MEKASGAYFWDVDGNKYIDYLAAYGPIITGHAHPHITEAIKKAAENGVLYGTPTKHEVTFAKMLKEAIPAMDKVRFVNSGTEAVMTTIRVARAYTGRTKIIKFAGCYHGHSDLVLVAAGSGPSTLGTPDSAGVPKSIANEVITVPFNDIDSYKAALEKWGSEIAAVLVEPIVGNFGIVEPKEGFLEQVNELTHNAGALVIYDEVITAFRFMYGGAQDLLQVKPDLTALGKIIGGGLPIGAYGGKQEIMEQVAPLGPAYQAGTMAGNPASILSGIACLEVLKEKGVYEKLDHLGAMLEEGIMKHAETHGITITVNRLKGALTVYFSDEKVENYEQAERSDGETFSTFFKLMLERGINLAPSKYEAWFITTAHTEQDIKDTLTAVEDAFKHLKN

SEQ ID NO: 2836 - protein, 430 aa, Oryza sativa (japonica cultivar-group)
MAMSRAAAAAAGTPVARRRLMGAVAARSMASWFGHVEPAAKDPILGVTEAFLADPSPDKVNVGVGAYRDDSGKPVVLECVREAERRIAGSMNMEYLPMGGSIKMIEESLKLAYGENCEFIKDKRIAAVQALSGTGACRLFADFQKRFLPDSQIYIPTPTWANHHNIWRDAQVPQKTFTYYHPESRGLDFAGLMDDIKNAPDGSFFLLHACAHNPTGVDPSEEQWREISHQFKVKKHFPFFDMAYQGFASGDPERDAKAIRIFLEDGHQIGCAQSYAKNMGLYGQRAGCLSILCDDEMQAVAVKSQLQQIARPLYSNPPVHGALIVSTILGDPELKSLWLKEVKGMADRIIGMRTALKENLEKLGSPMSWEHITNQIGMFCYSGMTPEQVDRLTKEFHIYMTRNGRISMAGVTTGNVAYLANAIHEVTKTK

SEQ ID NO: 2837 - protein, 1715 aa, Mycobacterium tuberculosis CDC1551
MPRWPRRPVGSSPMSFVLIAPEFVTAAAGDLTNLGSSISAANASAASATTQVLAAGADEVSARIAALFGGFGLEYQAISAQVAAYHQRFVQALSTGAGAYASAEAAAAEQIVLGVINAPTQALLGRPLIGDGANATTPGGAGGAGGLLFGNGGAGAAGAPGQAGGPGGPAGLWGNGGPGGAGGSGGGTGGAGGAGGWLFGVGGAGGVSGAGGGTGGAGGPGGLIWGGGGAGGVGGAGGGTGGAGGRAELLFGAGGAGGAGTDGGPGATGGTGGHGGVGGDGGWLAPGGAGGAGGQGGAGGAGSDGGALGGTGGTGGTGGAGGAGGRGALLLGAGGQGGLGGAGGQGGTGGAGGDGVLGGVGGTGGKGGVGGVAGLGGAGGAAGQLFSAGGAAGAVGVGGTGGQGGAGGAGAAGADAPASTGLTGGTGFAGGAGGVGGQGGNAIAGGINGSGGAGGTGGQGGAGGMGGSGADNASGIGADGGAGGTGGNAGAGGAGGAAGTGGTGGVVGAAGKAGIGGTGGQGGAGGAGSAGTDATATGATGGTGFSGGAGGAGGAGGNTGVGGTNGSGGQGGTGGAGGAGGAGGVGADNPTGIGGTGGTGGKGGAGGAGGAGADATATGATGGTGFAGGAGGAGGQGGSSGAGGTNGSGGAGGTGGQGGAGGAGGAGADNPTGIGGAGGTGGTGGAAGAGGAGGAIGTGGTGGAVGSVGNAGIGGTGGTGGVGGAGGAGAAAAAGSSATGGAGFAGGAGGEGGAGGNSGVGGTNGSGGAGGAGGKGGTGGAGGSGADNPTGAGFAGGAGGTGGAAGAGGAGGATGTGGTGGVVGATGSAGIGGAGGRGGDGGDGASGLGLGLSGFDGGQGGQGGAGGSAGAGGINGAGGNGGDGGDGATGAAGLGDNGGVGGDGGAGGAAGNGGNAGVGLTAKAGDGGAAGNGGNGGAGGAGGAGDNNFNGGQGGAGGQGGQGGLGGASTTSINANGGAGGNGGTGGKGGAGGAGTLGVGGSGGTGGDGGDAGAGGGGGFGGAAGKAGGGGNGGVGGDGGEGASGLGLGLSGFDGGQGGQGGAGGNAGAGGINGAGGAGGTGGAGGDGAPATLIGGPDGGDGGQGGIGGDGGNAGFGAGVPGDGGDGGNAGFGAGVPGDGGIGGTGGAGGAGGAGADGDPSIDGGQGGAGGHGGQGGKGGLNSTGLASAASGDGGNGGAGGAGGNGGDGDGFIGGSGGTGGTGGDAGVGGLANTGGTAGNAGIGGAGGRGGDGGAGDSGALSQDGNGFAGGQGGQGGVGGNAGAGGINGAGGTGGTGGAGGDGAPATLIGGPDGGDGGQGGIGGAGGNAGFGAGVPGDGGIGGTGGAGGAGGAGADGDPSIDGGQGGAGGHGGQGGKGGLNSTGLASAASGDGGNGGAGGAGGNGGDGDGFIGGSGGTGGTGGDAGVGGLANTGGTAGNAGIGGAGGRGGDGGAGDSGALSQDGNGFAGGQGGQGGAGGNAGAGGINGAGGTGGTGGAGGDGQNGTTGVASEGGAGGQGGDGGDGGEGGGAGFGSGVAGAAGAGGNGGKGGDGGTGGTGGTNFAGGQGGAGGRGGAGGNGANGVGDNAAGGDGGNGGAGGLGGGGGTGGTNGNGGLGGGGGNGGAGGAGGTPTGSGTEGTGGDGGDAGAGGNGGSATGVGNGGNGGDGGNGGDGGNGAPGGFGGGAGAGGLGGSGAGGGTDGDDGNGGSPGTDGS

SEQ ID NO: 2838 - protein, 490 aa, Oryza sativa
MALKSPVDFAGSITSGQKDPCCFGVPGCNPRCVRYNKKSRTCRLVTRAISVDRPQLDFSNSDWKKQFQEDFDRRFSLPHLKDVIDVEPRPTTFSLKSRTPLENVNGSMQGSWNGYVNDDDRALLKVIKFASPTSAGADCIDPDCSWVEQWVHRAGPRKQIYFEPQYVKAGIVTCGGLCPGLNDVIRQIVLTLEKYGVKNIVGIQHGFRGFFEDHLAEVPARRLDMLFVLGGNGTHAGANLIHEECRKRKLKVSIVGVPKTIDNDILLMDKTFGFDTAVEAAQRAINSAYIEAHSAFHGIGLVKLMGRSSGFITMHASLSSGQVDICLIPEVPFTLDGPNGVLQHLEHLIETKGFALICVAEGAGQEHLQQSNATDASGNMILGDIGVHLHQKIKAHFKEIGVHSDVKYIDPTYMVRAVRANASDAILCTVLGQNAVHGAFAGFSGITTGICNTHNVYLPISEVIKSTRFVDPNSRMWHRCLTSTGQPDFH

SEQ ID NO: 2839 - protein, 492 aa, Mesembryanthemum crystallinum
MDPYKYRPSSAFNSPYFTTNSGAPVYNNNSSLTVGTRGPILLEDYHLVEKLANFDRERIPERVVHARGASAKGFFEVTHDVSHLTCADFLRAPGVQTPVIVRFSTVIHERGSPETIRDPRGFAVKFYTREGNFDMVGNNFPVFFIRDGMKFPDMVHALKPNPKSHIQENWRVLDFFSHHPESLHMFTFLFDDVGVPTDYRHMEGSGVNTYTLISKSGKVHYVKFHWKPTCGVKCLLEEEAVKIGGANHSHATQDLYDSIAAGNYPEWKLYIQTIDPADEDKFDFDPLDVTKTWPEDILPLQPVGRLVLNKNIDNFFAENEQLAFCPGIVVPGVYYSDDKLLQTRIFSYADTQRHRLGPNYLQLPVNAPKCAHHNNHYDGQMNFMHRDDEVDYFPSRYDPVRHAERYPIPPNVLNGNRDRQIIQKENNFKQPGERYRSWDPARQERFICRWVDALSDPRITHEIRNIWISYWSQADKSVGMKLASRLNVRPTM

SEQ ID NO: 2840 - protein, 493 aa, Mesembryanthemum crystallinum
MDPYKYRPSSSYNTSFMTTKTGQPVWNDDSSLTVGARGPILLEDYHLLEKIASWDRERIPERVVHARGASAKGFFEVTNDITHLTCADFLRAPGVQTPVIVRFSTVIHERGSPETMRDPRGFALKFYTREGNFDLVGNNFPVFFNRDAMKFPDVVRAFKPNPKSHIQEMWRILDFCSHLPESLHTFAWFFDDVGIPINYRHMEGFGVHTFTMLNRAGKETYVKFHWKPTCGVKSIVTEEEAIQVGGANHSHATQDLYDSIAAGNYPEWRLFIQTMDPADEDKFDFDPLDITKTWPEDILPLQPVGRLVLNKNIDNFFTENEMLAFNPASIVPGIHFSHDKMLQARTFAYADTQRHRLGVNFLLLPVNAPKCAHHNDHHDGFMNFMHRDEEVNYFPSRSNVCHHAERFPIPSHTLTGRRERRIIPKENNFKQPGDRYRSWDPARQERYLARWVKALSDPKVTPEIRGVWVSWLSQSDRSLGMKLANKLNVRPTM

SEQ ID NO: 2841 - protein, 1217 aa, Mycobacterium tuberculosis CDC1551
MSFVLIAPEFVTAAAGDLTNLGSSISAANASAASATTQVLAAGADEVSARIAALFGGFGLEYQAISAQVAAYHQRFVQALSTGAGAYASAEAAAAEQIVLGVINAPTQALLGRPLIGDGANATTPGGAGGAGGLLFGNGGAGAAGAPGQAGGPGGPAGLWGNGGPGGAGGSGGGTGGAGGAGGWLFGVGGAGGVGGAGGGTGGAGGPGGLIWGGGGAGGVGGAGGGTGGAGGRAELLFGAGGAGGAGTDGGPGATGGTGGHGGVGGDGGWLAPGGAGGAGGQGGAGGAGSDGGALGGTGGTGGTGGAGGAGGRGALLLGAGGQGGLGGAGGQGGMGGAGGAGADNPTGIGGTGGDGGTGGSAGEGGAGGAAGQLFSASGAAGNAGVGGAGGQGGDGGAGGAGADADQPGATGGTGFAGGAGGAGGAGGSSGAGGTNGSGGAGGTNGSGGAGGTGGQGGAGGAGGAGADNPTGIGGTGGDGGTGGAAGAGGAGGAAGTGGTGGMIGTTGNAGVGGAGGQGGDGGAGGAGADADQPGATGGTGFAGGAGGAGGAGGSSGAGGTNGSGGAGGTGGQGGGAGGSSGAGGTNGSGGAGGTGGQGGAGGAGGAGADNPTGIGGTGGDGGTGGAAGAGGAGGAAGTGGTGGMIGTTGNAGVGGAGGQGGDGGAGGAGADADQPGATGGTGFAGGAGGAGGAGGAGGNSGAGGTNGSGGAGGTGGQGGAGGAGGAGADNPTGIGGTGGDGGTGGAAGAGGAGGAAGTGGTGGMIGTTGNAGVGGAGGQGGDGGAGGAGADADQPGATGGTGFAGGAGGAGGAGGAGGSSGAGGTNGSGGAGGTGGQGGAGGAGISFSNGSNGGTGGTGGVGGTGGDGGNAGTGAGDPGKGGTGGTGGTGGSGGAGGSGGANFNGGTGGTGGTGGTGGKGGLNTDGLSSATSGTGGTGGTGGKGGTGGAGDDSAGGTGGTGGAGGNAGAGGLANTGGTAGNAGIGGDGGQGGNGGQGDSGSGLGGQPGFAGGPGGKGGAGGNAGTGGTNGSGAGGAGGQGGAGGAGISFSNGSNGGTGGTGGVGGTGGDGGNAGTGAGDPGKGGTGGTGGTGGSGGAGGSGGANFNGGTGGNGGSGGTGGTGGPGGSGGAPTGSGTGGKGGAGGDGGDGADGGAATGVGDGGDGGNGGNGGNGGTGVGSPGGLGGAGGTGGLGGAGAGGGADGDDGDDGQPGNNGS

SEQ ID NO: 2842 - protein, 477 aa, GIBBERELLA ZEAE PH-1
MSDITDEPDRNEAAPLLADSEGGNTGEWPTNNWWTELSLIARYTVPLVATYLLQYSFSVITTTAAGHLSPDDLAAAAIGVTTMTIGGLALYEGMATALDTLCAQAYGSGNKTGVGLHVQRMLLLMTIVTVPVAIFWISSPAFLTLILRQDDLAAKAGSFLRVSIIGIPGYASFEALKRFLQAQGDFNTAMLVLVVCAPVNALLSWLFAFRLNMGLEGAALGAAVANTLRPILLLLCIFFKKSTHQCWPGFTTRAFQDWGPMIRLSVAGSAVTLAEWAAFEIITVSTSYMGTIHLAAQTILTTTSIVMWHIPFSLGVAVSTRIGHLIGGGHVLLARRITILYGILFVGLGTLNGTILLSLRNYIGPFYTDDDAVRRVVADTMFAVAAFQVVDSIICGCNGVLRGLAKQSVAAWVVFIVNYLAAVPIAVWLELGPLQFGLKGVWSGIIGGCATIATIEIVYMIRVDWRKSAEIVKSRED

SEQ ID NO: 2843 - protein, 394 aa, Staphylococcus aureus subsp. aureus Mu50
MNSIIELTDYYSSNNYAPLKLVISKGKGVKVWDTDGKQYIDCISGFSVANQGHCHPTIVKAMTEQASKLSIISRVLYSDNLGKWEEKICHLAKKDKVLSLNSGTEAVEAAIKIARKWGSEVKGITDGQVEIIAMNNNFHGRTLGSLSLSNHDAYKAGFHPLLQGTTTVDFGDIEQLTQAISPNTAAIILEPIQGEGGVNIPPKGYIQAVRQLCDKHQILMIADEIQVGLGRTGKWFAMEWEQVVPDIYILGKALGGGLYPVSAVLANNDVMRVLTPGTHGSTFGGNPLAIAISTAALDVLKDEQLVERSERLGSFLLKALLQLKHPSIKEIRGRGLFIGIELNTDAAPFVDQLIQRGILCKDTHRTIIRLSPPLVIDKEEIHQIVAAFQDVFKN

SEQ ID NO: 2844 - protein, 425 aa, Bacillus israeli
MIVAEGQKITMTNGTLNVPNDPIIPFIEGDGTGPDIWRAASKVLEAAVEKAYNGEKKIVWKEVLAGEKAFKETGEWLPQETLDVIREYMIAIKGPLTTPVGGGIRSLNVALRQELDLFVCLRPVRYFNGVPSPVKRPQDTDMVIFRENTEDIYAGIEYAKGTEEVKKVIEFLQKELGVNKIRFPETSGIGIKPISEEGTKRLVRAAINYAIEHGRKSVTLVHKGNIMKFTEGAFKNWGYELAEQEFGDKVFTWAEYDRIVEKEGKEAANKAQEEAEKAGKIIIKDAIADIFLQQILTRPREFDVVATMNLNGDYISDALAAQVGGIGIAPGANINYETGHAIFEATHGTAPKYAGLDKVNPSSVILSGVLMLEHLGWKEAADLIIQAMEKTIASKVVTYDFARLMDGATEVKCSEFGNELIKNMG

SEQ ID NO: 2845 - protein, 990 aa, Xanthomonas campestris pv. campestris str. ATCC 33913
MQHGSHCTVVYDGKTLHGQADIPLIEFLSGHGIDLSHICYHPALGAPQTCDVCWVEVGGELVRGCTLRSHDGLEVSSTVERAHAARHEGMDRVLAKHELYCTLCEHNTGDCTLHNTFADMKMPIQRYAFQRKPYEKDHSNPFYTYDPDQCILCGRCVEACQKVEVNETLSIDFSMEHPRVLWDGGKPINASSCVSCGHCVTVCPCNALLEKTMQPDAGPLTALPQELKRPMIDMVKTLENTIGAPPITGVSVLDMHWRQPEIKRTKTVCTYCGVGCSFEMWTRDRHLLKVQPVVDAPANGISTCVKGKFAWDFVNDPKRLTTPLIREHGRFREASWDEALALVARRLLEIRDLHGAQSIGFIGSSKASNEEAYLTQKIARLIIGTNSVDNSSRYCQNPATEGLFRTVGYGGDAGTIADLQQAELVVIVGSNLAENHPVIASKLKAARKLHGQKLIVVDPRKHEMAERADLFLRPVPSTDIVWASALSRYMFDNGYADTQFLAQRVNQVDEYRQSLEPFTLDYAAQITGLSREQLVEAGEMIGRARSVCIVWAMGITQHTHGADTSTALSNLLLVTGNYGRPGTGGYPMRGHNNVQGASDFGCLKNMYPGYESVSDPAVRNKWAQAWHVPAEQLSLEVGSDNFMMVQQADKGEIRAMYVIGEETAFSDADARNVHRGFSKLDFMVVQDLFFSRTAEFADVVLPACPSVEKDGTFVNTERRIQRFHQVFPPLGQSRPDWQILTELAARMGHDWGYTHPSQIMDEVARIATLFKGVSYQRLEGWRSLLWPMQDDGRDTPLLYTERFHTDDGKARLHPLQWKRPGEEADAQFDLMLDNGRMLEQFQGMNQTGRGPRLWSLAPNWFVEVSPQLAAERGLQEGDWVKLSSRRGSLEVPVVITDRVAGNTLFLPIHQGKPGINLLTGEHHDPDVNTPAYKELAVRMEPLGRTGKPPLPAHNFRHGHRTPNDGVPVQQKWAREDYVAPPARAPHPERF

SEQ ID NO: 2846 - protein, 1121 aa, Lycopersicon esculentum
MASGSGSRGKHDRNHQPKNQSQFSGTSNTNALSKAVAQYTTDARLHAAFEQSGESGKNFDYSQSVRNSTESVTEHQITAYLNKMQRGGHIQPFGCTIAVEEASFCVIAYSENACEMLDIMPQSVPSLEKNEILKIGTDVRTLFSSSSSGLLEGAFGAREITLLNPIWVHSKNSGKPFYAILHRIDVGIVIDLEPARTEDPALSIAGAVQSQKLAVRAISLLQSLPGGDIDLLCDTVVKSVRELTGYDRVMVYKFHDDEHGEVVAESRRSDLEPYIGLHYPATDIPQASRFLFKQNRVRMIVDCTAIPVRVIQDESLMQPLCLVGSTLRAPHGCHPQYMVNMGNVASLTLAVVINGNDDEVVGGRNAMRLWGLVVGHHSSARFIPFPLRYACEFLMQAFGLQLNMELQLASQLAEKRVLRTQTVLCDMLLRDSPTGIVTQNPSIVDLVKCDGAALYYQGRYYPLGITPTAAQIKGIVEWLLTCHVDSTGLSTDSLADAGYPEAASLGAAVCGMAVAYVTSKYFLFWFRSHTASEIKWGGAKHHPEDKDDWQKMHPRSSFKAFLEVVKNRSLPWENAEMDAIHSLQLILRDSFKDASNSKSIVRVQLREEGLQGMDELRSVAREMVRLVETATAPIFAVDVEGRINAWNAKVAELTELSVEEAIGKSLVHDLVHEESQTTAQNLLRKALRGEEDKNIEIKLRTFGAEQLKKTVFVEVNACSNKDYTNNIVGVSFIGQDITAQKVVLDKFVRIQGDYKAIMHSPNPLIPPIFVSDENTCCFEWNTAMEKLSGWNKEEIIGKMLVGEIFGTFCRLKGPDDMTNFMIMLHKAIGGQEIDKFPFSFSDRNGKFVQALLTANKRVNVDGQIIGAFCFLQIASPELQKTLMQRQQEKTSNIHMKELAYICRELKNPLNGIRFTNSLLEATELTENQKQFLETSAACERQMSKIIRDIDLDNIEDGSLELEKGEFFLASVIDAVVSQVMLLLRERGVQLIRDIPDEIKTLRVYGDQVRIQQVFADFLQIMASYAPPREGWVEVHLRPSIKQISDGVTIVHIEFRIVCPGEGLPPELIQDMFHNSLWVTQQGLGLSMCRRILQLMNGQVQYIRESERCFFLIILQLPMLIQ

SEQ ID NO: 2847 - protein, 240 aa, Bradyrhizobium japonicum USDA 110
MDMKKYAAEAIGTFWLTFAGCGSAVIAAGFPQVGIGLVGVSLAFGLSVVTMAYAIGHISGCHLNPAVTVGLAAGGRFPAGQILPYVIAQVCGAIVAAELLYIIASGAPGFDVTKGFASNGYDAHSPGQYSMMACFLTEVVMTMMFLFIIMGATHGRAPAGFAPLAIGLALVMIHLVSIPVTNTSVNPARSTGPALFVGGWAMAQLWLFWVAPLIGGALGGVIYRWLSEEPTGVVAGAKAA

SEQ ID NO: 2848 - protein, 443 aa, Wigglesworthia glossinidia endosymbiont of Glossina brevipalpis [sequence omitted]

SEQ ID NO: 2849 - protein, 430 aa, Synechococcus elongatus PCC 7942
MPDDYGTQIAEITAREILDSRGRPTVEAEVHLEDGSVGLAQVPSGASTGTFEAHELRDDDPSRYGGKGVQKAVENVSAIEDALIGLSALDQEGLDKAMIALDGTPNKKNLGANAILAVSLATAHAAATSLNLPLYRYLGGPLANVLPVPMMNVINGGAHADNNVDFQEFMIMPVGAPSFKEALRWGAEVFHALAKVLKDKGLATGVGDEGGFAPNLGSNKEALELLLTAIEAAGYKPGEQVALAMDVASSEFYKNGLYTCDGVSHEPAGMIGILADLVSQYPIVSIEDGLQEDDWSNWKTLTQQLGSTVQLVGDDLFVTNPDRLQSGIEQGVGNAVLIKLNQIGTLTETLRTIDLATRSGYRSVISHRSGETEDTTIADLAVATRAGQIKTGSLSRSERIAKYNRLLRIEAALGENALYAGAIGLGPKGR

SEQ ID NO: 2850 - protein, 321 aa, Haemophilus influenzae R2846
MIKKIAVLTSGGDAPGMNAAIRGVVRSALAEGLEVFGIYDGYQGLYNNKIKQLNRYSVSDVINRGGTFLGSARFPEFKDPNIRAKCAEILRSHGIDALVVIGGDGSYMGAKLLTEEHSFPCVGLPGTIDNDVAGTDYTIGYQTALQTAVDAIDRLRDTSSSHQRISIVEIMGRHCSDLTISAGIAGGCEYIVASEIEFNREELIQQIERSIIRSKRHAIIAITELLTDVHSLAKEIEARVGHETRATVLGHIQRGGSPCAFDRILASRMGAYAVDLLLQGKGGYCVGIQNEQLVHHDIIDAINNMQRVFKADWLKVAKRLE

SEQ ID NO: 2851 - protein, 282 aa, Thermosynechococcus elongatus BP-1
MFESFMTSVSSLPSRPLRPNWGVIFFMAIVHLGALLVFVPGTFSWSAVLLCFVLYWVSGGLGITLGWHRLVTHRSFQCPKWLEYFFVFCGTLACEGGIIEWVGLHRNHHLHSDQELDQHNSQKGFWWSHMGWMLQEVPAKAEVERLTKDINTDPVYRFLNQQFLPIQGVLGVLLYLWGGLPFVVWGIFVRLVLVYHLTWFVNSATHKFGYRTFESGDRSTNCWWVALLTFGEGWHNNHHTYPHSARHGLQWWEFDITWITIRALQGIGLAQKVRLVEAPPKQ

SEQ ID NO: 2852 - protein, 305 aa, Zea mays
MAMQAARRLASLKLQRRLLLPSQAESPSISIPTAAAAAAFLHSHATSFGYKQVREEDKSKLVGNVFSSVASSYDLMNDLMSVGLHRLWKDRLISKLNPFSAMKHLDVAGGTGDVAFRVLERIKSVSHRAMQGTLTETEEDTHIYVCDINPNMLNVGKKRAAERGYSEEHCLSWIQGDAEALSFEDGSMDGYTIAFGIRNVTHIEKALSEAYRVLKRGGRFLCLELSHVDVPVFKEIYDVYSFSVIPTIGELVAGDRQSYQYLVESIRRFPNQEKFAQMIQEAGFQRVEYENLVGGVVAIHSGLKL

SEQ ID NO: 2853 - protein, 182 aa, Triticum aestivum
MYLHSTAMAPTVMASSATSVAPFQGLKSTAGLPVSRRSNGASLGSVSNGGRIRCMQVWPIEGIKKFETLSYLPPLSTEALLKQVDYLIRSKWVPCLEFSKVGFIFREHNASPGYYDGRNWTMWKLPMFGCTDATQVINEVEEVKKEYPDAYVRIIGFDNMRQVQCVSFIAFKPPGCEEFGKA

SEQ ID NO: 2854 - protein, 444 aa, Zea mays
MATITVVKARQIFDSRGNPTVEVDIHTSNGVKVTAAVPSGASTGIYEALELRDGGSDYLGKGVSKAVGNVNNIIGPALIGKDPTQQTAIDNFMVHELDGTQNEWGWCKQKLGANAILAVSLAVCKAGAVVSGIPLYKHIANLAGNPKIVLPVPAFNVINGGSHAGNKLAMQEFMILPVGAASFKEAMKMGVEVYHHLKSVIKKKYGQDATNVGDEGGFAPNIQENKEGLELLKTAIEKAGYTGKVVIGMDVAASEFYSEDKTYDLNFKEENNNGSQKISGDALKDLYKSFVAEYPIVSIEDPFDQDDWEHYAKMTTECGTEVQIVGDDLLVTNPKRVAKAIAEKSCNALLLKVNQIGSVTESIEAVKMSKKAGWGVMTSHRSGETEDTFIADLAVGLSTGQIKTGAPCRSERLAKYNQLLRIEEELGSEAIYAGVNFRKPVEPY

SEQ ID NO: 2855 - protein, 496 aa, Ferroplasma acidarmanus
MEKIFGNIINGIEETGGERIELKSPVDGSLIGYIIDTDKDTVERAIQSSREAFNKFYLESTIKSRQELIGKLTDIVQEKATIYADLESKNTGKTIRQSTFMDIPLAISHIRYFAETDEFKFQRKITHPEYPGTEGIVQNAPMGVVASIAPWNVPFLMAVWKIIPPVLAGNAVVIKPSHYTPLTAIELVKDMKAAGFPDGLVNLVNGTGRTTGNLLVNSDHVDMVSFTGSTPTGSRIMEQAAKNIKKVSLELGGKSPNIVFADADLDHAVKGVIFGIFLNAGQLCESASRLIIEESIMDKFLQKVKTYLDSMKSGNPMDFETDISAITTKEQKEKIESLISQTVKSGGNIFYSKNMQGTPDKGTYFPPTLLTGLTPGQQISDEEIFGPVLTVYPFKSEKEAIDLANSTKYGLAAGIWTKDIEKAGRVASMIEAGTVWVNEYHLLSAAAPRGGFKKSGIGRELGLEGILEYTQTRHIFYGNNESGMSDVAYGILIKTE

SEQ ID NO: 2856 - protein, 266 aa, Gossypium hirsutum
LSIEEVEVAPPQKDEVRIKILFTSLCHIDVYFWDAKGQNPLFPRILGHEAGGIVESVGEGVTDLKPGDHVLPIFTGECKECPHCLSEESNMCDLLRINTDRVGMINDGKSRFSINGKPIYHFLGTSTFSEYTVVHVGQVAKINPHAPLDKVCVLSCGMSTGFGATVNVAKPKKGQSVAIFGLGAVGLAAAEGARVSGASRIIGIDLNPSRFEQANKFGVTDFVNPKDYNKPVQEVIVEMTGGGVDRSVECTGSIQAMISAFECVHD

SEQ ID NO: 2857 - protein, 414 aa, Bifidobacterium longum NCC2705
MTKNPKILSIVLAGGEGTRLMPLTRDRAKPAVPFGGVYRLIDFPLSNLVNSGYRQVVVLTQYKSHSLDRHISQVWRFSPLLGSYVSPVPAQQRLGKHWYLGSADAIYQTINIIEDVQPDIVVIVGADHVYRMDFEQMVQQHIESGAEFTVAGIRQPIEESNQFGVIEVDPDHPNMIKNFQEKPPTTTGLPDNPNQILASMGNYVANTKALFEALALDEKAADTKHDMGGDIAPYFASRNEAGVYDFNSNEIPGSTATDHAYWRDVGTIKQFYDAHMDLIAYVPEFNLYNQDWPIYTMSGNLPPAKFVHAGRDRLGHATDSIVSPGVIVSGGEVHHSVLSPNVRIHSWAQIVDSVLFDGVVINRRARVYKAILDKNVVLTENSTVGIDTEHDLARGFTVTPDGITVVPKNTIVDD

SEQ ID NO: 2858 - protein, 569 aa, Saccharomyces cerevisiae
MSFQIETVPTKPYEDQKPGTSGLRKKTKVFKDEPNYTENFIQSIMEAIPEGSKGATLVVGGDGRYYNDVILHKIAAIGAANGIKKLVIGQHGLLSTPAASHIMRTYEEKCTGGIILTASHNPGGPENDMGIKYNLSNGGPAPESVTNAIWEISKKLTSYKIIKDFPELDLGTIGKNKKYGPLLVDIIDITKDYVNFLKEIFDFDLIKKFIDNQRSTKNWKLLFDSMNGVTGPYGKAIFVDEFGLPADEVLQNWHPSPDFGGMHPDPNLTYASSLVKRVDREKIEFGAASDGDGDRNMIYGYGPSFVSPGDSVAIIAEYAAEIPYFAKQGIYGLARSFPTSGAIDRVAKAHGLNCYEVPTGWKFFCALFDAKKLSICGEESFGTGSNHVREKDGVWAIMAWLNILAIYNKHHPENEASIKTIQNEFWAKYGRTFFTRYDFEKVETEKANKIVDQLRAYVTKSGVVNSAFPADESLKVTDCGDFSYTDLDGSVSDHQGLYVKLSNGARFVLRLSGTGSSGATIRLYIEKYCDDKSQYQKTAEEYLKPIINSVIKFLNFKQVLGTEEPTVRT

SEQ ID NO: 2859 - protein, 791 aa, Bordetella pertussis Tohama I
MKERDTNAARPDGEPPVQWRRHSSHWGVFDAAHTGDRLKVRPFAGDPDPNRLIENLPDAIRHGVRVPEPMVRLGWLRDGPGPDTRRGSDDYVPMSWDEILDRLARKLRRVVDHHGTAGVFGGSYGWSSAGRFHHAQSQLHRFLNVALGGYVRSVHSYSSGAAQVVLPHVVGGFDEVTLCNVSWEQITRHTDVVLAFGGMALKNSRVAAGGVSRHIERQAMAQAAGRGCRFYTIGPQRDDLPTEAAATWLPVVPGTDVALMLGIAHTLVAAGLHDRDFVVDFCDGWPVFEDYLLGRADGLAKNAAWAAALCGIDAAAITELALGLAGKRVLVTVAHSLQRADHGEQPVWMGLVLAALLGQVGLEGGGYSYALGSISKYGRRKNAVSIAALPQGANHEKRFIPCARIADMLLSPGETFPYNGRTLRYPHIRLAYWAGGNPFHHHQDLGRLAQAFQRLDTFVVHEIGWTATARHADIVLPCTMTLERDDIGASPTDDLMVAMQQVVPPYADARNDYDIFSDLAQRMGCGAAMTEGRSASDWLQWIYAATREQLAAKGLDAPSFDAFWEKGELRLPQRPDDGGAQRAFRLDPAAHPLPTPSGRIQIASAQIAAFGYDDCPGHPAWLPPADPVSAAYPLYLVANQPANKLHSQFDYGGYSQASKREGREVCTLHPALARAREIGEGDIVRIYSPRGSCLAAATLSTDIREDVVRLPTGAWYDPEQDERGLPMCVHGNPNAVTRDAGTSSLAQGCSGQLTAVQIEKYLGPLRDVRAYCPPAIATRPGPPGPLAPPAG

SEQ ID NO: 2860 - protein, 297 aa, Aeromonas hydrophila
MIRDKMKAVIPVAGLGTRMLPATKAIPKEMLPIVDKPLIQYVVNECIAAGLKEIILVTHSSKNAIENHFDKSFELEATLESRVKRQLLEEIQSICPKDVTIMHVRQGEAKGLGHAVLSAYPLVGNNPFVVVLPDVIIDDAASDLKKDNLAKMVRNYKESGHSQIMVEPVAIQDVSKYGIVDCHSVDISAGESATIFNVVEKPEKDEAPSNLAIVGRYVLTPEIWPYLRTTKPGAGDEIQLTDAISELLKDGQVDAFCMQGKSHDCGDKLGYMKAFVEYGLRHKDHQHNFRNFIVSLV

SEQ ID NO: 2861 - protein, 417 aa, Yersinia pestis CO92
MESKVVVPAEGKKITVDAQGKLVVPHNPIIPFIEGDGIGVDVTPAMINVVDAAVKKAYNGERKISWMEIYTGEKSTHVYGKDVWLPEETLDLIRDYRVAIKGPLTTPVGGGIRSLNVALRQQLDLYVCLRPVRYYEGTPSPVKHPELTNMVIFRENAEDIYAGIEWKAGSPEAEKVIKFLREEMGVKKIRFPEQCGIGVKPCSEEGTKRLVRAAIEYAITNDRESVTLVHKGNIMKFTEGAFKDWGYQLAREEFGGELIDGGPWVKIKNPNNGKEIIVKDVIADAFLQQILLRPAEYDVIACMNLNGDYISDALAAQVGGIGIAPGANIGDDCALFEATHGTAPKYAGQDKVNPGSIILSAEMMLRHMGWFEAADLIIKGTEGAIQAKTVTYDFERLMEGAKLLKCSEFGDAIIKHM

SEQ ID NO: 2862 - protein, 433 aa, Borrelia burgdorferi B31 [sequence omitted]

SEQ ID NO: 2863 - protein, 232 aa, Sinorhizobium meliloti
MFKKLCAEFLGTCWLVLGGCGSAVLASAFPQVGIGLLGVSFAFGLTVLTMAYTVGGISGGHFNPAVSLGLAVAGRVPAASLVSYVIAQVAGAIIAAAVLYVIATGKADFQLGSFAANGYGEHSPGGYSLTAALVTEVVMTFFFLIIILGSTHRRVPAGFAPIAIGLALTLIHLVSIPVTNTSVNPARSTGQALFVGGWALSQLWLFWIAPLFGAAIAGIVWKSVGEEFRPVD

SEQ ID NO: 2864 - protein, 389 aa, Xanthomonas campestris pv. campestris str. ATCC 33913
MRALCWNGVNDLRVETVPDPVLVNPRDVILKVGLSTTCGSDLHFIDGYLPTMREGDVIGHEFMGTVVEVGPAVKNVRVGQRVVVPSFISCGGCWHCERKEYSLCDNTNPHWEMQESLLGHPTAGIYGYTHAFGGYAGSHATYIRVPHADVGCFEVPDEVSDEDALFLSDAGPTGFMGADFCNIQPGDTVAVWGCGGVGLMAQQSARILGAERVIAIDRLPERLAMARDVLGVEVIDYSTVDSVVDVLREMTGGRGPDACIDAVGMEAHGTGMGHAYDRVKQALHLHTDRGQALREAILACRKGGILSVLGVYGLMDKFPLGAVMNKGLTMRTAQQHGQLYVPRLLDLARAGRLKSSFLMTHKMPLEEAARGYEMFKHKHEGCVRAAFVP

SEQ ID NO: 2865 - protein, 234 aa, Nitrosomonas europaea ATCC 19718
MKIILIKAYELESELERRGKTEMLQYVRNLLPDDMKCVYIRQSEALGLGHAVLCAQPAVGDEPFAVLLADDLLEGDPVVIRQMVDVYEYYKCSVLGVQQVPREDTRSYGIVASQPIRDDLEAVQFIVEKPDPEEAPSTMAVVGRYVLTPRIFHHLIRLGKGTGSEIQLTDGIAALMQEEQVLAYRYKGQRYDCGSKIGYLEATLAMARKHPEVGAQFEQLLQSFQHQGNSEERQ

SEQ ID NO: 2866 - protein, 71 aa, Nitrosomonas europaea ATCC 19718
MKIRKAVFPVAGLGTRFLPATKASPKEMLPVVDKPLIQYAVEEAWAAGITEMIFVTGRSKRSIEDHFDKGV

SEQ ID NO: 2867 - protein, 436 aa, Chromobacterium violaceum ATCC 12472
MKKILAAMASGLAALSLPALADAPAGPAVAAAKVINSGDTAWMLTSTALVLFMTIPGLALFYGGMVRKKNVLATLMQSFAITALVTVLWAVVGYSLAFTVGTPYIGDLSRVLLDGMVYMKDAGKLAVHPLAGTIPESVFMTFQMTFAIITPALITGAFAERMKFSAMLVFMALWSLLVYVPVAHWVWAPGGWMGDKGVLDFAGGTVVHINAGVAGLVTALVLGKRVGFGREAMPPHNLVLTLVGASMLWVGWFGFNAGSAGAADGRAGMAMVTTQVATAMAALAWMFAEWIAKKKPSVLGIASGAVAGLVAITPAAGFVDVKGALAIGLAAGVICFWGATGLKHMMGYDDSLDAFGVHGVGGILGALLTGVFAVKDIGGADGSLATQALGVGVTIVYCGVVTFILLKLVDIVLGLRVAEDEEREGLDLVLHGERVE

SEQ ID NO: 2868 - protein, 437 aa, Ferroplasma acidarmanus
MASNDYKNLPKIITDVPGPESTLLLQRQREMESSTVIYLDSFPIAIKRAENSLIEDLDGNIFIDWVSGISVMNLGFNDKIRDAVKAQLDDIWHALEIPTEVRINFLEALRNSFPPEMRNYKTIFGISGADACETAINIAHAIRKKNAPTIAFEGAYHGVSGGIIAATAGRKYREAVYSDGFKIIRVPYPYELWYDYDVSDIISIMKKIMDDGEAGYDRPDSVIVEPIQGEGGYIVPPDGFLKAIREFCTEYDLTMIVDEVQSGVGRTGKMWAFEYENITPDIVCVSKSIGGGLPVSLVYYRDDYDKKLPKPFHLGTYRANPLAMAAGITVINEVPKYFDKVKSSGKEMLNKFNKIDSNLIGEVRGKGYMIGIELVDNGKPMNSKRMMELKHELLQNGLLMHTCGHYGNVFRFMGALNMPDELINTGINIFGKVLRGK

SEQ ID NO: 2869 - protein, 279 aa, Wigglesworthia glossinidia endosymbiont of Glossina brevipalpis
MKIKKVVIPIAGLGKRMLPITKVIPKELLPLIDKPLIQYAIHECINSGLKNIIFVTNYKKYLIKNYIENIFLKKKCNFQKKLNIDYIYQKSVNGLGNAILSALPKIGYKSFAVILPDVIINSYSCNNLKINNLLSMLNRFEKTGRSQVLVKLSYNTKDYGIVNCKKSKLNPNDISKIINIIEKPYIKNSIPSLSVVGRYVFSKNIWGMLEKIKPGIENEFQLTDAIKMLIKNEIVEAYCIKGSSYDCGNKLGYMKAFVKYGLYNKYFGKVFKKWLKKIL

SEQ ID NO: 2870 - protein, 568 aa, Clostridium thermocellum ATCC 27405
MENDYFDAETKKELLSIKDNPKEIEERFYKDLEFGTGGLRGIIGAGTNRINIYTVRKASQGLADYIKSLGLQDRGIAIAYDSRYKSPEFALEAAKVFAGNGIKAFLFDELRPTPELSFTVRHLNAAAGVVITASHNPKEYNGYKVYGEDGGQLPVEASNKVISYINKIEDITQVKVMEKDEAIEKGLLRIIGKEIDDEYISKLKTLSANPELAAEIGKTFKIVYTPLHGAGNKPVRRILDEIGFKNVLVVKEQELPDSEFSTVKSPNPEEREAFELAIELAKKENVDLIIGTDPDCDRVGIVVRNKEGEYVPLTGNQTGCLLLEYILSQKKQRGELPENGFVVKTIVTTELARAITDAYNVELVEVLTGFKFIGEKIKQLDEFGDKKYLFGFEESYGYLAGTFARDKDAVVASMLIAEMAAYYKSRGLTLYEGLMELLEKYGYTLEGITSFTLKGKDGVEKIKSAMKNLRENRVVKFGEYEAVAVRDYLTSERYEVATGAKEKLTLVESDVLYYELKDKAWFCIRPSGTEPKIKIYYGVTEKSMDAAKEKLKHLQDNVLSVIEPLLKD

SEQ ID NO: 2871 - protein, 980 aa, ASPERGILLUS NIDULANS FGSC A4
MSTHDNADRQSEFVADAVTAMKLEQSENNTDAPILNGGGAAMKPDSKAASPEPLIKDERASSTFMKSRSSSRTPSSRTPLKKEHSDSEDIQEKRGDDASGTEKVGGGISVKMEPGQPPKLARSSSQKVVPRPPQLFLDLPDSTEEAQKTFEVIETCQYANKYMGYTEHAMECDCAEEWVLVVVLAPSPSFRVPSQNPASSTNRACGEDSDCINRATKIECMGDCGCGPDCQNQRFQRREYANVAVIKTEKKGYGLRAEEDLRPHQFIFEYVGEVINEGPFHRRMRQYDAEGIKHFYFMSLSKGEFVDATKKGNLGRFCNHSCNPNCYVDKWVVGEKLRMGIFAERHIQAGEELVFNYNVDRYGADPQPCYCGEPNCTGFIGGKTQTERATKLSNATIEALGIEDADGWDTAVAKRPRKKKMGEEDEEYVDSVQPKSLDESGVTKVMAALMQCKEKWIAVKLLGRIQRCDDERVRNRVVKMHGYQILNSQLAMWKDDFNVVLQILDILDKFPRLTRNKIIDSKIESTIQPLTSCGDERVEQKATVLLQLWSTLEIGYRIPRMKRDPNAATPTVSQFHRRDDISDERQQRPRSRSRSRSIEAPRGPAAQKRGGQGPRNQHHQGPRTFRRRFDPLPQGWFAAESNGRTYYYSARGDTTWTRPTKPAPQPPPPPKESRDKALQSIIDGIMNAKEQTPKEKSGTPTTPQPSKPTPEGKDRQEKWRSYSEEKQKKLYENTLYPHIKYVVDKFKHKLPKDDLKRYAKDVAKKLVNSDFKNNRVTDPTKIDDKQQKKVKKFCKEFFDKAVAKHQAHEKRKAEKLAKEGSSDNKLATPVGGQSEGDGTPDVKMSDDEGSTGREGTGSLKRKRDELSVGNTNTPDDTPTSSTKRQRSSTPPPPPPPAMNTNDNNNDNDDMSVRSDEPDADADADEVVLVGNPTPPPPPPPPPQEDMRIPDADAETNGHNFEGYGEMNRSHQAQIGIEGNV

SEQ ID NO: 2872 - protein, 297 aa, Chromobacterium violaceum ATCC 12472
MTTGNLAMKRKGIILAGGSGTRLYPATIAVSKQLLPIYDKPMIYYPLTTLMLAGIQDILIISTPQDTPRFQQLLGDGSQWGINLQYAVQPSPDGLAQAFLIGERFIDGSPSALVLGDNIFYGHEFSGLLQAANIQTSGATVFAYRVSDPERYGVVEFDQQGCALSIEEKPAQPKSHYAVTGLYFYDSQVVDIAKRIKPSPRGELEITDVNNIYLQQQQLNVQTMGRGYAWLDTGTHESLLEAGQFIATIENRQGQKVACPEEIAFRNGWIDEAQVRQLAQPLQKTGYGRYLLAMLSN

SEQ ID NO: 2873 - protein, 288 aa, Escherichia coli
  unsure (1)..(288): unsure at all Xaa locations
IGQALALLLKTQXPSGSELSLYDIAPVTPGVAVDLSHIPTAVKIKGFSGEDATPALEGADVVLISAGVARKPGMDRSDLFNVNAGIVKNLVQQVAKTCPKACIGIITNPVNTTVAIAAEVLKKAGVYDKNKLFGVTTLDIIRSNTFVAELKGKQPGEVEVPVIGGHSGVTILPLLSQVPGVSFTEQEVADLTKRIQNAGTEVVEAKAGGGSATLSMGQAAARFGLSLVRALQGEQGVVXCAYVEGDGQYARFFSQPLLLGKNGVEERKSIGTLSAFEQNALEGMLDTL

SEQ ID NO: 2874 - protein, 324 aa, Clostridium thermocellum ATCC 27405
MSSVRTIGVLTSGGDAPGMNAAIRSVVRTGLYYGFKVLGIRKGFNGLINGDIEELTARSVGDIIHRGGTILQTARSPQFKTEEGLKKAMSMAKVFGIDALVVIGGDGSYRGARDISKLGLNVIGIPGTIDNDIGCTDYTIGFDTAMNTVQDAIDKIRDTAYSHERCSVLEVMGRHAGYIAVNVSISGGAEAVVLPEKPFDMDTDVIKPIIEGRNRGKKHYLVIVAEGGEGKAIEIAKEITEKTGIEARATILGHIQRGGSPTVYDRVMASQMGAKAVEVLMENKRNRVIVFKDNQIGDMDLEEALQVKKTISEDLIQLSKILAL

SEQ ID NO: 2875 - protein, 110 aa, Glycine max
LISCPAATTVNRAEAGMVAPFTVLKTMAGFPTRKTNNDITSIASNGGREQCMQVWPPGGKTKSETLCYLPDLDDAQLATVVEHLLRQGRIPCLEFESEHGFAHREHSRSP

SEQ ID NO: 2876 - protein, 384 aa, Gloeobacter violaceus PCC 7421
MVITEIKIPQLGEGLQEVLIDRLLKRSGEHIKRDEAIYVIETDKALMDVESPYEGVIQEWLVEENDVVLVGSPVARIQTIIEHSAAPHLEPRKAEFPETKPKSQIAPSSSAVIPPRTRAYCKQLGIPEDEMLQISALTEKLMPRDVDKYVAAKSNPEILPSLEQVRCDYLERSISGKQKTLLYRLKRSTELVVPGTISRPVAWFRLQEGIQILTNRGDSPLPSEFQMFAYCVAQASKKHPKFRSVLTGENSVREYRLLNLGIAIARPNDELITAVIPEADCLSPAAFANTARRQMRKAIKEGDQASESTQITLSYLGEYGIVDATPALVAPAVAVMFIGSTYGQAGKQVANIALTFDHRLINGAGAALFLNDIAQQVESFSSEL

SEQ ID NO: 2877 - protein, 395 aa, Streptomyces coelicolor A3(2)
MIPNQWYPIVEAQEVGNDKPLGVRRMGQDLVLWRDIDGNLVCQGARCPHKGANLGDGRMKGNTIECPYHGFRYGADGACRVIPAMGSEARIPGSLRVPTYPVREQFGLVWMWWGDERPTADLPPVAAPAEVTDNRKLYATKRWTRPVHYTRYIESLLEFYHVTYVHRDHWFNYIDYLLLYGTPSKFGLDGRERYLAATRITNHRVETEAEGQTIRYSFDHCQEDDPTNTTHYVITFTFPCMVHVQTEQFETTSWLVPIDDQNTEHILRWYEYEQVKPVLRFEPLRRLLPWASLYMEKWVQDPQDVRIMEHQEPKISAGGVNKFIPVDEMNAKYISMRAKLIADASAAPSSPARAAEPEPEAAGRGGSAARATGNGRGAAGGRRGTKPKEDAAARP

SEQ ID NO: 2878 - protein, 912 aa, Xanthomonas campestris pv. campestris str. ATCC 33913
MHRTTRSTCCYCGVGCGVLIHSTHDDAGERIVGIEGDPLHPANHGRLCSKGLALPQTAASQQGRVLAPELRRHRDAPRTAVSWDQALNHVTGKLAAIIDQHGPDAVAFYVSGQLLTEDYYVFNKLAKGLLGTNNIDTNSRLCMSSAVTGYKLALGADGPPTCYEDLELAQTVLFAGSNMAYAHPVLFRRLEDARARNPEIRWIVIDPRRTDTAAMADLHLAIEPGTDVALFNGMLHHLIWEGLVDARFVAAQTEDFDALKHMLREYTPRMSAEICGISHEDLVQAAEWFGRSPAALSLYCMGLNQSAHGTDKNLALINLHLATGQIGKPGAGPFSLTGQPNAMGGREVGGMATMLAAHREIGNAQERAEVERAWGVPAGRISATPGAPAVQLFERLRAGTLKAVWIVCTNPVHSMPDIDGVRAALEQAELVIVQDAFSGTDTVPYADVLLPAASWGEKDGTVTNSERCITRVRKAVEPPGQARADWWIAREVARRLEVRLAPQEGAGLFAFDTPAEIFDEHRALTVGRDLDIGGLDHAALDARGPQQWPFPAGATQGQARRYTDGVFATPNGRARFHATPYRKVAEPTSARFPMRLLTGRLRDQWHGMSRSGRAPGAFAHSPEPALRMHPDDAVRRGLQAGELVRVASKRGALVLPLELSDELRSGTVFAAMHWSAQTLASGGINEVSTPAVDTRSQQPELKHAAVRVEKAAFGWHLLAARRGDALALQQALQPLLRDCGYAGLRLHAEPGGDAGGQWAVLHAACERAPSAEWIDRLVAALQLPAGADVLEYRDLRRGLMRRVGWRLQDGHSHIDGVLLTAAQPSAANQSLLDTALRGQPWRGARLAVFAQTQGAPADPIVCTCMHVSSAAIHAAIDDGADLAQLKQRLGCGTVCGSCVPQLTRLCRPSQRA

SEQ ID NO: 2879 - protein, 383 aa, Oryza sativa
  unsure (1)..(383): unsure at all Xaa locations
MAPSSSSCHDAAASMLLCAEDNSSILWLEDEEGEVGERRSGGCRSMVGDLAAGGGGGSGGGGVEEDPGCCPPPPEECVASLVEREQAHMPRAXSGERLRGGGGDVDLRVRSEAIGWIWEVYTYYNFSSVTAYLAVNYLDRFLSQYELPEGRDWMTQLLSVACLSIAAKMEETVVPQCLDLQIGEPRFLFEVETIHRMELLVLTNLNWRMQAVTPFSYIDYFLRKLNGGNAAPRSWLLRSSELILRIAAGTGFLEFRPSEIAAAVAATVAGEATGVVEEDIAEAFTHVDKGRVLQCQEAIQDHHYSMATINTVQPKPASTRRGSASASSSSVPESPVAVLDAGCLSYKSDDTDAATIASHGGGRRKSCFDSSPVTSKKRRKLSR

SEQ ID NO: 2880 - protein, 442 aa, Leptospira meyeri
MVGPSGESMPRNFKPETIALHGGQEPDPTTTSRAVPLYQTTSYVFKDTDHAARLFGLQEFGNIYTRLMNPTTDVLEKRVAALEGGVAALATASGQSAEMLALLNIVEAGQEIVASSSLYGGTYNLLHYTFPKLGIKVHFVDQSDPENFRKASNDKTRAFYAETLGNPKLDTLDIAAVSKVAKEVGVPLVIDNTMPSPYLVNPLKHGADIVVHSLTKFLGGHGTSIGGIIIDGGSFNWGNGKFKNFTEPDPSYHGLKFWEVFGKFEPFGGVNIAFILKARVQGLRDLGPAISPFNAWQILQGVETLPLRMERHSGNALKVAEFLQKHPKIEWVNYPGLSTDKNYATAKKYHERGLFGAIVGFEIKGGVEKAKKFIDGLELFSLLANIGDAKSLAIHPASTTHQQLTGPEQISAGVTPGFVRLSVGLENIDDILVDLEEALKNI

SEQ ID NO: 2881 - protein, 234 aa, Plantago major
SIKSYVAEFIATLLFVFAGVGSAIAYNKLTSDASLDPAGLVAIAIAHAFALFVGVSMAANISGGHLNPAVTLGLAVGGNITIITGLFYWIAQCLGSIVACFLLSFVTNGLAVPTHGVSAGQTALQGVVMEIIITFALVYTVYATAADPKKGSLGTIAPMAIGFIVGANILAAGPFSGGSMNPARSFGPAVAAGDFSQNWIYWVGPLIGGGLAGLVYGDVYIASYAALPASEDYA

SEQ ID NO: 2882 - protein, 75 aa, Zea mays
  unsure (1)..(75): unsure at all Xaa locations
CKQKLVANALLAVSLAVCKALAMVKMITVXQHIGNLAGNKNMVLPVPALNAINGRSHAGNKLAMQEFMILPTGSL

SEQ ID NO: 2883 - protein, 427 aa, Synechococcus elongatus PCC 7942
MLAIILGGGAGSRLYPLTKQRAKPAVPLAGKYRLIDIPVSNCINADINKIYVLTQFNSASLNRHLSQTYNLSSGFGNGFVEVLAAQITPENPNWFQGTADAVRQYLWLIKEWDVDEYLILSGDHLYRMDYSQFIQRHRDTNADITLSVLPIDEKRASDFGLMKLDGSGRVVEFSEKPKGDELRAMQVDTTILGLDPVAAAAQPFIASMGIYVFKRDVLIDLLSHHPEQTDFGKEVIPAAATRYNTQAFLFNDYWEDIGTIASFYEANLALTQQPSPPFSFYDEQAPIYTRARYLPPTKLLDCQVTQSIIGEGCILKQCTVQNSVLGIRSRIEADCVIQDALLMGADFYETSELRHQNRANGKVPMGIGSGSTIRRAIVDKNAHIGQNVQIVNKDHVEEADREDLGFMIRSGIVVVVKGAVIPDNTVI

SEQ ID NO: 2884 - protein, 409 aa, Pseudomonas aeruginosa UCBPP-PA14
MAIEIKAPTFPESVADGTVATWHKKPGEAVKRDELIVDIETDKVVIEVLAEADGVLAEIIKNEGDTVLSNELLGKLNEGGAAAPAAPAAAAPAAAPAAQAAAPAAAGGDDAILSPAARKLAEEAGIDPNSIAGTGKGGRVTKEDVVAAVEAKKNAPAALAKPAAPAAEAPIFAAGDRVEKRVPMTRLRAKVAERLVEAQSAMAMLTTFNEVNMKPIMDLRSKYKDLFEKKHNGVRLGFMSFFVKAATEALKRFPGVNASIDGNDIVYHGYQDIGVAVSSDRGLVVPVLRNAEFMSLAEIEGGIANFGKKAKEGKLTIEDMTGGTFTISNGGVFGSLLSTPIVNPPQTAILGMHKIQERPMAVNGQVVILPMMYLALSYDHRLIDGKEAVSFLVAIKDLLEDPARLLLDV

SEQ ID NO: 2885 - protein, 202 aa, Zea mays
MGFPVGYSESEMLLPRVLLQVLLLLGHFHRFLLWAFHAVGLGDLIDLGCNYPPPSASTAQEMMEHQGRDDVASPLQHQRTEFRPVAAALIEEALPVVRFDELGGAACGSGDCAVCLGGIGGGDEVRRLGNCRHAFHRACLDRWMAHDQRTCPLCRAPLIPWAADADADAADYDMSYPSPLPPTQLRRAHELLLLLTGLGGFQ

SEQ ID NO: 2886 - protein, 435 aa, ASPERGILLUS NIDULANS FGSC A4
MVSKKASARPPSGIIGDFKVRNKQKRQLLHIKRKRAKDAARRAQRFSTKKEEAKNPKLKEERLKRNIPLTLERKRVWDDAGSDVEEPLGLSVDVERIKRLKQEEDEELNRPLDSGSEDRHSEDNGSDEEDDEDDLDSMLASSDEEDEGDEGKESKKDSRGRKPSAIPSATERATSPSQSTKSTNLNLAPEALAAKFPSLFSPDSQRPPKILITTSLNSTLHHEAEILTQLFPNSVYIRRTAHAHAHKFSIREIAKFASNREYTTLIILQEDSKKPAGLDIVHLPKGPMFHFSISNWVEGKKIPGHGKPTEHWPELILNNFRTPLGLLTAHLFRTLFPPQPDIEGRQVVTLHNQRDYIFVRRHRYVFREKRETEKAVVGADGKEIKGAEGIRTGLQELGPRFTLKLRRVDKGIQRASGQEWEWKGKMEKKRTLFQL

SEQ ID NO: 2887 - protein, 825 aa, ASPERGILLUS NIDULANS FGSC A4
MYSADQFMNPGPAPRPPTDRPKLNLSASSGVTTSLNQMSLDSPSTPSANLSLFPNTSSPSLVRTRTDQSGSAVVKEGYRFLILRESRLDFLKNEAGKVVLSIPLSAVTGVSRSEDTRMAFEIVRLANPKDATSKAALITRDVPTKSLTCEVRTDEEIYDWIDKIYERCPGMGGVSNPTNFSHRVHVGFDPRTGAFVGLPPEWEKLLTASAITKEDYKKNPQAVIEVLEFYSDIKMREQNPQYYAGLGSPAGQAKPYGSSTVGGSIAPPRPPPPPPAQRLDSGQSYSSHSASSGHSPSKSGSDRALDQQQQLEKMKQMADLERQRVEEDRRRRDEEQSRLEQDAYNASLPKTRVPLAKQELGGYGSPDPSMNDRYKPSRPAPQAPGSARQNQDPARQLTAQRPAPSPPTAGQRPGDYSSNGASRAPGYDSYNSRYASQDSRTQTSAARTQNNGKTQQAHGPPPSKLPAPVQPVKPLNIANKQAPKKATPDGVRQAEAALTKKADPHKKEVRMSAMSENEVMDRLRSVVSKDNPNESYSKQRKIGQGASGSVYVARVKENATSGVARELYRQYGPRCQVAIKQMDLRSQPRKELIVNEIIVMKDSQHANIVNFLDSFLQEQSNELWVVMEFMEGGALTDVIDNNRVIQEDQIATICAETCKGLAHLHSQSIIHRDIKSDNVLLDRAGHVKITDFGFCAKLTETKSKRATMVGTPYWMAPEVVKQKEYGPKVDCWSLGIMAIEMIESEPPYLNEEPLKALYLIATNGTPRLKAPEKLSKELKSFLSVCLCVAVDSRATAQELLEHDFLKTGCSLASLAELLRWKKNTQ

SEQ ID NO: 2888 - protein, 199 aa, ASPERGILLUS NIDULANS FGSC A4
MATGPATQSLKCVVTGDGAVGKTCLLISYTTNAFPGEYIPTVFDNYTASVMVDGRPISLGLWDTAGQEDYDRLRPLSYPQTDVFLICFSIVSPPSFDNVKSKWFPEIEHHAPNVPIILVGTKLDLRDDPAQLESLRMRKQEPVTYEQALAVAKEIRAHKYLECSALTQRNLKSVFDEAIRAVLNPRPATKQRNKKCTIL

SEQ ID NO: 2889 - protein, 289 aa, Glycine max
MAASDRTVLQFSSSSSSSSQILSAKVHPLVIFNICDCYVRRPDQADRVIGTLLGSVLPDGTVDIRNSYAVPHNESIEQVALDIEYHHNMLISHQKVNPKEIIVGWYSTGLGVTGGSALIHEFYSREVPNPIHLTVDTGFTNGAGTIKAYVSNNLSLGERQIAAQFQEIPLDLRMVEAERIGFDMLKATAVDKIPSDLEGMEASMQHLLVLIDDIYKYVDDVVEGRVAPDNKIGRFISEAVGSLPKLSPSVFDKLVNDSLQDHLLLLYLSSITRTQLSLAEKLNTAAQIL

SEQ ID NO: 2890 - protein, 324 aa, Zea mays
SFSSSSPSPPPPQETAQEASPSPPREEVAVSAPALPSPATQGGGRVVASPYAKKLAKDLGVDLFSVTGSGPGGRIVAKDVEAALAAPKKAAPVTAARSDVPLGSTVPFTTMQGAVSKNMVESLAVPTFRVGYTITTDALDQLYKKIKSKGVTMTALLAKATAMALVQHPVVNSSCRDGKSFTYNSSINIAVAVAIDGGLITPVLQDADKLDIYSLSRKWKELVDKARAKQLQPHEYNSGTFTLSNLGMFGVDRFDAILPPGTGAIMAVGASEPTIVGTKDGRIGIKNQMQVNVTADHRVIYGADLAAFLQTLAKIIEDPKDLTF

SEQ ID NO: 2891 - protein, 160 aa, Acinetobacter sp. ADP1
MTNLYQFEAELLEGDTKSLADYQGKVLLIVNTASKCGFTPQFAGLEKIYEKYKDRGFEVLGFPCNQFGGQDPGSNNEIGAFCQRNYGVSFPMFAKVDVKGPEAHAIFRYLTREAKGILGSENIKWNFTKFLVGRDGKVLNRYAPTTKPESLEEDIEKALA

SEQ ID NO: 2892 - protein, 476 aa, Acinetobacter sp. ADP1
MSQKKSVIFKNLLPVIKQYQQAGFTHEKIVALLKDQHDLDLVTTETFKSYLYRYAKVTPTPSESLKMTNTIQTPREIKKSSKLEHVCYDIRGPVLRAANEMEEQGHKIIKLNIGNPAPFGFEAPQEIINDVALNLPNAIGYTDSKGIFPARKAICQYYQQKGIRDMHVNDVYVGNGVSELIVMAMQGLLNDGDEMLVPMPDYPLWTAAVNLSGGTAIHYKCDEENSWYPDIVDMESKITPNTRGIVVINPNNPTGSVYPRHVLQQIVALAKKHDLILFADEIYDKIIYDGIEHVALASLAGDQLCISFNGLSKSYRVAGYRSGWMAITGDKSRAKDYIEGLDMLASMRLCANHQAQYAIQTALGGYQSINDLIRPSGRLYEQRNIAWEMLNEIHGVSCVKPEGAMYCFPKLDPNIYQVEDDEQLMLDFLRAEKVLLVQGTGFNWPTHDHFRLVFLPAENELREAITRLSRFLATRR

SEQ ID NO: 2893 - protein, 264 aa, Zea mays
MSAIDSAWQLLIANFTEFQLATVVTFLLHETVFFLSGLPSLLFERFGLFAKYKIQKKSNTSAYQNRCVLRLILYHVCVNLPVMIFSYPAFKFMGLRSSLPLPHWSVVVSQVLFYFVLEDFIFYWGHRALHTKWLYKHVHSVHHEYATPFGLTSEYAHPAEILFLGFATVVGPALTGPHLFTLWLWMVLRVLETVEAHSGYHFPWSPSNFLPLYGGSDFHDYHHRVLYTKSGNYASTFVYMDWLFGTDKDYRKAKTIEEKEGKNL

SEQ ID NO: 2894 - protein, 327 aa, Zea mays
  unsure (1)..(327): unsure at all Xaa locations
MDGGGGAGGAEGELTAQETALYDRQIRVWGVDAQKRLSKAHVLVCGMNGTTIEFCKNIVLAGVGSLSLMDDNVVTEEDLNANFLIPPDESIYGGRSRAQVCCESLIDFNPMVRVFVEKGDPSLIDGEFLDKFDIVVLSRASLKTKKKPGGATEQQELTYSSLQXLSLCLGIVYRSRLAKYTLTQTYLVHVLLPEYSEAISVPWNSLPKKTAKLYFAMRVLEDYELSEGRSPGETTLSDIDAVLARRKDMCDKMSLNESRIPTTLVERLLAAGKKEHPPVCAILGGILGQEVIKSISCKGDPVKNFFYFDVADGKGVIEDIPPPPPAK

SEQ ID NO: 2895 - protein, 105 aa, Zea mays
  unsure (1)..(105): unsure at all Xaa locations
YQWQQFHTELELLHVKGIQHDCIXHAEELEQYMMEGTYNHKVIAIDDEPHETNIYLMNHVDKTHKQEIDWYIEKGHKSLYDSEAKHMIMXNIDQEPDKGLTEEHQ

SEQ ID NO: 2896 - protein, 492 aa, Oryza sativa
MDPYKHRPSSGSNSTFWTTNSGAPVWNNNSALTVGERGPILLEDYHLIEKLAQFDRERIPERVVHARGASAKGFFEVTHDISHLTCADFLRAPGVQTPVIVRFSTVVHERGSPETLRDPRGFAVKFYTREGNFDLVGNNMPVFFIRDGMKFPDMVHAFKPSPKTNMQENWRIVDFFSHHPESLHMFSFLFDDVGIPLNYRHMEGFGVNTYTLINKDGKPHLVKFHWKPTCGVKCLLDDEAVTVGGTCHSHATKDLTDSIAAGNYPEWKLYIQTIDPDHEDRFDFDPLDVTKTWPEDIIPLQPVGRMVLNKNIDNFFAENEQLAFCPAIIVPGIHYSDDKLLQTRIFSYADTQRHRLGPNYLMLPVNAPKCAYHNNHHDGSMNFMHRDEEVNYFPSRFDAARHAEKVPIPPRVLTGCREKCVIDKENNFQQAGERYRSFDPARQDRFLQRWVDALSDPRITHELRGIWISYWSQCDASLGQKLASRLNLKPNM

SEQ ID NO: 2897 - protein, 467 aa, Pseudomonas aeruginosa PAO1
MMESYDVIVIGAGPGGYNAAIRAGQLGLKVACVEGRETLGGTCLNVGCMPSKALLHASELYAAASGGEFARLGIRVSPELDLAQMMKQKDESVAALTRGVEFLFRKHKVQWIKGWARLQGEGRVGVALADGGHAQLEARDIVIATGSEPAPLPGVPVDNQRILDSTGALELVEVPRHLVVIGAGVIGLELGSVWRRLGAQVTVLEYLERICPGLDGETARTLQRALTRQGMRFRLGTRVVAARSGEQGVELDLQPAAGGATESLQADYVLVAIGRRPYTEGLGLETVGLASDRRGMLENQGQRSAAPGVWVIGDVTSGPMLAHKAEEEAIVCIERIAGHAAEMNAEVIPSVIYTQPEVASVGLGEEQLQAARREYKVGRFPFSANSRAKINHESEGFIKILSDARSDQVLGVHMIGPGVSEMIGEACVAMEFSASAEDLALTCHPHPTRSEALRQAAMDVHGRAMQN

SEQ ID NO: 2898 - protein, 404 aa, Mycoplasma capricolum subsp. capricolum
MNYNNKKTLKDIDVKNKTVLVRVDFNVPIQNGVITDDNRIIAALPTINYLIENDAKIVLFSHLSRIKTNEDKLKKSLAPVAKRLEELLNKKVKFINQTRGKELEQAVSLLQTKEIILVENTRFEDVLDDQVVKYESKNDPELGKYWASLGEVFVNDAFGTAHRSHASNVGIASNIKISAIGFLVEKELKMLSQAVNDSKKPFIAILGGAKVSDKIGVIENLLPKVDKLLIGGGMSYTFLKAQGRSIGKSLLEEDKIDLAKHYLEVGKDKIVLPVDTACAKEFADVKPTIFETNIPDEWDGLDAGPKTIEMYKEEIKKAKTIVWNGPVGVFEFKNFETGTKSICQAIAEQTKTGAFTLIGGGDSASAAINMGFKDNFSWISTGGGASLEFMEGKELRGISAIQNK

SEQ ID NO: 2899 - protein, 871 aa, Thermosynechococcus elongatus BP-1
MTLDAADLDAITQEARHCFLYEDAPEYLLLLEQWAEQVVTDPERHYTAEDYNTLMRAAHSLKGGAGIAQLSELQALSHRLEDILEALKEGRLGDRPRAHHLLVQGIEQAQELLAAAKQNHSLTPTPPYQALLAALTELLSTVSDPSSPPTVAPPDLRTALTQTLEESLQLLEASATDAERETALAQLIATAHTLGKQYPLPWLQQLAAELPKLAADLPLGELVPAIVAECRQLQQAELVKLLPPEPTPPPPAETAPPQDSYLRIPVSRLDRLGNTVSELLIGQERLTLYQQQFLRANRELKQRLDQFRPIRDQVQTFYDRLATPLGGPGRPTNGHNDFDALEFDRYTELHTALQDFQELLVRIQETGADIDLLSRDLQEALDLNRQHLNSLYAELTNSRLVPFRQLAQMFVTAVQALGDRHHKPVQLVIEGGDTLVDQVILQQLKAPLTHLVRNAFDHGLEPPKQRQQLGKSPTGTIWLRARLRGNAVEIQVADDGRGIDLQRVSQKAVELRLCSAEQVPHLSREQILEFLFVPGFSTAKQVSDLSGRGVGLDVVREQVQRSRGHLQITTEPQRGTTFTLTLPLTLSLLPMVLCQVGELTLAIPDLSIREVIALKEYTDIRHPSATIDWQGQSIPLYPLHQLLPYQRPLSGPTRPLGVGVVVDVAGQAVALAVNYLIAERELVVKPFDQTVPVPPYVMGCTVLGSGEVVPVLAPDNFTVLLRPVEVRASPMESPQQPITPQVLIVDDSITVRRLLDRVLRQAGYNVVQCRDGKEALDFLLAAGDQVSLVITDIEMPRLDGYDLLEAIRLSARLRHLPVAMLTSRGGDTHRQKALQLGANGYITKPFQPQGILQTVTQLLTGRHGGVATLSQ

SEQ ID NO: 2900 - protein, 207 aa, Triticum aestivum
  unsure (1)..(207): unsure at all Xaa locations
MRSWANRPHSSLLASFLAASWLLVAASPQELHEASGSRILHHTKSHTHEVHCSRERSRAAWKAVDEYLMPFVEKEKYELPSKCRLRPENDMFREQEQHKIHFDCXEWRCGFCKKSFRAEKFIDQHFANRHSNQXNAAAAARNRHLCENLADSCFPITRGHSASRLHEFFLRQFCEGSFLTMGASKTFPLKGGRNQNKPCILPGSLAS

SEQ ID NO: 2901 - protein, 492 aa, Oryza sativa
MDPYKHRPSSSFNGPLWSTNSGAPVWNNNNSLTVGSRGPILLEDYHLVEKLANFDRERIPERVVHARGASAKGFFEVTHDITHLTCADFLRAPGVQTPVIVRFSTVIHERGSPETLRDPRGFAIKFYTREGNWDLVGNNFPVFFIRDGMKFPDMVHSLKPNPKSHVQENWRILDFFSHHPESLHMFTFLFDDIGIPADYRHMDGSGVNTYTLVNRAGKSHYVKFHWKPTCGVKSLLDDEAVTVGGTNHSHATQDLYDSIAAGNFPEWKLFIQTIDPDHEDRFDFDPLDVTKTWPEDIVPLQPVGRMVLNRNIDNFFSENEQLAFCPGIIVPGIYYSDDKLLQTRIFSYSDTQRHRLGPNYLLLPPNAPKCAHHNNHYDGFMNFMHRDEEVDYFPSRYDPAKHAPRYPIPSATLTGRREKVVIAKENNFKQPGERYRSWDPARQDRFIKRWIDALSDPRLTHEIRSIWLSYWSQADRSLGQKLASRLSAKPSM

SEQ ID NO: 2902 - protein, 255 aa, Oceanobacillus iheyensis HTE831
MFKDKVVLITGAAGGIGLEAAKAYAHEGAKLALVDLKNEALEKAASEIETEEILLITANVGKEEDVKNYVDRTKEQYGKIDIFINNAGINGQFKNIIEQTKENFSNVFDVNVMGVFFGMKYVLQVMKLQKSGVVINTASNGGLLGAPGMSAYVASKHAVIGLNKTAALEMAEYGVRVNAVAPSGVNTEMMRSIEKNAMGDKAEEARAQFEASVPMNRYATAGEIANLMLFLSSDKASFISGSYYRIDGGQGATSV

SEQ ID NO: 2903 - protein, 152 aa, Apium graveolens
AIMFYAPVLFSTLGFKDNASLYSAVITGAVNVLSTVVSIYVVDKLGRRILLLEAGVQMFIAQIIIAIVLGIKVTDHSDNLGTAYAVIVVVMICTFVSAFAWSWGPLGWLIPSETFPLETRSAGRSVTVCVNLLFTFVIAQAFLSMLCHFKFG

SEQ ID NO: 2904 - protein, 198 aa, Streptococcus mitis
GIEDILVVTGKSKRSIEDHFDSNFELEYNLKEKGKHDLLKLVDETTGIRLHFIRQSHPRGLGDAVLQAKAFVGNEPFVVMLGDDLMDITDDHAVPLTKQLMNDYETTHASTIAVMPVPHEDVSAYGVIAPQGEGINGLYSVETFVEKPAPEDAPSDLAIIGRYLLTPEIFDILENQAPGAGNEIQLTDAIDTLNKTQR

SEQ ID NO: 2905 - protein, 348 aa, Chromobacterium violaceum ATCC 12472
MAHDWEKVLLSPDTPAESALRVLDDSGLRLVLVVDEQRRLLGTLTDGDVRRALLRHVNFMTAAVADIMHREPRVALASASREQLRHLMEQHSLLHIPLLDHDDRVVGLETYQEVLQRPRRDNWVFLMAGGFGKRLRPLTDNCPKPMLLVGGKPMLQTILEGFIAAGFHRFYISVHYLPETIKNYFGDGSKWGVTIVYIEEDQPLGTGGALGLLPGTDDLPIIMMNGDILTRLDFNALLDFHEKHAADLTLCVREYDVQIPFGVVEGNDVTVTSIVEKPKHRFFVNAGIYVVTPQAIARVLPSMRVDMPDLIKQIIADQRNVSMFPIREYWLDIGRPEDFDVAQTSIAQ

SEQ ID NO: 2906 - protein, 116 aa, ASPERGILLUS NIDULANS FGSC A4
MADVEMKEASSSKTKAVSKAEGSGDGKKKFEVKKWNAVALWAWDIVVDNCAICRNHIMDLCIECQANQGSSTTEECTVAWGICNHAFHFHCISRWLKTRQVCPLDNKDWEFQKYGR

SEQ ID NO: 2907 - protein, 393 aa, Ferroplasma acidarmanus
MNYENEHIANTYQRLPVNVLNGNGAILHDINGKRYIDMMGGYGVAILGYGNKKIKEAVCRQFDTIPIAHASEYTAAREEFIKNLTGIVPAGLDKFYLGNTGAEAIEAAIKVVIKSSKNHKIIAMTNSYHGKTAGALSITYSEKYRQSFGDLLIKNVEFIRYNNMEDLDKIRKDNDISAVFFEPVQGEGGINIPDRDYVRELRQITEEKGIILVADEIQSGLGRTGKMWAHEHFGIKPDIITIGKGIGGGIPLSVTAGKPEFMDNLAKGEQSSTTGGNPIAMASGSAVIEQLTDDLINEVAVKGELFRNTLKEYLADSRIVKEIRGLGLMDAIELRVKFLPVFMDIINRGVLPLYSGINILRMLPPYVISDAEITEAAKIMSEGIKSYNKEVAP

SEQ ID NO: 2908 - protein, 185 aa, Zea mays
SLPVLGSLVPIVGGVALASFTEVSFNWTGFWSAMASNLTNQSRNVLSKKLLAGDKDVMDDINLFSVITVLSFLMSCPLMLFAEGIKFTPGYLQSTGLNLQELCVRAALAGLCFHGYQKLSYLILSRVSPVTHSVANCVKRVVVIVSSVLFFSTPISPVNALGTGAALAGVFLYSRLTRTKKPKDA

SEQ ID NO: 2909 - protein, 376 aa, Corynebacterium glutamicum ATCC 13032
MTLSERKLTTTAKILPHPLNAWYVAAWDYEVTSKKPMARTIANKPLALYRTKDGRAVALADACWHRLAPLSKGKLVGTDGIQCPYHGLEYNSAGRCMKMPAQETLNPSAAVNSYPVVEAHRFVWVWLGDPTLADPTQVPDMHQMSHPEWAGDGRTISADCNYQLVLDNLMDLTHEEFVHSSSIGQDELSESEFVVTHTEDSVTVTRWMHDIDAPPFWQKNMNDKFPGFEGKVDRWQIIHYYYPSTICIDVGVAKAGTGAQEGDRSQGVNGYVMNTITPDSDRSSHYFWAFMRNYRLESQTITTQLRDGVSGVFKEDEDMLTAQQDAIDANTDYEFYSLNIDAGGMWVRRILEEALSKEGRLDIPTTFPRATPKPEA

SEQ ID NO: 2910 - protein, 519 aa, Synechococcus sp. PCC 7002
MTDAATIQKIKLTKIEQAKQAKPGLAIKDELATLAQAGWEAMDQDDLIIRLKFLGLFHRPVTPGKFMLRLRTPHGILNSAQVRALAEIVQRYGEDGSADITTRQNIQLRGIRLEDTPEILTKLKQVGLTTVQSGHDNVRNITGSPVAGIDPEEYFDTRELAAQLQNMITNYGEGSLEFSDLPRKFNICLEGAPDNSSHVEINDIGFVPAFKDGQFGFNVLVGGYFSAQRQAEGISINVWVPPNEAVLAVSRGILALYTRHSAEEGLRGNRAKARVLWLVEAWGVNAFRARLEAEIGQSLEPAAPEHALTMDKRDHIGVYAQKQAGYHYVGLHVPAGRLTAEDMFEVARLAETYGNGEIRATVEENFIIPYVKSENVEALLQEPLLEKFSVNPSTLVRSFVSCTGNRYCNFALVETKEQGLALARELDAELDIPQRVRMHWTGCPNSCGQAQVGDIGFIGSKAKVDGAIVEAVNVLTGGTVGNQASLGAPVAQKVPCGDTLKATVKHILIEQFGATPKSE

SEQ ID NO: 2911 - protein, 180 aa, Ralstonia eutropha JMP134
MMTAEQARELWANSEEIVSAQEVQASLDRMAKDITAKMGDAFPLVLSVMGGAVVFTGMLLPKLQFPLEFDYIHLSRYNNKTVGGEMQWRVAPRESVRDRVVLVLDDILDEGETMAAIRQRIMDMGAKEFHAAVLCEKTLTKLKPMHPDFCGFQVPDRYVFGCGMDAKGYWRNLGTIRALM

SEQ ID NO: 2912 - protein, 399 aa, Azotobacter vinelandii
MAIDIKAPTFPESIADGTVATWHKKPGEPVKRDELIVDIETDKVVMEVLAEADGVIAEIVKNEGDTVLSGELLGKLTEGGAATAAPAAAPAPAAAAPAAAEAPILSPAARKIAEENAIAADSITGTGKGGRVTKEDAVAAAEAKKSAPAGQPAPAATAAPLFAAGDRVEKRVPMTRLRAKVAERLVEAQSSMAMLTTFNEVNMKPVMELRAKYKDLFEKTHNGVRLGFMSFFVKAAVEALKRQPGVNASIDGNDIVYHGYQDIGVAVSSDRGLVVPVLRNAEFMSLAEIEGGINEFGKKAKAGKLTIEEMTGGTFTISNGGVFGSLLSTPIVNPPQTAILGMHKIQERPMAVNGQVVILPMMYLALSYDHRLIDGKEAVTFLVTMKDLLEDPARLLLDV

SEQ ID NO: 2913 - protein, 484 aa, Lactobacillus plantarum
MTEKLTTETGQPWANNEHSQTAGARGPVLMQDYNLLEKLAHFDRERIPERVVHAKGAGAKGFFELENDMGEYTKADLFNGVGKKTPVILRFSQVAGEKGYPDTVRDVRGFALKFYTQQGNYDLVGNNTPVFFVNDPLKFPDFIHSQKRDPKTNRRTQNMQWDFWAHSPESLHQVTYLMGDRGLPASYRTMNGYGSHTFKWVNQNGEQFWVKYHFISDQGVKNMTAQAAEKAMSQDLDYLQDDLYDAIQEKNYPSWTMYVQILPYEEGLNYKWDIFDVTKVISHKDYPLIKVGKLTLNENPTNNFTDIEEAAMSPANFVPGIEPSPDKLLQGRLFSYKDAQRYRLGANFEDLPVNKPVVPVHNYERDGYMKINNQGAEVNYEPNALHGPEEVPDAALSPDSVRGETRAQPYRYQVDYTTQAGDLYRLMSEPEQERLINTIKDALGQVTLPGVKELEIKQFYEADKNYGTRVANALGMNIADIISD

SEQ ID NO: 2914 - protein, 227 aa, Plantago major
MVESCTKMNFEETELRLGLPGGAAAAGEKTTNNNNYGKRGYEQTVDLKLNLSSKDLPNQTDLAENKKNDQPVKPPAKAQVVGWPPVRNFRKNVMAVQKTEKAEESGGSAAFVKVSMDGAPYLRKVDLKMYKTYEELSDALGKMFSSFTMSKCDAQGMMDFMNESKLMDLLNGSDYVPTYEDKDGDWMLVGDVPWEMFVGSCKRLRIMKGTEAIGLAPRAMEKCKSRS

SEQ ID NO: 2915 - protein, 1137 aa, Oryza sativa
MSSSRSNNRATCSRSSSARSKHSARVVAQTPMDAQLHAEFEGSQRHFDYSSSVGAANRSGATTSNVSAYLQNMQRGRFVQPFGCLLAVHPETFALLAYSENAAEMLDLTPHAVPTIDQREALAVGTDVRTLFRSHSFVALQKAATFGDVNLLNPILVHARTSGKPFYAIMHRIDVGLVIDLEPVNPVDLPVTATGAIKSYKLAARAIARLQSLPSGNLSLLCDVLVREVSELTGYDRVMAYKFHEDEHGEVIAECKRSDLEPYLGLHYPATDIPQASRFLFMKNKVRMICDCSATPVKIIQDDSLTQPISICGSTLRAPHGCHAQYMASMGSVASLVMSVTINEDEDDDGDTGSDQQPKGRKLWGLMVCHHTSPRFVPFPLRYACEFLLQVFGIQINKEVELAAQAKERHILRTQTLLCDMLLRDAPVGIFTQSPNVMDLVKCDGAALYYQNQLWVLGSTPSEAEIKNIVAWLQEYHDGSTGLSTDSLVEAGYPGAAALGDVVCGMAAIKISSKDFIFWFRSHTAKEIKWGGAKHEPIDADDNGRKMHPRSSFKAFLEVVKWRSVPWEDVEMDAIHSLQLILRGSLQDEDANKNNNAKSIVTAPSDDMKKIQGLLELRTVTNEMVRLIETATAPILAVDITGSINGWNNKAAELTGLPVMEAIGKPLVDLVIDDSVEVVKQILNSALQGIEEQNLQIKLKTFNHQENNGPVILMVNACCSRDLSEKVVGVCFVAQDMTGQNIIMDKYTRIQGDYVAIVKNPSELIPPIFMINDLGSCLEWNEAMQKITGIKREDAVDKLLIGEVFTHHEYGCRVKDHGTLTKLSILMNTVISGQDPEKLLFGFFNTDGKYIESLMTATKRTDAEGKITGALCFLHVASPELQHALQVQKMSEQAAMNSFKELTYIRQELRNPLNGMQFTRNLLEPSDLTEEQRKLLASNVLCQEQLKKILHDTDLESIEQCYTEMSTVDFNLEEALNTVLMQAMPQSKEKQISIDRDWPAEVSCMHLCGDNLRLQQVLADFLACTLQFTQPAEGPIVLQVIPRMENIGSGMQIAHLEFRLVHPAPGVPEALIQEMFRHSPGASREGLGLYISQKLVKTMSGTVQYLREAESSSFIVLVEFPVAQLSTKRCKASTSKF

SEQ ID NO: 2916 - protein, 934 aa, Campylobacter jejuni
MSSVGENIKLTRRSFLKMAALSSLATPLLARSETLREASADELKEAYEGSKKVKTVCTACSVGCGIIAEVQNGVWVRQEIAQDHPVSSGGHCCKGSDMIDMVRSHVRLKYPMKKENGEWKRISYEQALSEIGEKLAAYRKENPESVMFLGSAKLNNEQAYYIRKFAAFFGTNNVDHQARICHSATVAGVANTFGYGAMTNHLGDIQRSKCIIIIGANPAVNHPVGFRHFLKAKEKGAKLIVVDPRFTKSAAKADIYARIRPGTDIAFMYGMLKIIFDEGLEDTKYLDERVFGIDKIREEAAKWTVEEVENVTGISKELLVQITHEVAKNKPTTLIWAMGLTQHTVGTSNTRLAPIVQMVLGNIGKFGGGVNILRGHDNVQGASDMACLSENLPGYYPLNEATWRYYAKIWGVDYEWLLGNFVSKDWMHKTGLSLARWWAAALNGKDGNDAIDNAGTPLKALVVMGNGITSTAQQVKVKEGLEALELLVLADPFVNEAGIIAERKDGIYLLPAATQFETSGSVTATNRSGQWRFKVVDPLYESMEDQEILFELAKKLGFYEDFTKTLRDEKGEIVWPENATREIAKAVRSIGLNGWSPERLKKHTLYWDKFDEVTLEGKDEVAGEYYGLPWPCWSDKHPGSPVLYNTDIEVAKGGMGFRNNFGLEYEGESLLAKNAPLNSPIDTGYPQITKDNIEKVLGITLSAQEKEKMGSTWSYDDSNIIATKCIEKGIVPYGNAKARAVVWTFKDKIPLHREPLHSPRNDLVQKYPSFEDQKALYRVDTKFVSVQQAKDYSKEFPLNLVTARLVNLNGAGMENRASMYLTRLTPEMFCEINPELAKEQDIKAGDMIWVHSPEGTKIHVRVKVNPGVAKDMIFLPFHFTGVMQGVDLTHNFPEGTKPYASGESANTVTNYGYDIMCQIPETKGGLCRISKDGK

SEQ ID NO: 2917 - protein, 686 aa, Methanocaldococcus jannaschii
MHKNKNLKELGETMEFKIVNTICPYCGVGCGLGLVVKDGRVIGIHPNKRHPINEGKLCAKGNYCYQFIHSKDRLTKPLIKKESGFVETTWNKALEVIAENLKTYKDEIGFFSSARCTNEDNYILQKFARVALKTNNIDHCARLCHSATVTGMSACFGSGAMTNSIEDIELADCILIIGSNTFEQHPLIARRIMRAKDKGAKIIVIDPRRTITAKNSDIYLQIIPGTNVALINAMINVIIKENLIDKEFIKNRTEGFEKLKEIIKKYTPEYASKICGVDKELIIESAKIYGNAERASIIYCMGVTQFTHGVDAVKALCNLAMITGNIGKEGTGVNPLRGQNNVQGACDMGALPNVFPGYQKVEDGYKLFEEYWKTDLNPNSGLTIPEMIDESGKNIKFLYIMGENPIVSDPDVKHVEKALKSLDFLVVQDIFLTETAKLADVVLPAACWAEKDGTFTNTERRVQLIRKAVNPPGEALEDWIIIKKLAEKLGYGDKFNYNKVEDIFNEIRKVTPQYRGITYKRLKIDGIHWPCLDENHSGTKILHKDKFLTDNGRGKIFPVEYREVAELPDKDYPFILTTGRIIFHYHTGTMTRRCKNLVEEINEPFIEINPDDAKSLKIENGDLVKVISRRGEITAKARITEDIKKGVVFMPFHFVEANPNVLTNTALDELCKIPELKVCAVKIERI

SEQ ID NO: 2918 - protein, 401 aa, Zea mays
MEAVGVTPAPVAAPEKKKLLDLKDPFPAAAAANGGAKASPAAKWAMKKKLVGGDAGYVLEDVPHLTDYMPQLPTYPNPLQDNPAYSVVKQYFVNPDDTVTQKIVVHKTSARGTHFRRAGPRQRVYFQSDEVNAAIVTCGGLCPGLNTVIRELVCGLYDMYGVSSVVGIEGGYKGFYSKNTVALTPKSVNDIHKRGGTVLGTSRGGHDTAKIVDCLQDRGINQVYIIGGDGTQKGASVIYEEVRRRGLKCSVVGVPKTIDNDIAVIDKSFGFDTAVEEAQRAINAAHVEAESAENGIGVVKLMGRNSGFIAMYATLASRDVDCCLIPESPFYLEGKGGLLEFVERRLKDNGHMVIVVAEGAGQDLIARSMNFVDTQEGARTRHGQDHRGHHAPRTSLCFYSV

SEQ ID NO: 2919 - protein, 556 aa, Zea mays
MASSWTLPDHPKLPKGKPVAVVVLDGWGEANPDQYNCIHVAQTPVMDSLKNGAPEKWRLVKAHGTAVGLPSDDDMGNSEVGHNALGAGRIFAQGAKLVDQALASGKIYDGDGFNYIKESFENGTLHLIGLLSDGGVHSRLDQLQLLLKGVSERGAKKIRVHILTDGRDVLDGSSVGFVETLENDLLELRGKGIDAQIASGGGRMYVTMDRYENDWDVVKRGWDAQVLGEAPYKFKSALEAVKTLRAQPKANDQYLPPFVIVDDSGKAVGPVLDGDAVVTINFRADRMVMLAKALEYADFNNFDRVRVPKIRYAGMLQYDGELKLPSRYLVSPPEIDRTSGEYLVKNGIRTFACSETVKFGHVTFFWNGNRSGYFDETKEEYVEVPSDSGITFNVAPKMKALQIAEKARDALLSGKFDQVRVNLPNGDMVGHTGDIEATVVACKAADEAVKIILDAVEQVGGIYLVTADHGNAEDMVKRNKSGKPLLDKNGGIQILTSHTLQPVPVAIGGPGLHPGVKFRNDIQIPGLANVAATVMNLHGFEAPADYEQTLIEVADN

SEQ ID NO: 2920 - protein, 286 aa, Zea mays
PCIAVQLVSLSRSLAGAGGAADLDDGAARSPAPNDGGDSDSSDHDPFHADADADADDDGRLPPAGSYEVIELGEQEILAPHVHSCKVCGKGFKRDANLRMHMRGHGEEYKTAAALAKPAAAAAATAQSSSSSTRCFYSCPFVGCKRNREHRSFQPLKTAVCVKNHYRRSHCDKSYTCRRCNVKRFSVLADLRTHEKHCGRDRWVCSCGTSFSRKDKLFAHVAAFDGHAPALPPEDDAAAHNVADGRTRHRLLSPPDDDGHRGSERNGELGVLLGHHARCSQGYRAR

SEQ ID NO: 2921 - protein, 476 aa, Chromobacterium violaceum ATCC 12472
MGENKMSDVFQFMKLSRNPGEKVEASVRKVEFKEIYQPLHAVDAADQAGRCLSCGNPYCEWECPVHNYIPNWLKLVEEGRLFEAAELSHQTNSLPEICGRVCPQDRLCEGACTLNQGGFGAVSIGSIEKYITDEAFKAGWRPDMSKVVWTDKTVGIIGAGPAGLACADVLVRNGVKAVVYDRYEEIGGLLTFGIPEFKLEKSIVHRRREILEGMGVEFVLNTEVGKDISFDKLMIKHDAVFMGMGAYKAMRGGFPGEDSKGVLQALPYLINNVRQSMGTLPVDEAAISMKGKRVLVLGGGDTAMDCNRTAIRQGAKRVICAYRRDEANMPGSRREVSNAREEGVEFLWNRQPLAIEPMIGGTLAVKLGETRLSEAGAKGRSAVELVPGGGEVLECDHVIIAFGFQAEAAAWFDACGVRTENGSGRTKVSRGGKYPYQTSNPKVFAGGDQVRGADLVVRAVFEGRQAAESLCAYLFD

SEQ ID NO: 2922 - protein, 398 aa, Vibrio vulnificus YJ016
MTFMFSQLPTPALDPILSLTVAFRNDPRDQKVDLGIGVYKNNKGETPIMRAVSQAQKIVADTQTTKSYVGLAGCEEFNQSMVNLLLAGTSVLDRVSAIQTPGASGALRMLGDLMKVAQPDTTVWISNPSYVNHKPVMEAAGLKVRYYRYFSPETKQVDIGQMLDDLATAGPKDVVLLHGCCHNPTGADIDFAAWQAITDLAVKNGFTPFVDIAYQGFGDGLEEDAKGLQFMADRVEEMLITTSCSKNFGLYRERTGAAIVIGKNAKESSNAKGKLLTLARSTYTMPPDHGAALVKTILQNVELTTTWKQELCEMQQRLLNLRQTLCNELRNQHNTSQFDFIESHKGMFTVLGFTPEQMGTLRDEYGIYGVGDGRINIAGLTEAHIPYVADAIVKVSQR

SEQ ID NO: 2923 - protein, 257 aa, Rhizobium etli
MKKYVCEFFGTFTLVFLGCGTLLYMRQEVGLLGVALAFGTTVVAMAYTIGPVSGAHLNPAVSLGFLVSRRLRVWDFLAYVSAQCAGAIAAAGTLYLIAMNKVGGYDITLEGFAQTGWVVYGWRAAFLFEFIATFLFVTVFLKCTAGRGAVARLAIGLALVAIHLGGITVSGSSVNPARSIGPALFAGGAALSQLWLYICAPMLGAIAAGLLQLRGIVASSEPQSLRQFESREMTSDISSPVSFFRHRRRGIPKRESH

SEQ ID NO: 2924 - protein, 181 aa, Zea mays
MASSMLSSAAVVTSPAQATMVAPFTGLKSSAAFPVTRKTNKDITSIASNGGRVSCMKVWPPIGKKKFETLSYLPDLSDVELAKEVDYLLRNKWIPCVEFELEHGFVYREHGNTPGYYDGRYWTMWKLPLFGCTDSAQVLKEVEECKKEYPGAFIRIIGFDNTRQVQCISFIAYKPPSFTEA

SEQ ID NO: 2925 - protein, 91 aa, ASPERGILLUS NIDULANS FGSC A4
MKTINFITGNKNKLAEVRAIIGNVVDVQNQTVDVPEIQGTIEEIAKEKCRHAANAVGGPVLTEDTALGFHALKGLPGPYMYDYLCASSNLI

SEQ ID NO: 2926 - protein, 557 aa, Arabidopsis thaliana
MATSSAWKLDDHPKLPKGKTIAVIVLDGWGESAPDQYNCIHNAPTPAMDSLKHGAPDTWTLIKAHGTAVGLPSEDDMGNSEVGHNALGAGRIFAQGAKLCDQALASGKIFEGEGFKYVSESFETNTLHLVGLLSDGGVHSRLDQLQLLIKGSAERGAKRIRVHILTDGGDVLDGSSVGFVETLEADLVALRENGVDAQIASGGGRMYVTLDRYENDWEVVKRGWDAQVLGEAPHKFKNAVEAVKTLRKEPGANDQYLPPFVIVDESGKAVGPIVDGDAVVTFNFRADRMVMHAKALEYEDFDKFDRVRYPKIRYAGMLQYDGELKLPSRYLVSPPEIDRTSGEYLTHNGVSTFACSETVKFGHVTFFWNGNRSGYFNEKLEEYVEIPSDSGISFNVQPKMKALEIGEKARDAILSGKFDQVRVNIPNGDMVGHTGDIEATVVACEAADLAVKMIFDAIEQVKGIYVVTADHGNAEDMVKRDKSGKPALDKEGKLQILTSHTLKPVPIAIGGPGLAQGVRFRKDLETPGLANVAATVMNLHGFVAPSDYEPTLIEVVE

SEQ ID NO: 2927 - protein, 196 aa, Triticum aestivum
MSLSNKLSIRDLDLKNKRVLIRVDFNVPMKDGAITNNNRIVQALPTVKYALDNGASAVILMSHLGRPNGEAVAKYSLKPVAAEVEKLLGQPVEFLNDCVGPDVEKACQSATGGKVILLENLRFHIEEEGSAKVEGQKVKADAEAVKKFRASLTALADIYVNDAFGTAHRAHSSMVGVDLPQRAAGFLMQKELEYFA

SEQ ID NO: 2928 - protein, 344 aa, Cytophaga sp. KUC-1
MLPKTMKAAVIREFGSLLKIEEVEVKRPGRNEILVKVIASGVCHTDLHAVEGDWPVKPKMPLIPGHEAVGYVVAVGQEVKNVKEGDAVGVPWLYSACGGCDQCITGWETLCDTQQNGGYSVDGGFAEYVIADARYVGLLPSNVNFMEMAPILCAGVTVYKGLKETEVKPGEWVAISGIGGLGHVAVQYAKAMGMHVAAIDVADDKLDLAKKLGADLVVNAKNQNPGEFLKKEVGGMHGALITAVSPIAFKQGLETLRRKGTMALNGLPPGNFDLSIFDTVLNRITIRGSIVGTRKDMKEAIEFAVEGKVKATVTPAKLENINEVFDKMKKGQIEGRVVLEIAKA

SEQ ID NO: 2929 - protein, 481 aa, Chlamydomonas reinhardtii
MSSTPSATAIDHGATYSDLLIIQGAIVFFLQVGFVSLEVGYGRSKNVKNILLKNTVNILLCAICWWAVGYAFSYGSSTDGFIGTSGFFHDGGLGAAKLWFYSWTFCLSTVTIVSGCLAERTSLVAYPVFTVLMASWVHPVVVHWAWSRDSWLLGISSECRFLDFAGGTVVHICGGMMGLVGAALVGPRIGRFEEGRAKELPGHDVSSVAIGTLFLWFGWFGFNCGSAYVYMGNMAAAAAEAAASAVASGDTSADVYASAAAAVSAAVTSGANATLHPGSTPADRVALNMTLCASVSGLTALLLSSLRSGTVDLCVCCNSLLAGLVMSTPACGFITSWAAVIYGLVAAALYMGGTRMLVRFHVDDPLESSAIHFGCGGVGTLLLALLARPTYVQELTGYDCGGLVYGGRKGAILLGLQLLGIAAITAWTAFFSVLVFYLLRRLGRLRVDQVTELAGLDNMEHGGPAYPEFNLVPYNTGSAER

SEQ ID NO: 2930 - protein, 248 aa, Magnaporthe grisea 70-15
MESVTSAGGLPPDLFDATTLQSLASVLVIVSIAYGTSLKALSPTTPGSLRFLFIWHMFDALIHFALEGSFLYHCFFSWLPVSDLTVKQLAKFHPTPEHFLGTSGRIYGAQAGDGFWANLWMVYAKADKRWAGADLTVISLELLTVFVVGPMAVWVCYDIAKKNPRYNITMIMLATAEIYGGFMTFCPEWLTANVNLDTSNFIYLWFYLVFFNMLWVFIPIYSIYVGSKDIFDAFSVRAAAGQIKKKQK

SEQ ID NO: 2931 - protein, 151 aa, Escherichia coli
GVARKPGMDRSDLFNVNAGIVKNLVQQVSKTCPKACIGIITNPVNTTVAIAAEVLKKAGVYDKNKLFGVTTLDIIRSNTFVAELKGKQPGEVEVPVIGGHSGVTILPLLSQVPGVSFTEQEVADLTKRIQNAGTEVVEAKAGGGSATLSMG

SEQ ID NO: 2932 - protein, 494 aa, Triticum aestivum
MSATCAADLGPLLGAAAANATDYLCNRFADTTSAVDSTYLLFSAYLVFAMQLGFAMLCAGSVRAKNTMNIMLTNVLDAAAGALFYYLFGFAFAFGTPSNGFIGKHFFGLKDMPQTGFDYSFFLFQWAFAVAAAGITSGSIAERTQFVAYLIYSAFLTGFVYPVVSHWIWSVDGWASAARTSGPLLFKSGVIDFAGSGVVHMVGGIAGFWGALIEGPRIGRFDHAGRSVALKGHSASLVVLGTFLLWFGWYGFNPGSFVTILKSYGPPGSINGQWSGVGRTAVTTTLAGSVAALTTLFGKRLQTGHWNVVDVCNGLLGGFAAITAGCSVVDPWAAVICGFVSAWVLIGLNALAGRLKYDDPLEAAQLHGGCGAWGIIFTALFAKKQYVEEIYGAGRPYGLFLGGGGRLLAAHIVQILAIAGFVSCTMGPLFLALKKLGLLRISAEDEMAGMDLTRHGGFAYVYHDDDEHDKSVGGFMLRSAQTRVEPAAAANSQV

SEQ ID NO: 2933 - protein, 379 aa, Arabidopsis thaliana
YSDSRGLPGVRKEVAEFIQRRDGYPSDPELIFLTDGASKGVMQILNCVIRGNGDGILVPVPQYPLYSATISLLGGTLVPYYLDESENWGLDVANLRQSVAQARSQGITVRAMVIINPGNPTGQCLSEANIREILKFCYNEKLVLLGDEVYQQNIYQDERPFISSKKVLMEMGSPFSKEVQLVSFHTVSKGYWGECGQRGGYFEMTNLPPRVVEEIYKVASIALSPNVSAQIFMGLMVNPPKPGDISYDQFARESKGILESLRRRARLMTDGFNSCKNVVCNFTEGAMYSFPQIRLPTGALQAAKQAGKVPDVFYCLKLLEATGISTVPGSGFGQKEGVFHLRTTILPAEDEMPEIMDSFKKFNDEFMTQYDNNFGYSKM

SEQ ID NO: 2934 - protein, 200 aa, Deinococcus radiodurans R1
MQQQTGGRRRQIRRVVVATSNAGKVRELQGALAPLGWQCEGLGAVTLPEETGSTYEENAALKACAAAMATGLPALADDSGIEVLALGGQPGVYSARFGNVNSDVERNVLLLEKMRRHTDRRAKFVSVLVLAYPDGKLEEYRGEVTGQLLEGPRGESGFGYDPLFLPDGSELSMGEMTLEQKQAISHRGQALAALLAAHGA

SEQ ID NO: 2935 - protein, 617 aa, Zea mays
MASISGAAAAPSSAACRLRLRRHLLLRPSHLRLRAPHSIADLSRSSSSSNSAPTRAQPLGSRPENGGGVRAVEKDPIKLWERYVEWLYQHKELGLFVDVSRMGFTEDFLRQMEPRMQRAFAAMRELEKGAIANPDEARMVGHYWLRDPALAPNSFLRSKIETTLDRILAFSQDVVSGKIQSPSGRFTSILSIGIGGSALGPQFVAEALAPDNPPLKIRFIDNTDPAGIDHQIAQLGPELATTLVIVISKSGGTPETRNGLLEVQKAFRDAGLQFSKQGVAITQENSLLDNTARIEGWLARFPMFDWVGGRTSEMSAVGLLPAALQGIDIKEMLAGAALMDEETRNTVVKENPAALLALCWYWASEGIGNKDMVVLPYKDSLLLLSRYLQQLVMESLGKEFDLDGNRVNQGLSVYGNKGSTDQHAYIQQLREGVHNFFVTFIEVLRDRPAGHDWELEPGVTCGDYLFGMLQGTRSALYANDRESISVTVQEVTPRAVGALVALYERAVGLYASLVNINAYHQPGVEAGKKAAGEVLALQKRVLTVLNEATCKDPCEPLTIDEIADRCHCPEDIEMIYKIVQHMAANDRAIIAEGSCGSPRSVKVYLGECNVDEDLQAA

SEQ ID NO: 2936 - protein, 351 aa, GIBBERELLA ZEAE PH-1
MSISIPSVQKAALIKNPGDEARIVIRSDIPVQNPGKNEILIKLACTGVCGSEIRALSGWGPYNPIVGHEGVGTVVKLGHDVDPNLLNKRVGVKWLYSACGECTICKRGYHNNCPKQLNTGKHVPGTLQEYMIADARYVTKIPDGVSSEVAAPLLCAGLTMAGAVSKLEGYAEKGDWVVILGSGGGLGHLGVQIAARLNGLRVIAVDTGEPRRKLSLESGAEHFIDFASENIEQRIKEITREGAAAVLVVTASQEAFIQAPNLVRNMGIIVTIGLPRNDFNIPLSASLCSARSLTVAGVAVGTETQMEELLQHASSGTIVPDITVLEFEQVGKVIRDLQDQTITGRVVVKIP

SEQ ID NO: 2937 - protein, 488 aa, Deinococcus radiodurans R1
MSKITGFLEQPRVKEQYAPIDARLKHYHEFMLPLDSASARLQATRCMDCGIPFCNNGCPVNNIIPDFNNLVFEDDWKAALDVLHATNNFPEFTGRICPAPCEAACTLNISEDPVGIKSIELAIIERGWQEGWVRPTPAEVKTGKKVAVVGSGPAGLAAAQQLARAGHDVTVFEKNDRVGGLVRYGIPDFKLDKSHIDRRIEQMQAEGVTFRTGVLVGDWDENSKITNLSKERVTPAELREQFDAVVLAGGSETPRDLPAPGRELNGIHYAMEFLPQQNRVNAGDKFKGQIRADGKHVVVIGGGDTGSDCVGTSNRHGAAGVTQFEVMPQPPEQENKPLTWPYWPMKLRTSTSHEEGAVREFAIATKEFIGKGGKVTGVRTVRVEMKDGKLEEIPGSEETHKADLVLLAMGFTNPMQSVLDAFGVDKDPRGNVLAGTEEHGGYLTSVPGVFAAGDMRRGQSLVVWAIREGRQAARAVDQFLMGESVLPR

SEQ ID NO: 2938 - protein, 198 aa, Streptococcus mitis
GIEDILVVTGKSKRSIEDHFDSNFELEYNLKEKGKHDLLKLVDETTGIRLHFIRQSHPRGLGDAVLQAKAFVGNEPFVVMLGDDLMDITDDHAVPLTKQLMNDYESTHASTIAVMPVPHEEVSAYGVIAPQGEGINGLYSVETFVEKPAPEEAPSDLAIIGRYLLTPEIFEILENQAPGAGNEIQLTDAIDTLNKTQR

SEQ ID NO: 2939 - protein, 317 aa, Vigna radiata
MTSIPSHMRAWIYSEYGNIEEVLKFDPNVPTPHLMENQVLIKVVAAAINPVDYKRALGHFKDIDSPLPTAPGYDVAGVVVKVGNQVKKFQVGDEVYGDINEVTLDHPKTIGSLAEYTAVEEKVLAHKPSNLSFVEAASLPLAIITAYQGLETAQFSVGKSILVLGGAGGVGSLVIQIAKHIFGASKIAATGSTGKLELFENLGTDLPIDYTKENFEELAEKFDVVYDAVGQSERALKSVKEGGKVVTIVAPATPPAIPFLLTSDGDLLEKLRPYLENGQVKPILDPKSPFPFSQTVEAFSYLKTNRATGKVVIYPIP

SEQ ID NO: 2940 - protein, 561 aa, GIBBERELLA ZEAE PH-1
MADETVISEPQPSPAPRKGVWHLLLENPYIFGLSLFASLGGFLFGYDQGVLTMESFATKFPRIYLDSSFKGWFVSTLLLCAWFGSLVNGPIADFLGRKGSMLVAVVIFTIGSAFQAGASDIPMLFAGRAVAGFAVGMLTMIVPMYVSEVSTAGIRGTLVVLQQLSITLGILYIGGHRCAPDIPYSGGTKDKPTFDPRHDVGSGGCTGQSDAAWRVPFAIQIFPAIVLGLGMLLFPESPRFYLMRRKEDKALNALAQLRRVHPDTNSLRHEYLAIKAEVLFDEAVNRDKFSGKKGVSLFIAQHGALVSNWASFRRLAIGCCIMFFQQFMGCNAIIYYAPTMFAQLGLSGGTSGLLATGVYGIVNTLSTLPALFLIDKIGRRPLLMCGAAGTFISLVIVGGIIGGYGASLASNKSAGWAGIAFIYIYDINFSFSFAPIGWVLPAEIFNLGIRSKAMAITTSTTWMCNFIIGLVTPDMLSTIGWGTYIFFAAFCLLAFFFTYFFVPETRGKSLEEMDALFGDTAAYEEKARLMEIASEIGLTEAFPDSTIDLARKKPATAEHLA

SEQ ID NO: 2941 - protein, 381 aa, Chromobacterium violaceum ATCC 12472
MKFATRAIHVGYDNAEHNRSVMPPLYQTSAFAFDHVGEDLRYAYARTGNPTRSALQDCLASLEEARHGLAFSSGMAAIDAVLRACLKPGDEVIAVADLYGGAYRLLTRVMQPAGIKVSFVDLSDPARLEAAITPATRLLWLESPTNPLLGMVDIAALSAIAHRHNVKVAVDNTFATPYLQQPLLLGADIVVHSATKYLGGHSDVLLGLVAVSDDKLHHDIRFLQNAAGAVPGPQDCFLTLRGIKTLALRMERHCDSAEKVAVWLAGQPAVAKVFYPGLPEHPGHELAKRQMRRFGGIISIRLQDDSREAASRVAQRLKLFALAESLGGVESLVNHSYTMSHGGMPAEQKAALGIVEGGLRLSIGIEDLDDILADLEQALRD

SEQ ID NO: 2942 - protein, 147 aa, Arabidopsis thaliana
MGLQGQLSDVSSDSIPLMLLALLATFFRHVRSLLLFPSSAPVVVVTSNLSVLADQLNLNRLFSYRYSDNAASDCIVCLSKLKTGEEVRKLDCRHVFHKQCLEGWLQHLNFNCPLCRSPLLPHHHQGHGSDASISAFPLRSTSTASSH

SEQ ID NO: 2943 - protein, 120 aa, Glycine max
  unsure (1)..(120): unsure at all Xaa locations
AASMISSPAVTTVNRAGAGMVAPFTGLKSMAGFPTKKTNNNITSITSNSGRVQFIQVXPPIGKNKFKTLSYLPDRNNTQLSKKVQYLXKKDXIPYYKFELKHDFLYPEHNRSPRYYNKRY

SEQ ID NO: 2944 - protein, 285 aa, Streptococcus pneumoniae
MKGIILAGGSGTRLYPLTRAASKQLMPVYDKPMIYYPLSTLMLAGIRDILIISTPQDLHRFQELLQDGSEFGIKLSYAEQPSTDGLAIGEEFISDDSVALILGDNIYHGPGLSTMLQKAAKKEKGATVFGYQVKDPERFGVVEFDTDMNAISIEEKPEYPRSNYAVTGLYFYDNDVVEIAKSIKPSPRGELEITDVNKAYLDRGDLSVELMGRGFAWLNTGTHESLLEASQYIETVQRMQNVQVANLEEIAYRMGYISREDVLALAQPLKKNEYGQYLLRLIGEA

SEQ ID NO: 2945 - protein, 301 aa, Bifidobacterium longum NCC2705
MKGIILAGGSGTRLYPLTTVTSKQLLPVYDKPMIYYPLSVLMMAGIRDILIISTPKDLPNFERLLGDGSHYGVRFSYKVQPSPDGLAQAFLLGEEFIAGEPCTLVLGDNIFYGNGLGATLRGAVAKAESGEGASVFGYYVDDPERYGVVEFDEDRKAVSIEEKPSKPKSHYAVTGLYFYDEHVVEYAKQVKPSPRGELEITDLNRMYLDAGRLNVRTLGRGYAWLDTGTMDSLFEAGEFVRTVQRAQGLPIAIVEEIAYENGWITRDQLMESAERYGKSPYGRHLKGIADGEIMLVPNQKN

SEQ ID NO: 2946 - protein, 234 aa, Triticum aestivum
  unsure (1)..(234): unsure at all Xaa locations
MESSTTDAGDKHLESYLTLGLTVSQSKKGNTKFPKVLSLLATYLGRSVQKNEELLGSNGIKEAATIFHGQKVPDLSIQLYAERIFKYAECSPSCFVXALVYMERYLQQPNVYMTPFSVHRLLITSVVVAAKFTDDAFFNNAFYARVGGIRTIEMNRLELDLLFNLDFRLKVNLETFGSYCLQLEKHAPVSPERLPVQVHRVNGSKDLSYSNSSADEFCQSKLVSYSSQALQGCS

SEQ ID NO: 2947 - protein, 282 aa, Mycobacterium tuberculosis CDC1551
MTGESGAAAAPSITLNDEHTMPVLGLGVAELSDDETERAVSAALEIGCRLIDTAYAYGNEAAVGRAIAASGVAREELFVTTKLATPDQGFTRSQEACRASLDRLGLDYVDLYLIHWPAPPVGKYVDAWGGMIQSRGEGHARSIGVSNFTAENIENLIDLTFVTPAVNQIELHPLLNQDELRKANAQHTVVTQSYCPLALGRLLDNPTVTSIASEYVKTPAQVLLRWNLQLGNAVVVRSARPERIASNFDVFDFELAAEHMDALGGLNDGTRVREDPLTYAGT

SEQ ID NO: 2948 - protein, 135 aa, Zea mays
MSETRFWEKYCRAEYLVRTKNTAAATAEAAGDEELAIFLKNDDILAKEAKLKIKRVDPTLDMEADTGDDYIHLPDHGIHRDGSKETVDADSELARRTLSQDLNRHAAVVLEGRSLDVESTDPKTLAEALARSKKG

SEQ ID NO: 2949 - protein, 460 aa, Chlorobium tepidum TLS
MQVKFGTDGWRAIIAKEYTYDNLKLAALASGKYFLSHPDKSNGVCVGYDTRFMSKEFARYTAEVLSSMGLKVFLSSSFVSTPAVSLYTREHKLAGGVMITASHNPPIYNGFKVKASYGGPAHPEVIDEIEKNLSGIDPSTLVKPAENLITMTDIKSEYIAYLESKLDLKLIRESGLKIAHNAMYGAGQDIVTRLLDESMVNCYHCSVNPGFDGINPEPIPPYITDFVEFFKEVETDVAIINDGDADRIGMLDEKGEFVDSHKLFAIVLKYLVEQKGQRGEVAKTFALTDIIDRICQKHDLKMHLLPVGFKYVSRLMTTNDILIGGEESGGIGITSFLPERDGVYTGLLMLEIMARRQKTLTGLVEELYDEYGFFSYNRLDLRVAESKKAAIIEAASGGKLKSIAGYPVTSFNDLDGFKYHFEGGWLLIRASGTEPVLRIYCEADSTEKVEKVLAFASRLA

SEQ ID NO: 2950 - protein, 413 aa, Rhodobacter sphaeroides
MAKEPMLQFVKMARETPEKRPRSLRSQDFHEICGRICPQDRLCEGNCVIEQSGHGTVTIGAVEKYITDTAWENGWVVPGKPAYERSESVGIIGAGPGGLAAADALRRAGLQVTVYDRYDRAGGLLTYGIPGFKLEKDVVARRVEQLEQAGVQFVLNCNVGEDLSFDAIRGQHDAVLIATGVYKQRDLAAPGVGSAGVVQALSYLTASNRRSFGDEVDDDGLDASGKRVVVIGGGDTAMDCVRTAIRQGATSVKCLYRRDRANMPGSQREVANAEEEGVEFVWLSAPRGFIAGDAVEGVIVQKMRLGEPDATGRQMPEIIEGADYVEPADLAIMALGFEPEDLPTLWGVPDLTVTRWGTIKADFRTHATSLPGVYAVGDIVRGASLVVWAIRDGRDAAQSILDYLAQPAVVAAE

SEQ ID NO: 2951 - protein, 258 aa, Zea mays
MGIGAVSDELLGTFVPIAVYWLYSGLYVALDGVGRLDGYRLHTREEAATKNVVSKAAVVRGVLVQQVFQVAVSLTLFAVIGDESSTGQKQPPVLVIVLQFITAMVVMDTWQYFMHRYMHINKFLYKHIHSKHHTLVVPYSFGALYNHPLEGLILDTIGGALSFLVSGMTPRTSIFFFSFATIKTVDDHCGLWLPGNILQALFSNNSAYHDIHHQLYGNKYNFSQPFFVMWDKILGTYMPYSIEQRKGGGIESKPAKLD

SEQ ID NO: 2952 - protein, 382 aa, Streptomyces coelicolor A3(2)
MIATPPASRIAELRRRSRRPALAPAPPGAVSLAMGEPDFPTPPTVVQAAVSALREGHTHYADQRGLRELRAALAARLPERPGGAWDADDVLVTHGATAALAAVVLATVGPGDRVVVPEPAYSLYADLVVLAGGTVDFVPLAPDLHWDLDALAAALPGAAMMIFSNPSNPTGIVHRREELEALGKLLDGTDVLVVSDEAYHRLAYPGHEPVSALEIESLRGRTVYVQTFSKTYAMTGWRVGYLTGPREVLDAAAQVHRTWNGSLNTAVQHAALAALDLPDGVVGAMADRYRQRRDLVVGRLSGVPGLHLVPPEGAFYGFLRYDADRPSEMVARELAACQVLVRAGAEYGPSGEGHLRISFAASEDDLWVGLERIVRYFAEARS

SEQ ID NO: 2953 - protein, 81 aa, Plantago major
ADEHFIVNWPENLPMEYAPLLCAGITTYSPLRYFGLDKPGMNIGVVGLGGLGHVAVKFAKSFGTKVTVISTSLRKKEEAYC

SEQ ID NO: 2954 - protein, 164 aa, Oryza sativa (japonica cultivar-group)
MGFPLVCYCMAIPKPLIALAKLLAAIREALQLMLFVVGICHHPERSGRPAAVDAPLPDEVKDRLPPLEFAQLLAASEHGCHGCDDDEAVAGCIVCLERLEADDVVRRLGNCAHAFHRGCIDRWIDLGRLTCPLCRSTLLPRARPAAGPRGRLGRLATRLTGVVW

SEQ ID NO: 2955 - protein, 464 aa, Oryza sativa
  unsure (1)..(464): unsure at all Xaa locations
MAASWGRLGRRRSQWGGGCGGTPGRDPHRFHDRQGRAQVRGEDEERPAAAPAAVSCSICRDASDAVAXGRSTERLHCRYEFGLDXFGSAFNAKGVMQCPNCRKIEKGNWLYANGSRPTQDVNMDEWAHDEDLYDVSYSEMPFRFHWCPFGRLAQLPSFFEEGESSPPVTFHDFMGQHMFTEHVAAVSSAPGAAHPCPYVAYLHPLXPSMASSISSRVPEXLWLVLYMIIPSSYSPPHSHRGVADQLALPLVPSWVGVRASDRQPRRHLHNINGVADQQRAPIGTVRAAGLHGDTQRRGITISQSHFSNGSGSXRPRAPNVPPMVPKLMRAHGCISEQYQQSSSSSLFAGAHRSGGMRTAPPPPLPENPAFCLFPPGSSGHNSMETDDAGGNRFYAWERDRFAPYPLMPVDCETNWWSSQQSHGTSEPAPAPRRLFGQWIGVGRSSPENRSPEGSSYRQMHTPRM

SEQ ID NO: 2956 - protein, 223 aa, Ferroplasma acidarmanus
MKIFIDTANIEEIKEANEFGLIDGVTTNPSLIMKASKGGKSFKAIATEILREVNGPVSLEVVAEKAEDMVEQALKLHALGSNAVIKIPMTLQGLKAMKILKEKEIKVNTTLIFNAIQALLAAKNGAAFVSPFVGRLDDIGEDGMAIIDQIKTEYTNYGYKTEVLVASIRNPVHVLRAALMGADAVTIPYDVIKKLAMHPKTDEGLNRFLDDWKKVSPDGSLPL

SEQ ID NO: 2957 - protein, 380 aa, Chromobacterium violaceum ATCC 12472
MTDFHTLAVTAGAHEDPFGAVMPPIYATSTYRQHAPGEHTGYEYSRSQNPTREALERAVAELEGGIRGYAFGSGLAAISTVLELLPAGSHLIAVNDLYGGTYRLFEKVRKASANLEVTYVASDDSAALEAAIRPNTRMIWVETPSNPLNQLVDLQQVSAIARRHKLIGVVDNTFASPVNQRPLDFGFDIVVHSATKYLNGHSDVVAGVAVVSRDQPELAEQLAFLHNAVGAILDAFPSFLVLRGLRTLALRIEQHNRNGLAIARWLEAQPWVEKVLYPGLESHPQHALARRQMQGYGGIVSFYLKGDVKAFLARLKLFALAESLGGVESLVCLPAAMTHASIPAERRAALGIHDNLIRLSVGVEGEAALIADLEQARRDS

SEQ ID NO: 2958 - protein, 405 aa, Chromobacterium violaceum ATCC 12472
MSLVTGRIEYMNLNWLNGLLDLPWWGNIIAALILTHITIASVTIFLHRHQAHRALDLHPIPSHFFRFWLWLTTGMVTKQWAAIHRKHHARCETQEDPHSPQVLGIKKVLWEGAELYRAACKDQSIMDKFGHGTPDDWLERNVYSKHNAKGIVLMLLIDLALFGPIGLSIWAVQMVWIPFWAAGVINGLGHYWGYRNFENEDASTNLVPWGILVGGEELHNNHHTFGTSAKLSYKWYEFDIGWMYIRMLEICGLAKVRKVAPQLAHDPSRPQLDLEHLQAIIANRYAIAARYARELKAECRAELAKLSLPELPQVNLPRKMKVWLKQDAKDLPECERDQLARILEQSHVLATIYNMRQELTRLWERSNLTREQLLHELQDWCARAEASGIAALQRFSLNLRQTALA

SEQ ID NO: 2959 - protein, 634 aa, Ferroplasma acidarmanus
MAVNNIVVGVKPVPEHVVSRGHLCGKGSVAHEALTAWDRLYYPLKKVKGELERTSWEDSIKYTIESIKNIQKKYGKDSVAFYGGCQNSLEEVYLLQKLARALGTNNVDSCARVCHDPSAKALKEIVGVGAGSNSATEIPKAKVVVVAGESVTDSHPVLIQYFLEAKEKGTKIILIDPRNTRFASFADLHLKIKPRSDIFLFNAVANYLIQNNMIKPDFIAARTEGYEKYKENVSKYTLELAVEQTGLAEKDIIEFAKYISEDKVIFSWGLGLTESTGTKGIKSYLSLPLLTGNMGKEGAGVIVYRGQTNVQGSGDLIKPDVFPNGEMNEANSEALSRIWGFKPPVNKGSSIIDTFYGSKNIKALFIMGYNPVRSLPNRKKVKEFLGSLELLVVQDIFMTDTARYADIVLPAAAWAEKEGSVASLDRLVKWRFKAVDPPGMARPDYEILSDLAKAAGYNFNSNPKELFEELKTAAPLYSHLNIDDVMDYSKDSRYPNGELHLYGEKFSTKSGKAQFIPVDSEKHNDGLILVTGRTVTRYNSDEVINRVPGMQEYNPTLWVNPSDAKNLGIENEDMVKLASKSGELDIIAKITDDVIPGVVFTYMHNPKINDIVSPEFDDETKTPKYKYTPVTVTK

SEQ ID NO: 2960 - protein, 277 aa, Azotobacter vinelandii
MQTIVTHDKLVLPKLGLGTWPMLGEECTQAVLSALELGYRHIDTAAAYENEAAVGLALERSPVPRESVHLTTKVWWDRLQPAAMRASLQRSLEALRTDRVDLFMIHWPGKDWDLPRSIETLVALREEGKARHIGVANFPLPLLRRTVEELGAPLSAIQVEYHVLLGQRRLLDYVRQHGMALIAYSPLARNRIAEVAEIRDIAARHQARPAQIALKWLLDQPAVAAIPKAASVANQRINLDAFKVTLNDRERALIDALPKNQRLVSPDFAPRWDPFDE

SEQ ID NO: 2961 - protein, 413 aa, Wigglesworthia glossinidia endosymbiont of Glossina brevipalpis
MNIIDILVPDLPESVTDAVVSNWRKKPGEYVKSGEILVDLETDKVVLEVPSPNSGKIIEIFQKNSSIVVSKQKIASLNINNYDQKKEENKIKEINFSQKEHNYECSENNKEKETKHADDINLSPSIRRSILKHNLNKNDINKNFDIKNNIENELNENNYLTKEKEKNENNIKDSSAYEKSSPRENRIKMTRLRKCIAERLLYSKNTTASLTTFNEVNMKSIHDLRKSYGDIFEKLHGIRLGYMSFFVLAVVKGLKKFPEIHAYIDGDDIVYNNYFDINIAISTERGLVTPILRNVDKMNMSEIEKRIKNLAFLGKNGKLKVEDLQCGSFTITNGGIFGSMMSTPIINPPQSAILGIHAIKDRVISINKKISINPMTYLALSYDHRLIDGKESASFLSNIKDMLENPIRMLLDI

SEQ ID NO: 2962 - protein, 463 aa, Actinobacillus pleuropneumoniae serovar 1 str. 4074
MNLQWQRYPENTRKLFKLTLPIFISQLSVAGMGLADIVMAGLVSDDDVSAIAVSNSIYFPLFLFVLGLLNVITPTVSYLNGSNQRHLIAHQIRQGFWLVLVCSVPLIIVFLNSHWILDYMNTPQAFSTKSQQYLAIMAIGVVPALLGINLRCMNDGLSNPKPAMRIMFFGLLLNIPLNYIFIFGKFGLPEMGAVGCGMATAIVNWIMFLLLFHYSYTNKSQKDIGLFNRWFEMPSGQTLLKICKLGLPIGFATFTEVMLFSTSALLLSPLGSQVVASHQAALQTSSLLFMIPMSFSIATTIVVGKTLGQKQVEQAKIISYHALITGALFALAAAVVIVILDEIIPLAFTGDPVSIAIAAHLLLFAAVYQIPDSLQAVANGILRGYKHTKPILYVTMFCYWVIGMPFGYILARTDWIVEPMAASGFWFIFCVSLSIAAGLLIYQMHKIQQIPAEQLLAKLERIK

SEQ ID NO: 2963 - protein, 484 aa, Brachymonas petroleovorans
MDAQRTLPDCSKLFLGGRWVEPAQGMYYDNENPAKRETICRVAQASAADVDAAVRGAQQALEPGSPWAQMTPAARARLLWRVAERIREQVEELAWLESLDTGKPYGEALHGDIPHAAGAFEYYAGWCSKLAGSVLPVSPRYLDYTRLEPVGVVGAIIPWNFPLQMAAMKVAPALAAGNAVLLKPAEQTPLTAFALARIFEELEFPPGVLSVLPGFGATGAALVAHPGIDKITFTGSTAVGKTIMRGAADTLKRVSLELGGKSPNIVFADADLKRAVRGATTGIYYNQGQMCTAGSRILVQDSLYDKFLEAFTAAIADLRPGDPLDPKTRMGALVSQEQFERVSHYVALGQEDGATLLAGGQGSAERGYFFPPTIFTDVKPEHRIAQEEIFGPVVSVMRFGSEEEALRLANGVSYGLAAGVWTADVGRAHRVAHGLRAGTVWVNTYNALWNEAPFGGYKQSGIGREGGREGIEPYTEVKNICLSL

SEQ ID NO: 2964 - protein, 201 aa, Glycine max
MSNEYDYLFKLLLIGDSSVGKSCLLLRFADDSYVDSYISTIGVDFKIRTVELEGKTVKLQIWDTAGQERFRTITSSYYRGAHGIIIVYDVTEMESFNNVKQWLNEIDRYANDTVCKLLVGNKSDLVDNKVVDSLTAKAFADELGIPFLETSAKDSINVEHAFLTMTAEIKKKMGSQTTTGKSAESVQMKGQPIPQKSNCCG

SEQ ID NO: 2965 - protein, 253 aa, Zea mays
  unsure (1)..(253): unsure at all Xaa locations
MAPSAVDSTHHSADGNRPGDIHRDYLDDRNAKAQDTLYTTSNGVPMPHPYETQRVGENGPLLLQDHHLIDLLSHFDRERIPERVVHAKGGGAHGIYRTTDALDDLCLADIFQQGHECPITVRFSTVGGESGTPDLARDPRGFSVKFRTAEGNWDMVANNTPVFFLRDPAKFPHFIHTHKPPPXTHLTHSDDSTVFWDYPSQNPEPAHQVLXISWRDRRLPHRWRKMHGYAGHTLKLVNKNGDWVYXQMHMKSK

SEQ ID NO: 2966 - protein, 356 aa, Zea mays
MAPSSYEVAASILLCAEDSSSILDLEAEAEEEALLARSGEPGGGAEFPVPSEECVAGFLESEAAHMPREDYAERLRSGGMDLRVRTDAIDWIWKVHTCYGFGPLTACLAVNYLDRFLSLYQLPEGKAWMTQLLSVACLSLAAKMEETYVPSSLDLQQAGDARYVFEAKTIQRMELLVLSTLKWRMQAVTPLSYVDYFLHRLRGGAAPSRRAVLRSAELILCIARGTHCLDFRPSEIALAVAATVAGEERAVDIDRAFTHRVHKERVSRCLEAIQQATATMALPQPLKSEGPSSSGRRASSSSATVPRSPTGVLDAGCLSYRRAAAAAASHASSSWRDEDDDDCPPAVCSKRRKISR

SEQ ID NO: 2967 - protein, 564 aa, Xanthomonas campestris pv. campestris str. ATCC 33913
MCSIFGIFGLQPGDDLQALRRQALECSQRQRHRGPDWSGVYVDAGAILVHERLAIVDPAGGSQPLLSEDGSLALAVNGEIYNHRELKAELLQPYAFQTGSDCEVINALYREDAPASYLNRLNGIFAFALWDKAAGRVIIARDPIGVVPLYWGHDREGRLRVASELKSLVDDCADAAQFPPGHWYDSATGALSRYYERSWREYSEVENVQVPLQELREAFERAVHRQLMTDVPYGVLLSGGLDSSLVAAVAARYARHRIEENDTTEAWWPRLHSFAIGLTGSPDLAAAEVAAAALGTVHHGFEYSFEEGLDALPEVIRHIETYDVTTIRASTPMFLLARRIKAMGVKMVLSGEGSDEIFGGYLYFHKAPNAREFHEELVRKLDALNNYDCLRANKSMMAWGVEPRVPFLDREFLDVAMRMDARFKMIDKTSTGATRIEKGILREAFAGYLPESILWRQKEQFSDGVGYGWIDGLKAHAAAHVSDRELAAADRRFPVNPPQTKEAYFYRSLFEQFFPSQAAAETVPGGKSIACSSPTAIAWDASFAAMADPSGRAIAGVHAQALAS

SEQ ID NO: 2968 - protein, 169 aa, Leavenworthia stylosa
NTERVGMIHDGESRFSIKGKPIHHFLGTSTFSEYTVVHSGQVAKINPEAPLDKVCIVSCGLSTGLGATLNVAKPKKGQSVAVFGLGAVGLGAAEGARIAGASRIIGVDLNSNRFEQAKKFGVTEFVNPKEHDKPVQQVIAEMTNGGVDRSVECTGSVQAMIQAFECVHD

SEQ ID NO: 2969 - protein, 428 aa, Exiguobacterium sp. 255-15
MITEIYAREILDSRGNPTVEVEVYTEDGGFGRALVPSGASTGEHEAVELRDGDKSRYLGKGVLKAVDNVNEKLAPEIIGYDVFDQAGIDKKMIDLDGTKNKGNFGANAILGISMAAARAAADELGLPLYTYLGGFNAKTLPTPMMNIINGGSHADNNVDFQEFMIMPVGAPTFKEALRMGAEIFHALKSVLSGMGLNTAVGDEGGFAPNLKSNEEAITVILEAIEKAGYKAGEDVYLAMDVASSEFYDKAAGKYNLAGEGKVLSTEELVEFYAQLVDKYPIISIEDGCDENDWDGHKLLTDRIGHKVQLVGDDLFVTNTEKLAEGIEKGIANSILIKVNQIGTLTETFDAIEMAKKAGYTAVVSHRSGETEDSTIADIAVATNAGQIKTGSLSRTDRIAKYNQLLRIEDMLSDVAVYDGIKSFYNLKK

SEQ ID NO: 2970 - protein, 264 aa, Bradyrhizobium japonicum USDA 110
MTQSPMLEIDLRTGQHLGGGESHEDALAAENVSLRLLLAQAEINTRGLLARAGIDARERETSEKLQKLILEELHHRIKNTLATVSAIVSQSLRGEQGLAHAQQAIAGRLLALGRAHDLLVRASLSSADLGAVVRSAVEAFDDPAESKFSISGPDLRINSAAVVAVAMTLNELCTNATKYGAFSAPKGCVDLHWTIDPQTQRLRLTWIEKNGPVIQSRAKRSFGTRLIETLGRELQGDVQLTYAERGFAYTFDAPLASLSVPMPA

SEQ ID NO: 2971 - protein, 369 aa, Brachymonas petroleovorans
MAKTGRIALFESPHQPFTFREMPVPDPKPGAAVVRVTMANICGSDLHAWHGDFKLAGLGGKLPTVLGHEMTGQIVALGEGKHTDGNGQPLHEGDHVVYTYFTGCGHCPMCLRGHRVSCDELTMAMTEPALEWPYFVGGYADYYYVKPGATIYKVPQGLPDEVVAGANCALSQVISGWERAQLTFDETVLIQGAGGLGLYACAVAKAFGARLVIAIDAVQQRLDMARRFGADATINLTELPDEKARVNLVKKLTDGRGVDVVMELVGRADVVPEGLRMLGQFGRYVTIGNINAGQTYAADPSRLVMSNKSMLGVSLYEPPTLGKALRFLERHRDTLPFAEMLSTRFPLEQINEAFAKADAREVVRASIVP

SEQ ID NO: 2972 - protein, 262 aa, Pseudomonas syringae pv. syringae B728a
MALTIQISHRIQAMSRPPLIGVTACRQQLGKYSSHTAGDKYVEAAAFAGMPVILPALEVPTEPAQLLASLDGLLFTGSPSNVEPRHYNGPASVEGTAHDVFRDRTTLPLLRAAIAQGVPVLCICRGFQELNVALGGSLHQRVQELPGYLDHREPQSEVLAVQYTPKHAVQVQPGGLLDSLGLGPGFEVNSLHSQGVDRLASDLRAEALAPDGLVEAVSMPGAPGFVLGVQWHPEWEFMDNPVSLSLFKAFREACQSYARNRR

SEQ ID NO: 2973 - protein, 354 aa, Pseudomonas syringae pv. syringae B728a
MHPKNAWYVACTADEVADKPLGRQICNEKMVFYRDQNQQVVAVEDFCPHRGAPLSLGYVENGQLVCGYHGLVMGGDGKTVSMPGQRVRGFPCNKTFAAVERYGFIWVWPGDREKADPALIHHLEWAVSDEWAYGGGLFHIQCDYRLMIDNLMDLTHETYVHASSIGQKEIDEAAPVTTVEGEEVVTARHMENIMPPPFWQMALRGNNLADDVPVDRWQICRFTPPSHVLIEVGVAHAGKGGYDAPKEFKASSIVVDFITPETDTSIWYFWGMARNFNPADEALTASIREGQGKIFTEDLEMLERQQQNLLQHPHRNLLKLNIDAGGVQSRKILERLIAAEQAGPGEQIPVMATK

SEQ ID NO: 2974 - protein, 263 aa, Neisseria meningitidis Z2491
MNVYFLGGGNMAAAVAGGLVKQGGYRIHIANRGAEKRERLGKELGVETSATLPELHSDDVLILAVKPQDMEAACKNIRTNGALVLSVAAGLSVDTLSRYLGGTRRIVRVMPNTPGKIGLGVSGMFAEAEVSETDRRIADRIMKSVGLTVWLEDEAQMHSITGISGSGPAYVFYLLDALQNAAIRQGFDMAEARALSLATFKGAVALAEQTGEDFEKLQKNVTSKGGTTHEAVEAFRRHRVAEAISEGVCACVRRSQEMERQYQ

SEQ ID NO: 2975 - protein, 538 aa, Wigglesworthia glossinidia endosymbiont of Glossina brevipalpis
MKNNNYRAGKKAEKSDLIDANEIIQKYYHITPKSGNNHNSIKFGTSGHRGESTKCTFNELHVLAISQAIVEQRKILGINGPCFVGRDTHALSDPAFNSVLEVLIANNIDVIIQSNNYYVPSPIISHAIINHNKKFISKSDGIIITSSHNPPQYGGIKYNSCNGGPANYKITKYIEEIANLILFKNLSKIKRVSLFRSKQKGNIYNRDITYKYVNDIYKVVDMESIKNSNIKLAIDPLGSSGILCWQLIEDIYKLNLTILNKNIDNTFYFLCLDYDGTIRMDCSSKPVLTNLLKLSKNFDLSFANDPDCDRHCIIESNKIIYPNHYLSVASHYLFKNRNNWNKSIGLGKTYVSSKMINSISNHLNKKLIQTPVGFKWFVDFLFYRNLGFCLEESSGATFLCSNGNTWSTDKDGIIMCLLSAEIVTNTKKRINIYYKNLENAFGCFYYKRFQYIIKEKNLGINYKINIRKIKHCILTDDKIIYYMFNINNILVEFINGWIAIRPSGTENFYRIYCESFIDDTHLKKLQKSAINIINIMLK

SEQ ID NO: 2976 - protein, 236 aa, Oryza sativa (japonica cultivar-group)
MAGADVDVGTELRLGLPGGGGGAAEAAAKAAKRGFEETIDLKLKLPTAGMEEAAAGKAEAPAAEKAKRPAEAAAADAEKPPAPKAQAVGWPPVRSFRRNIMTVQSVKSKKEEEADKQQQQPAANASGSNSSAFVKVSMDGAPYLRKVDLKMYNSYKDLSLALQKMFGTFTATGNNMNEVNGSDAVTTYEDKDGDWMLVGDVPWQMFVESCKRLRIMKGSEAIGLAPRAKDKYKNKS

SEQ ID NO: 2977 - protein, 103 aa, Oryza sativa
  unsure (1)..(103): unsure at all Xaa locations
RSTIHKQNDFKQPGERYRSWSPDRQERFILSFVGELVHPKVFPELRAIWVNFLXSCDESLGVKLFYLFPFFFLIHSHIIILISFYFFFLFSFFFFFFSLFFFL

SEQ ID NO: 2978 - protein, 477 aa, Oryza sativa
MSYNHSPSITAETINQKVRIFTYEPCGEIVRHARIIYCNLGNPQALGQRPINFFREVLSLCDNPSLIDRDEARALFSPCALKRARKIIESLPGRDSGSYTSSQGVRGLREAVADGIAARDGFPSKPDNIFLTDGASSAINMMMQILIRSHEDGILCPLPEYPLYSASIILHGGTMVPYNLTEDSIWGLEIFEVKRCLEDARASGLTIRAMVVINPGNPTGQVLSITNQEEIVEFCRKEGLVILADEVYQENVYTENKRFNSFKKVARSLGYDHHDLSIVSFHSVSMGYYGECGRRGGYMEICGFGDDVIDEMYKLASLTICPNIAGQILISLVMDPPKLGDEAFEIFMVEKEETYSSLLKRAKALQKAFNGLEGVSCNKFEGAMYLFPRLRLPQAAIKAAQLEGVSPDVFYAHRLLDATGIAVVPGSGFHPDLVSSCKKVSGTSHIRCTILPGEETITAMVPSLQAFHEAFMDEFRG

SEQ ID NO: 2979 - protein, 456 aa, Actinobacillus pleuropneumoniae serovar 1 str. 4074
MTKHYDYLAIGGGSGGIASINRAASYGKKCAIVEAKHLGGTCVNVGCVPKKVMFYGAHIAEAINSYAPDYGFDVTVNNFDFVKLIESREAYISRIHTSYNNVLAKNNVDVLNGFAKFVAAKTVEVTYADGSSEQVTADHILIATGGRPSIPAIKGAEYGIDSDGFFALREVPKRVAVVGAGYIAVEIAGVLNSLGSEMHLFVRQHAPLRMQDPLIVDTLLEVLAQDGITLHTQAIPQEVRKNADGSLVLTLADGREATVDCLIWAIGREPACDKINLDAVGVKTNAKGQIIVDKFQNTNVPNVYAVGDIIEGGIELTPVAVAAGRRLSERLFNNKPNEHLDYNLVPTVIFSHPPIGTVGLTEPQAIEQYGAENVKVYKSSFTAMYTAVTQHRQPCRMKLVCVGKDEKVVGLHGIGFGVDEMIQGFAVAIKMGATKADFDNTVAIHPTGSEEFVTMR

SEQ ID NO: 2980 - protein, 322 aa, Ustilago maydis 521
MSSALDSLKQYTAVVSDSGDFESIDAYKPQDATTNPSLILAAVKQEKYARLIDVAVKYAKEQTSDKSKQLDLATDRLLVAFGVEILKIIPGRVSTEVDARLSYNKEATIEKAKHLIALYESLGVKRERVLIKIASTWEGIQAARELESQHNIHCNLTLLFGFNQAVACAEANVTLISPFVGRILDYYKKAEGKEYASHEDPGVLSVQRIYTYYRQHGYKTIVMGASFRNIGEILELAGCDFLTISPKLLEELKNKEGPVEQKLSVEKAKSAEPIAKVSYINDQAAFLLDLAKDPMANTKLAEGIAGFAKDGATMEQMIADKL

SEQ ID NO: 2981 - protein, 239 aa, Chlamydia muridarum
MQVYNSLRTIMTNFQDKPNIRIMFDSLAPTYDKINKILSLGLHLTWNHSFVSLLGRSDHLLDLCAGTGHVALSYIQKYPQASATLVDFSTKMLENVQECHPLAPFSYVISDVTSMPLPNDTFHLASMAYGLRNLSSPLEALKEVHRVLKPKGRLGILELTRPATYNPVHLLHKLYLNLVVPSVGRFYSGNSYAYSYLKESIRNLPCDTSLERVFHKSGLHIIRKRKLLFGTATIWILEK

SEQ ID NO: 2982 - protein, 515 aa, Exiguobacterium sp. 255-15
MKKRPVALIILDGFGMRDEEFGNAVTAANKPNFDRYWEQYPHTLLNAKGEYVGLPEGQMGNSEVGHLNIGAGRVVYQSLSRINNAIKDRSFFSRQAMNDAAGHVKKYGSALHIFGLVSDGGIHSHINHLYAVLEFAKLHEIEKVYLHAFTDGRDCDPQSGAGFLRDAQAKMDELNVGQFASVSGRYYAMDRDNRWERVKKVYDVITFADGPTTKDPIAMVEASYKTDVTDEFIEPTVVVQEDGTPVAPIHDNDAIMFFNYRPDRAIQLAKTYKEKTGFTGFELPDNVPKNLLLVSMTKYSDAIDTDIVFPPEDIKNTLGETLSKQGLKQLRIAETEKYPHVTFFFNGQREEPYEGEDRILIPSPKVATYDLKPEMSVYEVTEALVDAINSDKHDAIILNFANPDMVGHSGMLEPTKKAIEAVDKCLGQVVDLIISKGGAAIITADHGNADKVLNADGSKMTAHTTEPVPCIVTVEDVELLKPLTGVLADLAPTVLDLLGADQPAEMTGKSIVLKK

SEQ ID NO: 2983 - protein, 519 aa, Orobanche ramosa
MTEQLGAAAKFRRSGGSPTKALINKPKKNMYALLISVMASMTSILLGYDTGVMSGATLYIKKDLKITDVQVEILVGLINIYSLIGSAVAGRTSDYLGRRITIVIASVIFFVGAAVMGLANNYAVLMVGRFVAGLGVGYALMIAPVYAAEVAPASSRGFLTSFPEVFINFGVLLGYLSNYAFAKFSLKLGWRLMLGVGALPAIFIGLAVIVMPESPRWLVMQGRLGDAKKVLDRTSDSPQEAQLRLADIMEAAGLPEDCHDDVVPVLKQDRGGGGVWKELIVHPTKPVLHITIAAVGCQFFQQASGIDAVVMYSPRIYEKAGITSDEKKLLATIAVGLCKTVFILVTTFMVDRIGRRVLLLTSCGGLVLSMLTLATGLTVIDHYGADRFPWVVVLCVLTTYSSVAFFSMGMGPIAWVYSSEIFPLKLRAQGCGLGVAINRATNGVILMSFISLYNAITIGGAFYLFSGIGIVTWIFFFTLLPETRGRTLEDMEVLFGTFFKWRTTMRELHKKEAEDALYA

SEQ ID NO: 2984 - protein, 394 aa, Exiguobacterium sp. 255-15
MNKKSIRDIDVKGKRVFTRVDFNVPLEDGKITDDTRIRAALPTIKHLVDGGAKVILASHMGRPKGEKNPEFSLAPVVARLSELLGKDIKLVEEAYGPVAEEAVSKLEEGDVIVLENVRFYPGETKNDPELAEGFAKLADVFVNDAFGAAHRAHASTEGIAHHVETAVAGLLIEKELQVLGKALSNPDRPFTAIIGGSKVADKIGVIDHLLDIVDTLIIGGGLSYTFLKAQGYEVGTSLLEVDKIEQAKEFMKKAEDKGVKFLMPVDCVITKEFGEETYVGSRDIDSIPADHMSLDIGPKTVELYAEAIKASKLVVWNGPMGVFELDKYANGTKGVAQALADSDAYSIIGGGDSAAAAEKFGLADKMSHISTGGGASLEFMEGKALPGVEALNDK

SEQ ID NO: 2985 - protein, 357 aa, Dioscorea gracillima
LKQKIDRMYNGEKINCTENRSVLHIALRAARDKVIESDGKNVVPDVWHVLDKIKEFSEIIRSGSWVGATGKALTDVVAVGIGGSFLGPLFVHTALQTDPEAAECAKGRQLRFLANVDPIDVARSIAGLNPETTLVVVVSKTFTTAETMLNARTLREWISGALGPQAVAKHMVAVSTNLTLVEKFGIDPANAFAFWDWVGGRYSVCSAVGVLPLSLQYGFSVVHKFLNGAASIDDHFHSTPFEKNIPVLLGLLSVWNVSFLRYPARAILPYSQALEKFAPHIQQVSMESNGKGVSIDGIPLPFETGEIDFGEPGTNGQHSFYQLIHQGRVIPCDFIGVMRSQQPIYLKGEVVSNHDEL

SEQ ID NO: 2986 - protein, 357 aa, Dioscorea nipponica
LKQKIDRMYNGEKINSTENRSVLHIALRAARDKVIESDGKNVVPDVWHVLDKIKEFSDRIRSGSWVGATGKALTDVMAVGIGGSFLGPLFVHTALQTDPEAAECAKGRQLRFLANVDPIDVARSIAGLNPETTLVVVVSKTFTTAETMLNARTLREWISGALGPQAVAKHMVAVSTNLTLVEKFGIDPANAFAFWDWVGGRYSVCSAVGVLPLSLQYGFSVVHKFLNGAASIDDHFHSIPFEKNIPVLLGLLSVWNVSFLGYPARAILPYSQALEKFGPHIQQVSMESNGKGVSIDGIPLPFEAGEIDFGEPGPNGQHSFYQLIHQGRVIPCDFIGVMRSQQPIYLKGEVVSNHDEL

SEQ ID NO: 2987 - protein, 357 aa, Dioscorea quinqueloba
LKQKIDRMYNGEKINCTENRSVLHIALRAARDKVIESDGKNVVPDVWHVLDKIKEFSERIRSGSWVGATGKALTDVVAVDIGGSFLGPLFVHTALQTDPEAAECAKGRQLRFLANVDPIDVARSIAGLNPETTLVVVVSKTFTTAETMLNARTLREWISGALGPQAVAKHMVAVSTNLTLVEKFGIDPANAFAFWDWVGGRYSVCSAVGVLPLSLQYGFSVVHKFLKGAASIDDHFHSTPFEKNIPVLLGLLSVWNVSFLGYPARAILPYSQALEKFAPHIQQVSMESNGKGVSIDGIPLPFETGEIDFGEPGTNGQHSFYQLIHQGRVIPCDFIGVMRSQQPIYLKGEVVSNHDEL

SEQ ID NO: 2988 - protein, 272 aa, Oryza sativa
MQQQGAAALTPATGLGSRPSLTVKTSRVCTTAALPPLCRCGRRHLIGSTSATALLPLLALPSPAASPVDPEVMLERVHPARPEWYEKFYATAMDKFMKPYEAEIAQYKSKLFSQLMTAGKNILELGVGTGPNLKYYANADGVNIVGVDPNKHMEEYARAAAVSAGLPPSNFTFRRGVGEALPAEDNSMDAVVGTLVMCSVSDVEMALRDGSFLRFVQGALNPLQQFVSDGCHLTRETGEIIRDAGFSSLDLNTTRLSTAFILSPHVYGVACK

SEQ ID NO: 2989 - protein, 357 aa, Dioscorea septemloba
LKQKIDRMYNGEKINCTENRSVLHIALRAARDKVIESDGKNVVPDVWHVLDKIKEFSERIRSGSWVGATGKALTDVVAVGIGGSFLGPLFVHTALQTDPEAAECAKGRQLRFLANVDPIDVARSITGLNPETTLVVVVSKTFTTAETMLNARTLREWISGALGPQAVAKHMVAVSTNLTLVEKFGIDPANAFAFWDWVGGRYSVCSAVGVLPLSLQYGFSVVHKFLNGAASIDDHFHSTPFEKNIPVLLGLLSVWNVSFLGYPARAILPYSQALEKFAPHIQQVSMESNGKGVSIDGFPLPFETGEIDFGEPGTNGQHSFYQLIHQGRVIPCDFIGVMRSQQPIYLKGEVVSNHDEL

SEQ ID NO: 2990 - protein, 357 aa, Dioscorea tenuipes
LKQKIDRMYNGEKINCTENRSVLHIALRAARDKVIKSDGKNVVPDVWHVLDKIKEFSERIRSGSWVGATGKALTDVVAVGIGGSFLGPLFVHTALQTDPEAAECAKGRQLRFLANVDPIDVARSIAGLNPETTLVVVVSKTFTTAETMLNARTLREWISAALGPQAVAKHMVAVSTNLTLVEKFGIDPANAFAFWDWVGGRYSVCSAVGVLPLSLQYGFSVVHKFLNGAASIDDHFHSTPFEKNIPVLLGLLSVWNVSFLRYPARAILPYSQALEKFAPHIQQVSMESNGKGVSIDGVPLPFETGEIDFGEPGTNGQHSFYQLIHQGRVIPCDFIGIMRSQQPIYLKGEVVSNHDEL

SEQ ID NO: 2991 - protein, 2378 aa, Cochliobolus heterostrophus
  unsure (1)..(2378): unsure at all Xaa locations
MAEPIAVIGLDAKLPCDGDSVQQFFDFLIAGRSARKPVPSDRYNADAFWHPDHHRDGIIASKQGHFMNSSVKAFDAPFFGITPAEAAALDPQQRLLLESSYAALENAGYTLQEILGSNTGVYTGSFVYDYRDVMIKDTDVALTYSGTGTVPSTLAGRVAWFFDFRGPAFTVDTACSSSMVALHQAVIGLKSRECNLALACGTNVILSPEFGQQLNGLGVLSPQGASKSFDKEANGYGRGEGISVVVLKRMSDAIRDGDTIRAVIRNSGIGHDGKGAPLPAPVRESQVNLVRRCYAQAKIDPSETRLFEAHGTGTNAGDPTEAGAISDIFSRYRSEEEPIYIGALKSNIGHTEGNSGVASFIKAVLTLESGIIPANAHFKEVNHAIPKKWHFKFPTVATPYPKTPSGVRRVSINSFGISGTNAHVVLEDARHFLKSHGYDAPHRTIAEPRLPGTTAINGTAFAPQLFVLSAFDQDGVSRLCKAYAEYLPKMTDSLYNLSYTLARKRSRFSWRAAVVASSGQSLEDKLSEGQPATRSLDQPGLGFVFTGQGAQWARMGTELIQYLPYRQSVECADAYLKTLGCEWSVIDELSKHEGESRINNAEFSQALCTVVQVALVDLLADWGVKAQAAAGHSSGEIAAAYSAGAIDQESAWRIAYWRGKYFSKHSITLFGQQVREQLADYSSPIGKLSVQLAASKDQPKGAMAAVGLDSKKTLEAIEKVNESGFQSVSKLTIACMNSENNHTVSGDVEQIDALVQMLGNENVFARKLKVEMAYHSRYMEPIVEQYTKCMGKIIPRPWNGQQIDVQFFSSTYGMKIDHSKLQEPAYWTTNLVSTVRFNECLKEMLKALSDVKVEGRSSSLVTDVIEIGPHSALQGPLRNIIDAVNRGGSGIKYHHTLKRGDSDVETLMQAAGTLFTRGIEADLLKINHVERTTPVLMTDLPRYQFNHSREYWSETRLSRNFRFRTAPRHELLGAPVTDWDAKHDAIWRNWIRLSENPWVEDHAVSGAVLYPAAGMLVMAIEACKQLAEISNPGKAIKAIRFHEVSFHSALQVPDNNLGVESHLHLRPVKQAARETKASPWCEFQVLTAQEDDQFREHCCGQVLVEYEESPTAVDAGREDQALRDHAQVRISDAQQKCKIRVTPEQIYQAWKDVGLSFGPTFQTLSESSVDHESGVTFATIKPTVPLLKSLMPLNYLQPHLIHPTTLDGALQACLVPLVSNPTRKQKKPIVLSFIEELWISASPHPEDGYQVFADYDACNRDEHTLSCTAIDNNTKAPMIRAFGCKATEVNGGTDPLSSELDPKHKXXXXXXXXDEYDLTDSSTSSLNEVQKNVTAGFVQPKVLDILSEPMHQGFKSESYDVLVAPVSAIPSAHMDIVLRRFFSLLKAGGKIVLTMPFDKVVAKSWAKYLVQQRFSEPDAVFGDKKSSILVASVPATESKESVARPKTYYIVADKASEKQRQVAEKLESLLKENGVTVKIVALADYEKLATTADQETITESACIMIPELEKTLLATADESVLSALRKMVGGKRLLWANEESPGTDLVTGFAASIRLDLPELKFVTITFQDNESDESVASKIFEVDTRLSSYRTCPYETSYKVVDGSILIPRLVEAPGLTKHIGQTSDDSLSEMAFGADPTRPLRLKVQQIGSLSSSCFVTDPLYTAPLEEDQVEFKVKATGMNFKDLAIQLGMISESAMGLEAAGIVTRVGSGVTRFKPGDRVFGVTYDGSFATYARTSESILTKIPDNLSFAQTATMPVVYLTAWICLYEIGGLAKRAKRGKKPTVLIHVAAGGVGQAAIQLAQREGAEIFVTVGSIEKRDFLENTYGIPRDHIFSSRDLTFKTGVLRMTANRGVDIVINSLAGDALRASWELVAPFGAFAEIGLTDIESRARISMATFARGVRFESLELAYMWRTDPERLGQFWADMIEDTLGRNLEIKTPITSYPVSKMEEAMRLIQSAKHIGKLVIEYHDEDVVRVIQPPKQGARLVPDATYVVSGGFGGLGLKIIRWLVQAGAKNLIVPSRRGPSNEASKALVAELQGNGVHIATPSCDITDKTGLEKAISEALAEMPPVRGCIQSSAVFADNAFDKMTAEQWHQAVDVKVKGSHNLWEILTLNSQTLDFFIMLSSIVGNIGMSGQVNYCAGNSYQNAMARSLAAQGHNVVALAAPILDDAGMVAQTPALRLYLLSTGLAFMTSEQLVKTIDYYCHPGTKLSVEEAQPVPRFWLPRYTADEGAEQPAWQHEPMYNHMVLRNGADNDNGSPGNGGSSKRSTPDIIAAATSLEEAEQTVLKALLNQLTKTLSYDLEELDADRSLNAYGVDSLVAVELRLWMTKEIGADVSVFDFTNGKSIGQLAAKAAAKSRFLPEVKEVEKVEGA

SEQ ID NO: 2992 - protein, 240 aa, Mycobacterium liflandii
EIGPDVYGFAVGDAVTGMTVSGAFAPSTVADHRMVMTIPARWSFPQAASIPVVFLTAYIALAEISGLSRGQRVLIHAGTGGVGMAAIQLAHHLGAEVFATASAAKWSTLEALGVPRDHIASSRTLDFSNAFLDATNGAGVDVVLNCLSGEFVEASLALLPRGGHFVEIGKTDIRDTEVIAATHPGVIYCALDLLSVSPDHIQRTLAQLSPLFATDTLKPLPTTNYSIYQAISALRDMSQA

SEQ ID NO: 2993 - protein, 2493 aa, Cochliobolus heterostrophus
MDQQPDPIAICGMALRLPGALKTPAQFWTFLTEKKDARAPIPFARFDAEAFYSASGKSGYFNSKNGYYLDDSAEVGALDTSLFRMSQQESERMDPQAKILLELARECFESAGETDWRGKDIGTYVGSFGNDWLEMAAKDRLDKNMYKVSGYSDFLLSNRLSYEYDLRGPSMTIRTACSASLMGLHEACLAIRNGDCSAALVGGSNLFWSPDTMADMSEQGVTSPNASCRSFDADADGYARAEAVNLIYIKPLSAAIKHGNPIRAIIRGSSLNADGKTPGPSMPSSSSQAALIRRAYQNAGIPESEIIRTAFVECHATGTATGDPIEATAVGNVFGNGGVYIGSVKPNVGHSEGASGITSIIKAVLALENRVIPPNIKFETPNPKIPFLEKDLKVPTDCLGWPKDKLERVSVNNFGIGGANAHFILDSAASYGVNSDIIADPEREESFLESLKWGKLFLITASTSESLEMQTRNLRDYALSNPTKAEHGSYTLACRREHFSHRAFSVIQELSVDSQAGVSIAGVSPLRLVMIFTGQGAQWPRMGIELLQSNTTFASSIKEMDQELRGLPTPPTWSIEEELAKGADSSNLNEAAISQPLCTAVQVALVDALANLAIKPHSVLGHSSGEIAAAYAANRISRRAAIVLAYYRGLVSQAATRSGAMAAIGLSWDEVTPFLQEGVVIACNNSPSNVTISGDEAVVRNVVQAIQTSNTEVFVRMLKVSTAYHSHHMLNAGNEYEEMVASFLEGEVPYNGASTNPGFFSTVTGLLLPDSERIDAQYFRRNLESPVLFLQALDSLLTGSKDSAHRNLCFLEVGPHSTLSGPLRQIFTQNSVAHPYASCLHREKNANATYLAALGTLWQHGLNFDLYRLTNPLGIAKVLPDMPTYPWYHGKSHIIQNRIAQAWRYPKFPHHELLGSLVLENNDDQPSFRNLLQLENAPWIRDHNIDGDVVFPGAAYVTMAGEACRRQCLPDQDHTFFGFSVKNMVIGAALILQENKPVEIVTSLRRWRITDHLESSGWEFMISSFSGTTWTTHCSGCVEAIYSSPPPPAVPETAFPRRTDAKKWYQAMWHLGARYGPCFQGLKNIECTPNKSSAKATICDKTPDGSESHYLIHPTTIDVFFQTMAAAACNGQGHATDRMSVPTFIKRMDIYESSGDLQVHTSAKVLAHGKFHGWGCAIGQDGALAISIDQIKLMPLDTALEIDLHAGASTTWSLEPSFTTMSSILKNATALAKQTPLMQEFALLHIRKALEQIQSIKPASDTMERYVNWMKRQSIPDTLRPMETVTSEVKTFSCPSTVDAIVKISENIIKLVLGEVSATELLMVDDMLLKIYQEAKVTDRGPYIKLLGHQKPNMRILEIGAGAGGTTHEFLSNLVNDSDGGKLWSSYTYTDISAGFFGAAKESFKEHTLEYKVLDITKDPVAQGFEGHDYDLIIATNVMHAVPNLQQALRNVHSLLRHDGTFYLEELCSDVQVTNFIMGLLPGWWVGEQDGRVDEPYVHPERWDGDLRAAGFTGVADCMLDAPRPHQGNAFMIAYPAIKDALPKPVTLLYDDASQQVVEDLKNELSQHGCFETVLQHWDSAESVVAKRNIICLLDINKPFFFDIEASRFDKFRHWMAQVAESKNGILWLTRSSQLSCEHPRWGQTPGAMRTIQKDMGIDLAICELDRLTSLSLKAVAQISERFSRRHTSSHKLELEYAIEDGNIYIPRLYPLNVDSELCKPDSSATTLPQTDNGELNLTLGTVGRLDTLQWTTCSYERPGENEVAIEIMATGLNFRDLLTAMDLIEAPRQVLGLEAAGMVRDVGSGVENLQPGDRVVVVGGTSLFRTAAVVPSTSCWKLPHSLSFEEAATMPCVFMTVIHGLLEFGQMHSGHTVLIHSACGGVGLAAIQLCHMAGATIYCTVSNEEKVQFLEDEFKIPRAHIFNSRNRSFVDDVMRATNGAGVDLVLNSLSGELLHASWECVAEFGKMIEIGKRDLLGNGRVSLHPFVLNRSFHGIDLAHLIERRPAECRRLLGRMMTLYEAGHIKPISPAKTFKVSEVEQCFRYMQQGRHIGKIILRVGDSADEATRSKDLITAHPKRNPTFNPQASYLLAGGLGGLGRIVANWMVENGARHLIFLSRNAGEKETDKAFFEELEYQGCKVMAVKGSVSVVKDVEKAIAAATAPVRGVMNICMQLQDMGFNQMTYEAWSTVNESKIKGTWNMHNVCMSREISLDFFLLFSSVSGLFGNFGQANYAAANTFLDTFVLYRHSLGLNASAIDIGMMYDHGYIAENPLLAERMQLLGAYGIRIPQLLDAITLVLSTPRSKPEKGTSRKCASLLGIGVRSGLPLSDPANRIMWKDDRRMAYYANLDSDSNAASGATSDVDKPTQAIRAFMKQVLAEPKILDQPDTSAFLARQIARKIALMLLRPLDDKEDSEVDILSPLQDAGLDSLVAIEMRRWWRTTFGFDITMLQMVGAENTMALGDRATEGLRIKYAEIEVQPVTSTPVVAVSA

SEQ ID NO: 2994 - protein, 336 aa, Mycobacterium tuberculosis CDC1551
MKLAIIAGDGIGPEVTAEAVKVLDAVVPGVQKTSYDLGARRFHATGEVLPDSVVAELRNHDAILLGAIGDPSVPSGVLERGLLLRLRFELDHHINLRPARLYPGVASPLSGNPGIDFVVVREGTEGPYTGNGGAIRVGTPNEVATEVSVNTAFGVRRVVADAFERARRRRKHLTLVHKTNVLTFAGGLWLRTVDEVGECYPDVEVAYQHVDAATIHMITDPGRFDVIVTDNLFGDIITDLAAAVCGGIGLAASGNIDATRANPSMFEPVHGSAPDIAGQGIADPTAAIMSVALLLSHLGEHDAAARVDRAVEAHLATRGSERLATSDVGERIAAAL

SEQ ID NO: 2995 - protein, 264 aa, Glycine max
DAWVGSENCIDKKHFVLVHGACHGAWCWYKLKPRLESAGHKVTVLDLAASGANMKKIEDVDTFSQYTEPLLFLLDTIPSNEKVVLVGHSFGGLNIALAMEKFPEKVAVGVFLTAFAPDVEHHPSYVLEKYSERTPLAAWLDTEFAPSGNKTTMFFGPNFLSDKLYQLSPIEDFELAKTLIRPSSLFMEDLTKQKNFSKEGYGSVPRAFIVCTEDLAIPLEYQLFMIQNVGFNEVVEIKGADHMVMLCKPQELFDSLQQIATKYA

SEQ ID NO: 2996 - protein, 192 aa, Xylella fastidiosa Temecula1
MNMLNVLRFPVLALALAFVSSGVLADVGSLLDLDYRPLAGKETVNLQRLYGGKVLLVVNTASKCGFTPQYEGLEALHQKLSPLGFAVLGFPSNDFKGQEPGDEQQIQEFCTLTYGVKFPMFQKVHVKGNEVTPLYQRLTQTTGVAPGWNFHKYLIARDGHVVAQFDSRTRPDDPILLEAIKRELAKSVQVVH

SEQ ID NO: 2997 - protein, 233 aa, Triticum aestivum
MAGADVDVGTELRLGLPGGGAEAAKAGKRGYEDTIDLKLTLPTGGMQEDSAGKPEPAADKAKRPAEAAAADPEKPPAPKAQAVGWPPVRSYRRNAMTVQSVKIKKEEETEKQQPAAAAAAGANGSNFVKVSMDGAPYLRKVDLKMYNTYKDLSIALQKMFSTFTATGNEGKMVEAVNGSDVVTTYEDKDGDWMLVGDVPWEMFVASCKRLRIMKGSEAIGLAPRAKDKYKNKS

SEQ ID NO: 2998 - protein, 207 aa, Guillardia theta
MLRTFLTTSRNPSLNLISFTKKLINLFPQSKKINRGRKFLTSLISYCVENEVKNLLVIYELKGNPNCLIISHLPSGPSVYFKISNYNILIFKNDINIFFSDLPILLISNLNTPIGSRISKIITNLYPKSSNNSKRIISYVGLSNNIVCNQYLFQKKNYNNENMKLKNIGPRFFLRPFKIILGNISEINSNVEWIITTLIQSKRRMII

SEQ ID NO: 2999 - protein, 418 aa, Prochlorococcus marinus str. MIT 9313
MVDALDSKSSAFGHVGSSPTAPTAVMGTYKRFPVTLLRGKGCWVWDDHGHQYLDAVAGIATCALGHSDRALRRSLGQQLKQLQHVSNLYRIPEQEALAHWLVENSCADSVFFCNSGAEANEAAIKLARKHGHRRRGIDRPIILTANSSFHGRTLAAISATGQPNFHKGFEPMVEGFEFFPFNNLQAFEQQLNRLEAQGPSVAAVLIEPLQGEGGVNPGEAGFFRRLRELCSQHQILLIFDEVQVGMGRCGNWWGYQQLGIEPDAFTLAKGLGGGHAIGALLVKQHADLFEPGDHASTFGGNPFACKAALTVAKEIERRGLIAKVQQRGAQLREGLTDLVQRFPRQLKGVRGWGLLQGLVLQDESTFTAPNVAQAALEEKLLVIAAGPKVVRMVPPLIIKPSEIRQLLQRLEATLAHFR

SEQ ID NO: 3000 - protein, 293 aa, Chlorobium tepidum TLS
MKGIILAGGSGTRLYPVTKGVSKQLLPVYDKPMIYYPLTTLMLAGIRDILVITTPDDQSSFVKLLGDGSDWGINLSYTVQPSPDGLAQAFILGRDFIGDDDVCLVLGDNIFFGYGFSGMLEEAVHVVERRRKAVVFGYYVSDPERYGVVEFDSDGQVFSIVEKPEKPKSNYAVVGLYFYPNDVIDIAASVNPSSRGELEITSVNQTYLDRGDLVCSIMGRGFAWLDTGTHESFQEAGNFIETVEKRQGLKVACPEEIAWRNGWIGDADIERLASPLLKNQYGQYLLNLLERRI

SEQ ID NO: 3001 - protein, 1272 aa, Streptomyces coelicolor A3(2)
MSPQSPSNSSISTDTDQAGTAGKNPAAAFGANEWLVDEIYQQYLQDPNSVDRAWWDFFADYKPGAAATPTAAGTVPTDAGSTPPAAPAPRAQAPAQPQAAAPAPAPAKPAAAAPAAPAAPATKPAAAPAKPAAKPQAKAAAPAKDAGAAPEGPELVTLRGPAAAVAKNMNASLELPTATSVRAVPVKLLFDNRIVINNHLKRARGGKISFTHLIGYAMVQAIKAMPTMNHSFGEKDGKPTLVKPAHINLGLAIDLVKPNGDRQLVVAAIKKAETLNFFEFWQAYEDIVRRARDNKLTMDDFTGVTVSLTNPGGLGTVHSVPRLMPGQSVILGVGSMDYPAEFQGTSQDTLNKLGISKVMTLTSTYDHRVIQGAASGEFLRQVANLLLGENGFYDDIFKALRIPYEPVRWLKDIDASHDDDVTKAARVFELIHSYRVRGHVMADTDPLEYQQRKHPDLDITEHGLTLWDLEREFAVGGFAGKSLMKLRDILGVLRDSYCRTTGVEFMHIQDPKQRKWIQDRIERSHTKPEREEQLRILRRLNAAEAFETFLQTKYVGQKRFSLEGGESVIPLLDAVIDSAAESRLDEVVIGMAHRGRLNVLANVVGKSYAQIFREFEGNLDPKSMHGSGDVKYHLGAEGTFTGLDGEQIKVSLVANPSHLEAVDPVLEGVSRAKQDIINKGGTDFTVLPVAIHGDAAFAGQGVVAETLNMSQLRGYRTGGTVHVVINNQVGFTAAPESSRSSMYATDVARMIEAPIFHVNGDDPEAVVRVARLAFEFRQAFNKDVVIDLICYRRRGHNETDNPAFTQPLMYDLIDKKRSVRKLYTESLIGRGDITLEEAEQALQDYQGQLEKVFTEVREAVSQPASAEPSEPQAEFPVAVNTAITAETVKRIAESQVNIPDHITVHPRLLPQLQRRAAMVEDGTIDWGMGETLAVGSLLLDGVPVRLTGQDSQRGTFGQRHAVVIDRETGDEFTPLLYLSEDQARYNVYNSLLSEYAVMGFEYGYSLARPDALVMWEAQFGDFVNGAQTVVDEFISSAEQKWNQTSGVTLLLPHGYEGQGPDHSSARPERFLQLCAQNNMTVAMPTLPSNYFHLLRWQVHNPHHKPLVVFTPKSMLRLKAAASKAEEFTTGQFRPVIGDDSVDPAAVKKVVFTAGKVYYDLDAERKKRGLTDTAIIRIERLYPLPGAELQAEIAKYPNAEKYLWAQEEPANQGAWPFIALNLIDHLDLAVGADVPHGERLRRISRPHGSSPAVGSAKRHQAEQEQLVREVFEA

SEQ ID NO: 3002 - protein, 489 aa, Prochlorococcus marinus str. MIT 9313
MSEASFDFDVIVIGAGYGGFDAAKHAADDGLKVAIVESGEMGGTCVNRGCVPSKALLAASGRVRELADAEHLSGFGIHAAPVRFERQKIADHANQLVATIRSNLTKTLQRAGVTILRGHGRLEGSQRIGLREKSGVDRLLTARDVILATGSDPFVPPGIETDGRTVFTSDEAVNLEWLPRWIAIIGSGYIGLEFADVYTALGCEVTMIEALDRVMPTFDPDITKMAARHLIEGRDIDARAGVLASKVIPGCPVRIELAEMKSRELVDSLEVDAVLVATGRVPSSKGLNLESVGVETNRGFVPIDDSMRVLVNGKPLPHLWAVGDVTGKLMLAHTAAAQGTLAVDNIQGHSRTIDYRSIPAATFTHPEISSVGLSEADAKDLAAKDGFELGSVRSYFKANSKALAELESDGLMKLLFRKDNGEVLGAHIYGLHAADLIQEVANAVARRQSVAQLATEVHTHPTLSEVVEVAYKQAAKQLAKAVVASASAS

SEQ ID NO: 3003 - protein, 222 aa, Triticum aestivum
WGEAPPDPFNCIHVADTPTLDALKKGAPERWRLIKAHGTAVGLPTDDDMGNSEVGHNALGAGQIYAQGAKLVDLALASGKIYEGEGFKYIQQSFETGTLHLIGLLSDGGVHSRIDQLQLLLKGASEHGAKRIRVHILTDGRDVLDGSSVTFVETLENDLAKLREKGVDARIASGGGRMYVTMDRYENDWQVVKRGWDAQVLGETPHKFPSALEAVKKLRDDP

SEQ ID NO: 3004 - protein, 169 aa, Nitrosomonas europaea ATCC 19718
MMKRLIHSSLKRYLVVLILSFTSLQGYAATEAVPVAEDPELEKRLVNLAENLRCLVCQNESLAASRADFANDMRREIREQMRMNKSDDEIVEFLVARYGDFILFNPPLKSTTWLLWFGPFALFLGGGAALIFYLRRRRIQINEKDLPLTESQRLRAESLIKEMNKDQSI

SEQ ID NO: 3005 - protein, 161 aa, Xanthomonas campestris pv. campestris str. ATCC 33913
MTTLSTYQFTDLDGQPQSLAEYAGKVVLVVNVASKCGFTPQYAGLQALWQRYRDRGLVVIGFPCDQFGHQEPGDAADIRQFCSLDYAVDFPLAAKVEVNGSGAHPLWQWLKHEKRGVLGSEAIKWNFTKFLIGRDGSVLERYAPTTKPEALAADIERALGA

SEQ ID NO: 3006 - protein, 196 aa, Zea mays
  unsure (1)..(196): unsure at all Xaa locations
PILSGSYNPGAGTATKRSGHSLGDADLKGKNVFALRRPLRLLVDRRXHKITDDTAIHAFDRTIKGLLENASKGILASHLRRAQGITPYYRLNPVVSRLTELLAAEVAIANDRIAEEVEKLAAVFSEGGVLLLDNGRFYKEEEKNEPECAKKLPSVDDLYVNDAFXGTLHRVHASTVXVTKRLKPAVDDSLMHQELD

SEQ ID NO: 3007 - protein, 93 aa, Zea mays
MRQPRKRSTLLRIIRKTRTVMECLHRFCRDCIDKSMRLGNNECPSCRTHCASRRSLRDDPNYDALIAALYPDIDKYEEEELAFNEQEMTRNQK

SEQ ID NO: 3008 - protein, 253 aa, Pseudomonas aeruginosa UCBPP-PA14
MSKLLSGQVALVTGGAAGIGRATALAFAAAGVKVVVADLDSAGGEGTVEAIRQAGGEALFIRCDVTRDAEVKALVEGCAAAYGHLDYAFNNAGIEIEQGKLADGNEAEFDAIMAVNVKGVWLCMKHQIPLMLAQGGGAIVNTASVAGLGAAPKMSIYAASKHAVIGLTKSAAIEYAKKGIRVNAVCPAVIDTDMFRRAYEADPRKAEFAAAMHPLGRVGRVEEIAAAVLYLCSDHAGFTTGIALPVDGGATAI

SEQ ID NO: 3009 - protein, 342 aa, Triticum aestivum
DIEKFKDYKASSSPSAESKPQSEPVEPKEEKKEVSKAPEPTATKTEESSQSGDRLFSSPVARKLAEDNNVPLSSLKGTGPDGRILKADIEDYLSSAAKGSKKEAAAAPGLGYVDLPNTQIRKVTANRLLQSKQTIPHYYLTVDSRVDKLIKLRSELNPMQDASGGKKISINDLVIKAAALALRKVPACNSSWMNDFIRQYHNVNINVAVQTEHGLFVPVVRDADKKGLATIADEVKQLASRAKDNSLKPEDYEGGTFTVSNLGGPFGIKQFCAIVNPPQSAILAIGSAEKRVVPGAAEGQYEIGSFMSATLSCDHRVIDGAMGAEWLKAFKGYLEDPTTMLL

SEQ ID NO: 3010 - protein, 633 aa, Arabidopsis thaliana
MTAVLFLCFLLICFSFTPSLQNVSESEPLVRFKRSVNITKGDLNSWRTGTDPCNGKWFGIYCQKGQTVSGIHVTRLGLSGTINIEDLKDLPNLRTIRLDNNLLSGPLPPFFKLPGLKSLLLSNNSFSGEIADDFFKETPQLKRVFLDNNRLSGKIPASLMQLAGLEELHMQGNQFTGEIPPLTDGNKVLKSLDLSNNDLEGEIPITISDRKNLEMKFEGNQRLCGSPLNIECDEKPSSTGSGNEKNNTAKAIFMVILFLLIFLFVVAIITRWKKKRQPEFRMLGKDHLSDQESVEVRVPDSIKKPIDSSKKRSNAEGSSKKGSSHNGKGAGGGPGSGMGDIIMVNSEKGSFGLPDLMKAAAEVLGNGSLGSAYKAVMANGLSVVVKRIRDMNKLAREAFDTEMQRFGKLRHPNVLTPLAYHYRREEKLVVSEYMPKSSLLYVLHGDRGVYHSELTWATRLKIIQGVARGMDFLHEEFASYDLPHGNLKSSNVLLSETYEPLISDYAFLPLLQPNNASQALFAFKSPEFVQNQQVSPKSDVYCLGIIVLEVMTGKFPSQYLNTGKGGTDIVEWVQSSIAQHKEEELIDPEIASNTDSIKQMVELLRIGAACIASNPNERQNMKEIVRRIERVTL

SEQ ID NO: 3011 - protein, 489 aa, Geobacillus stearothermophilus
MKIKAQVGMVMNLDKCIGCHTCSVTCKNTWTNRPGAEYMYFNNVETKPGIGYPKQWENQEKYRGGWELKNGELRLKSGSKAMRLVNLFYNPYQPTIDDYYEPWNYDYETLTNSPLKQYQPVARPKSSITGEWMELSWGPNWEDDLAGVHITGLRDPNVVKMEQAIQTEFENVFMMYLPRICEHCLNPSCVSSCPSGAMYKRDEDGIVLVDQNACRAWRYCVTSCPYKKVYFNWQTNKAEKCTLCFPRIEAGMPTICSETCVGRIRYIGVMLYDADKVKEAASVTDEKQLYHAQLDIFLDPNDPAVAAAAKEAGIPDEWIAAAQRSPIYKMIVDWKIALPLHPEYRTLPMVWYIPPLSPIMNTIEGKGSQASADDIFPAIDEMRIPIEYLANLLTAGDTAHIRTTLKKMAAMRSYMRAKQTNKQPDTRLIESLGLSREDIEEMYRLLAIAKYEDRFVIPASHHEEVADLYAEQGSCGLAFAGGPGACGTL

SEQ ID NO: 3012 - protein, 202 aa, Mycobacterium bovis
MHVTQSSSAITPGQTAELYPGDIKSVLLTAEQIQARIAELGEQIGNDYRELSATTGQDLLLITVLKGAVLFVTDLARAIPVPTQFEFMAVSSYGSSTSSSGVVRILKDLDRDIHGRDVLIVEDVVDSGLTLSWLSRNLTSRNPRSLRVCTLLRKPDAVHANVEIAYVGFDIPNDFVVGYGLDYDERYRDLSYIGTLDPRVYQ

SEQ ID NO: 3013 - protein, 468 aa, Mesorhizobium loti
MRLSNLGTEQLREKDRSFVFHPSTHLAKHSRGETPNRIMAGAEGVYIWDTEGRKSLDGFGGLYCVNMGYGCTEIAEAIARQAHEMPFAHIYASQGTEPVALLAEAVVEYFGQNMRRVFFGLSGSDANETNIKLVWYYNNILGRPEKKKIISRHRGYHGSGLVTGSLTGLAFFHNFFDLPLDLVRHTTTPHHYRQAHDGESEQAFSKRCADELEALIVAEGPETVAAFIGEPVLGTGGIVPPPKGYWTAIQSVLDKYDILLIADEVVCGFGRTGEKFGSHLYGMRPDFVTIAKGLSSAYLPISGSIIGDRVWSILEQGTEKHGALGHGWTYSGHTLCAAAALANIRLLKERNILEHVRDVGPYWHARMNAELAGHPIVGEVRGVGILSAVELMRDPKQRIPFESDLQVGVRAAAALFENGVIGRAMPHGDILGFAPPLIITRKEIDIIVNATAKSVETTYRALKAEGAI

SEQ ID NO: 3014 - protein, 555 aa, Mycobacterium tuberculosis CDC1551
MTTARPAKARNEGQWALGHREPLNANEELKKAGNPLDVRERIENIYAKQGFDSIDKTDLRGRFRWWGLYTQREQGYDGTWTGDDNIDKLEAKYFMMRVRCDGGALSAAALRTLGQISTEFARDTADISDRQNVQYHWIEVENVPEIWRRLDDVGLQTTEACGDCPRVVLGSPLAGESLDEVLDPTWAIEEIVRRYIGKPDFADLPRKYKTAISGLQDVAHEINDVAFIGVNHPEHGPGLDLWVGGGLSTNPMLAQRVGAWVPLGEVPEVWAAVTSVFRDYGYRRLRAKARLKFLIKDWGIAKFREVLETEYLKRPLIDGPAPEPVKHPIDHVGVQRLKNGLNAVGVAPIAGRVSGTILTAVADLMARAGSDRIRFTPYQKLVILDIPDALLDDLIAGLDALGLQSRPSHWRRNLMACSGIEFCKLSFAETRVRAQHLVPELERRLEDINSQLDVPITVNINGCPNSCARIQIADIGFKGQMIDDGHGGSVEGFQVHLGGHLGLDAGFGRKLRQHKVTSDELGDYIDRVVRNFVKHRSEGERFAQWVIRAEEDDLR

SEQ ID NO: 3015 - protein, 334 aa, Zea mays
MDGGGGGAGGAEGELTAQETALYDRQIRVWGVDAQKRLSKAHVLVCGMNGTTIEFCKNIVLAGVGSLSLMDDNVVTEEDLNANFLIPPDESIYGGRSRAQVCCESLIDFNPMVRVSVEKGDPSLIDGEFLDKFDIVVLSRASLKTKLLINENCRKRSKHIAFYTIDCKDSCGEIFVDLQKHSYVQKKPGGATEQQELTYSSLQEAISVPWNSLPKKTAKLYFAMRVLEDYELSEGRSPGETTLSDIDAVLARRKDMCDKMSLNESRIPTTLVERLLAAGKKEHPPVCAILGGILGQEVIKSISCKGDPVKNFFYFDVADGKGVIEDIPPPPPAK

SEQ ID NO: 3016 - protein, 238 aa, Bifidobacterium longum NCC2705
MTTNRPLIAVTPLMDYGRDSLWMLPGYMEAIMRAGGTPVMLPLTDDTDILAQCAERFDAFLFTGGPDVGPMVGAAASATGRSEVLSPERDRMESILLPAVMAWDKPILGICRGIQFINAALRGTLWQDLPSQHPSDIEHHMNPPYDAFGHNVSLVPGTPLASLFSGQTEIAVNSYHHQAVREPAAGLEVMAVAPDGVIEALYRPASHFLWAVQWHPEFLYKVDPRSQAIFDAFVGSCR

SEQ ID NO: 3017 - protein, 416 aa, Wautersia eutropha
MAIVDVKVPQLSESVAEATMLNWKKKPGEAVAQDEILIEIETDKVVLEVPAPSAGVLSIIVKNDGDTVVADEIIAKIDTEATAGAAAPAAAAPAPAAAAPAPAAAVAAPAAAGGVAMPSAAKLMAEAGLSAGQVAGTGKDGRITKGDALAAAAAPAAKAAPAPAAAKPALQQVSAPVDFAALGDRPEERVPMSRLRARIAERLLQSQSTNAILTTFNEVNMKPVMDLRNKYKDRFEKEHGVKLGFMSFFVKAAVHALKKFPLINASIDGNDIVYHGYFDIGIAVGSPRGLVVPILRNADQMSLADIEKKIAEFGVKARDGKLSLEELTGGTFSISNGGVFGSMLSTPIINPPQSAILGVHATKDRPVVEDGQIVIRPMNYLAMSYDHRIIDGREAVLGLVAMKDALEDPARLLLDL

SEQ ID NO: 3018 - protein, 474 aa, Wautersia eutropha
MSKQFDVLVIGAGPGGYIAAIRAGQLGLNVACCEGNPYDDPKGEARLGGTCLNVGCIPSKALLASSEEFENVQHHLGDHGITVGDVKVDVAKMLKRKDDIVGKMTKGIEFLFRKNKVTLLKGYGKFVGKSAEGFQVDVAGEVVTAKQVIIATGSKARHLPGIKVDNDLVSDNEGALKFPAVPKKLGVIGAGVIGLELGSVWRRLGSDVTVLEALPAFLGAADEGVAKEAQKQLTKQGLKFSLGVNVNEVTTGKNGVTVKYTDKDGKAQTLEVDRLIVSVGRVPNTDNLGLDAVGLAADQRGFIEVDDHCATKVPGLWAIGDVVRGPMLAHKAEDEGVAVAERIAGQKPHIDYNCVPWVIYTFPEIAWVGKTEAQLKAEGREYKAGQFPFMANGRALGMGHADGFVKMLADAKTDEILGVHIVAANASDLIAEAVVAMEFKAASEDIGRVCHPHPSMSEVMREAALAVDKRHVNM

SEQ ID NO: 3019 - protein, 411 aa, Triticum aestivum
MGSYSPTSRFKDLDTIPLDPHYALKETFQADPDPRKVILGSGLYRDDDSKPWVLPVVKKAEVLIKQTQDSGRYEYLPISGYPAFVSSARQVLFGPQSLNESRLVSIQTISGTGANFLGARFLAETLKPSAVWLSDPSWVNHANIWGLVNVNVKRYPYWNAKTKSLDFNNMIEKLQTDAIAGDVILLHACAHNPTGVDPNKEQWRKIADVCERKQLFPLFDCAYQGFATGNLDDDAWAIRHFIDRGTMELAVCQSFSKNMGLYGERVGALHMFCATSTDAEKVRGHLCRLQRGQISQPPTNGARIAATILSDSKLFQDWVTDLGEMSSRIKEMRKSLYDNLMILDTPGKWDHIVSQIGMFSYTGLTPEQVAFIQQDSHVYILKSGRISVAGLNSKNVEYVAKALDMAVRGLP

SEQ ID NO: 3020 - protein, 343 aa, Mycobacterium tuberculosis CDC1551
MRIGVLTGGGDCPGLNAVIRAVVRTCHARYGSSVVGFQNGFRGLLENRRVQLHNDDRNDRLLAKGGTMLGTARVHPDKLRAGLPQIMQTLDDNGIDVLIPIGGEGTLTAASWLSEENVPVVGVPKTIDNDIDCTDVTFGHDTALTVATEAIDRLHSTAESHERVMLVEVMGRHAGWIALNAGLASGAHMTLIPEQPFDIEEVCRLVKGRFQRGDSHFICVVAEGAKPAPGTIMLREGGLDEFGHERFTGVAAQLAVEVEKRINKDVRVTVLGHIQRGGTPTAYDRVLATRFGVNAADAAHAGEYGQMVTLRGQDIGRVPLADAVRKLKLVPQSRYDDAAAFFG

SEQ ID NO: 3021 - protein, 489 aa, Bordetella bronchiseptica RB50
MRIEHLIDGKAVAGKQYFETINPATQETLAEVAAGGEAEVHAAVAAAKAAFPKWAGLPAAERARLVRKLGDLIAAHVPEISRTETNDCGQTIAQTGKQLVPRAADNFYYFAEMCTRVDGHTYPTPTHLNYTLYHPVGVCALISPWNVPFMTATWKVAPCLAFGNTAVLKMSELSPLTAARLGELALEAGIPPGVLNLVHGYGRDAGEPLVAHPDVRAVSFTGSTATGNRIVQAAGLKKFSMELGGKSPFVIFDDADLDRALDAAIFMIFSNNGQRCTAGSRILVQQSIYADFTQKFVERARRIRVGDPLDEGTIVGPLISPAHLAKVRGYIELGSKEGATMLCGGLDRPSYAPELDARVRDGNFVWPTVFADVDNRMKIAQDEIFGPVACLIPFRDEAHAIELANDIEYGLSSYVWTESVGRAHRVAAAIEAGMCFVNSQNVRDLRQPFGGTKASGTGREGGTWSYEVFCEPKNVAVSLGNHHIPHWGA

SEQ ID NO: 3022 - protein, 350 aa, Candida albicans
MSEQIPKTQKAVVFDTNGGQLVYKDYPVPTPKPNELLIHVKYSGVCHTDLHARKGDWPLATKLPLVGGHEGAGVVVGMGENVKGWKIGDFAGIKWLNGSCMSCEFCQQGAEPNCGEADLSGYTHDGSFEQYATADAVQAAKIPAGTDLANVAPILCAGVTVYKALKTADLAAGQWVAISGAGGGLGSLAVQYARAMGLRVVAIDGGDEKGEFVKSLGAEAYVDFTKDKDIVEAVKKATDGGPHGAINVSVSEKAIDQSVEYVRPLGKVVLVGLPAHAKVTAPVFDAVVKSIEIKGSYVGNRKDTAEAIDFFSRGLIKCPIKIVGLSDLPEVFKLMEEGKILGRYVLDTSK

SEQ ID NO: 3023 - protein, 479 aa, Oryza sativa
MLRAAARALTVSSLNPKVLALADHHLGGLVARRAQLVTVTVNILIVERKKILQADTSMQQELDANPASHPFSEVLALCNHPHLLDRSEASFMFSSDAITRAREIVGFIPGKTTGGYSHCQANSIVSEFRANADKYGNELSSNLTIFDRVHMMMHLLIRGKKDGILCPIPSHSLYTDSMVLRGATLVPYYLDESRGWSVNISDLKKQLDGARAKGIDVRGLVVVNPGNPTGQVLVEENQCEIVELCKNECLVLLADEVYQENIYTDQKKFNSFKKVARSIGYGEGDISLVSFHSVSNGYYGECGRRGGYMEVTGFSSEVRGEVYKVASLSACSNISGQILMSLVMNPPKVGDESYPSYRAERDSILSSLSCCAEAMVSTFNSMEGMTCNKAEGGISVFPSVRLPPRAIEAAEAMNTEPDVFYALRLLESTGIVVVPGSVFGQVPGTWHFRCTILPQEEKTRQIISRFNVFHEAFMEEFRS

SEQ ID NO: 3024 - protein, 165 aa, Glycine max
  unsure (1)..(165): unsure at all Xaa locations
ASSMISSPAVTTVNRAGAGMAAPFTGLKSMAGFPTWKTNNDLASVASNGXRLQCMLVWPPVGKMIFETLCYLPDLDDAQLAKEVESLLKKGWIPCMEFELEHSFEYREHSCVPGYYNGRYCTMCKLPMVGCTMLPTCMNDILEAKTVVPRGYIRLSGLGNVRQVQ

SEQ ID NO: 3025 - protein, 843 aa, Thermosynechococcus elongatus BP-1
MRVVVMAGGSGTRLRPLTCDLPKPMVPVVNRPIAEHILNLLRRHNLDDVVMTLHYLPDVVRDYFGDGNEFGVHLSYVVEEEQPLGTAGSVKNIVNLLTDPFLVVSGDSITDVDLTDALRFHQQHGAPVTLILARVPQPKEFGIVFTDSDGRVRRFLEKPSAAEVFTDTVNTGIYILNPTVMDYLNSGIERDFSRDLFPLLLQADVPMYGYITDAYWCDVGSLQTYQQVQQDALYGRVHLEIQGHEVQPQIWVGHNTPLPPTVQLQAPLVLGNNCRLGAGVTLGPGTVLGDNVMIGNGSRLRSVVAWNGCFIGDDSELEHCILARHVHVDRHVTLQEGVIIGSRCVVREEASLSQGVRIWPGKRIEAGAIVNQSLIWGTTGQRYLFGQRGVAGVANVDITPEFAVRLAAAYASILEPGTSVLVSRDQRNVSRMVSHALMSGLMSVGIHVLNLEAIALPIARFAAQTLSVSGGIHVRAHPDRADQLLIEFFDHKGINLSRAKERQIETAYFREEIRRALLTDVGVMTHPNNCVAAYAQGFEKWLNTQLFYGSPAKIVIDYAYAVSGVVLPQILSKFGCDAVVLNATLHPTPLNILERQRLLRELGQVVTALSASLGVQVSANGERLTLVDNAGQVFSDQELTALMTYLTLLTHPGGTVVVPVTTSSAVEAIARQQGGHIIRSRTNPTDLMEACQHQSGVVLGGSAETGFIFPQLHPGFDAMFTIATLIELLALIGKPLTVIRQELPRVHYYHRPIRCPWLAKGSLMRHLVETHPRNHLSLIDGVKIGEPNTDHWVLILPDASEPLVHLYVNSPDALWSQQMLQRYSRRIEAFARLEPLSDATIKM

SEQ ID NO: 3026 - protein, 351 aa, Pseudomonas aeruginosa PAO1
MFPKNAWYVACTPDELAGKPLGRRICDEPMVFYRGEDGRVAALEDFCPHRGAPLSLGFVEDGVLVCGYHGLAMGEDGRTRAMPGQRVRGFPCIRRFPVQERHGFVWVWPGAEEQADDALIPRLEWAESPDWAYGGGLYHIHCDYRLMIDNLMDLTHETYVHASSIGQKEIDEAAPTTRVEGDEVITSRHMQNVMAPPFWRMALRGNGLADDVAVDRWQICRFTPPSHVLIEVGVAHAGHGGYQAPAERKAASIVVDFITPESATSIWYFWGMARNFQAHDQALTESIREGQGKIFGEDLEMLESQQRNLLRHPRRDLLKLNIDAGGVQARRIIERLLADERQAAAPNRAQA

SEQ ID NO: 3027 - protein, 381 aa, Ferroplasma acidarmanus
MNNNGFNSRCVHSGDMEIEGVGNVVTPIFENSTFEFPESGVAGKYIYSRWGNPTVESFEKKYADLEKTEHAFAFSTGMAAITSSIMPYLKSGDSVLALNELYGQTFGFFSKVLPQYKINVDFTSVNDLNRLDFKNKNYKLLYLESITNPLLEVPDIVNLSRICKEEGIKLMVDATFATPYNQNPVSLGADMALHSGTKYISGHSDLLIGLAGFNDNYDNLDFYRKTFGGTPDAFQAFLAYRGLKTLGLRMERHNKNAMELAKVLNESSRIEEVYYPGLKNSEYFDVAEKNLKGYGGMVSFKVKGGIENSHKLIKNLNIPKYAVSLGGVESLISIPVEGTHKALSPEERKASGITDNLVRLSVGIEDSEDLLQDFENALEKI

SEQ ID NO: 3028 - protein, 541 aa, Pichia angusta
MAGDSITGVAGTADVNRVEAPLTVRAYLMCAFGAFGGILFGYDSGYISGVMGMDYFIHEFTGKVKHGDDDSSFVVGSSQKSLITSILSAGTFFGAVCAGDLADMFGRRTIIVTGCSIYSVGVALQVASTTVALLSVGRVIAGVGVGFVSSVVVLYLSEISPKKIRGAIVSGYQFFVTIGLLLASCVDYGTEHRNDSGSYRIPIALQLIWAIILAVGLILLPESPRYYVLKGKFDRAAKVLSRLRGQPIDSDYIQEELAEIVANHEYERSVIPTTSYWQSWAACFTGGLRRPSSNLRKTILGTSMQMMQQWTGVNFIFYFGTTFFQQLGTIHNEFLISMITTIVNVASTPLSFYTIEKFGRRALMIYGAAGMVVCQFIVAIGGTVDGDNQKTVSAMIAFICIYIFFFASTWGPGAWVIIGEIFPLPIRSRGVGLSTASNWLWNCIIAVITPYMVDGDKGNLGAKVFFIWGSLCGCCLLYAIMLIPETKGLTLEQVDKMLEETTPWTSAKWKPHSTFAAEMGLAKDDKGVTHELKEHASVESV

SEQ ID NO: 3029 - protein, 483 aa, Oryza sativa
MTTPHGLLQYSSGAFSDQVPADDSAEEHGVKDHAMLAPFTAAWQTAISPPLVIERSEGCYVYDVNGTKYLDALAGLLSTALGGSEPRLVKAATEQLNKLPFYHSFWNHTTRPSLDLAKELISMFTAREMGKVFFTNSGSEANDSQVKIVWYYNNALGRPKKKNIISRTQSYHGTTFISASLSGLPTLHQDFDLPGRFVLHTDCPHYWRFHLPGETEEEFATRLADNLENLILKQGPETIAAFIAEPVIGAGGVILPPKTYFEKIQAVVKKYDNLFIVDEVITGFERLGTMFGSDLYNIKPDLVSLAKALSSAYAPIGAILVSPEISDVIHSHSNKLGTFAHGFTYSGHPVSCAVALEALKIYRERDIPGHVTHVAQRFQEGIKAFAAGSPIVGETRGVGLLIATEFTDNKSPYELFPFEWGVGEIFGQECKKRGMMVKVLGNLIAMSPPLIITREEIDKLVSIYGEALKATEERVAELKSKKN

SEQ ID NO: 3030 - protein, 508 aa, Vibrio vulnificus YJ016
MHMSKSFLLISMGLASISVHAQTLTRDNGAPVGDNQNSITAGENGSVLLQDVHLIQKLQRFARERIPERVVHARGTGAHGEFVASGDFSDLTLSSPFAQSGKVTPVFVRFSTVIHSKGSPETLRDPRGFATKFYTDQGNWDLVGNNLPVFFIRDSIKFPDMVHSLKPSPVTNLQDPNRFFDFFSSQPSATNMLTWVYTNLGTPASYRTMDGFGVHAYKWINQKGEVNYVKFHWKSQQGVKSLRPAEVTKVQGEDFNHLTNDLYTQINAGNFPKWDLYVKVLSPKALSKLDYNGLDATKVWLDVPEKKVGTMTLNRVPDNFFLETEQSAFAPSNIIPGIEPSEDRLLQGRLFAYADTQLYRLGANLFQLPVNSPKSPVANHNQDGPSNNSTGLGNVDSLDVNYEPSRLVNLTVDKQARAVETPLSGHVQQQAIRNPRDFFQAGVLYRSLSEQDKADLIHNLSGDLNKVNDAEVKAIMVSYFYRADKEYGTRLAKATDVNLKQVTKLASM

SEQ ID NO: 3031 - protein, 610 aa, Arabidopsis thaliana
EFHSRFSNGLYHLDDKISSSNGVRSASIDLITRMDDSSPKPILRFGVQNFSSTGPISQTVLAMPALSPTMSHGNVVKWMKKEGDKVEVGDVLCEIETDKATVEFESQEEGFLAKILVTEGSKDIPVNEPIAIMVEEEDDIKNVPATIEGGRDGKEETSAHQVMKPDESTQQKSSIQPDASDLPPHVVLEMPALSPTMNQGNIAKWWKKEGDKIEVGDVIGEIETDKATLEFESLEEGYLAKILIPEGSKDVAVGKPIALIVEDAESIEAIKSSSAGSSEVDTVKEVPDSVVDKPTERKAGFTKISPAAKLLILEHGLEASSIEASGPYGTLLKSDVVAAIASGKASKSSASTKKKQPSKETPSKSSSTSKPSVTQSDNNYEDFPNSQIRKIIAKRLLESKQKIPHLYLQSDVVLDPLLAFRKELQENHGVKVSVNDIVIKAVAVALRNVRQANAFWDAEKGDIVMCDSVDISIAVATEKGLMTPIIKNADQKSISAISLEVKELAQKARSGKLAPHEFQGGTFSISNLGMYPVDNFCAIINPPQAGILAVGRGNKEVEPVIGLDGIEKPCVVTKMNVTLSADHRIFDGQVGASFMSELRSNFEDVRRLLL

SEQ ID NO: 3032 - protein, 382 aa, Mycobacterium tuberculosis CDC1551
MLARRCSGRHGLAILTFWRCRMSFLIASPEALAATATYLTGIGSAISAANAVAAAPTTEILAAGTDEVSTAISALFGAHAQAYQALSAHVAAFHDQFVHTLTAGAGSYMAAEAAAASPLQALQLELLNAINAPTLALLGRPLIGDGTDAAPGSGGAGGAGGILIGNGGTGGASDLAGTGRGGVGGAGGAGGLFGIGGAGGGCGSAVAIGGDGGAGGAGGVFSGGGAGGAGDAIGGSGGAGGTGGLLGGGGGAGGAGGAGGNGGGASNSASIGGDGGSGGAGGMLYGAGGVGGNGGAAVAIGGDGGAGGRAGAIGNGGDGGNGGTSNTPGGSGGDGGNGGNAGLIGNGGNGGNAEIVISGGSVAGTGGNGGLLLGFNGTNGLP

SEQ ID NO: 3033 - protein, 566 aa, Bifidobacterium longum NCC2705
MAINPPVDATQTPEWAALQKHYDELQVEGVSLKKWFAEDAERVEKLSFDAGDLHFDLSKNLIKPETLQLFANLAKAVKLDERTKAMYTGVHINNTEDRAVLHTALRRPVEDEGKYIVDGQDTVKDVRETLDKIYAFADDVRSGKWTGVTGRKIETVVNIGIGGSDLGPVMVYEALKPYADAGISARYISNIDPNDLAEKTKGLDPETTLFIIVSKTFTTLETLTNAREARTWLLEELTANGAIAEGDEAQKAEAIKKHFVAVSTNLEKVEEFGIDPNNAFGFWNWVGGRYSVDSAVGTSLAVVFGPARFEEFLHGFHEIDEYFANTPFEKNVVVLLGMLNVWYRNFFKVASHAVLPYDQYLHRFPAYLQQLTMESNGKSVRWDGTPVTSETGEIFWGEPGTNGQHAFYQLIHQGTQLIPADFIAFVNTPNPTKDGDQDVHELFLGNYFAQTKALAFGKTADEVRAEGTPEEIVPARVFSGNRPTTSIFGVALTPFALGELIALYEHITFVEGTVWGLDSYDQWGVELGKQLAKQITPAISQDDDALAAQDASTQSLIKFYRANREF

SEQ ID NO: 3034 - protein, 286 aa, Zea mays
  unsure (1)..(286): unsure at all Xaa locations
PRPQLVXEAIPFPYTITTFHFASGTFFITLMWLLNLHPKPPRSLKQYAKLLPLALIHMLGNVFTNMSLGKVSVSFTHTIKAMEPFFSVLLPVRFLGETPSLPVLGSLVPIVGGVVLASMTEVSFNWIGFWSAMTSNLMNQSRNVYSKKILADKEDSLDDINLFSIITVMAFLLSAPLMLCVEGIKFSPSYLQNAAANGKELFMTAALAGTSFYFYQQVSYSLLARVSPVTHSVANSLKRVXVVIVSSVLFFRTLISPINALGTGVALAGVFLYSQFKKSKPKATAA

SEQ ID NO: 3035 - protein, 265 aa, Zea mays
MAVPMSAIESAWQLLIANFTEFQLATVITFLLHETVFFLSGLPSLLFERFGLFAKYKIQKRSNTSAYQNRCVLRLILYHVSVNLPVMILSYPAFKFMGLRSSLPLPHWTVVVSQVLFYFVLEDFIFYWGHRALHTKWLYKHVHSVHHEYATPFGLTSEYAHPAEILFLGFATVVGPALTGPHLFTLWLWMVLRVLETVEAHSGYHFPWSPSNFLPLYGGSDFHDYHHRVLYTKSGNYASTFVYMDWLFRTDNGYRKAKRPLRSKK

SEQ ID NO: 3036 - protein, 397 aa, Nitrosomonas europaea ATCC 19718
MKLSQRVQAIKPSPTLAVTAKAARLKAEGKNIIGLGAGEPDFDTPLHIKDAAITAIRNGFTKYTAVGGTASLKQAIISKFKRENSLEFMPGEILVSSGGKQSFFNLVLATIDPGDEVIIPAPYWVSYPDIVLIAEGKPVFIDTGIEEKFKISPDQLEKAITPRTRMFVVNSPSNPSGSVYSLEELQALGAVLRKYPDILIATDDMYEHILLSGDGFVNILNACPDLKARTVVLNGVSKAYAMTGWRIGYCGGPAAIITAMENIQSQSTSNPNSIAQVAAEAALNGDQSCMVPMIEAFRERNQFLTNALNSIAGIHCLLSEGAFYAFVDVRQAISRLNTQQILQNSSDIAFCNYVLEKAEVAAVPGSAFGCEGYMRLSFATSMDNLQEAVKRIASLLS

SEQ ID NO: 3037 - protein, 337 aa, Acinetobacter sp. ADP1
MKAVGYKEQGEITRPDALVDIEIDQPVARGKDILVEVKAISVNPVDTKVRKRAAAEAGQWKILGWDAAGVVVSVGDEVTEFKVGDEVWYAGDLTRPGSNAQFQLVDARIVGHKPKRLSFAEAAAMPLTTITAWEMLFDRLKIEDPVPGGDRSILIIGGAGGVGSITIQLLKAKSDLKVIATASRAETQAWVKQLGADYVIDHSKPLKAQMDELGLKAPSYVFSTNYTDQYMEQIAALTAPQGRLGLIDDPAELSISPLKTKSISLHWEFMYTRSMYQTEDIAQQRELLNAVAKLVDDGVIQTTLTEVYGKINAENLKEVHSLIEGGKAKGKIVLEGF

SEQ ID NO: 3038 - protein, 301 aa, Glycine max
MVPQSVITQVSDSSGVNAISNVSSSGYGFYDWLFKCHGFWHNATLIIPSFLFVFYLALQARHSLLKVSLARSYIIISYNLCLCLVTLLNLAWCFLQAWECTSGRELTWNLLSLFTTSGMLFLEVSLLAFLLQGNNAGGLEAMKRTFGISTLVVGLDILLKAIYLFVFGIPLFVDSNDHTHHGKWNLWVVHKLLLTAVYGFIMFMYHSGWKETLPAKIAFYKYVAIMFIFNAIATLACGLAGTHAAFAFWLYRVTVVFYHAFYLPFLYTTFLADFFQEENFHLENVYYSEMKDAGFFDTDWE

SEQ ID NO: 3039 - protein, 578 aa, Neurospora crassa
MEASSPLAAIRPAPPSFSQPEVLGPRNGNLAPPTGLFNFKRSNADLFNTKHAGRSSPKGSLVAGSSENFKLNEAGLAFSLRSRTTDSIVDSVDQMELCSSPLPPTPRRALFTSTGIENAVEGRGYATTPPPPASSSPAVNRLDMSPVPIKAPFLSRLAASPSPAAVDSGDEDTLPDSPAAVRQLSQESKGIGAERRRLGLSRPPLARAKGYSTSSIPGRSNGSGSGLPPFRFGARNLKVPISPSVSLSLSECFEESPPQERRTPVLPGSPCSNAAAARCKTHFGSGSSINSVRKRSPTNNARTPSNPFARQRKTFRRSLSMFESPGDIVKPKERTSLPSSLKSVVDVNEPQEPLLPHFFPSGENDSIPRISRDTLLEVLDGKYGSQYSHRMIIDCRFEYEYEGGHIDGAINYNDKELLARHLFETPMEGRTLLIFHCEYSAHRAPIMARHIRSEDRTINAEFYPKLTYPDVYILDGGYSGFFQNHRERCCPQAYIEMNDAEHVNTCEREMGRLRQTRKGFSRAQTYAFGQRERKSDKFEAVSPTAPGRKVSRDDEEDMIGASPILGNDRSHSRRMATF

SEQ ID NO: 3040 - protein, 456 aa, Chondrus crispus
MVTGFVPCAAPLRATTRQTAAVSVVSRSASTFVAPSRRVTAPAAPVPTVRMTTAAATTKKSIKDLSPADIAGKRVLVRCDLNVPLDGKTITDDTRIRASVPTIKFLMEAGAKVLLSSHLGRPKDGPEDKFSLSPVAARLTQLLGKDVTMAPDCIGDGVTKIVSGMANGDVTLLENVRFYKEETKNDPDFAKKLAANADFFVNDAFGTAHRAHGSTAGVTAHLKPSVAGLLLEKELAYLAGTVSDPARPFAAIVGGSKVSSKIGVIDSLLQKVDKLIIGGGMVFTFLKAKGLNVGSSLVEDDKLELARELVKTAEAKGVSIILPTDVVLADKFAADANTQVTSVDSIPDGWMGLDQGEDSTKLIQNELKECKTVIWNGPMGVFEMEKFAKGTFAIADTLADLTESGCITIIGGGDSVAAVEKAGLAEKMSHISTGGGASLELLEGKVLPGVAALDDN

SEQ ID NO: 3041 - protein, 647 aa, Xanthomonas campestris pv. campestris str. ATCC 33913
MCGLAGLLLATPRMHGEQLEALVRPMGGALRHRGPDDAGTWCDAQAGVALAHQRLSILDLSPLGHQPMRSADSRYVLAYNGEIYNFAQLRAALAALGHRFRGHSDTEVLLAAVVEWGLDDTLARCNGMFALALWDERDHCLSLARDRVGKKPLYYGWAGDTLVFGSELKALWQHPDFDNGVDRDALTLLLRLGYIPAPACIHERTFKLMPGRVLRLDAQAVAAGAAAHRPDQAQQPFWNAREAMQRALAAPFTGTDAQAEEQLDSLLRDAVALRMVADVPVGVFLSGGTDSSIVTAMMQAQSDQPVHTFSIGFEGSHHDEAPLAREVATHLHTDHTELYVSGADALAVVPTLPDMFDEPFADASQVPTALVARLARGGVTVALSGDGGDELFFGYGRYQRALRNWRMHGLVPAPLRRLMAVAARKSGEASRTGGLAALVAEAGARGIGDIYRNRISRWRDPAAVVLGATEPDSFYSLADPLHGSGTPADAMMLADFAAYLPDDLLCKVDRTTMAVGLEARAPLLDWRVAEFAWSLPLSLKYRDGVSKYLLKRVLCRYLPEPMVYRGKRGFGAPVSAWLRGDLHGWADDLLAHGTLQREGVFAADTVAGLWRDFNGGERKWHTHLWTVLMFQAWQDHWRAQRAAIVRS

SEQ ID NO: 3042 - protein, 418 aa, Chondrus crispus
MSFSKLCIDALDLAGKRVFIRVDFNVPFDKETGKTITNTQRIDAALPTIKYALEKGAKSVVLASHLGRPSGRVNPKFSLKPVADVVSEKIGKTVTFLEDAVGSATEEACKDPETGSVFLLENLRFHIEEEGKGVDADGNKIKADAAKVTEFRKSLSTLADVYVNDAFGTAHRAHSSMVGVDLPQKASGFLMKKELEYFGKALQEPQRPFLSILGGSKVSDKIQLIENLLDKVDEMIIGGGMAFTFKKAVEGMAIGQSLFDEAGAKIAQEIVDKAKAKNVKLHFPVDFTIADKFAPVANTRVATDSEGIPDEWMGLDAGPKSQEAMREVVLRAKTVVWNGPVGVFEFEAFAKGTKAVVDAVVEATSSGAVTIIGGGDTATAVKEMGAADSVSHVSTGGGASLELLEGKTLPGVAALTDA

SEQ ID NO: 3043 - protein, 549 aa, Escherichia coli O157:H7 EDL933; identical to SEQ ID NO: 339

SEQ ID NO: 3044 - protein, 392 aa, Neisseria meningitidis Z2491
MAFLKLTEQNVQGKTVLIRADMNVPFKDGKISDDTRIRASIASVKYCVDNGASVIVMTHLGRPTEGEFHPEDDVAPVAAHLGSLLGKDVKVLNDWRENKPALNAGDVVMLQNVRINKGEKKNDLELGKAYASLCDVFVNDAFGTAHRAQASTEAVAQAAPVACAGVLMAGELDALGKALKQPARPMVAIVAGSKVSTKLTILESLADKVDQLIVGGGIANTFLLAEGKAIGKSLAEHDLVEESKKIMAKMAAKGGSVPLPTDVVVAKAFAADAEAVVKDIADVAEDDMILDIGPKSAAALADLLKAADTVVWNGPVGVFEFDQFAGGTKALAEAIAQSKAFSIAGGGDTLAAIAKFGVTEQIGYISTGGGAFLEFLEGKELPAVAALEKRGA

SEQ ID NO: 3045 - protein, 452 aa, Schizosaccharomyces pombe
MTSYGNGFRMMAKCLLSLRSGYSVTAPVSKSMANVLWARYASTRIKTPPFPESITEGTLAQWLKQPGEYVNKDEEIASVETDKIDAPVTAPDAGVLKEQLVKEGDTITIDQDIAVIDTSAAPPEGGSAGPKKDEVKTADADAAKDLSTPQDSSKPIEEKPMPDLGAEQKESAPSSTKPAPDAKEPEFSSPKPKPAKSEPVKQSKPKATETARPSSFSRNEDRVKMNRMRLRIAERLKESQNRAASLTTFNECDMSAVVALRKKYKDEILKETGVKIGFMSFFSKACTQAMKQIPAINGSIEGEGKGDTLVYRDFCDLSIAVATPKGLVTPVIRNAESMSLLEIESAIATLGSKARAGKLAIEDMASGTFTISNGGIFGSLYGTPIINLPQTAVLGLHAIKERPVVINGQVVPRPMMYLALTYDHRMVDGREAVTFLRLVKEYIEDPAKMLLV

SEQ ID NO: 3046 - protein, 84 aa, Lycopersicon esculentum
IKGSPYPRGYYRCSSVRGCPARKHVERATDDPGMLVVTYGGEHRHVQTTISGNVTGAGAGSSGERMMAFELTGQKNGERLGLEI

SEQ ID NO: 3047 - protein, 475 aa, Arabidopsis thaliana
MAGAYDPSLPEVPEWLNKGDNAWQLTAATLVGLQSMPGLVILYASIVKKKWAVNSAFMALYAFAAVLLCWVLLCYKMAFGEELLPFWGKGGPAFDQGYLKGQAKIPNSNVAAPYFPMATLVYFQFTFAAITTILVAGSVLGRMNIKAWMAFVPLWLIFSYTVGAYSIWGGGFLYQWGVIDYSGGYVIHLSSGVAGFVAAYWVGPRPKADRERFPPNNVLLMLAGAGLLWMGWSGFNGGAPYAANLTSSIAVLNTNLSAATSLLVWTTLDVIFFGKPSVIGAIQGMVTGLAGVTPGAGLIQTWAAIIIGVVSGTAPWASMMIIHKKSALLQKVDDTLAVFYTHAVAGLLGGIMTGLFAHPDLCVLVLPLPATRGAFYGGNGGKQLLKQLAGAAFIAVWNVVSTTIILLAIRVFIPLRMAEEELGIGDDAAHGEEAYALWGDGEKFDATRHVQQFERDQEAAHPSYVHGARGVTIVL

SEQ ID NO: 3048 - protein, 448 aa, Geobacillus stearothermophilus
MKAKTKKYIQVKTAIPGPKAKELLRKKEENVPRGPFHTVPTFAVKGEGALLTDVDGNTFIDLAGAIGSLNVGHCPPKVVEAIQKQAEQYIHPCFHVMMYEPYVELAETLNRITPGNHSKKTFFLNSGAEAVENAVKIARKYTGRRAILSFERGFHGRTLLAMSLTSKVKPYKFGFGPFAPDTYKLPYPYYYRKPAGMTNEELDAELLRRLEDFFLSDVPAEEVAAIIMEPVQGEGGFIVPSKTFVQGVKRICEKYGILFIADEIQTGFGRTGKMFAIEHFDVIPDLITMSKSIGAGVPISAVTGRAEVMDAPNPGEIGGTYGGSPLGCVAALEVIRMLQQEQLVERANVIGQIAIDRFRRLQEKYETVGDVRGLGAMVAVEFVTDAKTKTPNKELTAAILRECHQRGVIVMGAGLYSNVIRLLTPLVITDEQLEEALDVIEEVIAELA

SEQ ID NO: 3049 - protein, 253 aa, Ferroplasma acidarmanus
MDFRNKNAIVTGGSRGIGNGIAKALADNGANVIITYGNNDNAADETVKYIRSKGVSGEKYKIDQSDIGEIDGLMKFIKDKFKTVDVLVNNAGICPFMDFFNIDQNLFEKVWKVNVESHFFITQRVSQMMIENNTKGKILFISSISAIVGGKFQAHYTTTKSAMNGLMHSLAIILGEHGIMVNSLEPGTILTDINTEDLSNKKKREYMENRIPLRRLGNPSDIASPALFLVSDENTYINGAELLVDGGMLVNLQ

SEQ ID NO: 3050 - protein, 482 aa, Geobacillus stearothermophilus
MIYVNGKWSKGEGKKRPVINPANEEIIIEINEASQQQAVEAIQAARHAFQYTDWPFNPAKRIAALRQLADLLEQNAETFASIETLNTGKPIRESRLDVSDSIQCLRYYADFVEQRAIEEIKRTDGTTSKIIEEPIGVCALIVPWNFPLLLGIWKLAPALAAGNTVVFKPSELTPLSFIELTKLIDSIGLPPGVFNLVPGGGSPVGETLVTHPDVEKISFTGGTKTGRWIYEQGARRLKRVSLELGGKSPLLIFDDADLASTIEWALFASFFNQGEVCVAASRILVQRRVYDSFLDQLTQRLASLRIGDPFAEHTEMGPLISSSHLEKVETYIQIGLQEGGVLLQGGKRMKELGYYLTPAVFAHVRQDMRIVQEEIFGPVITVQPFEHDEEAIKLANDTIYGLAAGLFSRDLERAEQIAGKLRAGTIWINSYHTPYVDAPWGGLKQSGIGRELGPQGFAAFTETKHVNISQHGKPLGWYSSHS

SEQ ID NO: 3051 - protein, 379 aa, Arabidopsis thaliana
MNLFSLCFKPFGHVCDNSEAGSGGGGGVSGGTGGEGKDGLLWFRDLGKYCGGDFSMAVIQANQVLEDQSQVESGNFGTFVGVYDGHGGPEAARYVCDHLFNHFREISAETQGVVTRETIERAFHATEEGFASIVSELWQEIPNLATVGTCCLVGVIYQNTLFVASLGDSRVVLGKKGNCGGLSAIQLSTEHNANNEDIRWELKDLHPDDPQIVVFRHGVWRVKGIIQVSRSIGDMYMKRPEFNKEPISQKFRIAEPMKRPLMSATPTILSHPLHPNDSFLIFASDGLWEHLTNEKAVEIVHNHPRAGSAKRLIKAALHEAARKREMRYSDLRKIDKKVRRHFHDDITVIVVFLNHDLISRGHINSTQDTTVSIRSALEH

SEQ ID NO: 3052 - protein, 581 aa, Mycobacterium bovis AF2122/97
MSNLLVTPELVAAAAADLAGIGSAIGAANAAAGAPTMALLAAGADEVSAAVAAVFSSYAQQYQALSAAAAAFHDQFVRALAAGAGAYAGAEAANVEQQLLNAINAPTLALLGRPLIGNGADGAAGTGQAGGAGGLLYGNGGNGGSGAAGQAGGAGGAAGLIGHGGTGGVGGTGAAGGAGGTGGWLFGNGGAGGTGGAVTGVSTTGGPGGHGGDAGLYGFGGAGGAGGFGQSGAAGGAGGAGGAGGWLYGDGGDGGAGGNGGNESGTGVSGVGGVGGAGGAGGLLFGNGGDGGVGGDGGDGSSTQDSGGDGGAGGAGGAGGWLLGNGGAGGAGGAASIKVATGGLGGDGGDAGLFGFGGDGGWGGRGVDARFGAAGGAAGAGGAGGWLYGDGGAGGVGGVGGAVFSLSSGDGGAGGAGGGGGWLFGNGGDGGAGGGGGGRFGSGSGAGGDGAVGGAGGAGAWFGNGGAGGVGGGGGRGTTAIGGDGGAGGAGGAGGWLYGDGGAGGAGGGGGRGGTGNDGGDGGDGGRGGDAQLLGNGGDGGAGGAGGPAGFGASPGAGAAGGGGGAGGSLFGSPGTTGPHG

SEQ ID NO: 3053 - protein, 187 aa, Agrobacterium tumefaciens str. C58
MSQESSRRASARRESPSSPRTWAGWIPVTGTGMRECVVALCLLLTLIFAAASPALAFNPDEVLKDPVLEQRARNLTSQLRCMVCQNQSIDDSNAELARDLRVLVRERLVQGDSDKAVIDYVVSRYGEFVLLKPRLSLRTLLLWGAPIGLTLAGIFAVFVFSRRRATQERPQKLSADEEERIRNLIEK

SEQ ID NO: 3054 - protein, 362 aa, Mycobacterium bovis AF2122/97
MSASLPVFPWDTLADAKALAGAHPDGIVDLSVGTPVDPVAPLIQEALAAASAAPGYPATAGTARLRESVVAALARRYGITRLTEAAVLPVIGTKELIAWLPTLLGLGGADLVVVPELAYPTYDVGARLAGTRVLRADALTQLGPQSPALLYLNSPSNPTGRVLGVDHLRKVVEWARGRGVLVVSDECYLGLGWDAEPVSVLHPSVCDGDHTGLLAVHSLSKSSSLAGYRAGFVVGDLEIVAELLAVRKHAGMMVPAPVQAAMVAALDDDAHERQQRERYAQRRAALLPALGSAGFAVDYSDAGLYLWATRGEPCRDSVAWLAQRGILVAPGDFYGPGGAQHVRVALTATDERVAAAVGRLTC

SEQ ID NO: 3055 - protein, 194 aa, Zea mays
GTCAVAGIMSDANILINTARLHAQRYALSYQEPIPVEQLVQSLCDTKQGYTQFGGLRPFGVSFLFAGWDKHHGFQLYMSDPSGNYGGWKAAAVGANSQAAQSMLKQDYKDGLTREEAVALALKVLSKTMDSTSLTAEKLELAEVFLQPDTGEVQYQVCSPEALGKLLAKSGLTQPTPEGIMYWFAVACDAFYCS

SEQ ID NO: 3056 - protein, 335 aa, Staphylococcus aureus subsp. aureus MW2
MKMIGFEKPFKLEEGNLFKVYEQRKPTPENDDILVKVNSISVNPVDTKQRQMEVTQAPRVLGFDAIGTVEAIGPDVTLFSPGDVVFYAGSPNRQGSNATYQLVSEAIVAKAPHNISANEAVSLPLTGITAYETFFDTFKISHNPAENEGKSVLIINGAGGVGSIATQIAKRYGLTVITTASRQETTEWCEKMGADIVLNHKEDLVRQFKEKEIPLVDYIFCTYNTDLYYNTMIELIKPLGHITTIVAFNEDQDLNALKLKSITFTHEFMFARPIHRTPDMIKQHEYLEDITKNIESGHYQPTTTQVFEGLSPENLYQAHQLLEKQSMIGKLVINI

SEQ ID NO: 3057 - protein, 141 aa, Zea mays
  unsure (1)..(141): unsure at all Xaa locations
MASSMLSSAAVVTSPAQATMVAPFTGLKSSSAFPVTRKANNDITSIVSNGGRVSCMKVWPPVGKKKFETLSYLPDLTEVELGKEVDYLLRNKWIPCVEFELEHGFVYREHGTTPGYYDGXRYGTMWKLPLXFGGTDSASRV

SEQ ID NO: 3058 - protein, 282 aa, Picea mariana
MAKEGSKEVEQQGFAAKDYKDPPPAALFDVSEFKLWAFYRAIIAEFIATLLFLYITVATVIGHKRNQAACGSVGLLGIAWAFGGMIFVLVYCTAGISGGHINPAVTFGLFLARKVSLPRAVLYMVAQCLGAICGCGLVKAFQKSYYDQYGGGANSVAHGYTKGVGLSAEIIGTFVLVYTVFSATDPKRNARDSHVPVLAPLPIGFAVFMVHLATIPITGTGINPARSFGAAVIYGHQKIWDEHWIFWVGPFLGAAGAAAYHQYILRAGAIKALGSFRSNPHV

SEQ ID NO: 3059 - protein, 126 aa, Guillardia theta
MSEIESLESISSVSVENEVDSEMISNEFPEKSLNCNENIFKMNDKLDIDFRMTLPILTKYEKARILGARALQISMGAPILTEVNTLSDSLDIASKELYERKIPITIRRYLPNGRYEDWKIEELIFD

SEQ ID NO: 3060 - protein, 84 aa, uncultured bacterium
YYEPWTYDYQHLFNAPEGPDQPTAVPVSMLTGEPIDVNAGPNWDDDLGGSPVYAENDPNLKDLTEEQRRQLFAVERLVFFYIPR

SEQ ID NO: 3061 - protein, 197 aa, Brassica oleracea var. capitata
MGRKKLEIKRIENKSSRQVTFSKRRNGLIEKARQLSVLCDASVALLVVSASGKLYNFSAGDDLVKVIDRYGEQHADDDRKALDLQSEAPKYGSHHELLELVESKLVESNSDVSVDSLVQLENHLETALSVTRARKTELLLKLVDSLKEKEKLLKEENQGLASQMEKNNLAGAEADKMEVSPGQISDINCPVTLPLLY

SEQ ID NO: 3062 - protein, 67 aa, Lycopersicon esculentum
IKGSKYPRGYYKCSSLRGCPARKHVERAMDDPTMLIVTYEDEHCHNPVAAMHGNSSQMVNFGLMEKK

SEQ ID NO: 3063 - protein, 55 aa, Lycopersicon esculentum
IKGSPHPRGYYKCSSMRGCPARKHVERCLEEPSMLIVTYEGEHNHPRLPSQSANA

SEQ ID NO: 3064 - protein, 1062 aa, Schizosaccharomyces pombe
MHNIQASSITLGDCLGKGAFGAVYRGLNIKNGETVAVKKVKLSKMLKSDLSVIKMEIDLLKNLDHPNIVKYRGSYQTNDSLCIILEYCENGSLRSICKNFGKIPENLVALYTFQVLQGLLYLHNQGVIHRDIKGANILTTKDGTIKLADFGVATKINALEDHSVVGSPYWMAPEVIELVGATTASDIWSVGCTVIELLDGNPPYYDLDPTSALFRMVKDEHPPLPSNISSAAKSFLMQCFQKDPNLRIKTRKLLKHPWVIMNQTSSKFSDAIDEVQKYNERVKESTLTAIIEPTSNRINPTLHSGRQSSYHMPESPKTPIAESPDHDNWDNEFQGTLKISDDVLKKSEHFMDFCSNFKGKNNSSSITSSPSKSRHAFNSDQISESNNFNASPLSTPLKAQFDPSKPALNRSIDHQKTPQHKRYLSTEFKENIPDGIEKFVETPRDSEFTDIFPTSSIKVQGLRKETGLGTLVLNKCYGSWNNEENEDGEESDIFDSIETNLENLDIENNIALDKRTHLASLLSSLLGSLRDKNIGSKDTTVSQIASILSEDLSLKREIIQAHGILPLLETLREIKTPDVQLLLLKLINTVAFDDHTTLQKVCFAGGLPLMLSFSNREHSFEFRYESAIFIQQMYRTSALTLQMFLSSNGLNSLLLFIKEDYGTNRDFVFVGVEGIWKLLRQQDYIPKNDICTMVVNDSLEPLTKAMLKALATDDDSSRMSLTRICEILLALSQADNYVKESLLCESALRRILRILLYLPHSDMAITLQFFKQLSMVPSSLSLLRKVHIIPLLTHILGDSKIEKGRKEIRSEALAALFNVCKLDKKSQEEAVISGAIPLLQEVIIKDRLFKEFALPILLALPQAGPVSRIYLWQNKCLDFFLSLLSDLNWQSAVFDTIASWLQFELREVQRVLAEKRNVQLVLKVFCISQSASSNRMLDTLGRVCQISPRLAASYGQPIIFQKFKEKLTHKGTKPIVVLNIFQIMKSMCEASSQSVAYIAHCGLPDVVANLNQTSDSVLVKELAKDLLKYLKVPQGPINEHKSPISKPHMPPPRWQPKQPLTQ

SEQ ID NO: 3065 - protein, 60 aa, Lycopersicon esculentum
IKGSPHPRGYYKCSSVRVCPARKHVERALDDPTMLIVTYEGEHNHSLSVAETSSLILESS

SEQ ID NO: 3066 - protein, 401 aa, Oryza sativa
MQRNGVMECSVCHSKVVAPSPRSVSRAYDKHRSKISSKYRALNFLLVSGDCILVGLQPILVFMSKVDGKFQFSPISVNFLTEVTKVIFAIVMLIIQSRKQKVGEKPLLSLSTFVQAARNNALLAVPALLYAINNYLKFIMQLYFSPATVKMLSNLKVLVIAILLKFIMRRKFSIIQWEALALLLIGISVNQLSSIPDGTKSFGLAVTTIAYIYTLIFVTVPSLASVYNEYALKSQFDTSIYLQNLFLYGYGAIFNFLGILGTVIFQGPESFDILRGHSRATMFLICNNAAQGILSSFFFKYADTILKKYSSTVATIFTGLASAAFLGHTLTVNFLLGISIVFISMHQFFSPLAKVKDDKPAGALEPEDAQNHRSSDSSFVNMTAGAADDCLLDENVTLLQL

SEQ ID NO: 3067 - protein, 371 aa, Azotobacter vinelandii
MTIKSRAAVAFGPNQPLQVVEVDVAPPKKGEVLVRIVATGVCHTDAYTLSGQDSEGVFPCILGHEGGGIVEAVGEGVTSLQVGDHVIPLYTAECRECKFCKSGKTNLCQAVRATQGKGLMPDGTTRFSYQGQPLYHYMGCSTFSEYTVLPEISLAKIPEDAPLEKVCLLGCGVTTGIGAVLNTAKVTEGSSVAIFGLGGIGLAAIIGAKMAKASRIIAIDINPAKFEVAGQLGATDFVNPKDHDKPIQEVIVEMTDGGVDYSFECVGNVQLMRAALECCHKGWGESTIIGVAGAGQEISTRPFQLVTGRVWRGSAFGGVRGRTELPSYVEKAQKGEIPLDTFITHNLPLERINEAFDLMHEGKSIRTVIHF

SEQ ID NO: 3068 - protein, 617 aa, Deinococcus radiodurans R1
MAAMVSHSSPVDGAPVSRPRSPVMATELKLPDVGDNIEKGTVVTVLVNPGDSVTEGQPIIEIETDKAVVEVPASAAGTIEAVNVKVGDTIPVGGVIATLGGGAASASDSAPSASAPSPANGGGDQAANVESTPATDSGTAQRVAQAQQDAQKEQAGQPTSGGTADANQAQATPSEGQSSGGQQVTLPDVGDNIEKGTVVTILVNVGDTVSEGQPVIELETDKAVVEVPANASGTVQSVAVKIGDSIPVGGTILTLSGAASTQPTAPAPESAQPASQSQQSTQPEPARPAGAPQAQAAAPQQSGTQNPQTFDGRPVVPAAPSVRRLAREIGIDIHAVHGTGIAGRISEEDVRRTAGTPSVQAQASAASAAAPAPMAAPLPNFEKWGTVRREDMSGIRKATVRSMTTAWTTIPMVTHFDKADVTAMEETRKRFGARVEKEGGKLTMTHILMKVVANALRKFPKFNASLDLGAEQVIYKEFVNIGVAVDTPVGLLVPVVKDADRKGITELVLDLSELAGRARERKLKPDEMQGATFTISNLGGIGGNAFTPIVNSPEVAILGVSRGGFEPVWNKEKGEFEPRNMLPLSLTYDHRLIDGADAARFLRYICESLEDPFLISL

SEQ ID NO: 3069 - protein, 202 aa, Chromobacterium violaceum ATCC 12472
MDAAGYVAGQDVMIALDCAASEFFRDGKYHLTAEKLSLSSEEFADYLENLVNKYPIISIEDGMAEQDWAGWKLLTDRLGQKVQIVGDDVFVTNPKILAEGIAKGVANSLLVKVNQIGTLSETLKAVDLAKRSRYTCVMSHRSGETEDSTIADLAVATNCMQIKTGSLSRSDRMAKYNQLLRIEEELGDAAHYPGRAAFYHLK

SEQ ID NO: 3070 - protein, 498 aa, Anabaena variabilis ATCC 29413
MAINTGKNKLMNRHIQPWQRLLVLAIGSMVFAVFAPTIVQAANTPTLESLSETTIKLQISIDTTWVLLSGFLVFFMQTGFAMLEAGLVRQRSVVNTLLENFIDAAVTVLAWWAVGFGIAFGTSAGGLFGIDTFFLNQLPGADGSYPLGAPGSTAAINTYTLFFFQFAFAATASTITTGSMAGRTDFIGDLIYSAIMGAISYPIIVHWAWNSNGWLGKLSYHDFAGGSIVHTVGGWTALVGAYLLGPRPDRPPWGKLPPAHNLALATLGTMILWFGWYGFNPGSTLGTANPGLIGLVTINTTLAAGAGALTALIFLYVRTGKWDLVYCLNGSLAGLVAITAPCAYVAPWASVLIGFTGGISVVLGVSLIESLHIDDPVGAFSVHGISGMMGTLSIGFLGQAELTLNQKAGLFLGGGFDLLGIQMLGIVAITVFTVAFAFLMYGGLKAVGYLRVNAEADSIGIDAYEHGASVWPDIYPVEEVSKLQDQTKISENKTLEEQ

SEQ ID NO: 3071 - protein, 429 aa, Azotobacter vinelandii
MAKIVDIKGREVLDSRGNPTVEADVILDNGIIGSACAPSGASTGSREALELRDGDKARYLGKGVLKAVANVNGPIRDLLLGKDPADQKALDRAMIELDGTENKASLGANAILAVSLAAAKAAAKDKGVPLYAHIADLNGTPGVYSMPVPMMNIINGGEHADNNVDIQEFMVQPVGAKSFAEALRMGAEIFHNLKAVLKARGLNTAVGDEGGFAPNLSSNEDALAAIAEAVGKAGYKLGSDVTLALDCASSEFYKDGKYDLAGEGKTFDAAGFADYLAGLTQRYPIISVEDGMDESDWAGWKGLTDKIGAKVQLVGDDLFVTNTKILREGIEKGIANSILIKFNQIGSLSETLEAIQMAKAAGYTAVISHRSGETEDSTIADLAVGTAAGQIKTGSLCRSDRVSKYNQLLRIEEQLGAKAPYRGRAEFRG

SEQ ID NO: 3072 - protein, 518 aa, Anabaena variabilis ATCC 29413
MYQQKSRTRNRRFSTRNYAKSRQSNSQIQIFNLVKKLSPSWQACIPLACLIVLGWSYVAVAQAPAAGPTTAELKVALDTLWVAIAAFLVFFMNAGFGMLETGFCRQKNAVNVLAKNLIVFALATVAFWAIGFGLMFGDGNDFIGFNGFFLSGEDNSPATGDAYKGVFSALSWAGVPLAAKFLFQLVFAGTAATIVSGAVAERIKFVDFLIFSLLLVGIAYPITGHWIWGAGWLADRGFWDFAGSTVVHSVGGWAALMGAAFLGPRIGKYQDKQVVALPGHNMSIATLGCLILWLGWFGFNPGSVMAADPNAITHIALTTNMAGAVGGIAATITAWLYLGKPDLSMIINGILAGLVGITASCAYVSIPSSAIIGFIAGVIVVFAVTFFDKLGIDDPVGATSVHLVCGVWGTLAVGLWSVGPGVYSWYGEGLGPAKGLFAGGGLGQLITQFLGAAAVGGMTVLVSSIFWLALKATLGIRVTREEELEGLDIGEHGMEAYSGFLKEASPGGFAEGKTSDGY

SEQ ID NO: 3073 - protein, 953 aa, Rubrobacter xylanophilus DSM 9941
MATRLGIIPDVDQPEAGGVEHLGSGSALANFPPPEKWDEWTEYEARGWTRREKRTYQIVPTICFNCEAACGLLAYVDRNTREIRKFEGHPLHPGSRGRNCAKGPATINQIKDPNRILYPVRRKGPRGSGEWERVSWEEALEDIGARIRKAIVEDRRTEIMYHVGRPGFEHPHMERVFRAWGVDAHNSHTNVCSSSGRFGYQIVGGFDRPSPDYANAGAIVLVSAHLESGHYFNPHAQRIIESKMKGGKLIVLDPRLSNSAAMADYWLPTRPGSEAAVLLCVVNVILQEGLCDERFLYDWTNWREYLRNRRPGEDPDSFESFLEALREEYARYTPEYAEAESGVPAERILEAARVVGNAAPAVAAHTWRAACAGNLGGWAVSRALAFLGVVTGSWGRPGGTNPNGWNKWLPHFWEEAPPQKAWNELTYPREYPLAANEMSFLLPHFLMEGRGRIEVYFSRVVNPVWTYPDGFSWIEALANEDYIGCHVALTPTWNETAYFADYVLPLGHGPERHDVMSQETHSGVWLSFRQPVLREASRRRGERVAYTYEANPGEVWEDDEFWIELSWKIDPDGSLGIRRHFESPYEPGRKLTTEEYYRWIFENAVPGLPEKAAEEGLSPLEYMRRYGAFEVKSAVYERNMRELSEKELEGSRVEPDGTITTEKSRTRGSLRANRLMPHVGVVVDGKAREGFPTPSGKLEIWSSTMAAWGWEEHATPGYIKSHVHPENLEEGQLVLNATFRLPTLIHTRSGNSKWLNEISNRNPLWIHPKDAEERGVETGDLVRVVTEIGYFVNHAWVTEGIAPGVVACSHHLGRWRRRKDRADRWSNALVDITRDGDGGWKLRQVEGPGPYDSPDPDTRRIFWSDGGVHQNLAFPVHPDPVSGMHCWHQAVYVERAHPEDRYGDVYVDTRKSREVYRRWLSMTRPGPLENGLRRPPVFDRPYRPDESCFYVRE

SEQ ID NO: 3074 - protein, 157 aa, Oryza sativa (japonica cultivar-group)
MAADKKEVADDTILLISSDGEHFNVPSAAASLSQLVSNMIENDCTTNGVPLPNVASKVLAKVIEYCVKHAAAAEDEEKELKSFDAEFMIDVDKNMLYGLLLASNFLNIKSLLDLCCQHTANLIKGKSPEQIRKEFGIKNDFTPEEEEIRKENTWAFE

SEQ ID NO: 3075 - protein, 404 aa, Oryza sativa (japonica cultivar-group)
MASAAMSTLNLSSSPLTKQQLRFGASTLSAEHVSGFSSARPAPSLCCSSSHWRAVKLRPRRRPWRRAGNRVVAQAGGYKVAILGAAGGIGQPLSLLVKMSPLVSALHLYDIANVDGVTADLGHCNTPAKVAGFTGKEELAGCLAGVDVVVIPAGVPRKPGMTRDDLFGINAGIVRELVEAVADHAPAALVHVISNPVNSTVPIAAEVLKRKGVYDPRKLFGVTTLDVVRANTFVAEMKGLPLADVDVPVVGGHAAATILPLLSKARPKTAFTDEEVEALTRRIQNAGTEVVEAKAKAGGGSATLSMAYAAARFLEASLRGLDGDADVYECSYVQCQAVPELPFFACRVKLGRDGVEEVAAAGAELRGLTEFEARALEALKPQLKKSIDKGVAYAQQQPATVAMG

SEQ ID NO: 3076 - protein, 84 aa, uncultured bacterium
YYEPWTYDYQHLFNAPEGPDQPTAIPVSMITGKYLDVEAGPNWDDDLGGSPVYAANDPNLKTLTPAQRRELLAVERLLYFYIPR

SEQ ID NO: 3077 - protein, 85 aa, uncultured bacterium
YYEPWTYDYENLFNAPEGDDQPTARAVSMITGKPMDSIEAGPNWDDDLGGSPVYARNDPNLDGLTDDEREQLNELERVVFFYMPR

SEQ ID NO: 3078 - protein, 306 aa, Sporothrix schenckii
MDGKRQLNSFQQLEKLGEGTYATVFKGRNRHTGEFVALKEIHLDSEEGTPSTAIREISLMKELKHENIVALHDVIHTESKLMLVFEYMDGDLKKYMDTNGERGALKPMLIKSFMYQLLKGIDFCHQNRVLHRDLKPQNLLINGKGQLKLGDFGLARAFGIPVNTFSNEVVTLWYRAPDVLLGSRTYNTSIDIWSVGCIMAEMYTGRPLFPGTTNEDQMLRIFRIMGTPAEHNWPGISQFPEYKATAPRYATQDLRQILPQIDATGIDLLQRLLQLRPELRISAHDALQHPWFHDILQYQHCQQAAG

SEQ ID NO: 3079 - protein, 84 aa, uncultured bacterium
YYEPWTYEYEDLFNAPAGTDQPTAMPISKVTGEYIDIKAGPNWDDDLGGSPIYAANDPNLTNVTEEQRQQLQAIERFVYFYIPR

SEQ ID NO: 3080 - protein, 496 aa, Escherichia coli CFT073
MITTFVFIPIFAIAAGVAQSLQYLNRYHVIREPPEHILNRLPSSASALACSAHALNLIEKRTLDHEEMKALNREVIEYFKEHVNPGFLEYRKSVTAGGDYGAVEWQAGGLNTLVDTQGQEFIDCLGGFGIFNVGHRNPVVVSAVQNQLAKQPLHSQELLDPLRAMLAKTLAALTPGKLKYSFFCNSGTESVEAALKLAKAYQSPRGKFTFIATSGAFHGKSLGALSATAKSTFRKPFMPLLPGFRHVPFGNIEAMLTALNECKKTGDDVAAVILEPIQGEGGVILPPPGYLTAVRKLCDEFGALMILDEVQTGMGRTGKMFACEHENVQPDILCLAKALGGGVMPIGATIATEEVFSVLFDNPFLHTTTFGGNPLACAAALATINVLLEQNLPAQAEQKGDMLLDGFRQLAREYPDLVQEARGKGMLMAIEFVDNEIGYNFASEMFRQRVLVAGTLNNAKTIRIEPPLTLTIEQCELVIKAARKALAAMRVSVEEA

SEQ ID NO: 3081 - protein, 826 aa, Cenibacterium arsenoxidans
MSKNRDRVALPPVNAQKTNMTCHFCIVGCGYHVYKWDENKEGGRAANQNALGLDFTKQLPPFATTLTPAMTNVITAKNGKRSNIMIIPDKECVVNQGLSSTRGGKMAGYMYAADGMTADRLKYPRFYAGDQWLDTSWDHAMAIYAGLTKKILDQGNVRDIMFATFDHGGAGGGFENTWGSGKLMFSAIQTPTVRIHNRPAYNSECHATREMGIGELNNSYEDAQVADVIWSIGNNPYETQTNYFLNHWLPNLNGSTEEKKKQWFAGEPVGPGLMIFVDPRRTTSIAIAEQTAKDRVLHLDINPGTDVALFNGLLTYVLQQGWIAKEFIAQHTVGFEDAVKTNQMSLADCSRITGVSEDKLRQAAEWSYKPKAAGKMPRTMHAYEKGIIWGNDNYNIQSSLLDLVIATQNVGRRGTGCVRMGGHQEGYVRPPHPTGEKIYVDQEIIQGKGRMMTWWGCNNFQTSNNAQALREVSLRRSQIVKDAMSKARGASAAEMVDIIYDATSKGGLFVTSINLYPTKLSEAAHLMLPAAHPGEMNLTSMNGERRMRLSEKFMDAPGDALPDCLIAAKAANTLKAMYEAEGKPEMVKRFSGFDWKTEEDAFNDGFRSAGQPGAEPIDSQGGSTGVLATYTLLRAAGTNGVQLPIKRVENGKMIGTAIHYDDNKFDTKDGKAHFKPAPWNGLPKPVEEQKAKHKFWLNNGRANEVWQSAYHDQYNDFVKSRYPLAYIELNPGDAQSLGVAAGDVVEVFNDYGSTFAMAYPVKDMKPSHTFMLFGYVNGIQGDVTTDWVDRNIIPYYKGTWGSVRRIGSIEQYKKTVSTKRRAFDNV

SEQ ID NO: 3082 - protein, 507 aa, Campylobacter jejuni
MKKLTNDFGNIIADNQNSLSAGTKGPLLMQDYLLLEKLAHQNRERIPERTVHAKGSGAYGEIKITADLSAYTKAKIFQKGEITPLFLRFSTVAGEAGAADAERDVRGFAIKFYTKEGNWDLVGNNTPTFFIRDAYKFPDFIHTQKRDPRTHLRSNNAAWDFWSLCPESLHQVTILMRDRGIPASYRHMHGFGSHTYSFINDKNERFWVKFHFKTQQGIKNLTNQEAAELIAKDRESHQRDLYNAIENKDFPKWKVQVQILAEKDIEKLGFNPFDLTKIWPHSLVPLMDIGEMILNKNPQNYFNEVEQAAFSPSNIVPGIGFSPDKMLQARIFSYPDAQRYRIGTNYHLLPVNRAKSEVNTYNVAGAMNFDSYKNDAAYYEPNSYDNSPKEDKSYLEPDLVLEGVAQRYAPLDNDFYTQPRALFNLMNDDQKTQLFHNIATSMEGVDEKIITRALEHFEKISPDYAKGIKKAFPIVSRIRAWRNHGHRCFLCEIVIRSQFHTTYEPEA

SEQ ID NO: 3083 - protein, 1166 aa, Ustilago maydis
MPPLPYRRSSSLLPVTHSGTSTVARATTSLATRTPIHLTLEDLKRRTIKFISEEDNTTRIVNVSDCRDAYDVMARVLKKFGKPPSGNSYTPTADQGPTGDELGATETWGIFATSADGQNTKALSDNELLAICHAPQPHDPLRERGLTLRRIPNHLPGEDARKVPVRSGRNKLEAFFGERMPVAQMQPAGPGSGVNADEEDAGSVTISGKKMKRASTVSIMSGLGVGPFSSSSHNTGAGHTHGSTRAEGKLLSKKESKHMSPPPVTSKPSKIRNFFGQRPPSELINTNLADFFPSTDSKALQRTARRSIYGRASASTRSKRNSTWSFVADPDAPPLPNKGSMDGHPTPLERSSISIRERGTTPVIQIGYDSRSEDDHQSNARRTSSGTHSHLHSSLTGPPTLPPVVSRDSLDEWSRDLKAVGSPVTEENAMFQSSRHGHASGSQQHHAAMKHYPSHASGYADRPSISRRASGESARSRRSLASQVRHGLSAARERNADTASLLTVDEITQEVENRRESISLAGAGGGWVVDEDGVPIPIPGSSSPFSSSAAASTRPSSGISSSYVHNGHLEHDDSEGHSDEEANQSSDLEEATRTRKARGVPSKAASIRTVASKRASSVLQAPGDESDRHLGDPMAVARSTTSRASSVSELRRSVHDHGDPSDGESGSDFTDSDLDSDGSETDEDEQANDVYLPSAKPAPIKWHKGALIGAGSFGNVFLGMNAKTGLLMAVKQVELPSGDSHLDQRKKGMLEALEREIKLLKSLEHENIVQYLDSFADDSHLNIFLEYVPGGSIVALLRNYGAFEEPLVRNFVRQILNGLSFLHNRGIMHRDIKGANILVDNKGGIKISDFGISKKVESDLVLATNKSGAGGGGAGGAAHRPSLQGSVFWMAPEVVKQTSYTIKADIWSLGCLVVEMISGTHPWAELNQMQALFQIGMGRKPSLPDEISNECRDFLEKTFELDYNNRPSADELLNHAFMGTEMTFPPSSGADGSGGGDDDAGGSGDAGDGDASTMGMTNDAETGTTRETRETKDGKRPTRSKSTRRLEREKRHKEAAAAAAAATALDTGTPNTPTSHTAAAAAAAAAAAASASASASASPAVASTSPAPGDAETGSPTNGKSAVPPAGSTGGTPESILTVSIATARGNSTSTALSAADAAFSEEADS

SEQ ID NO: 3084 - protein, 109 aa, Neisseria meningitidis Z2491
MGSLIIEDLQEGFGKEAVKGKEITVHYTGWLENGTKFDSSLDRRQPLTITLGVGQVIKGWDEGFGGMKEGGKRKLTIPSEMGYGARGAGGVIPPHATLIFEVELLKVYE

SEQ ID NO: 3085 - protein, 1123 aa, Orobanche minor
MASSQPGRSSTNSAQSRQSARIIAQTSIDAKLDADFEESGSSFDYSTSVRVTNYPAGLSEPRSDKVTTAYLHQIQKGKLIQQFGCLLALDEKTFRVIAYSENAPEMLTMVSHAVPSVGDHPLLGIGSDIRTIFTAPSAAALQKALGFGEVSLLNPILVHCKTSGKPFYAIIHRVTGSLIIDFEPVKPHEVPMTAAGALQSYKLAAKAIACLQALPGGSIERLCDTMVQQVFELTGYDRVMIYKFHEDDHGEVFTEITKPGLEPYVGLHYPATDIPQAARFLFMKNKVRMICDCRANHVKVVQDDNLPFDLTLCGSTLRAPHGCHSQYMENMNSIASLVMSVVVNEGDEDGPDSSSGPYKRKRLWGLVVCHNTCPRFIPFPLRYACEFLVQVFSIHVNKELELENQMLEKNILRTQTLLCDLLLRDVPLGIVSQSPNVMDLVKCDGAILLHKRTKYRLGLTPTDFQIRDIVSWLDEYHQDSTGLSTDSLYDAGFPGALALGNALCGMAAVKITDEDWLFWFRSHTAAEIRWGGAKHELEAKDDGRKMHPRSSFRAFLEVVKTRSLPWKDYEMDGIHSLQLILRNAYKESEEKDLESREIHARLNELQIDGVKEIEAVTSEMVRLIETATVPIFSVGVDGLVNGWNTKISDLTGLSVVEAIGMHFLALVEDSSADTVSKMLGLALQGKEEHDVQFEIKTHGQRSESGPISLIVNACASKDVKENVVGVCFIAQDITTQKSMMDKFTRIEGDYRSIIQNPNPLIPPIFGTDEFGWCSEWNAAMIKLSGWGREAVIDKMLLGEVFGLNKACCRLKNQEAYVNLGVVLNNTVTGQESGKVSFGFFSRSGKYVACLLCVSKKVDSEGSVTGLFCFLQLASPELQQALHIQRISEQTASKRLRVLAYIRREIRSPLSGIIFSRKLMEGTDLNDEQKNIVRTSLHCQSQMNKILEDTDLDHIIEGYLDLEMVEFKLHEVLIASISQVISKSNGKGIKIVDNLAPNLSNETLYGDSLRLQQVLAAFLLIAVDSTPSGGQLGVAATLAKDSIGEFVQLGRLECRITHGGGVPQEILNQMFGDEPTDASEDGISLFISRKLVKLMKGDIQYLREAGRSTFIISVEIAISNKPNL

SEQ ID NO: 3086 - protein, 450 aa, Anabaena variabilis ATCC 29413
MGSAWAQVPATAPPADTGDTAFMLISSALVLLMTPGLAFFYGGFVRSRNILNTLMMSFVLMAIVGVTWVLWGYSLSFAPGLPFIGGLQWFGLNGVGLETTGYLQGSEPTNVVSYAGTIPHQAYMIYQAMFAIITPALISGAIAERMSFRAYCLFVLLWSTFVYTPLAHMVWAKGGLLGLYGGLGALDFAGGTVVHISSGVSALVAAIVLGPRKTHPDRLSPPHNVTFILLGAGLLWFGWFGFNAGSALSVASSTSGSFITNPATTAFVATNTSAAAGALMWLILEGVLRGKPTAVGAATGAVAGLVGITPAAGFVTPLASILIGCITAFVCFYAVSFKHKLNVDDALDTYPVHGVGGTVGAILTALFATAEVNSGGKNGVLKGNFGELGVELAAIVIAYVIAAVGTWIILKIIDASVGLRVKEEAEYQGLDINEHGEEAYNSEFSDRIVP

SEQ ID NO: 3087 - protein, 148 aa, Arachis hypogaea
MASKRITKELKDLQKDPPVSCSAGPVGDDMFHWQATIMGPADSPYAGGVFLVNIHFPPDYPFKPPKVSFKTKVFHPNIYNNGSICLDILKEQWSPALTVSKVLLSICSLLTDPNPDDPLMPEIAHMYKSDRAKYENTARSWTQKYAMN

SEQ ID NO: 3088 - protein, 507 aa, Pseudomonas sp. KIE171
MSGDYMVQATTNLVGAAYWRGRADEIQFEGRCLIDGKMVEAQSGYTFDCVSPVDGRVLTKVSAGGEADVNRAVAAARSAFRDRRWSGQSPVSRKRTLQAFAALIRLHRDELALLETLDMGKPISASRSVDVEAVASCFEWYAEAIDKLYEQIAPTAETDLALITREPLGVVGAIVPWNFPMLTAAWKTAPALACGNSVVLKPAEQSPLTAIRLAQLALEAGVPEGVFNVVPGLGGSAGRALACHMDVDGIFFTGSTATGRLLTEYAAKSNLKRVCLELGGKSPNIILASYGDIEKAAVASAESMFNNQGEVCIAPSRLIVERSIHKRVVEIVAEVAKRRQPGDPLDPTTRMGALVDANHADRVMGFIGRAKADGATLVAGGTRALTETGGSYVVPTVFDNVSNCMEIARDEVFGPVLSVIPVANVGEAVAVANDSPYGLGAGVWTDRLSDAHKISRELRAGVVYVNCYNDCDITTPFGGVKQSGNGRDKSLYALDEYTELKTTWIKL

SEQ ID NO: 3089 - protein, 217 aa, Glycine max
MGSLALETEDVISDIYLSLGLKESDKGVGGPRVLSLLSSLLERSVQRNETSLEAKHIKDVVTVFHGLRAPTLSVRKYIDRIFKYSGCSPSCFVVAHIYVDRFIQHTEIKLTSLNVHRLLITSIMLAAKFIDDAFYNNAYYAKVGGVSTSELNRLEMSFLFGIDFRLQFSVDTFGRYCRQLEKEAAEVVQIERPMQACRIKESWSNKDDPTCASTIAR

SEQ ID NO: 3090 - protein, 371 aa, Malus x domestica
MGKGGMSDGDHADRCCGEAINGDVQQENMAAWLLGVKNLKIQPYKLPNLGPHDVRVRLKAVGICGSDVHHFKNMRCVDFIVKEPMVIGHECAGIIEEVGSEVEDLVPGDRVALEPGISCKRCNLCKQGRYNLCRKMKFFGSPPNNGCLANQVVHPGDLCFKLPDNVSLEEGAMCEPLSVGIHACRRANVCQETNVLVVGAGPIGLVTLLAARAFGAPRIVIADVNHERLLIAKSLGADAVVKVSTNIEDVAEEVAKIQKVLENGVDVTFDCAGFNKTITTALSATRPGGKVCLVGMGQREMTLPLATREIDVIGIFRYQNTWPLCLEFLRSGKIDVKPLITHRFGFSQKEVEEAFETSARGGNAIKVMFNL

SEQ ID NO: 3091 - protein, 265 aa, Oryza sativa
MPSSTAVVPAAAEASSRIILVHGTGHGGWCWYRVATLLRAAGHRVHAPDLAASGADARRLRDDDAPTFDDYSRPLLDAVRALPDGERAVLVGHSFGGMSVALAADTLPDKVAAAVFVAALMPDCASPRPDVIEKLPLTDWVDCATDEEHAPPSVLFGPEFMRRKLYQLSPEEDITLSRSLVRVSSYYVDDMRRQPPFGEDRYGAVRKVYVVCGKDQAIVEAYQRRMIAGCPVEEVREIAGADHMAMFSAPVELAGHLADVANTYT

SEQ ID NO: 3092 - protein, 164 aa, Oryza sativa (japonica cultivar-group)
MAAEKKEVADAAAGSGSDTILLISSDGEHFNVPSAAASLSQLVSNMIEDDCTTNGVPLPNVASKVLAKVIEYCIKHAAAGEEEEKDLKSFDAEFIDVDKNMLYDLLLASNFMNIKSLLDLCCQHTANLIKGKSPEQIRKEFGIKNDFTPEEEEEIRKENTWAFE

SEQ ID NO: 3093 - protein, 368 aa, Malus x domestica
MGKGGQSCNGVVRDAKPVEQENMAVWLVDVNTIKILPFKLPAIGPNDVRIRIKAVGICGSDIHYLKTMKCGDFQVKDPMVIGHECAGIVDKVGSKVKHLVPGDRVAVEPGISCAHCQQCKGGRYNLCFDMKFFATPPVHGSLANQIVHPADLCFKLPENVSLEEGAMCEPLSVGVHPFRRANVGPETTVLIVGAGPIGLVSVLAARAFGAPRIVIVDMDDRRLAMAKSLGPDGTVKVSTKMEDLDDELAKIKEAMGSEVDVTFDCVGFNKTMSTGLNATRPGGKVCLVGMGHGVTTVPLTPAAAREVDVVGVFAYKNTWPLCLEFLRSGKIDVKPLITHRFGFTEKEVEEAFATSARGGNAIKVMFTL

SEQ ID NO: 3094 - protein, 368 aa, Malus x domestica
MGKGGQSCNGMVRDVKPVEKENMAAWLVDVNTIKILPFKLPTIGPNDVQIRIKAVGICGSDVHYLKTMKCADFEVKEPMVIGHQCAGIVDKVGSEVKHLVPGDRVAVEPGISCAHCQQCKGGRYNLCPDMKFFATPPVHGALANQIVDPADLCFKLPENVSLEEGAMCEPLSVGVHACRRANVGPETTVLIVGAGPIGLVSVLAARAFGAPRIVIVDMDSKRLAVAKSLGADGTVKVSRKMEDLDDEVAKIKETMGAEVDVTFDCVGFNKTMSTGLNATRPGGKVCLVGMGHSMMTVPLTAAAAREVDVVGVFRCKNTWPLCLEFLRSGKIDVKPLITHRFGFTEKEVEEAFATSARGGDAIKVMFNL

SEQ ID NO: 3095 - protein, 241 aa, Lycopersicon esculentum
MGRGRVELKRIENKINRQVTFAKRRNGLLKKAYELSVLCDAEVALIIFSNRGKLYEFCSSSSMLKTLERYQKCNYGAPEPNISTREALEISSQQEYLKLKGRYEALQRSQRNLLGEDLGPLNSKELESLERQLDMSLKQIRSTRTQLMLDQLTDYQRKEHALNEANRTLKQRLMEGSQLNLQWQPNAQDVGYGRQTTQTQGDGFFHPLDCEPTLQIGYQNDPITVGGAGPSVNNYMAGWLP

SEQ ID NO: 3096 - protein, 501 aa, Zea mays
MKSSRFLFLCAMFCLMARLGAANVVLMGNNLTLSFDDIEASFSPGVKGSGVSGVVYASEPLNACSPLTIKTVNGPPSPFALIIRGGCTFDEKVKNAQDAGFKAAIVYDNKNSGVLVSMAGSSSGIHIYAVFVSKASGEVLKKFSGNMDVEVWILPTFENSAWSIMAISFVSLLAMCAVLGTCFFVRRHRIRREHPRIAEDREFHGMSSQLVKAIPSLIFTKVQEDNCTSSMCAICLADYNVGEKLRVLPCRHKFHAACVDLWLTSWRTFCPICKRDARSGASEVVATEATPLLSSAARLPSFRSSVAASPPRPISRHPSSHSVSRAYSVSSTPNSPNPFISSHISSPGIRASRSITDLGNISSLHPRISHLSSTHSLVGSHLSPPISIRYWSSHVAHSGYGSPSPHVSSSYISNSGYGSSSYCYLGLGGSSHSQHGTYLRRCGESGPSLCTMVPQQLQWETNVAAGASSAKSLRQSSYLRHCGDSDASLSDMTSAQSLPRC

SEQ ID NO: 3097 - protein, 496 aa, Triticum monococcum
MARKMLKDGEAPLVADDGGTYDYDLFVIGAGSGGVRGSRTAAGFGAKVAICELPFHPISSEWLGGHGGTCVIRGCVPKKILVYGASFRGEFDDAKQFGWEINGDINYNWKKLLENKTQEIVRLNGVYKRILGGSGVTMIEGAGSIVDAHTVEVTQPDGSKQRHTTKHILIATGSRATLVDIPGKELAITSDEALSLEELPKRAVILGGGYIAVEFASIWKGLGAEVDLFYRKELPLRGFDDEMRTVVASNLEGRGIRLHPGTNLTELSKTADGIKVVTDKGDELIADVVLFATGRAPNSNRLNLEAVGVEVDQIGAIKVDEYSRTSVPSIWAVGDVTNRINLTPVALMEATCFAKTVFGGQTVKPDYKDVPCAVFCIPPLSVVGLSEQEALAEAKNDLLVYTSSFNPMKNSISKRVEKSTMKLVVDAETDKVLGAAMCGPDAAEIMQGIAVALKAGATKATFDSTVGIHPSAAEEFVTMRTLTRRVSPPSKPKTNL

SEQ ID NO: 3098 - protein, 602 aa, Oryza sativa
MAMSRAAAAAAGTPVARRRLMGAVAARSMASWFGHVEPAAKDPILGVTEAFLADPSPDKVNVGVGAYRDDSGKPVVLECVREAERRIAGSMNMEYLPMGGSIKMIEESLKLAYGENCEFIKDKRIAAVQALSGTGACRLFADFQKRFLPDSQIYIPTPTWANHHNIWRDAQVPQKTFTYYHPESRGLDFAGLMDDIKNAPDGSFFLLHACAHNPTGVDPSEEQWREISHQFKVKKHFPFFDMAYQGFASGDPERDAKAIRIFLEDGHQIGCAQSYAKNMGLYGQRAGCLSILCDDEMQAVAVKSQLQQIARPLYSNPPVHGALIVSTILGDPELKSLWLKEVKGMADRIIGMRTALKENLEKLGSPMSWEHITNQIGMFCYSGMTPEQVDRLTKEFHIYMTRNGRISMAGVTTGNVAYLANAIHEVTKTNLLIQRHARRTLSLSGGTAATVGWCVRGGRVSAAWQHLQRHNSHANVDASRVNGWATHRNGGRVRLLLLQRRFHQTPGANGGAVADGGLVLSFSPACCMSRKREKGKGGKPTGGEMEEIESRKGAVQAWNIQQRKFQHKSHPPQLNNTPTIPPAIRAPLGRTLDTMASSRFNI

SEQ ID NO: 3099 - protein, 168 aa, Triticum monococcum
MAAASSATSVHDFTVKDSSGKDVDLSVYKGKVLLIVNVASQCGLTNSNYTELSQLYPKYKDQGFEILAFPCNQFGGQEPGTNDEIVQFACTRFKAEYPIFDKVDVNGNNVSPLYKFLKSSKGGLFGDSIKWNFSKFLVDKEGHVVDRYAPTTSPLSIEKDIKKLLGSS

SEQ ID NO: 3100 - protein, 261 aa, Ferroplasma acidarmanus
MKAAIIGAGTVGRSIGEGIKNDFEVSFSSGSFEKLEKWSKGEFKIFDNNVENAKYGDVILLAIKPGISDSVMEEIRSAAKGKLVISFMAGITLSHMQEMLKDSMVARGMPSIPMLVQKSVTAYSYKNLDKEHKDVLEKVLKGFGSAVHIDESYMDAVTGLSGSGPAFVAIMADSMINAGILAGIPKIQARELVIDTFINTMSLMREKGFSASDLRDEVMTPGGTTVAGIYEMEKANARTAIANAVLGSYRRAKEISKNSRD

SEQ ID NO: 3101 - protein, 317 aa, Streptomyces sp. PGA64
MIGTAFVFPGQGSQYVGMDSHLLAQRPDLADAYYRTADDLLGIPLSRLARQGPARDLDDPAVSQPAVLLTSLVTLDLLRGLGIEPGIVAGHSLGEYTALVAADVLEWTDALALVRLRGELVATVDDRVPGATAAVLGLDRARVARLCAEVAAGGGTVEASGDNGPGQTVISGEVAAVARAAAAALTAGASRVVPLKAGGSFHSRLLRGIEAEFTEALIATPFRDPVVPLVSSTTGARITTAAEAVVALRSQLTSPVRWTGAVRALGAAGADRFVEVGPGRALGGLIRRIAPDARVHATDNARQLALTQHAFTTTAAV

SEQ ID NO: 3102 - protein, 428 aa, Pseudomonas syringae pv. syringae B728a
MAKIVDIKGREVLDSRGNPTVEADVLLDNGIIGSACAPSGASTGSREALELRDGDKSRYMGKGVLKAVANINGPIRDLLLGKDPVDQKALDHAMIELDGTENKASLGANAILAVSLAAAKAAAQDQDLPLYAHIANLNGTPGVYSMPVPMMNIINGGEHADNNIDIQEFMIQPVGAKSFAEGLRWGTEIFHHLKAVLKARGLNTAVGDEGGFAPNLASNKEALDAIAEAVANAGYTLGTDVTLALDCAASEFYKNGKYKLSEEGEYSSAEFAEYLAELTRKHPIISIEDGLDESDWDGWKILTDKIGEKTQLVGDDLFVTNTKILKEGIDKKIANSILIKFNQIGTLTETLEAIQMAKAAGYTAIISHRSGETEDSTIADLAVGTSAGQIKTGSLCRSDRVSKYNQLLRIEEQLGSKAVYRGRAEFRG

SEQ ID NO: 3103 - protein, 503 aa, Oryza sativa
MALAILARRRAAEALLRRPLGAAGVSALRASYAAVAGEESDVVVVGGGPGGYVAAIKAAQLGLKTTCIEKRGTLGGTCLNVGCIPSKALLHSSHMYHEAKSSFAHHGVKFSNLEVDLPAMMAQKDKAVAGLTKGIEGLFKKNKVTYVKGFGKLASPSEVSVDLSDGGSTVVKGKNIIIATGSDVKSLPGVTIDEKKIVSSTGALCLSEIPKKLVVIGAGYIGLEMGSVWNRLGSEVTVVEFAPDIVPSMDGEVRKQFQRMLEKQKMKFMLKTKVVGVDTSGDGVKLTLEPAAGGEQSVIEADIVLVSAGRVPYTAGIGLESVGVETDKAGRILVDKRFMTNVNGVYAIGDAIPGPMLAHKAEEDGVACVEFIAGKEGHVDYDTVPGVVYTHPEVASVGKTEEQVKALGIPYRVGKFPLLANSRAKAIDDAEGLVKVVAEKETDKILGVHIMAPGAGEIIHEAVLALQYGASSEDIARTCHAHPTVSEALKEACLQTFTKAIHI

SEQ ID NO: 3104 - protein, 465 aa, Photorhabdus luminescens subsp. laumondii TTO1
MQHIHFDAIVIGSGPGGEGAAMGLVKQGKSVAVIERYNNVGGGCTHWGTIPSKALRHAVSRIIEFNQNPLYSDNSRVLRSSFAEILRRAEMVINQQTRMRQGFYERNGCRMFSGEATFIDDHRVSVRYADDNHDILSADKIIIATGSRPYCPPDVDFTHSRIYNSDSILKLDHEPRHVIIYGAGVIGCEYASIFRGLGVKVDLINTRNHLLAFLDQEMSDALSYHFWNSGIVIRHNEEYSKIEGVDDGVIVHLKSGKKVKADCLLYANGRTGNTDTLGLKNVGLEADSRGLLKVNKIYQTSNENIYAVGDVIGYPSLASAAYDQGRIAAQAMTKGNAEVHLIEDIPTGIYTIPEISSVGKTEQQLTAMKVPYEVGRAQFKHLARAQIAGMNVGSLKILFHRETKEILGIHCFGERAAEIIHIGQAIMEQKGESNTIEYFVNTTFNYPTMAEAYRVAALNGLNRLF

SEQ ID NO: 3105 - protein, 294 aa, Glycine max
MVEQSVLVLEKQGPNPVLSEGIHDWVFECHGLLHNAVLIIASFLFVLYLALQAKKSFLRLSHGRSYIIISYYASLWLVSILNLLWCFSQAWECSPGKEFAWNLLSLFTTSGMLFLEVSLLAFLLQGNSTSGLEALTRTFGISGIIVGFDILLKAIYLFAFGIPIFINSGYPTPHVKWNLWVIHKLLLTLVYGFILFMYHSRWRERLPARPAYYKYVTIMLILNAIALFACGITGNGAAFGFWLYHFTVVCYHAAYLPLLYITFLADFFQEEDLHLENVYYSEMKDAGFFEADWN

SEQ ID NO: 3106 - protein, 433 aa, Leuconostoc mesenteroides subsp. mesenteroides ATCC 8293
MAKPIFQRPKGTADLLPQKTVQWQHVEAVARVLFGDYNFKEIRTPLFENFEVFSRSAGDTSDVVTKEMYDFHDKGDRHIALRPEGTAGVVRAYVENKLYGPEFDKPYKAFYMGPMFRYERPQAGRFRQFHQIGAEVFGSDSPALDAEVIAMVIDFFQTLGLKNLKVAINTLGDKESRDAYRQALIDYLKPHFDELSADSQARLEKNPLRVLDSKDPRDQVFVADAPSILDFLSEKSTKHWEKLQDILTALNLDFDIDTTMVRGLDYYNDTIFEIMTTDESLKGAATIAGGGRYSGLVEEFGGPETPGVGFGIGVERLLDLLQAQNVAPTEEQNLDFYVVNIGDTTDVIATKIVQAVRSFGYVAERDYLSKSAKAQFKAADRHHAKYVITIGEQELEEQIVNIKNMTNGEQKSVQLSELYTNLPLIMDAEGNKE

SEQ ID NO: 3107 - protein, 430 aa, Xylella fastidiosa Temecula1
MTVIAKIYAREILDSRGNPTLEAEVTLENAVCGRAAVPSGASTGTKEAVELRDGDKTRYLGKGVRAAVDNVNGVIAAALVGFDGADQTGLDHRLINLDGTENKGRLGANALLGVSLATAHAVAAARKQPLWMYLSTLGESKLSLPVPMMNIINGGAHADNNVDFQEFMVLPVGFASFSEALRAGTEIFHALKSVLKGQGLSTAVGDEGGFAPDFRSNVEALDAILEAIGRAGYIAGEDVLLGLDVASSEFRNNGKYNLVGENKRLTSEQFVDFLDDLVAQYPIISIEDGLAEDDWVGWKQLTERIGHKVQLVGDDLFVTNPKVFQEGITSGIANAILIKLNQIGTLTETLESIAMAHRAQYAAIVSHRSGETEDTSIADIAVATTATQIKTGSLCRSDRVAKYNQLLRIEQALGVGARYAGRDAFVSLKS

SEQ ID NO: 3108 - protein, 398 aa, Azotobacter vinelandii
MNDALNLLQPYPFEKLRALLAGVQPPAGKKPIALSIGEPKHRSPSFVVEALAANLEQLAVYPTTLGLPALREAIARWCERRFRVPADRLDPARHVLPVNGTREALFAFAQTVVKRTGNGLVVSPNPFYQIYEGAALLAGATPHYLPCLPENGFNPDFDAVPADVWRRCQLLFLCSPGNPTGALVPLATLKKLIALADEHDFVIAADECYSELYFDEQNPPPGLLTACAELGRDDFRRCVVFHSLSKRSNLPGLRSGFVAGDAEILKSFLLYRTYHGCAMPVPTQLASIAAWSDEVHVRANRVLYREKFDAVLGILQPVLDVERPDGSFYLWPRTPVDDQVFTRDLFAREHVTVVPGAYLSRSVDGLNPGADRVRMALVAPLNECVEAAGRIRDFVRAG

SEQ ID NO: 3109 - protein, 431 aa, Vibrio vulnificus
MTKSAELYQKAQQTIPGGVNSPVRAFNGVGGSPIFVERADGAFIFDADGKAYIDYVGSWGPMILGHNHAVIREAVIEAAQRGLSFGAPTEMEIKMAELVSELVPSMEQLRMVSSGTEATMSAIRLARGFTGRDKILKFEGCYHGHADSLLVKAGSGALTLGQPSSPGVPADFAKHTLTATFNDLDSVRELFAANKGEIACIIVEPVAGNMNCIPPVEGFHEGLREICDQEGALLIFDEVMTGFRVALGGAQAHYNIKPDLTTLGKVIGGGMPVGAFGGRKEVMQYIAPTGPVYQAGTLSGNPVAMAAGYACLTLLREEGNEKRLASKTKHLADGFKSLAAQHGIPLVVNQVGGMFGFFFTEQEQITCYEDVTKCDIERFKRFFHLMIDHGVYLAPSAFEASFTSLAHGSKEIEATLEAADRCFAILAAESK

SEQ ID NO: 3110 - protein, 484 aa, Agrobacterium tumefaciens str. C58
MPNRSCPAMFGGRGGVSAVAFMGVRSVMNEVSKPMSNLAAIDAAHHLHPFSDMGKLNAAGTRIIERAEGVFIYDSTGKKYLDAFAGLWCVNIGYGRREIADVVQRQMNELPYYNAFFGTTTPPATLLAQKIASRAGPKMNHVFFTNSGSEATDTWFRMARVYWKALGHPTKTRVIARRNGYHGSTVAGASLGGMKWMHEQGNLPIEGIAHIGQPYWYAEGGDLSPAEFGLKVARELDAKIDELGEENVAAFVAEPIQGAGGVIVPPETYWPEIARICKARNILLVSDEVICGFGRLGSWFGYQHFGVEPDLAPVAKGLSSGYLPIGGVIVSDRVAEVMLSEVGDFNHGFTYSGHPVCAAAALENLRIIEDEGLVERVRDDIGPYFSEGWKSLADHELVGEAVNVGLMGGLQLTADKATRRRFAKPDDIGTAVRNHCLANGLVMRATGDRMLASPALTVSRSEVDEIIETLRQGLNHLRDTREHF

SEQ ID NO: 3111 - protein, 483 aa, Zea mays
  unsure (1)..(483): unsure at all Xaa locations
AALFDDSPTWDFADIEASFSPGVKGSGVNGIVYASEPLNACSPLTIKAVKGPPSPFALIVRGGCTFDEKVKNAQDAGFKAAIVYDNENSGVLVSKXVAVAGSSSGIHIYAVFVSKASGEVLKKSSGHTDVEVWILPTFDNSAWSIMAISFISLLAMSAVLATCFFVRRHRIRRDHPRIPEAREFHGMSSQLVKAMPSLIFTKVQEDNCTSSMCAICLEDYSVGEKLRVLPCRHKFHAACVDLWLTSWRTFCPVCKRDATSGVSELPATEATPLLSSAVRLPSQPSSFRSSVAASPPRPISRHPSSHSVSRAYSVSSTPHSPNPFRSHTNLPGVIHASRSTTDLANMSSPHPRISHLSSSTHSLVGSHLSPPISIRYPLPHSRHESPSPHVSSPYISNSGYGSSSYYYLGGSSQHGSYLRRCGESGPSLSTMVPRSSQQQFQSEANVAAGASSAQSSRQSYLRRCGDSDASLSDMASAQSLPGC

SEQ ID NO: 3112 - protein, 441 aa, Chlamydia muridarum
MTGKRTKEEQINRQRSHFYRDNVGVIVLCGGEGKRLSPLTCWRCKPTVSFGGRYKLIDVPISHAIASGFSKIFVIGQYLTYTLQQHLFKTYFYHGVMQDQIHLLVPERRDGSQVWYQGTADAIRQNLLYLSDSPVEYFLILSGDQLYNMDFRSIVDYAIDVQADMVIAAQPVSDKDVSRFGVLRVDDEWKLVDFYEKPQSEEILKHFRLSNAAMKKFGLDPQQGNFLGSMGIYLFRKECLFQLLLDETGDDFGKELIHRQMHRGKTVAYLYNGYWTDIGTIASYYEANMALTQRPSQNVRGFNCYDDGGMIYSKNNHLPGAIISDSKISSSLLCEGAMIESGQVSNSVIGVRGVIGQGSIFDHSIMMGSDSYVSGSVPFGVGKNCEIHKTIIDENCCIGNGVRLQNLQGHKDYDSPDGKLVVRDGIIIVPKGTKIPDNYVF

SEQ ID NO: 3113 - protein, 86 aa, Triticum aestivum
MPLSEQEDIFEWQFAILGPRDSEFEGGIYHGRIQLPSDYPFKPPSFMLLTPSGRFEIQKKICLSISNYHPEHWQPSWSVRTALVAL

SEQ ID NO: 3114 - protein, 893 aa, Moorella thermoacetica
  unsure (1)..(893): unsure at all Xaa locations
MVNLTIDGQRVTAPEGMTILEVARENGIHIPTLCHHPKLRPLGYCRLCLVDIEGAAKPMTACNTPVAEGMVIRTSTPVIEEMRKGIIEMLLSLHPEDCLTCEKAGNCQLQDCAYTYGVKHGELPVKREELPVLKENPFIVRDYNKCIVCGRCVRACQEVQVQRVVDLVGKGSAARVGATKAGAEVSLEEGGCVFCGNCVQVCPVGALTEKAGLGQGREWEFKKVRSICSYCGVGCNLTLYVKDGKVVKVRGYENPEVNNGWLCVKGRFGFDYIHNPDRITRPLIREGDREKGYFREASWEEALALVSQKLTQIKGSYGSEALGFLCSAKCTNEENYLLQKLARGVLGTNNVDHCARLXHSSTVAGLATTFGSGAMTNSIADIASADCIFVIGSNTTENHPVIALKVKEAVRRGARLIVADPRRIELVNFSYLWLRQKPGTDLALLNGLLHVIIKEELYDKEFIAQRTEGFEALKLAVEEYTPAKVSEVTGVPAGDIIEAARTYARGPSSTILYAMGITQHITGTANVMALANLAMACGQVGKEGNGVNPLRGQSNVQGACDMGGLPNVLPGYQPVTDPGVRHKFSETWGVPDLPGEPGLTLMEMMAAAQEGKLKGMYILGENPVLTDPDVSHVKEALKNLEFLVVQDIFLTETARMADVVLPGASFAEKEGTFTSTERRVQLLHKAIEPPGEARPDWLILNDLLLLMGYPRKYSSPGEIMQEIAGLTPSYAGITYERLEDKGLQWPVLSLEHPGTPVLHREKFSRGYGQFQVVHYRPPAEEPDEEYPFLFTTGRNLYHYHTVISRKSRGLEEMCPAPVVEINDNDAARLGIREGEMIEIVSRRGKVRVKALVTDRIPRGQVFMNFHFHEAAANLLTIAALDPVAKIPIIKPVL

SEQ ID NO: 3115 - protein, 294 aa, Lactobacillus gasseri
MKGIILAGGSGTRLYPLTLVTSKQLLPVYDKPMIYYPLSTLMLAGIKDILVISTPADTPRFKELLGDGSQFGINLSYKVQPTPDGLAQAFTLGEDFINGEPCAMVLGDNIFYGNGFTDLLKNAAEDAQKGKATVFGYYVNDPERFGVVDFDENGKAVSIEEKPEHPKSNYAVTGLYFYPAGVSEKAAQVKPSARGEVEITSLNDMYLQDDNLRVQLLGRGYAWLDTGTMQSLVDASNYVKMIEERQGVSVSAPEEIAYVHGWIDKDQLLEAAKHYGKSPYGKHLKSVAEGKVRY

SEQ ID NO: 3116 - protein, 281 aa, Silene latifolia subsp. alba
MSKSRMEFGGAKSNNELRLKGKVAIVTGGARGIGAAIAKLFASNGAHVVVADVLDELGVGLANSIGGCFVHCNVSKEADLENTVKLAMAWKGRLDIIVNNAGTSGADGSIVNVNMDRVREIVGVNLFGVVHGIKHAARAMIEGKRGGSIICTSSSAAIMGGLASHAYTMSKGAILSVMKSAACELGEHGIRVNCISPHAVPTEMLISGYRRFVGDIGDEEIAKMCAAKASLLHGKGGSVEDIAAGALFLASDDAGFITGHNLVVDGGYTAANITMAHMYRD

SEQ ID NO: 3117 - protein, 281 aa, Silene latifolia subsp. alba
MSKSRMEFGGAKSNNEQRLKGKVAIVTGAARGIGAAIAKLFASNGAHVVVADVLDELGVGLANSIGGCFVHCNVSKEADLENTVKLAMAWKGRLDIIVNNAGTSGADGSIVNVNMDRVREIVGVNLFGVVHGIKHAARAMIEGKRGGSIICTSSSAAIMGGLASHAYTMSKGAILSVMKSAACELGEHGIRVNCISPHAVPTEMLISGYRRFVGDIGDEEIAKMCAAKASLLHGKGGSVEDIAAGALFLASDDAGFITGHNLVVDGGYTAANITMAHMYRD

SEQ ID NO: 3118 - protein, 65 aa, Zea mays
  unsure (1)..(65): unsure at all Xaa locations
MAVTITWVKARQIFXGRGNPTVKVDVGPNDGSYARGAVPSGASTGIYEALELRDGGSDYLGKGVL

SEQ ID NO: 3119 - protein, 492 aa, Secale cereale
MDPCKFRPSSSFDTKTTTTNPGQPVWNDNEALTVGPRGPILLEDYHLLEKIAHFARDIPEPFVHAGRASAKGFFECTHDVTGLTCADFLPSPGAGTPVIVRFSTVIHERGSPETIRDPRGFAVKFYTREGNWDLLGNNFPVFFIRDGIKFPDVIHAFKPNPKSHVQEYWRVFDFLPHHPESLHTFFFLFDDVGIPTDYRHMDGFGVNTYTFVTRAGKSHYIKFHWRPTCGVSCLMDDEATLVGGKNHSHATQDLYDSIDAGNFPEWKLFVQVIDPEQQDRFDFDPLDDTKTWPEDLVPLQPVGRLVLDRNVDNFFNENEQLAFGPGLVVPGIYYSDDKMLQCRVFAYADTQRYRLGPNYLMLPVNAPKCGFKKNHYDGAMNFMHRDEEVDYYPSRHAPLRHAEPASFPVPTRPVVGKREKTRIKKENDFVQPGERYRSWAPDRQDRFVALRRRLAHPKVSHELRVIWIDFLSKCDKSCGMKVANRLNVKPSM

SEQ ID NO: 3120 - protein, 243 aa, Zea mays
MASLFKDPSKLSAYRDRRFKGTQEEYEATLHASTTLYIGNMSFYTTEEQAYELFSRAGEIKKIIMGLDKNSKTPCGFCFVLYYSREDAEDAVKYISGTMLDDRPIRVDFDWGFEEGRQWGRGRSGGQVRDEYRTDYDPGRGGYGKMVQRELEAQRELVDYGGSFQPNAPPPYERGERKRGYGDSHRNARGDYQRKRYRSSDDRSAPEESKRAPDSDPADKNPRFREKGDSDEEDDDYDKRRRR

SEQ ID NO: 3121 - protein, 458 aa, Zea mays
  unsure (1)..(458): unsure at all Xaa locations
MAGLLHLQSTLLPSASALRRRAGAPVPCSSRRRCRVEAKIREIFMPALSSTMTEGKIVSWTAAEGDRLSKGDPVVVVESDKADMDVETFHDGFLAAVLVPAGXSAPVGSAIALLAESEXEIPVAQSQAASFSSSSPSPPPPQETAQEASPPPPPPPPSAPVAVSAPALPSPATQGGGRVVASPYAKKLAKDLGVDLFSVTGSGPGGRIVAKDVEAALAAPKKAAPVTAARPDVPLGSTVPFTSMQGAVSKNMVESLAVPTXFRVGYTITTDALDQLYKKIKSKGVTMTTLLAKATAMALVQHPVVNCSCRDGKSFTYNKSINIAVAVAIDGGLITPVLQDADKLDIYSLSRKWKELVDKARAKQLQPXEYNSGTFTLSNLGMFGVDRFDAILPPGTGAIMAVGASEPTVVGTKDGRIGIKSQMQVNVTADHRVIYGADLAAFLQTLAKIIEDPKDLTF

SEQ ID NO: 3122 - protein, 444 aa, Leuconostoc mesenteroides subsp. mesenteroides ATCC 8293
MSKNKEILEEEKIHLANATRVKYFDIVIDHGKGAIITDADGHEYIDLLASASATNTGHSHPKVVEAITSQAQKLIQYTPAYFANTVTAKLADRLVNVAPGNFQKQVAFGNSGSDANDAIIKFARGYTGRQYVVSFTGAYHGSTYGSLSISGVSLNMTRKIGPLLPNTVKVPFPDQTQRIAGESDNDFSERLFKQFKLPFETYLPADEVALVIIEPIQGDGGIIKAPQHYVELVYEFTREHGIVFAVDEVNQGLGRTGKMWSIDHFGIAPDLMSVGKSIASGLPLSAVIGRKEIMDSLQAPANVYTTAGNPVTAAAALATLDVIEEENLVARSRQLGELAKAFFESAAKRYAFIGDVRLYGLNGGIDIINDHGEPDNEATNKLIYRIFELGAIMISLRGNTLRFQPPLVIQEEELQRAFEILEKAFSDLASGKIALPKTDNHIGW

SEQ ID NO: 3123 - protein, 411 aa, Pseudomonas syringae pv. syringae B728a
MAIEIKAPSFPESVADGTISKWYKKEGDAVKRDEMLVDIETDKVVLEVLAEADGVMGTITKEEGAIVLSNEVLGTLNDGATASAAPAPAAAPAAAPASAPAAAPAATAGEEDPIAAPAARQLAEENGINLASVKGTGKDGRITKEDIVAAVEAKKSAPAAAPAAKPAAAAAPVVAAGDRTEKRVPMTRVRATVAKRLVEAQSNMAMLTTFNEVDMTEVMALRSKYKDLFEKSHNGVRLGFMSFFVKAATEALKRFPAVNASIDGSDIVYHGYADVGVAVSSDRGLVVPVLRNAEHMSLAEIEGGIATFGKKARDGKLSIDEMTGGTFTITNGGTFGSMMSTPIVNPPQAAILGMHNILQRPMAVNGQVVIRPMMYLALSYDHRLIDGKEAVTFLVTIKNLLEDPARLLLDI

SEQ ID NO: 3124 - protein, 218 aa, Ipomoea batatas
MGRGKVEIRRIEKSTNRRVTFWKRRNGLLKKAMEMGILCDAEVGLMIFSSTGKLHEFATTSIRSVIERYNKTQGDSLQSPLDPTLELKFWQIEVAILRQQLHNMQEDHRKVMGEVYGLSVKDLQNLENQLEMSLSGIRMKKEQILIEQIQELTHKQGSFVHQENFELFNKFQAYGTSDPNAVNGDTISPYDFTISEESQGHIHFQLPQNFSDLARALY

SEQ ID NO: 3125 - protein, 463 aa, Brucella suis 1330
MEFTLMPMLITNPHLPDNPIVFANPAFLKLTGYEADEVMGRNCRFLQGHGTDPAHVRAIKSAIAAEKPIDIDIINYKKSGEAFWNRLHISPVHNANGRLQHFVSSQLDVTLELSRLVELEKERKTLSIETARSKDQLDYIVEVANIGFWTREFYSGKMTCSAECRRIYGFTPDEPVHFDTILDLVVLEDRMTVVQKAHQAVTGEPYSIEYRIVTRLGETRWLETRAKALTGENPLVLGIVQDVTERKKAEANKALVSREIAHRFKNSMAMVQSIANQTLRNTYDPEQANRLFSERLRALSQAHDMLLKENWAGATIQQICATALAPFNSTFANRIHMSGPHLLVSDRVTVALSLAFYELATNAVKYGALSNEKGVINITWAIMEDKGEKKFHMRWAESRGPEVMQPARRGFGQRLLHSVLAEELKAKCDVEFAASGLLIDVLAPITPEVFPGMGHNVPEQRIA

SEQ ID NO: 3126 - protein, 243 aa, Schizosaccharomyces pombe
MSLAFTLLTSKDNTDEDEEHLELSSFNQEKLLEMISVFLSRLTRLNDSKQEATESDQIPLSPTSLKNPCLIFSAKNVPSISIQAYLTRILKYCPATNDVFLSVLIYLDRIVHHFHFTVFINSFNIHRFLIAGFTAASKFFSDVFYTNSRYAKVGGIPLHELNHLELSFFVFNDFNLFISLEDLQAYGDLLLSWYRQNGQNYNPTDVSCSIESPISHTPQQNQQDEQPRRPIMDRRLLSSHSIG

SEQ ID NO: 3127 - protein, 313 aa, Ceratopteris richardii
MAMPCSDIDLLDSDNDNVDDQHISLELRQVHEDTDDGSHDEPRELSLLNHESNLCKIVNSKGKGAEAGNSLLPSTGTSRGKIQIRRIENTTSRQVTFSKRRNGLLKKAHELSVLCDAEIALIIFSSTGKLFEYSSSRGIKKILERYKRCSGILQDVGGTVIRDVEYWKQEAERLKERLTYMEEIQRNMLGESLGSLQIKDLQNLEAKLDSGLYKIRGAKTQLMARQVQELQKKEQILLQQNEALRAKLAELSCLQAPVSGLTTATTSQDVQESSSGRGSRQRETSLSAAETTLQLASHNEQTFLLRAVPHMRL

SEQ ID NO: 3128 - protein, 395 aa, Burkholderia fungorum LB400
MESLKTGTDTLFLLLGAGMVLAMHAGFAFLELGTVRKKNQVNALVKILVDFSVSTIAYFFIGYAIAYGVQFFGSAESLAAHNGYALVRFFFLLTFAAAIPAIVSGGIAERSKFNPQLFATFVLVGFIYPFFEGIAWNGRFGIQNWLAEMFGAQFHDFAGSVVVHAFGGWVALPAVLLLGARHGRYHRDGGIAAHPPSNIPFLALGAWVLAVGWFGFNVMSAQTVDKISGLVAVNSLMAMVGGTLTAWLAGRNDPGFSYNGPLAGLVAVCAGSDIMHPLGALVTGGIAGVLFVYMFTCVQNRWRIDDVLGVWPLHGLCGAWGGLAAGIFGLRALGGMGGVSFGAQLVGTLGGIVVATLGGTLVYGAIRLTVGLRLDQEDEYNGADLSIHKISATPE

SEQ ID NO: 3129 - protein, 542 aa, Zea mays
NSGGKCDFDLAATFFCSVVYLVVGGDMQFALALDTNSGPHQIRSCEGDGIDRLEKLSIGGRKQEKALRNRCFGGRVAATQQCILTSDCAPETLHSQTQSSRKNYADNARVSAIILGGGTGSQLFPLTSTRATPAVPVGGCYRLIDIPMSNCFNSGINKIFVMSQFNSTSLNRHIHRTYLEGGINFADGSVQVLAATQMPEEPAGWFQGTADSIRKFIWVLEDYYSHKSIDNIVILSGDQLYRMNYMELVQKHVEDDADITISCAPVDESRASKNGLVKIDHTGRVLQFFEKPKGADLNSMRVETNFLSYAIDDAQKYPYLASMGIYVFKKDALLDLLKSKYTQLHDFGSEILPRAVLDHSVQACIFTGYWEDVGTIKSFFDANLALTEQPSKFDFYDPKTPFFTAPRCLPPTQLDKCKMKYAFISDGCLLRECNIEHSVIGVCSRVSSGCELKDSVMMGADIYETEEEASKLLLAGKVPIGIGRNTKIRNCIIDMNARIGKNVVITNSKGIQEADHPEEGYYIRSGIVVILKNATINECLVI

SEQ ID NO: 3130 - protein, 488 aa, Dechloromonas aromatica RCB
MGKPTGFMEFERLNESYDPVEQRLKHYKEFVHTLNDEDAKIQGARCMDCGIPFCNNGCPVNNIIPDWNDLVYRGNWKQALDVLHSTNNFPDFTGRICPAPCEAACTLGINAAPVGIKSIEHFIIDKGWESGWVVPQPPKAKTGKKVAVVGSGPAGLAAAQQLARVGHDVTVFEKSDRIGGLLGYGIPDFKLEKTVIDRRVAQMEAEGVTFKTKVVVGDKAVPAGINNDAIEFVSADQLKKDFDAVILAAGSEVPRDLPVPGRELKGIYAALEFLIPQNKEVQQGKANPINVKGKHVIVIGGGDTGSDCVGTSNRHGAASVTQFELMPMPPEEENKALTWPYWPYKLRTSSSHDEGCSRDFAVATKGFIDDGKGNVKALKAVRLDWKDGKMSEVAGSEFELPCDNAFLAMGFTNPVGGLLDAFGVEKDARQNAKATTDGEGCYKTNVDKVYAAGDVRRGQSLVVWAIREGRQAAREVDAFLMGSTTLPR

SEQ ID NO: 3131 - protein, 198 aa, Picea mariana
MSTCKFIKCVTVGDGAVGKTCMLISYTSNTFPTDYVPTVFDNFSANVVVDGNTVNLGLWDTAGQEDYNRLRPLSYRGADVFILAFSLISKASYENIMKKWLLELRHFAPGVPIVLVGTKLDLRDDKQFFTDHPSAVPITTAQGEELKKQIGAAAYIECSSKTQQNIKAVFDSAIRVVLQPPKVKRKKKRKSHKTCSIL

SEQ ID NO: 3132 - protein, 122 aa, Triticum aestivum
  unsure (1)..(122): unsure at all Xaa locations
PDVGPAHVXSKXGAXMVGAKPFVESYNVPIXCKDVPTVRRITRRVTGRSGGFPTVQALAXFHGDNCTEIACLLDPDHVGADQVQWLVEQIAGEQGLEVDKGYFTDLSKDMMLERYFKMVAAD

SEQ ID NO: 3133 - protein, 347 aa, Anabaena variabilis ATCC 29413
MSSLSQAVSIHDVRQLGINLNHWYVVARSQEVTNKPLGVTLWHQAIALYRDSEGQIHALEDRCPHRQVKLSHGQVIGNELECAYHGWRLNHHGECAAVPYLAENQKLPNCKIRHYPVKEQDGFIWLFPGDGEPSIEPMGLPEWDHLNYIASVAIINCQAHYSYLIENLMDMYHGHLHQDLQAWAQAELQDIEETDERVDAHYQAQSYYKIDKIWSISQLFFPALRRLHPEPLDVSYIYPHWMSTLGKDFKIYCLLCPINETQTKAYLIHFTSLNAFWRLHKLPVWFRRFVKDSLFGAAQKFLDGLVVKDVQMIEEEQQAYLQNPQRRNYELNRALVSVQRLMKNQAS

SEQ ID NO: 3134 - protein, 428 aa, Buchnera aphidicola str. Sg (Schizaphis graminum)
MNKKINSVRGMHDYLPEELKIWKKIENIIQKILTSYCYEEIRLPILEKTKIFQRAIGNITDVVEKEMYSFKDKKGNSLTLRPEGTVGCVRAIIENNLLFQKKQRFWYLGPMFRYERPQKGRYRQFYQLGVEVFGLNTPDIDLEIILLISRLWKCLGINLHIKLEINSIGSKLDRIKYQKELVFFLEKYKNILDEDSKKRLYTNPFRILDSKNDMMQKILKKAPLLKNYINTSAINHFNSLCNMMDSYGIKYIHNQNLVRGLDYYNSTVFEWKIDQIGSQNTICAGGRYDSLVQELGGNKTSAIGFAIGIERLVLLIKSLNIISCKEEDINIYIIFIGELNKIYAISLSEEIRNIYPKLKIFVDFMTCSLSKKIKNAVDSLAHIAILIGANEIKKNCFLLKDLKRGREYFFSKSELILKIKKIFYKQGN

SEQ ID NO: 3135 - protein, 616 aa, Rhodospirillum rubrum
MCGLVAILERRGPADEAAVSKALARLARRGPDGEGRAAFWDGRLLLGHRRLAIFGKGADGAQPMVDPETGSVLVFNGALYNYVELRQALQALGQRFAGESDTEVALLAWRQWGEAAFARFNGMWAMVLLDAPGDRLVVSRDRLGVKPLYLCDTGGRVTFASTIAATLAASGIAPRVDDDAVFDFLVGGLTDHRGGSFFAGIVEVPAGALWSVDRSGGIDRRRFHDWRKEGSGEAAPPSAEALRATLSDAVRLRLRADVPAVALLSGGLDSSIVTRLATAPDMPRGALAGLLTYGYRDATEADETREAGRFAATLDSALPHDILRVAPLPAAPDLDALLAAQEQPFNTPSLVAAFRLYRLIAARGVKVAITGEGADELFAGYTNRYGALLAREHLRLGRLRPLGALLGSAHCPPRLVANRLAWDLPLAIVRPLMAGRVHGRVIARSFWQDSAERFEALAAYHHQPLASRLRDDALRALLPYSLRFADRSGMASGVEVRSPFLDYRVVEAALALPVAAKIDDRGGKRILRQAFRHDLPAEIIGAGKTHGLGMAEQFQVGHLDWAALAEAPPTLAARYLDLGRLKTALAAHPSDPRLWWPLCLLRWLAWVEGGMADAPR

SEQ ID NO: 3136 - protein, 72 aa, Glycine max
MGKQIVPVKSVIYALSPFQQKIMPGLWKDLPTKIHHKVSENWISATLLLGPLVGTYTYVQNYLEKEKLSHRY

SEQ ID NO: 3137 - protein, 390 aa, Photorhabdus luminescens subsp. laumondii TTO1
MVADMTRKPATIAVRNGLNNDEQYGCVVPPIYLSSTYNFTDFNQPRTHDYSRRSNPGRDMVQQALAELEGGAGAIMTSSGMSAIHLLCMVFLQPGDLLVAPHDCYGGSYRLFDSQTKRGAYEVAFVDQSDEQALKQVLSKKPKLVLIETPSNPLLRIVDIAHICQLSHEVGATVIVDNTFLSPVLQKPLALGADLVVHSCTKYLNGHSDVIAGAIIAKDEEVATELAWWANNIGVTGAAFDSYLLLRGMRTLSPRVLLQQKNALELVNYLQQQPLVKKLFYPALKDHPGHEIACKQQFGFGAMISFEFDGGEQAIRRFLSELKLFTLAESLGGVETLISHTATMTHAGMSAQARAEAGITDSLLRVSVGIEDSQDLIADLENAFQAVVKE

SEQ ID NO: 3138 - protein, 567 aa, Oryza sativa
MAAAAVAANGGGDGAQASNAPAPTRLASVYSEVQTSRLKHALPLPSVLRSPFALADGPASSAAGNPGEIAKLFPNLFGQPSVSLVPSPEPASTRPLKVGVVLSGGQAPGGHNVICGIFDYLQEYAKGSVMYGFKGGPAGVMKCKYVELTADYVYPYRNQGGFDMICSGRDKIETPEQFKQAEDTVNKLDLDGLVVIGGDDSNTNACLLAEYFRGKNMKTRVIGCPKTIDGDLKCKEVPTSFGFDTACKIYSEMIGNVMTDARSTGKYYHFVRLMGRAASHITLECALQTHPNVALIGEEVAAKKETLKSVTDYITDIVCKRAELGYNYGVILIPEGLIDFIPEVQKLIAELNEILAHDVVDEAGAWKSKLQPESRQLFGFLPKTIQEQLLLERDPHGNVQVAKIETEKMLIAMVETELEKRKAEGKYPAHFRGQSHFFGYEGRCGLPTIFDSNYCYALGYGSGALLQCGKTGLITSVGNLAAPVEEWTVGGTALTSLMDVERRHGKYKPVIKKAMVELDGAPFKKFASLRDEWSLKNHYISPGPIQFSGPGSNDANHTLMLELGAEA

SEQ ID NO: 3139 - protein, 488 aa, Leuconostoc mesenteroides subsp. mesenteroides ATCC 8293
  unsure (1)..(488): unsure at all Xaa locations
MADPFGFLKYERVDNPYRKITERIKDFNYMAEPLAFDQRVEQAARCMNCGVPYCHIGALYGNKSKQMSGCPNDNLIPEWNDLLYRKELHQAWLRLAKTNPIPEFTGKVCPAPCEVSCNEFLNGAGVTIKDNEDFIVEYAFAHGWVVPEGLPEQRTGKKIAVIGSGPAGITAAWRLNQLGHEVTIFEKDERLGGLLMYAFQTXXXXXXXXXXXXXXXXXXMSEVGIKFKVNTTIGEDITKEQLDADFDKVIVATGASVARDVDVPGRDLKGIDFALPFLSQTTKNVLKNGTTTFEKTLSNQQVIVIGSGDTATDCIATAIRLGAENVTQFDYHTEKPTDRTTPWPEYPWQKQISYGQAEAMDTVNQELIPYQTQTVEFLGNSFGEVTGVRTVLIDANKQVISNSEKDYSADLVLVAVGFTGLNTKILNDLDITRLNVMGTTNQENYMVAGDANTGANLVITAIHDARLVAELVDAKLQSFADRFSVKVN

SEQ ID NO: 3140 - protein, 295 aa, Haemophilus ducreyi
MMKGIILAGGSGTRLYPITRGISKQLLPVYNKPMIYYPLSVLMLAGIREILVITTPVDHQHFKALLGDGSHFGIHIDYAIQAKPAGLAEAFIIGEPFIGKDNVCLVLGDNIFYGQGFTQILSVAANRQQGATLFGYQVNNPARFGVVEFDQDLRILTLEEKPQKPKSDWAVTGLYFYDNRVIEFAKQVTPSARGELEITDINQRYLQEGMLHLQLLGRGFAWFDTGTCDSLHEAAAFVKTIEHLQKLQVACLEEIAWRKGWLTDIDVITLAEPMIQNEYGQYLLALVQQQRKYKA

SEQ ID NO: 3141 - protein, 465 aa, Schizosaccharomyces pombe
MAPISKVFDYLVIGGGSGGLASARRAAKHGAKVALIEASGRLGGTCVNYGCVPKKIMWNIADLVAKMKTAKQNGFPNSQLGSFDWGMIKRKRDAYIGRLNGIYERNVNKDGVAYISGHASFVSPTEVAVDMNDGSGTQVFSAKYILIAVGGHPIWPSHIPGAEYGIDSDGFFELESQPKRVAIVVGAGYIAVELAGVFAALGTETHMFIRQSKFLRKFDPIISDGIMDHFQHIGINVHTNSLEFKKVEKLPSGELCIHQQDGSTFNVDTLLWAIGRAPKIQGLRLEKAGVKTLPNGIIIADTYQRTNVPTVLSLGDVCGKLELTPVAIAAGRRLSDRLFGGIKDAHLDYEEVPSVVFAHPEAGTIGLTEQEAIDKYGESQIKVYNTKFNGLNYSMVEQEDKVPTTYKLVCAGPLQKVVGPTFSWRFSAEILQGFGVAIKMGATKSDFDSCVAIHPTSAEELVTLV

SEQ ID NO: 3142 - protein, 332 aa, Pseudomonas syringae pv. syringae B728a
MTFERRALRADDVAIEILYCGVCHSDIHQARNEWGIAVYPLMPGHEIVGRVTATGSSATQYQVGDMVGVGCMVDSCRECSACKSDLEQYCLEGPTMTYATPDRVDGSNTMGGYSNSIVVAEHFVVRVPEKLDPAAAAPILCAGITTYSPLKHYGVKAGDKVGILGMGGLGHMGIKFAKAMGAEVTLFTRSAAKAQEAHRQGADHVIVSTDAEQMKAAAGHFDFLLDTIPVQHDLNPYLETLRFDGAHILVGLIEPIEPPVHAANLVMSRRVLAGSLIGGIAETQEVLDFCAENDITCDIEMLDIRNINEAYERMLAGDVKYRFVIDMATLKA

SEQ ID NO: 3143 - protein, 317 aa, Zea mays
LISKIEQADPDFDPRPFLKQLNVLGRYEPIKRNVYFTKRYIEDYGISCHCKPSPGSSVVCGRDCYCSMLFSCCSSQCECDIACTNKSFQHRPLTKTKLIKTEKCGHGLVAEDEIKKGEFVIEYVGEVIDDRTCENRLWTMKRLDDTDFYLCEVSSNMVIDATNKGNLSRFINHSCEPNTAMQKWTVDGETRVGIFALRDIKIGEELTYDYKFVQFGAAQVCHCGSSKCRKMLGTTKYSGSSQNHRTKKKKRKTSCESCIQQFLRLWHPRQKMYVGCWIVDFDQGTKMHTLQFIDHHTEKFDLKEEEWHFLEVDSDED

SEQ ID NO: 3144 - protein, 172 aa, Escherichia coli
DAAVEKAYKGERKISWMEIYTGEKSTQVYGQDVWLPAETLDLIREYRVAIKGPLTTPVGGGIRSLNVALRQELDLYICLRPVRYYQGTPSPVKHPELTDMVIFRENSEDIYAGIEWKADSADAEKVIKFLREEMGVKKIRFPEHCGIGIKPCSEEGTKRLVRAAIEYAIAND

SEQ ID NO: 3145 - protein, 143 aa, Triticum aestivum
  unsure (1)..(143): unsure at all Xaa locations
MAPTVMXSSATSVAPFQGLKSTAGLPVSRRSNGASLGSVSNGGRIRCMQVWPIEGIKKFETLSYLPPLSTEALLKQVDYLIRSKWVPCLEFXKVGXIFREXXASPGYYDXRXYWTMWKXLPMFXCXPXATQVINEVGGRSKKE

SEQ ID NO: 3146 - protein, 359 aa, Triticum aestivum
  unsure (1)..(359): unsure at all Xaa locations
PPSAPPAPSAAPAAPAGPPAPARSSGRPPPPAPPPSAAPAPPPPPAAPVAAAPAPVAAGTKGVATPQAKKLAKQHRVDLAKVTGTGQFGRITPADVEAAAGIQPKPKVAPTPAAAPVAAASSVKAVPQAAVLPPVPGATVVPFTAMQAAVSKNMVESLSVPAFRVGYPILTDKLDALYEKVKPKGVTMTVLLAKAAAMALGQHPVVNASCRDGTSFTYNSSINIAVMXKVKPKGVTMTVLLAKAAAMXLLSQKWKELVKKARAKQLQPNEYNSGTFTLSNLGMFGVDRFDAILPPGQGAIMAVGASKPTVAADKDGFFSVKSKMMVNVTADHRIVYGADLAAFLQTFAKIIEDPESLTL

SEQ ID NO: 3147 - protein, 587 aa, Oryza sativa
MDAAAAMEKQQQPGEKKITGGEEEEEEEVISSVRYRGWKSMPYVIGNETFEKLGTIGTTANLLVYLTTVYHLPSVRAATLLNFFSGTTNLAPLLGAFLSDTFLGRYTTIAAASLASCLGMLVLTLTAAIPSLHPPPCTASSSSSSCQGPTHGQLAALLAAFAFLVVGAGGIRPCNLAFGADQFDPRTDSGRRGIASFFNWYYFTFTVAMMLSATLIIYLQSNVSWAIGLAVPAALMAISCALFFMGTRLYVRVRPEGSPFTSFARVIVAAVRKRRVPAPASADDLFDPPHQSKLVAKIAYTDQFRCLDKAAVVTPESRSSPWRLCTVQQVEEVKCLARIIPVWSAGIVYFIVVTQLGTFVVLQALQMDRRLFRWWAFEVPAGSMVVFNMMAMTVWIPVYDRVVVPALRRVTGKEGGISQLQRIGVGLVLSVATMVVAAAVEQRRRRLGAVGVKMSFLWLVPQQVAAGMSEAFAAIGQTELYYRQFPENMRSVAGALFFLAFALANYASGFMVAAVHRTTGWLAQDLNHARLDLFYLTVAAIAAANVCYFLLCARWYRFKNTTIADHVELPDYHHHQPGTANTIASKV

SEQ ID NO: 3148 - protein, 523 aa, Vigna unguiculata
MAMASLARRKAYAVVSSSRSSVFLTSLRGFASGSDENDVVVIGGGPGGYVAAIKASQLGLKTTCIEKRGTLGGTCLNVGCIPSKALLHSSHMYHEAKHSFANHGIKLSSVEVDLAGMMAQKDKAVSNLTKGIEGLFKKNKVNYVKGYGKFVSPSEVSVDTIDGGNTVVKGKHIIIATGSDVKSLPGVTIDEKKIVSSTGALALTEIPKKLVVIGAGYIGLEMGSVWGRLGSEVTVVEFASDIVPTMDAEVRKQFQRSLEKQGMKFQLKTKVVGVDTSGDGVKLTLEPAAGGDQTILETDVVLVSAGRTPFTAGLGLDKIGVETDKIRRILVNERFTTNVSGVYAIGDVIPGPMLAHKAEEDGVACVEFIAGKVGHVDYDKVPGVVYTTPEVAYVGKTEEQVKALGVEYRVGKFPFMANSRAKAIDNAEGLVKILAEKETDKILGVHIMAPNAGELIHEAAIALQYDASSEDIARVCHAHPTMSEAVKEAAMATYDKPHSHMKSWLLLHSLLFIFVQQFTMTWR

SEQ ID NO: 3149 - protein, 1306 aa, Mycobacterium bovis AF2122/97
MSFVIATPEMLTTAATDLAKIGSTITAANTAAAAVAKVLPASADEVSVAVAALFGTHAQEYQTVSAQVATFHDRFVQTLSAAASSYVAAEAVNVEQSLLAAVNAPTQALFGRPLIGNGADGSPGTGQAGGPGGILYGNGGNGGSGAPGQRGGAGGAAGLIGNGGNGGAGGVGTTGGAGGHGGAGGWLYGNGGAGGFGGAGAVGGNGGAGGTAGLFGVGGAGGAGGNGIAGVTGTSASTPGGSGTAGGAGGIGGNGGAGGAGGVLMGNGGNGGAGGEGGPGGAGGAGASGAHATNLGADGQAGGNGGNGGAGGTGGVGGPGGGHGLLGLGGSHGAGGAGGSGGDGGAPGDGGNGATGTWGHNLGAGGTGGNGGNPGAGGAGGAGGASVGGSAHGANGAPGTTSTSGGNGGDGGKGADAISSGQTGANGGRGGDGGQVGNGGAGGAGGRGGAGGLGFGSEAPGRPGGAGGTGGAGGNGGTQAGDGGTGGAGGAGGDGGSGGAGSIGFNASAPGAAGSPGGNGGNGGPGGAGGEGGAGGLALAASGQNGSQGAGGDGGAGGNGGTPGNGGHGAAGALGVNGGVGGAGGHGGDPGVGGAGGQGGSGSTPGANGAPGNTPTSGGNGGNGGRGADATGFGQTGASGGRGGDGGLVGNGGAGGAGGNGSKGLPGLGRLGNPGLDGGTGGNGGAGGSGGAWAGNGGTGGAGGTGGVGGTGGSGSDGVNGSSAGADGHPGGTGGVGGTGGKGGDGGDGGAAPNGVAGSQGPGGAGGDGGTGGVGGNGGRGIDGADGATAGARGQDGGAGGAGGKGGRGGTGGPGGAGPAGTTGSQGAGGNGGSGGTGGDPGDGGNGANGSVFTNNGIGGNGGNGGNAGPSGAGGSGGAGSTFGATGSSSSIHVNGGNGGNGGNGDHALSGNGAAGGNGGNGGNGSLRGSGGAGGHGGNGGNASRGMGGDGGTGGAGGNAGQIGNGGAGGNGGDGGTGSDGNPGAITGSGGRGGDGGVGGQGGSVAGDGADGGRGGAGGTGGTGLRGTTGATGATGTFDAGADGHGGNGGTGGVGGTGGAGGGGGNGGAGGKALSPTGNNGSQGAGGDGGAGGTGGTGGTGGDGGRGAHGTLFSSLAGTGGTGGNGGTGGTGGTGGAGGAGGTGSTLGATGATGAAGRAGNGGVGGSGGLGSAFGPGGTGGMGGAGGTSTVSAGGDGGRGGFGGDGLDASSGGNGGDGGHGGDGFRTAGAGGRGGDGGKGADPGGLFPIPGAGGKGGTGGTGGTAHLGPLAIIGQSGQPGQFGSPGADGRGGAGGAGGGGGAGGSF

SEQ ID NO: 3150 - protein, 241 aa, Populus balsamifera subsp. trichocarpa
MGRGRVQLKRIENKINRQVTFSKRRTGLLKKAHEISVLCDAEVALIVFSHKGKLFEYSTNACMEKILERHERYSYAERQLVATDLDSQGNWTLEYNRLKAKVELLQRNHRHYLGEDLDSVSLKELQNLEQQIDTALKLIRERKNHLMYQSISELQIKEKAIKEQNNMLVKQIKEKEKALAQPALWDQQDHGPNASSFLLPQPPLPCLNISYQEEDPEARRNYELDLTLEPIYSCHLGCFGT

SEQ ID NO: 3151 - protein, 162 aa, Populus balsamifera subsp. trichocarpa
MGRGRVQLKRIENKINRQVTFSKRRTGLLKKAHEISVLCDAEVALIFFSHKGKLFEYSTNACMEKILERHERYSYAERQLVATDLDSQGNWTLEYNRLKAKVELLQRNHRHYLGEDLDSVSLKELQNLEQQIDTALKLIRERKNHLMYQSISELQIKLYPIG

SEQ ID NO: 3152 - protein, 308 aa, Zea mays
MASRIASRLLRRSSPTLGLLRSYTHVRNYSSQLSGLIPVGPQSSKLTRRNNYFPNASPYQLWSRSFASDNGDKFEAVVPFMGESVTDGTLANFLKKPGDRVEADEAIAQIETDKVTIDVSSPEAGVIEKFIASEGDTVTPGTIVAIVSKSAAPAETHVAPSEEAPQKESPPVKAEEKSPKAEEKPTKVEPPKKQAPKPTPSKTSPTEPQLPPKERERRVPMARLRKRIANRLKDSQNTFAMLTTFNEVDMTNLMKLRSDYKDEFVKKHGVKLGLMSCFVKAAVSGLQNQPIVNAVIDGDDIIYRDYVD

SEQ ID NO: 3153 - protein, 286 aa, Oryza sativa (japonica cultivar-group)
MAEDDYNDMDMGYEDEPPEPEIEVQSCCFVIYFWTLLYQEELCGLFTFSELEGAEEEPENNNEDAVDDVVGAEDDREQEKTARPWKTSKYMTKYERARILSTRALQISMNAPVMVELEGGTYPLEVEALERVYTDCPKPTSARRQQLLCECPILANIEPKQIKVAAHHNGHGTSHENHTQESESSVEQHDPESQDDISIKATPADESPPEETSAAPTKEQDFVDLAGSEQAAQTHAVGARLKEGCHINRSLLTLTTVIRELRKAKCGLFVTHRVMPIAKIDVGRSV

SEQ ID NO: 3154 - protein, 597 aa, Glycine max
MTGVEAMEKNEKSVTDEEPKINYRGWKVMPFIIGNETFEKLGTIGTLANLLVYLTTVFNLSSLAATNIVNIFNGSASLSTLLGAFLCDTYFGRYKTLGFSTMASFLGLLVIQLTAWIKKMHPPHCGRDSITCIGPTTGQMGFLLAGFGLLIVGAAGIRPCNLAFGVDQFNPNTESGKKGINSFFNWYFFTYTFAQMVSLSLIVYIQSNVSWAIGLGIPAALMLISCTLYYTGSNYYVKVKATGPAPLTSLAQAVVVAIKKRRLNLSEYPLDSSLFAYVSPQSINSKLLHTSQFRFLDKAAIITPQDGINPDGSASDPWSLCSMQQVEELKCLLRVIPIWFAGIFFYIAIVQQNTMLVFQALQSDRRILSTNFKILAASYTIFQMLSLTIWLPIYDRILVPSLQRVTKKEGGITVLQRIGFGMFLSILCTMVSGVVEERRRTLALTNPIGLEPRKGAISSMSGLWLVPQLTLAGLSDAFAIVGQVEFFYKQFPENMKSLAASLFFCGLAGSSYLSSLLISIIHRATAKSSTGNWLPQDLNKGRLDYFYYIITALEVVNFGYFILCAKWYKYKGTGSSSSGDLQLDQVSKPSERTVNTV

SEQ ID NO: 3155 - protein, 542 aa, Escherichia coli CFT073
MIAVVKLLPTGEDFASHVYPCYTSHRKETIMTNNPPSAQIKPGEYGFPLKLKARYDNFIGGEWVAPADGEYYQNLTPVTGQLLCEVASSGKRDIDLALDAAHKVKDKWAHTSVQDRAAILFKIADRMEQNLELLATAETWDNGKPIRETSAADVPLAIDHFRYFASCIRAQEGGISEIDSETVAYHFHEPLGVVGQIIPWNFPLLMASWKMAPALAAGNCVVLKPARLTPLSVLLLMEIVGDLLPPGVVNVVNGAGGEIGEYLATSKRIAKVAFTGSTEVGQQIMQYATQNIIPVTLELGGKSPNIFFADVMDEEDAFFDKALEGFALFAFNQGEVCTCPSRALVQESIYERFMERAIRRVESIRSGNPLDSVTQMGAQVSHGQLETILNYIDIGKKEGADVLTGGRRKLLEGELKDGYYLEPTILFGQNNMRVFQEEIFGPVLAVTTFKTIEEALELANDTQYGLGAGVWSRNGNLAYKMGRGIQAGRVWTNCYHAYPAHAAFGGYKQSGIGRETHKMMLEHYQQTKCLLVSYSDKPLGLF

SEQ ID NO: 3156 - protein, 715 aa, Escherichia coli O157:H7 EDL933
  unsure (1)..(715): unsure at all Xaa locations
MKKVVTVCPYCASGCKINLVVDNGKIVRAEAAQGKTNQGTLCLKGYYGWDFINDTQILTPRLKTPMIRRQRGGKLEPVSWDEALNYVAERLSAIKEKYGPDAIQTTGSSRGTGNETNYVMQKFARAVIGTNNVDCCARVXHGPSVAGLHQSVGNGAMSNAINEIDNTDLVFVFGYNPADSHPIVANHVINAKRNGAKIIVCDPRKIETARIADMHIALKNGSNIALLNAMGHVIIEENLYDKAFVASRTEGFEEYRKIVEGYTPESVEDITGVSASEIRQAARMYAQAKSAAILWGMGVTQFYQGVETVRSLTSLAMLTGNLGKPHAGVNPVRGQNNVQGACDMGALPDTYPGYQYVKDPANREKFAKAWGVESLPAHTGYRISELPHRAAHGEVRAAYIMGEDPLQTDAELSAVRKAFEDLELVIVQDIFMTKTASAADVILPSTSWGEHEGVFTAADRGFQRFFKAVEPKWDLKTDWQIISEIATRMGYPMHYNNTQEIWDELRHLCPDFYGATYEKMGELGFIQWPCRDTSDADQGTSYLFKEKFDTPNGLAQFFTCDWVAPIDKLTDEYPMVLSTVREVGHYSCRSMTGNCAALAALADEPGYAQINTEDAKRLSIEDEALVWVHSRKGKIITRAQVSDRPNKGAIYMTYQWWIGACNELVTENLSPITKTPEYKYCAVRVEPIADQRAAEQYVIDEYNKLKTRLREAALA

SEQ ID NO: 3157 - protein, 412 aa, Lactococcus lactis subsp. cremoris
MDTGSIAFILICAALVLLMTPALAFFYGGLGRRKNVLNTMMMSLAPMALASIYGLIIGFHFFSGNNSWIGNFDHLFMNGVHMAKNSLFPANHIPDGLFSGFQMMFSIITVALITGSVVGRMRFTPILLFMGAWLILVYYPLAHMVWGGGFLAQIHAIDFAGGDVVHISNGVTGLVLALVLGKRRDYERLDYRPHNIPFVVLGAGLLWFGWFGFNAGSALAANGVAINAFMTTNTAAAAAMLSWMIIEKIMIGKPSVIGACSGAVVGLVAITPGAGFVSLWSSIIIGLLVSPLSYFMISVVKKKFGYDDALDAFGCHGIGGMFGGIMTGIFATPALAPEKGYVGLVYGSGKLLLANLTAVVFTVIFTALVSWIIIKVIGLIMPIPVTDRAEAIGLDDSEHEETAYPTFLGLDS

SEQ ID NO: 3158 - protein, 441 aa, Leuconostoc mesenteroides subsp. mesenteroides ATCC 8293 [sequence omitted]

SEQ ID NO: 3159 - protein, 537 aa, Neurospora crassa
MAMSTVAAALGKLLFVAVVTLVISVANALSSVPELSDWEQDQYLTLQLTVPLGSGDAKPIRHRVVPLTEAVGMNQSVIARESITIKGTMVPTEESGWLEFIDSNSIAYLNCDNSNSTSFFDQLMSKAPKAILLFSLAGAGCRRDSTDDWNYTTLFTMTDQIDARDTLNLTMSGSLATITGDYEEPDDDDDEDRTGHGSPIAMNILYSITGVITLLFLAIIATGAIRAHRYPERYGPRPGYGGRPSQSRAKGLARAVLETLPIVKFGEKSPAKPDPDFQLEQQPSRSSQDPTPRAKLSAIQEAVPSIAKSQGPMTVASVEASEQASSATVYGAQTGMTNTAGDIENTTPDDINLGCPICTEDFTIGEDVRVLPCNHRYHPACVDPWLVNISGTCPLCRLDLRPHSSTESTTGPGDNHSVSLPTAAGDNAQQPGTSGSPMPSTTPRERRRSLRILDLHRLRAASIEERMEILRRHRSQQQQRRHVTGSSLTGDPDTGESADPTHRARLAERFRGRFRASRPPGQAQPQPTEVDIPTPTP

SEQ ID NO: 3160 - protein, 438 aa, Pseudomonas stutzeri
MTLRRFAGLGALLSLLSPGLAMAQEATLDSGDTAWMLTATALVLFMTIPGLALFYGGMVRSKNILSVMMQCFAITGLMSILWMVYGYSLAFDTTGMEAGVTNFNSFVGGLDRAFLSGLTPDSLVGAFPESVFITFQMTFAIITPALIVGAFAERMKFSAMLVFMDVWFTLVYAPIAHMVWGGDGGLMWDWGVLDFAGGTVVHINAGIAGLVACLVLGKRKGFPTTPMAPHNLGLTLVGAAMLWIGWFGFNAGSAVAANGTAGMAMLVTQIATAAAALGWMFAEWIGHGKPSALGIASGVVAGLVAITPAAGTVGPMGALIIGLVSGVVCFFCATSLKRKLGYDDSLDAFGVHGVGGIVGALLTGIFAAPMLGGFGEVENIGLQLWIQFKGVLFTVVYTGIVTYLILKAIDLVMGLRVNEEQETIGLDLSLHNERGYNL

SEQ ID NO: 3161 - protein, 276 aa, Photorhabdus luminescens subsp. laumondii TTO1
MSQTTSTTLTGQCISEFLGTALLVFLGVGCVAAARIAGAQLGLWEISIIWGMSVALAVYLTAGVSGAHLNPAVTIALWLFARFDGKKVIPFIIAQMIGGFIAAALIYMMYYSVFLDYEQVHNIVRGTPESLFTAGVFSTYPMASLSISQAFMIEVIIAAILLCLILSLTDDGNGIPRGPLAPLLIGIVIAVIGGAFGPLTGFALNPARDFGPKLIAYLAGWGDIALTGGREIPYCLVTLTAPIIGGIVGAFGYRKLIGRNLPSDVHKTEDQKKKKA

SEQ ID NO: 3162 - protein, 417 aa, Pseudomonas stutzeri
MDSTALIPVQYGLDTFYFVICGALVMWMAAGFAMLEAGLVRAKNTAEILTKNIVLYALASIMYLLVGYYIMYSSPEGGIFPSLGFLIGDEHAVDLVAAGGEDAPYYSARADFFFQIVFAATCMSVVSGAVAERMKLWAFIAFAVVMTGFIYPIQGFWKWGGGFLDAAGFLDFAGSGVVHMAGAAAALAGVLLLGARKGKYGPNGQINAIPGANMPLATLGAFILWMGWFGFNGGSQLKMSTIEDANAVAQVFVNTNMGAAGGLIAALITARLLFGKSDLTMVLNGALAGLVAITAEPLTPSALQATLIGGVGGVLVVFSILGLDKLKLDDPVGAISVHGVAGMWGLLAVTADQCRRFFRQSSCLGLVSIFLWVFFASLIVWGIIKAVMGLRVSEEEEYEGVDVVECGLEAYPEFTRQ

SEQ ID NO: 3163 - protein, 402 aa, Ferroplasma acidarmanus
MVESIEITDSRITKIFDSRGNPAIEATIILNYATGTSSAPAGASTGKTEVIAYPKNNIDNSVDFYNKHVRNALKGFNALNQSGFDTLLHELDGTDNFSEMGGNLATALSIANAKAVSNYLEIPLYRYVGGLHPQIPRPMGNIIGGGKHSKNGTTIQEFLVSSQGKTFYDSVYYNILVHRRVGEKLSEKLKGQSVGLGDEKAWTADVSDEEAIEIMKEAAGEISSENKVKIYLGVDFAADSFYNNGKYDYKTSKKTQDEQIDYAVSLNKEHGFYFIEDPLYDNDFEGFAEITKKIGEDSLIVGDDLYTTNSARIQKGIDMKSTNAVLIKVNQIGTLSDTVKSVKLATKNSMDTVVSHRSGETTDDFIAHLAVAFNSKFIKTGTIGGERLAKLNEVIRLEEDLI

SEQ ID NO: 3164 - protein, 323 aa, Photorhabdus luminescens subsp. laumondii TTO1
MSNEIKRIGVLTSGGDAPGMNAAIRGVVRAGLTEGLEVFGIYDGYLGLYENRMKKLDRFSVSDMINRGGTFLGSARFPEFRDEKVRTVAIENMRKNGLDALVVIGGDGSYLGAKKLTEAGFPCIGLPGTIDNDVAGTDYTIGYFTALETVVEAIDRLRDTSTSHKRISIVEVMGRYCGDLTLSAAIAGGCEFIVLPEVSFSCDELVAEIKAGIDKGKRHAIVAITEHVCDVYELAKHIEKETHHETRATVLGHVQRGGSPVAYDRILASRMGAYSIQLLLEGYGGRCVGIQNEKLVHHDIIDAVQNMKRVFKQDWLETAKKLY

SEQ ID NO: 3165 - protein, 216 aa, Xylella fastidiosa Temecula1
MAAYDYLYHCDPGLSGWMQRLGPLPALRRWRQPFNVVDALARAILFQQLSGKAASTIVARIEAVIGSTCLYAETLACIDDACLRACGVSSNKILALRDLTRREVAGELPSVWQMGSMHHNTIVEKLIPIRGIGRWTVEMMLIFRLGRPDVLPVDDLGVRKGIQRVDSLAFVPTPKALCTRGECWAPYRTYAGLYLWRIADFHEGERAVISDRSQDE

SEQ ID NO: 3166 - protein, 464 aa, Glycine max
MANTLYNGATCRIPLRNQSLAFSRHVSRSLSFLPITRAAKQPNAIAVKASSHSDFDVDPSLSPRVNAVKPSKTVAISDHATALVQAGVPVIRLGGGEPDFDTPAPIAEAGINAIREGYTRYTPNAGTMELRQAICHKLKEENGITYTPDQVVVSNGAKQSIAQAVLAVSSPGDEVIIPAPFWVSYPEMARLADATPVILPTLISDNFLLDPKLLESKITERSRLLILCSPSNPTGSVYPKELLEEIARIVAKHPRLLVLSDEIYEHIIYAPATHTSFASLPGMWDRTLTVNGFSKAFAMTGWRLGYIAGPKHFVAACGKIQSQFTSGASSIAQKAAVAALGLGHAGGEAVSTMVKAFRERRDFLVKSFREIDGVKISEPQGAFYLFLDFSFYYGREAEGFGKIVDSESLCQYLLDVGQVALVPGSAFGDDTCIRISYAESLTTLQAAVERVKRALIPLSSAALV

SEQ ID NO: 3167 - protein, 106 aa, Glycine max
SMIFFPAGTTVNRAGARMGGSFTGLKFMGGFPTKKNNHDLTFIGCNRGRIPCMPVWAPIGKKKFETLFYLPDLDDAPLGKEVEYLLRKGWISCVEFELEHRFVYRE

SEQ ID NO: 3168 - protein, 479 aa, Medicago truncatula
MLSEKQGEETMMSSLNETIELNEEREEEKGASPGSGFKNFLWHGGSVYDAWFSCASNQVAQVLLTLPYSFSQLGMISGIIFQVFYGLMGSWTAYLISILYVEYRSRKEKENVSFKNHVIQWFEVLEGLLGPYWKAIGLAFNCTFLLFGSVIQLIACASNIYYINDHLDKRTWTYIFGACCATTVFIPSFHNYRIWSFLGLGMTTYTAWYMTIAAIVHGQVENVVHSGPKKMVWYFTGATNILYTFGGHAVTVEIMHAMWKPQKFKAIYFFATLYVFTLTLPSAIAVYWAFGDQLLDHSNAFSLLPRNAWRDAGVILMLIHQFITFGFACTPLYFVWEKVIGMHDTKSIFLRALARLPVVIPIWFLAIIFPFFGPINSAVGALLVSFTVYVIPASAHMLTYRSASARQNAAEKLPKVIPSWTLMYVINAFVVIWVTIVGFGFGGWASMTNFIKQVDTFGLFAKCYQCPPKLPASNHTMHH

SEQ ID NO: 3169 - protein, 546 aa, Dechloromonas aromatica RCB
MLPKLSSFPGVQGPVVIIVMDGYGLPKTDVGSAIAAARKPTLDRLFASYPNVRLRAHGTAVGMPSDDDMGNSEVGHNAIGAGQVYSQGASLVSNAIASGAIWQGEAWQQIVAGAKAGRGVVHFMGLFSDGNVHSHIDHLKAMVVQAKAEGIKTVRIHALLDGRDVPETSALDYVVPFEAFLAEISSDGFDARIASGGGRQYITMDRYDANWAMVDKGWQTHVLGRGTQFANATAAVNGLREQNPGTIDQDLPEFVVAENGKAIGTIEDGDSVVFFNFRGDRAIEITRAFEEAAFDKFDRVRFPKVTYAGMLQYDGDLKLPARFLVAPPAIKDTTGEWFAKSGIAQFACSETQKFGHVTYFWNGNRSGKFDGETWQEVPSDVVPFEQRPWMKAAEIADAMIAALQSGQYRTLRCNFANGDMVGHTGNFSAATLAVEAVDLSLARVLQAIDAAGGVALITADHGNADEMFELDKKTKQPAMNKDGSFKAKTAHTLNPVPLILYDNVSGGKLGLKQTETAGLSNIAATVANLLGLEKHAAWDESLLEIR

SEQ ID NO: 3170 - protein, 236 aa, Mesorhizobium loti
MRPLVGIVSNFEVDKKGYFCLENYVRAIEQSGALPIILPYVSEGDVGQLLDTLSGIVLTGGGDFPTEFYGADPHPTVQRMIPERDRFEFALARAAFERPVPVLGICRGMQILNVVAGGTIYPHTRDALPEVGDHRDGTPLEQTVHGINIEPNTYLSRLVESPNLSFRVNSSHHQAIDRLAPGFVVSARADDGIVEAIEAPDRPFVIGVQWHPEAMFESEPACRSLIQNFAKACGVK

SEQ ID NO: 3171 - protein, 542 aa, Aspergillus fumigatus
MSILALVEDRPTPKEVYNWKIYLLAAVASFTSCMIGYDSAFIGTTLALSSFREEFGFSTMSKTAVNLVSANIVSCYQAGAFFGAFFAYPIGHFWGRKWGLLFAGTIFTLGAGLMLGANGDRGLGLLYGGRVLAGLGVGAGSNITPIYISEMAPPSIRGRLVGVYELGWQIGGLVGFWINYGVSETLAPSHKQWIIPFAVQLIPSGLLLIGAVFLKESPRWLFSRGRREDAIKNLCWIRQLPADHIYMIEEIGAVDQALEEQRTTIGLGFWKPFKAAGTNKKVMYRLFLGSMLFFWQNGSGINAINYYSPTVFKSIGLHGANTSMFSTGIFGVVKTVVTFVWLLYLIDRVGRRLLLLIGAAGAAVCLLIVGAYIKIADPASNPTQEMTGGGIAAMFFFYLYTVFYTPSWNGTPWVMNSEMFEPNMRSLAQACAAASNWLWNFLISRFTPQMFAKMEYGVWFFFASLMLLSIVFVFFLVPETKGIPLESMDVLFESKPIWRAHATVLAKLREDEEQFRHDIEESGYSKTGEQQVEHVSEDLPKV

SEQ ID NO: 3172 - protein, 866 aa, Mycobacterium avium subsp. paratuberculosis str. k10
MTGEWQPSACILCECNCGIVVQVEDRRLARIRGDKAHPASQGYTCNKALRLDHYQNSRARLTSPLRRRPDGSYEEIDWDTAIVEIAEGFKRIRDSYGGDKIFYYGGGGQGNHLGGAYSGAFLKALGSRYRSNALAQEKTGESWIDGQLYGGHTRGEFEHAEVAVFVGKNPWMSQSFPRARVVLNEIAKDPARSMIVIDPVVTDTAKMADFHLRVRPGTDAWCLAALAAVLVQENLCDEAFLAEHVRGADGVRRALRDVAVCECAAHCGVDEELLRTAARRIGTADSVAVFEDLGVQQAPNSTLCSYLNKLLWILTGNFAKRGGQHLHSSFAPLFGQFSGRTPVTGAPIISGLVPSNVVPEEILTDHPDRFRAMIVESSNPAHSLANSAACREAFASLELMVVIDVAMTETARLAHYVLPAASQFEKPEATFFNLEFPRNTFQLRRPLLTPLPGTLPEPEIWARLVRALGVVTEADLRPLHDAARRGRHAYTEAFLTAVSTNPTVAQLLPFVLYETLGPTLPDGLRGAAALWGLAQKTALTYREAVRRAGHADGNALFDAILDNPSGVTFTVHDYADDFTLIGHPDHKIALEIPAMLQELAKLSSGPPRLTTEEFPIVLSVGERRAYTANDIFRDPSWRKRDAEGALRVSVEDAQALGLADGCRARISTAAGSAEATVEISETMLAGHAALPNGFGLDYIGDDGRTVVPGVAPNAQPHVAGHLGALVGLQVGAGTLEYLPQRLGDAIGPGAVEHLFDLARGAPVGVALQRAGDALPGGDVTALQSRTDGGGRPEFHRLVEVRQRGGRAAAAVALVPRGRPVRRRSRASVGCQRHLASSSIATATARQRCLICSQSAGASASGPWSSG

SEQ ID NO: 3173 - protein, 393 aa, Buchnera aphidicola str. Sg (Schizaphis graminum)
MNRINILVPDLPESVNDAVVVKWYKKIGEQISSEDNIVDIETDKVMLEVSAPCNGILNEILEKEGSIVKSNQILGNIVESKNIESKTKSKLEKSNKYFIKDKNFNISFKEKIYNFPPSIRRIIRIKKNKEIFNELNYIKNQENIIEEKLNDQSFSNEKEKKIYENRIKMTRLRQKIAERLLETKNNTAMLTTFNEVNMQPIISLRKKYGEFFEKKHGVRIGFMPFFVKAVVESLKKFPEINASIDKNDIVYYKNIDVSIAVSTPRGVITPVLRNADNMSMADIEKKIKEFSIKGIENKIKIEELIGGNFTITNGGIFGSLMSTPIINPPQSAILGMHLIKERPMAINGKVKILPMMYLALSYDHRLIDGKESVSFLVTIKNILEDFNRIIINV

SEQ ID NO: 3174 - protein, 320 aa, Buchnera aphidicola str. Sg (Schizaphis graminum)
MIKKIGVLTSGGDAPGMNAAIRGVVRTALSEKLEVFGIYDGYLGLYENRMTLLDRYSVSDMINRGGTFLGSARFPGFYKNEIRTIAVNNLNKRNIDALVVIGGDGSYIGAQKLTKMGIPCISIPGTIDNDVAGTDYTIGYFTALETVVEAIDRLRDTSSSHQRISIVEVMGRYCGDLTLAAAIAGGCEFIVLPEIHYKKEELVSEIQAGIEKGKKHAIVAITEYICDVEKLAKYIEKKTNRETRATILGHIQRGGAPVVYDRILASRMGAYAVELLIEGYKGKCVGIQNEKMVFNDITDALKNMKRVFKKDWLITAKKLY

SEQ ID NO: 3175 - protein, 262 aa, Buchnera aphidicola str. Sg (Schizaphis graminum)
MNFCSKKKILKQCFFEFLGTGLIIFLGISSLVVSKLTNFHFNHCEISCIWGLGVFISICFCSSVSGAHLNPAITIFLFLSSQFNKKKVIPYILSQISGTFFFTFLIYLIFNNLLNSFESKYNIVRGTKKSLELASLFCVFPKENYNFIHDFILEILIGIIFIIILMKLSEKNNLFKFYKFINPFLIGTLVIIINLFLTSYSNITLNPARDLGPRIFLSLIGWGKLAFTGDDNIIFPYFLIPTIAPIIGINLGGWIYILYIKK

SEQ ID NO: 3176 - protein, 414 aa, Rickettsia conorii
MTEKLQPLRGMKDLLPDDYKVHDYIINKARDVGVLYGYKQMSTPIVEYTKVFNRSMGESSDVISKEIYSFLDKSNDFVALRPEFTACIIRSLISNRLQHKLPLKFFSTGPVFRYDRPQAGRQRQFHQLNYEYIGAKGAITDADTLKLAVDILKALEIEQDTTLELNSLGCNESRSVYQQKLVEYLNDFKDQLSEESKIRLSKNPMRILDSKSETDQKIIANAPVLSEYYTDESKEYFEELIQYLDILGVKYSINPRLVRGLDYYCHTAFEFTTKKLGSQSTILAGGRYDGLAKIMGNNDDVPAIGFAAGIERIALMREYNISEVKPVFVLPIGKNNICYALEIVDKLRTENIAIIIESLGKIAKRMQRIFNENAQFIIFIGDEEQANNNLKIKDLKKAEEYIVDFAKALELLKK

SEQ ID NO: 3177 - protein, 419 aa, Mesorhizobium loti
MDIDIFEAYESNVRRYGRSFPTVFTKSLGATIWDESGKPYIDFIVGSGALNYGHNNQDIMAPAIQYLANQNIVLSLDMYTTAKRDFIEVFVNSILKPRGLSYKIQFPGPTGTNANEAALALARKYTGRSSVMAFTNSYHGMSLGSLAVSGSASTRQLGGVARHDVIRVPYENYPNQTFDSASYIDHVLGDPGSGIEKPAAIILEPIQAEGGMNTASAPWLAEIQRICRKHDVVFIVDDIQAGSGRTGDFFSFEFAKVEPDIVCLSKSLSGSGNPLSIVLIRPEMDIWKPGEHSGTFRGNNLAFVTSAAMCKMWSDRQFTKAVEGTAVKLQEHLDRLVAKFPKCIEQKRGRGLMAGLKCRSQAVVGRVHDVAFENGLLIESSGPNRDVIKVLPPITISDDELDHGIAILDQALQEKTNGD

SEQ ID NO: 3178 - protein, 227 aa, Oryza sativa
MAVLPYKDSLLLLSRYLQQLVMESLGKEFDLDGNRVNQGLTVYGNKGSTDQHAYIQQLREGVHNFFVTFIEVLRDRPPGHEWELEPSVTCGDYLFGMLHGTRSALYANDRESITVTVQEVNPRAVGALVALYERAVGLYAYLININAYHQPGVEAGKKAAGEVLALQKRILLVLNEASCKDPAEPLTLDQIADRCHCPEEVTQGNCGSPRSIKVYLGECNVDDDMNS

SEQ ID NO: 3179 - protein, 287 aa, Eremothecium gossypii
MSSVAVVLNNATTIDAGPELRGVFERCVPFLDAQRSVLDIILLEPFDSPTSLDLTLLKIYGTSRNILLKQKLYTTPINVLFNVSMEAYSRMKWDVVFLSDRLLQDAFPHRQIELFDSPAMAAAGPVESGGRDKYAVSALGGTFDHLHDGHKILLSVAALVTASRLIVGITDEELLRNKKYREQLQSFDERCDNVCSFLHRLKPGLEIKIFALHDVCGPTGSEPGIEALVVSEETVAGAQTINDTRESKGMRKLAVHVVNVLGGEEADKWKNKLSSTELRRRLMNEDS

SEQ ID NO: 3180 - protein, 375 aa, Helicobacter pylori 26695
MTFEPYPFERLRALLKEITPKKRGLDLGIGEPQFETPKFIQDALKNHTHSLNIYPKSAFEESLRAAQRGFFKRRFKIELKENELISTLGSREVLFNFPSFVLFDYQNPTIAYPNPFYQIYEGAAKFIKAKSLLMPLTKENDFTPSLNEKELQEVDLVILNSPNNPTGRTLSLEELISWVKLALKHDFILINDECYSEIYENTPPPSLLEACMLAGNEAFKNVLVIHSLSKRSSAPGLRSGFIAGDSRLLEKYKAFRAYLGYTSANAIQKASEAAWLDDRHAEFFRNIYANNLKLARKIFKNTLIYPYSFYVYLPVQNGENFAKTLYQNEGIITLPALYLGRNRIGADYVRLALVYDTPLLEKPLEIIETYRENHA

SEQ ID NO: 3181 - protein, 202 aa, Magnaporthe grisea 70-15
MNPEYDYLFKLLLIGDSGVGKSCLLLRFADDTYTESYISTIGVDFKIRTIELDGKTVKLQIWDTAGQERFRTITSSYYRGAHGICVVYDVTDMDSFNNVKQWLQEIDRYATEGVNKLLVGNKSDMADKKVVDYTVAKEFADSLGIPFLETSAKNANNVEQAFLTMARQIKERMGTTTTNNSKPSVQVGPGQGVGSNQSNSCC

SEQ ID NO: 3182 - protein, 786 aa, Brucella melitensis 16M
MLAGHGGQALCLQDEEMSKGKKTGFIGKRSSAAGGWGALKSCGQQLLASGAPLAGARALLKANQPDGFDCPGCAWGDPEHGSSFEFCENGVKAVAWEATDRRTTPAFFREHTVSKLREWTDYDLENTGRLTHPMRYNTATDKYEAVEWDEAFQAIGGILKSFDTPDRVEFYTSGRASNEAAFLYQLFVRAYGTNNFPDCSNMCHEASGVALTQSVGVGKGTVLLEDFEQADAIFVVGQNPGTNHPRMLGDLRRAAERGARIVAFNPVRERGLERFADPQDKLEMLHGGSEPITSDYFQPRLGGDLAAFRGMAKAVFAADDAALAAGRPSVLDRAFLAAHTAELEAYRAAVDATSWDEIEDQSGLLRQSLERAAEIYMQAGRVICTWAMGITQHRHSVITIREITNFMLLRGNIGKPGAGLCPVRGHSNVQGDRTVGINEHPPVAFLDALEREFGFKPPREPGHNVLGAIGAMLDGTAQAFVALGGNFARATPDSPIISRALSSQRLTVHIATKLNHSHLVPGRDSFILPCLGRTEIDLNSKGVAQIVTVEDSMSMVHGSGGINQPASPLLRSEVAIIAGMANATLGPKPVDWLALADDYDLIREHIARVLPDFHDYNRRVRVPRGFHLRNAARDLEWNTPTGKATFWTGALPQAIEHQQVRDKPGRYVLQTFRSHDQYNTTIYGMNDRYRGVYGERHVVFMNPLDMADLGVEAGDRADIVGEFDDGVERVAANFRFVPYDIPRGCIAGYYPEMNVLVPLGSAGDESDTPTSKSIIVSFRLNRTKAA

SEQ ID NO: 3183 - protein, 654 aa, Allochromatium vinosum
MATSSDEMKMKPTWRRFEDGEHVWDNLTDKIFNQDRSHKCPTYVHKTPPCQGSCPSGEDIRGWLQIVRGMEKPPQGMDWQEYAFRRSTDANPFPAMMGRVCPAPCQDGCNRNELEDFVGINSVEQFIGDTAIANGYTFEAPELDTGKRIAIVGGGPAGLAAAYQLRRKGHSCTIFEANDGLGGMFRFGIPGYRVPRDKLDAEIQRILDMGRVEVRLKTRIGTDVTVEQLEKDYDAILWAIGCQSGRGLPVPGWEGTPNCVTGVAFLKAFNEGRMKVTAGKVVCVGGGDTSIDVVSVARRLGHVNKSNPNELPETVIRDGYVAHDAASAAAAQGAEVTLTSLFTRDKMTASEHEVDDATREGVTILDGVMPVEVIKDANGRAIGLKVADCTMTDGRPTPVEGTERVLEADLIVSAIGQGGDLSGLEQLDNGRGLMDSDKFYQVPGKAGHFVAGDIIRPHLLTTAIGQAWIAADSIDAYVMQAEHKRRPKVDVHHFNLLDKLTEAHLAPESFVAGQAGDMRGTSDANYAIHNYEDRSGAEVIPHEELFLGHFNYVPRNLRKEEVPSADEVLGHFHERVIGLTEPEAIDEAKRCMSCGLCFECDNCVIFCPQDAVFRVDKGSRTTGRYVDTDYAKCIGCHICADVCPTGYIKMGLGE

SEQ ID NO: 3184 - protein, 491 aa, Zea mays
MDPYKHRPSSAFNAPYWTTNSGAPVWNNDSSLTVGARGPILLEDYHCEKLANFDRERIPERVVHARGASAKGFFEVTHDITHLTCADFLRAPGVQTPVIVRFSTVIHERGSPETLRDPRGFAVKFYTREGNWDLVGNNFPVFFIRDGIKFPDMVHALKPNPRTHIQDNWRILDFFSHHPESLHMFSFLFDDVGIPADYRHMDGSGVHTYTLVSRAGTVTYVKFHWRPTCGVRSLMDDEAVRCGANHSHATKDLTDAIAAGNFPEWTLYIQTMDPEMEDRLDDLDPLDVTKTWPEDRFPLQPVGRLVLNRNIDNFFAENEQLAFCPGLIVPGIYYSDDKLLQTRIFSYSDTQRHRLGPNYLLLPANAPKCAHHNNHYDGSMNFMHRHEEVDYFPSRYDAVRNAPRYPIPTAHIAGRREKTVISKENNFKQPGERYRAMDPARQERFITRWVDALSDPRLTHEIRTIWLSNWSQADRSLGQKLASRLSAKPSM

SEQ ID NO: 3185 - protein, 430 aa, Erwinia carotovora subsp. atroseptica SCRI1043
MKMKKLLSSLGLGVAALLPSWAMAATPTIDKADNAFIMICTVLVLFMTIPGIALFYGGLIRSKNVLSMMTQVSVTFAMVCILWVVYGYSLAFSEGNAFFGGFSTFMLKGIGIESISGTYYQFVHVAYQASFACITVALIVGAIAERIRFSAVLIFVGLWLTFSYLPMTHMVWGGGYLAMDGALDFAGGTVVHINAAVAGLVGAYLLGKRAGFGKEAFKPHNLPMVFIGTAILYIGWFGFNAGSAGAANGVAALAFLNTVVATAAAILAWVGGEWLVRGKPSLLGACSGCIAGLVAITPAAGTVGVGGALIIGLAGGVAGLWGVTVLKRWLRVDDPCDVFGVHGVCGIVGCILTGVFTSASLGGTGYAEGVTMAHQVWVQLFSVIVCLVWSGVVAFVAFKVADMIVGLRVPEEQEREGLDVNSHGESAYNQ

SEQ ID NO: 3186 - protein, 486 aa, Pseudomonas sp. KL28
MRQIENFIAGEFVASASGKRFDKHSPLDNRIICSVSEAGRGEVDAAVRAARSALQGEWGGLTTEQRIELLYGVANEITRRFDDFVEAEMSDTGQPEHVMKHVFIPRGAANFKVFADVIKNVASESFQMDTPDGRGALNYSIRRPKGVIGVVCPWNAPFMLMTWKVGPALACGNTVVVKPSEESPQTAALLGEVMNAVGIPKGVYNVVHGFGPDSAGEFVTRHPQVDAITFTGETRTGTAIMKAASEGMRDVSFELGGKNAGIVFADADFEAAVESFSRSVFLNTGQVCLGTERVYVERPIFERFVQALKVKAEAVKYGRPDDHQANYGPLISQEHKQKVLSYYRKAVEEGATLVTGGGVPQMPGELAEGAWVQPTIWTGLPETAAVVQEEIFGPCCHISPFDSEDEVVEKANATDYGLSTTIWTSNLARAHRMAGRIDVGITWINSWFLRDLRTPFGGSKQSGIGREGGVHSLEFYTETRNVCVKL

SEQ ID NO: 3187 - protein, 125 aa, Agrobacterium tumefaciens str. C58
MVPQRVIVVEDEYLVALDVEAVLQSMGVESIIIATTLAQARQVVEQDGADCVLLDVSLSDGKSYDFARQLRMAGIPFGFVSGYGDTTGFPDDLLHSPLLGKPFGETEIMDFVLRLVGMPRDAVKE

SEQ ID NO: 3188 - protein, 492 aa, Triticum aestivum
MDPYKHRPTSGANSGYWTTNSGAPVWNNNNALTVGQRGPILLEDYHLIEKLAQFDRERIPERVVHARGASAKGFFEVTHDVSQLTCADFLRAPGVQTPVIVRFSTVVHERGSPETLRDPRGFAVKFYTREGNFDLVGNNMPVFFIRDGMKFPDMVHAFKPSPKTNMQENWRIVDFFSHHPESLHMFTFLFDDVGIPLNYRHMDGFGVNTYTLISRDGKAHLVKFHWKPTCGVKCLLDDEAVTVGGTCHTHATKDLTDAIAAGNYPEWKLFIQTIDADHEDKFDFDPLDVTKTWPEDIIPLQPVGRMVLNKNIDNFFAENEQIAFCPAIIVPGIHYSDDKLLQTRIFSYADTQRHRLGPNYLMLPVNAPKCAHHNNHHEGFMNFMHRDEEVNYFPSRFDPTRHAEKVPIPPRVLTGCREKCIIEKENNFKQAGERFRSFDPARQDRFIQRWVDALSDPRVTHEHHTIWINYWSQCDASLGQKLASRLNLKPNM

SEQ ID NO: 3189 - protein, 200 aa, Hordeum vulgare subsp. vulgare
MASKSKGLVVLALLLAAAILVASADEHPQAKKEENEAGVENFFHGGGGHHGHGRGGHGGGGYGGGGGYGGGGGGYPGGGGGYGGGGGGYPGHGGEGGGGYGGGGGYPGHGGEGGGGYGGGGGYHGHGGEGGGGYGGGGGYHGHGGEGGGGYGGGGGGYPGHGGGGGHGGGRCKWGCCGHGFLHHGCRCCARADEVPEVRN

SEQ ID NO: 3190 - protein, 496 aa, Streptomyces avermitilis MA-4680
MADPKGFLTTPREEWPRRPVEERVRDWDEVYVPGALLPIISRQADRCMDCGVPFCHEACPLGNLIPEWNDLVSREDWRAASDRLHATNNFPEFTGRLCPAPCEAGCVLAINQPAVTIKNVEVAIADRAWADGFTPPCPPERLSGRTVAVVGSGPTGLAAAQQLTRAGHTVAVFERADRIGGLLRYGIPAFKMEKRHLNQRLEQMRDEGTKFRTSTAIGRDIGAEELRARYDAVVLAVGATAWRELDVPGRELAGIHQAMEYLPLADRVCEGDLEVSPLSAAGKHVIIVGGGDTGADCLGTAVREGAASVTQLDIYPLPEAERDEDIEPWPVYPKIYRMSPAHEEARDLKTAPAADADARLFAASTLRFAGDAAGHVRALHLVEVDARRRPLPGSGRTLPADLVLLALGFSGPDRDDGLVDQLGLALDPRGTITRDADFATNVPGVFAAGDAARGQSLIVWAIAEGRAVAAAVDRRLTGAASKLPAPIGPYDRPMRA

SEQ ID NO: 3191 - protein, 450 aa, Bordetella pertussis Tohama I
MAFDFDLYVIGAGSGGVRAARFAAGYGARVAVAESRYLGGTCVNVGCVPKKLLVYGAHFHEDFEQAAGFGWNPGRPEFDWPTLIANKNREIERLNGIYRNLLVNSGVALHEGHARIVDPHTVEINGQRHSAQHILVATGGWPFVPDIPGKEHAITSNDAFFLPELPRRVLVVGGGYIAVEFASIFDGLGAQTVQVYRRELFLRGFDGSVREHLRDELVKKGLDLRFNTDVERIDKRADGVLAVTLSDGSVLETDCVFYATGRRAMLDDLGLENTGVRLAESGYIEVDDEYRTSEPSILAIGDVIGRVPLTPVALAEGMAVARRLFRPQEYRKVDYDLIPTAVFSLPNIGTVGLTTEQALERGFRVTRYESRFRPMKLTLTQSQEKTLMKLVVDADSQKVLGCHMVGPDAGEIVQGLAVALKAGATKQVFDDTIGIHPTAAEEFVTMRTAT

SEQ ID NO: 3192 - protein, 518 aa, Glycine max
MPAVGGINTGGGKEYPGSLTLFVTVTCIVAAMGGLIFGYDIGISGGVTSMDPFLLKFFPSVFRKKNSDKTVNQYCQYDSQTLTMFTSSLYLAALLSSLVAATVTRKFGRKLSMLFGGLLFLVGALINGFAQHVWMLIVGRILLGFGIGFANQSVPLYLSEMAPYKYRGALNIGFQLSITVGILVANVLNYFFAKIKGGWGWRLSLGGAMVPALIITVGSLVLPDTPNSMIERGDREKAKAQLQRIRGIDNVDEEFNDLVAASESSSQVEHPWRNLLQRKYRPHLTMAVLIPFFQQLTGINVIMFYAPVLFSSIGFKDDAALMSAVITGVVNVVATCVSIYGVDKWGRRALFLEGGVQMLICQAVVAAAIGAKFGTDGNPGDLPKWYAIVVVLFICIYVSAFAWSWGPLGWLVPSEIFPLEIRSAAQSINVSVNMLFTFLIAQVFLTMLCHMKFGLFLFFAFFVLIMTFFVYFFLPETKGIPIEEMGQVWQAHPFWSRFVEHDDYGNGVEMGKGAIKEV

SEQ ID NO: 3193 - protein, 360 aa, Azotobacter vinelandii
MSKQILVLPGDGIGPEIMAEAVKVLQLANEKYQLGFVLGYDELGGAAVDKYGVPLADETLERARAADAILLGAVGGPKWDAIDPAIRPERGLLKIRSQLGLFGNLRPALLYPQLAEASTLRPEVVAGLDILIVRELTGGIYFGAPRESRLLANGERMAYDTLPYSESEIRRIAKVGFDMARVRGKKLCSVDKANVLASSQLWRAVVEEVAKDYPDVVLSHMYVDNAAMQLVRAPKQFDVIVTDNMFGDILSDEASMLTGSIGMLPSASLDADNKGMYEPCHGSAPDIAGKGIANPLATILSVSMMLRYSFGQVEAANAIEQAVSKVLDQGLRTGDIWSEGCRKVGTAEMGDAVVAALATL

SEQ ID NO: 3194 - protein, 200 aa, Campylobacter jejuni subsp. jejuni NCTC 11168
MKIILATSNKHKVLELKEILKDFEIYAFDEVLMPFEIEENGKTFKENALIKARAVFNALDEKQKKDFIALSDDSGICVDVLEGNPGIYSARFSGKGDDKSNRDKLVNEMIKKGFKQSKAYYVAAIAMVGLMGEFSTHGTMHGKVIDTEKGENGFGYDSLFIPKGFDKTLAQLSVDEKNNISHRFKALELAKIILKILNKG

SEQ ID NO: 3195 - protein, 501 aa, Oryza sativa (japonica cultivar-group)
MLLPPLVVGSTMASLASLSLPVSTASQGRARGAGPVTAAPRRRRVSVVRAKVREIFMPALSSTMTEGRIVSWTAAEGDRVAKGDPVVVVESDKADMDVETFYDGIVAVVLVPAGESAPVGAPIALLAESEEEVAVAQARAQALPRGPGQEPPPPHVPKAAPPPPPPPPPHAPPGPPPTKGVATPHAKKLAKQHRVDISMVVGTGPHGRVTGADVEAAAGIKPKLKGPKGAPPPPPPPPPSPHRHPAAHPPPPPHHPAPRPPPPMAAAPRQPAALPPVPGATVVPFTTMQAAVSRNMMESLSVPTFRVGYAVCTDKLDALCEKVKSKGVTKTLLLVKAAAMALTQHPVVNASCRDGKSFSYNSSINIAVAVAIEGGLLTPVLEDVDKLDVYLLAQKWRGLLKKARMKQLQPDEYSSGTFTLSNLGMFGVDRFDAILPPGQGAIMAVGGSRPTLVANKDGFFSIKNEMLVNVTADHRIIYGADLAAFLQTFAKIIEDPESLTL

SEQ ID NO: 3196 - protein, 416 aa, Zea mays
  unsure (1)..(416): unsure at all Xaa locations
MDNHIHSQPAANLYYQFGMGTEQQYPPPFASPPSTNIPHMDWNPATMLDNLTFIEEKIQQVKDVIRTMVDNAGQVQVQCHHQGRRAXAQKQKQQVVNADLTCLIVQLISTAGSLLPSLKNSSFLSHPHPAGHVDMANHVGPSSSLVPNAMTVSEDYEELFKGWTDGGIEVDDDGVLVEEQEITKDGDSLSYELLQLEEDEILAPHTHFCTICGKGFKRDANLRMHMRGHGDEYKSPAALAKPPRDPGAEQEPAKRRYSCPFAGCKRNKLHKSFQPLKTILCVKNHYRRSHCEKSHTCGRCHAKKFSIVADLRTHEKHCGRRDRWVCSCGTSFSRKDKLFAHVALFQGHTPALSSPLEEEPPKACSDQHQTGRAGSRREPAKVPAGSVGGGSGSSSSIRVGCLVLRGEQCSGYQRFC

SEQ ID NO: 3197 - protein, 341 aa, Petroselinum crispum
MALDLMNNNSYKFRSKMEETAVQEAAAAGLQSVENLIKAISQSNHQTAYLSSSSSSETGDTDYRAVTDVAVNKFKKFISLLDKNRTGHARFRRGPVQEKTGVEMLVNPIQNQIQNHGSDGFQVYRPTAVHPVQPVQPVQIQPVQLVQPVQRLPPVPKKENISTTINFAAPAVAVAAPATSFMSSLTGDTDGSGFQITNMSGFSSGSRPVSSLKRKCSSMNDVSAKCSGSSSGRCHCPKKKKLRVKKVVRMPAISMKTSDIPPDDFSWRKYGQKPIKGSPHPRGYYKCSSVRGCPARKHVERAVDDPTMLIVTYEGEHNHSQSSNENTNTSHILESDGLKQS

SEQ ID NO: 3198 - protein, 504 aa, Zea mays
  unsure (1)..(504): unsure at all Xaa locations
MPPPQATSLLKHVTGTASLQGNADSLLDGTXRHFGSAPSAQPEENGFXGHGMLAPFTAGWQSNXHLHPLIIERSEGSYVYDINGXKYLDSLAGLWCTALGGSKPRLVKAATEQLNKLPFYHSLWNRTTKPXLDLTQKIVSMFTAREIRGKXFFANSGSEANDSQVKLVSYYNNALGRPNNKKFIARSKANHGSTMISASLICLPAQHHEFFLLAPFVLQTDXPHYWRNHLPGVKVEDFATRLATNLENLIRKEGPETIAAFIAEPVMGAGGVIPPPKTYFDKVQAIVKXVCTFFSITDEVITAFGRLGTMFGCDYYNXKPDLVSLAKALSNAYVPIGATLVSPEISDVIHSQSNKLGSFAHGFTYSGHPVACAVAIEALKLYRERDIPGHVKQIXPKFQDGIRALADSPIIGEIRGLGMIMGXEFTNNKFTGLILFPAEWGVGAIFGEECQKRGIAGGGSLATPIMMSPTLIMTTGEVDELVRIYGEALKATEERVAALQSKKN

SEQ ID NO: 3199 - protein, 462 aa, Chlamydophila caviae GPIC
MSTDFDCVVIGAGPGGYVAAITAAQQGLKTALIEEQQAGGTCLNRGCIPSKALLVGAGIVSQIKHAKQFGIHIDGYSVDYPTMVQRKNTVINGIRQGLEGLIRSNKITVLNGRGSLISSTEVRVKGQDTTVIKAKHIIIATGSESRPFPGVPFSSRVLCSTGILNLTELPKKLAIIGGGVIGCEFASLFNTLGVEVTIIEVADQILSVNNADISKTMLDKFSQRGIQVITRASINQLEDLGDRVKITVNDQPQEYEYVLVAIGRQFNTTDIGLDNAGVIRDERGVIPVDEMMRTNVANIFAIGDITGKWLLAHVASHQGIVAGRNAAGHNEIMDYSAVPAVIFTFPEVAMVGLSLEAAQKQNIPAKLTKFPFKAIGKAVAMAEADGFAAIISHETTQQILGAYVVGPHAASLIAEMTLAVRNELTLPCIYETIHAHPTLAEIWSESALLATNHPLHLPPPRL

SEQ ID NO: 3200 - protein, 560 aa, Arabidopsis thaliana
MASSTALICDTEAWKDLKGHVEDIKKTHLRDLMSDANRCQSMMMEFDGLLLDYSRQRATVETMDKLLNLAKASQLTEKISRMFNGEHINSTENRSVLHVALRAPKDAVIKADGMNVVPEVWNVLDKIKEFSDKIRSGSWVGATGKPLKDVIAIGIGGSFLGPLFVHTALQTDPEALESAKGRQLRFLANIDPVDVARNISGLNPETTLVVVVSKTSTTAETMLNARTLREWITAALGASAVAKHMVAVSTNLALVEKFGIDPNNAFAFWDWVGGRYSVCSAVGVLPLSLQYGFSMVEKFLKGASSIDQHFQSTPFEKNIPVLLGLLSVWNVSFLGYPARAILPYSQALEKFAPHIQQVSMESNGKGVSIDGLPLPFETGEIDFGEPGTNGQHSFYQLIHQGRVIPCDFIGIVKSQQPVYLKGEVVSNHDELMSNFFAQPDALAYGKTPEQLQKENVSENLIPHKTFSGNRPSLSLLLPELTAYNVGQLLAIYEHRVAVQGFVWGINSFDQWGVELGKVLATQVRKQLHSSRTQGTAPEGFNYSTTTLLKRYLETSSEPQM

SEQ ID NO: 3201 - protein, 401 aa, Desulfovibrio desulfuricans G20
MNAADTAFILVCSALVMFMTPGLALFYGGLVRSRNVLSTTMHSVALLGIASLVWWAVGYSLAFGSDHGGIIGGLEYLFLHNVGTEPGPVDNLPHLLFMVFQCMFAVITPALISGAYAERIRFGAMVLFSVLWLVLVYAPMAHWVWGGGWMARLGALDFAGGAVVHMSSAAAALAAANVLGLRRGYGREAFIPHNLPMTVLGAGILWFGWFGFNAGSALAANGAAANAFVTTHLAAAAALVGWLAVEKLHGGRATTLGAASGAVAGLVAITPAAGFVTPASAVFIGLAGGVLCYGGVFLKHKLRYDDALDVVGIHGVGGTWGALATGIFADAAVGGADGLLHGNAYQLWVQFVSVVATWLFCYVASWLLFKAVDAVMGLRVSGEAELAGLDVSEHNETAYQM

SEQ ID NO: 3202 - protein, 147 aa, Triticum aestivum
  unsure (1)..(147): unsure at all Xaa locations
GCPSRDVSVHPAPVWPTLAVSLHAPNQRLRETIVPSAKAYPLEALMDDCKNYFLETETQXVSFEYTLLAGINDEKAHAEELAALLHACGGGYHVNLIPYNPVEGSEYXRPYRKAIQAFVDALESRXKMTVSVRQTRGLLSSAIDRWP

SEQ ID NO: 3203 - protein, 177 aa, Lemna gibba
MASSMMASTAAVARAGPAQSNMVAPFNGLRSSVAFPATRKANKNLSTLPSNGGKVSCMQVWPPEGLKKFETLSYLPPLSVEDLAKEVDYLLRNDWVPCIEFSKEGFVYRENHASPGYYDGRYWTMWKLPMFGCTDASQVIAEVEEAKKAYPEYFVRIIGFDNKRQVQCISFIAYKPT

SEQ ID NO: 3204 - protein, 177 aa, Lemna gibba
MASSMMASTAAAVARAGPAQSSMVPFNACRSSVPFPATRKANNNLSTLPGNGGRVSCMQVWPPEGLKKFETLSYLPPLSVEDLAKEVDYLLRNDWVPCIEFSKEGFVYRENHASPGYYDGRYWTMWKLPMFGCTDASQVIAEVEEAKKAYPEYFVRIIGFDNKRQVQCISFIAYKPT

SEQ ID NO: 3205 - protein, 177 aa, Lemna gibba
MASSMMASTAAAVARAGPAQTNMVPFNACRSSVPFPATRKANNDLSTLPSNGGRVSCMQVWPPEGLKKFETLSYLPPLSVEDLAKEVDYLLRNDWVPCIEFSKEGFVYRENHASPGYYDGRYWTMWKLPMFGCTDASQVIAEVEEAKKAYPEYFVRIIGFDNKRQVQCISFIAYKPT

SEQ ID NO: 3206 - protein, 311 aa, Bacillus subtilis
MLSYADSTNSSCMFPAFVIFYFHNTYGLEDNSSKEGKPLKIGFIGTGNMGTILIESFIESKAADPSNMTITNRTIEKALHIKNRYNSINVTESLEKLVSENEMIFICVKPLDIYPLLARALPYLRKDHILISITSPVQTEQLEQYVPCQVARVIPSITNRALAGVSLVTFGTSCGESAKAKINELMQHISQALQIESDITRVASDIVSCGPAFMSYLIQRFIDAAVSETSVSKQDAILMCKEMLVGMGKLLETELYTLPALQEKVCVKGGVTGEGIKALESGVQDMFHRVFQNTHMKYEEDISAVKKQFHV

SEQ ID NO: 3207 - protein, 523 aa, Aspergillus fumigatus
MIEKILSKRGYNWFISLVAAACMVLYGYDASVYNSVQGSKNWVKFFNDPDENMIGAVNTAYTVGAIFGGFFLGGPIADYLGRKIGMGVGCVLVIASTFMQTWSPRGNIGCFLAGRLIIGIGQGIALSEYPLPMESAGPIYIGELAPPEIRGKIMTFWQMFYSVGSFICFWVNYGCTQHKENLGEWDWKMVVIFQLLVPSLILALLPTIPGSPRWFLQRGDNVEKARAALRRVRETEEEVEEEILRIREALEYEKEAISSNYSALWKDKSLRKRMALALVINAGQQVTGQGSLNSYSTKIYQKVFPSAGTIALINALNATFGIIFTLNAVWIIDRFGRKFLLIVGGIGMGLCMIIAAAVETETPSPNGVKTEPVGISIVFLLFLFIFFSNILISDKPSWGATVWIWTSEVFSMNVRAQAVGMASQTQNVANAIVQQFFPIFLKNCGFYAFYMFAGVNFLLALFVWFFIPETKQVPLEEIDALFGGANHVTHGERMMIGEKEKHFEDQANEKGDAVTIENLEARR

SEQ ID NO: 3208 - protein, 389 aa, Pseudomonas syringae pv. syringae B728a
MLMTVLKMTDLDLQGKRVLIREDLNVPVKDGVVSSDARILASLPTIRLALEKGAAVMVCSHLGRPTEGEFSAENSLKPVADYLSKALGRDVPLVADYLDGVDVKAGEVVLFENVRFNKGEKKNADELAQQYAALCDVFVMDAFGTAHRAEGSTHGVAKFAKVAAAGPLLAAELEALGKALGAPAQPMTAIVAGSKVSTKLDVLNSLSGICNQLIVGGGIANTFLAAAGHKVGKSLYEPDLLDTARAIAAKVSVPLPTDVVVAKEFAESAAATVKLIADVADDDMILDIGPQTAAHFAELLKSSGTILWNGPVGVFEFDQFGEGTKTLAKAIAESQAFSIAGGGDTLAAIDKYGVAQQISYISTGGGAFLEFVEGKVLPAVEVLEQRAKA

SEQ ID NO: 3209 - protein, 506 aa, Zea mays
  unsure (1)..(506): unsure at all Xaa locations
MASPAMVPLRQLFVDGEWRPPAQGRRLPVVNPTTEAHIGEIPAGTAEDVDXAAVAAARAALKRNRGRDWARAPGAVRAKYLRAIAAKVIERKPELAKLEALDCGKPYDEAAWDMDDVAGCFEYFADQAEALDKRQNSPVSLPMETFKCHLRREPIGVVGLITPWNYPLLMATWKVAPALAAGCAAVLKPSELASVTCLELADICKEVGLPPGVLNIVTGLGPDAGAPLSAHPDVDKVAFTGSFETGKKIMAAAAPMVKPVTLELGGKSPIVVFDDVDIDKAVEWTLFGCFWTNGQICSATSRLLIHTKIAKKFNERMVAWAKNIKVSDPLEEGCRLGPVVSEGQYEKIKKFISNAKSQGATILTGGVRPAHLEKGFFIEPTIITDITTSMEIWREEVFGPVLCVKEFSTEDEAIELANDTQYGLAGAVISGDRERCQRLSEEIDAGCIWVNCSQPCFCQAPWGGNKRSGFGRELGEGGIDNYLSVKQVTEYISDEPWGWYQSPSKL

SEQ ID NO: 3210 - protein, 693 aa, Nicotiana tabacum
MTTSFGAAINIAVADDPNPKLQIHNFSGLKSTSNSLLLSRRLHVFQSFSPSNPSSIVRAVSTPAKPAAVEPKRSKVEIFKEQSNFIRYPLNEEILNDAPNINEAATQLIKFHGSYMQYDRDERGGRSYSFMLRTKNPGGEVPNRLYLVMDDLADQFGIGTLRLTTRQTFQLHGVLKKNLKTVMSTIIKNMGSTLGACGDLNRNVLAPAAPFAKKDYMFAKQTADNIAALLTPQSGFYYDVWVDGEKVMTAEPPEVVKARNDNSHGTNFPDSPEPIYGTQFLPRKFKIAVTVPTDNSVDIFTNDIGVVVVSNEDGEPQGFNIYVGGGMGRTHRMETTFPRLAEPLGYVPKEDILYAVKAIVVTQRENGRRDDRRYSRLKYLLSSWGIEKFRSVTEQYYGKKFQPCRELPEWEFKSYLGWHEAGDGSLFCGLHVDNGRVKGAMKKALREVIEKYNLNVRLTPNQNIILCNIRQAWKRPITTVLAQGGLLQPRYVDPLNLTAMACPAFPLCPLAITEAERGIPDILKRVRAIFERVGLKYSESVVIRITGCPNGCARPYMAELGLVGDGPNSYQIWLGGTPNQTSLAKTFKDKLKVQDLEKVLEPLFFHWRRKRQSKESFGDFTNRMGFEKLGEFVEKWEGIPESSSRYNLKLFADRETYEAMDALASIQDKNAHQLAIEVVRNYVASQQNGKSMD

SEQ ID NO: 3211 - protein, 523 aa, Escherichia coli CFT073
MTLEYEVVAMSVSKKPMVLVILDGYGYREEQQDNAIFSAKTPVMDALWANRPHTLIDASGLEVGLPDRQMGNSEVGHVNLGAGRIVYQDLTRLDVEIKDRAFFANPVLTGAVDKAKNAGKAVHIMGLLSAGGVHSHEDHIMAMVELAAERGAEKIYLHAFLDGRDTPPRSAESSLKKFEEKFAALGKGRVASIIGRYYAMDRDNRWDRVEKAYDLLTLAQGEFQADTTVAGLQAAYARDENDEFVKATVIRAEGQPDAAMEDGDALIFMNFRADRAREITRAFVNADFDGFARKKVVNVDFVMLTEYAADIKTAVAYPPASLVNTFGEWMAKNDKTQLRISETEKYAHVTFFFNGGVEESFKGEDRILINSPKVATYDLQPEMSSAELTEKLVAAIKSGKYDTIICNYPNGDMVGHTGVMEAAVKAVEALDHCVEEVAKAVESVGGQLLITADHGNAEQMRDPATGQAHTAHTNLPVPLIYVGDKNVKAVEGGKLSDIAPTMLSLMGMEIPQEMTGKPLFIVE

SEQ ID NO: 3212 - protein, 476 aa, Oryza sativa (japonica cultivar-group)
MDGRKDVGILAMDIYFPPTCVLQESLEAHDGASKGKYTIGLGQDCMAFCSEVEDVISMSMTVVTSLLKKYKVDPKLIGRLEVGSETVIDKSKSIKTWLMQIFEECGNTDIEGVDSSNACYGGTAALLNCVNWVESNSWDGRYGLVVCTDSAVYAEGPARPTGGAAAIAMLIGPNAPIAFESKYKASHMAHVYDFYKPDLASEYPVVDGKLSQTCYLMALDSCYRQFCKKYEKLAGKQFSISDADYFVFHSPYNKLVQKSFARLYYNDFTRDCSSVDNDAKEKLQPFSNLTGEESYQSRDLEKASQQVAKPLYDIKVQPSTLLPKQIGNMYTASLYAALASVLYNKHASLDDQRIVMFSYGSGLTSTMFSLKLNNGQDPFSLSNIASVLNATEKLESRHMTLPEKFVETLKLMEHRYGAKDFETCKDTSLLPPGTFYLTRVDSMYRRFYERKADEEIAAAKAKYSNGHATNGYANGH

SEQ ID NO: 3213 - protein, 183 aa, Clostridium perfringens str. 13
MIRDIKDDVKKVLYSEEQLAKRVKEMAEEISKDYAGKDLLVVGILKGSVLFTSDLIKNISIPCEIDFMAVSSYGNSAQTSGVVRILKDLDSDIENKHVLIVEDIVDTGTTLSYLLEYLKARKAASIEIVALLDKEARRTSNVSAKYKGFDVPDEFIVGYGIDYAEKYRNLPFIGALKEEIYNK

SEQ ID NO: 3214 - protein, 497 aa, Micrococcus luteus
VPHATGSTRENGAPAVSDRESLTVGSEGPIVLHDVHLLETHQHFDRMNIPERRPHAKGSGAFGVFEVTEDVSSYTKALVFEPGVETEVLLRFSTVAGENGSPDTWRDTRGFALRFYTSEGNYDLVGNNTPIFFLRDPMKFTHFIRSQKRLPNSGLRDATMEWDFWTNNPESAHQVTYLMGPRGLPRTWREMDGYGSHTYLWVNAEGAKHWVKYHFISQEGVHNLSNDEATQIAGENADFHRQDLFEVIAKGVFPKWNLYIQAIPYSQGKTYRFNPFDLTKTISQANYPRIKVGVNTLNRNPKNFFAEIESAAFSPSNTVPGIGLSPDRMLLGRAFAYHDAQLYRVGAHVNQLPVNSPDDATHNYAFEGEMWEDHTGNRSTYVPNSDGNSWSNEVGPTNNGWEAVGVLTREAEALRANDNNFGEAGTLTREVFSNEERNNFVQTVAGALKGVRSNVEAEAFVYWKLVNATNGERIQNTVKRKSGNGIPGVEAGGEARM

SEQ ID NO: 3215 - protein, 521 aa, Zea mays
  unsure (1)..(521): unsure at all Xaa locations
MQFSSVLPLEGKACMSPVRRGSGGYGSERMRINCCSIRXNKALRRMCFSARGXLCSSTQCVLTSDAGPDTLVVRTSFRRNYADPNEVAAVILGGGTGTQLFPLTSTRATPAVPIGGCYRLIDIPMSNCFNSGINKIFVMTQFNSASLNRHIHRTYLGGGINFTDGSVEVLAATQMPGEAAGWFQGTADAXVRKFIWVLEDYYKHKAIEHILILSGDQLYRMDYMELVQKHVDDNADITLSCAPVGESRASDYGLVKFDSSGRVIQFSEKPKGAALEEMKVDTSFLNFAIDSPAEYPYIASMGVYVFKRDVLLDLLKSRYAXLHDFGSEILPKALHEHNVQAYVFTDYWEDIGTIRSFFDANMALCEQPPKFEFYDPKTPFFTSPRYLPPTKSDKCRIKDAIISHGCFLRECAIEHSIVGVRSRLNSGCELKNTMMMGADLYETEDEISRLLAEGKVPIGVGENTKISNCIIDMXCQGWKERLHNKQRGRPRSRPAGRRILXIRSGIVVVLKNATIKDGTVI

SEQ ID NO: 3216 - protein, 510 aa, Zea mays
MATAMGAMAATCMASIPAAATFPGDLGVGRRRAVVPGWRAGGRRLRATPPARRPFLFSPKGVSDSRSSQTCLDPDASTSVLGIILGGGAGTRLYPLTKKRAKPAVPLGANYRLIDIPVSNCLNSNVSKIYVLTQFNSASLNRHLSRAYGNNIAGYKNEGFVEVLAAQQSPENPNWFQGTADAVRQYMWLFEEHNIMEFLILAGDHLYRMDYQKFIQAHRETDADITVAALPMDEQRATAFGLMKIDDEGRIVEFAEKPKGEKLRSMMVDTTILGLDPERAKELPYIASMGIYVFSKDVMLRLLRENFPAANDFGSEVIPGATEIGLRVQAYLYDGYWEDIGTIEAFYNANLGITKKPVPDFSFYDRSAPIYTQPRYLPPSKVLDADVTDSVIGEGCVIKHCTINHSVVGLRSCISEGAVIEDSLLMGADYYETENDKNVLSETGGIPIGIGKNSHIRKAIIDKNARIGENVKIINFDNVQEAVRETEGYFIKSGIVTVIKDALIPSGTII

SEQ ID NO: 3217 - protein, 103 aa, Brassica napus
MTSSVTTLALTLVLIFHLTPEIAEARHLNDQKPTDEMKYLFPPGLPFTGVPPLPSLFPPFPGNVPRFPFPLPSQSSPPAPLGPLPSFPGVNFPPLPLLTPPPE

SEQ ID NO: 3218 - protein, 370 aa, Brucella melitensis 16M
MASRKLLLLPGDGIGPEAMAEVRKVIAFLNSDLNLGFETEEGLVGGCAYDAHGQAISDADMEKALAADAVLFGAVGGPKWDSVPYEVRPEGGLLRLRKDMQLYANLRPAICYPALAHSSSLKPEVIEGLDILILRELTGGVYFGEPKEIIDLGNGQKRGIDTQVYDTYEIERIADVAFELARTRRNKVTSMEKRNVMKSGVLWNQGVTARHKEKHADVQLEHMLADAGGMQLVRWPKQFDVILTDNLFGDLLSDVAAMLTGSLGMLPSASLGAADSKTGKRKALYEPVHGSAPDIAGKGIANPIAMIASLAMCLRYSFGLVAEADRLEAAIAGVLDDGIRTADIWSEGNTKVGTTEMGDAILAKFKALSA

SEQ ID NO: 3219 - protein, 177 aa, Lemna gibba
MASSMMASTAAVARAGPAQSSMVAPFNGLRSSVAFPATRKANNDLSTLPSNGGRVSCMQVWPPEGLKKFETLSYLPPLSVEDLAKEVDYLLRNDWVPCIEFSKEGFVYRENHASPGYYDGRYWTMWKLPMFGCTDASQVIAEVEEAKKAYPEYFVRIIGFDNKRQVQCISFIAYKPT

SEQ ID NO: 3220 - protein, 177 aa, Lemna gibba
MASSMMASTAAVARVGPAQTNMVAPFNGLRSSVAFPATRKANNDLSTLPSNGGRVSCMQVWPPEGLKKFETLSYLPPLSVEDLAKEVDYLLRNDWVPCIEFSKEGFVYRENHASPGYYDGRYWTMWKLPMFGCTDASQVIAEVEEAKKAYPEYFVRIIGFDNKRQVQCISFIAYKPT

SEQ ID NO: 3221 - protein, 189 aa, Larix laricina
MASSIMALSSTAAVAAVAAPSKTGNSNVVSAFTGLKSMAQFPSSKTMSNAGAEWEQKTTSNGSRVRCMQVWPPYANKKFETLSYLPRLTPEQLVKEVEYLLKNKWVPCLEFEEDGEIKRVYGNSPGYYDGRYWVMWKLPMFGCTEASQVLNEVNECAKAYPNAFIRVIGFDNVRQVQCISFIVHKPEYN

SEQ ID NO: 3222 - protein, 427 aa, Burkholderia fungorum LB400
MAIVEVKVPQLSESVSEATMLQWKKKPGEAVAQDEILIEIETDKVVLEVPAPSAGVLAQVIANDGDTVTADQVIAKIDTEGTASAAAVEAEVKPAPQAAPAPAAAPAPAAQAASATGANTAASPAAGKLMAEKGLGAGDVAGTGRDGRITKGDVLTAGAPAAKAAAPAPAAAPKAAKPSLPDVKAPASAEQWLKDRPEQRVPMSRLRARIAERLLESQQTNAILTTFNEVNMAPVMDLRNKYKDKFEKEHGVKLGFMSFFVKAAVHALKKFPLVNASIDGNDIVYHGYFDIGIAVGSPRGLVVPILRNADQLSLAEIEKKIAEFGQKAKDGKLSIEEMTGGTFSISNGGVFGSMLSTPIINPPQSAILGVHATKERAVVENGQIVIRPMNYLALSYDHRIIDGREAVLSLVAMKDALEDPARLLLDL

SEQ ID NO: 3223 - protein, 181 aa, Nicotiana sylvestris
MAFLIMSSAAAVATGTNAAQASMIAPFTGLKSATSFPVSRKQNLDITSIASNGGRVQCMQVWPPINKKKYETLSYLPDLSEEQLLREVEYLLKNGWVPCLEFETEHGFVYRENNKSPGYYDGRYWTMWKLPMFGCTDATQVLAEVEEAKKAYPQAWIRIIGFDNVRQVQCISFIAYKPEGY

SEQ ID NO: 3224 - protein, 476 aa, Burkholderia fungorum LB400
MSKEFDVVVIGAGPGGYIAAIRAAQLGKTVACIEKWKNPAGALKLGGTCLNVGCIPSKALLASSEEFENASHHLADHGISVENVKVDIAKMMARKEGIVEKMTKGIEFLFRKNKITWLKGHGKFTGKTDAGVQIEVSGEGETETVTAKNVIIATGSKARHLPNIPVDNRIVADNEGALSFESTPKKLAVIGAGVIGLELGSVWRRLGAEVTVLEALPEFLGAADQALAKEAAKQFKKQGLDIHVGVKVGEVKTTDSGVTIAYTDKDGNAQTLEADRLIVSIGRVPNTDNLGLEAIGLKANERGFIDVDEHCATAVPNVYAIGDVVRGPMLAHKAEDEGVLVAEIIDGQKPHIDYNCIPWVIYTEPEIAWVGKTEQQLKAEGREIKTGQFPFMANGRALGINKADGFVKMIADAKTDELLGVHIISANASDLIAEAVVAMEFKAASEDIGRICHPHPSLSEVMREAALAVDKRALNM

SEQ ID NO: 3225 - protein, 349 aa, Nostoc punctiforme
MELIDRFKALLAALLYGQEDLRLEQVADPTPAAGEVVIQVGAATTCGTDLKVWRRGGHAKMLKPPTLFGHEGAGRIVALGAGVTNWQVGDRIVANNSAPCMKCFFCQRQEYSLCPNLTWNNGTFAEYLKIPAPIVEHNLLQIPDELPWELAAMTEPLACVLHGVARSNIKPKDRVVVLGDGAIGLMFVAALSEKAEVLLWGGNNHRLEIGQKLGATQTFNYHQIPDIPNLVKELTQGWGADVAIEATGVPSVWETAIACARPGATVNLFGGCPRDTSITVNTEQLHYSELTIKGVFHNTPEYVREALALIASRKIPFELLISEQRPLKDLEQVFCEMKARQVIKAAMIP

SEQ ID NO: 3226 - protein, 469 aa, Geobacter sulfurreducens PCA
MQITFGTDGWRGIIAREFTFDNLSRVAQATMDYLKREGLAARGLVVGYDRRFLSRDFADRVAEIAAGNGIRVWLTDGPAPTPAISWAVHEMKAGAGVMITASHNPPAYNGFKVKESFGGSARPATTRILEEITAANTAAGRGIEERPLAAALADGTVTIFDPREGYCRQLARYVDLDLIRQAAIPLAVDPMHGAGAGVIPELVPGALEIHGDENPGFRGVPPEPTEEHLQELATLVRDGVCRVGLALDGDADRIGAVDENGEFFSSHRIFTVILRHLVERKGLTGGVVKTVSTTRMIDLLAQKYGLPLHETPIGFKHICELMLEHDILMGGEESGGLGVKGHIPERDGVLMGLLLLEAMAMSGKGLRRLLDETMDEIGVFHYQRLDLPIEDAPKAALITRLREERIDAIAGRPVAGTNFRDGFKFMFEDGSWLLIRPSGTEPVLRLYSEAGTPGTVGELLAAGREIAGV

SEQ ID NO: 3227 - protein, 177 aa, Zea mays
MNVPVVDPYQGEFPETIEEYLHHGTMKCIAFNRKGTLLAAGCSNGSCIIWDFETRGLAKEFRDKDSTAPITSVSWSRYGHRLLASATDKSLTLWDVPTGEKIARITLQQTPLRASLQPGSPTPSICLACPLSSAPLLVDLNTGSTTVLPVSVSENGNPPAPNPRNKFADGTPPFTPT

SEQ ID NO: 3228 - protein, 273 aa, Helicobacter pylori 26695
MIKKCLFPAAGYGTRFLPITKTIPKEMLPIVDKPLIQYAVEEAMEAGCEVMAIVTGRNKRSLEDYFDTSYEIEHQIQGTNKENALKSIRNIIEKCCFSYVRQKQMKGLGHAILTGEALIGNEPFAVILADDLCISHDHPSVLKQMTSLYQKYQCSIVAIEEVALEEVSKYGVIRGEWLEEGVYEIKDMVEKPNQEDAPSNLAVIGRYILTPDIFEILSETKPGKNNEIQITDALRTQAKRKRIIAYQFKGKRYDCGSVEGYIEASNAYYKKRL

SEQ ID NO: 3229 - protein, 396 aa, Oryza sativa (japonica cultivar-group)
MAALPLLRWGASSLRGGHSSAPPSSRLFSALRRPPAAARCEPGSRVMLKGMDYPELENWVRSQGFRPGQAMMLWKCLYGNNVWAHCYDELAGLNKDFRKMLTDHADLKALTVKDILNASDGTRKILFSLEDGSVIETVVIPCTSGRTTVCVSSQVGCAMNCQFCFTGRMGLRKHLSTAEIVEQAVFARRLFSDEFGSITNVVFMGMGEPLHNIDNVLKASAIMVDEQGLQFSPRKVTVSTSGLVPQIKRFLQESNCALAVRNWIMPINRKYNLSLLLGTLREEIRLKKKYKVFFEYVMLAGVNDSVDDAKRLVDLVRGIPCKINLISFNPHSGSQFKPTPDEKIIEFRNILIQDGLVVFVRLSRGDDQMAACGQLGEPGDYQLPLLRVPEKFQVAL

SEQ ID NO: 3230 - protein, 295 aa, Medicago sativa
MGNTNSSHNLLITVTVFAVTVTVFFILYFILRRRRFSPSSSSTVRVSPVTPTSSTSSSVVDSLPIFTFSSIKRRSSTVVSGDCAVCLSKFEQNDLLRLLPLCCHAFHTECIDAWLASNQTCPLCRSSVFVSESEIMKIFRSSSTSSGNNSFRLEIGNISHRREATATDNNNNNNNVAGETDRRTYSVGAFDYFVDEEAEIPVGNTNRRIFSGEKDDAAVLSVEVETPVDSQASLIGEGNWLKDYVDGLTRVMSFRGSGSSRRNDVVAGVGDFDVEANGNGFGEEISEMFRWISGV

SEQ ID NO: 3231 - protein, 268 aa, Triticum aestivum
IDMLFVLGGNGTHAGANAIHDECRKRKLKVSVVAVPKTIDNDIPLMDKTFGFDTAVEEAQRAINSAYIEARSAYHGIGLVKLMGRSSGFIAMHASLSSGQVDVCLIPEVSFALDGEYGVLQHLEQLIKNKGFCVVCVAEAAGQELLQNSGATDASGNAILSDIGVHMQQKIKTHFKGIGVHADIKYIDPTYMVRACRANASDAILCTVLGQNAVHGAFAGFSGITSCICNTHYVYLPVTQVITAPKRVNHKGRMWHRCLTSTGQPDFR

SEQ ID NO: 3232 - protein, 193 aa, Calamus usitatus
TVVHSGCVAKINPLAPLDKVCVLSCGISTGLGATLNVAKPPKGSTVAIFGLGAVGLAAAEGARIAGASRIIGVDLNPARFDTAKKFGVNEFVNPKDYERPVQQVLAEMTGGGVDRSIECTGNVNVMISAFECVHDGWGIAVLVGVPHKEAVFKTHPINFLNERTLKGTFFGNYKPRTDLPSVVEKYMSKVLEV

SEQ ID NO: 3233 - protein, 193 aa, Phoenix reclinata
TVVHSGCVAKINPLAPLDKVCVLSCGISTGLGATLNVAKPPMGSTVAVFGLGAVGLAAAEGARIAGASRIIGVDRNPTRFDEAKSFGITEFVNPKDYDKPVQEVLAEMTGGGVDRSIECTGNINAMISAFECVHDGWGVAVLVGVPHKEAEFKTHPINFLNERTLKGTFFGNYKPRTDLPLVVEKYMNKELEL

SEQ ID NO: 3234 - protein, 331 aa, Oryza sativa
MAKERKRRQPADAPPPGDDDEGRDHRREKKPRKERPDPVLPSQIKNKDKRKEPPEKLVPRTIENTREPDETVCRPDDQELFAGNDADEFNAVLKQQTTPKVLITTCRFNSGRGPAFIEELMQVIPNSCYVKRGTYELKKIVEYANNRDFTSLVVVHTNRREPDALLIINLPAGPTAHFKLSKLILRKDIKNHGNPTSHKPELVLNNFTTRLGHRVGRYIFEMKENKIASKDKKAKTSESKSQPEKQVICRLQECGPRFTLKLLTLQHGTFDTKNGEYEWVHKAGWQIAACCWVLLLHMAWGSHPIQVRPYVSARTSVQARAYDTEHLHASY

SEQ ID NO: 3235 - protein, 350 aa, Staphylococcus epidermidis ATCC 12228
MKAAVWYGQKDVRVEDREPKAIKDNEVQVKVSWAGICGTDLHEYLEGPIFISTDQPDPLLGQTAPVTLGHEFSGVIENVGKDVSRFKKGDRVVVNPTVSKREKPENVDLYDGYSFIGLGSDGAFAEFTNAPETNVYHLPDNVSAREGALVEPTAVAVQAVKEGELLFGDTVAVFGAGPIGLLTIVAAKAAGASKIFVFDLSEERLAKAKSVGATHVYNSGNVDPVQTVYEHTDNGVDVSFEVAGVGITLQQSIEVTRPRGTAVIVSIFGHPVEFNPLLQMNKGVKLTTTIAYTPTTFQQTIDLIANGSLNVKDVVTDQIELENIVESGFNQLVNDKSQAKILVRLNGDQK

SEQ ID NO: 3236 - protein, 541 aa, Agrobacterium tumefaciens str. C58
MQATIEKLKATASSTAATDLRAAFAADDQRFSRFSVKFDDLLMDYSKCAVNEEIVTLLEQLAREGGVEAKREEMFSGKAINFTEDRAVLHTALRNRSNTPVLVDDKDVMPDVNGVLAAMGKFADAIRSGSLKGATGKKITDVVNIGIGGSDLGPVMATLALAPFHDGPRAHFVSNIDGAHIADTLKLLDPETSLFIIASKTFTTIETMTNAATARRFIAEKLGEGAVKHHFAAVSTALDKVAAFGIESDRIFGFWDWVGGRYSIWSAIGLPLMIAIGPDNFGKFLDGAHAMDRHFREAPIRENLPMLLGLIGFYNRNVLDYPTRAILPYDQRLSRFPAYLQQLDMESNGKGVTIDGTPVEGQSGPVVWGEPGTNGQHAFYQLIHQGTSVIPAEFMIAANGFEPELRHQHQLLIANCLAQSEALMKGRTLAEAKAQLTSKGMEDSQADFIAPHRVFTGNRPSITFVYDKLTPFALGRLIALYEHRVFVEGVLFRINSFDQWGVELGKELATGLLPVVEGKESAAGHDSSTQGLVKALAGLAG

SEQ ID NO: 3237 - protein, 775 aa, Oryza sativa
  unsure (1)..(775): unsure at all Xaa locations
WQSHIILPKEEEAGAGQWQVEEDHDSPAAPGYQHQQGPPVAKALPFSATCVRISRDSYPNLRALRNASAMSLPDDDAAYAKLEEGDYGYLLDDVPHFTDYLSDLPTFPNPLQDHPAYSTVKQYFVNADDTVPEKVVVQKDSPRGVHFRRAGPRQRVYFESEDVKACIVTCGGLXCPGLNTVIRELVCGLSHMXYNVNDIFGIQVXNNGYKGFYSSNYLPMTPKSVNDIHKRGGTVLGTSRGGHDTKKIVDNIQDRGINQVYIIGGDGTQNGAYDIYKEIRRRGLKVAVAGVPKTIDNDIAVIDKSFGFDSAVEEAQRAIDAAHVEASSAENGIGLVKLMGRYSGFIAMYATLASRDVDCCLIPESPFYLEGEGGLFEYIEKRLKENNHMVIVVAEGAGQDLIAKSIAAADQIDASGNKLLLDVGLWLTHKIKDYCKNKKMEMTIKYIDPTYMIRAIPSNASDNVYCTLLAHSAIHGAMAGYSFTVGMVNGRHAYIPFHRVTSTRNKVKITDRMWARLLSSTNQPSFLSQKDIDAAREADKLASKSPVPVNTKEHGENVKKPANGEGSSDAVVQEPFATTPTSPAALAAGAVSNPALTPAAVSMSFYDVNAGEQPSREDEAPEEVVEAAVANGAPTAVEKHNKLYSPAETPAGSGTRPHPTADAVAETAGAAPDDVDGCTTPPPPPVHDSEGSDTQSADDHGSPQREKPRTTSTAGGVKRDVAPSWSSRLLAFRSFSRDKKAKATVDARPPAHGKARDEGDEHKEKGKERRKRFWK

SEQ ID NO: 3238 - protein, 273 aa, Glycine max
  unsure (1)..(273): unsure at all Xaa locations
MATIVSIKARQIFDSRGNPTVEVDLTCSDGTFARAAVPSGASTGIYEALELRDGGSDYLGKGVSKAVDNVNTVIGPALIGKDPTEQTAIDNLMVQQLDGTVNEWGWCKQKLGANAILAVSLAVCKAGASVLKIPLYKHIANIAGNKKLVLPVPAFNVINGGSHAGNKLAMQEFMVLXHVGASSFXEAMKMXVEVYHNLKSVIKKKYGQDAINVGDEGXIAHFAPNIQENKGXDTIKLLKTAIAKAGYIQANRQSLELLKTDTSIACQKRQCCH

SEQ ID NO: 3239 - protein, 475 aa, Anabaena variabilis ATCC 29413
MSASSNSSKIKFGTDGWRGIIADDFTFPNVRKVTRAIASYLETAYTKDRPVLIAYDTRFLADQFAQTAAQVLADLGWNVKITDRDCPTPVIAYNARHLNSAGALMFTASHNPAPYCGIKYIPDYAGPATPEITDTIVANIESASDELPSGKPSGSISTFDPKPDYLQFIYTLLDVEKIKSAQLKVKYDALYSTSRGYLDEVLIESGTQLESFHTWRDVLFGGGMPEPKGEQLVELVEAVRRDHADLGLATDGDSDRFGIVDELGNVLTPNTVLLVLARHLIKNKGKTGAIVRTVATTHLLDNFAAKYGLTIYETAVGFKYIGEKMRETAVLIGGEESGGLSIIGHIPEKDGVLADMLIAEAIAYEGKPLSQLVKEAIAEADGPLYNNRLDLHLTEAHKVAVIDSFTKNPPSEVAGIKVKEVGRKDGIKLYLEEGSWVLLRPSGTEPLVRVYLETNSPEKLSKLEQELESTIAKLG

SEQ ID NO: 3240 - protein, 367 aa, Arabidopsis thaliana
MATTASSSLLLPSISLNNLSSSKNASFGFAAKNLSRSRISMSVSAGSQSTTVHDSLFADYKPTSAFLFPGQGAQAVGMGKEAQSVGAAGELYKKANDILGYDLLDICVNGPKEKLDSTVISQPAIYVTSLAAVELLRVREGGEQIINSVDVTCGLSLGEYTALAFAGAFSFEDGLKLVKLRGEAMQAAADAAKSAMVSIIGLDSEKVQQLCDAANQEVDEADKVQIANYLCPGNYAVSGGLKGIEVVEAKAKSFKARMTVRLAVAGAFHTSFMEPAVSRLEAALAATEIRSPRIPVISNVDAQPHADPDTIKKILARQVTSPVQWETTVKTLLSKGLQSSYELGPGKVIAGIFKRVDKSASFENISA

SEQ ID NO: 3241 - protein, 287 aa, Lupinus albus
GKEQDVSLGANKFPERQPLGIAAQSQDEFKDYQEPPPAPFFEPSELTSWSFYRAGIAEFVATFLFLYITILTVFGVQRSPTKCQSVGIQGIAWAFGGMIFALVYCTAGISGGHINPAVTFGLFLARKLSLTRAVFYIVMQVLGAIVGAGVVKGFEGKHRYTQYNGGANFVAPGYTKGDGLGAEIVGTFVLVYTVFSATDAKRSARDSHVPILAPLPIGFAVFLVHLATIPITGTGINPARSLGAAIIFNKDLGWNDHWIFWVGPFIGAALAALYHQVVIRAIPFKSK

SEQ ID NO: 3242 - protein, 459 aa, Schizosaccharomyces pombe
MTETVTTTSSDKSEKKNYLFYTSPNHRPPTVVRAEGVYLYLEDGTRIMDATGGAAVACLGHGNKEVIDAMHKQSEKVCYIHSMGFSNEPADKLANLLVSEHPDVFARAYFANSGSEAVETCLKLILQYWQLVGEKQRCHIIARKQGYHGNTLFALSVGGMKPRKQPYEGVFSHTTSHVSPCFEYRYKENGETTEEYVARLAKELEDEILRVGPEKVAAFVAETVSGACTGCATPVPGYFKAMRKVCDKYGVIFYLDEVMSGIGRTGTMHAWEQEGVTPDIQSIAKCLGGGYQPISGALVGHRIMNVFEQKDAAMAGFFTYQAHPIACSAALAVQTILRRDHLVERAAEMGKYLSEKLHETFDSHPNVGNIRGRGLFWGLEIVKDKATKECFPPEYKVGSLANKIGCEHGVFVYPGMGTIDGTRGDHVLLAPPYIITREQIDELVEALSKTITSTVAALP

SEQ ID NO: 3243 - protein, 360 aa, Schizosaccharomyces pombe
MAPAEKAFVLRKKMDTAIEDRPGQTLTDDHQVKVAIKATGICGSDVHYWKEGGIGDFILKKPMILGHESAGVVVEVGKGVSSLKPGDPVAVEPGCVCRLCDYCRSGRYNLCPHMEFAATPPYDGTLRTYYITTEDFCTKLPKQISVEEGALFEPMSVAVHAMTRGNLKCGSRVLVMGCGTVGLLMMAVAKAYGAIDIVAVDASPSRVEFAQKYVGAKPFTPIAAKENESLPDYAQRYKQAIIEKYGEFDFAVDATGVGICIHTAVLALKRGGTFVQAGNGKPVIDFPINHIINYEINVLGSFRYAHGCYKQSLFLVSNGLVDVKPLITHRFAFKDALKAYETVASGEEGVLKVIIGGPDA

SEQ ID NO: 3244 - protein, 284 aa, Glycine max
MESGRIFFGASASSGNNMLFLGNTELAFRGRSIMSMEEASKRRPFFTSPDELYDEEYYEKQSPEKKHRLSSEQVHLLEKSFEEENKLEPERKTQLAKKLGLQPRQVAVWFQNRRARWKTKQLERDYDVLKSSYDTLLSSYDSIMKENEKLKSEVVSLNEKLQVQAKEVPEEPLCDKKVDPIPVDEDMAPIFGTRVEDHLSSGSVGSAVVDEGSPQVVVDSVDSYILADNYGGCVGPVERVQSEEEDGSDDGRSYLDVFVVSETEHQNHEEGETLGWWTNMYYVG

SEQ ID NO: 3245 - protein, 401 aa, Populus nigra
MATKKSVSSLKEADLKGKSVFVRVDLNVPLDDNFNITDDTRIRAAVPTIKYLMGHGARVILSSHLGRPKGVTPKYSLKPLVPRLSELLGVDVKMANDCIGVEVEKIVAEIPEGGVLLLENVRFYKEEEKNDPEFAKKLASLAEIYVNDAFGTAHRAHASTEGVAKYLKPAVAGFLMQKELDYLVGAVANPKKPFAAIVGGSKVSSKIGVIESLLEKVDLLFLGGGMIYTFYKAQGHSVGSSLVEEDKLDLATSLIEKAKVKGVKLLLPADVVVADKFAPDANSKVVPASEIPDGWMGLDIGPDSIKTFSEALDTTKTIIWNGPMGVFEFEKFAAGTEAIARKLAELSGKGVTTIIGGGDSVAAVEKAGLADKMSHISTGGGASLELLEGKPLPGVLALDDA

SEQ ID NO: 3246 - protein, 483 aa, Neurospora crassa
MLTRSPASAAATSPTTTVTVTVTAAATSPRPSRGAAPHGHFHYAPTPSLREAASRIPALSSRRQSATAPATSSTSLPISIQSRHGPAPVASHTSSPVASDPGLGFPPSSRPQRWAGVDVVAQYSPMEPMDYTTGALLSSQAASSSNNQAVARGSIESRPSHIPNTVGPMASHEEQASALASTSEATAAPIPHGPTVAVAVPPTPGVYSAAPQPHPLSHTPQTGTPVKRRNSQGDVTHNQVEAASAGQSGPHSPKRARLAPKIVSRRYEHCPVEDLVVLIAHMLGELIELNDEAAQKVGQRHNLTRFHSRTTPGISVLDYLHRLAKHAYLSPPILLSMVYYIDRLCALYSDFTINTLTVHRFLITAATVAAKGLSDSFLTNTLYARVGGVRVAELNMLELEFLHRVDWKIVPDPDVLVAYYGGLVARCPGYILECPEPEEADDEDEDEELDESDAIGDDDDDIDGEGGEREEETSSSQRDRHAT

SEQ ID NO: 3247 - protein, 507 aa, Streptomyces avermitilis MA-4680
MAARAAGRRPCLTRTTPQEAIVPDLFIDGEWRAALDGRTREIRCPADGSLVGVVDEAGGKDTAEAIAAARRAFDEGPWPWLPAADRGDLLLRVADLLVRDRAKLARAESLDTGKRFVESEYDIDDIVNCFRYFGRLAAAESGRVIDTGSASTDSRVVYEPVGVCALITPWNYPLLQTAWKVAPALAAGNTFVLKPSELTPHTAIHLMRLLQEAELPPGVANLVLGAGPEAGAPLADHPDVDLVSFTGGLHTGRRLMAAAAGTVKKVALELGGKNPNIVFADADFDTAVDMALTAVFLHSGQVCSAGARLLVEDSLHDRFVDEVVRRAAEIRLGGPFDERAQTGALISAAHRAKVEAYVAKGLDEGAVLRCGGRRPEGLDEGFFYLPTVLDECTSGMSVIQDESFGPVLTVERFTGEAEAVRLANDTVYGLAGAVWTTDEAKAQRVVSRLRIGTVWINDYHPYVPQAEWGGYKQSGFGRELGPSGLAEYREAKHIWRNTDPSPQGWFA

SEQ ID NO: 3248 - protein, 506 aa, Bordetella pertussis Tohama I
MDLSDLKKLGLDVAYPFKEQYENYIGGQWVAPAGGEYFDNLSPITGQPFCRVPRSGAADVELALDAAHRACAAWARTSPAERANILLRIADRIEGQLPMLAVAESIDNGKPLRETTAADLPLAIDHFRYFAGCIRAQEGAISEIDANTVAYHFHEPIGVVGQIIPWNFPLLMVAWKLAPALAAGCVVVLKPAEQTPASILVLAELIGDLLPPGVLNVVNGYGKEAGQALATSKRIAKIAFTGSTPVGKHILHAAADNLIPATVELGGKSPNIFFDDVMDHDDEFLDKALEGLAMFALNQGEVCTCPSRILIQESIYERFIEKAIARVQSIKTGHPLDAGTMVGAQVSQVQMDKILSYIDIGRQEGAQCLTGGARNDMLPGGLDQGFYVQPTMLLGKNSMRIFQEEIFGPVAAVATFKDEEEAIAMANDTFYGLGAGVWSRDGARAYRVGRGIEAGRVWTNCYHLYPAHAAFGGYKQSGIGREAALSNYQQTKCLLVSYSAKALGFF

SEQ ID NO: 3249 - protein, 548 aa, Hypocrea jecorina
MPIGNIYVIAGVSVVGGALFGFDISSVSAQLAEQSYLCYFNQDENPPTTVDGTCGGPRSLVQGGITASMAAGSWLGALISGPLSDRLGRKYSIMVGCIIWVIGSTLSCASQNIGMLIVARIINGLSVGIESAQVPVYIAEISPPSKRGRFIGMQQWAITWGILIMYYISYGCSFIGKQNPLEYNTASWRIPWGLQMIPAFFLFFMMMPLPESPRWLARKDRWEDCRAVLTLVHGKGDPNHPFVAYELQDIKDMCEFERRHADVTYLDLFKPNMLNRTFIGLFTQIWSQLTGMNVMMYYIANIFSMAGYSGNANLLASSIQYIINVLMTIPALLWVDKWGRRPTLLVGSVLMALWMYANAGILATYGEVVPGGIDHVAAQSMRVSGAPAKGLIACTYLFVASFAPTWGPVSWTYPPELFPLRLRGKGVALATSGNWAFNTALGLFTPVAFANIKWKSYLIFAIFNTVAFFHVFFVFPETAGKTLEETEAMFEDPNGIKYLGTPAWKTRVATSLTERAEHGDIEAKIGHDTEKPPVHTHEEEKASTPPPQ

SEQ ID NO: 3250 - protein, 401 aa, Populus nigra
MATKKSVSSLKETDLKGKRVFVRVDLNVPLDDNFNITDDTRIRAAVPTVKYLMDHGARVILCSHLGRPKGVTPKYSLKPLVPRLSELLGVEVKIANDCIGEEVEKLVAEIPGGGVVLLENVRFHKEEEKNDPEFAKKLASLAEVYVNDAFGTAHRAHASTEGVAKYLKPAVAGFLMQKELDYLVGAVANPKKPFAAIVGGSKVSSKIGVIESLLEKVDFLFLGGGMIFTFYKAQGYSVGSSLVEEDKLDLATSLIEKARVKGVKLLLPTDVVVADKFASDANSKVVPASEIADGWMGLDIGPDSIKTFSEALDTTKTIIWNGPMGVFEFEKFAAGTEAIAWKLAELSGKGVTTIIGGGDSVAAVEKVGLADKMSHISTGGGASLELLEGKPLPGVLALDDA

SEQ ID NO: 3251 - protein, 363 aa, Streptomyces avermitilis MA-4680
MVVPHEVRAVVAVKKGAPVEVQTIVVPDPGPGEVLVAVQACGVCHTDLHYREGAITDDFPFLLGHEAAGTVEAVGAGVTDLAPGDYVVLAWRAPCGSCRSCRRGRPWYCFDSRNATQPMTLLDGTPLSNALGIGAFAEKTLVAAGQAVKIDPAARPEAAGLIGCGVMAGYGAAVNTGKVGRGDTVAVIGCGGVGNAAIAGACLNGAMKVIAVDIDDKKLDQAEKFGATHTVNSRGTDPVEAVRALTDGFGVDIAIDAVGRPETYKQAFYMRDHAGTLVQVGVPDPEMKIDLPLIDLFSRGGALKSSWYGDCLPSRDFPFLIDQYLYGLLDLNAFVSETISLEQVEEAFAKMHRGEVLRSVVVL

SEQ ID NO: 3252 - protein, 403 aa, Streptomyces avermitilis MA-4680
MKTIDELLAEGVDGKRVFVRADLNVPLADGLITDDGRIRAVLPTVKALAEAGAKVVVASHLGRPKGAPDPAFSLLPAAERLGELLGAPVAFAQDTVGPAAHDAVNGLQPGQVAVIENLRFNAGETSKDDAERGAFADRLAALADIYVGDGFGAVHRKHASVYDLPARLPHYAGYLIATEVNVLKKLTEDVKRPYVVALGGAKVSDKLAVIDQLLGKADRLLIGGGMAYTFLKAKGYEVGISLLQEDQIPTVKEYMERAEKNGVELVLPVDVLVSTEFPDLKTKAPANPTTVAADAIPADQEGLDIGPETRKLYASKLADAATVFWNGPMGVFEHPDYAEGTKAVAQALVDSQAFTVVGGGDSAAAVRILGFDETAFGHISTGGGASLEYLEGKTLPGLAALED

SEQ ID NO: 3253 - protein, 411 aa, Oryza sativa
MAATIVSVKARQIFDSRGNPTVEVDVCCSDGTFARAAVPSGASTGVYEALELRDGGSDYLGKGVSKAVDNVNSVIAPALIGKDPTSQAELDNFMVQQLDGTKNEWGWCKQKLGANAILAVSLAICKAGAIIKKIPLYQHIANLAGNKQLVLPVPAFNVINGGSHAGNKLAMQAEFMILPTGAASFKEAMKMGVEVYHNLKSVIKKKYGQDATNVGDEGGFAPNIQENKEGLELLKTAIEKAGYTGKVVIGMDVAASEFYNDKDKTYDLNFKEENNDGSQKISGDSLKNVYKSFVSEYPIVSIEDPFDQDDWEHYAKMTAEIGEQVQIVGDDLLVTNPTRVAKAIQEKSCNALLLKVNQIGSVTESIEAVKMSKRAGWGVMTSHRSGETEDTFIADLAVGLATVRFCALHSL

SEQ ID NO: 3254 - protein, 203 aa, Glycine max
VLRSLEYDYLFKLLLIGDSSVGKSCLLLRFADDSYVDSYISTIGVDFKIRTVELEGKTVKLQIWDTAGQERFRTITSSYYRGAHGIIIVYDVTEMESFNNVKQWLNEIDRYANDSVCKLLVGNKSDLVDNKVVDSLTAKAFADELGIPFLETSAKDSINVEQAFLTMTAEIKKKMGSQTTAGKSAETVQMKGQPIPQKSNCCG

SEQ ID NO: 3255 - protein, 566 aa, Glycine max
  unsure (1)..(566): unsure at all Xaa locations
MQSSISLSSSYAPTISGPRHSFPLSGRTLAPSNLRFCGLRRQAFTSTPLNHHFRLRRRRLPHSAAVSAALSANGTSPKSFDYDLLIIGAGVGGHGAALHAVEKGLKTAIVEGDVVGGTCVNRGCVPSKALLAVSGRMRELRSDHHLKSFGLQVSAAGYDRQGVADHANNLASKIRNNLTNSMKALGVDILTGFGTILGPQKVKVGSSDNVVTAKDIIIATGSVPFVPKGIEXVDGKTVIPRVRALKLETVPDWIAIVGSGYIGLEFSDVYTALGSEVTFIEALDQLMPGFDPEISKLAQRVLINPRNIDYHTGVFASKITPARDGKPVSIELIDAKTKEPKDTLEVDAALIATGRAPFTQGLGLENIDVVTQRGFVPVDERMRVIDANGNLVPHLYCIGDANGKMMLAHAASAQGISVVEQVTGRDHVLNHLSIPAACFTHPEISMVGLTEPQAREKAEKEGFEVSVAKTSFKANTKALAENEGEGLAKLIYRPDTGEILGVHIFGLHAADLIHEASNAIALGTRIQDIKFAVHAHPTLSEVLDELFKSAKVKAEASEPIKEAVAV

SEQ ID NO: 3256 - protein, 783 aa, Salmonella typhimurium LT2
MTLSQAITLPFATTAQAQDTPIPKDANGETVRHSACLVNCGSRCPLKVIVKNDRIVRIEPEDAKDDAVFGEHQIRPCLRGRSSRWRVYSPDRIKYPMKRVGKRGEGKFKRISWDEATAFIAAELTRVSEKYGREAIYYNYQSGAYYHTQGRPAWIRLLNLTGGYLNYHNTYSTAQIATATPYTHGDYVGSHFTQIAHSDLVVLFGLNLSETRMSGGGQVEELRRALETSKARVIIIDPRYTDSVITEHAEWLPIRPTTDAALVAGIAHTLITEQLLDEALVNRYCVGYDRSTLPDTAAPNASYKDYVLGTGDDGIAKTPEWAADITGIPATRIRQLAREIASARACYICQGWGPQRHANGEQTVRAIQTLPALTGHFGRPGTNNGNWPYGTPYGVPLLPVGKNPITTSIPCYLWTDAIQHPEKMTATTMGVKGADRLKTGIKLFFNQAGNTLLNQHGETNRTRQILADESLCETIIVIENHMTPSAMYADLLLPETSYLEAEDLVDSSYAAGSHNYMIAIQKTVKPMWEVRSTYDICADIAGHLGLREQYTEGRTQAQWAEMHYQQIREKRPYLPEWSVAKEMGVIDQRIATEQQSLAFADFRADAEANPLSTPSGKIEIYSQALADLAQTWTLPEGERIPALPEFCPAKESHLNKALTAKYPLQLSGFHTKGHTHSTYSNVLMLHEAVPDEVWINPIDASARQLKSGDRVHVFNDRGVVELPCKVTQRILPGVAAMPQGAWTRLDGNGVDVGGCINTLTSHHPSPLAKGNPQHTNLVEIKRA

SEQ ID NO: 3257 - protein, 178 aa, Trifolium repens
MALISSAAVTTINRAPVQANLATPFTGLKSSAGFPVTKKNNDITSITSNGSRVNCMQVWPPVGKKKFETLSYLPPLTDEQLLKEVEYLLRKGWVPCVEFELEKGFVHRQYNSSPGYYDGRYWTMWRLPLFGTTDAAQVLKEVAECKAEYPEAFIRIIGFDNVRQVQCISFIASTPKVY

SEQ ID NO: 3258 - protein, 485 aa, Mycobacterium avium subsp. paratuberculosis str. k10
MTENFTTTNAGAPAPSDELSLTLGPDGPVLLQDFYLIEQLAAFNRERVPERQPHAKGTGAFGRFEVTNDLSAYTKAAVFQPGTKTDVFVRLSGNAGERGSADTVRDTRGFSVKFYTTEGNFDLVGLDFPVFVIRDPIKFPQMVRSAKRRANNDCRDHNMQWDFWTLSPESAHQVAMIMSDRGIPKTFRHMHGFGLHTFSFLNAAGEISWVKFHFKSNQGIEWLTQEEGDRLAGTDPDYCIRDLYEAIERGDHPSWSVKVQIMPFEEAKTYRFNPFDVTKVWPHADYPLIDLGTMTLDRNVTDHHTEVEQVTFAPHALVPGIGLSPDKLLLGRSFAYADAHRYRVGANHNQIPVNAPRCPVRSYSKDGQMRFVNSTDPVYAPNSYGGPKADPDRASVVKWAVDGGMMVRAPYTLRPDDDDWGQAGALVRDVMDDAERERLVHNIVHHVTDGVKEPVLSRVVEYWYNIDADIGKRVEDGIRAANLGR

SEQ ID NO: 3259 - protein, 484 aa, Mycobacterium avium subsp. paratuberculosis str. k10
MAENHTTTNAGAPAPSDELSLTVGPDGPLLLQDSYLVEQMAAFNRERVPERQPHAKGAGAYGRFEVTADVSEYTKAAFLQPGAVTEVFARFSSGNSGERGSADTARDNRGFSVKFYTTEGNFDLVGSDVPVFAIRDPMKFPNLIRAGGRRADNDLHDHNMVWDFWTSCPETAHLVTLVMGDRGIPRTFRHMNGFGLHAFSWVNSAGEIHWVKYHFKTDQGIQWLPQEEGRRLAGTHPDCCVRDLYEAIARGKYPSWSLQVQLMPFADAKTYRFNPFDVTKVWPHADYPPIEIGTMTLDRNVTDHHAEVEQAAFAPSNLVPGTGLSPDRLLLGRSFAYPDAHRARIGVNHDQLPVNAARCAVRSYAKDGRMRFVNTADPVYAPNSAGGPQADPARAGEVHWAADGQMLRAAYTLRRDDDDWGQAGTLVRRVMDDSQRERLVHNIVGHVSAGVNEPVLSRVFAYWRHVDADIGRKVEEGVRANLNS

SEQ ID NO: 3260 - protein, 481 aa, Populus nigra
MASATAPTTLSLLKTAAASTSTSARASLLPVSTSGLRTTSLRGLGFSAADPLFSSHVVSKIRSFKSNGRAPRAVVSMAKKSVGDLTAADLKGKKVFVRADLNVPLDENQKITDDTRIRAAVPTIKYLISKGAKVILSSHLGRPKGVTPKFSLAPLVPRLSELLGIQVVKADDCIGPEVEKLVASLPEGGVLLLENVRFYKEEEKNEPEFAKKLASMADLYVNDAFGTAHRAHASTEGVTKFLKPSVAGFLLQKELDYLVGAVSNPKRPFAAIVGGSKVSSKIGVIESLLEKCDILLLGGGMIFTFYKAQGLAVGSSLVEEDKLDLATTLLEKAKAKGVSLLLPSDVVIADKFAPDANSKTVPASAIPDGWMGLDIGPESVKTFSEALGTTQTVIWNGPMGVFEFEKFANGTEAIAKKLAELSGKGVTTIIGGGDSVAAVEKVGVADVMSHISTGGGASLELLEGKELPGVLALDEVERVAV

SEQ ID NO: 3261 - protein, 117 aa, Zea mays
MLEGRGAAIMKQAWWRPAGRRTKSLPPSPQQPAHISLWRIEGRKEEMGGGMEVHKNRWIEEWNAGRENLEFNFRWTRRSLAVVGLFGLAVPILVYKGIVREFHMQDEDAGRPYRKFL

SEQ ID NO: 3262 - protein, 564 aa, Saccharomyces cerevisiae
MQSSTESDRDIQDGPDADIHVAPPVEKEWSDGFDDNEVINGDNVEPPKRGLIGYLVIYLLCYPISFGGFLPGWDSGITAGFINMDNFKMNFGSYKHSTGEYYLSNVRMGLLVAMFSIGCAIGGLIFARLADTLGRRLAIVIVVLVYMVGAIIQISSNHKWYQYFVGKIIYGLGAGGCSVLCPMLLSEIAPTDLRGGLVSLYQLNMTFGIFLGYCSVYGTRKYDNTAQWRVPLGLCFLWTLIIIIGMLLVPESPRYLIECERHEEARASIAKINKVSPEDPWVLKQADEINAGVLAQRELGEASWKELFSVKTKVLQRLITGILVQTFLQLTGENYFFFYGTTIFKSVGLTDGFETSIVLGTVNFFSTIIAVMVVDKIGRRKCLLFGAAGMMACMVIFASIGVKCLYPHGQDGPSSKGAGNAMIVFTCFYIFCFATTWAPVAYIVVAESFPSKVKSRAMSISTACNWLWQFLIGFFTPFITGSIHFYYGYVFVGCLVAMFLYVFFFLPETIGLSLEEIQLLYEEGIKPWKSASWVPPSRRGIPSEESKTEKKDWKKFLKFSKGSD

SEQ ID NO: 3263 - protein, 412 aa, Vibrio vulnificus CMCP6
MNDCLPTQSPLWQKLEGAVKNVISAYGYNEMRMPIVEMTHLFSRAIGEVTDVVEKEMYTFEDRNGDSLTLRPEGTAGCVRAGIENGLLYNQEQRVWYMGPMFRHERPQKGRYRQFHQCGVEVFGLNGPDVDAELIMMTARLWRELGIDKHVRLELNSIGSLEARANYRTALIAFLEQHIDVLDEDCKRRMHTNPLRVLDTKNPDVQAILGDAPRLSDYLDPESTQHFAGLCELLDAAGIEYTVNERLVRGLDYYNRTVFEWITESLGSQGTVCGGGRYDGLVEQLGGKATPAVGFAMGLERLVLMLETLELTDVRRSVDVYVVTAGEGTMMAGMKLAEQVREAIPGVRVMNHFGGGNFKKQFKRADKVGAVVALVLGENEVADNTVVLKDLAGGEQVTYSQQEIASKIAELI

SEQ ID NO: 3264 - protein, 390 aa, Helicobacter pylori 26695
MLYSSKIQSLSESATIAISTLAKELKSQGKDILSFSAGEPDFDTPQAIKDAAIKALNDGFTKYTPVAGIPELLKAIAFKLKKENNLDYEPNEILVSNGAKQSLFNAIQALIEEGDEVIIPVPFWVTYPELVKYSGGVSQFIQTDEKSHFKITPKQLKDALSPKTKMLILTTPSNPTGMLYSKAELEVLGEVLKDTKVWVLSDEIYEKLVYKGEFVSCAAVSEEMKKRTITISGLSKSVAMTGWRMGYAASKDKKLVKLMNNLQSQCTSNINSITQMASIVALEGLVDKEIETMRQAFERRCDLAHAKINAIGGLNALKPDGAFYLFIHIGSLCGGDSMRFCHELLEKEGVALVPGKAFGLEGYVRLSFACSEEQIEKGIERIARFVKSKG

SEQ ID NO: 3265 - protein, 440 aa, Corynebacterium glutamicum ATCC 13032
MDTKLGAELGTEFDLIVVGFGKAGKTIAMKRSAAGDKVALIEQSPQMYGGTCINVGCIPTKKLLFETATGKDFPDAVVARDQLIGKLNAKNLAMATDKGVTVIDGKATFTASHEITVTSGSDTLVLYAPTIVINTGSTPVIPNVPGTDNPHVFDSTGIQHISPLPKHLAIIGGGPIGLEFATLFSGQGSKVTIIDRGELPLKNFDREVAELAKTDLEARGITFLNNAELTGFSGDLTIALKDHDLLADAALLAIGRRPATDGLGLEQAGIKTGTRGEVLVDAHLRTNIDGIFAVGDVNGGPQFTYVSYDDHRIVLDQLAGTGKKSTAHRLIPTTTFIEPPLSTIGDNTEGENVVVKKALIADMPIVPRPEIINQPHGMVKFFVDKQSDALLGATLYCADSQELINTVALAMRHGVTASELGDGIYTHPATSEIFNQLLGS

SEQ ID NO: 3266 - protein, 550 aa, Streptomyces avermitilis MA-4680
MNADSRTRLNQRPEWTALAKHREELAGTHLRDLFAADPGRGAGYTLEVGDLHVDYSKHLVTDETLRLLRELAAATDVFGLRDAMFRGEKINVTEDRAVLHTALRAPRDAVVEVDGENVVPAVHAVLDKMSTFAERVRTGEWTGHTGKPIKNIVNVGIGGSDLGPAMAYEVLRSFTDRSLTVRFVSNVDGADLHEAVRDLDPAETLFVIASKTFTTIETITNATSARDWLLTELKAGQEAVAKHFVALSTNAEKVSEFGIDTANMFEFWDWVGGRYSFDSAIGLSLMIAIGPERFREMLDGFRIVDEHFESAPAEDNVPLLLGLLGIWYGNFHDAQSHAVLPYSHYLSKFTAYLQQLDMESNGKSVQRDGNPVEWETGPVVWGTPGTNGQHAYYQLIHQGTKLIPADFIGFAEPVADLLPGLVAQHDLLMANFFAQTQALAFGKTPDEVRAEGVPEQLVPHKTFKGNHPTTTILAKELTPSVLGQLIALYEHKVFVQGAVWNIDSFDQWGVELGKVLAKRVEPALTEGADVPGLDESTKALVAKYRQLRGR

SEQ ID NO: 3267 - protein, 395 aa, Ostreococcus tauri
MEVREANKRARREGGMCFASPPARKSLAFDDTEDASERSKIVTTIAFDTPRAVAQAERVEERGEGSGASTATPLLKRKARTARAEGVDEVSFLTPFARALSDASNGRCVDGGQGGAAAMAAAAASAMPCRPLASPPPMATLASPPAPPRKLALGQNMSYGYTPSRGDTRYDASQRVDYDEPETPALAGSCALIPSALDAALGLPTIDGATLRGLMSSHDAELVVIDCRFPYEYSGGRARGALNFHLPHDVQRFLASRASISANTVYVFYCEFSSERAPRMWRHVRNLDRRDHIANYPSLSFPHTYVLAGGFSKFYEQHPDCCEGQMISMSDSRFTNLCREYVTRSREVWHVAQRATSLRHIPSDQDLIATARASNREVQRRGAINFDEVADMDNE

SEQ ID NO: 3268 - protein, 830 aa, Yersinia pestis CO92
MKLSRRDFMKANAAVAAAAAAGMTIPTVAKAVGETTNAIKWDKAPCRFCGTGCGVLVGTQNGRIVASQGDPDSPVNRGLNCIKGYFLPKIMYGKDRLTQPLLRMKDGQYDKEGDFTPISWEKAFDIMELKFKNALKEKGPTAVGMFGSGQWTVWEGYAALKLLKGGFRSNNLDPNARHCMASSVVGFMRTFGMDEPMGCYDDIEEADAFVLWGSNMAEMHPVLWSRMTSRRLTNAHVRIAVLSTYEHRSFELADNPIVFTPQTDLVIMNYIANYIIQNNAVDKDFLAQHVNFRRGATDIGYGLRPTHPLEKAAKNPGSDASEPMSFEDFKTFVAEYTLEKAAKMSGVPEDQLESLAQLYADPKVKLVSYWTMGFNQHTRGVWANNMCYNLHLLTGKISTPGSGPFSLTGQPSACGTAREVGTFSHRLPADMVVTNEKHRQIAETTWQLPAGTIPEKVGLHAVAQDRALKDGTLNAYWVMCNNNMQAGPNINEERMPGWRDPRNFIVVSDPYPTISALSADLILPTSMWVEKEGAYGNAERRTQFWRQQVPSPGEAKSDLWQIVEFAKRFNVEEVWPAELVNQKPEYRGKNLYEVLFANDVVSKYPLSEIPDDQLNDEARDFGFYIQKGLFEEYASFGRGHAHDLAPFDVYHQVRGLRWPVVDGKETLWRYREGFDPFVPKGEEVRFYGKPDGKAVIFALPYEPAAESPDQEYDLWLSTGRVLEHWHTGSMTRRVPELHRAFPEAVLFIHPLDAKARGLHRGDKVKVISRRGEVISLVETRGRNRPPRGLVYMPFFDAAQLVNNLTLDATDPLSKETDFKKCAVKLERVVA

SEQ ID NO: 3269 - protein, 396 aa, Haemophilus influenzae R2846
MFEHIKAAPADPILGLGEAFKSETRENKINLGIGVYKDAQGTTPIMRAVKEAEKRLFDKEKTKNYLTIDGIADYNEQTKALLFGKDSEVIKSNRARTVQSLGGTGALRIAAEFIKRQTKAQNVWISTPTWPNHNAIFNAVGMTIREYRYYDAERKALDWDHLLEDLSQANEGDVVLLHGCCHNPTGIDPTPEQWQELAALSAKNGWLPLFDFAYQGLANGLDEDAYGLRAFAANHKELLVASSFSKNFGLYNERVGAFTLVAENAEIASTALTQVKSIIRTLYSNPASHGGATVATVLNDTQLRQEWENELTEMRERIKKMRHLFVQLLKEYGAEQDFSFIIEQNGMFSFSGLTGEQVDRLKEEFAIYAVRSGRINVAGITEDNIRYLCESIVKVL

SEQ ID NO: 3270 - protein, 230 aa, Spinacia oleracea
GRGKIEIKRIENTTNRQVTFCKRRNGLLKKAYELSVLCDAEIALIVFSSRGRLYEYANQSVKGTIDRYKKACSDQTGAGSVAEANAQYYQQEAAKLRNQIRTATENNRLLSRHMMGEGLSSLSMKELKNLETKLEKGISRIRSKKNELLFAEIEFMQKREIELHNNNQFLRARISENERAQQSMSLMPPGGSDYDLVPSQSFDSRNYFQVNALQPNSQYARQDQTPLQLV

SEQ ID NO: 3271 - protein, 452 aa, Pseudomonas putida KT2440
MPQPLYEFTDSPLLQRQQQQESNARSYPRRIPLALRRARGIHVEDVEGRQFIDCLAGAGTLALGHNHPVVVEAIQRVLADELPLHTLDLTTPVKDRFVQDLFGILPEALRREAKVQFCGPTGTDAVEAALKLVRTATGRSTVLAFQGAYHGMSQGALNLMGSHGPKQPLGALLGNGVQFMPYPYDYRCPFGLGGEAGVKANLHYLENLLLDPESGVPLPAAVILEVVQGEGGVVPADIEWLKGVRRITEQAGVALIVDEIQSGFARTGRMFAFEHAGIVPDVVTLSKAIGGSLPLAVVVYRDWLDTWKPGAHAGTFRGNQMAMAAGSAVINYLVEHRLAEHAEAMGQRLRGHLQRLQRDYPQLGDIRGRGLMLGVELVDPQGQPDALGHPPANRDLAPKVQRECLKRGLILELGGRHGAVVRFLPPLIISAEQIDEVAQRFSAAVAAAVGSV

SEQ ID NO: 3272 - protein, 520 aa, Sinorhizobium meliloti
MTAGNDFQHQAIAAHVAQRLAGPARAILGFQELLVEQARDLGLIHIKGDLDRIGAAARQLNGFIDRLLEGAACPLEEGEAEAEARLRHDLRTPLNAIIGYSEMILEEASDAPEHALKEDLHVILSAAAELLTQVDAIASLSRGETVEMLQPGERAEIDAAGLERLLFKAQEVACPEQGGRILVVDDVASNRDLLSRRLRREGHRVVTAESGLSALARLAEDEFDLILLDILMPDMNGIEMLSRLKSEERWQHVPVIMISGLSDVTAVARCIEAGADDYLTKPFNPILLRARINSTLEKKRWLDREHRYLQQIKTEKLRADSLIRAILPDQIVARLQDGEEIIADRFDEVSILFADIVGFSPIAASLTASDLVRRLDRMFRRFDLLTEQHRVEKIKTIGDAYMAACGIPEPAPDHADRIVALGKSMLRSLQDMEAGPDRFRVRIGIHTGPVVAGLIGRLRFVYDVWGETVNIASRLESQGVADVIQISEATRRALRGPWTLERRCALELRGIGAVETYLVR

SEQ ID NO: 3273 - protein, 447 aa, Trichodesmium erythraeum IMS101
MAYDYDLFVIGAGSGGLASSKRAASYGAKVAIAENDLVGGTCVIRGCVPKKLMVYGSRFSHFYKDAVGYGWSEVEPSFDWHKLIDAVNTEVLRLNKLHISFLEKAGVEIIEEYAKFIDPHTIEVGDRKVTADKILIAVGGKPEKIDIPGIEYSITSREIFHLKEQPKRMAVWGGGYIGVEFAGILNGVGTEVTQIIRRDSILRGFDTDISSNIQEGMVKHGINFRENTNVEKIEKVPEGLKVHLSGENAEPLIVDTFLCATGRKPNLAGLNLENAGVETLRGAVAVSNNCRTTQANIYAIGDCIDKVNLTPIAIAQGRAFADTEFGNIPRSISLENIPTAVFSEPEGGTVGLTEAAAREKFGDSIKCYRSKFRPMFHSFTGADEKVMVKLVVETNTDRILGVHMVGKDAGEIIQGMAIAVNMGATKADFDRTIGIHPSTAEELVTLN

SEQ ID NO: 3274 - protein, 762 aa, Mycobacterium tuberculosis H37Rv
MTSSDWLPTACILCECNCGIVVQVDDRRLARIRGDKAHPGSAGYTCNKALRLDHYQNNRARLSSPMRRRADGTYEEIDWDTAIVEIAEGFKQIRDTHGGDKIFYYGGGGQGNHLGGAYSGAFLKALGSRYRSNALAQEKTGEAWVDFQLYGGHTRGEFENAEVSVFVGKNPWMSQSFPRARVVLNEIAKDPGRSMIVIDPVVTDTAKMADFHLRVQPGCDAWCLAALAAVLVQENLCNEAFLAAHVHGVDTVRAALQEVPVADYAQRCGVDEELLRAAARRIGTAASVSVFEDLGIQQAPNSTVCSYLNKLLWILTGNFAKKGGQHLHSSFAPLFSQVSGRTPVTGAPIIAGLIPGNVVPEEILTEHPDRFRAMIVERGNPAHSLADSAACRAAFQALELMVVVDVAMTETARLAHYVLPAASQFEKPEATFFNFEFPRNGFQLRRPLFPPLPGTLPEPEIWARLVRALGVVDEADLRPLREAAAQGRQAYTEAFLAAAATNPTVAKLTAYVLYETLGPTLPDGLAGAAALWGLAQKTAMAYPDAVRRAGHADGNALFDAILERPSGVTFTVHNYEDDFALISHPDHKIALEIPEMLAEIRSLTQTPSRLTTPQLPIVLSVGERRAYTANDIFRDPSWRKRDANGALRVSVEDAQALGLADGCLARITTAAGSAEATVEVTETMLAGHAALPNGFGLDYTGDDGRTVVAGVAPNALTSTRWRDPYAGTPWHKHVPAAIRRADAESPIWYPKWAILPARGVLA

SEQ ID NO: 3275 - protein, 835 aa, Clostridium thermocellum ATCC 27405
MLFKVQQEIYERMNRMKAVIMAGGEGTRLRPLTCNRPKPMVPVVNKPVMEHIIELLKKHGFTDIAVTLQYLPDMIKDYFGDGSDFGINLRYYVEDKPMGTAGSVKNAEEFLDDTFLVISGDALTDIDLGKAVEYHYSKGSMATLVLKKVDIPLEYGVVVTDENGRITRFLEKPSWGEVFSDTVNTGIYILSPEVLKYFNKNEMFDFSKDLFPMLLKENKPMYGYITDEYWCDIGDLMAYSKAHMDVLDGKVKINIPGNKIKDRVWVGEGTVIEENVVIEEPCVIGANTRIKKDSVIGSYSVLGDNNIIGERSGIKRSILWKNNVLETNTQLRGTVVCSKVNIKEGVFAFENSVIGDDTQIGKNAVIKPSIKIWPNKIVEGGTEVNSNLVWGSKFVRSIFGFRGVAGEINVDITPEYASKLGAAYGAIFKGKGKIGVSSDDSAAAKMLKMSFMSGLLSAGLKVLDFGVLHLPVARSAVRFYGADGGIHISTSSTNFGRLTVDFLDKNGSNIKREVERKIENAFQREDFSRCEGEAIKDVEVIPDYTKYYLRNIINNTRSKDFGYRIALNSLSGFILETVGNLLETFGCTVEKTSLDLRNAKTMRNGNKSAEMTYFTDMIKMGNYDLGVSIEDTSEKMMLVDNNGRIVSDDMFTALISLIVFKTVQGGTVVVPISTSSVVDKLAEQNNGKVIRTKTSPQDIMNKMLGNETKENVYEQFTLHFDAIAGLVKILDFMKSENYSLSDLVNMIPDFYVSEKEVECSWNVKGKVIRQIIQENEGQSIETLEGVKIFKDGGWVLVLPDAEQPVCRIKSESYSAEFAEELTNFYVNKVREISQK

SEQ ID NO: 3276 - protein, 403 aa, Oryza sativa
MLAGSNCAFVQWYEAPREPAGMAAASSPAAAITCRAAVAWAPGQALVMEEVEVAPPEAMEIRVKVVSTSICRSDVTQWQSTPDTPDALIDFAAVSETQAQTDLFPRIFGHEASGVVESVGEGVTEFEVGDHVLTVFIGECMSCKHCVSGKSNMCQKLGLERRGVMHSDQKTRFSLRGKPVYHYCAVSSFSEYTVVHSGCAVKVGPTVPMDRICLLSCGVSAGLGAAWKVADISKGSSVVIFGLGTVGLSVAQGAKLRGASIIIGVDTNPEKQEKGKAFGVTDFINPEELNEPVQQVVKRLTNGGADYSFECGWGLTVTLGVPKAKPEVSAHYALLLSGRTLKGSLFGGWRPKSDLPLLVDKYANKEIQVDDLVTHDLSFDYINKALELMLENKCLRCVIHMPQ

SEQ ID NO: 3277 - protein, 408 aa, Oryza sativa
MQSAAAVGLLRPCGATTAAAPLQLRNPSPRGFGVGVGQPLLPPRGLRLSAVAPRAGISARRIGLVPASPEQEDERRRGARDVAVAATAAAAGEAGAEEGGGLAKTLQLGALFGLWYLFNIYFNIYNKQVLKVFPYPINITNVQFAVGTVIALFMWITGILKRPKISGAQLAAILPLAMVHTMGNLFTNMSLGKVAVSFTHTIKAMEPFFSVLLSALFLGEMPTPFVVLSLVPIVGGVALASLTEASFNWAGFWSAMASNVTFQSRNVLSKKLMVKKEESLDNITLFSIITVMSFFLLAPVTLLTEGVKVTPTVLQSAGLNLKQIYTRSLIAAFCFHAYQQVSYMILARVSPVTHSVGNCVKRVVVIVTSVLFFRTPVSPINSLGTGVALAGVFLYSQLKRLKPKPKTA

SEQ ID NO: 3278 - protein, 399 aa, Agrobacterium tumefaciens str. C58 (Cereon)
MAEAAAPLFDTFARAPLRFERGEGVWLFTESGERYLDFAAGVAVNSLGHAHPHLVEAIKTQAEKVWHVSNLYEVPGQEKLAKRLTEATFADKVFFTNSGAEALECAIKTARRYHYSKGHPEKFRIITFEGAFHGRTLATIAAGGQQKYLEGFGPKVEGFDQVPFGDVDALKAAITAETAALLIEPIQGEGGIRAPAKEFLQLLRSLCDEHDLLLIFDEVQTGVGRTGKFFAYEQTGVAPDIMAVAKGIGGGFPLGACLATADAASGMTAGVHGTTYGGNPLAMAVGNAVLDVVLADGFLEKVRDVALVFRQGLASLKDRYPDVIEEIRGEGLLLGIKARVPSGELLQAMRAEHLLGVPAGDNVIRLLPPLVTTAEEAREGLARVEAAAASLTAKQAKIA

SEQ ID NO: 3279 - protein, 210 aa, Azorhizobium caulinodans
MKGIILAGGSGTRLHPITLVVSKQLLPVYDKPMIYYPLCTLMMAGIRDILIITTPHDSELFQKLLKDGSQFGLNISYAVQPSPRGLADAFIVGREFVGNDRVALVLGDNLFFGHGLPELLKTAQARETGATVFGYPVTDPERYGVVEMDETGKVLSLEEKPLKPKSNLAVTGLYFYDNRVVDIAANLAPSPRGEIEITDVNKAYLDLGEL

SEQ ID NO: 3280 - protein, 486 aa, Desulfovibrio desulfuricans G20
MMAKYDYDIIVIGGGAAGLTVTAGAAQLGVKVLLVESGHALGGDCLHYGCVPSKTLLRTAGVRHLMRHAARYGLPDAQLPPVDFAQVAQRISEVQAVIQQHDSVERFTALGAEVLFGAASFADDHTVEIRSDDSVVRATGAKIVIATGSGASVPPLEGLKESGYLTNREIFSLPVLPASLIVLGGGPVALEMAQAFRRLGTEVTVVQRSGQLLSNEDADMADIVRLRLESEGVRVLTRTEIQSIRRGADGVQVRLVHEGSEKLLSAAELLVALGRAPHVSGLTLENAGVVYSARGVGVDARMRTNVPHIYAAGDVTGRYLFTHAAGYEGGIIIANAVFRLPKKADYTNMPWCTFTDPELASVGLNERRAQAAGVDYTVRTELFSGNDRALAEGAPEGRIKMLLDPREKVLGVQICGAGAGEIINQWVAVQAGKVSLSRIAGAVYPYPTLGEISKRVAGNVMADKLFSGKVQSALCFLFRHQGKACS

SEQ ID NO: 3281 - protein, 216 aa, Glycine max
MSKQRLQGKVAIVTGGATGIGAEAVRIFVENGASVVIADIKDELGHNLATSLGLDKVDYRHCDVRDEKQVEETVSFTLEKYGSLEILFSNAGIAGPLSSILDFDLNEFDNTMAVNLRGAMAAIKHAARVMVARETRGSIICTTSVAGSFAGCAGHDYTASKHGLIGLVRSACSELGAKGIRVNSMSPYAVATPLTCETFDMEPGEVEAAAHALANL

SEQ ID NO: 3282 - protein, 450 aa, Pelobacter carbinolicus
MSDNRIIALTMPKWGLTMEEGTISSWLMDEGDTIEVGSEILEVETDKIAQPVESAVEGILRRKIGEEDEEYPVKALIGIIAAEDVTEEEIDAFIASYGGEGAEGSDEDEAPAETAAAPEGIYELTMPKWGLTMEEGTISSWLIDEGDEVEVGTEIMEVETDKIAQPVESTVAGVLRRKIGEEDEEYPVKALIGIIADASVSDADIDAYLASRGGEAASGDEEEEAAAPAQPTSKPMSAIGAAISNTVTNSWTIPQFPVTMGIEMGAAKEFRAGLKAAGKAVSMNDMVIRACGKAIEQYPMVNATLGGKEYGLNADVNIAVAVGTDDALMMPVVKGCQALSLEEVASASRAVIDKVKAGTCGPAEMAGGNFAISNLGMLGVDSFGALVPPGMSAILAVGGIKDEVVVKDGEMVPVSTMKVTLVADHRVVDGLYSAQFLVELKRLLENPEEL

SEQ ID NO: 3283 - protein, 394 aa, Agrobacterium tumefaciens str. C58
MSNKWRPATQLVHGGTLRSPYGETSEAIYLTQGFVYENSEAAEARFKGETDGFIYARYASPTNDMFEKRMCLLEGAEDARALASGMAAVTAAIMCQLRAGDHIVAARALFGSCRWVVETLAPKYGIECTLIDGRDLDNWEKAIQPNTKLFFLESPTNPTLEVVDIAGVAKLANQIGAKVVVDNVFATPLFQKPLELGAHIVVYSATKHIDGQGRCLGGVILSDKKWIEEELQDYFRHTGPAMSPFNAWTLLKGIETLPLRVKQQTENAAKIADFLADSGKVAKVIYPGRADHPQADIIARQMSGGSTLVAFELKGGKDAAFKLQNALEIVKISNNLGDAKSLITHPGTTTHKNLSDEARAELGISGGTLRLSCGIEDTDDLLEDLAKGLAAVSA

SEQ ID NO: 3284 - protein, 318 aa, Glycine max
  unsure (1)..(318): unsure at all Xaa locations
MNFNCTANKEQKKTVDQSILLCCKFFVSESRNNATLNAIERAARSNPETVIVNMFHDRAYNRARYDLVSYVLHDCTGNPIYSPLHQTVIAMAEATFNAVNLEFHEGAHPRLGAVDDIVFHPLGHASLDEAAWLAKAVAADIGNRFSVPVFLYAAAHPTGKELDAIRRELGYYRPNSRGSQWXGWAMPETLPLSPDEGPNVVSRAKGITVIGARPWITFYNVPILCTDVSVARRIARKVSARGGGLPTVQTIAVVHEDSTEIACMLLDPKLVGADRVQNRVEMQAAEEGLDVEQGYFTDLSPEMFVEKYMKLINNANKS

SEQ ID NO: 3285 - protein, 330 aa, Candida albicans SC5314
MSTTATSTNELALLDKSVVVSPLVLLSVVDHYNRVAKDSKKRVVGVILGDNSTDTIKVTNSYAIPFEEDEKNPGVWFLDHNFIDSMGEMFKKINAKEKLIGWYHSGPKLKPSDLKINEVFRRYTDNPLLLIVDVQPREVGIPTDAYFAVDDIKNDGSAAEKTFIHVPSLIEAEEAEEIGVEHLLRDIRDQAAGNLSLRVSETHQSLLGLHQKLGEIANYLDKVYQKKLPMNHTILGKLQNVFNLLPNLMQQSGSDLDGGSDSSHALATAFTVKTNDELMIIYISTLVRAIIAFHDLIENKLENKKLNENKAQASVAESSLNSEKKDSIED

SEQ ID NO: 3286 - protein, 594 aa, Zea mays
MLYSTQTMLQTMDIVRFKISSLHIYTNLFNFYFLLNIKHKKTHGELGDLTTNRRSPLLLAIVEGERERERPRSVGFGFGRQLQLSATATMGLRVAATAPAPAGVRVLGRGAARVTPRPWAAVGGRRRFSVRMSVATTEATTTIAVGASEDQALEARNSKTVVAVILGGGAGTRLFPLTRRRAKPAVPIGGAYRLIDVPMSNCINSGINKVYILTQFNSQSLNRHLSRAYDFSNGVAIGDGFVEVLAATQRPGTEGKRWFQGTADAVRQFDWLFDDAKSKDIEDVLILSGDHLYRMDYMDFVQSHRQRGAGISICCLPIDGSRASDFGLMKIDDTGRVISFSEKPKGDELKAMQVDTTVLGLSKEEAENKPYIASMGIYIFKKDILLNLLRWRFPTANDFGSEIIPASAKEIDVKAYLFNDYWEDIGTIKSFFEANLALAEQPPRFSFYDADKPMYTSRRNLPPSMVNNSKITDSIISHGCFLDNCRIEHSVVGVRSRIGSNVHLKDTVMLGADYYETAVERGELLAEGKVPIGIGENTTIQKCIIDKNARIGKKVVISNSEGVDEADRTSEGFYIRSGITVVLKNAIIADGLVI

SEQ ID NO: 3287 - protein, 146 aa, Oryza sativa
MAALREASRRLVSRRESPAAYARPFLLTHSRGITYRLFIGGLSQFATEDSLAEAFSQYGQVLEATIVTDKMTNRPKGFGFVKFASEEAANKAKEEMNGKVLNGRVIYVDIAKAKMNRTTDSSPRATGPPKPPELGVPKTIESNMND

SEQ ID NO: 3288 - protein, 260 aa, Triticum aestivum
  unsure (1)..(260): unsure at all Xaa locations
MGGGSRSRAKEAEGESEVRPGXGMFVQRRDGEEGPTVRLRVSHGPALRDVFVPAQATFGELDRKRVLTNALEPERERLILARNGKPKMEYHYVCVANECVQMWMLGSHDPANVKEKVEPVMMDESMMRACEAVVRVRSEVDKLSAKVCELEKSVLAGKKVEDKEFVVLTELLMVQLLKLDGIEAEGEARAQRKAEVRRVQNLVETLDKLKARNANPSSDSAKSVSVSTEWETFENGMGSLNAPPARFSSTQNDTDWEQFD

SEQ ID NO: 3289 - protein, 539 aa, Arabidopsis thaliana
MTGATPENRTAPSPPPVKHVPESVLPAKPPKRNNYAFACAILASMTSILLGYDIGVMSGAMIYIKRDLKINDLQIGILAGSLNIYSLIGSCAAGRTSDWIGRRYTIVLAGAIFFAGAILMGLSPNYAFLMFGRFIAGIGVGYALMIAPVYTAEVSPASSRGFLNSFPEVFINAGIMLGYVSNLAFSNLPLKVGWRLMLGIGAVPSVILAIGVLAMPESPRWLVMQGRLGDAKRVLDKTSDSPTEATLRLEDIKHAAGIPADCHDDVVQVSRRNSHGEGVWRELLIRPTPAVRRVMIAAIGIHFFQQASGIDAVVLFSPRIFKTAGLKTDHQQLLATVAVGVVKTSFILVATFLLDRIGRRPLLLTSVGGMVLSLAALGTSLTIIDQSEKKVMWAVVVAIATVMTYVATFSIGAGPITWVYSSEIFPLRLRSQGSSMGVVVNRVTSGVISISFLPMSKAMTTGGAFYLFGGIATVAWVFFYTFLPETQGRMLEDMDELFSGFRWRDSKSKPKGNPEKTVPNPEVEIGSNKQWKEGDTQSS

SEQ ID NO: 3290 - protein, 567 aa, Saccharomyces cerevisiae
MSGVNNTSANELSTTMSNSNSAVGAPSVKTEHGDSKNSLNLDANEPPIDLPQKPLSAYTTVAILCLMIAFGGFIFGWDTGTISGFVNLSDFIRRFGQKNDKGTYYLSKVRMGLIVSIFNIGCAIGGIVLSKVGDIYGRRIGLITVTAIYVVGILIQITSINKWYQYFIGRIISGLGVGGIAVLSPMLISEVAPKHIRGTLVQLYQLMGTMGIFLGYCTNYGTKNYHNATQWRVGLGLCFAWATFMVSGMMFVPESPRYLIEVGKDEEAKRSLSKSNKVSVDDPALLVEYDTIKAGIELEKLAGNASWSELLSTKTKVFQRVLMGVMIQSLQQLTGDNYFFYYGTTIFKSVGLKDSFQTSIIIGVVNFFSSFIAVYTIERFGRRTCLLWGAASMLCCFAVFASVGVTKLWPQGSSHQDITSQGAGNCMIVFTMFFIFSFATTWAGGCYVIVSETFPLRVKSRGMAIATAANWMWGFLISFFTPFITGAINFYYGYVFLGCLVFAYFYVFFFVPETKGLTLEEVNTMWLEGVPAWKSASWVPPERRTADYDADAIDHDNRPIYKRFFSS

SEQ ID NO: 3291 - protein, 58 aa, Pseudomonas putida
MHNIIQRPMAINGQVVIRPMMYLALSYDHRLIDGKEAVTFLVTIKNLLEDPSRLLLDI

SEQ ID NO: 3292 - protein, 233 aa, Staphylococcus epidermidis ATCC 12228
MTGKHKRAIEDHFDNQKELEMVLENKGKADLLEKVQYSTDLANIFYVRQKEQKGLGHAIHTAKQFIGNEPFAVLLGDDIVESDTPAIKQLMDVYEETGHSVIGVQEVPESDTHRYGVIDPSAKEGSRYEVRQFVEKPKQGTAPSNLAIMGRYVLTPEIFDYLETQQEGAGNEIQLTDAIERMNSKQQVYAYDFEGNRYDVGEKLGFVKTTIEYALKDPEMSQDLKAFIKQLDI

SEQ ID NO: 3293 - protein, 484 aa, Brucella melitensis 16M
MKSTIHSEGAAVSASVANHTPKPPLLSVDDAKALDLPRMTELFTAHLNPGQLHFMKLLGFHKVKVERAEGMYYYDQNGRRILDFFGGFGSLAFGHNHPRIIAARRKFQEELRHEIAIAFMSQYAAALAYDLAACSPGDLDMVFLGSSGSEAMEAAIKVAERAAGPKKPKIVYAENSFHGKTKGVLSITDGGLYRGEFKLVDNTVRVPFGDITAIENAFRSDPEIGTIVLETVQGGCGIIQADAEFWQKLRQLCDRYGVIWVADEVQCGFGRTGKFYAFEHYGVIPDVTALAKSLGGGKAAMAAMIARRDIYMKAYGTPKTAMIHAMATFGGIGEACITAIEAVNILYDEQLIDNSAEVGDYLLERLKELQVRYPGLLKDVRGKGMMVGLEFHDFSQAMPMVLRPMLAMLDDKLKGSLPGFIGSHLLRDHGVLVAFTEYNRNVIRLEPPLICQRAHVDEFIKALDEVLSRGIVKIVKDFIKAQIK

SEQ ID NO: 3294 - protein, 208 aa, Saccharomyces cerevisiae
MSLEEFDEVKYDHSTKRLDTPSRYLLRKARRNPNGLQELRESMKSSTIYVGNLSFYTSEEQIYELFSKCGTIKRIIMGLDRFKFTPCGFCFIIYSCPDEALNALKYLSDTKLDEKTITIDLDPGFEDGRQFGRGKSGGQVSDELRFDFDASRGGFAIPFAERVGVPHSRFDNSSSQSNTNNYIPPPDAMGTFRPGFDEEREDDNYVPQ

SEQ ID NO: 3295 - protein, 266 aa, Gossypium hirsutum
LSIEEVEVAPPQKDEVRIKILFTSLCHTDVYFWDAKGQNPLFPRILGHEAGGIVESVGEGVTDLKPGDHVLPIFTGECKECPHCLSEESNMCDLLRINTDRVGMINDGKSRFSINGKPIYHFLGTSTFSEYTVVHVGQVAKINPHAPLDKVCVLSCGMSTGFGATVNVAKPKKGQSVAIFGLGAVGLAAAEGARVSGASRIIGIDLNPSRFEQAKKFGVTEFVNPKDYNKPVQEVIVEMTGGGVDRSVECTGSIQAMISAFECVHD

SEQ ID NO: 3296 - protein, 266 aa, Gossypium herbaceum
LSIEEVEVAPPQKDEVRIKILFTSLCHTDVYFWDAKGQNPLFPRILGHEAGGIVESVGEGVTDLKPGDHVLPIFTGECKECPHCLSEESNMCDLLRINTDRVGMINDGKSRFSINGKPIYHFLGTSTFSEYTVVHVGQVAKINPHAPLDKVCVLSCGMSTGFGATVNVAKPKKGQSVAIFGLGAVGLAAAEGARVSGASRIIGIDLNPSRFEQAKKFGVTDFVNPKDYNKPVQEVIVEMTGGGVDRSVECTGSIQAMISAFECVHD

SEQ ID NO: 3297 - protein, 667 aa, Bacillus subtilis subsp. subtilis str. 168
MSKVHQSACPLNCWDSCGFLVTVDDGKVTKVDGDPNHPITEGKICGRGRMLETKTNSPDRLRYPMKKQNGEFVRISWEQALDEIADKLREIKETSETTAVLHSHDYANNGLLKALDQRFFNGYGGVTEIVGSICWGSGIEAQSWDFGRSYGHGPLDIYNSKHVVVWGRNVSRTNMHLYHHLQQVKKKGATITVIDPIFNPTAKLADRYISVKPGMDGWLAAAVLKVLIEMGRTDETFISEHSVGFDDVKELLKTVSLEEFIVKTETSMEELEYLAGLYADGPVSTFMGLGMQRYKNGGGTIRWIDALVAASGNVGIKGGGANFGNVQIGESFAKTKLTLPELKTTSRSFSMMTQAEEVLTAADPAIEMIIVTCGNPLTQVPNTNKVRQAFEKVPMTVAIDSIMTDTAELCDYVLPTATVFEEEDIYYSSMYHHYVQYGKKLVEPQGEAKSDSWIWSELAKRLGFGELFEYSTQEFLEMGLSSLEAEDVTLERLKEKGHLPLPVKQVPWDDYQFLTPSGKFEFTSSLAEQKGFSGSLQLNVPEESVFHNEELAGKYPYTLLSIHPQRSNHSQHVPFIEKLQHVQVDISPDIAAGQDLQDGDEVVIFNDRGSMKGKVKVMKQAHAKTINIDEGMWAAFGGSVNALTNDTNSDNGMGSTLFDCLVGLKKA

SEQ ID NO: 3298 - protein, 266 aa, Gossypium raimondii
LSIEEVEVAPPQKDEVRIKILFTSLCHTDVHFWDAKGQNPLFPRILGHEAGGIVESVREGVTDLKPGDHVLPIFTGECKECPHCLSEESNMCDLLRINTDRVGMINDGKSRFSINGKPIYHFLGTSTFSEYTVVHVGQVAKINPHAPLDKVCVLSCGMSTGFGATVNVAKPKKGQSVAIFGLGAVGLAAAEGARVSGASRIIGIDLNPSRFEQAKKFGVTESVNPKDYNKPVQEVVVEMTGGGVDRSVECTGSIQAMISAFECVHD

SEQ ID NO: 3299 - protein, 214 aa, Oryza sativa
  unsure (1)..(214): unsure at all Xaa locations
QYHSQRKTTLEYPKVLLLLAAYLDRSVQKNEDLLDSNKIKDSSTIFHGHRAPDLSIKLYAERIFKYSECSPSCFVLAPHLPWRDIYXQPHVYMTSLSVHRLLITSVVVAAKFTDDAFFNNAFYARVGGISTVEMNRLELDLLFNLDFRLKVDLETFGSYCLQLEKETMVLVIDRPIQQVHGVNSTKDLSRNSSIDESCKSELMRYSSQALQGCS

SEQ ID NO: 3300 - protein, 465 aa, Arabidopsis thaliana
MSRLLQTPFLPSVSLPTKTRSSVTGFRVKPRIIPIQAKIREIFMPALSSTMTEGKIVSWVKSEGDKLNKGESVVVVESDKADMDVETFYDGYLAAIMVEEGGVAPVGSAIALLAETEDEIADAKAKASGGGGGGDSKAPPASPPTAAVEAPVSVEKKVAAAPVSIKAVAASAVHPASEGGKRIVASPYAKKLAKELKVELAGLVGSGPMGRIVAKDVEAVAAGGGVQAAVAVKEVVAAPGVELGSVVPFTTMQGAVSRNMVESLGVPTFRVGYTISTDALDALYKKIKSKGVTMTALLAKATALALAKHPVVNSSCRDGNSFVYNSSINVAVAVAIDGGLITPVLQNADKVDIYSLSRKWKELVDKARAKQLQPQEYNTGTFTLSNLGMFGVDRFDAILPPGTGAIMAVGASQPSVVATKDGRIGMKNQMQVNVTADHRVIYGADLAQFLQTLASIIEDPKDLTF

SEQ ID NO: 3301 - protein, 266 aa, Gossypium robinsonii
  unsure (1)..(266): unsure at all Xaa locations
LSIEEVEVAPPQKDEVRIKILFTSLCHTDVYFWDAKGQNPLFPRILGHEAGGIVESVXKGVTDLKPGDHVLPIFTGECKECPHCLSEESNMCDLLRINTDRVGMINDGKSRFSINGKPIYHFLGTSTFSEYTVVHVGQVAKINPHAPLDKVCVLSCGMSTGFGATVNVAKPKKGQSVAIFGLGAVGLAAAEGARVSGASRIIGIDLNPSRFEQAKKFGVTEFVNPKDYNKPVQEVIVEMTGGGVDRSVECTGSIQAMISAFECVHD

SEQ ID NO: 3302 - protein, 497 aa, Ammi majus
MDVIIIVLSVMLAYVLVKHLLLSRDRGKNLPPGPFQLPIIGNLTNLGKLPHRSLAKLSQNYGPIMHLQLGRVTTIVISSSAIAQQVFQKKGRAFSRRFIPDSLCACDHSLYSFVWLPIGPQWRNLRKISNSNLFSANKLDANQHLRGRKVNELIAYVQKCSQTGDAVDIGRAAFRTSFNLLSNTVFSKDMVDPYQDSAQEFKDLAWNIMVEAGSPNLVDYFPVLKKMDPQGVKRRMTGYFQKVIKMLDGLINERLALKGSGTTVDKTDMLDELINISQVNPNEMDKILMEHLFVDIFVAGTDTTSNTVEWGMAEILRSTETMMKVKAELRHLVGKGVILEEGDIYRLPFLQCIVRETLRLHPPFPLLLPRQTEEETELNGYTIPKNSQVLVNAWAIGRDPVSWKNPSSFRPERFLDSEVDVKGQDFELIPFGAGIRICPGLPLVMRMVPVMLGSLINCFDWELEGGIPLNELDMEEKCGLSVAKLHPLRVLATSQVV

SEQ ID NO: 3303 - protein, 302 aa, Moorella thermoacetica ATCC 39073
MTRIQKAIIPAAGWGTRFLPATKAQPKEMLPIVDKPAIQFIVEEAVNAGAEDILIITGKNKRAIEDHFDRSLELENLLREKGKDELLALVEGIAELADIHYIRQKEQLGLGHAVYCARKFIGQEPFAVLLGDDIIVNSPSCLEQMLAVYEEVGATIVAVQEVPREEVNRYGVIDPLEVDGSLIRVRDLVEKPRPEEAPSNLAVIGRYILVPAIFPLLEKVKPGAGGEIQLTDALRLLARQDRVYAYRFQGKRYDIGDKLGFLQATVEFALARPDLAGPFSEYLAGIITSTADKLQVAATREG

SEQ ID NO: 3304 - protein, 637 aa, Arabidopsis thaliana
MVLPLFRRAAIARTSSLLRARLFAPASEFHSRFSNGLYHLDDKISSSNGVRSASIDLITRMDDSSPKPILRFGVQNFSSTGPISQTVLAMPALSPTMSHGNVVKWMKKEGDKVEVGDVLCEIETDKATVEFESQEEGFLAKILVTEGSKDIPVNEPIAIMVEEEDDIKNVPATIEGGRDGKEETSAHQVMKPDESTQQKSSIQPDASDLPPHVVLEMPALSPTMNQGNIAKWWKKEGDKIEVGDVIGEIETDKATLEFESLEEGYLAKILIPEGSKDVAVGKPIALIVEDAESIEAIKSSSAGSSEVDTVKEVPDSVVDKPTERKAGFTKISPAAKLLILEHGLEASSIEASGPYGTLLKSDVVAAIASGKASKSSASTKKKQPSKETPSKSSSTSKPSVTQSDNNYEDFPNSQIRKIIAKRLLESKQKIPHLYLQSDVVLDPLLAFRKELQENHGVKVSVNDIVIKAVAVALRNVRQANAFWDAEKGDIVMCDSVDISIAVATEKGLMTPIIKNADQKSISAISLEVKELAQKARSGKLAPHEFQGGTFSISNLGMYPVDNFCAIINPPQAGILAVGRGNKVVEPVIGLDGIEKPSVVTKMNVTLSADHRIFDGQVGASFMSELRSNFEDVRRLLL

SEQ ID NO: 3305 - protein, 112 aa, Listeria monocytogenes
MTDRKNLTTNQGVPVGDNQNSMTAGRKGPTLIEDYVLIEKLAHFDRERVPERVVHARGAGAHGKFVTKKSMKKYTMAKFLQEEGTETEVFARFSTVIHGQHSPETLRDPRGF

SEQ ID NO: 3306 - protein, 124 aa, Escherichia coli O157:H7
MKQKITDYLDEIYGGTFTATHLQKLVTRLESAKRLITQRRKKHWDESDVVLITYADQFHSNDLKPLPTFNQFYHQWLQSIFSHVHLLPFYPWSSDDGFSVIDYHQVASEAGSGRIFSSSVNAVI

SEQ ID NO: 3307 - protein, 398 aa, Thermotoga maritima
EKMTIRDVDLKGKRVIMRVDFNVPVKDGVVQDDTRIRAALPTIKYALEQGAKVILLSHLGRPKGEPSPEFSLAPVAKRLSELLGKEVKFVPAVVGDEVKKAVEELKEGEVLLLENTRFHPGETKNDPELAKFWASLADIHVNDAFGTAHRAHASNVGIAQFIPSVAGFLMEKEIKFLSKVTYNPEKPYVVVLGGAKVSDKIGVITNLMEKADRILIGGAMMFTFLKALGKEVGSSRVEEDKIDLAKELVEKAKEKGVEIVLPVDAVIAQKIEPGVEKKVVRIDDGIPEGWMGLDIGPETIELFKQKLSDAKTVVWNGPMGVFEIDDFAEGTKQVALAIAALTEKGAITVVGGGDSAAAVNKFGLEDKFSHVSTGGGASLEFLEGKELPGIASMRIKKA

SEQ ID NO: 3308 - protein, 326 aa, Escherichia coli O157:H7
MWKEPGTSCIHLEKTHLIIKLLRSIIDDIAPGTVIITETNVPHKDNIAYFGEGDDEAHMVYQFSLPPLVLHAVQKQNVEALCQWAQSLSLPSGKTTWFNFLASHDGIGLNPLRGLLPESEILALVEALQQEGALVNWKNNPDGTRSPYEINVTYMDALSRRESSDEERCARFILAHAILLSFPGVPAIYIQSILGSRNDYAGVEKLGYNRAINRKKYHSEEITRELNDEATLRHAVYHELSRLITLRRSHNEFHPDNNFTIDTVNSSVMRIQRSNAEGNCLTGLFNVSKNIQHVNITGLHGRDLISEVDILGNKITLRPWQVMWIK

SEQ ID NO: 3309 - protein, 377 aa, Methanococcoides burtonii DSM 6242
MKVSKPRGTRDFLPEETARRRNIENIMRNVVNKWDYKEVITPTFENLELFTLKSGEGVIGELYNFNDKGNRNMALRPELTAPVMRMYVNEMQATPKPLKLFYFENCFRYERPQKGRFREFWQFGVEVIGSNRADADAEIIALATTMLNAAGIKGDLHVGHLGIIRHILRELEPEQQSKIMRLVDKKDDSGLEEYFEEINAPVELRRNLLELICITGTDAITKAREILGDIEEIDKFEQLLTFLNAYEIDYSINLGIARGLDYYTGMVFEIYAEGLGAQNQVCGGGSYQLISLFGGGDVPSTGFGLGFDRIMEVCEIMPEKQKSVVVISTDETRIDAIQVTTSLRKELTVYLDIMQRNFKTQLSHANNIEADYAVIVG

SEQ ID NO: 3310 - protein, 506 aa, Vibrio vulnificus CMCP6
MIYAQPGSDNAVVNFKSHYDNYIGGEWVKPVSGEYFDNISPVNGQAYCKVARSSAADINLALDAAHSVRYQWAKTSVTERANILLKIADRIEAHLEELAVAETWENGKPVRETLAADLPLVVDHFRYFAGCIRAQEGSAAELDANTASYHFPEPIGVVGQIIPWNFPMLMAAWKLAPALAAGCCVVLKPAEQTPTSILVLMEKIGDLIPAGVVNVVNGFGAEAGQALATSDRIAKLAFTGSTEVGNHILKCAAESLIPSTVELGGKSPNIYFPDVFDHEDAYLDKCIEGTLLAFFNQGEVCTCPSRVLVHESIYDQFIAKVAERAKSIKQGNPLDTDTQVGAQASQEQFDKILSYLEIGRQEGAKVVFGGEIAKQEDDLASGYYIQPTLLQGHNKMRVFQEEIFGPVIAVTTFKDEAEALAIANDTEYGLGAGVWTRDQNLAYRMGRNIEAGRIWINCYHAYPAHAAFGGYKKSGIGRETHKMMLNHYQNTKNLLISYDVNPLGFF

SEQ ID NO: 3311 - protein, 425 aa, Helicobacter pylori 26695
MAYNPKILQKPKEGEEITIKDNKLHVPNHPIIPFIEGDGIGSDITPAMIKVVDSAVQKAYKGEKKIAWYEVFVGEKCYQKFKDYKELSPEEQWLLPDTIEAINHYKVSIKGPLTTPIGEGFRSLNVALRQKMDLYVCLRPVRWYGSPSPVKEPQKVDMVIFRENSEDIYAGIEWQEGSAEAKKLIHFLQNELKVKKIRFPESSGIGVKPISKEGTERLVRKAIEYAIDNDKPSVTFVHKGNIMKYTEGAFMKWGYALAQKEFNAQVIDKGPWCSLKNPKNGKEIIIKDMIADAFLQQILLRPSEYSVIATMNLNGDYISDALAAMVGGIGIAPGANLNDTVGMFEATHGTAPKYAGLDKVNPGSIILSAEMMLRHMGWVEAADLIVSAMEKAIKSKKVTYDFARLMDGAKEVKCSEFASVMIENM

SEQ ID NO: 3312 - protein, 405 aa, Methanococcoides burtonii DSM 6242
MKAVILAAGEGLRCRPLTLTRSKVMLPVANKPIIEHVIDSLAKNEIKDLILVVGYEKERIMDYFEDGIDFGINITYVHQKAQLGTAHAIKQVAELMGEEDETFLVLNGDNVIEANTIKDLLDNHNGNATILTARKENTRGYGVIVCDGKKVKKIVEKPTAEVSHVINTGIYMFDQNIFERIEQTPISQMGEFAITDTLQQMIDDGLQVDHTITNSLWIDAVFSWDILKDNSIVLDRSKDYGIKGTVEEGAIIRGNVSIGNNTIIRSGCYIVGPAIIGDNCEIAPTVVILPSTTIGDNVTIGSFSHLQNSIIMNNTRIGNHSHISNSVIGMNNSIGPYFITEDKENIKIELEDDIQTAEKLGTITGDDTIIGHGVLVKAGVMISSNCNIDSGKIISRNLPENSIVI

SEQ ID NO: 3313 - protein, 252 aa, Prunus caroliniana
AHYKSEADVGNAIAEAIRSGLVKREELFITSKASNHGHVVEACKNSLKKLQLDYLDLYLVHYPLATKHSGVGTTASLLDENKVLDIDVTVSLETTWHDMEKTVSLGLVRSIGLSNYELFLTRDCLSYAKIKPQVSQFETYPYFQRESLVKFCKKHGVTPMAHTPLGGATANVKSFGSISPLEDPVLLGLAKKYKKSVAQIALRWNIERDTPVIPKSSKVERLKENLEVLNFKLEKEDIELINTIDKKSRTTL

SEQ ID NO: 3314 - protein, 306 aa, Streptococcus pneumoniae TIGR4
MTKTAFLFAGQGAQYLGMGRDFYDQYPIVKETIDRASQVLGYDLRYLIDTEEDKLNQTRYTQPAILATSVAIYRLLQEKGYQPDMVAGLSLGEYSALVASGALDFEDAVALVAKRGAYMEEAAPADSGKMVAVLNTPVEVIEEACQKASELGVVTPANYNTPAQIVIAGEVVAVDRAVELLQEAGAKRLIPLKVSGPFHTALLEPASQKLAETLAQVSFSDFTCPLVGNTEAAVMQKEDIAQLLTRQVKEPVRFYESIGVMQEAGISNFIEIGPGKVLSGFVKKIDQTAHLAHVEDQASLVALLEK

SEQ ID NO: 3315 - protein, 528 aa, Crocosphaera watsonii WH 8501
MDKQQLWQRYQDWLYYHEGLGVYVDVSRMRFDHGLVTQLTPKFEKAFADMETLESGAIANPDEGRMVGHYWLRAPELAPNDDVRKEITEPLANIGEFVQKVHAGTIKPPTADKFTHVLSVGIGGSALGPQFVAEALSDVDPPMVIHFIDNNDPAGIDRVIEQIGDHLKNTLVLITSKSGGTPETRNGMLEVKNAYESKGLAFEPNAVAVTMPGSKMDKVAVDDKWLARFPMQDWVGGRTSELSAVGLLPAALQGINIDEMLVGAKEMDEATRVKDLKTNPAALLALAWYHSGNGKGEKDMVVLPYKDSLLLFSRYLQQLVMESLGKEKDLDGNTVYQGIAVYGNKGSTDQHAYVQQLREGVPNFFATFIEVLEDGRDTLFEIEPGVTSGDFLSGFLQGTRQALFENNRDSITITIPQVNPRIVGALIALYERTVSFYASLVNINAYHQPGVEAGKKMAASILDLQTKVQTVIKETSEVLDMATLAEKAGSPDEVESVYKIVRHLAANGRGVSLEGELTDLKTLKVSAS

SEQ ID NO: 3316 - protein, 423 aa, Saccharomyces cerevisiae
MFKRYLSSTSSRRFTSILEEKAFQVTTYSRPEDLCITRGKNAKLYDDVNGKEYIDFTAGIAVTALGHANPKVAEILHHQANKLVHSSNLYFTKECLDLSEKIVEKTKQFGGQHDASRVFLCNSGTEANEAALKFAKKHGIMKNPSKQGIVAFENSFHGRTMGALSVTWNSKYRTPFGDLVPHVSFLNLNDEMTKLQSYIETKKDEIAGLIVEPIQGEGGVFPVEVEKLTGLKKICQDNDVIVIHDEIQCGLGRSGKLWAHAYLPSEAHPDIFTSAKALGNGFPIAATIVNEKVNNALRVGDHGTTYGGNPLACSVSNYVLDTIADEAFLKQVSKKSDILQKRLREIQAKYPNQIKTIRGKGLMLGAEFVEPPTEVIKKARELGLLIITAGKSTVRFVPALTIEDELIEEGMDAFEKAIEAVYA

SEQ ID NO: 3317 - protein, 255 aa, Leuconostoc mesenteroides subsp. mesenteroides ATCC 8293
MNYGFIGAGNMATAMIKGLIYAGIDSKNIYVSSPHSAAKLAANLHIQAADSETIAKKCDIVIIAFLPNQLRTLGNSLNLDGKIVISVLAQVTIADLDEVFPTAFNVRSLPNINSAIGKGSTALAFSKRLNEGQIEVVQNYWHLLGTTSVLDEQHFAIFSAIAGSGPAFVLKFIDALTQAGINNGLDGESAAAIAASTVAGTTETLQKSNSDAVTLMNNVASPGGSTRAGLDNFEQNDFDTIVNSAINATVNHKHT

SEQ ID NO: 3318 - protein, 313 aa, Neisseria lactamica
MTKHIAILRGDGIGPEIVAETVRVLDKLIEQGLDAGYEYAPLGGEAYDEYGHPYPEFTQNLCRKADAVLLGAVGSPQYDNLDRPLRPERGLLAIRKDLNLFANLRPAVLYPELANASTLKPEIVAGLDILIVRELTGDIYFGEPRGIRVLENGEREGYNTMKYSESEIRRIAHVAFQSAQKRSKKVCSVGKANVLETTELWREIFEEIGKEYPDVELSHMYVDNAAMQLVRAPKQFDVIATGNIFGDILSDEASMLTGSLGMLPSASLDENGKGLYEPSHGSAPDIAGQNKANPLATILSLAMLLRYSLNDEA

SEQ ID NO: 3319 - protein, 320 aa, Bordetella pertussis Tohama I
MPSQLEALRRHTVVVADTGDFEAMRALRPTDATTNPSLILKAVQQEAYRPLLVQTARAHQGASPAEITDRLLVAFGRQILDIVPGRVSTEVDARLSFDTRATVERARGLIALYQAAGVPRERVLIKIASTWEGIQAARVLQAEGIRCNLTLLFCLPQAAACADAGVQLISPFVGRIYDWHKKNAGAEWVEDARRGANDPGVQSVSRIYRYYKRFGIETEIMGASFRNVDQILALAGCDLLTISPELLTRLAQTEGEVPAALSPQAGHDDADAVRLDGGEVAFRTQLNEDAMASEKLSEGIRLFVADARKLDALIESHGAA

SEQ ID NO: 3320 - protein, 121 aa, Saccharomyces cerevisiae
MSNEVDRMDVDEDESQNIAQSSNQSAPVETKKKRFEIKKWTAVAFWSWDIAVDNCAICRNHIMEPCIECQPKAMTDTDNECVAAWGVCNHAFHLHCINKWIKTRDACPLDNQPWQLARCGR

SEQ ID NO: 3321 - protein, 1136 aa, Neurospora crassa
MATAQLAYGVEKIVGNGPEQIKQDVSAYDPSKGTGDASELMKALVWEGAKKVQVVEVPKPKIVEPTDVILKVTGSTICGSDLHLYHGAVMQMNKGDILGHEFCGIVEQVGPAVQKVKPGKRYVVSFQIACGNCFFCKNKLSSQCEVTNSNSQMKAMYGGRTAGIFGYSHLTGGFAGGQAEYVRVPLADANMLEIPDDVPDEKALYLSDVLPTSYNGVKDTAVYPGDALAIFGGGPIGQMVGIFALWEGASKVIYVDTEPRLSFIKSRWPAEHADKLHLVDFKQLSSGFTKNETVVSKLKELTGNRGPDVAIDCAAGEYAKGWLHWLEMQIGAETDTSEIINEMVEGVRNYGRVGLTGVYVGYTNHFNVGSLMQRGIRLIGNGQAPVHKYWEDLLQKIREGTLDPTIMISHRVRLDDMDKVYHKFDAKEDAMQKVFVETKFSLPRAPGTPELTTRPHYHEVLHKQWHEPVFVPAANHPHCRSIRRFPIAAASSCSPIIYPMRCTCIPQSRPPLPVSLQTTADEHLPIFVSAAATPRGRPPPTVVDVVSVRSRSSSSSSSSSPPTVTFNKTLGVQANEEKEKEEKEVEAEIDDQERRLGSHITTRRRSRLPPVAPPQATKRKAKCDVNRDPSYDHDDSDSNNDNDNDNDFLESPTLRSHPPHSSCHRNRTTTTASAGSDGLFPPTCDPLYHLYDLSSSSSSSSYYLPEHAMFSLIHNPRTFLRFIFGIVFLMCFLTNMVSGGPLTAQHLRDAFRGHRPWKTDNNERRDDDITQSQSQSQSTPPPQQGSGNVIRVAASPAQIDPHGVYIRASPLYSPTDGRPDTSRIIAGFASTSGSDRVLRVSSSTNSGASWSPLGEITRFPSDGTHDLDNAMPLALPSGRILFAFRHHSLSPSSSPSGGFHYTFYRLDLCSSSDGGRTWSFLSHIDQRAAASSSGNKNGLWEPFLRVAADGNTIQAYYSSENSADDQDNLMRYSTDEGKTWSDPPILVSSSPTAASRDGMTGVSALSSSSSPRELICVFETTSPDGTFSIARVLSHDDGLTWGERENVYMAQGGKWAGAPQVYLVGDTLVTSFLTNEGTDLPKIDGAYTKVVVSKDQGKTWTETGKAETVAGTGSHWPGIRIAMGIGVMSKYLDILR

SEQ ID NO: 3322 - protein, 656 aa, Moorella thermoacetica ATCC 39073
MVEGGKIKELAGDPAHGYSRGHLCRFGYSYLDIFHHPARVLYPLRQEPRGSGNWRRIGWDEAMTLIAGKMLELKGRWGSFLPVFFYSNSGNIGLLHQAWNWLARSLGEVTVASGSLCWSAGLDAMVYGYGAHNHPDPAAMARAGYLLLWGANPAWTAVHQMEYIYEARERGARLVVIDPIFTATAARADFYVQIKPGSDGALALGLAHQLWQKGLVDNYYLENYVRGWPEWREYLAGLDPRELVAATGVPLELMARLAEEYAAGNPAAIWIGIGLQRHINGGQNIRAINALAAMTGNLGREGGGVYYASPVASELFTTSWPEWMRPAGSERQIPVYDLARGLEEADSPPVKMALLANANPLAQNATTQELQRALANLDLVVLSGQFLTETARAADVFLPVTTFLESWDVVPSYWHRWIGINEPAVSPGGECRSDIQVVSDLARVLNQISPGCCPFPSGWTEEEWLEQVFNPEVYRLLGINHYRDLLDGPRELKLPANPWAGGRFATPSGRYEIYSDRAAAAGLPSLPVYQPAAAGTEAYPYRLLTPHTSAGLNSQFYNLGDVPEPLALVNPRLAREQGLHSGSQARLYNEWGEIIIPVVISELVPPQTILCHQRPLPGGQVINDLTPPLATDMGTITSSGPGLAYYDTFVNIAPVA

SEQ ID NO: 3323 - protein, 582 aa, Lotus corniculatus var. japonicus
MSSSFSIRFLAPPFPSTSRPKSCLSAATPAVAPTDAAVSRLEPRVEERNGYWVLKEEHRGGINPQEKVKLEKEPMALFMEGGIDELAKVSIEELDSSKLTKDDVDVRLKWLGLFHRRKHQYGRFMMRLKLPNGVTTSAQTRYLASVIRKYGKDGCADVTTRQNWQIRGVVLPDVPEILKGLAEVGLTSLQSGMDNVRNPVGNPLAGIDPDEIVDTRPYTNLLSHFITANSRGNPTVSNLPRKWNVCVVGSHDLFEHPHINDLAYMPANKDGRFGFNLLVGGFFSPKRCAEAIPLDAWVSAEDVIPVCKAILEMYRDLGTRGNRQKTRMMWLIDELGIEVFRSEVEKRMPLGQQLERASQEDLVQKQWERRDYFGANPQKQEGLSYVGIHIPVGRIQADEMDELARLADEYGTGELRLTVEQNIIIPNVENSKLSALLNEPLLKEKFSPEPSLLMKTLVACTGSQFCGQAIIETKARALKVTEEVERLVAVTRPVRMHWTGCPNTCGQVQVADIGFMGCMARDENGKPGEGVDIFLGGRIGSDSHLAEVYKKAVPCKDLVPIVADILVKHFGAVQRNREEGDD

SEQ ID NO: 3324 - protein, 477 aa, Triticum aestivum
MESRRGGGGPAAAAAAAGDPRGPMPGFGAPQHTIPTNVNVMQPSRVADLGALAHSAGFRIEDLANFSTNNLFNLKPNTHAYTSDPLQFGNYGKSISPTDLATTAAAAAAVTAVDPQALLQQKGVQPNLVALRTHNNDNWGESSMADTSPRTDTSTDPDIDIDERNQMFEQGQLAAPTASDSSDKSRDKLDHKSLRRLAQNREAARKSRLRKKAYIQNLESSRLKLTQLEQELQRARQQGIFISSSGDQSQSASGNGAVAFDMEYARWLEEHNKHINELRAAANAHAGDDDLRKIVDSIMSQYDEFFRLKGVAAKADVFHVLSGMWKTPAERCFMWLGGFRSSELLKLLAGQLEPLTEQQLTGICNLQQSSQQAEDALSQGMEALQQSLAETLASGSLGPAGSSGNVASYMGQMAMAMGKLGTLENFLRQADNLRLQTLQQMQRILTTRQSARALLAISDYFSRLRALSSLWLARPRE

SEQ ID NO: 3325 - protein, 167 aa, Zea mays
YRSGIPGSTHASAANDEVDENDRVQIANFLCPGNYAVSGGVKGIEVVEAKAKSFKARMTVRLAVAGAFHTSFMQPAVSRLESALAATEIRTPRIPVISNVDAQPHSDPNTIKQILAQQVTSPVQWETTVKNLMGKGLEKSYELGPGKVIAGILKRINKGTSIENIGA

SEQ ID NO: 3326 - protein, 423 aa, Bacillus subtilis subsp. subtilis str. 168
MAQGEKITVSNGVLNVPNNPIIPFIEGDGTGPDIWNAASKVLEAAVEKAYKGEKKITWKEVYAGEKAYNKTGEWLPAETLDVIREYFIAIKGPLTTPVGGGIRSLNVALRQELDLFVCLRPVRYFTGVPSPVKRPEDTDMVIFRENTEDIYAGIEYAKGSEEVQKLISFLQNELNVNKIRFPETSGIGIKPVSEEGTSRLVRAAIDYAIEHGRKSVTLVHKGNIMKFTEGAFKNWGYELAEKEYGDKVFTWAQYDRIAEEQGKDAANKAQSEAEAAGKIIIKDSIADIFLQQILTRPNEFDVVATMNLNGDYISDALAAQVGGIGIAPGANINYETGHAIFEATHGTAPKYAGLDKVNPSSVILSGVLLLEHLGWNEAADLVIKSMEKTIASKVVTYDFARLMDGATEVKCSEFGEELIKNMD

SEQ ID NO: 3327 - protein, 390 aa, Desulfovibrio desulfuricans G20
MKISDRLMQVKPSATLAVNAKALELKAQGREIISLSVGEPDVPPPAHIGAAAKKAIDENFTRYTAVPGIPELRDAVAGYFRRFYGVDAAAEHTIVTNGGKQALYNLFQALLNPGDEVLIPAPYWVSYPAMVQLAGGTPVPVASGPETGFKTCVEELQRHMTPRTRVLLLNSPSNPTGACYTRHEIDTIAAWAIENGLFIISDEIYDQLVYAPASPAGLAPWWQSNPEQVCVVNGLAKSFSMTGWRVGYVLAHPDLIKALGKIQGQSTSNVCSIAQKAALAALTGPFDALDTLRESYARRRDIALDIISGWKNVVCPRPDGAFYLFPDVHRLYTDATPDSATLCTRLMESAGVALVPGAAFGDDRCVRISYAVSEQTLRDALSKISNVLFS

SEQ ID NO: 3328 - protein, 799 aa, Moorella thermoacetica ATCC 39073
MAEDTKLWLKPISRRKFLTLSAAAAGGVAALTTLMWEKKAGAVASGATGATGETIIPTSCVHNCGGRCPLYAHVKDGVVTWFSPDQEGNDSPDFPQVRACLRGRSQRKRLYHPDRLKYPMKRVGKRGEGKFERISWDEALDTIARELQRIKSNYGNEAIYINYATGVYGQVSQSWITPAFGGALPRFLNMFGGYLGYYNTYSSACFSYAAPYTFGTVEGNSPDDLLNSKLIVLFADNPGETRLGGANGHYYLRLAKEKGARVIVVDPRYTDTAVTLADEWIPIRPTTDNALIDALAYVMINENLHDQAFLDKYCLGFDEEHMPPGIPPGNSYKSYVLGQGEDKTPKTPEWAEAITGVPRDTIIKLARQIASIKPCCLLQGFGWQRHAYGEQPVRGLPVLAAMTGNIGIRGGGPGLRNGGHGVVVGWMPAGQNPVKASIPCFMWPEAIERGHELTAADGVKGVDKLSTDIKMIWNYGGNTLINQHSDINKTAKILADEKKCEFILVHDVFMTPSARFADILLPDVTHFEREDIVTFASGIGYAIYHQKVVDPMYECRSLYDVCSELAKRLGFGDQYTEGKSEQDWLREAVNVARQKDPNFPSFEEFRRKGIYKIAPKDPIVAYEKQIKDPANNPFQTPSGKIEIFSTRLWAMNNPKEIPAIPKYIPAWEGPQDPLRAKYPLQCIGPHYKRRVHSTFDNVPWLEEASPQEMWINPRDAAERGLKDGDKARVFNDRGELIIPVKVTPRIMPGVVAIPQGAWWTPDSNGVDQRGCINTLTKYHPTPLAHGNPQHTNLVQVAKA

SEQ ID NO: 3329 - protein, 347 aa, Sinorhizobium meliloti
MKSYSIALIPGDGIGQDVTDAAWQVLSTVARHSGFTLTGTSFPWSCAFYKETGAMMPADGIEALRPFDAILLGSVGWPAEVPDSISLHGLLLPIRKAFVQYANIRPHRLLSGVEGPLKASDFDILCVRENTEGEYSGAGGRVHQGTADEVAVETSIFTRAGVERILRFAFEQARQRRGKLASVTKSNAQKHSMVFWDEVTRQLADEYPDVEVTSYHIDAMAARVVMAPESLDVVVASNLFGDILTDLGAAIQGGLGFAASANINPDRSAPSMFEPVHGSAPDIAHLGIANPIAAIWSGAMMLEHLGEREAAGMIMAALERTTIRGIGTVPGKDRTRSITAAVLAALD

SEQ ID NO: 3330 - protein, 454 aa, Haemophilus influenzae R2846
MTMITPVQAILASNQHFLDRQDVMESNVRSYPRKLPFAYAKAQGCWVTDVEGNEYLDFLAGAGTLALGHNHPILMQAIKDVLDSGLPLHTLDLTTPLKDAFSEELLSFFPKDKYILQFTGPSGADANEAAIKLAKTYTGRGNIIAFSGGFHGMTQGALALTGNLGAKNAVENLMPGVQFMPYPHEYRCPFGIGGEAGAKAVEQYFENFIEDVESGVVKPAAVILEAIQGEGGVVSAPISFLQKVREVTQKHGILMIVDEVQAGFCRSGKMFAFEHAGIEPDIIVMSKAVGGSLPLAVLAIRKEFDAWQPAGHTGTFRGNQLAMATGYASLKIMRDENLAQNAQERGEYLTNALRELSKEYPCIGNVRGRGLMMGIDIVDERQSKDATGAYPRDCELAAAIQKACFKNKLLLERGGRGGNVVRVLCAVNINQNECEEFIKRFKQSVVDALKVVRS

SEQ ID NO: 3331 - protein, 716 aa, Erwinia carotovora subsp. atroseptica SCRI1043
MKKITSVCPYCGAGCKLKLVVEDNKIIRAEAADGVTNQNELCLKGYYGWDFLNDTQLLTPRLTQPMIRYEKGGRLTPVSWDEAIRYTAQRFSEIKAKYGPRSIMTTGSSRGTGNETNYVMQKFARAVLNTNNVDCCARVCHGPSVAGLQEVLGNGAMSNSISDIENSKCLLIFGYNSADSHPIVARRVVKAHQNGAKIIVCDPRRIEAARIADQHLQLNNGSNMALVNAFGYVLLEEKLYNQHYVDRFTEGLDTYREIVKDYAPEAVEHLTGVPAADVRQAMRTFAAAPSATIMWGMGVTQFGQAVDVVRGLAGLALLTGNLGRENVGVGPIRGQNNVQGACDMGVLPNMFPGYQSVTDPDVRAKFADAWGISPAVMDENIGTRITEVPHMALEGKIKAYYIMGEDPLQTEADLSLVRRGVEALDFLVVQDIFMTKTAEVADVLLPATSWGEHGGVFTCADRGFQRFEKAIEPKGNVKRDWEIISLIASEMGYPMHYADNQQIWDEMRSLCSLFYGVTYEKMGDMGHIQWPCPTLDHPGTPYLYQDSHFDTPTGKGKLFATQWRAPAEVPDEAYPLVLCTVREVGHYSCRSMTGNCAALQALADEPGRVQMHPQDANRLGIKDRSLVWVSSRRGKVISRADISERINKGTIYMTYQWWIGACNELTQDNLDPISKTPETKYCAAKVDVIEDQRWAEDFASTSYNDMKARLRAAVAH

SEQ ID NO: 3332 - protein, 195 aa, Dechloromonas aromatica RCB
MKKLVLASNNAKKMKELNALLAPLGFEVIPQGQLGIPEAEEPHCTFVENALAKARHAAEHSGLPALADDSGLCVEALHGAPGVLSARYAGDPKSDARNNEKLLAHLKGQSNRKAHFYCVLVLVRAANDPQPIIAEGEWHGEILEAQRGADGFGYDPLFFVPSQNQTAAELDSEVKNQLSHRGRAMQKLIERLPTL

SEQ ID NO: 3333 - protein, 427 aa, Zea mays
MKQTEGSHKVVTAAGGKMAVGVRSIVTSLVAFFILASSVVFLLLDREAGLQEESAIRAGGGGGGDEECSWSRGRWVYDNVSRPLYDGLKCAFIFPEVACDKYGRKDVMYQHWRWQPHGHGCDLPRFDGMKLLEELRNKRLVFVGDSVNRNQWVSLVCMVEASIPDDRLKMRIFNGSLISFKALEYNATIDFYWSPLLVESNSDNPIIHRVEYRIIRADRIEKHASVWRDADVIVFNSYLWWRKQKDDMRMKVMYGSFEDGDAKLDEMEMVDGFEIAIKKLTEWLAENIDKNKTRIFFAGSSPTHSWASNWGGQDKNKCLNETEPISYRPGGGYKAATTDYSLMAMARSYFRRTLEPRGIRVQILNITELSDYRKDGHPTVFRRQFVPLTKEQIADPASYADCTHWCLPGVPDVWNEFLYGYLTQQRK

SEQ ID NO: 3334 - protein, 358 aa, Pseudomonas syringae pv. syringae B728a
MVKTYSYAAQSAQDTLKPHQFERCSPGADDVQIDILYCGVCHSDLHTARNEWHNTLYPSVPGHEIVGRVTAVGSDVKQFKVGDLAGVGCMVDSCQQCASCAEGDEQYCESGFTGTYNGPVFGGENTFGGYSDKIVVKEKFVLRISHDANLAAVAPLLCAGITTYSPLRHWKVGPGKKVGIVGLGGLGHMGVKIAHAMGAHVVLFTTSPDKREDGLRLGADEVVVSRDAGQMAAQANSLDFILNTVAAPHDLDAFLSLLKRDGTMTLVGAPAEPHPSPAVFNLIFKRRSLAGSLIGGIQETQEMLDFCAEHGIVSDIEVIAMQDINEAYERMLKGDVKYRFVIDMDSLKQEAAADSNAA

SEQ ID NO: 3335 - protein, 565 aa, GIBBERELLA ZEAE PH-1
MARAMGWHKPENFAGSSIRAILVGLFVSSGGLLFGYDVGVINGILAMDVFQNDFATDQTCRDENDHIDLCPIDSSLIVAILSGGAVVGSILAAPAGDSIGRRKTLFLAVVTFCIGAIFQVCAQATPMLLVGRALAGVAVGATSVLVPLYQSETAPKWIRGSIICAYQLSITVGILGATIINVITSGMNSAAAYRIPLGLQLVPGVILAFGIMLLPETPRFLVKKGRNDDAGISLSRFRRLDITHPALVNELQEIIANHQYEMTLGQDTYRALFTSNSSLGHRTLTGCVLQMLQQLTGINFVMYYGTTFFSRSGVSNPFIINLVMIIVNCVCTIPGLIVIESWGRRKLLMAGALGMAVCQFIIGAVSTANEKSSQDLGNASNMALIVCCAINVFFYASSWGPVTWVVTSEIFPLKLRAKAMSVSTTANWLLNFAVAYAPPFILGRRADAFGLKIFFIWGTFCILAIVFVWFMVYETSRMTLEQIDEMYERVSHAWESPGFNPSWSFQEMHNTGWAANGQAELQSATSTSNNISSSNTEDGGNDRHSIHSNAPPNSATPIANVDFSY

SEQ ID NO: 3336 - protein, 434 aa, Beta vulgaris
MDRYKLLKELGDGTCGTVYKAVNRESYEIVAVKKMKRKFYFWEECVNLREVKSLPSIESSHIIKLKEVVRENNDLFFIFEYMQYNLYQIMKDRHRPFTEEEIRNFLTQVLQGLAHMHRNGYFHRDLKPENLLVTNDVIKIADFGLAREVSSIPPYTEYVSTRWYRAPEVLLKSSLYTPAIDMWAVGAVLAELFTSCPIFPGESETDQLYKICCVLGAPDWAVFPEAKNISQLTSISYSQMLPANLSEIIPNANWEAIDLISQLCSWDPLKRPTAEQALHHPFFHVALRVPRPIHDPFHSKPDYTKTKPNLELNLWDFDSKADDCFLGLTLAVNPGVSSLEMGPRVSGSTRQDVYFCSSFQDHPEQSVFWSLFSPCRNGATPPVDPSLSLSFSSITHPRIAVPHSGGFGLAALQPGILDGPLLVVSSPHQPSHYL

SEQ ID NO: 3337 - protein, 423 aa, Saccharomyces cerevisiae
MILLLILFPCIYFLPFCINRTVRSSPEYSAADYYKSSIQYHKSYSNMPHSVTPSIEQDSLKIAILGAAGGIGQSLSLLLKAQLQYQLKESNRSVTHIHLALYDVNQEAINGVTADLSHIDTPISVSSHSPAGGIENCLHNASIVVIPAGVPRKPGMTRDDLFNVNAGIISQLGDSIAECCDLSKVFVLVISNPVNSLVPVMVSNILKNHPQSRNSGIERRIMGVTKLDIVRASTFLREINIESGLTPRVNSMPDVPVIGGHSGETIIPLFSQSNFLSRLNEDQLKYLIHRVQYGGDEVVKAKNGKGSATLSMAHAGYKCVVQFVSLLLGNIEQIHGTYYVPLKDANNFPIAPGADQLLPLVDGADYFAIPLTITTKGVSYVDYDIVNRMNDMERNQMLPICVSQLKKNIDKGLEFVASRSASS

SEQ ID NO: 3338 - protein, 495 aa, Zea mays
ITMDPTKFRPSSSHDTTVTTTNAGAPVWNDNEALTVGPRGPILLEDYHLIEKVAHFARERIPERVVHARGASAKGFFECTHDVTSLTCADFLRAPGVRTPVIVRFSTVIHERGSPETIRDPRGFAVKFCTREGNWDLLGNNFPVFFIRDGIKFPDVIHAFKPNPRSHVQEYWRVFDFLSHLPESLHTFFFLFDDVGVPSDYRHMEGFGVNTYTFVSAAGKAQYVKFHWKPTCGVRCILTHEEAALVGGRNHSHATQDLYDSIAAGSFPEWTLYVQVMDPDTEEQYDFDPLDDTKTWPEDLLPLRPVGRLVLDRNVDNFFNENEQLAFGPGLVVPGIYYSDDKMLQCRVFAYADTQRYRLGPNYLMLPVNAPRCAHHNNHYDGAMNFMHRDEEVDYYPSRHAPLRQAPPVPIPARPVVGKRQKETIQKPNDFKQPGERYRSWDANRQERFVRRFADSLGHPKVSQELRSIWIDLLSKCDASLGMKIATRLNMKPNM

SEQ ID NO: 3339 - protein, 331 aa, Oryza sativa
MAHKRGRLVGWVLLLLLAVAIAGAAAATPRQLFLVTQAPVTLTNHHGQLLTGNYSVNLLWYGRFTPAQRATVADFLLSMSSPSAAAEAAAVSGGPAAPSVASWWATTARYHPGAARLTLGRQVLDASLSLGRRLSETSLAALAARLSPHRGSIAVVITAPDVLVDGFCLSHCGLHASATSAAAAAATASPAATRGRGRFAYAWVGNAAEQCPGECAWPFHQPAYGPQAPPLVSPNADVGMDGIIINLATLLAGAVTNPYGGGYFQGPTEAPLEAVTACTGMFGAGAYPGYPGQLPVDAATGASYNAVGVAGRRFLLPAMWDPKTSQCSTLV

SEQ ID NO: 3340 - protein, 319 aa, Bacillus subtilis subsp. subtilis str. 168
MKRIGVLTSGGDSPGMNAAVRAVVRKAIYHDVEVYGIYNGYAGLISGKIEKLELGSVGDIIHRGGTKLYTARCPEFKTVEGREKGIANLKKLGIEGLVVIGGDGSYMGAKKLTEHGFPCVGVPGTIDNDIPGTDFTIGFDTALNTVIDAIDKIRDTATSHERTYVIEVMGRHAGDIALWAGLAGGAESILIPEADYDMHEIIARLKRGHERGKKHSIIIVAEGVGSGVEFGKRIEEETNLETRVSVLGHIQRGGSPSAADRVLASRLGAYAVELLLEGKGGRCVGIQNNKLVDHDIIEILETKHTVEQNMYQLSKELSI

SEQ ID NO: 3341 - protein, 508 aa, Corynebacterium glutamicum ATCC 13032
MTDIKATSSTSATTAPTAGRPARRLGQISLVACLGGLLFGYDTGVANGAEGHMAQELGLNVLQLGVVISSLVFAAAFGALFAGRISDEIGRRKAIITLSVLFFLGSILVVFSPAGELGQFYGPGFATLVTGRIMLGLAVGGASTVVPVYLAELAPLEIRGSLTGRNELAIVTGQLLAFVINALIAVTLHGVIDGIWRIMFAVCALPAVALFLGMLRMPESPRWLVNQGRYDDARRVMETVRTPERAKAEMDEIIAVHSENNAALPGVKQSSGQASGQVSSKHTHMSIGEVLSNKWLVRLLIAGIGVAVAQQLTGINAIMYYGTRVLEESGMSAEMAVVANIAFGAVAVIGGLIALRNMDRLDRRTTFIIGLSLTTTFHLLIAAAGTLLPEGNSIRPFAIMILVVGFVLSMQTFLNVAVWVWLAEIFPVRMKGIGTGISVFCGWGINGVLALFFPALVSGVGITFSFLIFAVVGVIALAFVTKFVPETRGRSLEELDHAAFTGQIFKKA

SEQ ID NO: 3342 - protein, 505 aa, Schizosaccharomyces pombe
MFTDYPNDINCESPRMSDLDGFCQNAFSDLNSLNQQVFKANYAVRGALAILADEIQDDLLENPSSYPFSEIVYANIGNPQQMGQSPITFVRQVLSLCQYPTLLDHAEEKWFQNLFPTDVVQRSKMLLKESGSLGAYSASQGIPLVRRHVADFIRARDGFDCEPSDIYLTSGASHAARLIMTLIIARPTDGVMVPAPQYPLYGAQIDLMSGSMVSYSLSEENNWDIDFDQFKKSFDEASKKGINVRLCVVINPGNPTGACISENSMEKVLRFAKAKGIVLLADEVYQNNIYQNKFHSFRRKLGELREKEPDNHWDQVSLISVNSVSKGQFGECGQRGGYLDVVNIPEPAKDQILKLATIDICPPVAGQLLVDMLVNPPKPGDPSYDLFIKEVDEIHEALRLQCRQLYEGTKRMKRVSCLEPHGAMYLHPSVSLPEKLITTAKAQKIQPDEFYAIELLKRSGICVVPGSGFGQPEGDYHIRITFLAKGTEYIERFVKAHNEIMDLYE

SEQ ID NO: 3343 - protein, 1465 aa, Adiantum capillus-veneris
MATPGGPKTKHSVSVAQTRADARLHAAFEGSGDAGAGGSRAPFDYSKSGMDASSVTSVAPEAITAYLQRMQRGGLTQAFGCMLVVAGQKIVAFSENAPEMLEVAAGLGTDLRMLFTQGSTAALDQAVKEEDLSSVNPLVLQSCGGSAKQFYAMLHRIEDVAGVVIDLEPIENGVVEKKSSAEMAVKPIARVQSLPGGEIGRLCQVVVEEVQEMTGYDRVMAYKFHEDGHGEVVAEVRRPDLEPYLGLHYPSTDVPQASRMMFMKNGVRMIGDCTLPPVRVVQAKELAQPISLAGSTLRAPHGCHAQYMSNMGSAASLTMAVAIDDYDDDSSLSCGSRKLWGLVVCHHPSPRTVSYPLRCACEKLMVAFGVQLNIELDLAAQLRENHILTTQALLCDMLRRIRGAPIGIVSRSPSIMDLVKCDGAALYYGGRFWPLGTTPSEFQIRDLAEWLLGASEEIASTGVTCTDSLAEMGYPGAALLGDAVCGMAAAMITPNSDFLFWFRSHTAKEVYWGGAEHDPQSRDDDSWMQLPRSSFKAFLEIVKRRSLPWEEVEVDAIRSLQLILREDLEQFCAAVGAVKASDGDDEDSLVPSAKKLSLKETEENGGADNSKKLERMHSAAAGGGGGGGRWEKMRLPSSLAQEWMEAIRGTGDGGASGGGGGGPFDWDLISAFQHNSFIVVDALKPDFPIIYASTGFFNLTGYTSREVIGGNCRFLQGPDTNPADVASIREALAQGTGTFCGRLLNYRKDGSSFWNLLTIAPIKDDLGSIVKLIGVQLEVSKYTEGIRANNRRPNGMPQSLIRYDVRHQDKVSAFIAQLVAALTKPDKVETPRLSSAMRFSLTGQTIESLPQPTAIPREGGGRTRRPRSSSFLSLLGMEKEKDIPEEDELQELEVIMLEDASVGRPGSLDDPERTRRGIDLATTLERIGKSFVITDPRLPDNPIIFASDRFLELTEYTREEVLGNNCRFLQGRGTDRKAVQLIRDAVKEQRDVTVQVLNYTKGGRAFWNLFHLQVMRDENGDVQYFIGVQQEMVAPRPVHQPPELPDILPDRVEQEKAEVVRATAQRVDAAARELPDANLVPDHLFAPHSKVVTPLPHSKTNSSSWFAIRRVQRRLSRGERLGLKHFRPIKPLGSGDTGSVHLVELRGTGQVFALKAMDKSMMLQRNKVHRARAEREILAIMDLPFLPTLYASFQTKTHVCLITDYCPGGDLFLLQDKQPTQTLSERTASFYAAEVVVALEYLHCMGVIYRDLKPENVLLQKNGHILLTDFDLSFLTSCRPQLILQGGKGRSRRSKRRRRVTFCAEPRVSSNSFVGTEEYIAPEIISGEPHSSAVDWWALGILLYEMLYGRTPFVGRNRQKTFYNVLNKELIFPTSIPVSLAGRQLIAGLLQRDPTIRLGTLRGASELKKHPFFREINWPLIRWRKFSANQAHNANNVSSLDEGESDSGNAWEANGGSTQSFQDTF

SEQ ID NO: 3344 - protein, 558 aa, Triticum aestivum
  unsure (1)..(558): unsure at all Xaa locations
MYPTLVRPAGDPCTRQAARPRQPQPHRSCRGTANVIDAVQQRAAPGRAKRASPPSGERAPPPRGLKVGRQQQHQAREGXRRMCNGGRASRRHRRAVRAHLRRQPRQTPLFSGRPSAGIXADPNEVAAVILGGGTGXTQLFPLTSTRATPAVPIGGCYRLIDIPMSNCFNSGINKIFVMTQFNSASLNRHIHRTYLGGGINFTDGSVEVLAATQMPGEAAGWFRGTADAVRKFIWVLEDYYKNKSIEHILILSGDQLYRMDYMELVQKHVDDNADITLSCAPVGESRASEYGLVKFDSSGRVVQFSEKPKGDDLEAMKVDTSFLNFAIDDPAKYPYIASMGVYVFKRDVLLNLLKSRYAELHDFGSEILPRALHDHNVQAYVFTDYWEDIGTIRSFFDANMALCEQPPKFEFYDPKTPFFTSPRYLPPTKSDKCRIKEAIISHGCFLRECKIEHSIIGRXSRLNSGSELKNAMMMGADSYETEDEISRLMSEGKVPIGVGENTKISNCIIDMNARIGRDVVISNKEGVQEADRPEEGYYIRSGIVVIQKNATIKDGTVV

SEQ ID NO: 3345 - protein, 621 aa, Listeria monocytogenes EGD-e
MCGFVGCVHDRITEITGADKETFRQMNSMITHRGPDDEGYFTDDHVQFGFRRLSIIDVENGHQPLTYENERYWIIFNGEVYNYVELREQLVAEGMTFETESDTEVIIATYAKYKEKTAERLRGMFGFVIWDKQEELVYGARDPFGIKPFFYAEEDDKLFMGSEKKSILHALKEKELDEVSLQNYMTYQFVPEPDSLTKNVKRLEPGHQFTKKIGQPMEITTYWKASFAPVTKSEDAWIKEVRDVMYDSVKMHMRSDVPVGSFLSGGIDSSIIAAIAKEYHPAIKTFSVGFERDGFSEIDVAKETADKLGVENISYVISPEEYMKELPKIVWHMDDPLADPAAIPLYFLSREARKQVTVALSGEGADELFGGYNIYNEPNSLAMFNKMPGVFKSMLNNLARIMPEGMRGKSFLERGTTPMEERYIGNAKMFTEKEKQILLPKYQAGHDYTNITDPFYAETTNYHPVERMQYIDIHTWLRGDILLKADRMTMANSLEVRVPFLDKEVYNVARNIPDTMKTTNGTTKYILRKAAATFVPEHVLNRRKLGFPVPIRHWLKDEMNAWVKNIIKESPTDHLINKQYVLDLLDDHCAGKFDYSRKIWTVVIFMIWYDVYVADKYDFGK

SEQ ID NO: 3346 - protein, 269 aa, Phalaris aquatica
MMKMVCSSSSSSLLVVAALLAVFVGSAQGIAKVPPGPNITAEYGDKWLDAKSTWYGKPTGAGPKDNGGACGYKDVDKAPFNGMTGCGNTPIFKDGRGCGSCFELKCSKPESCSGEPITVHITDDNEEPIAPYHFDLSGHAFGSMAKKGEEENVRGAGELELQFRRVKCKYPDGTKPTFHVEKGSNPNYLALLVKYVDGDGDVVAVDIKEKGKDKWIELKESWGAIWRIDTPDKLTGPFTVRYTTEGGTKAEFEDVIPEGWKADTHDASK

SEQ ID NO: 3347 - protein, 291 aa, Streptomyces galilaeus
MKGIILAGGSGTRLHPITVSVSKQLLPVGDKPMIYYPLSVLMLADIREILLICTERDLEQFRRLLGDGSQLGLRIDYAVQNRPAGLADAFVIGADHVGDDDVALVLGDNIFHGHHFYDLLQSNVHDVQGCVLFGYPVEDPERYGVGETDASGQLVSLEEKPLRPRSDLAITGLYLYDNEVVDIAKNLRPSPRGELEITDVNRNYLARGRARLVDLGRGFAWLDAGTPESLLQATQYVRTLEERQGVRIACVEEVALRMGFIDADMCHRLGEQMSQSGYGRYVMAVAREFSG

SEQ ID NO: 3348 - protein, 542 aa, Zea mays
  unsure (1)..(542): unsure at all Xaa locations
MNTVALLSLAPQLLIKPSLTCFSRKGVGRYGGIKVYAVLRDDGAEFAKNNNLEALFHVDDPGPRVPIKKGRFLDVNEALEVVRFDIQYCDWRARHDLLTIMVLHNKVVEVLNPLAREFKSIGTLRKELAELQQELAKAHNQVHLSETRVSSALDKLAHMETLVNDRLLPPDGASSTSTAQPTSLVPSTSSTARVRAKKPPRRGLNVSGPVKPYNPSLKNFWYPVAFSSDLKDDTMVPIACFEEQWVIFRGKDGRPGCVQNTCAHRACPLHLGSVNEGRIQCPYHGWEYSTDGKCEKMPSTKMLNVRIQSLPCFEQEGMVWIWPGDDPPKATIPSLLPPSGFTVHAEIVMELPVEHGLLLDNLLDLAHAPFTHTSTFAKGWSVPSLVKFLTPASGLQGYWDPYPIDMEFRPPCMVLSTIGISKPGKLEGKSTQQCSTHLHQLHVCLPSSRNKTRLLYRMSLDFAPWLKHVPLMHLLWSHFAEKVLNEDLRLVLGQQERXDQWRQRLELAGIIXKLGVRYRLWRDTVERGSERLPFSNQAESGS

SEQ ID NO: 3349 - protein, 1122 aa, Arabidopsis thaliana
MSGSRPTQSSEGSRRSRHSARIIAQTTVDAKLHADFEESGSSFDYSTSVRVTGPVVENQPPRSDKVTTTYLHHIQKGKLIQPFGCLLALDEKTFKVIAYSENASELLTMASHAVPSVGEHPVLGIGTDIRSLFTAPSASALQKALGFGDVSLLNPILVHCRTSAKPFYAIIHRVTGSIIIDFEPVKPYEVPMTAAGALQSYKLAAKAITRLQSLPSGSMERLCDTMVQEVFELTGYDRVMAYKFHEDDHGEVVSEVTKPGLEPYLGLHYPATDIPQAARFLFMKNKVRMIVDCNAKHARVLQDEKLSFDLTLCGSTLRAPHSCHLQYMANMDSIASLVMAVVVNEEDGEGDAPDATTQPQKRKRLWGLVVCHNTTPRFVPFPLRYACEFLAQVFAIHVNKEVELDNQMVEKNILRTQTLLCDMLMRDAPLGIVSQSPNIMDLVKCDGAALLYKDKIWKLGTTPSEFHLQEIASWLCEYHMDSTGLSTDSLHDAGFPRALSLGDSVCGMAAVRISSKDMIFWFRSHTAGEVRWGGAKHDPDDRDDARRMHPRSSFKAFLEVVKTRSLPWKDYEMDAIHSLQLILRNAFKDSETTDVNTKVIYSKLNDLKIDGIQELEAVTSEMVRLIETATVPILAVDSDGLVNGWNTKIAELTGLSVDEAIGKHFLTLVEDSSVEIVKRMLENALEGTEEQNVQFEIKTHLSRADAGPISLVVNACASRDLHENVVGVCFVAHDLTGQKTVMDKFTRIEGDYKAIIQNPNPLIPPIFGTDEFGWCTEWNPAMSKLTGLKREEVIDKMLLGEVFGTQKSCCRLKNQEAFVNLGIVLNNAVTSQDPDKVSFAFFTRGGKYVECLLCVSKKLDRKGVVTGVFCFLQLASHELQQALHVQRLAERTAVKRLKALAYIKRQIRNPLSGIMFTRKMIEGTELGPEQRRILQTSALCQKQLSKILDDSDLESIIEGCLDLEMKEFTLNEVLTASTSQVMMKSNGKSVRITNETGEEVMSDTLYGDSIRLQQVLADFMLMAVNFTPSGGQLTVSASLRKDQLGRSVHLANLEIRLTHTGAGIPEFLLNQMFGTEEDVSEEGLSLMVSRKLVKLMNGDVQYLRQAGKSSFIITAELAAANK

SEQ ID NO: 3350 - protein, 307 aa, Petunia x hybrida
MDQYEKVEKIGEGTYGVVYKARDRVTNETIALKKIRLEQEDEGVPSTAIREISLLKEMQHANIVRLQDVVHTVKSDCILSFEYLDLDLKKHMDSSPEFSKDPRLVKMFLYQILRGIAYCHSHRVLHRVLHRDLKPQNLLIGRRTNALKLADFGLARAFGIPVRTFTHEVVTLWYRAPEILLGSRHYSTPVDVWSVGCIFAEMVTQRPLFPGDSEIDELFKIFRVMGTPNEDTWPGVTTLPDFKSALPKWPSKDLATIVPNLDGAGLDLLDKTVRLDPSKRITARNALEHEYFKDIGYVFRSKGSSRV

SEQ ID NO: 3351 - protein, 1172 aa, Arabidopsis thaliana
MVSGVGGSGGGRGGGRGGEEEPSSSHTPNNRRGGEQAQSSGTKSLRPRSNTESMSKAIQQYTVDARLHAVFEQSGESGKSFDYSQSLKTTTYGSSVPEQQITAYLSRIQRGGYIQPFGCMIAVDESSFRIIGYSENAREMLGIMPQSVPTLEKPEILAMGTDVRSLFTSSSSILLERAFVAREITLLNPVWIHSKNTGKPFYAILHRIDVGVVIDLEPARTEDPALSIAGAVQSQKLAVRAISQLQALPGGDIKLLCDTVVESVRDLTGYDRVMVYKFHEDEHGEVVAESKRDDLEPYIGLHYPATDIPQASRFLFKQNRVRMIVDCNATPVLVVQDDRLTQSMCLVGSTLRAPHGCHSQYMANMGSIASLAMAVIINGNEDDGSNVASGRSSMRLWGLVVCHHTSSRCIPFPLRYACEFLMQAFGLQLNMELQLALQMSEKRVLRTQTLLCDMLLRDSPAGIVTQSPSIMDLVKCDGAAFLYHGKYYPLGVAPSEVQIKDVVEWLLANHADSTGLSTDSLGDAGYPGAAALGDAVCGMAVAYITKRDFLFWFRSHTAKEIKWGGAKHHPEDKDDGQRMHPRSSFQAFLEVVKSRSQPWETAEMDAIHSLQLILRDSFKESEAAMNSKVVDGVVQPCRDMAGEQGIDELGAVAREMVRLIETATVPIFAVDAGGCINGWNAKIAELTGLSVEEAMGKSLVSDLIYKENEATVNKLLSRALRGDEEKNVEVKLKTFSPELQGKAVFVVVNACSSKDYLNNIVGVCFVGQDVTSQKIVMDKFINIQGDYKAIVHSPNPLIPPIFAADENTCCLEWNMAMEKLTGWSRSEVIGKMIVGEVFGSCCMLKGPDALTKFMIVLHNAIGGQDTDKFPFPFFDRNGKFVQALLTANKRVSLEGKVIGAFCFLQIPSPELQQALAVQRRQDTECFTKAKELAYICQVIKNPLSGMRFANSLLEATDLNEDQKQLLETSVSCEKQISRIVGDMDLESIEDGSFVLKREEFFLGSVINAIVSQAMFLLRDRGLQLIRDIPEEIKSIEVFGDQIRIQQLLAEFLLSIIRYAPSQEWVEIHLSQLSKQMADGFAAIRTEFRMACPGEGLPPELVRDMFHSSRWTSPEGLGLSVCRKILKLMNGEVQYIRESERSYFLIILELPVPRKRPLSTASGSGDMMLMMPY

SEQ ID NO: 3352 - protein, 238 aa, Clostridium thermocellum ATCC 27405
MGRNEPVIGITPSFDYNENKMYINNIYCEAIILSGGMPVLLPVTEDEGLLSQMVEEFDGFLLSGGPDVDAVHWGEWNYSYNGEISPHRDKMELFIAKEAVAKDKPIFGICRGIQVLNVALGGTLYQDIYSQNKEKRLIKHSQNAPRWYPVHKVMLKAGSKVRNAHGAESIAVNSFHHQAVREPAPDFIVTGTSEDGIIEAIEHKNCKFAVGVQWHPEHMWKRDLSFLNIFKYFVSSCL

SEQ ID NO: 3353 - protein, 540 aa, Oryza sativa (japonica cultivar-group)
MTTVASLSLLPHLLIKPSFRCCSRKGVGRYGGIKVYAVLGDDGADYAKNNAWEALFHVDDPGPRVPIAKGKFLDVNQALEVVRFDIQYCDWRARQDLLTIMVLHNKVVEVLNPLAREFKSIGTLRKELAELQEELAKAHNQVHLSETRVSSALDKLAQMETLVNDRLLQDGGSSASTAECTSLAPSTSSASRVVNKKPPRRSLNVSGPVQPYNPSLKNFWYPVAFSSDLKDDTMVPIDCFEEQWVIFRGKDGRPGCVMNTCAHRACPLHLGSVNEGRIQCPYHGWEYSTDGKCEKMPSTKMLNVRIRSLPCFEQEGMVWIWPGNDPPKSTIPSLLPPSGFTIHAEIVMELPVEHGLLLDNLLDLAHAPFTHTSTFAKGWSVPSLVKFLTPSSGLQGYWDPYPIDMEFRPPCMVLSTIGISKPGKLEGKSTKQCSTHLHQLHICLPSSRNKTRLLYRMSLDFAPWIKHVPFMHILWSHFAEKVLNEDLRVVLGQQDGCQWRKCLELASIICKLGIRYRLWRDAIERGVDRLPFSNQSESGS

SEQ ID NO: 3354 - protein, 1004 aa, Geobacter sulfurreducens PCA
MLNSELNTKIVNRGKEFFGSISGEKPSLFNKGAWMGKAMDWSMQNEQFKIQMFRFVDVFPSLTTSKLLTEHIREYFGNEQDMPAFMSTGAKVAGMLGSFGGAVLNKVLTSNIEEMARQFIVGETTKEAVKNLEKLRKDGFAAVVDVLGEATLSEEEAEVYTNTYLELLEALKKEQGSWKGLPGKGGDPGLDWGHAPKVNIAVKPTALFCLANPQDFEGSVVAILDRMRRIFKKVMELNGFLCIDMESYRHKEIILEVFRRLKLEYRDYPHLGIVLQAYLKDNDKDLDDLLAWAKEHKVQISVRLVKGAYWDYETVKAKQNDWEVPVWTIKAESDAAYERQARKILENHQICHFACASHNIRTISAVMEMARELNVPEDRYEFQVLYGMAEPVRKGILKVAGRIRLYAPYGNMVPGMGYLVRRLLENTANESFLRQSFAEDAQIERLLEDPAVTVERERAARAAKPKKERKGLGGLPPFNNEAMVDFTRADHRAAFPKHIAQVRTQLGKTYPLFINGKEVRTNDLIPTVNPNKPSEVLGQICQAGTTEVGDAIAAAKAAFPAWRDTDPRTRAEYLLKAAQAARKRLFELSAWQVLEIGKQWDQAYADVTEAIDFLEYYAREMIRLGQPQRVGHAPGELNHYFYEPKGVAAVIAPWNFPLAISMGMASAAIVTGNCVVFKPSGITSIIGWHLVELFREAGLPEGVFNFTPGRGSVMGDYLVDHPDISLIAFTGSMETGLRIIERAAKVHPGQANVKKIISEMGGKNAIIIDDDADLDEAVPHVLYSAFGFQGQKCSACSRVIVLDAVYDKFIERLVSMAKATKVGPSEDPANYMGAVADDKAMKSIKEYAEIGKREGHVLYESPVPAGEGYFVPMTIIGGIKPEHRIAQEEIFGPVLAVMRAKDFDQAIEWANSTQFALTGGIFSRSPEHLAKARREFRVGNLYINRNNTGALVERQPFGGARMSGVGTKAGGPDYLLHFMDPRVVTENTMRRGFAPIEEDDDWVD

SEQ ID NO: 3355 - protein, 870 aa, ASPERGILLUS NIDULANS FGSC A4
MAAFPAHQRCSKTVVNKPGTNSKDLKAFAKRTSHASLTVISSAQSSELAARLLPTGRAMDGPPGLSGASPATPATISDLVKHSHEPPDHVMAFDYTEQLLTPENSRSETSSNNDNASNEEKPTVRRQSTRVTRASLRGAADLDFGAEIEHNGHKHSAETTEHVVLDKPPDNGAAPRGKNPRASHLRHSIAIMESALQAETSLTQDAMDVDNHPLAPNTPISESSHGSHTDDVPAALPPRTLRKRVEQALARDKGYGSEKDSKPASADNETPVRRSSRLSLLGKVSDLAGRATGVLGKRSTSMRENAKEPDRRSSLRPRRSTTAREEPPAEPPTKKQRVSVSAPVDKAKSESDASQEEPTPPEVITRFKEKRWLTHGLYSGQEYTNLRPSQKRTEKRRKSHNTSQPNHQRKYLPLPMFAGERLLQTGRDFQLPFDIYSPLPPGQPKPNEWRKTNKNVFVGEAGSIWRANKEEELSKCTCMPETGCDQFCQNRYMFYECDDRICGVGPECGNRNFEELKQRAKAGGKYNVGVEVIKTPDRGYGVRSNRTFEPNQIIVEYTGEIITQAECEKRMRTIYKKNENMIIDATRGSIARFVNHGCEPNCRMEKWTVAGKPRMALFAGDRGIMTGEELTYDYNFDPYSQKNVQQCRCGSSKCRGILGPRKREKEQRAELRAAKLKEIADAKKAKAAKRRKENALKRSRPRNNRKGRALAPSSIKSGVKKAASKARGAVSRKMPAAATSSKKSASKKSTNASKQTSTKSKRNIRLPTIKAPKVKAKITSRVRAPAQTTRTKVKKASTSPPKSRSRVSATKTTKAATAAESSPARKRPLKAKKDILNGVRETINKGTTKHSQRAKSSSSRTTGRSPRARK

SEQ ID NO: 3356 - protein, 364 aa, GIBBERELLA ZEAE PH-1
MGFAKTLIFLSQQQPTMSFVRAFSFLTAVSLVTYTILSIATSFGPAEMPEFNKNETVRDIPAFGLGTWLAGKGVVVPAVEYALKGGYRHIDTALIWRNEDEVGKGIKASGVSRDEIWVTGKLWNTDHRPELVRKAIETSIANLGVEYLDLYLIHYPVAWVPETRDVDNNTSLIDTWKAMEELVRAGLTRNIGFSNFAPKDINKILKIASIQPYAHEFETHPYLQQQSFVDFHKKENIKVIAASPLANTNPTYGDKYPSILHDEFWVKLAEDKNATVAQTILAWGQQRGTIVISKSTHSNHIAENLCSQGIEFTKSELEEVAKQDKKLRLLNPIHWGMDLFEGLDAGAAEKEEPKKEEDERNLDL

SEQ ID NO: 3357 - protein, 963 aa, Bordetella pertussis Tohama I
MAQALPTMDRRTFLRRSGLGVGAGLAATQLSLVKRAEAAEGDGKVAIGNTKIEVRRTVCTHCSVGCAVDAVVENGVWVRQEPVFDSPINLGAHCAKGASVREHGHGEHRLRYPMKLVNGKYQRISWDTAYEEITAKLMQLRKESGPDSVYWIGSSKHNNEQSYLLRKFVSFWGSNNCDHQARICHSTTVAGVANTWGYGAMTNSYNDMQNSKVALYIGSNAAEAHPVSMLHMLHAKETGCKMIVVDPRFTRTAAKADQYVRIRSGTDIPFLFGLLYHIFKNGWEDQAYIDARVYGMDEVKADILAKWSPDKVEEACGVDEATMYSVAKTMHENRPGTLVWCMGQTQHSIGNAMVRASCIVQLALGNVGKSGGGANIFRGHDNVQGATDVGPNPDSLPGYYGLAEGSWKHFANTWGVDYEWIKDRYASPAMMTKPGITVSRWIDGVLENPDLIDQDTNLRAVFYWGHAPNSQTRGLEMKRAMDKLDLLVVVDPYPSATAAMAAMPGKAEDLNPNRAVYLLPAATQFETNGSCTASNRSLQWREKVIDPLWESRTDHMIMHQLAEKLGFGKELSKNYKMQKVKGMDEPVVEDILREINASVWAIGYTGQSPERLKAHMRNMHVFDVKTLRAKGGKDAETGYDLTGDYFGLPWPCWGNPSLKHPGTANLYDTSLHVMDGSGNFRANFGVERNGVNLLAADGSHSKGADLTTGYPEFDHVLLKKLGWWEDLTPEEQKAAEGKNWKTDPSGGIIRVTMKVHGCHPFGNARARAVVWNFPDAIPQHREPIYGTRPDLVAKYPTHNDLKTFWRLPTLYTSLQQKNVAEKLYEKFPIILTSGRLVEYEGGGEETRSNPWLAELQQESFVELNPKAAADRGIRNGDRVWVLTPTGARLNVQALVTERVGPDTAFMPFHFSGHWQGVDMLASYPEGAAPIVRGEAVNTGTTYGYDSVTMMQETKTTICNIEKA

SEQ ID NO: 3358 - protein, 291 aa, Gloeobacter violaceus PCC 7421
MKGIILAGGKGTRLYPLTLGVSKQLLPVYDKPMIYYPLATLMLAGIREVLLISTPRDLPAYQELLGDGSRYGIEIRYCVQPSPDGLAQAFVLGREFLEGGPACLILGDNIFYGYGLGEMLQKAATRTFGSTIFAYRVSDPERYGVVEYDEQGRVLSIDEKPKAPKSNYAVVGLYFYDAQISEIAAGVKPSARGELEITDVNNAYLERGLLRVERLGRGMAWLDTGTHESLLQASNFIETIEKRQGLKVACLEEIAYQMGHIGVEAVLEQAGRLGKTEYGQYLRNLVEKTNR

SEQ ID NO: 3359 - protein, 408 aa, Medicago sativa
MAAAASATFTIGTTQTGRSLPQSSPFGLKFNSQVNFNTFSGLKAMPSLRCDSESSFSGKETCAALRATFAPKAQKENRNLTRNLQPQASYKVAVLGAAGGIGQPLALLIKMSPLVSDLHLYDIANVKGVAADISHCNTPSKVLDFTGASELANCLKGVDVVVIPAGVPRKPGMTRDDLFNINAGIVRDLVTAVADNCPNAFIHIISNPVNSTVPIAAEILKQKGVYDPKKLFGVSTLDVVRANTFVAQKKNLRLIDVDVPVVGGHAGITILPLLSKTKPSVSFTDEEIEELTVRIQNAGTEVVEAKAGAGSATLSMAYAAARFVESSLRALDGDADVYECSFVQSDLTDLPFFASRVKIGRKGVEALIPTDLQGLSEYEQKALEALKPELKASIEKGVAFAQKQTVTA

SEQ ID NO: 3360 - protein, 390 aa, Listeria monocytogenes EGD-e
MAKEYAQDTAVIKASLGIDKETGALNTPIHLSSTFHQHDFDNYHAYDYARSGNPTREKVEQAIAELEGGTNGFAFASGMAAVSAALFTLSKGDHFIIAKDVYGGTFRLVEQVLPRFGITHTFVDTTNIDEVAKAFQANTKLVYLETPSNPLLHVTDIRTVAKLAKANGCYTFVDNTFLTPLIQKPLELGADLVIHSATKFLGGHSDILAGLIVTNNPNLAEAVYFLQNSTGGVLGVQDSWLLLRGLKTLSVRMKAGTETAEKIALFLNAEPDVVAVHYPGLPSHAGYDIQVEQATSGGAVLSFDLGSEEAVRELVTHLELPVFSVSLGAVESILSYPAKMSHAAVPEEERLAQGITPGLLRFSAGLEDAEDLIADLKQALSFIKKGSVAK

SEQ ID NO: 3361 - protein, 127 aa, Oryza sativa
  unsure (1)..(127): unsure at all Xaa locations
DARAAPRGPILXLEDYHLVEKLVNFDRKRIPERVEHAQMGSSKGFFQVTHDITHLNWAEFLRAPGVQTPVIVRFFTRIHDRGRPETLPKHCGLNIKVYTREGKLDLVGNNFPVLFIHDGMKFPDMVH

SEQ ID NO: 3362 - protein, 88 aa, Zea mays
MGFQISKAVIPAAGLGTRFLPATKAMPKEMLPVVDKPAIQYVVEEAVGAGLTDVLMITGRNKNALENHFDHVSELEETLKKKGDHEKL

SEQ ID NO: 3363 - protein, 305 aa, Triticum aestivum
  unsure (1)..(305): unsure at all Xaa locations
GIRTRRQSNRTEKSSSQRRIRGKKEDMDPDMGENFAYYWETQRYLESEELVDSIFVGATEDAISYYDSSSPDGSHSSSTPMGSALPGAGMGMDGTGANKNILMERDRXRRKLNEKLYTLRSVVPNITKMDKASIIKDAIEYIQQLQAEERQMEAEVSALESATGAEDDYDGGLSVDQVSSAQRKKVKRALSVSSMNDALLAAAAAVASPPVEVLELRVSEVSEKVLVVSVTCSKQRDAMTKVCRALEELRLRVITANITSVSGCLMHTLFVEVDEMDRFQMKEAVEAALSQLDSTGSPPLSSMSY

SEQ ID NO: 3364 - protein, 293 aa, Escherichia coli
MKTRKGIILAGGSGTRLYPVTMAVSKQLLPIYDKPMIYYPLSTLMLAGIRDILIISTPQDTPRFQQLLGDGSQWGLNLQYKVQPSPDGLAQAFIIGEDFIGGDDCALVLGDNIFYGHDLPKLMEAAVNKESGATVFAYHVNDPERYGVVEFDNNGTAISLEEKPLEPKSNYAVTGLYFYDNDVVEMARKNLKPSARGELEITDINRIYMEQGRLSVAMMGRGYAWLDTGTHQSLIEASNFIATIEERQGLKVSCPEEIAYRKGFIDAEQVKVLAEPLKKNAYGQYLLKMIKGY

SEQ ID NO: 3365 - protein, 152 aa, Zea mays
MAVTITWVKARQIFDSRGNPTVEVDVGLSDGSYARGAVPSGASTGIYEALELRDGGSDYLGKGVLKAVSNVNNIIGPAIVGKDPTEQVEIDNFMVQQLDGTSNEWGWCKQKLGANAILAVSLAVCKAGAMVKKIPLYQHIANLAGNKTLVLP

SEQ ID NO: 3366 - protein, 397 aa, Bordetella bronchiseptica RB50
MTDESRHIDTLLQHLGTAPFDPDTGAAPVNLPSMRASTVRFRDLAALEQAQRRKAGGDRAVTYGRMGMDTHAALEHVFKELEAGTHCYLASSGMGAVTMAFLSLLSAGEHALVADCVYGPVYELDNAVLKRMGIELTFFAPGDDLQALVRPNTRLLYVESPGSLLFQMLDLPALAEFARRNQLVLATDNTWGSGYIYRPLELGAQVSVIAGTKYVGGHSDLMLGAVVTNDEAVAQRLNRTQYAMGYSVSADDAWLALRGVRTLPIRMAQHARHAQRVCEFLQGRPEVARIYHPAWPQDPGHALWLRDCSGSNGMLAVELRLSQPAARVFVESLQLFGIGFSWGGFESLVQLVTPGELARHRYWQGGGNALVRLHIGLESPEDVIADLTQALARAASA

SEQ ID NO: 3367 - protein, 568 aa, Solanum tuberosum
  unsure (1)..(568): unsure at all Xaa locations
MASSALISDTESWKDLRAHVEEINKTHLRDLMNNTNRCQSMMVEFDGILIDYSRQRATFDTLNKLFSLAEAARVKEKIIRMFNGEHINSTENRSVLHVALRAPRDAVINSDGKNVVPEVWHVLDKIRDFSERVRSGAWVGATGKTLKDVVAVGIGGSFLGPLFVHTALQTEAEASECARGRQLRFLANVDPIDVARNITGLNPETTLVVVVSKTFTTAETMLNARTMREWISSALGPQAVAKHMVAVSTNLKLVEQFGIDPNNAFAFWDWVGGRYSVCSAVGVLPLSLQYGFSIVEKFLKGASSVDQHFLSAPFEKNIPVLLGLLSVWNVSFLGYPARAILPYSQALEKLAPHIQQVSMESNGKGVSIDGVPLPYQTGEIDFGEPGTNGQHSFYQLIHQGRVIPCDFIGVVKSQQPIYLKDEVVNNHDELMSNFFAQPDALAYGKTPEQLQKENIPEHLVSHKTFSGNRPXLSILLPSLNAYNIGQLLAIYEHRVAVQGFVWCINSFDQWGVELGKSLATQVRKQLHASRKKGESVEGFNFSTKTLITRYLEASADVPSDPSTLLPNI

SEQ ID NO: 3368 - protein, 531 aa, ASPERGILLUS NIDULANS FGSC A4
MGFVFANIYVITTIAVIGGALFGFDIASMSAILGTQQYKCFFNQGGIGEDGKCAGPTSSNQGGISASMPGGSFAGALCSGILTDWLGRRRAIQVGAVIWCIGSAITCSSFSIGQLVVGRFINGVSVGICSAQVPVYVSELAQPSKRGTVVGAQQWAITWGIMIMFYISYGSSYMEGPAAWRLPWGLQMIPAVFLFFALFFMPESPRWLAKKDRWEECHETLALVHAKGNHNDPFVRTELREIREMCEFERANADASYLDLFKPNMINRTHIGMFTQIWSQLTGMNVMMLYITYVFGMAGLSGNANLVASSIQYVINVVMTIFALVFIDRWGRRIPLLIGSTLMMTFMFANAGIMASYGKPAPPGGVDNVPEESWDMSEAKSAAKGVIACTYLFVASFAPTWGPVSWIYPPELFPLRLRGKAVAVTTASNWIFNFALSYFVPPAFENIKWKVYIVFGVFCAAMTLHVFFLFPETAGKTLEDVDAMFHTNVKPWQTRVQYRDIKNVERGGVGARMLEKENAVGVEREEREVAA

SEQ ID NO: 3369 - protein, 429 aa, Schizosaccharomyces pombe
MPVESEHFETLQLHAGQEPDAATSSRAVPIYATTSYVFRDCDHGGRLFGLQEPGYIYSRMMNPTADVFEKRIAALEHGAAAIATSSGTSALFMALTTLAKAGDNIVSTSYLYGGTYNLFKVTLPRLGITTKFVNGDDPNDLAAQIDENTKAVYVESIGNPMYNVPDFERIAEVAHAAGVPLMVDNTFGGGGYLVRPIDHGADIVTHSATKWIGGHGTTIGGVIVDSGKFDWKKNSKRFPEFNEPHPGYHGMVFTETFGNLAYAFACRTQTLRDVGGNANPFGVFLLLQGLETLSLRMERHVQNAFALAKYLEKHPKVNWVSYPGLESHVSHKLAKKYLKNGYGAVLSFGAKGGPDQSRKVVNALKLASQLANVGDAKTLVIAPAYTTHLQLTDEEQISAGVTKDLIRVAVGIEHIDDIIADFAQALEVA

SEQ ID NO: 3370 - protein, 617 aa, Lycopersicon esculentum
  unsure (1)..(617): unsure at all Xaa locations
MASSSLSSIYSPSSSFKSEVKSIHKITSSQLGSIYLPNKSRFHVHAVAREVSASLSAGNNDVVHKLKKENVGLEKNPNALWKRXVEWLYQHKELGLYLDISRVGFSDGFLEEMEPRLQKAFKDMVDLEKGAIANPDEGRMVGHYWLRSPHLAPNSFLRLQIENTLEAVCEFANDVVSGKVKTPSGGRFXQILSVGIGGSALGPQFVAEALAPDNPPLKIRFIDNTDPAGIDHQIAQLGPELASTLVIVISKSGGTPETRNGLLEVQKAFREAGLIFAKQGVAITQENSLLDNTARIEGWLARFPMFDWVGGRTSEMSAVGLLPAALQGIDIREMLAGAALMDEANRTTVVRDNPAALLALCWYWATDGVGSKDMVVLPYKDSLLLFSRYLQQLVMESLGKEFDLDGNRVNQGISVYGNKGSTDQHAYIQQLREGVHNFFATFIEVLRDRPPGHDWELEPGVTCGDYLFGMLQGTRSALYSNDRESITVTVQEVTPRSVGALVALYERAVGIYASLVNINAYHQPGVEAGKKAAGEVLALQKRVLQVLNEASCKQPVEPLTLDEIAERCHCEDDIEMIYKIIAHMAANDRALIAEGNCGTPHSIKVYLGECNVDDLYA

SEQ ID NO: 3371 - protein, 174 aa, Hordeum vulgare subsp. vulgare
MAPTVMASSATSVAPFQGLKSTAGLPVSRRSNASSASVSNGGRIRCMQVWPIEGIKKFETLSYLPPLSTEALLKQVDYLIRSKWVPCLEFSKVGFIFREHNASPGYYDGRYWTMWKLPMFGCTDATQVLNEVEEVKKEYPDAYVRIIGFDNMRQVQCVSFIAFKPPGCQESGKA

SEQ ID NO: 3372 - protein, 250 aa, Sphingomonas paucimobilis
MSDLSGKTIIVTGGGSGIGRATVELLVASGANVPVADINDEAGEAVVATSGGKAAYFRCDIAQEEDVKALVAQTLAAFGGLDGSFNNAAIPQAGLPLAEVSLERFRQSMDINVTGTFLCMKYQILAMIERGTKGSIVNTASAAGVVGVPMHGEYVGAKHAVVGLTRVAAADYGKHGIRVNALVPGAVRTPMLQRAMDNDAGLEPYLNSIHPIGRFSEPHEQAQAAVWLLSDAASFVTGSCLAADGGFTAI

SEQ ID NO: 3373 - protein, 250 aa, Sphingomonas paucimobilis
MANRLAGKVALITGGASGLGAAQAKRFAEEGAKVVIGDLNEEMAKGVVAEIRAAGGDALFIRLDVTDAASWNNAIAAAVDGFGGLTTLSNTAGIIHPGGFEEESIEGWNKMVAVNQTAIFLGIKAAIPELVKSGNGSIINISSLIGMFPTAGNASYCATKAAVRIMSKAAALEFVDRGVRVNTIVPGGMNTPITANVPPDVLKQQTSQIPMGKLGDPIDIANGALFLASDEAKYITGVDLPIDGGWSVGV

SEQ ID NO: 3374 - protein, 374 aa, Listeria monocytogenes EGD-e
MAKLKQETIAAQIGNRKCERTGAVNMPVYFSTAYQHADLGVSTGYDYTRTGNPTRDALQEALAELENGTHAFATSSGMSAIQLVFQLFKTGEHIISSQDLYGGTFRYFEQFGAQYQIGFSYWDGAEIADLEKLIRPETKAIFIETPTNPLMQETDIATVAKWAHAHDLLVIVDNTFYTPVLQQPLSLGADIVIHSATKYLGGHNDVLAGAVIVKEEKLGKFFFDQLNATGTVLSPFDSWLLIRGLKTLVLRVRQHQANAQKIAAFLEEHKLVEEVRYPGRGGMISFFIRDAALVSPLLKELELFTFAESLGGVESLITYPTTQTHADIPVELRNSYGLTDKLLRISVGIEASEDLIADLSKALDAVLEEVSARG

SEQ ID NO: 3375 - protein, 412 aa, Streptococcus pyogenes SSI-1
MEYEVYETMKIIEKSSKLEHVAYDIRGPVLDEANRMIASGEKILRLNTGNPAAFGFEAPDEVIRDLIVNARLSEGYSDSKGIFSARKAIMQYCQLKGFPDVDIEDIYLGNGVSELISISLQALLDNGDEVLVPMPDYPLWTACVSLGGGKAVHYLCDEEAGWYPDIADIKSKITSRTKAIVVINPNNPTGALYPKEILEDIVALAREHQLIIFADEIYDRLVMDGKEHIAIASLAPDVFCVSMNGLSKSHRIAGFRVGWMVLSGPKDHVKGYIEGLNMLANMRLCSNVLAQQVVQTSLGGHQSVDALLLPGGRIFEQRNFIYEAINAIPGLSAVKPEAGLYLFPKIDRQMYRIDDDEEFVLQLLKQEKVMLVHGRGFNWKDPDHFRIVYLPSVEELEDVQEKITRVLYQYRR

SEQ ID NO: 3376 - protein, 285 aa, Oryza sativa
  unsure (1)..(285): unsure at all Xaa locations
MAKFLKYDVYELELTSVKDNTELRKLLIDTTGLYLMLGNMDNYRLHSKKDEXEKNLVXKKEVVKGVLLQQIVQAAVATVLFVLGLLSLYSTNALLWFPFTLVTGDDGESGGDRHASIFVLGRQLFVAMLMLDTWQYFMHRYMHQNKFLYKHIHAQHHRLIVPYAFGALYNHPLEGLILDTIGGALAFLVCGMSPRTSIFFFSFATIKTVNDHCGLWLLGNLFHIFFKNNSAYHDIHHQLYGTKYNYSQPFFVTWDRILGTYMPYELERRPEGGFEAKPVKDCKEH

SEQ ID NO: 3377 - protein, 230 aa, Pseudomonas putida KT2440
MSLGKRMGAELIGTFWLVLGGCGSAVLAASSPLGIGVLGVAFAFGLTVLTMAFAIGHISGCHLNPAVSFGLVVGGRFPAKELLPYVIAQVIGAILAAGVIYLIASGKAGFELSAGLASNGYADHSPGGYTLGAGFVSEVVMTAMFLVVIMGATDARAPAGFAPIAIGLALTLIHLISIPVTNTSVNPARSTGPALFVGGWALQQLWLFWVAPLIGAAIGGALYRGLAKEP

SEQ ID NO: 3378 - protein, 528 aa, Oryza sativa (japonica cultivar-group)
MDHQLVARGLFKPLLLFVAGLIVLYALRRRRRHRRSSGLRLPPSPFGLPILGHLHLLAPLPHQALHRLAARHGPLLFLRLGSVPCVAACSPDAAREVLKTHEAAFLDRPKPAAVHRLTYGGQDFSFSAYGPYWRFMKRACVHELLAGRTLDRLRHVRREEVARLVGSLRASADGGERVDVDAALMGLTGDIVSRMVMGRRWTGDDNDAEEMRSVVAETAELTGTFNLQDYIGVFKYWDVQGLGKRIDAVHRKFDAMMERILTAREAKRKLRRQAAADGEDDEKDLLDMLFDMHEDEAAEMRLTRDNIKAFMLDIFAAGTDTTTITLEWALSELINNPPVLRKLQAELDAVVGGARLADESDIPSLPYLQAVAKETLRLHPTGPLVVRRSLERATVAGYDVPAGATVFVNVWAIGRDAAWWPEPTAFRPERFVSGGGGGGTAADVRGQHFHLLPFGSGRRICPGASLAMLVVQAALAAMVQCFEWSPVGGAPVDMEEGPGLTLPRKRPLVCTVSPRIHPLPAAASASLT

SEQ ID NO: 3379 - protein, 351 aa, Staphylococcus aureus subsp. aureus Mu50
MKALVKTREGHGNLELLDKEVATPLDDKVKIKVHYAGICGTDIHTYEGHYKVNFPVTLGHEFSGEIVEVGADVKDFKVGDRVTSETTFYVCNECEYCKSKDYNLCNHRKGIGTQVDGVFTNYVIAREESLHHIPDEVSYQSAAMTEPLACAHHGVSKIQVNSGDVAVVMGPGPIGLLVAQVLKSKGATVVVTGLDNDKVRLDKAEALHMDYVVNLQQTDLKTYINGITDGYGADVVVECSGAVPAARQGLDIIRKKGFYSQIGIFKDAEIPFDMEKVIQKEITVVGSRSQKPADWEPSLQLMADGLVNAEALVTKIYDISKWDEAYQHLKSGEGIKALLKPLDLDENEGEN

SEQ ID NO: 3380 - protein, 549 aa, Haemophilus influenzae
MKNINPTHTHAWKSLEAHKAELSNITIQDLFKQEKNRFDDYSLTFNNQILIDFSKNNINQTTLSHLRQLAQECALDSAKEAMFTGEKINRTENRAVLHTALRNRTNTPVLVDGKDVMPEVNAVLAKMKDFCQRIISGEWKGYTGKAITDVVNIGIGGSDLGPYMVTEALRPYKNHLNMHFVSNVDGTHIAETLKKVNPETTLFLVASKTFTTQETMTNAQSARDWLLKAAKDESAVAKHFAALSTNAKDVEKFGIDTNNMFEFWDWVGGRYSLWSAIGLSIALSIGFENFEALLNGAHEMDKHFLSTPIEQNIPTTLALVGLWNTNFLGAQTEAILPYDQYLHRFAAYFQQGNMESNGKYVDRDGNVIKNYQTGPIIWGEPGTNGQHAFYQLIHQGTTLIPCDFIAPAQRHNPLADHHNKLLSNFFAQTEALAFGKTKEEVEAEFVKAGKSLDDVKNIVPFKVFTGNKPTNSILVQKITPFTLGALIAMYEHKIFVQGVIFNIFSFDQWGVELGKQLANRILPELTDSEKVASHDSSTNGLINQFKAWR

SEQ ID NO: 3381 - protein, 463 aa, Desulfovibrio desulfuricans G20
MPVQPPEERIRNFDEVATGYTLEMAAEEAARCLQCKKPKCVKGCPVEVPIPQFIAHLAAGDIDAAYRTLKSTNSLPAVCGRVCPQEVQCEGECILTAKGQPVAIGRLERFVADEYMHRDACGLISGKPECPLIDPHKKVACIGSGPASLTAAGYLAARGCKVTVFEALHELGGVLVYGIPEFRLPKEKIVAKEVNALRELEVDFVRNRVGGKTFSIGELFAQGYRAVFIGVGAGLPRFLGIPGENLNGVFSANEYLTRVNLGRAYSFPDYDTPIIRGRRVTVFGGGNVAMDAARTALRLGADSVHIVYRRTVAEMPARHEEVEHAMEEGVKMQELCAPIAFVPDAEGCLSGVRLQQMQLGEPDQSGRRRPVPVEGSELLLPTDLAVIAVGTRSNPVLLEAEPELDLNRWGYISINSDTGETSIPDVFAGGDIVTGAATVILAMGAGRTAAKEIARRLGCQPDD

SEQ ID NO: 3382 - protein, 671 aa, Burkholderia fungorum LB400
MRVTVEAGRAIKVVADPEHPPTQGALCTKVSRYAERVHHPQRLTRPMKRVGRKGEGRFEPIGWDEAFQLAARRLSEIAHRAPEAILPYSYAGTMGLIQGDSIAQRFFHKLGASQLDRTICAAAGTAGLKYTYGASLGMLTEFFDESELILIWGSNPIASNLHFWTRAQQAKRRGARLIAIDPYRSLTAEKCHQHIALKPGTDSALALGMINVLIRENLLDHAYIEAHTSGFEALKARALSYPPSRAAEICGIDERVIVDLARLYGGTRKAAIRMNYGLQRVRGGGNAVRAIACLPSLTGAWRERAGGVLLSSGGWAPVDSYALQRPDLMPGWPTRTSRVINMNGIGDALLHKGDAAFGPKVEAIVVYNSNPVAVAPDSERVAAGFAREDLFTIVLEHFQTDTADYADLLLPATTQLEHLDVHKSYGHTHVMVNLPAIAPVGEALPNTEIFRGIARHMGLDEPALFESDETVAQAAFRWQDRTLEGVDWETLKKTGWAKLNLPDAPFAEGGFQTPSGKCEFYSERLAQRGLDPLPDYLPPYESADGAPELAARYPLAMISPPARNFLNSTFVNIESLRSTEGEPHLDMHPADAQSRDIVDGDQVRIFNDRGSMQARVRVTDKAREGLVVGLSIWWKKLAPDGRNANQVTSQALTDLGGSATFYDCLVEVERV

SEQ ID NO: 3383 - protein, 93 aa, Triticum aestivum
  unsure (1)..(93): unsure at all Xaa locations
MAATIHSEKARQIFDSRGNPTVXVDECCSYGTLARAAVPSGASTGVYEALELTDRGSDYLGKGVSKAVNHVNFIIAPAVVGEDPTAQTELYNF

SEQ ID NO: 3384 - protein, 390 aa, Clostridium thermocellum ATCC 27405
MPKLSSKIEGFTDSVIRRMTRIANSYGAINLSQGFPDFDPPVELKNALSRVASGSIHQYAVTWGAKNFRESLAKKQSRFMGIPIDPETQIVVTCGSTEAMMAAMMTVCNPGDKVVVFSPFYENYAADAILSGAEPIYVHLRPPGFNFDVDELEEAFKQRPKALILCNPSNPSGKVFTLEELKTIAYFAEKYDTFVITDEVYEHIVYPPHHHIYFASLPGMFERTISCSSLSKTYSITGWRLGYLIAPSYIVDGARKVHDFLTVGAAAPLQEAAVVALNFGDDYYENLKRIYTEKRDFFLDGLDRLGLAYTVPQGAYYVMVDISEFGAKSDLEFCEWMAREVGVAAVPGSSFFRDNVNHLIRFHFAKKKETLAEAVKRLEKLKDKARERWR

SEQ ID NO: 3385 - protein, 207 aa, Hypocrea jecorina
MPLCGGSKTVQRKLVLLGDGASGKTSLLNVFTRGYFPTVYEPTVFENYVHDIFVDNVHIELSLWDTAGQEEFDRLRSLSYDDTDLIVLCYSVDSKDSLENVESKWVGEIADNCPGVKLVLVALKCDLRQQEDDEPEDQAAADGNAQREKPPTISYDEGLEVAKRIGASRYLECSAMKNRGVNEAFTEAARVALSVKKEREDNKCTIM

SEQ ID NO: 3386 - protein, 98 aa, Glycine max
  unsure (1)..(98): unsure at all Xaa locations
MSRRYDSRTTIFSPEGRLYQVEYAMEAIGNAGTAIGILSKDGVVLVGEKKVTSKLLQTSTSTEKMYKIDDHVACAXAGIMSDANILINSDRDQAQRYT

SEQ ID NO: 3387 - protein, 270 aa, Dechloromonas aromatica RCB
MKIVFLGGGNMANALIGGMVKQGFSAADIHVIDPGAEALAKLASAYGVNCHASADAAPASPDVLILAVKPQQMKDAVAPLVGKLGKALIISIAAGLDMTALSRWLGGHRQIVRCMPNTPALIGAGITGLCALPEVSTDQRAVADRVLRAVGTTVWIDDEAKIDGVTAISGSGPAYVFLFIEALQQAAADLGFTPEQGRQLAIETVQGAAALAAQSTEPASILRERVTSKGGTTAAALNVMAERGVKEGIVAGCMAAAARGQELGKILGAD

SEQ ID NO: 3388 - protein, 311 aa, Vitis aestivalis
MAMDSSNWMAASLDLNANPLRLFDDTPKKEVQDDFTGLGLKVVSLKEEETGVLVEKLNQVNAENRKLTEMLTVMCENYNALRSHVMEYISKNPERESPSSRKRKAESSNNNSNNNGVVGNSESSSSDEDSFKKPREETIKAKISRVYTRTDASDTSLVVKDGYQWRKYGQKVTRDNPSPRAYFKCSFAPSCPVKKKVQRSVEDQSILVATYEGEHNHPHHGRIEPTSGANRSVNLGSVPCASSLSSSGPAITLDLTKPKSNSDAKASKSPELHHFLVEQMASSLTKDPSFKAALAAAISGRILHHNQTEKW

SEQ ID NO: 3389 - protein, 404 aa, Nanoarchaeum equitans Kin4-M
MILPPRGTKDFTPELAILWKEIVSKIESVYQKYGFDPIITPIVEYWDTLKGKYGEEAEKKEIWRFRVPQSKKWYALKYDQTVPLARYFARFRPKLPFKRYTIDRTFRYDEPQKGRYREFWQADADIVGSPYPEADAEILNMMIEAYETLGFNVYLRVSDRRALESLIEKVGEKDKFIEIARIIDKWDKIGEEGVLEKLKQITDKAEKIIELLKENPEEFYPKEFWEIIDLVEKKNKIKIDIKLARGFDYYTGMVYEVWIEGFNRALGGGGRYDNLIGIFSKEKIPAVGGSIGINPLIDVGLEKGIFNLNKKTYTQIAVIYIEVFKEAWRIANKLRDLGLNVYIDLLRRDFKKQMEYVIEKDIRYLVIVGKKDLANNLVTFQDRLTRERKKIPIENLEEIKSLVQ

SEQ ID NO: 3390 - protein, 266 aa, Bifidobacterium longum NCC2705
MSNPTIGFIGYGNMAQAIAEGLVAAGAVDGADIVACAAHYDKLEKTTMKVGAKPLHNAAEVVAASDMVVIAIKPYQIESVIKPVIGAIADEDKFVVSIAAGWDLDKYRDLFGADFNAAHIQCTIPNTPMAVGKGVLVTEADNTLTDTQAEVFERLFSSISLIERVDSAHMGIGMCIAGCAPAFTDMYIEALGDAGVKYGLQRATAYRLAAKMVEGVGALYLKNETHPGVMKDAVCSPGGTTIKGVTSLEESAFRGAVIKAVDAIEA

SEQ ID NO: 3391 - protein, 716 aa, Pseudomonas syringae pv. tomato str. DC3000
MASKKAPPATDTSKSQMAGTDTPDRGNTNAKLESLEQFRSDATGQALRTNHGVKISDNQNTLKVGSRGPSLLEDFIMREKITHFDHERIPERIVHARGTAAHGYFQTYENHGALSKAGFLRDPAEKTPVFVRFSTVQGPRGSGDTVRDVRGFAVKFYTGEGNFDLVGNNMPIFFIQDAIKFPDFVHAVKPEPHNEIPTGGSAHDTFWDFVSLVPESAHMVLWTMSDRAIPKSLRTMQGFGIHTFRLINTEGKSSFVKFHWKPKFGVCSLVWDEAQKLAGKDTDFHRRDLWESIEMGDYPEWELGVQIVAEEDEHKFDFDLLDPTKIIPEELVPVTPLGKMVLNRNPDNYFAETEQVAFCPGHIVPGIDFSNDPLLQGRLFSYTDTQISRLGGPNFHEIPINRPIAPNNNGQRDAQHRTTIDKGRASYEPNSIDGGWPKETPAAAVDGGFETYPERVEAHKVRERSESFGDHFSQATLFFQSMSHHEKEHIIAAYSFELGKVEREYIRARQVNEILANIDLELASRVAANLGLPAPTAGTVPVRNTSVKESPALSQVNLLSGDIVSRKVAILVANGVDGKAVEAMKKELTAKGAHAKVLGPTSAPVKTADGASLPVDASAEGLPSVAFDAVFVPGGKDSVKALSTDGVALHFILEAYKHLKAISVAGEAKELLTLLRLEEDAGLLVVSDSKSFETFFNAIAQHRVWDREVKAKAVPA

SEQ ID NO: 3392 - protein, 503 aa, Triticum aestivum
MVATAKIPQRQLFIDGDWRAPALGRRLPVINPTTEASIGEIPAGTSEDVDAAVAAARAALKRNRGRDWSRAPGAVRAKYLRAIAAKMVERKSDLARLEALDCGKPLDEAAWDMDDVAGCFEFFAGHAEALDKRQNAAVALPENFKCHLKKEPIGVVALITPWNYPLLMAVWKVAPALAAGCTAVLKPSELASLTCLELGDVCKEIGLPSGVLNIVTGLGHEAGAPLSSHPDVDKVAFTGSYATGQKIMVAAAPTVKPVTLELGGKSPIVVFDDVDIDKAVEWTLFGCFWTNGQICSATSRLLIHKNIAKEFVDRMVAWSKNIKVSDPLEEGCRLGPVVSEGQYEKIKKFVANAKSEGATILTGGVRPKHLEKGFFIEPTIITDINTSMEIWREEVFGPVLCVKEFSTEEEAIELANDTHYGLAGAVISGDRERCQRLAEEIDAGCIWVNCSQPCFCQAPWGGNKRSGFGRELGKGGIDNYLSIKQVTEYTSDAPWGWYKAPAN

SEQ ID NO: 3393 - protein, 423 aa, Oryza sativa
  unsure (1)..(423): unsure at all Xaa locations
MAKRRSNGETAAASSDDSSSGVCGGGGGGSGEVEPRRRQKRPRRSAPRDCPSQRSSAFRGVTRCAXWTGRFEAHLWDKNTWNESQSKKGRQGAYLGAYDGEEAAARAYDLAALKYWGHDTVLNFPLSTYDEELKEMEGXSREEYIGSLRRKSSGFSRGVSKYRGVARHHHNGKWEARIGRVFGNKYLYLGTYATQEEAAVAYDIAAIEHRGLNAVTNFDINLYIRWYHGSCRSSSAAAATTIEDDDFAEAIAAALQGVDEQPSSSPATTRQLQTADDDDDDLVAQLPPQLRPLARAASTSPIGLLLRSPKFKEIIEQAAAAAASSSGSSSSSSTDSPSSSSSSSLSPSPLPSPPPQQQPTVPKDDQYNVDMSSVAAARCSFPDDVQTYFGLDDDGFGYPEVDTFLFGDLGAYAAPMFQFELDV

SEQ ID NO: 3394 - protein, 347 aa, Lycopersicon esculentum
MGRVPCCDKMGVKKGPWTPEEDIMLVSYVQQHGPGNWRALPTKTGLRRCSKSCRLRWTNYLRPGIKRGNFTDQEEKMIIQLQALLGNKWAAIASYLPERTDNDIKNYWNTHLKKKMKRLDQCHGSNDLFSLENGLTHLSSSNSSTSRGQWERTLQADINMAKKALHNALSLENPTSSHNNNIKQENTQVSSTSTIYASSTENIARLLQGWIGSSTSSTNNSESSKTSSNNIATTDSSSCDGTPNAETKGGMGLMEAFESLFGLESFESSSSDELSQTTTPEAIKIEIKKEENEHDVEVPLSIILENWLLDENTLNIQPKNDLTTLISFDETPQLFYKFFFLLILLME

SEQ ID NO: 3395 - protein, 393 aa, Nitrosomonas europaea ATCC 19718
MSHVMNTYARLPVTFVKGEGVWLWDDQGNRYLDALSGIAVCGVGHCHPVLVKALCEQVSTLIHTSNVYHIQHQERLADRLTSLSGLEKAFFCNSGAEANEAAIKLARLYGHNQGINLPTIIVMERSFHGRTMATLTATGNRKTQAGFEPLLTGFVRVPYDDLEAVNKVAANNREIVAILLETYQGEGGVNFPQANYLQGLRRICDQNGWLLMLDEVQCGLGRTGKWFAFQHSEVMPDAMTLAKGLGSGVPIGACLAGGKAAEVFKPGNHASTFGGNPLACRAALTTLDIIEQEGLMDNAVTIGNFMWEEFGRRLQAWQDVLKIRGQGMMIGIELPVPCSELVPEALKRRVLVNVTSEKVVRLLPALNMQKAEAEQVVTEVSALITWFLESRVK

SEQ ID NO: 3396 - protein, 568 aa, Glycine max
MASSTLICDTQQWKELKAHAEDVEKTHLRDLLSDDERSQSMVVEFDGILLDYSRQQATLETREKLFKLAEVASLKQKINQMYNGEYINSTENRSVLHVALRAPRDAVIQSDGNNVVPDVWNVLDKIQEFSERVRSGSWVGATGKALKDVVAIGIGGSFLGPLFVHTALQTDPEAVESARGRQLRFLANVDPIDVARNITGLNPETTLVVVVSKTFTTAETMLNARTLREWISSALGPSAVAKHMVAVSTNLTLVEKFGIDPKNAFAFWDWVGGRYSVCSAVGILPLSLQYGFSVIEKFLRGASSIDQHFYSQPFESNIPVLLGLLSIWNVTFLGYPARAILPYSQALEKFAPHIQQVSMESNGKGVSIDGVPLPFEAGEIDFGEPGTNGQHSFYQLIHQGRVIPCDFIGVVKSQQPVFLKGEVVSNHDELMSNYFAQSDALAYGKTAEQLQKENVPPHLVPHKTFSGNRPSLSLLLPSLNAYNIGQLLAIYEHRVAVEGFIWGINSFDQWGVELGKSLASQVRKQLNASRTKGEPVQGFNFSTTAMLTRYLQASADVPADLPTRLPQI

SEQ ID NO: 3397 - protein, 212 aa, Oryza sativa
SSKGAAAAPAPKVVAVLAGLLERAAARGDADADARGGSAAAAAATAFRGRTRPEISVRRYAERIYRYAGCSPACFVVARVYLDRLAGRSPAVCVDSYSVHRLLITSVMVAAKFMDDIHYNNAYFARVGGVEVAEMNGLELELLFALRFRLNVTPATFATYCAALEGEMAADDGPLPSPSPSPEEEGNDRRQPPPRRKDGITNKVAAAVDRSA

SEQ ID NO: 3398 - protein, 276 aa, Zea mays
MEILPIPAESFKVGFIGAGKMAESIARGVVASGVLPPNRICTAVHSNLNRRDVFESFGVNVFSTSEEVVKESDVVIFSVKPQVVKKAVTELKSKLSKNKILVSVAAGIKLNDLQEWSGQDRFIRVMPNTPAAVGEAASVMSLGTGATEEDGAIVAMLFGAVGKILKADEKMFDAVTGLSGSGPAYIFLAIEALADGGVAAGLPRELALSLASQTVLGAATMVSKTGKHPGVLKDDVTSPGGTTIAGVHELEKGSFRATLMNAVVAAAKRSRELSQS

SEQ ID NO: 3399 - protein, 388 aa, Oceanobacillus iheyensis HTE831
MKIGIDKIGFYAPHLYLDMNELAEERGVEPEKFTIGIGQEKMAVPPITQDTVTLAANAAAQILDETDKQDIDMVIFGTESGIDHSKSAAVNVHQLLGLQPHARAIELKQACYGATAGIQMARGHIALNPNRKVLVLGSDIARYGLRTPGESTQGAGAVALLISADPSIMAIEQESTYYTDDIMDFWRPVYSDIAFVDGKYSNEQYIAFFQKVWNAYKEQTNRGLEDFAAICFHLPYTKMGLKALRTVLDEVEENTQTHLKEQYRLSTQYNRNIGNIYTGSLYLSLLSLLENSNELTAGDKIGMYSYGSGAVGEFFSGVLQEGFEKQLHQTKHNAMFEKRQKISVSEYEKIFEQQIPTDGSVTEWSTKEDPAEICLTGIQNHQRIYQVK

SEQ ID NO: 3400 - protein, 275 aa, Trichodesmium erythraeum IMS101
MAITKLGLIGGGVMGEALLSRLIKQNVYLPSEILVSDPQQQRRNLLTQEYGVQVTTDNSLVVTSTTEVLLLAVKPQIFDSVVSQLGDWQVAGKTTTLPLLISIMAGVPLQKLEAFFCGQPVVRVMPNTPATVGVGMSAIALGKNVQPSHRELATCILASIGQVVEVSESLMDAVTAVSGSGPGYVTIFIESLTDGGVRAGLPRAIAYQLALQTVLGTAVLLQESGMHPAQLKDRVTSPGGTTIAGIAELESAGFRSAIIEAVLAAKEKAEELGNS

SEQ ID NO: 3401 - protein, 279 aa, Thermosynechococcus elongatus BP-1
MTSSLELQPQTSRLNWGFVLFLGAVHILAAVALFFFSWSALAVTIFLHWLFGSIGICLGYHRLLSHRSFQVPQWLEYVIAVVGALAMQGGPIFWVAGHRLHHAHTEDEIKDPYSARRGFWWSHMLWLVYPQSQFFNAEEYARFAPDLTRDPFYRWLDRYFLLLQLPLALLLYGLGGWSWLLWGMFMRAVFLWHSTWLINSATHKWGYRRFETEDNSRNLWWAALLTYGEGWHNNHHAYPHVAKAGWYWWEVDPTWWVIRTLQGLGLAAKVQLPPPKALS

SEQ ID NO: 3402 - protein, 608 aa, Glycine max
  unsure (1)..(608): unsure at all Xaa locations
MYTFLLLLPIMSSSFSVRFLAPLPPSSSSCFPTSSLPKTWLCAAATPTVAXVNHHLLLXEVEASRLEPRVEERDGFWVLKEEYRGGISPQEKVKLEKDPMKLFMEGGIEELAKMSLEEIESSKHTKDDIDVRLKWLGLFHRRKQHHGRFMMRLKLKLPNGVTTSAQTRYLASVIRKYGKDGCADVTTRQNWQIRGVVLPDVPEILKGLDEVGLTSLQSGMDNVRNPVGNPLAGIDPDEIVDTRPYNNLLSQFITANSRGNPAMSNLPRKWNVCVVGSHDLFEHPHINDLAYMPANKDGRFGFNLLVGGFFSAKRCAEAIPLDAWVSADDVIPLCKAVLEAYRDLGFRGNRQKTRMMWLIDELGIEVFRSEVEKRMPGKKLERASKEELVKKQWERRDYLGVHPQKQEGLSYVGIHIPVGRVQADDMDELARLADEYATGELRLTVEQNIIIPNVDNNKIDGLLNEPLLKGRFSPEPSLLMKTLVACTGNQFCGQAIIETKERALKVTEEVERQVAVTRPVRMHWTGCPNTCGQVQVADIGFMGCMARDDNGKATEGVDIFLGGRIGSDSHLAQVYKKGVPCKDLVPVVVDILVKHFGAVLRNREEGED

SEQ ID NO: 3403 - protein, 386 aa, Clostridium thermocellum ATCC 27405
MMKVGNVSNYSISTKVVHGSKCYDPHTGAVSFPIYQSATFRHPALYQTTGYDYSRLQNPTREELENTIANIENGKFGFAFSSGMAAVSTILSLFSPKDHIIVSDDLYGGTYRLFEEIYKKYGLEFSYVNTSRIQDIEEAVKENTKAFFIETPTNPMMKVADLKTISRFAKDRKILLIVDNTFLTPYFQRPLELGADIVVHSGTKYLGGHNDTLAGLVVVNDEELAERIKLIQKSEGAVLSPFDSWLILRGIKTLGVRLEKQQENAMKIAKWLCTHKNVTKVNYVGLPDHEGYEISKSQASGFGAMISFNVKDVQTVEKVLSKVQLVMFAESLGGVESLITYPAVQTHAAIPEEMRNRIGVTDTLLRLSVGIEDADDIIADLEQALE

SEQ ID NO: 3404 - protein, 527 aa, Oryza sativa (japonica cultivar-group)
MAPLSLLLRSGARPASLPLRVDGAASQRIASLAAPPRRPWIGRGVALRLPTSVSAVSAAETETETPPVAEEVRAPAAGEERFDWLDQWYPVAPVCDLDPRKPHGKMVLGLRVVAWFDGGGEWRVVDDACPHRLAPLSEGRVDGKGRLQCAYHGWCFDGHGSCQFIPQAPALGPPVHKNSKACVASYPSVVQNNILWFYPRTEPEYRDVLQRKRPPYFPDLDDPSFNTVFGVRDFPYGYDMLVENLMDPAHNIHLLSTVEFDQERGGPVKMKIEEANIDGFLSIQGENWGHFRFIAPCTINRSELPLETLAHFDQEKQQQQPQGMLVFLCIPVAPGRSRVIWVFPQSVSAWPDKFIPRWLHHMVTNTVLDSDLYLLHIEERNFAAVGVDKWQKACYVPTLSDNMIITFRNWFRKYCKHQVGWATPMVNQLPTTPTKDQLMERYWSHVMQCTSCSAALKWMRAMEVALQVASVAVVGFLAAGKGTTVVTSAVQRAAVVAAAALCFAASRWLANFIEKSFYFQDYVHAYK

SEQ ID NO: 3405 - protein, 513 aa, Triticum aestivum
  unsure (1)..(513): unsure at all Xaa locations
WYFTCAREGSHLSYTSQVISQSRTRVRTRTPLALRSIWSDSIRFDLGFLSKPRDARPELRPWRRTIQSVKARQIFDSRGNPTVEVDVCCSDGTFARXAAVPSGASTGVYEALELRDGGSDYLGKGVSKAVDNVNSIIAPALIGKDPTAQTELDNFMVQQLDGTKNEWGWCKQKLGANAILAVSLAVCKXAGASVKKIPLYQHIANLXAGNKQLVLPVPAFNVINGXGPMLGNKLAMQEFMILPTGAASFKEAMKMGVEVYQQLEXSLLKKKYGQDATNVGDEGGFAPNIQENKXGLELLKTAIEKAGYTGKVVIGMDVAASEFYNDKDKTYDLNFKEENNDGXSQKISGDSLKNVYKSFVSEYPIVSIEDPFDQDDWVHYAKMTEECGVEVQIVGDDLLVTNPTRVAKAIQEKSCNALLLKVNQIGSVTESIEAVKMSKHAGWGVMTSHRSGETEDTFIADLAVGLSTGQIKTGAPCRSERLAKYNQLLRIEEELGDAAVYAGLKFRAPVEPY

SEQ ID NO: 3406 - protein, 92 aa, Oryza sativa
  unsure (1)..(92): unsure at all Xaa locations
MAFAVSDELLXGTFVPIAVYWLYSGLVIVLGAMGMDDYRLHPKGEEATKNVVSKWTVVKGVLVQQSFQIAVSLLLFTIIGDESGTVRKQPPA

SEQ ID NO: 3407 - protein, 391 aa, Bacillus subtilis subsp. subtilis str. 168
MFMFEKPHGMRDTLPGLYETKKKVRRSLTDLIDKWGYQFMETPTLEFYDTVGVQSAIEEQQLFKLLDQDGKTLVLRPDMTGPIARVAASKLLKHGHPLRVGYAANVFRAQEREGGRPAEFEQVGVELIGDGTTSADAEVIALVVGALKNAGLASFKIAIGHAGIADALFVEVLGNVERADVLRRFLYEKNYVGYREHVKSLPLSSIDKSRLLELLELRGGIEVCGRAEEIVDSAQGKSVVDELKALWDILEDYGCTENVRLDLNMVSHMSYYTGILFEVYAENVGFVIGSGGRYNKLLGHFDSPAPATGFGLRIDRLIEALHMKDEPCEIDAVIFSKEQRAQAIAYANEERMKGNKVVLQDLSGIENIDQMTKSFANVTYFIGARKEEQNG

SEQ ID NO: 3408 - protein, 422 aa, Thermus aquaticus
MEYRDPGGLQPAGGLPRMDPHGALGLPIYAVAAYGFKTLEEGAERFATGEGYVYARQKDPTARALEERLKALEGADYAVALASGQAATFAALLALLRQGDEVVAARGLFRGQEPPKSGGFSARVLGPHGGVRVRYVDPEPDRVREALSPSTRAIFVETLANPALYIPDLEGLASLAEEKGVALIVDNTFGAAGALCRPLRWGAHVVVQSLTKWASGTGSVLGGAVLSRDTALWARYPQFLEKDPRGQVPWEALGGRCYPERVRTLGLSLLGMALSPFHAYLLFQGLETVALRVARMSETAHFLAERLQGHPKVKALRYPGLEGDPAHGRPRKYLSAFGPMLTLDLGSQEAASRFLRAIPLPKAANLGDARTLLVHPWTTTHSRLPEEGRLQAGVTPGLVRVSVGLEAPEDLLGMFREALEVV

SEQ ID NO: 3409 - protein, 521 aa, Oryza sativa (japonica cultivar-group)
MAPVSLHLLSLTRLSLPFRDTVTNPSTPRIPPWRRQWISPTDARRRRLSMPVSAVAAEAPLPRAVDEKETPAAGEERFDWLDQWYPVAPVRDLDKRKPHGKMVMGISVVVWFDGGGGEWRVVDDACPHRLAPLSEGRVDGKGCLQCAYHGWCFDGHGSCQFIPQAPALGPPVHKNSKACVASYPSVVQNNILWFYPRSEPEYKEILQRKRPPYIRELDDPSSVINSGVRDLLYGYELLVENFMDPAHVPYAHRGQFPHVPREEDIGRYEGGLPIKMNIEELNIAGFHSNPEENWGYFKFIAPVDQDNNNTNNKKQPEVTTVFFCIPVSPGRCRVIWANGYNLDGWFDKMIPRWWLHIKTNQVLDSDSSVLHIEERNYAAFGLDNWHKACYVPTSSDNLIIAFRNWFKKYCNNQVGWLTPMVNQLPPASTRVEVYERYWSHVMQCTSCSAALKWMRALEVALQVASVAVVGFLAAGKGTVVTSGVQRAAVVAAAVLCFAASRWLAGFIEKTFYFEDYVLADK

SEQ ID NO: 3410 - protein, 92 aa, Zea mays
GMTPRTAIFFFSFATIKTVDDHCGLWLPGNILQALFNNNCAYHDIHHQLYGNKYNFSQPFFVMWDKILGTYMPYSIEQRKGGGVESRPAKLD

SEQ ID NO: 3411 - protein, 248 aa, Synechococcus elongatus PCC 7942
MSSSTQVGLKEQLHPLIRDLATGIEATWQRWLNLEPYAAMPADLGYIEGKLEGERLQIENRCYQSREFRKLHLELARVGNNLDILHCVLFPRTTFDLPMFGADLVGGRGQISAAIVDLSPTTIARELSNDYIAGLTALPNPTFQGLRELPTWGDIFSSFCLFIRPGSPEEEAAFLDRALGFLQVHCQQAAAATALTDPEAIATVLEQQRYYCEQQRRNDKTRRVLEKAFGDDWADRYMTTMLFDLPSD

SEQ ID NO: 3412 - protein, 573 aa, Clostridium tetani E88
MNYMRIYNEWLNNDYFDDVTKEELKSIKDNPKEIEDRFYKNLEFGTAGLRGKIAAGTNRMNKYIIAKVTQGLANFIAKQGKEVMNRGVAIAYDCRHYSDVFAKTAALVLAANGIKAYLFEDLRPTPELSYTVRRLNTISGIVVTASHNPKDYNGYKVYWEDGAQILDKIAKPVTEEINNIKNFKEIKSISEEEALEKGLLEILGKEIDDEYIEKVKALSIRNDIDKDIKIVYTPLNGTGNIPVRRVLRERRFTNVIVVPEQENPDPDFTTVGYPNPEDIKAFEYAKRLGEKERADLLLATDPDCDRLAVMARNNRGEFVALNGNQTGAVLIKYLVESKVEKGTLPEKPMIVKSVVTGDMGKVVGEKYGVTTFESLTGFKNICGKEMEMNKKGYNFIFGYEESIGYTAGDFVKDKDGVISAMFLCEAAAYYKTQGKTLIDVLNDMYNEFGYYRENLISLILEGVEGQRRIGRMMEAYRNEFPKIIGDNKLIKYIDIDKGKEIDFITREEKSVEFPKSNVLKFILEDGSWYAIRPSGTEPKIKIYLYSKGHTLKDSEDKLKIMEKTIMEKLNSVE

SEQ ID NO: 3413 - protein, 584 aa, Mycobacterium tuberculosis CDC1551
MSFVIVAPEALMSVASEVAGIGSALNAANAAAAAPTTGVLAAAADEVSAAMAALFGAHAQEYQRLSAQAAGFHAQFVQALNAGVNSYASAEAANASPLQAVEQQVLGLINGPAQTLLGRPLIGNGADGAPGTGQPGGPGGLLWGNGGNGGSGVAGVGGPGGSGGAAGLFGHGGNGGAGGSNAAGAGGVGGAGGAGWLVGNGGAGGFGGVGTTVSGNGGAGGAAGAFGNGGVGGAGGAAVIGGLPGNGGAGGNAGLIGAGGDGGVGGVGAPGTNGMNPPPNQTSQAANGSPGANNGAGSGGAGLPGNPGAVPGRAGGAGGLGGSGSDTSEGPVTGGNGGNGGDGGPGAPGGNGAPGGIGVNTGTGWAYGGNGGNGGDGGAGARGGDGGNGGNGLALNGGNGIGGNGGAGGRGGTGAAGGNGGIGGGATGTLTFFGSGGDGGPGGAGANTAGTGGVGGVGGAGGQGGLLFGDGGNGGAGGAGGIGGTGASGGAGGKGGSGLVGGDGGNGGAGGAGGNGGKGGAGGAGGGAGMFSQPGVHGAGGTGGQGGAGGAGGAGGAAGAGTVVAGNPGDPGGFGAAGADGLPG

SEQ ID NO: 3414 - protein, 679 aa, Arabidopsis thaliana
MLTWETPVMLASNTASTKKLAFITTFLIIVLCPVTMVMSQPQADVLPLPASDADCLLRFKDTLVNASFISSWDPSISPCKRNSENWFGVLCVTGNVWGLQLEGMGLTGKLDLEPLAAIKNLRTLSFMNNKFNGSMPSVKNFGALKSLYLSNNRFTGEIPADAFDGMHHLKKLLLANNAFRGSIPSSLAYLPMLLELRLNGNQFHGEIPYFKQKDLKLASFENNDLEGPIPESLSNMDPVSFSGNKNLCGPPLSPCSSDSGSSPDLPSSPTEKNKNQSFFIIAIVLIVIGIILMIISLVVCILHTRRRKSLSAYPSAGQDRTEKYNYDQSTDKDKAADSVTSYTSRRGAVPDQNKLLFLQDDIQRFDLQDLLRASAEVLGSGSFGSSYKTGINSGQMLVVKRYKHMNNVGRDEFHEHMRRLGRLKHPNLLPIVAYYYRREEKLLIAEFMPNRSLASHLHANHSVDQPGLDWPTRLKIIQGVAKGLGYLFNELTTLTIPHGHLKSSNVVLDESFEPLLTDYALRPVMNSEQSHNLMISYKSPEYSLKGHLTKKTDVWCLGVLILELLTGRFPENYLSQGYDANMSLVTWVSNMVKEKKTGDVFDKEMTGKKNCKAEMLNLLKIGLSCCEEDEERRMEMRDAVEKIERLKEGEFDNDFASTTHNVFASRLIDDDDFGFAMNR

SEQ ID NO: 3415 - protein, 464 aa, Haemophilus influenzae R2846
MNFRLLSQYHTDIKKLIKISLPILLAQIAQNSMGLADTIMAGRVSSTDMAAISIGASIWMPLMFFGQGLLLALPPTISYLNGSGQHHRIAHQVRQGIWLVLGVSIPLGLLIYFCEIPLQYMQMESKMSDLARNYLHAMLWGLPAYLMLINFRCLNDGIEKTKPAMVITFLGLLINIPLNYIFIYGKFGMPAFGAVGCGIATAIVNWAMCLMMIFYSYTNTQERSLKVFSQLIEMPNPKTLKKLLRLGLPIAIAICCEVALYALTSLMLSPLGATIVASHQITLNTSSFIFMFPMSIGMATTILVGQALGAGSPQNAKKIGYAALLLGLTVTIVTALITIFFRYEIASIFVTDEIVIAMAANLLLFAALYQFSDTIQMVVGGILRGYKDTKVILYITLFSYWVIGVPLGYTLGRTDWLVPHIDAKGFWIAFVVSLTFAAFLLSLRMKKMQAMNDNAILQRLEKLK

SEQ ID NO: 3416 - protein, 436 aa, Mycobacterium tuberculosis CDC1551
MSFVIAVPEFLSAAATDLANLGSTISAANAAASIPTTGVLAAGADDVSAAIAALFGAHAQAYQTISAQAATFHAQFVQTLSAGAGAYANAEAANVQQSLLNAINAPTQALLGRPLIGDGADGTAPGQNGGAGGLLYGNGGNGAAGVNAGIAGGSGGAAGLIGNGGSGGAGGAGAAGGSGGQGGLLYGNGGAGGNGGAATIPGGNGGAGGAGGNAWLFGNGGAGGLGAAGAAGAAGVNPLTVPAGQGSMGNNGEPGGPGQPGTEFGQTGGTGGTGGTGLSVGGTGGTGGTGGTGGAGGSGGRGGLLVGDGGAGGIGGTGGEGGIGARGGTGGQGGMGGAGQPGVGGDAGDGGNGGIGGDGGAGGDGGAGGAGGLFGVSGSSGLGGAAGSGGNGGGGGEPGVAGSPGVGPAGRGGDGNLGQFGPEGAPGQPGQPGQPG

SEQ ID NO: 3417 - protein, 348 aa, Saccharomyces cerevisiae
MSIPETQKGVIFYESHGKLEYKDIPVPKPKANELLINVKYSGVCHTDLHAWHGDWPLPVKLPLVGGHEGAGVVVGMGENVKGWKIGDYAGIKWLNGSCMACEYCELGNESNCPHADLSGYTHDGSFQQYATADAVQAAHIPQGTDLAQVAPILCAGITVYKALKSANLMAGHWVAISGAAGGLGSLAVQYAKAMGYRVLGIDGGEGKEELFRSIGGEVFIDFTKEKDIVGAVLKATDGGAHGVINVSVSEAAIEASTRYVRANGTTVLVGMPAGAKCCSDVFNQVVKSISIVGSYVGNRADTREALDFFARGLVKSPIKVVGLSTLPEIYEKMEKGQIVGRYVVDTSK

SEQ ID NO: 3418 - protein, 558 aa, Bifidobacterium longum NCC2705
MVANNAGQPATPADLINVDEVIGKYYDLVPDPEVPEQRVIFGTSGHRGSSLKTSFNEAHIIAISQAIAEYRKKAGVTGPLYLGSDTHALSGPAKKTAIEVLVANGVHVRVDSRDDFVPTPVVSQAILTHNRAVDGTQRFEGEGLADGIVVTPSHNPPTDGGFKYDPVTGGPAPAETTNAIAARANELLGDFKSIKRVPYEEAIKSEYVEGFDFREHYVDDLENVIDFDVIRNSGVRLGIDPLGGASVNYWPLINEKYDLNIGVVRPEVDPTWRFMTIDHDGKIRMDPSSPYAMKGLVDELNAGAWDKYDLVGGTDPDADRHGIVCPNWGVMNPNHYIAVCVEYLFGGNRPGWPEGAAVGKTLVSSSLIDRVAASINAKVIEVPVGFKWFVDPLFSGEVAFGGEESSGMSFLRKDGRVWTTDKDGLIPDLLAAEITAKTGKNPAQLHQEQVERFGESWYKRVDTPTTLEQKAKFAKLTGDDVAATQLAGEDITAKLTEAPGNHAKIGGLKVTTKDNWFAARPSGTENIYKVYAESFVSPEALDKVLDEATVVVDKALSE

SEQ ID NO: 3419 - protein, 314 aa, Streptococcus pyogenes SSI-1
MIMTKTAFLFAGQGAQKLGMARDFYDNFAIVRKTFDQASQVLGYDLRRLIDSDELKLNQTSYTQPAILTSSIAIYRVLGLHHVKPDMVAGLSLGEYSALVASGALSFEDTLSLVAKRGRLMEEAAPQGSGKMVAVMNTDVQVIEEVCQIAAKHGVVAPANYNTPSQIVIGGQTDAVNVAVELLKERGVKRLIPLNVSGPFHTALLEPASRLLAKELERYNFSDFKIPLVGNTEANIMEKDRIPELLARQVMEPVRFYDSVATLVESGITQFIEVGPGKVLTGFVKKIDKNLLCTSVENMVSLRLFLDREDIHGN

SEQ ID NO: 3420 - protein, 148 aa, Haemophilus influenzae
MIKKIAVLTSGGDAPGMNAAIRGVVRSALAEGLEVFGIYDGYQGLYNNKIKQLNRYSVSDVINRGGTFLGSARFPEFKDPNIRAKCAEILRSHGIDALVVIGGDGSYMGAKLLTEEHSFPCVGLPGTIDNDVAGTDYTIGYQTALQTA

SEQ ID NO: 3421 - protein, 433 aa, Methylobacillus flagellatus KT
MQVAMQEISKSSKLSNVCYDIRGPVLDRARQMEEDGHRIIKLNIGNPAPFGFAAPEEILQDVIRNMDSASGYTDSKGLFAARKAIMHYTQQKNIQGVTIDDIIIGNGVSELIVMAMQALLNNGDQVLVPMPDYPLWTAAVNLAGGTARHYVCDEQTGWLPDLRDIENKITANTRGIVIINPNNPTGALYPRETLEGIIEIARHHGLVIFADEIYDKVLFDGNTHTSIASLADDVLFVTFNGLSKNYRTCGYRAGWLVISGEKRHAGDYIEGLNMLASMRLCANVPGQLAIQTALGGYQSIDDLVAPTGRLCKQRDLAYKMLTDIPGVSCVKPKAGLYLFPRLDPKIYPIQDDQQFILDLLLEEKVLLVQGTGFNWRAPDHFRVVFLPNVDDLTEAFTRIARFLENYRKQHSTITIVEGKASKEAQTTSQSASA

SEQ ID NO: 3422 - protein, 513 aa, GIBBERELLA ZEAE PH-1
MFATQSPRHLQVLLCRTKKFALASPPICYKVGAASSGSIRKFLSARFSTSARARNLKQSVLDNSGRHGVYLYPTLKPEPLNVVSAKDTTVVFSNGKTIEDTTCGAAVACLGYNNERVKNAMIKQMDSFCYSNSLFYGHEIGEELAAELIGGTNGEMAKVYLMCSGAEAMESAMKMARQYYMELNPRQPQRTNFIAREGSYHGSTLGALSMGGHVGRRKLFEGMLLDNNIHRVSAANEYRGKADGQTTEEYVQQLADELDRKFQEVGPETVAAFVAETLVGATLGTIPAPTGYFKAMKKVCDKYGALLILDEVMCGMGRCGSLHEWEQEGVVPDIQTVAKGLAGGFAPMAAMFINHRLSDALMSGSGTSVFSHGHTYQGHPVGCAAALEVQRIIREDNLVENVRKNGEYLGKLLHDQLDDHPNVGNIRGRGFFWSMEFVADKETKEPFLPSDGIAKKVHLTALNDVGISLYPGMGTKDGVAGDHAWIGPAYNCSKQDIERIVSKVKEAVVLALG

SEQ ID NO: 3423 - protein, 175 aa, Triticum aestivum
  unsure (1)..(175): unsure at all Xaa locations
MAPTVMASLATFVAPFQGLKYTAGLPVSRRSSSAGLGSVSNGGRITCMQVWPIEGIKKFETLSYLPPLCTEALLKQVDYLIRSKWVPCLEFSKVGFVFREHNSSPGYYDGRYWTMWKLSMFGCTDATQVLNEVEEVKKEYPDAYVRVIGFDNLRQVXCVSFXRLKAPGXKDPXXG

SEQ ID NO: 3424 - protein, 511 aa, Oryza sativa (japonica cultivar-group)
MVMGLSVVAWLDGGGEWRVVDDACPHRLAPLSEGRVDGKGRLQCAYHGWCFDGHGSCQFIPQAPALGPPVHKNSKACVASYPSVVQNNILWFYPRSEPEYCDVLKRKRPPYVPEIDDDDPSHFMVYGVRDLLYGYELLVENLMDPAHVPYAHKGLFVEFDLEHGSPMKMRIEEASIDGFHSNLDGDWGYFKFVAPCTLYGTPFRTDLEADEVKKKKKKKPEVRVVLFTVPVAPGRSRFIWASRYKVGGWLDKILPRWFYHMTSNTILDSDTYLHVEDRNITTVGLDNWHKACYVPTSSDNLVIAYRNWFRKYCNHQIGWANPNPTVKQQLPQTPTRDQLLERYWSHVMQCTSCRAALKGMRALEITLQVAAVAVVGFLAAGKETAVMSGVQRASPPPAGSPTSSRRPSISRIMSMLTNDASIQEICDVLLLLGICHEPGLRRGFRLHRLAVSWPSWFRDAAINQQPKLETLWPCVCVIHAEARPGIQSFSLSKNKRSQATAKGIHEETASA

SEQ ID NO: 3425 - protein, 167 aa, Synechococcus elongatus PCC 7942
MKIRNVSMAPQVTDIAVTTIDGAAKSLSDYAGQVLLIVNVASYCGYTSQYSGLEALYRQYRDRGLQVLAFPCNDFGAQEPGSNEEIKTFCSTRFDVSFELFDKVHAKGADQHPLYAALTQTDPAGDVAWNFEKFLVGKDGTVLARFKSGVAPNDASLIQAIEAALAA

SEQ ID NO: 3426 - protein, 166 aa, Bordetella bronchiseptica RB50
MTEIIKPWHSVRRSRLHGNGVFATRKIPAGTRIIEYGGKRISAAEADRRHPTNPDDPFHTFFFSLSSGRVIDGGDEGNDARWINHSCDPNCEAQEGRHGKRVYIVALRDIARGEELFYDYGLVLDGRITRKLKEGYRCLCGTTPCRGTMLALPEKKKTKARSAEKA

SEQ ID NO: 3427 - protein, 520 aa, Oryza sativa
MAGPPGPAPGTSSSSSSLPSRRRRRPPPRLGRRRGGDDQQPPHPPKASSEALPCAASPPARCRGGDHQPPHPPEAALEALRGAGSPPARRRGGDLHPSHPPEGRVGGSPRGGLPSRAAPRGGSTALASYRGRVGGSSGSASPPARRRGGDQQPPPAVAVAVTSEGGVGPRRSFRISLRHRVRVVPWVKPPVARKPKDPAKPPRPSIEALAAEWAKEKAASGAPEEECVLPFLQKDAPKKLDIVKVLGLDGFGYMDTVILSLKSYRKNIPITVGNFVIVMQSCIRLVLKKVMDAVLDMMQVQQMEAFRRLPLPHTFQEFNIDPIKKEELDNGTEPPPYKIKIIPTGLYWLAALGLVTAQMSALTNHFADRKRLRSLSGILLQTQYCGWGSRALEAIEKDDFVIEFVGEVIDDETCEERLEDMRRRGDKNFYMCKVKKDFVIDATFKGNDCRFFNHSCEPNCQLQKWQVNGKTRLGVFASKAIEVGEPLTYDYRFEQHYGPEIECFCGAQNCQGNMSVSGKD

SEQ ID NO: 3428 - protein, 501 aa, Mycobacterium bovis AF2122/97
MSFVVTIPEALAAVATDLAGIGSTIGTANAAAAVPTTTVLAAAADEVSAAMAALFSGHAQAYQALSAQAALFHEQFVRALTAGAGSYAAAEAASAAPLEGVLDVINAPALALLGRPLIGNGANGAPGTGANGGDGGILIGNGGAGGSGAAGMPGGNGGAAGLFGNGGAGGAGGNVASGTAGFGGAGGAGGLLYGAGGAGGAGGRAGGGVGGIGGAGGAGGNGGLLFGAGGAGSVGGLAADAGDGGAGGDGGLFFGVGGAGGAGGTGTNVTGGAGGAGGNGGLLFGAGGVGGVGGDGVAFLGTAPGGPGGAGGAGGLFGVGGAGGAGGIGLVGNGGAGGSGGSALLWGDGGAGGAGGVGSTTGGAGGAGGNAGLLVGAGGAGGAGALGGGATGVGGAGGNGGTAGLLFGAGGAGGAGGFGFGGAGGAGGLGGKAGLIGDGGDGGAGGNGTGAKGGDGGAGGGAILVGNGGNGGNAGSGTPNGSAGTGGAGGLLGKNGMNGLP

SEQ ID NO: 3429 - protein, 309 aa, Chromobacterium violaceum ATCC 12472
MAFAFLFPGQGSQSLKMMDGFADLPVVQHTFEEASDTLSLDLWAMLRADSADAINATVNTQPIMLAAGYATYLAWQELNGKQPSVVAGHSLGEYTALVAAGALPFAEAVKLVRLRAEAMQAAVPAGAGAMAAILNLPDDDIRAACAEAAQGEVVEAVNFNSPGQVVIAGNKGAVERAMDLCKEKGAKRALPLPVSVPSHCSLMRPAAERLAEALRDVHLSAPAVPVLHNADVASYNDAAQIRDALTRQLFMPVRWTETIQKLAAEGVTLMAECGPGKVLTGLAKRIDGNVKCLALTDRAALEAAREELV

SEQ ID NO: 3430 - protein, 205 aa, Triticum aestivum
MSGAAAAVARVLPKAVTFVTGNAKKLEEVRAILGSSIPFQSLKLDLPELQGEPEDISKEKARMAASQVNGPVLVEDTCLCFNALKGLPGPYIKWFLEKIGHEGLNNLLKAYEDKSAFAMCIFSLALGPEEEPITFVGKTAGKIVPARGPADFGWDPVFQPDGFEQTYAEMPKPEKNQISHRGRALALVKEHFASANYEVQGDGLA

SEQ ID NO: 3431 - protein, 902 aa, Trichodesmium erythraeum IMS101
MIIPSQISTPKEAKPSKLEGIKENSNLLREPLASQLLEDTNHFTEEAVQILKFHGSYQQHNRDNRIKGQEKDYQMMLRTRNPGGFIPPQLFLTLNKLSNEYGNGTLRVTTRQGFQLHGVLKKNLKKVISSIIKSMGSTLGACGDINRNVMSPPAPYKNRPEYEYAKDYANKIADLLTPQTGAYYEIWLDGEKVISAQEASEVKVARLRNGNGTIFPNSEEPIYGTHYMPRKFKCAVTVPGDNSIDLYTQDVSLVVITNEVGELEGFNVLAGGGLGRTHRKEETFPCLAQEIGYVTKEDIFDFMKAIVATQRDYGDRSNRRHARMKYLLHDWGVEKFKAKLIEYFGKSIAPFKPLPEWKYLDFLGWHEQGDGRLFLGISVENGRVKDEDSFQLKTALRKIVDLFKLPMLLTANHNIILYEIKPQQQQAVEQILNKHGISTEKNIDPLVRYSMACPALPTCGLAITESERTLPGILGQIRLLLDKVGLGQEHFVVRMTGCPNGCARPYMAELGFVGSAADSYQIWLGGSPNQTRLAKPYIDKLHINNLEAELERIFIYFKQQRQPDESFGDFCNRVGIEAIRKFVTNYQSSFSMNTDINNSSLTSINSEKNIPIVTDVTETTPDTKSQEESTSKNLENNQEVIPMNSPVTQSTNMTQTTTTSTTISEAQPLSTHQTPKTPTFSSDTNTTISTPSTLGKQEGQPTVETTPSTSVQQEDKLTVETTSGQQEGQTTVEPTIPSTSGQQEGQTTVEPTIPSTSGQQEGQPTGEPTIPSTLGKQEGQPTVETTIPNLDKQEAQPNRESTISDNLDKQEAQPTSESTISANLDQQEAQPIGQLESSPDKPKDTSKMRHRVSVRDEIYTKLKEESKRQGKPVVQLATEAIAEYLEKIRKNESLTTTNETNF

SEQ ID NO: 3432 - protein, 247 aa, Prunus dulcis
  unsure (1)..(247): unsure at all Xaa locations
RIENKINRQVTFAKRRNGLLKKAYELSVLCEAEVALIIFSNRGKLYEFCSSSSMLKTLERYQKCNYGAPETNVSAREALELSSQQEYLKLKARYEALQRNQRNLLGEDLGPLSSKELESLERQLDMSLKQIRSTRTQCMLDQLTDLQRKEHMLNEANKTLKQRLFEGYHVNSLQMNPNADEYGRQQTQAHGDGFFHPLDCEPTLQIGYQNDPISVVTAGXSVSNYMAXMVAMIIXKCVLESTXSHEW

SEQ ID NO: 3433 - protein, 310 aa, Xanthomonas campestris pv. campestris str. ATCC 33913
MASATRHRPPDTSAVSFLLLDGAAMTQPSSSTAVAAHGDVPVVAFVGGGNMARSLIAGLLRQGAPASAIRVAEPVAELRQALSADFGVQVFDDARSAVEGAALWVLAVKPQVMSTVCTQLADLAQQQHPLLLSIAAGITATQLERWCGGTAAVVRAMPNTPALLGAGVTGLYANARVSAAQRTQATRLLESAGVTVWLDDEAQMDAVTAVSGSGPAYVFLLAEAMEAAARAQGLPAETARTLVLHTLLGAARMLTESGEAPEVLRRRVTSPNGTTQAAIEEFQAGGFEALTATAIAAATERGRSLSAAND

SEQ ID NO: 3434 - protein, 398 aa, Nitrosomonas europaea ATCC 19718
MDDIASILMNGLIDLPWWGYIVVALVFTHITIASITIFLHRYQAHRSLELHPIPSHFFRFWLWLTTGMVTKEWAAVHRKHHAKCETVDDPHSPQVFGIKKVLGEGAELYKVETKNQETLDRYGHGTPDDWIERNVYTKHSVAGIASMLIINVILFGPLGLTIWAVQMMWTPVMAAGVINGIGHYWGYRNFRSEDASRNIVPWGILIGGEELHNNHHAYPTSARLSNKWYEFDIGWMYIRILEMMGLARVKKIAPKLQLNKAKTECDLETLQAVISHRYEILAKYTKSLKIALKNELVHLQQAAIENGVDGLTLRNWVLADAKTLKEEERTKLETVLSHAQKLDKLYRMREELSLIWERSAATKDELLKQLEDWCRRAEESGIELLEKFSRRLRCYAMA

SEQ ID NO: 3435 - protein, 256 aa, Archaeoglobus fulgidus
MGSSHHHHHHSSGRENLYFQGHMVSLDKAVIARLRKGGEEFEVLVDPYLARDLKEGKEVNFEDLLAAEEVFKDAKKGERASVDELRKIFGTDDVFEIARKIILEGEVQITAEQRREMLEAKRKQIINFISRNTIDPRTNAPHPPSRIERALEEAKVHIDIFKSVEAQVKDIVKALKPILPLKFEEMEIAIKIPPEHTGRAISALYNFGGVTREEWQRDGSWICVMRIPSGMYGDLMDLLGKVAKGEALTKVLRRIG

SEQ ID NO: 3436 - protein, 445 aa, Ricinus communis
MAITIVSVRARQIFDSRGNPTVEADIKLSDGHLARAAVPSGASTGIYEALELRDGGSDYLGKGVSKAVENVNSIIGPALIGKDPTEQTALDNFMVQELDGTVNEWGWCKQKLGANAILAVSLALCKAGAHVKGIPLYKHIANLAGNKNLVLPVPAFNVINGGSHAGNKLAMQEFMILPVGASSFKEAMKMGAEVYHHLKSVIKKKYGQDATNVGDEGGFAPNIQENKEGLELLKTAIAKAGYTGKVVIGMDVAASEFYGSDKTYDLNFKEENNDGSQKISGEALKDLYKSFASEYPIVSIEDPFDQDDWEHYSKLTSEIGEKVQIVGDDLLVTNPKRVEKAIQEKACNALLLKVNQIGSVTESIEAVRMSKRAGWGVMASHRSGETEDTFIADLSVGLATGQIKTGAPCRSERLAKYNQLLRIEEELGAEAVYAGAKFRTPVEPY

SEQ ID NO: 3437 - protein, 427 aa, Pseudomonas syringae pv. tomato str. DC3000 [sequence omitted]

SEQ ID NO: 3438 - protein, 386 aa, Corynebacterium glutamicum ATCC 13032
MSFDPNTQGFSTASIHAGYEPDDYYGSINTPIYASTTFAQNAPNELRKGYEYTRVGNPTIVALEQTVAALEGAKYGRAFSSGMAATDILFRIILKPGDHIVLGNDAYGGTYRLIDTVFTAWGVEYTVVDTSVVEEVKAAIKDNTKLIWVETPTNPALGITDIEAVAKLTEGTNAKLVVDNTFASPYLQQPLKLGAHAVLHSTTKYIGGHSDVVGGLVVTNDQEMDEELLFMQGGIGPIPSVFDAYLTARGLKTLAVRMDRHCDNAEKIAEFLDSRPEVSTVLYPGLKNHPGHEVAAKQMKRFGGMISVRFAGGEEAAKKFCTSTKLICLAESLGGVESLLEHPATMTHQSAAGSQLEVPRDLVRISIGIEDIEDLLADVEQALNNL

SEQ ID NO: 3439 - protein, 98 aa, Glycine max
  unsure (1)..(98): unsure at all Xaa locations
TRAESPLFAPFTVLKTMAGLPTIKTTNYITSIANNGGRVQCMQVCPPVGKKKFDTLSYLPNLDDAQLAKEVQYLLRKGWIPCXEIRXDHGLEYREHNR

SEQ ID NO: 3440 - protein, 132 aa, Xanthomonas campestris pv. campestris str. ATCC 33913
MLASCAPALPPSGGTIAAFERIDRTVGTGAEATPNALVTVHYTGWLYDEKAADKHGKKFDSSLDRAEPFQFVLGGRQVIRGWDEGVAGMRVGGKRTLMIPPEFGYGDKGAGGVIPPGASLVFDVELLGVQPR

SEQ ID NO: 3441 - protein, 424 aa, Exiguobacterium sp. 255-15
MATIQGENITVTDGTLNVPNSPIIPFIIGDGTGPDIWNAAVRVFDAAVEKAYNGEKKIEWKEVYAGEKAFNKTGNWLPEETLDLIREHIIAIKGPLTTPVGGGIRSLNVALRQELDLYTCLRPVRYFTGVPSPVKRPEDTDMVIFRENTEDIYAGIEYASGSEEAQKLLNFLQTEMGVNKIRFPETSGLGIKPISKEGTERLVRAAIEYALENKRASLTLVHKGNIMKFTEGAFKNWGYELAEREYAEHVFTWNQYDRIKDEEGADAANKAQSEAEAAGKLIVKDSIADIFLQQILTRPKEFDVVATMNLNGDYISDALAAQVGGIGIAPGANINYMTGHAIFEATHGTAPKYAGLDKVNPSSVILSGEMMFRHLGWNEVADLIIQSMEKSIEGKVVTYDFARLMDGATEVKCSEFADELIKNM

SEQ ID NO: 3442 - protein, 162 aa, Thermosynechococcus elongatus BP-1
MLTPTDFATYSRWAGIATLVMTGLTALAFMFRWGVRFRFVGISGFLGVVTVGLFALSIVPIVHSPVPGAGKYTLVYDNGATQAVITVPADIDPSTLKATLVQAANDLFSLGRLGRGGDRLTVIARTIQHPQPGVSEPVILGVATRSLSDRADTNVTVQLLQN

SEQ ID NO: 3443 - protein, 713 aa, Zea mays
  unsure (1)..(713): unsure at all Xaa locations
EPASTEDPALSIAGAVQSQKLAVRAISRLQALPGGDVKLLCDTVVEHVRELTGYDRVMVYRFHEDEHGEVVAESRRDNLEPYLGLHYPATDIPQASRFLFRQNRVRMIADCHATPVRVIQDPGLSQPLCLVGSTLRAPHGCHAQYMANMGSIASLVMAVIISSGGDDEQTGRGGISSAMKLWGLVVCHHTSPRCIPFPLRYACEFLMQAFGLQLNMELXLAHQLSEKHILRTQTLLCDMLLRDSPTGIVTQSPSIMDLVKCDGAALYYHGKYYPLGVTPTESQIKDIIEWLTVFHGDSTGLSTDSLADAGYLGAAALGEAVCGMAVAYITPSDYLFWFRSHTAKEIKWGGAKHHPEDKDDGQRMHPRSSFKAFLEVVKSRSLPWENAEMDAIHSLQLILRDSFRDAAEGTSNSKAIVNGQVQLGELELRGINELSSVAREMVRLIETATVPIFAVDTDGCINGWNAKIAELTGLSVEEAMGKSLVNDLIFKESEATVEKLLSRALRGEEDKNVEIKLKTFGSEQSKGPIFVVVNACSSRDYTQNIVGVCFVGQDVTGQKVVMDKFVNIQGDYKAIVHNPNPLIPPIFASDENTSCSEWNTAMEKLTGWSRGEVVGKFLIGEVFGNCCRLKGPDALTKFMVIIHNAIGGQDYEKFPFSFFDKNGKYVQALLTANTRSKMDGKSIGAFCFLQIASTEIQQAFEIQRQQEKKCYAR

SEQ ID NO: 3444 - protein, 379 aa, Exiguobacterium sp. 255-15
MRAVTYQGTKNVEVKDVQDPSIEKNDDIIVKITSTAICGSDLHIYQGNMPAKKDYVIGHEPMGIVEEVGPDVTKVKRGDRVVLPFNVACGHCFFCEHDMESQCDNSNGNPHVDTGGYFGFTEEFGGHPGGQAEYLKVPFGNFMPLVVPESCELEDEALLFLSDVIPTAYWSVINSGVKKGDTVVILGSGPVGLMTQKFAWMQGAKRVIAVDQQVYRLNHAKMTNRVETVNLQDHKETGQYLKELTQGGADVVIDCVGLDGKMSAVEKVEQKVGLQGGTLSAINIAKDAVRKFGTVQLTGVYAKKYNQFPLGDFFTRNITLKMGQAPVVHLMPELFQKIINQEFDPTDIITHKIDLEQAAHAYQTFNDHEDGCIKVILKP

SEQ ID NO: 3445 - protein, 392 aa, Oceanobacillus iheyensis HTE831
MQSLYKSNIVRNMPPYLFAHIQKKKQKLMEQGSDVIDLGIGAPDLPPPSYIIEELSKHIKNRHLHRYSPYQGIPELRQAVATFYQEKYNVTLDPEEEILILIGSKEGLVHLIQSVINPGDKVILPDPGYPVYKMGVHMTQGRAVYLPLDKNKEYKPNWKMLSEQDKEEAKLLFLNYPNNPTGATAQKETFVKAVQIANKYNICIAHDAAYDHVTFSDYKSPSLLQVDGAKKVGVELGSLSKNFNMTGWRIGYIVGNSSVIQALATLKSNIDTSQFIPVQIAAIKALEQSEDEIRTIHHTMEKRMLKTWKLLKNAGFEVKKTKGTIFLWVKVPKGYTSSSFTEQVLDQAHVIVTPGSAFGEQGEGFFRIALTVPEERLIEAVQRIDSWLNGGK

SEQ ID NO: 3446 - protein, 473 aa, Arabidopsis thaliana
MSSSVPNSDRKIVTGPAGYILEDVPHFSDDFPDHPTYPNPLQDNAAYSVVKQYFVDEDDTVPQKIVVHPDSPRGTHFRRAGPRQRVYFESDDVLACIVTCGGLCPGLNTVIREIVCGLSYMYGVKRILGIDGGYRGFYARNTIHLDLKTVNDIHRSGGTILGTSRGGHNTTKIVDSIQDRGINQVYIIGGDGSQKGAAAIFEEIRKRKLKVAVAGIPKTIDNDIPIIDRSFGFDTAVEEAQRAINAAHVEATSFENGIGLVKLMGRYSGFIAMHATLASRDVDCCLIPESPFFLEGSGGLFEFIDKRLKESGHMVIVIAEGAGQDLLSESMKESTTLKDASGNKLLQDIGLWISQRIKDHFAKKMTLTLKYIDPTYMIRAVPSNASDNVCCTLLAQSAVHGVMAGYNGFTVGLVNGRHTYIPFNRITEKQNKVVITDRMWARLLSSTNQPSFMKQADKIHSNQLVGEPGTMKW

SEQ ID NO: 3447 - protein, 276 aa, Zea mays
  unsure (1)..(276): unsure at all Xaa locations
MAAPMSAIDSAWQLLIANFTEFQLATVVTFLLHETVFFLSGLPSLLLERFGLFSXYKIQKKSNTSAYQNRCDLRLILYHVCVNLPVMIFSYPAFVEIMGLRSSLPLPHWSVVVSQVLFYFVLEDFIFYWGHRALXHTKWLYKHVHSVHHDRYATPFGLTSEYAHPAEILFLGFATVVGPALTGPHLXFTLWLWMVLXRVLETVEAHSGYHFPMEPIKFSWPLYGGXSDFHDYHHRVLYTKSGNYASTFVYMDWLFGTDKDYRKXAKTIEEKEGKNL

SEQ ID NO: 3448 - protein, 486 aa, Pseudomonas stutzeri
MKEIKHFINGAFVDSASGRTFEDINPVNGQVIGRVHEAGRAEVDAAVRAARAALKGPWGKMTVAERAEILHRVADGVTARFDEFLEAECLDTGKPKSLASHIDIPRGAANFKVFADLIKNVPTEAFEMATPDGAGALNYGVRRPKGVIGVISPWNLPLLLMTWKVGPALACGNCVVVKPSEETPLTATLLGEVMQAAGVPAGVYNVVHGFGGDSAGAFLTEHPDVDAYTFTGETGTGETIMRAAAKGVRQVSLELGGKNAGIVFADCDLDKAIEGTLRSAFANCGQVCLGTERVYVERPIFDAFVARLKAGAEALKIGEPNDPEANFGPLISHKHREKVLSYYQQAVDDGATVVTGGGVPEMPAHLAGGAWVQPTIWTGLTDDSAVVTEEIFGPCCHIRPFDTEAEAIELANSLPYGLASAIWTENASRAHRVAGQIEAGIVWVNSWFLRDLRTAFGGSKQSGIGREGGVHSLEFYTELKNICVKL

SEQ ID NO: 3449 - protein, 183 aa, Burkholderia fungorum LB400
MNREEALHIFSHSEEIVSADDVNASISGMAAAIRDEMSEDFPLVLSVMGGAAVFTGMLLPHLDFPLEFDYIHLTRYRNTTKGGNEMQWRVAPAESVKDRVVLVLDDILDEGETMAAIRDRILAMGAKRFLSAVLCEKIIPKAKPLRPDYCGFEVPDRYVFGCGMDAKGYWRNLPTIRALTEGA

SEQ ID NO: 3450 - protein, 411 aa, Glycine max
  unsure (1)..(411): unsure at all Xaa locations
MDPPPKSWSIHTRSEIIAKYEVMERVGSGAYADVYRGRRLSDGLTVALKEIHDYQSAFREIDALQLLEGSPNVVVLHEYFWREDEDAVLVLEFLRTDLATVIADTAQFSDPPRQALQLLRMIHILSGLDACHRYMVLYRDLKRTNLLIYQHCLLNMADFGQASILMERGCDVCKISGXKLIPYHYLANXDHQLELFGCDNTYRRACNIQASCQLGLSLSXSCVGTRWFRAPELLYGSRNYGLEVDLWSLGCIFADLLTLQPLFPGTADIDQLSRIIGVLGSLDENAWAGCSKLPDYAIISFSKVENPAGLEACLPNRSPDEVALVKKLVCYDPAKRATAMELLHDKYFSDEPLPVPVSELRVPMTRKGQDGDSPGGWGDINDMDSDSDSQFDEFGPLNITRTGTGFSIQFP

SEQ ID NO: 3451 - protein, 275 aa, Escherichia coli
IGQALALLLKTQLPSGSELSLYDIAPVTPGVAVDLSHIPTAVKIKGFSGEDATPALEGANVVLISAGVARKPGMDRSDLFNVNAGIVKNLVQQVAKTCPKACIGIITNPVNTTVAIAAEVLKKAGVYDKNKLFGVTTLDIIRSNTFVAELKGKQPGEVEVPVIGGHSGVTILPLLSQVPGVSFTEQEVADLTKRIQNAGTEVVEAKAGGGSATLSMGQAAARFGLSLVRALQGEQGVVECAYVEGDGQYARFFSQPLLLGKNGVEERKSIGTLSA

SEQ ID NO: 3452 - protein, 479 aa, Synechococcus elongatus PCC 7942
MSSEFDYDVIVIGAGYGGFDAAKHACEKGLKTAIVEARDLGGTCVNRGCVPSKALLAASGRVREITDTDHLQNFGIQVQGVSFDRQAIADHAANLVDTVRTNLGNTLKRLGAEILMGRGRLAGSQRVTVTAADGTEKTYSARDVILATGSDPFVPPGIEIDGKTVFTSDDALKLETLPQWIAIIGSGYIGLEFSDVYTALGCEVTMIEALDRLLPTFDPDVAESCPAIAAGWSRHRNPHGCFGAQNYAGSPVVIELADFETKELVEVLEVDACLVATGRIPSTKNLGLETVAVEVDRRGFIPVDDGMRVLRDSKPVPHLFAVGDATGKLMLAHAAAAQGVVAIENITGHPRSVDYRSIPAATFTHPEISSVGLSEADAKALGGQEGFEVGSVRSYFKANSKALAEADADGFAKVLFRKDTGEVLGAHIFGLHAADLIQEVANAIARRQSVKELAFEVHTHPTLSEVIESAYKQAATAIA

SEQ ID NO: 3453 - protein, 880 aa, Vibrio vulnificus YJ016
MHGCSKTTCPYCGVGCGVEVKPDELVGDKEHPANHGALCVKGAALAESLNMPSRLLYPKLSGEQVSWELASDWIAQRFHQAMEEYGPDSVAMYVSGQLLTEDYYVANKLMKGYVGSANIDTNSRLCMSSAVAAHVRAFGEDVVPVSYDDLEHAELIVISGANTAWTHPVLFRRIQQIRENNPNVKLVVIDPRKTVTAEQADLHLPIANDSDITLFNGLLAYLLKQGSDKGIDTEFIDQHTQGFAALQALVSSGAYQLEQVASHCGIDVQALRTFYQWFSRSNATMTLFCQGVNQAQNGVDKANAIINAHLATGQIGKRGAGPFSLTGQPNAMGGREVGGLANQLAAHRGFDPDSIRAVQQFWQSPRIAEQPGLKALDLFKAVERGEIKVLWIMATNPVVSMPDNRWIRQALERCPCVIVSDITADSDVAHYADLLLPAAGWGEKQGMVTNSERRMSRQRRFISPPGEAKPDWQAICEVGARLSLKLQAKNGFAFESEAAIFREFAGLTAINSDSHYKLDLAQYQNLSDEAYEQWRPTQWGGESPYADGRFSHPDGKARFVAVTELANSSDEPIGRGLWRLNSGRQRDQWHTMTRTGHIEKLAASELEPSVYLNRLSAEKLELQAGELAYITNPQTLQSLLAKVVIDESMAFGELFMSMHWAGRYGGQSQVNAVVSATGDPISGQPAFKSSLVEVEKAPVVSFGVMISDFSPAIATNYCTYQHQDQSGVWRVASLTLPPQQLAEINLPAVSQVRRVSWQHELGWITLQLQSDTDEANQAKLQAIFIASSQPLKADYQQLLKLIGEPINWQALMHAGFATRVSQLVCSCLRVTDTQIEQAIEQKGVTTLTQLQNQLQCGTNCGSCIPQLKQYFAPAIAQPSR

SEQ ID NO: 3454 - protein, 261 aa, Oryza sativa
MGFISGEELAVTLAPVAVYWLYSGIYEALGSVRALDRYRLHSRRDEESNNMASKKEVVKGVLLQQAIQVAISLAVLKVSPAAAPSSSSAAAALLDVAARFGVAMFVLDAWQYFAHRLMHSSRYMYRRFHSWHHRVVAPYAFAAQYGHPVDGVLTEALSGAAAYLASGLPPRAAAFFLAFATVKGIDDHCGLLVPWNPLHAAFANNTAYHDVHHQLSGGRRNFSQPFFVVWDRLLGTHAGYTVTARERNNGGGLEAKPICND

SEQ ID NO: 3455 - protein, 178 aa, Bacteroides thetaiotaomicron VPI-5482
MDTIQIKDKQFTVSIKEQDIQKEVIRVANEINRDLAGKNPLFLSVLNGSFMFTADLLKHITIPCEISFVKLASYQGVTSTGVIKEVIGLNEDIAGRTVVIVEDIVDTGLTMQRLLDTLGTRNPEAIHIASLLVKPEKLKVNLNIEYVAMEIPNDFIVGYGLDYDGFGRNYPDIYTVVD

SEQ ID NO: 3456 - protein, 178 aa, Arabidopsis lyrata subsp. petraea
ANVDEAVAKLKSKGIDAYGIVCHVSNAQHRRNLVEKTVQKYGKIDIVVCNAAANPSTDPILSSKEAVLDKLWEINVKSSILLLQDMAPHLEKGSSVIFITSIAGFQPQGAMAMYGVTKTALLGLTKALAAEMAPDTRVNAVAPGFVPTHFASFITGSSEVREGIEEKTLLNRLGTTGD

SEQ ID NO: 3457 - protein, 479 aa, Bordetella bronchiseptica RB50
MTNKTLTTAAGAPVADNNNTMTAGPRGPALLQDVWFLEKLAHFDRERIPERVVHAKGSGAYGTFTVTHDISRYTRARIFAEVGKQTPLFLRFSTVAGERGAADAERDVRGFAIKFYTDEGNWDLVGNNTPVFFIRDPLKFPDFIHTQKRDPKTNLRNATAAWDFWSLNPESLHQVTILMSDRGLPQNYRQQHGFGSHTYSFVNDAGERFYVKFHFKSQQGIACYTDGEAAELVGRDRESAQRDLFQNIEQGQFPRWTLKVQVMPEAEAATYHINPFDLTKVWPHADYPLIEVGVLELNKNPENYFAEVEQAAFTPANVVPGIGFSPDKMLQGRLFSYGDTHRYRLGINHHQIPVNAPRCPFHSFHRDGMGRVDGNGGATLNYEPNSFGEWREAKHAAEPPLALDGQAADRWNHRVDEDYYSQPGALFRLMNDDQKQQLFGNIGRHMAGVPEEIQRRQLEHFRRADPAYAAGVAKALGLK

SEQ ID NO: 3458 - protein, 202 aa, Mycobacterium tuberculosis CDC1551
MHVTQSSSAITPGQTAELYPGDIKSVLLTAEQIQARIAELGEQIGNDYRELSATTGQDLLMITVLKGAVLFVTDLARAIPVPTQFEFMAVSSYGSSTSSSGVVRILKDLDRDIHGRDVLIVEDVVDSGLTLSWLSRNLTSRNPRSLRVCTLLRKPDAVHANVEIAYVGFDIPNDFVVGYGLDYDERYRDLSYIGTLDPRVYQ

SEQ ID NO: 3459 - protein, 199 aa, Leavenworthia crassa
SVGEGVTDLQPGDHVLPIFTGECGECPHCHSEESNMCELLRINTERGGMILDGESRFSINGKPIHHFLGTSTFSEYTVVHSGQVVKINPKAPLDKVCIVSCGLTTGLGATLNVAKPKKGQSVAVFGLGAVGLGAAEGARIAGASRIIGVDLSSKGFEEAKKFGVTEFVNPKEHNKPVQQVIAEMTNGGVDRSVECTGSV

SEQ ID NO: 3460 - protein, 487 aa, Sinorhizobium meliloti 1021
MQRFQCYINGEFADGEARFESIDPTTGRAWAEMPEAREADVNRAVEAARIALHDQPWSTLTATQRGKLLYKLADLVAENAGRLAELETRDTGKIIRETSSQIAYVADYYRYYAGIADKIEGSYLPIDKPDMDVWLRREPIGVVAMVVPWNSQLFLSAVKIGPALAAGCTMVVKASEDGPAPLLEFARLVHAAGFPAGVVNIVTGFGPSCGAALSRHPQVDHIAFTGGPETARHIVRNSAENLASTSLELGGKSPFIVFADADLESAANAQIAGIFAATGQSCVAGSRLIVEKSVKDRFLQILKAKAETIRIGSPLEMSTEVGPLATERQSNHVKTLVARSLAAGAKLVTGGTAPEGAGFYYRPTILDCDGSASPSLENEFFGPVLSVLSFETEAEALHLANDSRFGLAAGVFTQNLTRAHRLMKGIRAGIVWVNTYRAVSPVAPFGGFGLSGHGREGGLEAALDYTRSKTVWLRTSDDPIPDPFVMR

SEQ ID NO: 3461 - protein, 133 aa, Glycine max
RISSHVVTTVNRAGAGLVVPLTGLKSMAGFPTGKTNIAIPSIVGTGGGVHCMQGGPPIGRKKFGTFSYWPDLVDAQLAKEVESFLRKGWIPCLEFGWEHGFGFRGPTSLPGSFDGPLWTMWKLPMLGCTDAFK

SEQ ID NO: 3462 - protein, 489 aa, Listeria monocytogenes EGD-e
MGKATGFMEYDRIPSPGRDPKSRTRDWNEYSLPMPVADLTIQAARCMDCGVPFCSVGMEIKNGVSGCPLHNLIPEWNDAVYRGDWYEALQLLLKTNNFPEFTGRICPAPCEGGCTVAISEPAVGIKSIEKAIIDRGFEEGWIKPAPPKKRTGKRIAVIGSGPAGLACADQLNKAGHSVTVIEKSDRIGGLLMYGIPTMKLEKEQVTRRVNLMAEEGIEFVTGVAAGTDVTFAELREEYDSIVLATGAGNARDIPLAGRDAAGIHFAVPYLSQSTRDNLDNGGIQTLSAKGKNVVIIGGGDTGADCVATALRQGAKSIYQFGIQDKLPELRDGENPWPQYPRVFKMDYAHEEAEAVYGRDPREYLINTTSFEKDEAGNLIGLHTVEVEENKAERKYTPVEGSEKYFEVDMVLIAIGFAGTTEDIFTNFGVGKTDRHTIDAAKGFYRTSEEGVFACGDARHGQSLVVTAIAEGREAAREVDFYLMGETFLP

SEQ ID NO: 3463 - protein, 297 aa, Aquifex aeolicus VF5
MREIRKVVLPVAGWGTRFLPATKAMPKEMLPIIDKPIIQFIVESFINIGIENIIFVTGRHKKAIEDHFDHNHELEEHLKKAGKEKLLREVVKISSLINPIYVRQKEQLGLGHAVLMAEPAVSQEPFFVALGDIIVENEEEELKKMIHLFRKFGNSIVALMEVPKEEVSKYGIAKVKKLDEETYIIVDLVEKPSPEEAPSNLAIVGRYIFTPTIFEKLKVTKPGKGGEIQLTDAMRLLLEEEAIYACKVNNTVYDTGNPKDYLKTVISFALRREDINGELIEFIRGLIKEEPKKEKAK

SEQ ID NO: 3464 - protein, 398 aa, Oceanobacillus iheyensis HTE831
MTITSTNIIEETNYYGAHNYHPLPIVVSEANGVWVKDPEGNSYMDMLSAYSAVNQGHRHPKIIEALKNQADKVTLTSRAFHNELLGPWTKRMAKLTKKDKVLPMNTGVEAVETAIKAARRWAYQVKGVTENQAEIIAADGNFHGRTLNAISLSNDPDATKNYGPFVPGINKVSYGDINAIEKAITENTAAIILEPIQGEAGIIIPPEGYLKKVRELCSEKNILFIADEVQTGFARTGKMFACEWENVEPDIYVMGKALGGGVFPVSAIAANNEIMDVFTPGSHGSTFGGNPLACAVSMAAIDVIEEENLVNKSLESGKYFADKLRAVNFEGIKEVRARGLFIGMEFHQPVREICEKLKDKGILCKETHVNTIRFAPPLVITKDEMDWAIQRIEEVLTN

SEQ ID NO: 3465 - protein, 303 aa, Actinoplanes sp. 50/110
MRGILLAGGTGSRLRPVTWAVSKQLMPVYDKPMIYYPLATLVSCGIREILVITTETEAAQFQRLLGDGSQWGLRLEFAVQQRPGGIAEAFLIGEEFLAGGPVALMLGDNLLHGVDFRPCVQRARETAGGHVFGVAVADPSAYGVVEFDAAGRVLSIEEKPVRPRSPYAVPGFYLYDADVVETARSLRPSARGELEITEVNQAYLRRGALSVTLLGRGAVWLDTGTLADCMRAVDYVRAIDEGQGIKIGCVEEAAWRAGFLDTAHVRALAEPLMSSGYGQYLLALTGDGLSRTPQWPALTAAAG

SEQ ID NO: 3466 - protein, 428 aa, Pseudomonas aeruginosa UCBPP-PA14
MGTHVIKMPDIGEGIAEVELVEWHVQVGDSVNEDQVLAEVMTDKATVEIPSPVAGRILALGGQPGQVMAVGGELIRLEVEGAGNLAESPAAATPAAPVAAAPEEPKETPVAAPKAAAEAPRALRDSEAPRQRRQPGERPLASPAVRQRARDLGIELQFVQGSGPAGRVLHEDLDAYLTQDGSVTRSGGAAQGYAERHDEQAVPVIGLRRKIAQKMQDAKRRIPHFSYVEEVDVTDLEALRAHLNQKWGGQRGKLTLLPFLVRAMVVALRDFPQLNARYDDEAEVVTRYGAVHVGIATQSDNGLMVPVLRHAESRDLWGNASEVARLAEAARSGKAQRQELSGSTITLSSLGALGGIVSTPVINHPEVAIVGVNRIVERPMVVGGNIVVRKMMNLSSSFDHRVVDGMDAAAFIQAVRGLLEHPATLFLE

SEQ ID NO: 3467 - protein, 193 aa, Exophiala dermatitidis
MVVATIKCVVVGDGAVGKTCLLISYTTNKFPSEYVPTVFDNYAVTVMIGDEPYTLGLFDTAGQEDYDRLRPLSYPQTDVFLVCFSVTSPASFENVREKWFPEVHHHCPGVPCLIVGTQTDLRDDPQVREKLAKQKMQPVRKEDGERMAKELGAVKYVECSALTQYKLKDVFDEAIVAALEPPPKKSSKKCTIL

SEQ ID NO: 3468 - protein, 464 aa, Pseudomonas aeruginosa UCBPP-PA14
MSQILKTSLLIVGGGPGGYVAAIRAGQLGIPTVLVEGAALGGTCLNVGCIPSKALIHAAEEYLKARHYAGRSALGIQVQAPSIDIARTVEWKDAIVDRLTSGVAALLKKHGVDVVQGWARILDGKSVAVELAGGGSQRIECEHLLLAAGSQSVELPILPLGGKVISSTEALAPGSLPKRLVVVGGGYIGLELGTAYRKLGVEVAVVEAQPRILPGYDEELTKPVAQALRKLGVELYLGHSLLGPSENGVRVRDGAGEEREIAADQVLVAVGRKPRSEGWNLESLGLDMNGRAVKVDDQCRTSMRNVWAIGDLAGEPMLAHRAMAQGEMVAELIAGKRRQFAPVAIPAVCFTDPEVVVAGLSPEQAKDAGLDCLVASFPFAANGRAMTLEANEGFVRVVARRDNHLVVGWQAVGKAVSELSTAFAQSLEMGARLEDIAGTIHAHPTLGEAVQEAALRALGHALHI

SEQ ID NO: 3469 - protein, 497 aa, Synechococcus elongatus PCC 7942
MPRGVAPAFAGRKPKGWAWASTAVPDFQGGFKRLINRFQGSKLWLACVPLAATIAVFWGVAANAQGSADPVPSAQFLVNNLWLMVATVLVIFMNAGFAMVETGLCRQKNAVNVLAKNLIVFTLAATAYWFIGYSLMYGSPVVDGFLYFGKGGPLGFFFDPTVSAETIKNDGLISSLDFLFQAAFAGTAATIVSGSVAERIKFVDFIIFSLILTAVIYPIAGSWQWNVGSGWLNKAGFIDFAGSTVVHSVGGWAALIGAITLGPRMGKFQDGRPGALPGHNLAIATLGALILWIGWYGFNGGSVLAFNTAVPYVAVTTTLGGAAGGISATITSWSTSGKPDLSMVINGILAGLVGVTAGCDGFGMGGSFIVGLIAGVLVVFSVYTFENLKIDDPVGACSVHLVCGIWGTLAVGLFNLEKGLFYGGGFGQLGSQILGIISYGVWTVVASVIIWNILKALLGLRVSPEEELQGLDIGEHGMEAYSGFAKDASNALSSISE

SEQ ID NO: 3470 - protein, 591 aa, Bacillus subtilis
MTDTLSKRGPDDSNVWGEHHVLFGHKRLAVVDIEGGRQPMACTYKGDTYTIIYNGELYNTEDLRKELRARGHQFERTSDTEVLLHSYIEWQEDCVDHLNGIFAFAVWDEKRNLLFAARDRLGVKPFFYTKEGSSFLFGSEIKAILAHPDIKARVDRTGLSEIFGLGPSRTPGTGIFKGIKEIRPAHALTFSKDGLNIWRYWNVESEKHTDSFDDTVANVRSLFQDAVTRQLVSDVPVCTFLSGGLDSSAITAIAAGHFEKEGKAPLHTYSIDYEENDKYFQASAFQPNDDGPWIEKMTEAFGTTHHKCVISQKDLVDHLEEAVLVKDLPGMADVDSSLLWFCREIKKDFVVSLSGECADEIFGGYPWFHTADVESGFPWMRSTEERIKLLSDSWQKKLNLKEYVNAKYEETLAETPLLDGETGVDKARRQLFYLNMLWFMTNLLDRKDRMSMGASLEVRVPFADHRLVEYVWNIPWEMKMHDNREKGILRKALEGILPDDILYRKKSPYPKTHHPEYTKGVSEWLKTIRSQKDSVLHTLLDRKQLDQLLETEGSSFKVPWFGQLMKGPQLIAHLAQIHTWFEAYRIDIDER

SEQ ID NO: 3471 - protein, 959 aa, Saccharomyces cerevisiae
MTVTTPFVNGTSYCTVTAYSVQSYKAAIDFYTKFLSLENRSSPDENSTLLSNDSISLKILLRPDEKINKNVEAHLKELNSITKTQDWRSHATQSLVFNTSDILAVKDTLNAMNAPLQGYPTELFPMQLYTLDPLGNVVGVTSTKNAVSTKPTPPPAPEASAESGLSSKVHSYTDLAYRMKTTDTYPSLPKPLNRPQKAIAVMTSGGDAPGMNSNVRAIVRSAIFKGCRAFVVMEGYEGLVRGGPEYIKEFHWEDVRGWSAEGGTNIGTARCMEFKKREGRLLGAQHLIEAGVDALIVCGGDGSLTGADLFRSEWPSLIEELLKTNRISNEQYERMKHLNICGTVGSIDNDMSTTDATIGAYSALDRICKAIDYVEATANSHSRAFVVEVMGRNCGWLALLAGIATSADYIFIPEKPATSSEWQDQMCDIVSKHRSRGKRTTIVVVAEGAIAADLTPISPSDVHKVLVDRLGLDTRITTLGHVQRGGTAVAYDRILATLQGLEAVNAVLESTPDTPSPLIAVNENKIVRKPLMESVKLTKAVAEAIQAKDFKRAMSLRDTEFIEHLNNFMAINSADHNEPKLPKDKRLKIAIVNVGAPAGGINSAVYSMATYCMSQGHRPYAIYNGWSGLARHESVRSLNWKDMLGWQSRGGSEIGTNRVTPEEADLGMIAYYFQKYEFDGLIIVGGFEAFESLHQLERARESYPAFRIPMVLIPATLSNNVPGTEYSLGSDTALNALMEYCDVVKQSASSTRGRAFVVDCQGGNSGYLATYASLAVGAQVSYVPEEGISLEQLSEDIEYLAQSFEKAEGRGRFGKLILKSTNASKALSATKLAEVITAEADGRFDAKPAYPGHVQQGGLPSPIDRTRATRMAIKAVGFIKDNQAAIAEARAAEENFNADDKTISDTAAVVGVKGSHVVYNSIRQLYDYETEVSMRMPKVIHWQATRLIADHLVGRKRVD

SEQ ID NO: 3472 - protein, 199 aa, Leavenworthia crassa
SVGEGVTDLQPGDHVLPIFTGECGECPHCHSEESNMCELLRINTERGGMILDGESRFSINGKPIHHFLGTSTFSEYTVVHSGQVVKINPKAPLDKVCIVSCGLTTGLGATLNVAKPKKGQSVAVFGLGAVGLGAAEGARIAGASRIIGVDLNSNRFEEAKKFGVTEFVNPKEHNKPVQKVIAEMTNGGVDRSVECTGSV

SEQ ID NO: 3473 - protein, 397 aa, Chlamydophila pneumoniae J138
MRRNPHFSLLKPQYLFSEISKKLAQFRKENPEISVIDLSIGDTTQPLCRSITQAIKEFCVSQEKQETYRGYGPETGLEKLRTKIASEVYENRISPEEIFISDGAKPDIFRLFSFFGSEKTLGLQDPVYPAYRDIAHITGIRDIIPLACRKETGFIPELPNQQSLDILCLCYPNNPTGTVLTFQQLQALVNYANQHGTVLIFDAAYSAFVSDPSLPKSIFEIPEAKYCAIEINSFSKSLGFTGMRLAWNVIPKELTYDNNEPMINDWKRLFATTFNGASLLMQEAGYYGLDLFPTPPAISLYLTNAQKLKKSLETAGFSVHGGDHAPYLWVELPEGISDEEAFDFFLHQYHIAVTPGHGFGSCGQGFVRFSALTQPQNIALACDRLCTASLKETMVLA

SEQ ID NO: 3474 - protein, 321 aa, Aquifex aeolicus VF5
MRIGILTAGGDAPGMNAVIRAVVRSAEREGHEVIGIKRGYKGLIEGDFIKLTSRDVGGILDRGGTILLSSRDPRYKKLEYREKAYKNLNEQGIEALIILGGEGTLAGAKLTAEETGIPVIGVPCTIDNDVGGTEYCIGYDTALRNAVDAIDKIRDTASSHERIFIVEVMGRNRGFIAVEAGLATGAELILIPEERFPREQIPEEIEKAKKLGKLHFIIVLAEGYCRAKELEDFLLEKIGDKYGEIRSTVLGHIQRGGIPTHFDRIMGTKFGVVAYESLIAGERSGFVAYEKGKFYIEDFEKAQEYKPIDREAYKLNTRLAI

SEQ ID NO: 3475 - protein, 475 aa, Salmonella enterica subsp. enterica serovar Typhimurium
MMSTEIKTQVVVLGAGPAGYSAAFRCADLGLETVIVERYNTLGGVCLNVGCIPSKALLHVAKVIEEAKALAEHGIVFGEPKTDIDKIRTWKEKVITQLTGGLAGMAKGRKVKVVNGLGKFTGANTLEVEGENGKTVINFDNAIIAAGSRPIQLPFIPHEDPRVWDSTDALELKEVPKRMLVMGGGIIGLEMGTVYHALGSEIDVVEMFDQVIPAADKDIVKVFTKRISKKFNLMLETKVTAVEAKEDGIYVSMEGKKAPAEAQRYDAVLVAIGRVPNGKNLDAGKAGVEVDDRGFIRVDKQLRTNVPHIFAIGDIVGQPMLAHKGVHEGHVAAEVIAGKKHYFDPKVIPSIAYTEPEVAWVGLTEKEAKEKGISYETATFPWAASGRAIASDCADGMTKLIFDKESHRVIGGAIVGTNGGELLGEIGLAIEMGCDAEDIALTIHAHPTLHESVGLAAEVFEGSITDLPNPKAKKK

SEQ ID NO: 3476 - protein, 161 aa, Triticum aestivum
KVSHDSKQGMKEFIAEIVSIGRLQHRNLVQLLGYCRRKGELLLVYDYMPNGSLDKYLYGKDGKPTLDWSQWFQIIKCVSNGLLYLHEECEKIIIHRDIKASNVLIDTEISGRIGDFGLARLYDHGSDPEAIRVVGTIGYLAPELARTGKATPFTDVYSFGV

SEQ ID NO: 3477 - protein, 160 aa, Zea mays
SIVDLQLDYLDLYLIHFPVATRHTGVGTTSSALGDDGVLDIDTTISLETTWHAMEELVSMGLVRSIGISNYDIFLTRDCLAYAKIKPAVNQIETHPYFQRDSLVKFCQKHGICVTAHTPLGGSTANAEWFGTVSCLDDPVIKVVAISNLSIVSSGANAVC

SEQ ID NO: 3478 - protein, 507 aa, Arabidopsis thaliana
MAMASLARRKAYFLTRNLSNSPTDALRFSFSLSRGFASSGSDENDVVIIGGGPGGYVAAIKASQLGLKTTCIEKRGALGGTCLNVGCIPSKALLHSSHMYHEAKHSFANHGIKVSSVEVDLPAMLAQKDNAVKNLTRGIEGLFKKNKVTYVKGYGKFISPNEVSVETIDGGNTIVKGKHIIVATGSDVKSLPGITIDEKKIVSSTGALSLSEVPKKLIVIGAGYIGLEMGSVWGRLGSEVTVVEFAGDIVPSMDGEIRKQFQRSLEKQKMKFMLKTKVVSVDSSSDGVKLTVEPAEGGEQSILEADVVLVSAGRTPFTSGLDLEKIGVETDKAGRILVNDRFLSNVPGVYAIGDVIPGPMLAHKAEEDGVACVEFIAGKHGHVDYDKVPGVVYTHPEVASVGKTEEQLKKEGVSYRVGKFPFMANSRAKAIDNAEGLVKILADKETDKILGVHIMAPNAGELIHEAVLAINYDASSEDIARVCHAHPTMSEALKEAAMATYDKPIHI

SEQ ID NO: 3479 - protein, 172 aa, Triticum aestivum
  unsure (1)..(172): unsure at all Xaa locations
MAPTVMASSATSVAPFQGLKSTAGLPVSRRSNGASLGSVSNGGRIRCMQVWPIEGIKKFETLSYLPPLXSTEALLKQVXDYLIRSKWVPCLXEFKQVGFIFRXEHNAPPGYYDGRYWDMWKLPISGAPXPTQVINEVEESRRIPDAYSASSVRHIASACVAHASTTGSRSEG

SEQ ID NO: 3480 - protein, 251 aa, Arabidopsis lyrata
MGRGRVQLKRIENKINRQVTFSKRRAGLLKKAHEISVLCDAEVALVVFSHKGKLFEYSTDSCMEKILERYERYSYAERQLIAPESDVNTNWSMEYNRLKAKIELLERNQRHYLGEDLNAMSPKELQNLEQQLDTALKNIRTRKNQLMYESINELQRKEKAIQEQNSMLSKQIKEREKILRAQQEQWDQQNHGHNMPPPPPPQQHQIQHPYMLSHQPSPFLNMGGLYQEEDPMAMRRNELELTLEPVYNCNL

SEQ ID NO: 3481 - protein, 241 aa, Picea mariana
NHKGKSIAEVCRESLRDFNPMVHVSVEKGSVKDISANFLDNFDAVVLGRASVIVKKQVNEMCRKRPQRIAFYSVDCRGSCGEIFVDLQNHTYTQKKQEDAIASQIFFPSLEESVLVRWSSLPRKTTKLYFALRIIEEFEQAEGRQPGHVSSADLESVLILQKKLCEEQGLSESRIPDILLERILDAGTRQLPPVCAIIGGILGQEVIKAMSCKGDPIKNFFFFDVMDGKGIIEDISNQDKN

SEQ ID NO: 3482 - protein, 444 aa, Agrobacterium tumefaciens str. C58
MDNPSRSNSTSLDSYWMPFTANRQFKANPRLLTSAEGMYYTSNDGRQVLDGTAGLWCVNAGHGRQQIASAVKHQLSTLDYAPSFQMGHPVAFEFAERLAEIAPGPEGGKLDRVFYTGSGSESVDTALKIAIAYQRAIGQGTRSRLIGRERGYHGVGFGGISVGGLVNNRRVFPQIPADHLRHTHDLARNSFVKGQPEHGAELADDLERLVALHGAETIAACIVEPVAGSTGVLVPPKGYLERLRAICDKHGILLIFDEVITGFGRMGSSFASNYFGVTPDIVTTAKGLTNGAIPMGAVFTSRKVHDALMHGPENQIELFHGYTYSGHPVACAAGIATLDIYRDEGLFTRAAELQDAWHDAIHSLKSAANVIDIRTIGFIAGIELQSREGAVGARAYDVFVDCFERGLLIRVTGDIIALSPPLIAEKSHFDDIVSILGDALNRAV

SEQ ID NO: 3483 - protein, 357 aa, ASPERGILLUS NIDULANS FGSC A4
MPGQIMRAVVFKGPYKVAVEERPIPKIQNPEDIIIKATYTALCGSDLHVYRGIEPAGTGFVMGHEVTGEVVEVGDAVKTVQRGDLVVSAFTTSWISGTCFYCEQGFSSRCDENTLLGCDDLDGAQAEYVRIPHADGTVVKAPSGVSPQYLVLMGDIFPTGYFAAQNAFKNATAAQIAEQTVVIIGCGPVGLCALINALEYKPKHLLAVDCVPSRLDLAKSLGAEPWDFKNDREALDRRVSELTNGRGADAVIEVVGMSPALRMGFELLRPWGVISSVGVHNGEIPWTGSEAYGKNVTVQMGRCPVRSVSDAALEVLKKNQHLLGFMTENIMPLSQAAEAYDLFNAMKVQKVIFEAGK

SEQ ID NO: 3484 - protein, 446 aa, Zea mays
  unsure (1)..(446): unsure at all Xaa locations
MAVTITWVKARQIFDSRGNPTVEVDVGLSDGSYARGAVPSGASTGIYEALELRDGGSDYLGKGVLKAVSNVNNIIGPAIVGKDPTEQVEIDNFMVQQLDGTSNEWGWCKQKLGANAILAVSLAVCKAGAMVKKIPLYQHIANLAGNKTLVLPVPAFNVINGGSHAGNKLAMQEFMILPTGASSFKEAMKMGVEVYHNLKSIIKKKYGQDATNVGDEGGFAPNIQENKEGLELLKAAIEKAGYTGKVVIGMDVAASEFFGEKDKTYDLNFKEENNDGSNKISGDXLKDLYKSFVSEYPIESIEDPFDQDDWSTYAKLTDEIGRKVQIVGDDLLVTNPTRVAKAINEKTCNALLLKVNQIGSVTESIEAVRMSKRAGWGVMASHRSGETEDTFIADLSVGLSTGQIKTGAPCRSERLAKYNQLLRIEEELGDAAVYAGAKFRAPVEPY

SEQ ID NO: 3485 - protein, 199 aa, Clostridium thermocellum ATCC 27405
MRKFVIATKNKGKLKEIQEILDGLDFEVVSMEEMGITKDIEESGSTFEENALIKAREVYKACGEIVMADDSGLEVDYLNGAPGIYSSRFAGEGASDEDRNNKLLSLLKDVPFEQRKARFVCVIAVILSDEEYFTVRGTVEGYIGFEPKGDNGFGYDPLFFIPEYNMTAAQMKPSKKHEISHRGKAMRMMLEELKKRLDL

SEQ ID NO: 3486 - protein, 383 aa, Bordetella pertussis Tohama I
MKFDTLLTHGGRDPKAHKGMVNTPVYRTSTVVFESMAEYKATRGAKFDHVRYGRLGTHTVKELENLVAAIEGGHRAVLTPSGVSAIATTLNTLARPGSHILVPDNVYYPCREFCEKVLAPRGVRVEYYAGSEVERLVRPDTSVVYCESPGSLTMEMQDFARIAAAAHAVGAKVVADNTWATPVFLQPFEHGIDVSIHAATKYLVGHSDVMMGTVTAHDPELWLAIRTEAAAQGLSISPDDAYLATRGIRTLGVRMAAHYRNALDVAQWLAGHPRVAQVLYPALPQHPDHALWRRQMRGASGLLTLELEPCSLEQRDAFIDRLTLFAIGASWGGYESLVLPADTAGKRSLAGRDYAGPLVRLHIGLEDVEDLKRDLDQALRRED

SEQ ID NO: 3487 - protein, 391 aa, Glycine max
MSLTLQTPPSTTLSSASPIHRTITRYTTFSFSLRPPTTLHFNPHRSLPLIRASNSSINAASTTELDAVSAFSEIVPDTVVFRCISKIFLPILLGICGLPDTIFRNAVEMALADSECYGLENPNARLSCFVNKAFANIGSDMAKLVPGRVSTEVDARLAYDTHAIIRKVHDLLKLYNDSNVPPQRLLFKIPSTWQGIEAARLLESEGIQTHLTFVYSFAQAAAAAQAGASVIQIFVGRIRDWARNHSGDTEIESAQLRGEDPGLALVTKAYNYIHKYGHKSKLMAAAVRNKQDLFSLLGVDYIIAPLKVLQSLKESVASPDEKYSFVRRLSPQSAAKYTFSDEELVRWDEDSLSKAMGPAAVQLLAAGLDGHADQAKRVEELFGKIWPPPNV

SEQ ID NO: 3488 - protein, 432 aa, Arabidopsis thaliana
MTVRSKIREIFMPALSSTMTEGKIVSWIKTEGEKLAKGESVVVVESDKADMDVETFYDGYLAAIVVGEGETAPVGAAIGLLAETEAEIEEAKSKAASKSSSSVAEAVVPSPPPVTSSPAPAIAQPAPVTAVSDGPRKTVATPYAKKLAKQHKVDIESVAGTGPFGRITASDVETAAGIAPSKSSIAPPPPPPPPVTAKATTTNLPPLLPDSSIVPFTAMQSAVSKNMIESLSVPTFRVGYPVNTDALDALYEKVKPKGVTMTALLAKAAGMALAQHPVVNASCKDGKSFSYNSSINIAVAVAINGGLITPVLQDADKLDLYLLSQKWKELVGKARSKQLQPHEYNSGTFTLSNLGMFGVDRFDAILPPGQGAIMAVGASKPTVVADKDGFFSVKNTMLVNVTADHRIVYGADLAAFLQTFAKIIENPDSLTL

SEQ ID NO: 3489 - protein, 397 aa, Bordetella bronchiseptica RB50
MLVHIPTIAMIRSKLPDVGTTIFTVMSRLAIEHKAINLGQGFPDFDPDPELCALVGKAMAAGHNQYPYMPGVAPLREAIAAKVKTLYGHAYDPETEITVTSGATEALMATVLAAVGPGDEVVVIEPCYDSYLPAIRLAGGTAVPVPLRAPTRDDPYYRIDWQRVRDAIGARTRLLMLNFPHNPTGAVLDESDLDALESIVRETGVLLLSDEVYEHIVFDGKPHASLSRRPLLAEHAFVISSFGKTYHTTGWKVGYCCAPRQLSAELRKVHQFMVFTVSSPMQFALAEYMANPKPYLDLPAFYQAKRDRLAAGLANTRFRPLPSPGTFFMLADYSEITKHAEADFARHLTIDHGVTVIPVSAFYQNPAAPESNHHLVRFCFAKQDATLDAAIERLAHV

SEQ ID NO: 3490 - protein, 154 aa, Zea mays
MAFAVSDELLGTFVPIAVYWLYSGLYIVMDRMEIDDYRLHPKGEEEVKNVVSKWTVVKGVLVQQGFQIAVSLLLFTIIGDDSGTVRKQPPALVIALQFIIAMFVMDTWQYFMHRYMHINKFLYKHIHSKHHTLVVPYAFGALYNHPLEGLILDT

SEQ ID NO: 3491 - protein, 404 aa, Prochlorococcus marinus str. MIT 9313
MNSFSSSKHPQPGTQIDAVLDPVIPALNELVAKTPGTLSLAQGMVNWPPPIAVKLAMNNALLNQESSLNRYGPARGDPDLLELIKQKLMMQNGLDLAESMVMVTAGSNMAFHAIAQVLCDPGDEVILPLPYYFNHFMAIQLAGGVPVPVNAGLIPNPGLIEAAITKRTRAIVTISPNNPSGIVFPQTLLAAINRICAQHGLLHISDEAYEDFVFGDVPHWSPGSLPGAGNHTVSLYSFSKAYGMAGWRLGYMSVPIVWSKALEKVQDTVLICPPRFCQRAAIAALLDGSDWVRQNVSQLMSRYQLLLKRFAASNDRPWRFLHEPNGAFYCLLEVDCGCNGDTLMRQLVRDYRVATIGGCSFGFKNESCVLRISVGMLEGAELIDAFNRLEAGMLNAVQQGDRTT

SEQ ID NO: 3492 - protein, 199 aa, Leavenworthia crassa
SVGEGVTDLQPGDHVLPIFTGECGECPHCHSEESNMCELLRINTERGGMILDGESRFSINGKPIHHFLGTSTFSEYTVVHSGQVVKINPKAPLDKVCIVSCGLTTGLGATLNVAKPKKGQSVAVFGLGAVGLGTAEGARIAGASRIIGVDLNSNRFEEAKKFGVTEFVNPKEHNKPVQQVIAEMTNGGVDRSVECTGSV

SEQ ID NO: 3493 - protein, 298 aa, Escherichia coli
MNMANLKAVIPVAGLGMHMLPATKAIPKEMLPIVDKPMIQYIVDEIVAAGIKEIVLVTHSSKNAVENHFDTSYELEALLEQRVKRQLLAEVQAICPPGVTIMNVRQAQPLGLGHSILCARPVVGDNPFVVVLPDIILDGGTADPLRYNLAAMVARFNETGRSQVLAKRMPGDLSEYSVIQTKEPMVAEGQVARIVEFIEKPDEPQTLDSDLMAVGRYVLSADIWAELERTQPGAWGRIQLTDAIAELAKKQSVDAMLMTGESYDCGKKMGYMQAFVTYGMRNLKEGTKFRESIKKLLA

SEQ ID NO: 3494 - protein, 853 aa, Pseudomonas sp. G-179
MSSPHTWFSNRQLQKRRCRMTAELTRRDVLKAQAAAIAASTAGIAMPAAAQSVPGGVAALEIKWSKAPCRFCGTGCGVMVGVKENHVVATHGDMEAEVNRGLNCVKGYFLSKIMYGKDRLTTPLLRKRNGVFDKEGEFEPVTWEEAFDIMAEKAKKTLKEKGPTALGMFGSGQWTIFEGYAATKLMRAGFRSNNLDPNARHCMASAAYGFMRTFGMDEPMGCYDDFEHADAFVLWGSNMAEMHPILWTRLADRRLGHEHVKVSVLSTFTHRSMDLADIPLVFKPGTDLAILNYIANHIIQTGRVNQEFIDKNTKFMQATTDIGYGLRAEHPLEVKATGAAKAAEMTPIDFEAFKKHVSEYTLEKVAELAGVDKGFLEQLAELYADPKVKVMSLWTMGFNQHVRGVWANQMVYNIHLLTGKISEPGNSPFSLTGQPSACGTAREVGTFAHRLPADMTVTNPEHRKHAEELWNIPHGIIPEKPGYHAVQQDRMLHDGKLNFYWVQVNNNMQAAANNSNEAYIGYRNPDNFIVVSDAYPTVTAMTADLILPAAMWVEKEGAYGNAERRTHVWHQLVNAPGEARSDLWQLVEFSKRFTTDEVWPQDILDQNPEYKGKTLYDVLFQNGNVDKFPVSEISSDYENREAKAFGFYLQKGLFEEYASFGRGHGHDLGPYDLYHQVRGLRWPVVNNQETKWRYREGYDPYVKEGEGVKFYGQNDGRAVILAAPYEPPAESPDDEFGFWLVTGRVLEHWHSGSMTMRVPELYKAFPGARCFMNGDDARRLGINQGGQVKIQSRRGEIISRVDIRGRNRMPHGVIFVPWFDASQLINKVTLDATDPISKQTDFKKCAVKILPVA

SEQ ID NO: 3495 - protein, 310 aa, Oryza sativa
  unsure (1)..(310): unsure at all Xaa locations
MAVDLMGCYAPRRADDQLAIQEAATAGLRSLEMLVSSLSSSSQAAGAHKASPQQQPFGEIADQAVSKFRKVISILDRTGHARFRRGPVESSAPAAPVAAAPPPPPPPPAPVAAALAPTSSQPQTLTLDFTKPNLTMSAATXSVTSTSFFSSVTAGEGSVSNGRSLLSSGKPTLSGHKRKPCAGGHSEATANGGRCHCSKRRKNRVKRTIRVPAISSKIADIPPDEYSWRKYGQKPIKGSPYPRGYYKCSTVRGCPARKHVERATDDPAMLVVTYEGEHRHTPGPLPAPPAAAAVAAMPVSVAVSTGNGHV

SEQ ID NO: 3496 - protein, 1132 aa, Nicotiana tabacum
MASGSRTKHSHQSGQGQVQAQSSGTSNVNYKDSISKAIAQYTADARLHAVFEQSGESGKSFDYSQSIKTTTQSVVPEQQITAYLTKIQRGGHIQPFGCMIAVDEASFRVIAYSENACEMLSLTPQSVPSLERPEILTVGTDVRTLFTPSSSVLLERAFGAREITLLNPIWIHSKNSGKPFYAILHRVDVGIVIDLEPARTEDPALSIAGAVQSQKLAVRAISHLQSLPGGDVKLLCDTVVESVRELTGYDRVMVYKFHEDEHGEVVAESKIPDLEPYIGLHYPATDIPQASRFLFKQNRVRMIVDCHATPVRVVQDESLMQPLCLVGSTLRAPHGCHAQYMANMGSIASLTLAVIINGNDEEAVGGRSSMRLWGLVVGHHTSARCIPFPLRYACEFLMQAFGLQLNMELQLASQLSEKHVLRTQTLLCDMLLRDSPTGIVIQSPSIMDLVKCDGAALYCQGKYYPLGVTPTEAQIKDIVEWLLTYHGDSTGLSTDSLADAGYPGAALLGDAVCGMAVAYITSKDFLFWFRSHTAKEIKWGGAKHHPEDKDDGQRMHPRSSFKAFLEVVKSRSLPWENAEMDAIHSLLILRDSFKDAEASNSKAVVHAQLGEMELQGIDELSSVAREMVRLIETATAPIFAVDVEGRINGWNAKVAELTDLSVEEAMGKSLVHDLVHKESQETAEKLLFNALRGEEDKNVEIKLRTFGPEQLKKAVFVVVNACSSKDYTNNIVGVCFVGQDVTGQKVVMDKFIHIQGDYKAIVHSPNPLIPPIFASDENTCCSEWNTAMEKLTGWSRGEIIGKMLVGEIFGSCCRLKGPDAMTKFMIVLHNAIGVQDTDKFPFSFFDRNGKYVQALLTANKRVNMEGQIIGAFCFIQIASPELQQALRVQRQQEKKCYSQMKELAYLCQEIKSPLNGIRFTNSLLEATDLTENQKQYLETSAACERQMSKIIRDVDLENIEDGSLTLEKEEFFLGSVIDAVVSQVMLLLRERSVQLIRDIPEEIKTLTVHGDQVRIQQVLADFLLNMVRYAPSPDGWVEIQLQPNMKQISDEVTVVHIEFRIVCPGEGLPPELVQDMFHSSRWVTKEGLGLSMCRKILKLMNGDIQYIRESERCYFLIILDLPMTRRGSKSLG

SEQ ID NO: 3497 - protein, 165 aa, Triticum aestivum
RVSHESKQGIKEFIAEVVSIGRLRHRNIVQLLGYCRRRGELLLVYDYMSNGSLDRYLHIQGQGEDDKPILDWARRFEVIRGVASGLFYLHERWEKVVIHRDIKASNVLLDSEMNGRLGDFGLSRLYDHGTDPQTTRIVGTMGYFAPELARTGKATPLTDVYSFGV

SEQ ID NO: 3498 - protein, 207 aa, Zea mays
WRSSHPSVVLCADIVMHSATKFIAGHSDLMAGILAVKGESLAKEVGFLQNAEGSGLAPFDCWLCLRGIKTMALRVEKQQANAQKIAEFLASHPRVKQVNYAGLPDHPGRALHYSQAKGAGSVLSFLTGSLALSKHVVETTKYFSVTVSFGSVKSLISLPCFMSHASIPASVREERGLTDDLVRISVGIEDAEDLIADLDRALRTGPV

SEQ ID NO: 3499 - protein, 291 aa, Streptomyces spectabilis
MRGIILAGGTGSRLWPVTQAVSKQLMPVFDKPMVYYPLSTLMLAGIRDILVITTREDEIDFRRLLGDGSHLGLRLTYRTQDRPGGIAEAFLIGADFIGGEPVALILGDNIFHGRSFGVHVREHTAPDGGRIFAYPVADPTAYGVVEIGEDGTALSIEEKPAKPKSRYAAVGLYFYDEHVVDIAAGLRPSERGELEITGVNEEYLRRGALSVTVLDRGTAWLDTGTFTAMVQASEYVRVIEERQGLKIGCVEEVAWRCGYIDDERLRALSGPLLKSGYGRYLLSLLDEEALL

SEQ ID NO: 3500 - protein, 242 aa, Glycine max
MLGKTRKVSARGEAVAANYAFGPSEDDVIIKHRLLTRTTTTRGDPPLKKLQKKFTTFVSEVDKDEDINYNDCEKLARAFLQELTTFEIPLLKSKAIVEANVREKENFNELKEEMNRQILLAQSDIEDLKKQLEESKVERRHKEECEAIRKLIAMQPPRSETMKVISELEKEIAALDAENTAGSRLLELRKKQFALLLHVVDELQNTIEEDQKSLVEEMRMATEELKNGMEDTNGGAEAMAID

SEQ ID NO: 3501 - protein, 362 aa, Candida albicans SC5314
MTLTTPELNFKAYTYKNSSTPVQLTDKSIKLVKDPSNPDSYVAPPGKILLKINYTSLNPVDVKLHHLATSLVSLLVNNNNGFGRDFSGEVLSIGDNVKTNVKVGDLVQGIYHKVYSQGTASQYLLVDPNEVDMIAKPDNISLAEASSWPTVFGTALLMSKDLKYKDSKVLVIGGGTSVGRYLVQLAKQGGAKEVVVTCSPRTEDVIKSLGADTIIDYTKHKNILYPVLESVKSTGKFDYILDSYGGHELFPEINNILTEKIGRYYSIVGDYPGSSFYNLISTVSKVAWRQLLGALGLLSFNYKFIMLDNFKESMQEARDLIGSGNLKIFVDSIYPFNQLDQAIEKLDSGKAAGKVVIEVAKE

SEQ ID NO: 3502 - protein, 298 aa, Escherichia coli
MNMANLKAVIPVAGLGMHMLPATKAIPKEMLPIVDKPMIQYIVDEIVAAGIKEIVLVTHSSKNAVENHFDTSYELEALLEQRVKRQQLAEVQAICPPGVTIMNVRQAQPLGLGHSILCARPVVGDNPFVVVLPDIILDGGTADPLRYNLAAMVARFNETGRSQVLAKRMPGDLSEYSVIQTKEPMVAEGQVARIVEFIEKPDEPQTLDSDLMAVGRYVLSADIWAELERTQPGAWGRIQLTDAIAELAKKQSVDAMLMTGESYDCGKKMGYMQAFVTYGMRNLKEGTKFRESIKKLLA

SEQ ID NO: 3503 - protein, 230 aa, Chlamydophila pneumoniae J138
MEPSTNKPDCKKIFDSIASKYDRTNTILSLGMHHFWNRSLIQILGSGYSLLDLCAGTGKVAKRYIAAHPQASVTLVDFSSAMLDIAKQHLPQGSCSFIHSDINQLPLENHSYPLAAMAYGLRNLSDPHKALQEISRVLMPSGKLGILELTPPKKTHPTYSAHKLYLRAVVPWIGKSVSKDPDAYSYLSKSIQQLPKDHDLEDLFSKSGFYIAKKKKLFLGAATIWLLEKQ

SEQ ID NO: 3504 - protein, 199 aa, Leavenworthia crassa
SVGEGVTDLQPGDHVLPIFTGECGECPHCHSEESNMCELLRINTERGGMILDGESRFSINGKPIHHFLGTSTFSEYTVVHSGQVAKINPKAPLDKVCIVSCGLTTGLGATLNVAKPKKGQSVAVFGLGAVGLGAAEGARIAGASRIIGVDLNSNRFEEAKKFGVTEFVNPKEHNKPVQQVIAEMTNGGVDRSVECTGSV

SEQ ID NO: 3505 - protein, 346 aa, Mycobacterium tuberculosis CDC1551
MSTVAAYAAMSATEPLTKTTITRRDPGPHDVAIDIKFAGICHSDIHTVKAEWGQPNYPVVPGHEIAGVVTAVGSEVTKYRQGDRVGVGCFVDSCRECNSCTRGIEQYCKPGANFTYNSIGKDGQPTQGGYSEAIVVDENYVLRIPDVLPLDVAAPLLCAGITLYSPLRHWNAGANTRVAIIGLGGLGHMGVKLGAAMGADVTVLSQSLKKMEDGLRLGAKSYYATADPDTFRKLRGGFDLILNTVSANLDLGQYLNLLDVDGTLVELGIPEHPMAVPAFALALMRRSLAGSNIGGIAETQEMLNFCAEHGVTPEIELIEPDYINDAYERVLASDVRYRFVIDISAL

SEQ ID NO: 3506 - protein, 443 aa, Haemophilus ducreyi
AEIMAGVGIKAYLLPRKLPTPVLAYAIKHLDTTAGVMVTASHNPPEDNGYKVYLGKANGGGQIVSPADQQIAAFIDQVATGNIRELARSQDFNLLDDEVINAYIEKTARLSQENKMALNYVYTAMHGVGYEVLQKTLKQAGLSQPKLVSEQIEPDGNFPTVSFPNPEEKGALDLAIKLAQQENAEFIIANDPDADRLAVAIPDAQGIWKSLHGNVLGCLLGWHLAKKYHAQGQQGVLACSLVSSPALAEIAKKYGLKSEETLTGFKYIGKVDNLLFGFEEAIGYLVDPDKVRDKDGISAAVAFLDLVLYLKKQGKTILDYINEFNQQFGAYISGQISIRVSDLAEISKLMTALRNNPPTKIGGVKVTQLIDHTKTDRQSDILVFNLANGSRLITRPSGTEPKIKFYLDVKGNNGQQEAERALAHFDESVRQMLRQTQYGNQDC

SEQ ID NO: 3507 - protein, 273 aa, Exiguobacterium sp. 255-15
MWQKNLRLEDDYDFAGIRKRLRGDRLQVEQDGRLFVPVMLPEGNFIGQVEAVGSRELLLSGEGPQEPMVQLLRCRFRLDTTNPSQHLSETSLSEVVSTFGAERLVLDINPFTALIRSIIHQQINLAFAQVLMERFCRTFGTEQNGVIFPPTAEQLVNVEPEQLRALQLSGRKVDYLLGAARAAIDFERLTEAPDATIAETLIALKGVGPWTVQNVLMFGYGREDLFPASDIGILRAFERLHGTRPSVEEAVLLAEEFAPYRSHAAYLLWRSIE

SEQ ID NO: 3508 - protein, 349 aa, Nitrosomonas europaea ATCC 19718
MTIKAYGARAGDLPLEPMNITRRTPSAHDVQIDITHCGVCHSDLHQVRSEWAGTLYPCVPGHEIVGRITAVGAQVSGYKPGDLVGVGCIVDSCQHCADCNDGLENYCDHMVLTYNGPTSDAPGHTLGGYSQQIVVHERYVLRIRHSEAQLAAVAPLLCAGITTWSPLRHWKVGPGQKVGVVGIGGLGHMGIKLAHAMGAYVVAFTTSESKREAARALGAHETVVSRNPDEMARHVGSLDFILNTVAASHDLDAFFALLKRDGTMALVGAPATPHPSPNVFNLIMKRRSLAGSLIGGISETQEMLDFCAKHNIVADVEMIRIDEINEAYERMLKGDVKYRFVIDCASLTA

SEQ ID NO: 3509 - protein, 358 aa, Angiococcus disciformis
MGRGLQPLPPDAPHPRPARCEGRRWQGLGAHGQPHLRPRRGESGPGRCRDGSHREGTHPPQSRSYLAMTADSMDATVPSRRPALGFIGGGVMAEALIGAVTGGGLAAPGTLLVGEVDEERRRVLREQYGVEVTADNLAAADAELVVLAVKPQHLGVVLQQLRGQLREDTIVVSIIAGARLQTLCEGLEHPLVVRAMPNTPARVRKAATFWIPSAGLSEPALVRVRSLLGALGTEVEVADEAGVEMATGLAGPMPAFVYFLIEAFIDAGVALGLPRDQATLATVESMRGSLELLHRSQESPAALRKQVTSPGGATLAGLKVFESAGVRDAMDAAVRAVHARAQELGRLPLAPLEPGKEG

SEQ ID NO: 3510 - protein, 546 aa, Actinobacillus pleuropneumoniae serovar 1 str. 4074
MQNINPTQTAAWSALEQHKADNLNIPQLFAEDANRFDKYHLNFEQQILVDFSKNAINQKTLELLRQLANECGLASATEAMFSGQKINRTENRAVLHTALRNRSNTPVLVDGKDVMPEVNAVLAKMKDFCERIISGSWKGYTGKAITDVINIGIGGSDLGPYMVTEALRPYKNHLNMHFVSNVDGTHIAEVLKKVNPETTLVLVASKTFTTQETMTNALTAREWLLAAEKDESAVAKHFAALSTNAKEVAKFGIDTANMFEFWDWVGGRYSLWSAIGLSIALSLGFENFEALLSGAHAMDNHFRTAPIEKNIPTTLALIGIWNSNFLGAETEALLPYDQYLHRFAAYFQQGNMESNGKFVGRDGSPVTHQTGPIVWGEPGTNGQHAFYQLIHQGTKLIPCDFIAPAQTHNPVGDHHAKLLSNFFAQTEALAFGKSKETVEAEFVAAGKNLADVAEIVPFKVFTGNKPTNSILVQKITPFTLGALIAMYEHKIFVQGVIFNIYSFDQWGVELGKQLANRILPELQNAEKISSHDSSTNGLINQFKAWR

SEQ ID NO: 3511 - protein, 289 aa, Streptomyces griseus
MKGIILAGGHGTRLQPITFGVSKQLLPVYDKPMIYYPLSVLMLAGITDIQIVAAPDGLQGFRRLLGDGSDLGLDLSYAEQDKPRGLADAFLVSEDHIGDDAVALVLGDNLFHGPGFSDILRRVALDLDGAVLFGYPVRDPERYGVGEVDGAGNLTALEEKPARPRSNLAITGLYFYDNDVVEIARSLRPSERGELEITDVNRRYLERGKAALVQLGRGFVWLDTGTHDALIDAGQYVQLLEHRQGVRIACVEEIAWRMGYIDREACHRLGAQLARSPYGQYVMDIAAAG

SEQ ID NO: 3512 - protein, 404 aa, Zea mays
  unsure (1)..(404): unsure at all Xaa locations
PAGVLQKKKKISNLEVDLPAMTAQKDKAVAGLTKGIEGLFKKNKVTYVKGFGKLSSPSEVSVDLIDGGSTVVKGKNIIIATGSDVKSLPGITIDEKKVVSSTGALCLSEIPKKLVVIGAGYIGLEMGSVWNRLGSEVTVVEFAPDIVPSMDGEVRKQFQRMLEKQKFKFMLKTKVVGCDTSGDDVKLTLEPAAGGEQNILEADVVLVSAGRTPFTSXIXLETLGVETDKAGRILVDKRLKFGTRGVYAIGDAIPGPMLAHKAEEDGVACVEFIAGKEGHVDYGTVPGVVYTHPEVASVGKTEEQVKALGIAYNVGKFPLLANSRAKAIDDAEGVVKVIAEKETDKILGVHIMAPNAGEIIHEAVVALQYGASSEDVARTCHAHPTVSEALKEACLQTFDKAIHI

SEQ ID NO: 3513 - protein, 148 aa, Oryza sativa
  unsure (1)..(148): unsure at all Xaa locations
MSKSGGAAAGPTAAAXAAAVQKQKTLLQKADADVSSLVDNFAALINIARVNDPPVRNTQEAFQMDMRGSRMVHSADSLLKLVSELKRTAIFSGLASLTENVDRRIEIFSQQVEGTERMLERIGQEAAGSLKELEAHYYSSVVRTPPDE

SEQ ID NO: 3514 - protein, 367 aa, Malus x domestica
MGKGGQSCNGVVRDAKPVEQENMAVWLVDVNTIKILPFKLPAIGPNDVRIRIKAVVICGSDVHYLKTMKCADFEVKEPMVIGHECAGIVDTVGSEVKHLVPGDRVGEPGISCARCQQCKGGRYNLCPDMKFFATPPVHGSLANQIVHPADLCFKLPENVSLEEGAMCEPLSVGVHACRRANVGPETSVLIIGAGPIGLVSVLAARAFGAPRIVIVDMDDKRLAMAKSLGADEAVKVSTKMEDLDDRVAEIKKAMISEVDVTFDCVGFNKTMSTGLNATRPGGKVCLVGMGHGVMTVPLTPAAAREVDVVGVFRYQNTWPLCLEFLRSGKIDVKPLITHRFGFTEKEVEEAFATSARGGNAIKVMFKL

SEQ ID NO: 3515 - protein, 451 aa, Arabidopsis thaliana
MQSSFKTVPFTPDFYSQSSYFFRGDSCLEEFHQPVNGFHHEEAIDLSPNVTIASANLHYTTFDTVMDCGGGGGGLRERLEGGEEECLDTGQLVYQKGTRLVGGGVGEVNSSWCDSVSAMADNSQHTDTSTDIDTDDKTQLNGGHQGMLLATNCSDQSNVKSSDQRTLRRLAQNREAARKSRLRKKAYVQQLENSRIRLAQLEEELKRARQQGSLVERGVSADHTHLAAGNGVFSFELEYTRWKEEHQRMINDLRSGVNSQLGDNDLRVLVDAVMSHYDEIFRLKGIGTKVEVFHMLSGMWKTPAERFFMWLGGFRSSELLKILGNHVDPLTDQQLIGICNLQQSSQQAEDALSQGMEALQQSLLETLSSASMGPNSSANVADYMGHMAMAMGKLGTLENFLRQADLLRQQTLQQLHRILTTRQAARAFLVIHDYISRLRALSSLWLARPRD

SEQ ID NO: 3516 - protein, 493 aa, Actinobacillus pleuropneumoniae serovar 1 str. 4074
MKDLNVFDKNYGLLINGKWTQGSGNDLLPSYNPANGEVLAHFVDATDADVDAAVKAAQEAFKSWRKTTVAERAAILNKIADVIDENSELFALQETLDNGKPIRETRAADIPLASDHFRYFASAIRAGEGSLNQINQEELSLVLREPIGVVGQIIPWNFPFLMAAWKIAPALAAGCTVVIHPSSTTSLSLLSFAQKINHLLPKGVLNVITGKGSKSGEYMLHHKGFNKLAFTGSTEIGRHIAISAAELLIPATLELAAKSANIFFDDMPFDKALEGAQKGILFNQGQVCCAGSRIFVQEGIYDKFVAALAEEFKKVKVGLPWEDDTQMGAQVNAGQLNTILKYVKIGEEEGCRIITGGRKVLSDNLACGEFVEPTLIESKDNNSRIAQEEIFGPVATVIKFKTEEDVIRMANDSEYGLGGGVWTKDINRALRVSQAIETGRVWVNCYNILPAGAPFGGYKSSGIGRETHQMMLDAYTQVKNIYISTREEREGMY

SEQ ID NO: 3517 - protein, 264 aa, Salmonella enterica subsp. enterica serovar Typhimurium
MNDSLKAQCGAEFLGTGLFLFFGIGCLSALKVAGASLGLWEICIIWGLGISLAVYLTAGISGGHLNPAVTIALWLFACFPKQKVLPYIIAQFAGAFGGALLAYVLYSSLFTEFETAHHMVAGSVESLQLASIFSTYPAAALNVWQAALVEVVITSILMGMIMALTDDGNGIPKGPLRLCLLGILVAVIGASTGPLTGFAMNPARDFGPKLFTWLAGWGNMAMSGGREIPYFIVPIVAPVIGACAGAAIYRYFIGKNLPCNRCEL

SEQ ID NO: 3518 - protein, 199 aa, Leavenworthia crassa
SVGEGVTDLQPGDHVLPIFTGECGECPHCHSEESNMCELLRINTERGGMILDGESRFSINGKPIHHFLGTSTFSEYTVVHSGQVVKINPKAPLDKVCIVSCGLTTGLGATLNVAKPKKGQSVAVFGLGAVGLGAAEGARIAGASRIIGVDLNSNRFEEAKKFGVTEFVNPKEHNKPVQRVIAEMTNGGVDRSVECTGSV

SEQ ID NO: 3519 - protein, 393 aa, Chlamydophila pneumoniae J138
MIFEFRFPKIGETSSGGSIVRWLKNLGDHVARDEPLIEVSTDKIATELPSPKAGRLVRFCVNEGDEVASGDVLGLIELEEISEADDESTSCPLTSCETKSEAGSSSSSVWFSPAVLSLAQREGIGLDNLQKIAGTGKGGRVTRQDLEAYISESQQVSIPEIFQGEVNRIPMSPLRRAIASSLSKSSDEVPHASLVVDVDVTDLMNLISGERQRFLDTHGVKLTITSFIVQCLAQTLRQFPLLNGSLDGTTIVMKKSVNVGVAVNLNKEGVVVPVIHNCQDRGLVSIAKALADLSSRARLNKLDPSEVQDGSVTVTNFGMTGALIGMPIIRYPEVAILGIGTIQKRVVVRDDDSLAIRKMVYVTLTFDHRVLDGIYGSEFLTSLKNRLESVTMG

SEQ ID NO: 3520 - protein, 199 aa, Leavenworthia crassa
SVGEGVTDLQPGDHVLPIFTGECGECPHCHSEESNMCELLRINTERGGMILDGESRFSINGKPIHHFLGTSTFSEYTVVHSGQVVKINPKAPLDKVCIVSCGLTTGLGATLNVAKPKKGQSVAVFGLGAVGLGAAEGARIAGASRIIGVDLNSNRFEEAKKFGVTEFVNPKEHNKPVQQVIAEMTNGGVDRSVECTGSV

SEQ ID NO: 3521 - protein, 400 aa, Chlorobium tepidum TLS
MNTPAINLETEKQLFFHNYARLPLDIASGKGSFLYTASGERYLDMIAGVGVNAIGYGDKRLEQAITEQASKYIHVSNLFMQKPQFDLAAKLLEISRMSKVFFCNSGTEAIEAAIKLARRFAARNGDTDKTQVLSLTNCFHGRTYGALSLTAKPKYVDGFEPLVPETGMIDFNDVEDLERKVSNRTAAVFVEFVQGEGGIHKVSEAFIAKLKELAKEHDFLIVADEIQAGCGRTGAFFSYMPFDIQPDLVCVAKPLGGGLPLGAIIGSEKVAEVFTPGSHGTTFGGNPVACAAGLAMIEAILADGLMQNALEVGSMMRTAFEKMAEKHAQILEIRQYGLMIGVTVHREAKYYVEEALKRGVLVNATSNNVIRLLPPLSISKEEAQLCLDTLDAIFTEEAKA

SEQ ID NO: 3522 - protein, 241 aa, Zea mays
MMSGRSGGRDGEAAGPVIRIRVSHGATFREVVVPAQATFGELKRILVQTTGLEPERQRLFFRGKEKSDREFLHAAGVKDGAKLLLLEKPSPANIEQKVEPVIMDESVMKACEAVARVRAEVDRLSAKVCDLEKNVLAGRKVDDKEFVVLTELLMIQLLKLDGIEAEGEARAQRKAEVRRVQSLVETLDKLKARNANPFSDHNNAVSVTTQWETFENGMGSFSAPPPHVPSEQVNTDWEQFD

SEQ ID NO: 3523 - protein, 199 aa, Leavenworthia crassa
SVGEGVTDLQPGGHVLPIFTGECGECPHCHSEESNMCELLRINTERGGMILDGESRFSINGKPIHHFLGTSTFSEYTVVHSGQVVKINPKAPLDKVCIVSCGLTTGLGATLNVAKPKKGQSVAVFGLGAVGLGAAEGARIAGASRIIGVDLNSNRFEEAKKFGVTEFVNPKEHNKPVQQVIAEMTNGGVDRSVECTGSV

SEQ ID NO: 3524 - protein, 233 aa, Spinacia oleracea
  unsure (1)..(233): unsure at all Xaa locations
XVAQTSEWEQEGSTNAVLEGESDPEGAVSWGSETQVSDEGGVEGGQGFSEPPEEAKLFVGNLPYDVDSEKLAGIFDAAGVVEIAEVIYNRETDRSRGFGFVTMSTVEEAEKAVELLNGYDMDGRQLTVNKAAPRGSPERAPRGDFEPSCRVYVGNLPWDVDTSRLEQLFSEHGKVVSARVVSDRETGRSRGFGFVTMSSESEVNDAIAALDGQTLDGRAVRVNVAEERPRRAF

SEQ ID NO: 3525 - protein, 360 aa, Magnaporthe grisea 70-15
MPYPEKFTGFQVKSPDSWTEFHKNEFDPKPFGDYDVDIEIECCGVCGSDVHTVSGGWGEQKFPLVVGHEIVGKAIKVGPKVTLIKEGQRVGVGAQSYACLDCKQCKNDNETYCKKQLDTYGSVWPDSGVVSQGGYSSHVRTHEHWVFPIPDALASTIAAPMLCAGLTAYSPLVRNGVGPGKKVGILGMGGIGHFGLLFAKALGAEVWAISRSRAKEADCKAMGADGFLATSEKGWNEPHAMTFDAILNTASSFEGWDFGAYLGLLDVHGKFVAVGLPEGEGMKIRNQDLLSNGVFIGASHLGSRRETIEMLQLAADKGIKSWVEEIQIGEDGLKEALTRVHKTDVRYRFCMTGYDKVFTA

SEQ ID NO: 3526 - protein, 199 aa, Leavenworthia crassa
SVGEGVTDLQPGDHVLPIFTGECGECLHCHSEESNMCELLRINTERGGMILDGESRFSINGKPIHHFLGTSTFSEYTVVHSGQVVKINPKAPLDKVCIVSCGLTTGLGATLNVAKPKKGQSVAVFGLGAVGLGAAEGARIAGASRIIGVDLNSNRFEEAKKFGVTEFVNPKEHNKPVQQVIAEMTNGGVDRSVECTGSV

SEQ ID NO: 3527 - protein, 324 aa, Actinobacillus pleuropneumoniae serovar 1 str. 4074
MAKQIKKIAVLTSGGDAPGMNAAIRGVVRAALNEGLEVYGVQDGYYGLYTDRVIPLDRRSVSETINRGGTFLGSARFPQFKDPDVRKKSVETLKKYDIDALVVIGGDGSYMGAKLITEEFGYPCIGIPGTIDNDIVGTDYTIGYQTALETAVEAIDRLRDTSTSHQRISIVEIMGRHCGDLTISAALASGCEYIIVPEKGLDKESLMRNIEDGFNKGKRHAIIAITELMTDVQALAKEIEDRFGHETRATVLGHIQRGGAPCPFDRILASRMGVYAVDLLLQGHGGRCIGIKNENLVHHDIIDAINNMRRPFKEELFEAARKLF

SEQ ID NO: 3528 - protein, 142 aa, Zea mays
  unsure (1)..(142): unsure at all Xaa locations
MMEWDNQQQPSNNPSSNLQGIDVNGGSGSGGMYVKVMTDEQLETLRKQIAIYATICERLVEMHKTLTSQQDLAGRVGGLYADPTFGHKMTGGRQRWTPTQXQLQILERIFDQGIGPPTSQKSRTYPGTDPPGQNLNKTFTWF

SEQ ID NO: 3529 - protein, 172 aa, Antirrhinum majus
KATELRLGLPGTDESEPQTSSSIKNNNNKRSSSEMQGSCQKSTQQEESIAPAPKAQVVGWPPVRSFRKNVMKASESDGSGMFVKVSMDGAPYLRKIDLKFYNNYFDLLKALENMFKCTIGVYSEREGYNGSEFAPTYEDKDGDWMLVGDVPWDMFITSCKRLRIMQSKLCCL

SEQ ID NO: 3530 - protein, 386 aa, Rubrobacter xylanophilus DSM 9941
MYKGPFEVAVENVEDPKIQDPNDVVVRITSTCICGSDLHMYEGRTAAEPGIVFGHENLGIVEEVGPGVVSLRQGDRVVMPFNVACGFCKNCQRGYTGFCLTVNQGFAGGAYGYVAMGPYTGGQAEYLRVPFADFNCLKLPEGDEHEADFALLADIFPTGYHGTELADVQPGETVAVFGAGPVGLMAAYSAMIRGAERVFVVDRVKERLDKAEEIGCIPVNFDEVDPVEYIKEQTPGNRLSTLSVDNDANRGADKGIDAVGYQAHVRGGEREEPAIVLNTLIECVRPTGALGVPGLYVPSDPGAPDDASKKGQLLVSIGRMFEKGLRMGTGQCNVKRYNAYLRDLIIAGRARPSFVVSHEVPLDQAPEAYEKFDKRIEGYTKVILKP

SEQ ID NO: 3531 - protein, 748 aa, Rubrobacter xylanophilus DSM 9941
MEKVRKGWDPSLWAGLKPFGIGEERPNNYAEILRAVWENKDEALYAWRILSRGVCDGCALGVAGLHDWTMDGVHLCNIRLRLLRLNTMPALDTRLLADLASLKQKKSAELKELGRLPYPMIRRRGERGFTRISWERALDEIAGRIRATSPRRTGYYMTSRGEPNENYYVAQKAVRAMGTNSIDNAARICHSPSTVSLKATIGAGATTCSYSDWIGTDLLVFIGSNPANNQPVTTKYMYYAKKAGTKIAVINSYREPGMERYWIPSNLESALFGTKISDRTFLVNVGGDVAFLNGTLKHMIENGWLDRGFIERHTAGFKQMRAALEEQSWEDLERLSGASREEMREFARMVGEASTAVFVWSMGITQHEFGEDNVRAIINLGLTKGFVGRDNCGLMPIRGHSGVQGGAEMGAYSTAFPGGLPVNPENARKLGELYGFEVPSEPGLTTPRMIDAAHDGELDVLVSLGGNFLEVLPDPDYVREALARVPLRVHVDIVLSNQMLIDPADTVILLPAATRYEIPGGVTQTSTERRIMYSPEIPGRRIGEARPEWEIFMELAKRVRPELADKLHFDGTQEIREEIARVVPMYDGIQHLRKSGDQVQYGGPHLCAGWKFDTPDGKAHFSAIALPETGIPEGMFVVTTRRGKQFNSMIHEEKDALTGAVREAVLMSEEDARGLGLANGERVVLRSEAGEFEGRVHIAPIKPRTLQVHWPEGNVLIDRRHRSAVADIPDYNALVRVERAGEREPAAV

SEQ ID NO: 3532 - protein, 466 aa, Zea mays
  unsure (1)..(466): unsure at all Xaa locations
MAGLLHLQSTLLPSASALRRRAGVPVPSSSRRRCRIEAKIREIFMPALSSTMTEGKIVSWTAAEGDRLAKGDPVVVVESDKADMDVETFYDGFLAAVLVPAGDSAPVGSAIALLAESEEDIPVAQSQAASFSSTSPLPSPPQETAAQEASPSPPPPPPPGPVSVSAPTPPLPATQGERVVASPYAKKLAKDLGVDLFSVTGSGPGGRIVAKDVEAALAAPKKAAPVTAARPDVPLGSTVPFTSMQGAVSKNMVESLAVPTFRVGYTITTDALDQLYKKIKSKGVTMTTLLAAATAMALVQHPVVNCSCRDGKSFTYNKSINIAVAVAIDGGLITPVLQDADKLDIYSLSRKWKELVDKARAKQLQPXEYNSGTFTLSNLGMFGVDRFDAILPPGTGAIMAVGASEPTVVGTKDGRXSDIKSQMQVNVTADHRVIYGADLAAXLQTLAKIIEDPKDLTFDSSLSAGF

SEQ ID NO: 3533 - protein, 432 aa, Bifidobacterium longum NCC2705 [sequence omitted]

SEQ ID NO: 3534 - protein, 493 aa, Glycine max
  unsure (1)..(493): unsure at all Xaa locations
MSFREESGDARDLQKPFLHTGSWYKMGSRQSSIMGSSTHVIRDGAVSVLFCVLIVALGPIQFGFTCGYSSPTQGAIVRDLNLSISEFSFFGSLSNVGAMVGAIASGQIAEYIGRKGSLMIAAIPNIIGWLAISFAKDSSFLYMGRLLEGFGVGIISYVVPVYIAEIAPQNLRGGLGSVNQLSVTIGIMLAYLLGLFVNWRVLAILGILPCTVLIPGLFFIPESPRWLAKMGMIDEFETSLQVLRGFDTDISVEVHEIKRSVASTGKRAAIRFADLKRKRYWFPLMVXYDTVVGIGLLVLQQLSGINGILFYSTTIFANAGISSSEAATVGLGAVQVIATGISTWLVDKSGRRLLLIISSSVMTVSLLIVSIAFYLEGVVSEDSHLFSILGIVSIVGLVAMVIGFSLGLGPIPWLIMSEILPVNIKGLAGSIATMGNWLISWGITMTANLLLNWSSGGTFTIYTVVAAFTIAFIAMWVPETKGRTLEEIQFSFR

SEQ ID NO: 3535 - protein, 1086 aa, Candida albicans SC5314
MLLKQIFLPFFVLFNAINAIDIYQNQVSRGTIDLSIGAITIHSGAYWSIIDNAISALVGTLTVQQDAGFYITGLNPLLGLQVELLGVLNSIKNDGIVSFNGLNSLVGPIYNLVGLSFQNNGEFYLSASGVAPPVFSITAADWHNNGLLVLAQAKRTSALANLGFPTGSIENQGSICLFGTAYQQLTSITGSGCISADRDSTIYIFSSLLPIATTQTLYLADRASSIVIQPVTLPATYTVRGFGNGNKVGISLPLLSVPLLGQPAYSYDPSSGVLTLRGLGVGLLSQRFQIGTGYDSTSFEIVTDDGAGLPTTLLGSVRYNGPVPNNAVPASCNCKYVPPSPGTDESSSSLSSSTSEQSSSSATSVSASETSDTSSTQESSSSSEVSSTQEPSSSTPEPSSSSETSSTQESSSTEGPSSSTDSSTEASSSESSTAPSSSTEASSSTESSTEEPSSSTEGPSSSQESSSSEESSTQEPSSSTKESSSTEGPSSTEESSSTEGPSSSTDSSTDITSASSTDEQSSSGTGQSSTEDEPIDSTESDTSSATDSSTATDSSATNTDTNSESTDSSTATDTSSTDSNTASSTETNTDVTDSSTDSNTGATESSTATDTNTDATDSSTVSETGATDSSTATDTNTGATESSTDSNTGATESSTATDTNTSATNTDTNTGSNTATNTDDNTATDTSSTETNTATNTDGTETNTGATETNTDTSASNTDDNTGSNTATNTGGTDTNTDTNTGGTDTNTGTNTGGTDTKTGTNTATGNNTGATETNTATNTNGNGTNTNTGATDTATNTATGTNTNTGATDTNTNTNTGATVTNTATNTDNVSTTKDIPSPTSTNEGSNNGGGSNNGSGSNNGSGNESGSGSGSGNGSGDGSNNGSGNGSDNGTGSGNGSDNGTGSGSGSDNGSGSGSGSGSGSGNGSGSGSDNGSGSGNGSGSGSGSGSGSDNGSGSGSNNGSGNGSGNGSGSGSDNGSGNGSGSGSGSGSGNGSGNGTGSGSGSGSGNGSGSNNNNGSGSGSGSGSGQDNGIITSSIGQPGSSTSTQGPSSSNSATIPEQANSGNHIKFTLFNRLLIGLVSIVFM

SEQ ID NO: 3536 - protein, 114 aa, Deschampsia antarctica
NETEVGGRKIKVNVTESFLPNIDPSAPEAEPAFVDSQYKVYVGNLAKTVTMEVLKNFFSEKGEVLSATVSRVPGTPKSKGFGFVTFSSDEEVEAAVSTFNNTELEGQAIRVNRA

SEQ ID NO: 3537 - protein, 245 aa, Oryza sativa
  unsure (1)..(245): unsure at all Xaa locations
MRTASTATRRVSAGAPLPTSLPFSSSPSRQPGMGFPVCCYXSELLLPKQLLHLLLLLGYIRRFLLWAFHAVGLGDLLDLGDEQQAVLQDHAREHRAPAQALPPQQQHRRAEFRTVPAMVIEEVLPVVRFDELVAAAPAVCGGGDCAVCLSGIGGGDEVRRLSICRHVFHRGCLDRWMEHDDQRTCPLCRAPLIPDEMASALWAAAGVPDASDFDFSYFGAPLTPMPTPTLLRPHELLLTGLGGYQ

SEQ ID NO: 3538 - protein, 491 aa, Oryza sativa
MVPREQAEEAIVADSNGKEEEVGVMGVSAGEHGADDHHGGGGKFSMKNLLWHGGSVWDAWFSCASNQVAQVLLTLPYSFSQLGMLSGVLLQLFYGFMGSWTAYLISVLYVEYRSRKEKEGVSFKNHVIQWFEVLDGLLGPYWKAAGLAFNCTFLLFGSVIQLIACASNIYYINDRLDKRTWTYIFGACCATTVFIPSFHNYRIWSFLGLGMTTYTAWYLAIAALLNGQAEGITHTGPTKLVLYFTGATNILYTFGGHAVTVEIMHAMWKPAKFKYIYLLATLYVFTLTLPSASAMYWAFGDELLTHSNAFSLLPKTGWRDAAVILMLIHQFITFGFACTPLYFVWEKAIGVHGTRSVLTRAPARLPIVVPIWFLAIIFPFSAPSNSAVGALLVSFTVYIIPALAHILTYRSASARLNAAEQPPRFLPSWRGMFVVNVFVVAWVLVVGFGLGGWASVTNFIKQIDTFGLFAKCYQCPPRAHAGAPLPAPPRH

SEQ ID NO: 3539 - protein, 127 aa, Oryza sativa
  unsure (1)..(127): unsure at all Xaa locations
MDPCKFRPESSFDTKTTTTNAGAPVWIDSQALTVGPRGAILLEDYHLIEKAAHFARERIPERVVHDRGVYAKGFFECTHDLTDITXADFLRCQGAQTPDMGRLYTVMHERGSPETIRDPRGFAVKCY

SEQ ID NO: 3540 - protein, 199 aa, Leavenworthia stylosa
SVGEGVTDLQPGDHVLPIFTGECGHCPHCHSEESNMCELLRINTERGGMILDGESRFSINGKLIHHFLGTSTFSEYTVVHSGQVVKINPKAPLDKVCIVSCGLTTGLGATLNVAKPKKGQSVAVFGLGAVGLGAAEGARIAGASRIIGVDLNSKRFEEAKKFGVTEFVNPKEHNKPVQQVIAEMTNGGVDRSVECTGSV

SEQ ID NO: 3541 - protein, 561 aa, Nitrosomonas europaea ATCC 19718
MTTLKITGMTCDSCATHVKQALEKVPGVQSAVVSYAKGAAQLDLDPGTAPDALTAAVAGLGYKATLADAPPTDNRTGLLDKVRDWMGAADKGSDGEHPLQVAVIGSGGAAMAAALKAVEQGAKVTLIERGTIGGTCVNVGCVPSKIMIRAAHIAHLRRESPFDGGIPATAPAIDRSKLLAQQQARVDELRHAKYEGILDGNPAITVLHGEARFKDDQSLVVRLNAGGERVVVFDRCLVATGASPAVPPIPGLKESPYWTSTEALVSDIIPERLAVIGSSVVALELAQAFARLGSQVTILARSTLFFREDPAIGEAITAAFRAEGIKVLEHTQASQVAHVDGEFVLTTARGEIHADKLLVATGRTPNTRSLALEAAGVAVNAQGAIVIDKGMRTSAPHIYAAGDCTDQPQFVYVAAAAGTRAAINMTGGDATLDLTAMPAVVFTDPQVATVGYSEAEAHHDGIETDSRTLTLDNVPRALANFDTRGFIKLVIEEGSGRLIGVQAVAPEAGELIQTAALAIRNRMTAQELADQLFPYLTMVEGLKLAAQTFNKDVKQLSCCAG

SEQ ID NO: 3542 - protein, 199 aa, Leavenworthia stylosa
SVGEGVTDLQPGDHVLPIFTGECGHCPHCHSEESNMCEFLRINTERGGMILDGESRFSINGKPIHHFLGTSTFSEYTVVHSGQVVKINHKAPLDKVCIVSCGLTTGLGATLNVAKPKKGQSVAVFGLGAVGLGAAEGARIAGASRIIGVDLNSKRFEEAKKFGVTEFVNPKEHNKPVQQVIAEMTNGGVDRSVECTGSV

SEQ ID NO: 3543 - protein, 122 aa, Glycine max
  unsure (1)..(122): unsure at all Xaa locations
APSLISTAAVTTVNRAGARMDAPFTGLKSMAGYPTRKTNHDITSIASNRGRVQCMQVWPPLGKKKMETLSYLPHLDDAQLATDVEYLLRNGGIPCXEFQLQHGIEYREHNRSPAYYNGRYWT

SEQ ID NO: 3544 - protein, 195 aa, Glycine max
FLVVLQLSSELLNRKNLQGNLVVEKLDSLMVLAFLHLESCQNSGRLAEVFNTLLASFQRTVLNAYKSKFTQFVMFYACALDPEGCGVKFAMVLADMFGGDANPPITRMSAVAYLASYLTRAKFLSAALVTSIIQSLVDWCYVYCKFRDFDMNPRAHQVFYSGCQAIMYIMCFRMRSLMDVPRLKLQLLNMPMKAS

SEQ ID NO: 3545 - protein, 487 aa, Zea mays
MAAAREEDEAARPLLLLPRTAQEDQKWWRRWAREAGWVGYLALPMVVVNLSQYAVQVSSNMMVGHLPGVLPLSSAAIATSLANVSGFSLLIGMASALETLCGQAYGAKQYHKLGLDTYRAVVTLLVVCVPLSLLWVFMDKILVLIGQDPLISQGAGRYMVWLIPGLFANAVIQPLTKFLQTQSLIYPLLLSSAATAAVHVPLCYVMVFKTGLGYTGAALTISISYWLNVAMLVGYIAFSSSCKETRARPTVEVFRGVDAFLRLALPSALMMCLEWWSFELLTLMSGLLPNPELQTSVLSICLTSVTLLFTIPFGLGAAGSTRVANELGAGNPDGARSAVRVVLSMAGIDAVVVSGSLLAARRLVGIAYSSEEEVISAVAAMVPLVCITAITDCLQGILSGVARGCGWQHLGAYVNLGSFYLLGIPMAILLGFVLRMGSRGLWMGIVCGSLSQTTLMSAITFFTDWNKMAEKARERVFSDKQPQEPGP

SEQ ID NO: 3546 - protein, 294 aa, Sesbania rostrata
MEQYEKVEKIGEGTYGVVYKARDRVTNETIALKKIRLEQEDEGVPSTAIREISLLKEMQHRNIIRLQDVVHSEKRLYLVFEYLDLDLKKHMDSSPEFVKDPRQVKMFLYQILCGIAYCHSHRVLHRDLKPQNLLIDRRTNSLKLADFGLARAFGIPVRTFTHEVVTLWYRAPGILLGSRHYSTPVDIWSVGCIFAEMVNRRPLFPGDSEIDELFKIFRILGTPNEDTWPGVTSLPDFKSTFPKWPPKDLATVVPNLEQAGLNLLSSMLCLDPSKRITARSAVEHEYFKDIKFVP

SEQ ID NO: 3547 - protein, 129 aa, Triticum aestivum
  unsure (1)..(129): unsure at all Xaa locations
PTVMASSATSVAPFQGLKSTAGLPVSRRSNGASLGSVSNGGRIRCMQVWPIEGIKKFETLSYLPPLSTEALLKQVDYLIRSKWVPCLXEFKQVGFIFRXEHNXTPGYYDGRYLDMXELPMFXGCTDPTQ

SEQ ID NO: 3548 - protein, 478 aa, Geobacillus kaustophilus
MPIAVQKQKLYINGEWREGKSYTELKSPYSRETIAEIPVATEQEVDEAIAAAYAARQTMAAMPAHERAAILERVGEQLKARQEEAARLIALEAAKPIITAKGEVARTIQTYKFAAEEAKRIHGETLPLDAAPGGEHRIALTVREPIGVIGAITPFNFPMNLVAHKLGPAIASGNTVVLKPASQTPLSAYFIAELFEKAGLPKGALNVVTGSGRTVGDKIVTDPRISMITFTGSPEVGIAIRNKAGLKRVTLELGSNSAVIVDEQVDLDRIIPRCVFGAFTFQGQVCISLQRIYVHENRYDEFVEKFVAAAKQLKTGDPLDPTTDVSALITPNDVDRALSWIEEAKQGGANVVLGGERDGNILLPTVIVDAEPTMKVSCQEVFAPIVLINRVRSIDEAIELVNDSRYGLQAGIYTDNVHTAWKAAKQLHVGGVLINDIPTFRVDHMPYGGVKESGFGREGVRYAIEEMTELKLIIFNES

SEQ ID NO: 3549 - protein, 215 aa, Zea mays
MAHRMDNEYDYLFKIVLIGDSGVGKSNILSRFTRNEFCLESKSTIGVEFATRTLQVEGKTIKAQIWDTAGQERYRAITSAYYRGAVGALLVYDITKKQTFENIQRWLRELRDHADSNIVIMMVGNKSDLNHLRSVPEEDGQALAEKEGLSFLETSALEALNVEKAFQTVLSDIHQIISKKALAAQEAAGSGPPGQGTTINVADSSANMKGGCCSS

SEQ ID NO: 3550 - protein, 251 aa, Agrobacterium tumefaciens str. C58
MPKPIIAVPADIRHFAGADWHAAQNQYLSAALKVAGVMSFIVPAFEDGNEVDAILDRVDGLLVSGSATNVHPSLYGKEAQESDGPFDPARDATSLPLIRRALERGIPMLAICRGIQELNVALGGTLASEIQEQPGTWDHRKPEHDDRDVAFAIRQPVHVREGSCIAQHLGMSGEIQINSLHRQAIAETAPRLQVEATAADGTIEAVSVIDAKGFAVGVQWHPEYWAETDAPSRALFEAFGKAVHAYRNSKA

SEQ ID NO: 3551 - protein, 715 aa, Escherichia coli
  unsure (1)..(715): unsure at all Xaa locations
MKKVVTVCPYCASGCKINVVVDNGKIVRAEAAQGKTNQGTLCLKGYYGWDFINDTQILTPRLKTPMIRRQRGGKLEPVSWDEALNYVAERLSAIKEKYGPDAIQTTGSSRGTGNETNYVMQKFARAVIGTNNVDCCARVXHGPSVAGLHQSVGNGAMSNAINEIDNTDLVFVFGYNPADSHPIVANHVINAKRNGAKIIVCDPRKIETARIADMHIALKNGSNIALLNAMGHVIIEENLYDKAFVASRTEGFEEYRKIVEGYTPESVEDITGVSASEIRQAARMYAQAKSAAILWGMGVTQFYQGVETVRSLTSLAMLTGNLGKPHAGVNPVRGQNNVQGACDMGALPDTYPGYQYVKDPANREKFAKAWGVESLPAHTGYRISELPHRAAHGEVRAAYIMGEDPLQTDAELSAVRKAFEDLELVIVQDIFMTKTASAADVILPSTSWGEHEGVFTAADRGFQRFFKAVEPKWDLKTDWQIISEIATRMGYPMHYNNTQEIWDELRHLCPDFYGATYEKMGELGFIQWPCRDTSDADQGTSYLFKEKFDTPNGLAQFFTCDWVAPIDKLTDEYPMVLSTVREVGHYSCRSMTGNCAALAALADEPGYAQINTEDAKRLGIEDEALVWVHSRKGKIITRAQVSDRPNKGAIYMTYQWWIGACNELVTENLSPITKTPEYKYCAVRVEPIADQRAAEQYVIDEYNKLKTRLREAALA

SEQ ID NO: 3552 - protein, 478 aa, Xanthomonas campestris pv. campestris str. ATCC 33913
MSEQFDVVVIGAGPAGYHAAIRAAQLGMKVACIDAAIGKDGKPALGGTCLRVGCIPSKALLDSSRQFWNMGHLFGDHGISFNDAKMDVPTMIGRKDKIVKQFTGGIAMLFKANKITPYYGFGQLQPGNIVKVTQHEGGEIELKGTNVILAAGSESIELPFAKFDGDTIVDNVGGLDFTAVPKRMAVIGAGVIGLELGSVWKRLGAEVTILEALPDFLALADAEVAKTALKEFKKQGLDIKLGAKVSKTEITGSGDAKQVVLSYTDAAGEQTLTVDKLLVAVGRKAATKNLLADGTGVKLTERGQIEVDGHCHTGVDGVWAIGDCVRGPMLAHKGFEEGIAVAELIAGLPGHVNFDTIPWVIYTEPEIAWVGKTEQQLKAEGVAYKAGSFPFAAIGRAVAMGEPAGFVKVIADAETDRVLGMHLVGVGVSELVHEGVLTMEFSGSADDLARICHAHPTLSEAIHDAAMAVSKRAIHKAN

SEQ ID NO: 3553 - protein, 404 aa, Xanthomonas campestris pv. campestris str. ATCC 33913
MATEVKVPVLPESVSDATIASWHKKAGEAVKRDENLVDLETDKVVLEVPSPVDGVLKEIKFEAGSTVTSNQILAIIEEGAVAAAAPAEEKKADATAAAAAPAAAPAPAAAAAAAPVASKSSADSLPPGARFSAITQGVDPSQVDGTGRRGAVTKEDIVNFAKAGGVGKASGARPEERVAMTRVRKTIAKRLMESKNSTAMLTTFNEVNLAKVSAARKELQDEFQKAHGIKLGFMSFFVKAAANALQRFPLVNASIDGDDIIYHGYSDISIAVSTEKGLVTPVLRNVERQSFAEVEQGIADYAAKARAGKLGLDDLQGGTFTITNGGTFGSLLSTPIINPPQSAILGMHAIKERPIAENGQVVIAPMMYLALSYDHRIIDGKDSVQFLVDIKNQLENPGRMLFGL

SEQ ID NO: 3554 - protein, 547 aa, Mycobacterium tuberculosis CDC1551
MVANPRAGQPAQPEDLVDLPHLVTAYYSIEPDPDDLAQQVAFGTSGHRGSALTGTFNELHILAITQAIVEYRAAQGTTGPLFIGRDTHGLSEPAWVSALEVLAANQVVAVVDSRDRYTPTPAISHAILTYNRGRTEALADGIVVTPSHNPPSDGGIKYNPPNGGPADTAATTAIAKRANEILLARSMVKRLPLARALRTAQRHDYLGHYVDDLPNVVDIAAIREAGVRIGADPLGGASVDYWGEIAHRHGLDLTVVNPLVDATWRFMTLDTDGKIRMDCSSPDAMAGLIRTMFGNRERYQIATGNDADADRHGIVTPDEGLLNPNHYLAVAIEYLYTHRPSWPAGIAVGKTVVSSSIIDRVVAGIGRQLVEVPVGFKWFVDGLIGATLGFGGEESAGASFLRRDGSVWTTDKDGIIMALLAAEILAVTGATPSQRYHALAGEYGGPCYARIDAPADREQKARLARLSADQVSATELAGEPITAKLTTAPGNGAALGGLKVTTANAWFAARPSGTEDVYKIYAESFRGPQHLVEVQQTAREVVDRVIG

SEQ ID NO: 3555 - protein, 234 aa, Mycobacterium bovis AF2122/97
MIFGAGVLGGAQADLLAVPAADFQVLKIPEGITTEQALLLTDNLATGWAAAQRADISFGSAVAVIGLGAVGLCALRSAFIHGAATVFAVDRVKGRLQRAATWGATPIPSPAAETILAATRGRGADSVIDAVGTDASMSDALNAVRPGGTVSVVGVHDLQPFPLPALTCLLRSITLRMTMAPVQRTWPELIPLLQSGRLDVDGIFTTTLPLDEAAKGYATARARSGEELKVLLTP

SEQ ID NO: 3556 - protein, 199 aa, Leavenworthia stylosa
SVGEGVTDLQPGDHVLPIFTGECGHCPHCHSEESNMCELLRINTERGGMILDGESRFSINGKPIHHFLGTSTFSEYTVVHSGQVVKINPKAPLGKVCIVSCGLTTGLGATLNVAKPKKGQSVAVFGLGAVGLGAAEGARIAGASRIIGVDLNSKRFEEAKKFGVTEFVNPKEHNKPVQQVIAEMTNGGVDRSVECTGSV

SEQ ID NO: 3557 - protein, 199 aa, Leavenworthia stylosa
SVGEGVTDLEPGDHVLPIFTGECGHCPHCHSEESNMCELLRINTERGGMILDGESRFSINGKPIHHFLGTSTFSEYTVVHSGQVVKINPKAPLDKVCIVSCGLTTGLGATLNVAKPKKGQSVAVFGLGAVGLGAAEGARIAGASRIIGVDLNSKRFEEAKKFGVTEFVNPKEHNKPVQQVIAEMTNGGVDRSVECTGSV

SEQ ID NO: 3558 - protein, 199 aa, Leavenworthia stylosa
SVGEGVTDLEPGDHVLPIFTGECGHCPHCHSEESNMCELLRINTERGGMILDGESRFSISGKPIHHFLGTSTFSEYTVVHSGQVVKINPKAPLDKVCIVSCGLTTGLGATLNVAKPKKGQSVAVFGLGAVGLGAAEGARIAGASRIIGVDLNSKRFEEAKKFGVTEFVNPKEHNKPVQQVIAEMTNGGVDRSVECTGSV

SEQ ID NO: 3559 - protein, 573 aa, Nitrosomonas europaea ATCC 19718
MANTLPPTDRSCDISQPLERLSPDESLKAESDYLRGTIALGLLDRITSAVPGNDIKLMKFHGIYEQDDREIRDERRRQKLEPAFQFMIRVRLPGGICTTERWLKISELACAHGNETLRMTTRQTFQFHWVLKQNIVPLIRGLHEVLLDTVAACGDDSRGVMATVNPQFPALQAELAALAKTVSDHVIPKTRAYHEIWYGEERIASSEPEEPFYGQTYMPRKFKIGFVIPPNNDIDIYAQDLGYIAIIGENGKIAGFNVAIGGGMGRTDKAPHTYPRTASVIGFITPDRLISVTEAVMGVQRDYGNRADRSRARFKYTIDDKGLDWIKLAIEDRAGPLESARPYDFTSNADIYGWIESGDGFHHFTLFIENGRLNRDMLDKIAQIAHVHKGHFRLTPNQNLMIANVATADKPEIEALLRETGLIAFNERSVLRLNSMACVALPTCGLAMADSERYLPDLITKIEGILTRYNLQNEPITLRMTGCPNGCSRPFIAEIGLTGRAPGKYNLYLGGGFHGQRLNRLYRENIGEPAILETLNEVLGRYATERLPDEHFGDFTIRAGIIREVTEGRFSND

SEQ ID NO: 3560 - protein, 380 aa, Ralstonia metallidurans CH34
MYAAESALDHRTADPAPSGAPAAAPAETRTEAATRDLRRVPIHPDHWYPLAWSREVKAGQAHGVQFAGDPIVLVRTATGKIFALEDRCAHRQVPLHAGVVDGESIRCCYHGWTYDCSGRCIDVPYLGKERLPNGVRAYPCEERAGLIFVFPGNPALAGQQPLPEFASVADKHYKTRRFGREVKCHYSFMHENLMDMNHQFLHRRQMGMMRARSLGRRRGADFVEVDYTFSREGGKQPMGEALVFSKEGGEGNKDVMTVRTGYPYQTLKIRSGSGTLVMDLWIAYVPLDAAQRTNRTFGMLSIRRPGIPFALDLAWPLLVWFTERIFKEDRWIVEREQEAHDRQGEDWNHEVFPVIRDLRDLLRECGGRTVIPIQRLETQV

SEQ ID NO: 3561 - protein, 421 aa, Halomonas elongata
MQTQILERMESDVRTYSRSFPVVFTKARNARLTDEEGREYIDFLAGAGTLNYGHNNPHLKQALLDYIDSDGIVHGLDFWTAAKRDYLETLEEVILKPRGLDYKVHLPGPTGTNAVEAAIRLARVAKGRHNIVSFTNGFHGVTMGALATTGNRKFREATGGVPTQAASFMPFDGYLGSSTDTLDYFEKLLGDKSGGLDVPAAVIVETVQGEGGINVAGLEWLKRLESICRANDILLIIDDIQAGCGRTGKFFSFEHAGITPDIVTNSKSLSGYGLPFAHVLMRPELDKWKPGQYNGTFRGFNLAFATAAAAMRKYWSDDTFERDVQRKARIVEERFGKIAAWLSENGIEASERGRGLMRGIDVGSGDIADKITHQAFENGLIIETSGQDGEVVKCLCPLTIPDEDLVEGLDILETSTKQAFS

SEQ ID NO: 3562 - protein, 394 aa, Glycine max
  unsure (1)..(394): unsure at all Xaa locations
MNNVAERPLNKDVEDDDEDDGGGLEAWERTYAEDRSWEALQEDESGLLRPIDTTAIYRAQYRRRLRTLAASAATARIXKGLIRYLYIVVDLSKAASERDFRPSRMAVMGKQVEAFIREFFDQNPLSHVGLVTIKDGIAHCITELGGSPESHIKALMGKLECSGDASLQNALELVLGYLNQIPSYGHREVLILYSALSTCDPGDLMETIQKCKKSKIRCSVIGLAAEMFVCKHLCEETGGTYSVALDESHFKELILEHAPPPPAIAEYSTANLIKMGFPQRSAEGSVAICTCHEEAKTGGGYTCPRCKVRVCELPTECRVCGLTLISSPHLARSYHHLFPIVMFDEVTPSQNDSNHSFPNTCFGCQQSLLSQGKFLSTFPTCSILSCWPTYICQI

SEQ ID NO: 3563 - protein, 116 aa, Brassica rapa
WRKYGQKVTRDNPSPRAYFRCSFAPSCPVKKKVQRSAEDPSILVATYEGTHNHLGPNGSEGDVTSQVGSSTVTLDLVHSGQGTMQEVLVRQMASSLTKDSKFTAALAAAISGRLME

SEQ ID NO: 3564 - protein, 393 aa, Pseudomonas aeruginosa PAO1
MRYSDFTQRIAGDGAAAWDIHYRALARVEQGEEILLLSVGDPDFDTPAPIVQAAIDSLLAGNTHYADVRGKRALRQRIAERHRRRSGQAVDAEQVVVLAGAQCALYAVVQCLLNPGDEVIVAEPMYVTYEAVFGACGARVVPVPVRSENGFRVQAEEVAALITPRTRAMALNSPHNPSGASLPRATWEALAELCMAHDLWMISDEVYSELLFDGEHVSPASLPGMADRTATLNSLSKSHAMTGWRVGWVVGPAALCAHLENLALCMLYGSPEFIQDAACTALEAPLPELEAMREAYRRRRDLVIECLADSPGLRPLRPDGGMFVMVDIRPTGLSAQAFADRLLDRHGVSVLAGEAFGPSAAGHIRLGLVLGAEPLREACRRIALCAAELLGQA

SEQ ID NO: 3565 - protein, 312 aa, Zea mays
MTSPDTIRTAIGVIGNGTALVLFLSPVPTFIRIWEKGSVEQYSPIPYVATLLNCMMWVLYGLPAVHPHSMLVITINGTGMAIQLTYVALFLLYSAGAARRKVVLLLAAEVGFVGAVAALVLSLAHTHERRSMVVGILCVLFGTGMYAAPLSVMKMVIQTKSVEYMPLFLSLASLVNGICWTAYALIRFDLYITIPNGLGVLFAVAQLVLYAIYYKSTQEIIEARKRKADQIAMTGVVVDGGKTNNQAGAGQYAQARSQRQINYVAAGFYVFCDSICTLAACPSRPMEKKGGRKNVCRYMCSRRITLAHSWWG

SEQ ID NO: 3566 - protein, 381 aa, Vibrio vulnificus YJ016
MKTFILPDLGEGLAESEIIKWHVSVGDKVEVDQVILTVETAKATVDVPAPWAGTIITRHGNEGDVVNIGALLLEIEDGDVATNSDKKVQKREDAATVVGHVSNQMHQVKVDDFWIGGNQNHTTEKRVTALPSARLLAQKLGVNLEMVSGTGPSGLIMDHDVYDEAGKQRPGTEVLKGARRTMMTTMTESHLQVAAVTITEEALLEHWSSQEDITVRLVQAVVYACQQEPALNAWFDADTVTRCVHHTVNIGVAVDSAHGLYVPVMRHADEFSPDDIRSWINQTVSGIRERKIGREQLQHATITLSNFGAIAGIYATPVVSPPQVAIVGAGRIIEKVVLREGKAVAVKAMPLSITFDHRACTGGEAARFTKALAEHLRKPSV

SEQ ID NO: 3567 - protein, 248 aa, Populus balsamifera subsp. trichocarpa
MGRGRVQLKRIENKINRQVTFSKRRTGLLKKANEISVLCDAEVALIVFSHKGKLFEYSTDDSMEKILERYERYSYAERQLVATDLDSQGNWTLEYNRLKAKVELLQRNHRNYLGEDLDSMSLKELQNLEQQIDTALKHIRARKNHLMSQSISELQRKEKAIQVQNNMLVKQIKEKEKNDKALAQPAFWDLQDHGPNASSFLLSQPAGLPLPCLNIGGSHQEEAPEARRNELGHTLEPIYSFHLGGYGA

SEQ ID NO: 3568 - protein, 368 aa, Arabidopsis thaliana
MDPIKHISLPVLVLFLLLSVSAGQPGTPDQRHDPYAYSGSLSPAMAVVVVVVIAALFFMGFFTVYIRHCTGAVDGSVTPAGGARRRVTNATVARGLDAETIETFPTFVYSEVKTQKIGKGALECAICLNEFEDDETLRLLPKCDHVFHPHCIGAWLQGHVTCPVCRTNLAEQTPEPEVVVETDLEAQQQSAVPVPVVELPRVKFPRSHTTGHSVVLPGESTDRFTLRVPEELRKKIMANWKLNRSNSVFVLPRGGSSRSGKQVDRSRAKSDRWLFRKTPSFLWRNRDDGSIRLGGTGSVRGNSVTSPSGDSVRADRWAFLRNPSFLWRNTTPVPSPRVEVNNKDGEGTSSVQHIGTVGSTSGSLRLPV

SEQ ID NO: 3569 - protein, 210 aa, Arabidopsis thaliana
MIGQLMNLKATELCLGLPGGAEAVESPAKSAVGSKRGFSETVDLMLNLQSNKEGSVDLKNVSAVPKEKTTLKDPSKPPAKAQVVGWPPVRNYRKNMMTQQKTSSGAEEASSEKAGNFGGGAAGAGLVKVSMDGAPYLRKVDLKMYKSYQDLSDALAKMFSSFTMGNYGAQGMIDFMNESKLMNLLNSSEYVPSYEDKDGDWMLVGDVPWE

SEQ ID NO: 3570 - protein, 287 aa, Aeromonas hydrophila
MKGIILAGGSGSRLHPITRGISKQLLPIYDKPMIYYPLSVLMLAGIKDILIITTPEDSESFQRLLGNGEQFGINLQYTVQPSPDGLAQAFILGEEFIGQDSVCLVLGDNIFFGQAFGKQLQKAIANQEGATVFGYKVMDPERFGVVEFDEEFRAKSIEEKPVKPKSNWAVTGLYFYDNSVIEIAKSIKPSERGELEITSVNQAYLDRGQLKVEQLGRGFAWLDTGTHDSLIEASQFVQTVEKRQGFKIACLEEIALNNGWLSRDQIKAIGNSMAKTGYGKYLLSLIK

SEQ ID NO: 3571 - protein, 103 aa, Glycine max
MTSSVTTLALTLVLIVHLTPEIAEARHLNDQKPTDEMKYLFPPGLPFTGVPPLPSLFPPFPGNVPRFPFPLPSQSSPPAPLGPLPSFPGVNFPPLPLLTPPPE

SEQ ID NO: 3572 - protein, 885 aa, Azospirillum brasilense
METVRTTCPYCGVGCGVLASVSSDGTVGVAGDPDHPANRGKLCSKGTNLPDTLGLAERLLHPQVDGRRVAWDEAIAEVAKRLSDTIAKHGPDSVAFYVSGQLLTEDYYAVNKLAKGFLGTANIDTNSRLCMASSVAGHKRGFGADAVPVTYDDLDEADLVLLVGSNLAWCHPILNQRLLAAKHTRGTRIVVLDPRRTAAVDGADRHLPIRPGTDALLFNGLLVYLADNHLADNGLIDARFVAEHTAGLAEALEAARADAPSPAHVAACCGLPLAEVEAFYAEVATVRRTVTVYSQGVNQSSQGTDTVNAILNVHFLTGRIGAPGMGPFSVTGQPNAMGGREVGGLANQLAAHMGFEPESVDRLRRFWNAPRVADKPGLKAVDLFRAVEQGTVRAVWVMATNPAVSMPDAARVRRALAKCETVIVSDCVADTDTARLSHIRLPAAGWSEKDGTVTNSDRTISRQRAFRPLAGEARPDWWIVTQVARAMGFAAAFSFETPADVFREHAALSAFENGGTRAFDIGGLAGLSDAEFETLAPAPWPRRAGEGPTRRLFADGRFFTEDGRARFVPVASRPLPRSVEPGSLMLNTGRLRDQWHTMTRTGLSPRLSAHAPEPCLDLHPQDAAARGLTDGALVSLSTPVGTALARLRVTEAQRVGEAFLPMHWTDRFTASCVVGRLVDDLAVDPVSGQPDLKRMPVTLTPYPAAWTGFLIAREPVEPAHGGYWSRRAVPGGHLIELASEDALPAPETLAFGFAGATVDYSDAARGVLRRAWVTHDRLEACLFLSTSGALPSRGWLVELLSAEALDGAARRALLSGRSPVPTADEGRTVWSCFGVGVNRLIAAIQSQGLTTVQEVGAALRAGTNCGSCIPELKEILADAQRSHVA

SEQ ID NO: 3573 - protein, 185 aa, Xanthomonas campestris pv. campestris str. ATCC 33913
MSLNRLLVLVFAGLFSTAAVAAGTSVLDLDYRPLAGKAPINLNRSYGGKVVMVVNTASKCGFTPQYEGLEALNQRFGSRGFTVLGFPSNDFQGQEPGSEKQIQEFCTLTYGVKFPMFEKVHVLGAQATPLYQRLTRETGVAPGWNFHKYLIGRNGHVVAQFPSKVKPDDPQVLAAIERELKAPAR

SEQ ID NO: 3574 - protein, 293 aa, Streptomyces rochei
MAGDVVMFPGQGSQRIGMGKEVFDAYPQLCDRADEIVGHSLRELCLKDPDGRLNETSRTQEAVYFVSCLMYLAYAEEHGAEQVRCLTGHSLGLYPALFAAGVFDLFEGLEIVSRRGALMQEARDGAMVAVLGPRASEIDDHLARLEFFDVDVANYNSPEQVVLSALKPRLEELVPRLEETGHRCVWLPVSGAFHSRHMEPARLRFAQFLRDRTFTPPTKPVVSTTSGRTLGARHLLEEMVFQLVKPVRWWQTVTHLSRTGHKTFDEVGPGRVLTKLSAEILGDEPSPQAEPRK

SEQ ID NO: 3575 - protein, 364 aa, Magnaporthe grisea 70-15
MAATDYKFEGWLGDSPESANGKMRWGEFEPKKWTEDDVDIKISHCGICGSDLHTLSSGWGPTPYPCCVGHEIVGRAVRVGSNVKDIKVGDRVGVGAQARSCMSADCPECSIGRENYCSTKGQLINTYGSVYPGDEGKSYGGYATYNRTNAKFCIKIPDGVPSEYAAPLMCGGVTVWSPLKDNKCGPGKNVGIVGVGGLGHFAVLFAKAMGADKVVGVSRRESKRKEVMSLGADDYIATEDEKDWEKHHRRSLDLIICTVSHTGMPLDKYLMLLKPNGILINVGVPEGGALPNLNAFTLVINAVSVGGSLIGSPSEIREMLEFVAEHNIKPLIETRPMKEANQAILDMEHGKARYRYVLVNEDNE

SEQ ID NO: 3576 - protein, 443 aa, Rhodospirillum rubrum
MKQILALNAFDMSDAPTLSDSAQRLLAKRKALFGAASVLFYDKPLELVRAEGCWLFDEAGERYLDVYNNVPSVGHCHPHVVAAVADQLAKINTHTRYLNEAIHRYAERLVATLPPSLSNITFTCTGSESNDLALRLASHYSGGRGVIVTETAYHGNTAAVTEVSPSSARDHALAPHVRVVRAPDSYRVAPEALAARFAGDVAAAIADLADHGITLSALLVDSIFSSDGVYADPAGFLAEAVAVVHRHGGLFIADEVQPGFGRTGSALWGFQRHGVTPDIVTMGKPMGNGLPMGGVATRPEILDAFCAEVGYFNTFGGSPAAGAAGSAVLDVIEGEGLMANAEAVGAYLRESLGALAKRFPVIGDVRGAGLFDAVELVSDPEAKTPSPELASAIINGLRQRHVLIGAAGPFGNILKVRPPLCFTRDQVDILGAALEEVLTEIAP

SEQ ID NO: 3577 - protein, 298 aa, Arabidopsis thaliana
MYSAIRSLPLDGGHVGGDYHGPLDGTNLPGDACLVLTTDPKPRLRWTTELHERFVDAVTQLGGPDKATPKTIMRTMGVKGLTLYHLKSHLQKFRLGRQAGKESTENSKDASCVGESQDTGSSSTSSMRMAQQEQNEGYQVTEALRAQMEVQRRLHDQLEYGQVQRRLQLRIEAQGKYLQSILEKACKAFDEQAATFAGLEAAREELSELAIKVSNSSQGTSVPYFDATKMMMMPSLSELAVAIDNKNNITTNCSVESSLTSITHGSSISAASMKKRQRGDNLGVGYESGWIMPSSTIG

SEQ ID NO: 3578 - protein, 564 aa, Brassica juncea
MASTPKLTTTISSSPSLQILCRKLPTAINLPSSPTSRSLPKTLSHLSSLRLRAASVSNHRYYSSSSSSRRFSVRAQNDNGADSDRHYDFDLFTIGAGSGGVRASRFATSYGASAAVCELPFSTISSETAGGVGGTCVLRGCVPKKLLVYASKYTHEFEDSQGFGWKYDTEPSHDWSTLIANKNAELQRLTGIYKNILNNANVKLIEGRGKVIDPHTVDVDGKIYTSRNILIAVGGRPFIPDIPGREFAIDSDAALDLPSKPEKIAIVGGGYIALEFAGIFNGLGSEVHVFIRQKKVLRGFDEDVRDFVGEQMSLRGIEFHTEESPEAIIKAGDGSFSLKTSKGTADGFSHVMFATGRKPNTKNLGLENVGVKLAKNGAIEVDEYSRTSVPSIFAVGDVTDRINLTPVALMEGMALAKTLFQNDPTKPDYRAVPCAVFSQPPIGTVGLTEEQAIEQYGDIDVFTSNFKPLKATLSGLPDRVFMKLIVCANTNKVLGVHMCGEDSPEIIQGFGVAVKAGLTKADFDATVGVHPTAAEEFVTMRTPTRKIRKESSEGKASVEAKTAV

SEQ ID NO: 3579 - protein, 225 aa, Arabidopsis thaliana
MVMETESKFHVLAVDDSLFDRKMIERLLQKSSCQVTTVDSGSKALEFLGLRVDDNDPNALSTSPQIHQEVEINLIITDYCMPGMTGYDLLKKVKESAAFRSIPVVIMSSENVPARISRCLEEGAEEFFLKPVKLADLTKLKPHMMKTKLKKESEKPVAIEEIVVSKPEIEEEEEESSVIEILPLHQEIESEQLEPMLSSNKRKAMEEVVSTDRSRPKYNDITTSV

SEQ ID NO: 3580 - protein, 483 aa, Solanum tuberosum
MGKKLKYTKFQLRSNVVKPNICMSLTTDIAGEAKLKDLERQKKGDARTVVAIILGGGAGTRLFPLTKRRAKPAVPMGGAYRLIDVPMSNCINSGINKVYILTQFNSASLNRHIARAYNFGNGVTFESGYVEVLAATQTPGELGKRWFQGTAHAVRQFHWLFEDARSKDIEDVLILSGDHLYRMDYLHFVQSHRQSGADITISSLPIDDSRASDFGLMKIDDTGRVMSFSEKPKGDDLKAMAVDTTVLGLSPEEAKEKPYIASIGKVYVFKKDILLNLLRWRFPTANDFGSEIIPASTKEFCVKAYLFNDYWEDIGTIRSFFRANLALTEHPPRFSFYDATKPIYTSRRNLPPSAIDNSKIVDSIVSHGIFLTNCFVEHSVVGIRSRIGTNVHLKDTVMLGADYYETDAEIRSQLAEGKVPLGIGENTRIKDCIIDKNARIGKNVVIANSEGVQEADRSSEGFYMASGITVISKNSTIPDGTVI

SEQ ID NO: 3581 - protein, 200 aa, Picea mariana
MAGGIFDLEKQFAFYGAYHNNAINVLIHTIFVWPIFFTALVLGCFTPALGLLPFSPGAFPFQEYMILNLSFVVAVVYALFYIMLDKKAGTLAAALCLLCWVSSNSLAQRLGFSLAWKVVLVSQLVCWIGQFIGHGVFEKRSPALLDNLVQAFMMAPFFVLLEVLQKFCGYEPYPGFQKAVRAKVQVNIKEWRANKQKKSA

SEQ ID NO: 3582 - protein, 330 aa, Zea mays
  unsure (1)..(330): unsure at all Xaa locations
RNKMSNRATHWCYACRRPIRLRGQDIACPNCNDGFIQEISEMGGILNTYGLIEPDFEERRARRFGMMDAMSSLMRQRMEEMGRDGLFDIRGRQGTGTEYGRRPTAVPTLVFGGIPSPGVDSGDVNVVLRGGRRVGAAQPNFSSLVVGPSLEALFEQLLLQNNRQGPAPAPQSAIDSMPVVKINRRHLDDDPQCAVCKDKFEVGAEAREMPCKHLYHTDCIIPWLVQHNSCPVCRHPLPSQRSGSTSSARPSAYYNEAADPPGVTRADLEPAPRDGGRESQERRRSFSFLWPFGPSSSRSSSYQYEQNVDEPAVYDPNXGRIAYSEWHYDH

SEQ ID NO: 3583 - protein, 466 aa, Xylella fastidiosa Temecula1
MIKPRTPPGVLELLPREQIAFQRMLDVIRRNYERFGFLPVETPVFELSDVLLTKSGGETERQVYFVQSTGTLANAAESGATRLPELALRFDLTVPLARYVAEYEHVLAFPFRRYQIQRVYRGERAQRGRFREFYQCDIDVIGKQTLSIRYDAEVLAVIHAVFSELGIGDFQVQLNNRKVLRGFLESQGVRDGELQLAVLREVDKLDKRGVLDVRDTLIGQGFGIPAAQVENILTFVATRSTSHADALARLDALIQDSGPEAHDMLRQGVAELREVLTLVNVLGVPEHAYRLNFSIARGLDYYTGTVYETALINHPQIGSICSGGRYENLANHYTQSKLPGVGISIGLTRLFWQLRDAGLIDGIAESSVQAMVVLMDEATLDDALDIARRLRIGGINTEVQMEAKKLSKQFQYASRAGIRFVVLAGDDERARGVVAVKDLTREQQFEIPREELASTLQVELEQAKVM

SEQ ID NO: 3584 - protein, 1214 aa, Mycobacterium bovis AF2122/97
MYRKFRDDPSSVDPSWHEFLVDYSPEPTSQPAAEPTRVTSPLVAERAAAAAPQAPPKPADTAAAGNGVVAALAAKTAVPPPAEGDEVAVLRGAAAAVVKNMSASLEVPTATSVRAVPAKLLIDNRIVINNQLKRTRGGKISFTHLLGYALVQAVKKFPNMNRHYTEVDGKPTAVTPAHTNLGLAIDLQGKDGKRSLVVAGIKRCETMRFAQFVTAYEDIVRRARDGKLTTEDFAGVTISLTNPGTIGTVHSVPRLMPGQGAIIGVGAMEYPAEFQGASEERIAELGIGKLITLTSTYDHRIIQGAESGDFLRTIHELLLSDGFWDEVFRELSIPYLPVRWSTDNPDSIVDKNARVMNLIAAYRNRGHLMADTDPLRLDKARFRSHPDLEVLTHGLTLWDLDRVFKVDGFAGAQYKKLRDVLGLLRDAYCRHIGVEYAHILDPEQKEWLEQRVETKHVKPTVAQQKYILSKLNAAEAFETFLQTKYVGQKRFSLEGAESVIPMMDAAIDQCAEHGLDEVVIGMPHRGRLNVLANIVGKPYSQIFTEFEGNLNPSQAHGSGDVKYHLGATGLYLQMFGDNDIQVSLTANPSHLEAVDPVLEGLVRAKQDLLDHGSIDSDGQRAFSVVPLMLHGDAAFAGQGVVAETLNLANLPGYRVGGTIHIIVNNQIGFTTAPEYSRSSEYCTDVAKMIGAPIFHVNGDDPEACVWVARLAVDFRQRFKKDVVIDMLCYRRRGHNEGDDPSMTNPYMYDVVDTKRGARKSYTEALIGRGDISMKEAEDALRDYQGQLERVFNEVRELEKHGVQPSESVESDQMIPAGLATAVDKSLLARIGDAFLALPNGFTAHPRVQPVLEKRREMAYEGKIDWAFGELLALGSLVAEGKLVRLSGQDSRRGTFSQRHSVLIDRHTGEEFTPLQLLATNSDGSPTGGKFLVYDSPLSEYAAVGFEYGYTVGNPDAVVLWEAQFGDFVNGAQSIIDEFISSGEAKWGQLSNVVLLLPHGHEGQGPDHTSARIERFLQLWAEGSMTIAMPSTPSNYFHLLRRHALDGIQRPLIVFTPKSMLRHKAAVSEIKDFTEIKFRSVLEEPTYEDGIGDRNKVSRILLTSGKLYYELAARKAKDNRNDLAIVRLEQLAPLPRRRLRETLDRYENVKEFFWVQEEPANQGAWPRFGLELPELLPDKLAGIKRISRRAMSAPSSGSSKVHAVEQQEILDEAFG

SEQ ID NO: 3585 - protein, 459 aa, Nostoc sp. PCC 7120
MTFDYDLFVIGAGSGGLAASKRAASYGAKVAIAENDLVGGTCVIRGCVPKKLMVYGSHFPALFEDAAGYGWQVGKAELNWEHFITSIDKEVRRLSQLHISFLEKAGVELISGRATLVDNHTVEVGERKFTADKILIAVGGRPIKPELPGMEYGITSNEIFHLKTQPKHIAIIGSGYIGTEFAGIMRGLGSQVTQITRGDKILKGFDEDIRTEIQEGMTNHGIRIIPKNVVTAIEQVPEGLKISLSGEDQEPIIADVFLVATGRVPNVDGLGLENAGVDVVDSSIEGPGYSTMNAIAVNEYSQTSQPNIYAVGDVTDRLNLTPVAIGEGRAFADSEFGNNRREFSHETIATAVFSNPQASTVGLTEAEARAKLGDDAVTIYRTRFRPMYHSFTGKQERIMMKLVVDTKTDKVLGAHMVGENAAEIIQGVAIAVKMGATKKDFDATVGIHPSSAEEFVTMR

SEQ ID NO: 3586 - protein, 112 aa, Fragaria x ananassa
EITGHPAGITQLQRVGIGLVLSAVSMAVAGIVEVKRRNYALAHSPLAPGGISLFWLSFQYAIFGIADMFTLVGLLEFFYREAPAGMKSLSTSFTWLSLSFGYFLSSTLLRTH

SEQ ID NO: 3587 - protein, 299 aa, Candidatus Carsonella ruddii
MNLFNFVKKKIKISIDSADLNLIKKYNFDSLTSNPSLILLSFLNNSYNKILKFFFKNNNKKILLDPDTEISFYDYLLIFVVCNLIKFIKDKISIEIPARISYNYNKIIIYSQKILFLCDQFGINKNRILIKIPATDSGIKAASKLKLSGIECNLTLIFDLNQVKKCFDNEIYIISPFVGRISDIINCNFDSGVNFVKNIYNYKKNYNYKTKIMAASFRNLNQILNLLFCDYITISPIYFEKLLNKKINFNINDFQIFKINFNLNFLNLISSKLLINGIIQFEKDHNSLIKLIYFLINNF

SEQ ID NO: 3588 - protein, 368 aa, Mycobacterium tuberculosis CDC1551
MKTTAAVLFEAGKPFELMELDLDGPGPGEVLVKYTAAGLCHSDLHLTDGDLPPRFPIVGGHEGSGVIEEVGAGVTRVKPGDHVVCSFIPNCGTCRYCCTGRQNLCDMGATILEGCMPDGSFRFHSQGTDFGAMCMLGTFAERATVSQHSVVKVDDWLPLETAVLVGCGVPSGWGTAVNAGNLRAGDTAVIYGVGGLGINAVQGATAAGCKYVVVVDPVAFKRETALKFGATHAFADAASAAAKVDELTWGQGADAALILVGTVDDEVVSAATAVIGKGGTVVITGLADPAKLTVHVSGTDLTLHEKTIKGSLFGSCNPQYDIVRLLRLYDAGQLMLDELVTTTYNLEQVNQGYQDLRDGKNIRGVIVH

SEQ ID NO: 3589 - protein, 426 aa, Crocosphaera watsonii WH 8501
MGTIQTPPGTKDILPEEIGYWQYVETVATQILSRAMYYEIRPPIFEQTSLFERGIGEATDVVGKEMYTFRDRGDRSLTLRPEGTAGVVRAYLQNNLYAAGGVKRLWYFGPMFRYERPQAGRQRQFHQIGLELIGTGDPRADVEVIALATDILKTLGLQSLKLDINSVGDRNDRQNYREALVNYFLPYKEELDPDSQDRLEKNPLRILDSKAKRTKEINENAPSILEYLGDASKKHFDQVQQLLTDLGIEYNINPCLVRGLDYYTHTAFEIISDDLGAQATVCGGGRYDGLVEELGGNPTPAVGWAIGMERLIILLKKLQPSPQTSPDIYVVSRGEAAEAQGLLLAQKLRAEGLTVELDMSGSAFGKQFKRADRSGAIACLVLGEEEAVNQTVQLKWLQSKEQQTMTQSELFNQVGELKEQLNRHTK

SEQ ID NO: 3590 - protein, 111 aa, Citrus limon
METSVPYENDLNLKATELRLGLPGSDENEQQTRNNKRSLPDTPDDLDTKDKSDEAASVAKAQVVGWPPIRSYRKNSLQQKKNEGECAGIYVKVSMDGAPYLRKIDLKLYNG

SEQ ID NO: 3591 - protein, 255 aa, Streptomyces exfoliatus
MNDLSGKTVIITGGARGLGAEAARQAVAAGARVVLADVLDEEGAATARELGDAARYQHLDVTIEEDWQRVVAYAREEFGSVDGLVNNAGISTGMFLETESVERFRKVVDINLTGVFIGMKTVIPAMKDAGGGSIVNISSAAGLMGLALTSSYGASKWGVRGLSKLAAVELGTDRIRVNSVHPGMTYTPMTAETGIRQGEGNYPNTPMGRVGNEPGEIAGAVVKLLSDTSSYVTGAELAVDGGWTTGPTVKYVMGQ

SEQ ID NO: 3592 - protein, 132 aa, Triticum aestivum
  unsure (1)..(132): unsure at all Xaa locations
KNPLAKKGFFLEKGGEFPFFLGLQKGKDFLFFFFSPPTKKPGVIPGGIPGRANRKKCKEFQKLDFSVMGLVAEXFICKHLCEETGGSYTVALDESHFKELLLEHAPTRPAIAEYAAANLIKMGFPQRGAEEF

SEQ ID NO: 3593 - protein, 149 aa, Rhodobacter capsulatus
MLKRLLLLLVLATPVHAVQPDEVLSDPGLEARARQISQVLRCPVCQGENIDESNAGVSRDLRLAVRERLVAGDSDAQVIDYIKDRFGEYVLFEPERRGANLILYWIGPAVLVVALGGIFLWLRGRRREEEPVPVLSAEEEARLKDLLKD

SEQ ID NO: 3594 - protein, 458 aa, Oryza sativa
MASAPFAVSSSPAASAVAARSKVLRGGRSEARTGCRLGITRKNFGRVMMALAVDVSRFEGVPMAPPDPILGVSEAFKADQNDLKLNLGVGAYRTEELQPYVLNVVKKAETLMLEKGENKEYLPIEGLAAFNKATAELLFGADNPVLKQGRVATLQSLSGTGSLRLAAAFIQRYFPEAKVLISSPTWGNHKNIFNDAKVPWSEYRYYDPKTVGLDFEGMIADIQAAPDGSFVLLHGCAHNPTGIDPTPEQWEKIADVIQEKKHMPFFDVAYQGFASGSLDEDASSVRLFVQRGLEVFVAQSYSKNLGLYAERIGAINVVCSTPEVANRVKSQLKRLARPMYSNPPIHGARIVANVVGDPTMFGEWKQEMEEMAGRIKNVRQKLYDSLSAKDDSGKDWSFILRQIGMFSYTGLNKTQSDNMTDKWHIYMTKDGRISLAGLSLAKCEYLADAIIDSFHNVS

SEQ ID NO: 3595 - protein, 148 aa, Pisum sativum
MASKRILKELKDLQKDPPTSCSAGPVAEDMFHWQATIVGPADSPYAGGVFLVTIHFPPDYPFKPPKVAFRTKVFHPNINSNGSICLDILKEQWSPALTISKVLLSICSLLTDPNPDDPLVPEIAHMYKTDRTKYEATARSWTQKYAMG

SEQ ID NO: 3596 - protein, 390 aa, Rhodospirillum rubrum
MSASIITTTKGFATWAVHAGHGADATTGAVMTPIYATSTFAQSSPGKHTGWEYARSGNPTRAAFERAVAELEGGTNGYAFASGLAAEATILDLLDHGAHIIAGDDLYGGSWRLFEKVRARSAGLTVSYVDPSDLGAVAQAITPQTKLIWIETPSNPLLKIADLAALAALAKEHGLRTVVDSTFATPWIQRPLDLGIDIVVHSATKYLNGHSDVIAGVVVVKDPDLASQLGFLQNATGAVLDPFAAFLALRGLKTLALRMDRHSANGLAVAHALEGRAKVRRVLYPGLASHPQHALARQQMRAFGGMLTLDLESDLAGTVRFLEALKLFTLAESLGGVESLAGHPVTMSHGSIPVERRTALGITDTLVRLSVGIEDAGDLIADLDQALAVV

SEQ ID NO: 3597 - protein, 330 aa, Deinococcus radiodurans R1
MTMKQPVRVAVTGAAGQIGYSLLFRIAAGDMLGQDQPVILQLLEITPALKALNGVVMELRDGAFPLLADVITSDDPMVAFKDADYALLVGAMPRKAGMERGDLLGANGGIFKPQGEALGAVASRNVKVLVVGNPANTNALIAQQNAPDLDPKCFTAMVRLDHNRALSQLAEKTGAAVSDIKNVTIWGNHSSTQYPDLSQATVNGKPALEQVDRTWYENDYIPTVAKRGAAIIEARGASSAASAASAAIDHMHDWALGTKDGEWVSMGIPSDGSYGIPEGLIYGFPVRVKDGKYEIVQGLDVSDFSRGKMDATAQELEEERDEVRKLGLVK

SEQ ID NO: 3598 - protein, 429 aa, Anabaena variabilis ATCC 29413
MSNIVDTAIEAIVAREILDSRGRPTIEAEVHLLSGAVGLAQVPSGASTGTFEAHELRDKDKSRYGGKGVLKAVHNVNEVLAPKLIDLDAINQELIDRTMIALDGSGNKSNLGANAILAVSLAAARAGAASLGIPLYRYLGGPLANLLPVPLMNVINGGAHAANNVDFQEFMIVPVGATSFREALRWGAEVFATLSEVLHDKGLLTGVGDEGGFAPNLESNQVALELLVAAIEKAGYKPGEQVALALDVAASEFYKEGQYVYDGRPHAPTEFIDYLGQLVDQYPIVSIEDGLHEEDWQNWQLLTQKVGSRVQLVGDDLFVTNATRLQKGIQEKAGNAILIKLNQIGSLTETLETIDLGTRNGFRSVISHRSGETEDTTIADLAVATRAGQIKTGSLCRSERVAKYNRLLRIEDELGDRAVYAGAVGLGPK

SEQ ID NO: 3599 - protein, 182 aa, Schizosaccharomyces pombe
MASITRLDAVSPYLIRRFKNDLRALDAVKQSNCVYVGNLSFYTTEEQIYALFSKCGEIRRIIMGVDRFTKTPCGFCFVEYFENQDALDSLKYISRTSLDERIIRADLDHGYEEGRQYGRGASGGQVRDEMREEFDPGRGGYAKNRQPTSSRQLANYSGISSAPLGSSLELQSNPRYNRWKKN

SEQ ID NO: 3600 - protein, 295 aa, Zea mays
  unsure (1)..(295): unsure at all Xaa locations
RGRLSRGQYRNPKEFAEDVRLTFHNAMTYNPKGQDVHFMAEQLSGIFEAQWPEIEAEVNXPCIGPPLPKKFPPPPIDLHFLERSDSMRHHMALDTNSRPISHTPTYTRTPSMKKPRAKDPNKRDMTIDEKRKLSENLQNLPPEKLDAVVQVIKNKNLSVMQHDDEIEVEIDSMDAETLWELDRFVANYKKNLSKQKRKAERAMLARQDAELRAQRLIQQPQPTPVPQEPVGEKSLKQVAKGEQLPTSASEKNDENRQNVSGSSNSSSSSSDSGSSSSDSDSDSSSSDGSDAANSS

SEQ ID NO: 3601 - protein, 51 aa, Escherichia coli
YASLEEQNNDALSPAIRRLLAEHNLDASAIKGTGVGGRLTREDVEKHLAKA

SEQ ID NO: 3602 - protein, 586 aa, Medicago sativa
MCGILAVLGCSDDSQAKRVRILELSRRLKHRGPDWSGLHQHGDNYLAHQRLAIVDPASGDQPLFNEDKSIIVTVNGEIYNHEDLRKQLPNHKFRTQCDCDVIAHLYEEYGENFVDMLDGIFSFVLLDTRDNSFIVARDAIGVTSLYIGWGLDGSVWIASELKGLNDECEHFEVFPPGHLYSSKDREFRRWYNPPWFNEAVIPTTPYDPLVLRNAFEKAVIKRLMTDVPFGVLLSGGLDSSLVAAVTARYLAGTKAAKQWGAKLHSFCVGLKGAPDLKAGREVADFLGTVHHEFQFTIQDGIDAIEDVIYHTETYDVTTIRAATPMFLMSRKIKSSGVKWVISGEGSDEIFGGYLYFHKAPNKEEFHQETCRKIKALHRYDCLRANKSTYAWGLEARVPFLDKEFIKVAMDIDPEYKMIKHEEGRIEKWILRKAFDDEENPYLPKHILYRQKEQFSDGVGYGWIDGIKDHAAKHVTDRMMLNASHIFPFNTPLTKEAYYYRMIFERFFPQNSARLTVPGGASVACSTEKAIEWDASWSSNLDPSGRAAFGVHNSAYENQVNSVAKTVEPEKIIPKMEISNLGVAIQS

SEQ ID NO: 3603 - protein, 151 aa, Picea mariana
KKAKEKGVSLLLPTDVVIADKFAADANSKVVPASDIPDGWMGLDIGADSIKTFSEALDTTKTVIWNGPMGVFEFDKFSLGTTSIAKKLAELSGKGVTTIIGGGDSVAAVEKVGVAEKMSHISTGGGASLELLEGKTLPGVLALDEAVPVTV

SEQ ID NO: 3604 - protein, 428 aa, Chlamydia muridarum
MSNVLPKGVFDIFPYVTNSKNLWRNSFLWKTVEHAAHRICNLYGFDEIRTPVFEKTETFLRVGEHSDIVKKEVYTFLDKKGRSLTLRPEGTAAVVRALLDHSADMRKDNKIYYILPMFRYERQQSGRYRQHHQFGLEAIGVRHPLRDAEVLSLLWDFYAAVGLKHMQIQVNFLGGRKTRARYDEALREFFRKDLDKLSTLSQERFHANLLRILDSKEPEDQAFIEQAPSILDYVDDQDLNYFDSVLAELKVLGIPYKINPRLVRGLDYYTDLVFEAVTVVGDHSYALGGGGRYDELVAQSGGPAMPAFGFGVGLERVIQTLLEQGAALPTAPRRLRLIPMDESADAFCFSWAKHLRHLGVATEVDWAHKKPKTALKDAADQQVGFVCFVGEQELSTKQFIVKDMSLHQSFSGAQQDVEQRLVYEVQNA

SEQ ID NO: 3605 - protein, 297 aa, Candidatus Carsonella ruddii
MNLLNYLYINKKISIDSADLNLIKKYKFNSITSNPTLILKSFLNKTYNLLLNLFFYKNNKKILLDSDIQISLYDKILILIVGNLIPFINDKISIEIPARISFNYNLIIIYSKKIIFLCNKYGINIKKILIKIPGTDSGIKAAKKLKEIGIETNITLIFDINQVKKCLDYGVYIISPFVGRISDSIFCKYDSGVNFVKNIFIYKNNNNYKTKIMAASFRNINQILNLTFCDCLTISPIYFSKLLKFNLKLLFTNNIKKSIKINFLNKHSSKLIINGINIFDKDHKKFINIISTIINNL

SEQ ID NO: 3606 - protein, 390 aa, Nostoc sp. PCC 7120
MQFAKRLEKIPPYLFAEINRKREALIAKGVDIINIGVGDPDKPTPAHILQAMREAIDDASNHNYPPYEGTQEFREAAVEWMERRFGVMDLNPNTEVVSSIGSKEAIHNTFLAFVEAGDYTLIPDPGYPVYRTSTIFAGGEAFSMPLKAENKFLPDLDLIPEEVARKAKMLWINYPNNPTGALATLEFFEELVALCQQYSILLCHDHAYSEMAYDGYKPPSVLQIPGAKDIAIEFHSLSKSYNMTGWRIGFAVGNAYAIKGLSQVKTNVDSGVFKAIQKAAIAAYATDEVELQAVMSVYQSRRDIIVKGLQSLGWPIEPPKATLYVWVPVPPGYTSTEFTTLLLDKCGIVVPPGVGYGASGEGYFRVALTISDERLHEAIQRMQDAGIRYA

SEQ ID NO: 3607 - protein, 159 aa, Prochlorococcus marinus str. MIT 9313
MSIPELIETATGWLAWSGLALSLMTLIAFLVRWGQRFRLVGVTSFNLLLLASCWAFGVSYTPPLKVEGALVVPVVFDNSTDLVVAQVPDDFPDEAVEATLQQLAGNIHRGGYNGSEVHVRLRRLESVGEGVSQPVILGEVIRDLRQNITLPLAEKSDAG

SEQ ID NO: 3608 - protein, 113 aa, Glycine max
TRNGRGSGKNSAEPTTERAPTPEQHRQKGGPGRKARNLHRQTRKHQNGIHTDNATENREDKGHGTTLTTGNGTDPGSEHKPMTSGLHRPDDTPIKDPGARKGAQNRHNPQDLA

SEQ ID NO: 3609 - protein, 471 aa, Acinetobacter sp. ADP1
MPRKKEVVSGNFVRYDAVILGSGPAGEGAAMKLAKSGKRVAIVDIREQLGGNCAHVGTIPSKALRQTVSSIIRYQRDPMFQKVGEWKKFTMKQVLSHAHRVIQQQVATHTRFYDRNNIDVFYGRAYIQDQNTVLVFTPEGIKESIIFEQLVIATGSRPYQPQGLDFKHKRVFDSDKILDLDYPIHKIIIYGAGVIGCEYASIFIGLNHKVDLINTQHKLLSYLDDEIADALSYHLREQGVLIRHNEQIDHLETHDDYVVLHLQSGKKIKADAILWCNGRSGNTDGLGLENVGLKPNGRGQLAVNEKYQTEVENIYAAGDVVGWPSLASAAYDQGRCAGANMSGEENVKPVTDIPTGIYTIPEISCFGKTEQQLTEEKIPYEVGQSSFRHLARAQITGDTVGELKILFHRDTLEILGIHCFGNNASEIIHIGQAVMQSPNNSLKYFMETTFNYPTMAEAYRVAALNGLNRLF

SEQ ID NO: 3610 - protein, 391 aa, Rhodospirillum rubrum
MIPPGNAIFAAAGASVFETMSQLAHEHGAINLGQGFPEALEPPEVIEAAARALRDGPHQYPSAWGVPALRQAVAEANERFWGLATDPTREVLVTSGATEALAACFLGLLNAGDEVIVLQPAFDCYQAQIRRAGAVAVGVALSAPDWTLPRAALAAAITPRTRAIVLNTPMNPCGKVFDGPELDFIAELLIAHDLVAICDEVYEHLTFEDRAPLPLMTRPGVRARCLRIGSAGKTFSVTGWKIGYVSGDAALLAPVARAHQVTTFSTPPFLQTAVAHGLRLADGYFDGLRATLRTRRDLLSRGLTEAGFEVLGCQGTYFLLAGTDGAEDDVGFCRRLVEEAGVTAIPLSGFFTPAGRRPLVRFCFAKRLETLEGGIARLVAWRGGQRWRRAS

SEQ ID NO: 3611 - protein, 194 aa, Saccharomyces cerevisiae
MVTSNVVLVSGEGERFTVDKKIAERSLLLKNYLNDMHDSNLQNNSDSDSDSDSETNHKSKDNNNGDDDDEDDDEIVMPVPNVRSSVLQKVIEWAEHHRDSNFPDEDDDDSRKSAPVDSWDREFLKVDQEMLYEIILAANYLNIKPLLDAGCKVVAEMIRGRSPEEIRRTFNIVNDFTPEEEAAIRRENEWAEDR

SEQ ID NO: 3612 - protein, 205 aa, Petunia x hybrida
MGRKKVEIKLIQDKNSRQVTFSKRRKGLIKKAKELSILCDADVAVVVFSNRGRLYDFSSNNSLTEIVQRYHSHVEAEKEISAEASDAEQSKYASIMTIGEMLQTIQRQLEEPDVDDLNVTDLVHLENQIQTALMEARSRKTHLMMESLKSLHEKENLLREENRILADKISMTTNTREVNGMDLDFTNLATIQPIGEQQRATLNFF

SEQ ID NO: 3613 - protein, 474 aa, Campylobacter jejuni subsp. jejuni NCTC 11168
MKKLTNDFGNIIADNQNSLSAGAKGPLLMQDYLLLEKLAHQNRERIPERTVHAKGSGAYGEIKITADLSAYTKAKIFQKGEVTPLFLRFSTVAGEAGAADAERDVRGFAIKFYTKEGNWDLVGNNTPTFFIRDAYKFPDFIHTQKRDPRTHLRSNNAAWDFWSLCPESLHQVTILMSDRGIPASYRHMHGFGSHTYSFINDKNERFWVKFHFKTQQGIKNLTNQEAAELIAKDRESHQRDLYNAIENKDFPKWKVQVQILAEKDIEKLGFNPFDLTKIWPHSFVPLMDIGEMILNKNPQNYFNEVEQAAFSPSNIVPGIGFSPDKMLQARIFSYPDAQRYRIGTNYHLLPVNRAKSEVNTYNVAGAMNFDSYKNDAAYYEPNSYDNSPKEDKSYLEPDLVLEGVAQRYAPLDNDFYTQPRALFNLMNDDQKTQLFHNIAASMEGVDEKIITRALKHFEKISPDYAKGIKKALEK

SEQ ID NO: 3614 - protein, 550 aa, Tropheryma whipplei TW08/27
MNILRKASLWIENDPVAITRLEMRRLLAESEKTGDVRELEERLSKTLEFGTAGLRAPQGAGFNRVNAVVTAQAANALSQFLLEENRGRTLVIGYDGRYNSQLWARNTARIASSYDITALIMPRALPTPLLAFAVRQLGAAAGVMVTASHNPREYNGYKVYLGGEDKGAQIPDTAAAKIAKNLRDEVAYSDIPMKDSYGILDEEIIEAYLSRTAKAIKRQFGSPKADLKICHTAMHGVGHEIFVRLMEKLGFHNLVFVEEQKMPDPAFPTLPFPNPEEKGALDLAFETARLAECDIIIANDPDADRVAVAHPDGKVFTGNEIGALLGVEIARMQRGHGVLSNSMVSSPIMRRIAETYGMQHVETPTGFKWVARVPDICFGFEEALGYMIHPELVRDKDGLSAGAAIATIAASQKAQGRSLRDCLDDLQSKLGYFRSTQYAVRMASLDSVQAVMQNLRAESLNKIGRFRVTKYRDLLFGSPPVDLLEFNLGQDIDDLFGRLIVRPSGTELKLKCYIDSVAKTPDGAEQLLSELTYACKNLLCETSRRGGAEN

SEQ ID NO: 3615 - protein, 328 aa, Oryza sativa
  unsure (1)..(328): unsure at all Xaa locations
MGGGGGAEEELTAQETALYDRQIRVWGVDAQKRLSKAHVLVCGMNGTTTEFCKNIVLAGVGSLSLMDDHLVTEDDLNANFLIPHDESIYGGRSRAEVCCESLKDFNPMVRVAVEKGDPSLIDGEFLDKFDIIVVSCAPIKTKLLINDNCRKRSKHIAFYAIECKDSCGEIFVDLQNHSYVQKVXGEPKPKELAYPSLQEAISVPWKNLPRKTTKLYFAMRVLENYESSEGRNACEASLADRPAVLALRKDMCDKMSLSESQIPTALLERLLAAGKKQHPPVCAILGGILGQEVIKSISGKGDPIKNFFYYDAADGKGIAEDIPPLSSD

SEQ ID NO: 3616 - protein, 465 aa, Tropheryma whipplei TW08/27
MSVKKNHKIVVIGGGPGGYSAALSGALLGADVVLIENQAVGGSATLTDVVPSKTLIASAERAVFVAQGADFGIRFQNCVSADIGHINRRIMDLTRAQSADMFSTLTGAGVRVVYGHAALDGPNRVLVSVSGQEKYEFFANTVVVATGSSPRVLPNAIPDGKRILTWKQLYTLEQVPEHIIVVGSGVTGAEFASAFRNLGSEVTLVSSRDRVLPGGDEDAADLIQEVFINSGMKLLNRARAQAAAACNGGVVVTLTDGTEVRGTHCLMAVGSVPNTSGIGLETANIALNPAGRITVNRVACSSVPGVYAAGDCSDFLPLASVAEMQGQVAVYHAMGENANPIELKNLASTVFTTPEIATVGRSEKAIDKARATALKVDLATNSRAKILGIKTGFVKMIVSRETGTVLGGVVVAPNASDLIFPISVAVQNRLSADQLSQSFAVYPSLTISLWHAARASHVRTDSASP

SEQ ID NO: 3617 - protein, 313 aa, Pseudomonas syringae pv. syringae B728a
MTSKLDQLKKFTTVVADTGDFGAIKSLEPEDATTNPSLLLKAASDANNAKMLGEAFDGSKGDIGLACDRFAVAIGQEILKVVPGRVSTEVDARLSFDTNALIERSERLIGLYDAAGIKRDRVLIKLAATWEGIRAAEKLEKDGIQTNLTLLFSFAQAVACAEAGVFLISPFVGRIYDWYKKSTGTDYTGAEDPGVQSVTRIYNYYKANDFKTVVMGASFRNLNQIEQLAGCDRLTISTDLLKKLAEDTGTLERKLTPDKAGEKRSDTVKNLTESQFRWASNEDAMATEKLAEGIRQFARDQEKLEALLSAKKA

SEQ ID NO: 3618 - protein, 423 aa, Chromobacterium violaceum ATCC 12472
MAQKYQAVKGMNDVLPAESYQWEYFEEALRKLLADYGYQNIRTPIVEGTPLFVRSIGEVTDIVEKEMYTFVDSLNGDSLTLRPEGTAGTLRAVVEHNLLYNATPKLWYMGPMYRHERPQKGRYRQFHQVGVEALGLAGPDIDAEIIAMTADLWRRLGISQYVRLEINSLGNAEERAAHREALIAYLERHVDILDEDGKRRMHTNPLRVLDTKNPALQEMANAAPKLSDYLGEESRAHYEGWKAMIAALGIEYIENPRLVRGLDYYNRSVFEWVTSELGAQGTICAGGRYDGLIEQLGGKAASGIGFGMGMERVLLLLQDKGLLPAQRSVDVFLVNQGEGAGLYSMKLAQTLRAAGYSVVQHLGEASFKSQMKKADGSGAEFALIVGENEIQAGQVVVKALRADVAQQTVAADAVLATLATLKA

SEQ ID NO: 3619 - protein, 531 aa, Schizosaccharomyces pombe
MGFKRGKNFTLVMLIFVSMAGWMFGADTGSIGGVTSMRDFRERYADRYDPITDQYSLSSARQGLLTGMVNVGSLFGCIISSPIADRFGKRLSIIGFCAVYIIGIIVQVTAVPSWVQIMVAKIWTGIGIGALSVLAPGYQSETAPPSIRGTVVVTYQLFVTGGIFIAACINMGTHKLHKTAQWRVSIGINLLWGIITMIGILFLPESPRYLIQVGKDEEAVRVLSESAELFPDSEEVQNEYHRLKSSIDEEFAGGPCSWASIFGKDIRYRTFLGMFVMSLQQLTGNNYFFYYGFSVMQGAGINSPYLSAMILDAVNFGCTFGGMYVLERFGRRNPLIIGGIWQSICFFIYSAVGSRALYHKNGTSNTRAGAVMIVMACLFIFGFAQTWAPAAYVIVGESYPVRYRSKCAAVATASNWLWNFLISFFTPFIQASIGFKYGYVFASCNLTGAIVIFLFAKETKGLTLEEINELYMSVIKPWESGNFKLNYSEQKKVEKEKSRKGGARGESVEYVERASNTDSSPQYSSHEEDYA

SEQ ID NO: 3620 - protein, 316 aa, Streptomyces aureofaciens
MTRTAFVFPGQGSECAGLGRELLALRPDLGDTYYRTADDLLGIPLARICRDGSPRDFEDPAVAQPAVFLTSLAVLEVLRGEGLEPDAVAGHSLGEYAALVAAGVLEWTEALWLVRLRAELVATAGDRIGSATVAVIGPPRSDLVRLCAEARAATGQVVEVAGDNEPRQTVVSGQAAAVERVAREAGAAGARVERLRTGGPFHSSLLGEAAAEFTETLIATEFRDPAVPLVSGVTGGWVTTAAEAAVTLRGQLTSPVRWTEAVATLAGSGVDRYVEVGPGRVLTGLVRRILPGARVHPTCAADRLLGAVDALTAATV

SEQ ID NO: 3621 - protein, 288 aa, Neisseria meningitidis MC58
MKGIILAGGSGTRLYPITRGVSKQLLPVYDKPMIYYPLSVLMLAGIRDILVITAPEDNASFKRLLGDGSDFGISISYAVQPSPDGLAQAFIIGEEFIGNDNVCLVLGDNIFYGQSFTQTLKQAAAQTHGATVFAYQVKNPERFGVVEFNENFRAVSIEEKPQRPKSDWAVTGLYFYDNRAVEFAKQLKPSARGELEITDLNRMYLEDGSLSVQILGRGFAWLDTGTHESLHEAASFVQTVQNIQNLHIACLEEIAWRNGWLSDEKLEELARPMAKNQYGQYLLRLLKK

SEQ ID NO: 3622 - protein, 621 aa, Dunaliella salina
MSYHSIDGIGNSRHPLMQLRSVLVGGVKIASLDVWKTQLLLFSHTVSQPSHNTNPVLTDGPGAMGEPAKADEHRDSNGENGNGKPAPGQLFPDYRRTVALKYVSRGLQVAFSYISLTMLATPFVVFGSLELFNLYRQGELQKLVEVAKQTEMTFDMITVMGCIAMMVVGLLLYFFLRKNPVYLVDFSVFRANDSSWNATYKRFMNGSFMTRRFTEDSLNFQKKILERSGLGQDTMLPPAMQTMCSLDWKTLELSHDPAQTLASVAPRPGMKLAREEFEVVIFSTVQDLLNKTGVRAKDIGILVVNCSLFNPTPSLCAMVINHFKMRSNIISYNLSGMGCSASPIAIDLANQMLQLYSGTYALVISTENITQNWYFGNDRSMLLPNCLFRVGGAAMLLSNRRRDGLRAKYELQHVVRTHLGAKDQAYGCIFQTEDDEDNVGVRLTKELMAVAGEALKVNVTTLGPLVLPISEQALFIFNLIVRKTFNKKLKPYIPDFKLAFDKICIHTGGRAVIDEIEKQLRLTPEMVEPSRAVLFRYGNVSSSSIWYVLAYMESIEGVKRGDRIWQLGFGSGFKCNSAVWRSKRRIKNMHYAWEGFNLQEMRDHLASLAIHKARHLEQKPK

SEQ ID NO: 3623 - protein, 297 aa, Candidatus Carsonella ruddii
MNIINYLYNNKKISIDSADLNLIKNFKFNSITSNPTLILKSFLNKTYNKILNLFFIKNNKKKIIDSDKEISLYDKILIFIVGNLIPYINDKISIEIPSRISFNYNLIIIYSKKIIYLCEKYGINKSFILIKIPGTDSGIKAAKKLKEIGIEVNITLIFDINQVKKCFDYGIYLISPFVGRISDNIFCKYDSGVNFVKNIFIYKNNNNYKTKIMAASFRNINQIINLRFCDCLTISPIYFNKLSKYNLKILLNNNFNNLVKFNFYNKHSSKLIIEGLKSFDKDHKRLINLLSTIINNL

SEQ ID NO: 3624 - protein, 322 aa, Fusobacterium nucleatum subsp. nucleatum
MEKKLAILTSGGDAPGMNAAIRATAKIAEYYGFEVYGIRRGYLGMLNDEIFPMTGRFVSGIIDKGGTVLLTARSEEFKEARFREIAANNLKKKGINYLVVIGGDGSYRGANLLYKEHGIKVVGIPGTIDNDICGTDFTLGFDTCLNTILDAMSKIRDTATSHERTILIQVMGRRAGDLALHACIAGGGDGIMIPEMDNPIEMLALQLKERRKNGKLHDIVLVAEGVGNVLDIEEKLKGHINSEIRSVVLGHIQRGGTPSGFDRVLASRMAAKAVEVLNKGEAGVMVGIEKNEMVTHPLEEACSVDKRKSIEKDYELALLLSK

SEQ ID NO: 3625 - protein, 529 aa, Glycine max
  unsure (1)..(529): unsure at all Xaa locations
SEVTAMASACVTLKSNTHLANSEKGFLGERIKGGFNNSALVMNQLAIRSRSHKRVKHGVGVVSAVLTSNNAKESLTLQVPSFLRRRADPKNVISIILGGGPGTQLFPLTKRAATPAVPVGGCYRLIDIPMSNCLNSGINKIFVLTQFNSASLNRHIARTYFGNGINFGDGIVEVLAATQTPGEAGKNWFQGTADAVRQFTWVFEDAKHTNVENVLILAGDHLYRMDYMDLVQSHVDRNADITVSCAAVGDSRASDYGLVKVDDRGRIIQFSEKPNGADLKAMQVDTSVLGLPPHEAKRSPYIASMGVYVFKTDVLLKLLKWRYPTSNDFGSEIIPAAVRENNVQAYFFXDYWEDIGTIKSFYDANLALTEENPMFKFYDPKTPIYTSPRFLPPTKIDKCRIVDAIISHGCFLRECTVQHSIVGERSRLDYGVELQDTVMTMGADYYQTEXEIASLLAEGKVPIGIGRNTKIRNCIIDKNAKIGKDVIIANKDLSLXGVQEADRPEDGFYIRSGITIIMEKATIEDGTIV

SEQ ID NO: 3626 - protein, 297 aa, Candidatus Carsonella ruddii
MNLLNYLYKNKKISIDSADLNLIKNYKFNSITSNPTLILKSFLNKTYNLLLNFFFYKNNKKILLDSDIQISLYDKILIFIVGNLIPFINDKISIEIPARISFNYNLIIIYSKKIIFLCNKYGININKVLIKIPGTDSGIKAAKKLKEIGIETNITLIFDINQVKKCLDFGVYIISPFIGRISDSIYCKYDSGVNFVKNIYTYKNNNNYKIKIMAASFRNINQIINLTFCDCLTISPIYFLELLKFNLKLLFKNKIKKTLKINFFNKYSSKLIIEGIKSFDKDHKKLINIISTIINNL

SEQ ID NO: 3627 - protein, 406 aa, Arabidopsis thaliana
MSLSPRVQSLKPSKTMVITDLAATLVQSGVPVIRLAAGEPDFDTPKVVAEAGINAIREGFTRYTLNAGITELREAICRKLKEENGLSYAPDQILVSNGAKQSLLQAVLAVCSPGDEVIIPAPYWVSYTEQARLADATPVVIPTKISNNFLLDPKDLESKLTEKSRLLILCSPSNPTGSVYPKSLLEEIARIIAKHPRLLVLSDEIYEHIIYAPATHTSFASLPDMYERTLTVNGFSKAFAMTGWRLGYLAGPKHIVAACSKLQGQVSSGASSIAQKAGVAALGLGKAGGETVAEMVKAYRERRDFLVKSLGDIKGVKISEPQGAFYLFIDFSAYYGSEAEGFGLINDSSSLALYFLDKFQVAMVPGDAFGDDSCIRISYATSLDVLQAAVEKIRKALEPLRATVSV

SEQ ID NO: 3628 - protein, 602 aa, Triticum aestivum
  unsure (1)..(602): unsure at all Xaa locations
MSAAVGGAEFHGFGGAAQLPRSRMLGRPVRVAPPGATPAGGGGPSAASIRAVSTPLKKDAKEVKRSKVEXIIKETSNGFRYPLNEELVSEAPNVNDTAVQLIKFHGSYPAHQAARKXQQSDREVRGQKNYSFMLRTKNPXLSTVIKNMGSTLGACGDLNRNVLAPAAPYVRKDILFAQETAENIAALLAPQSGAYYDLWVDGEKIMSAEEPPEVTKARNDNSHGTNFPDSPEPIYGTQYLPRKFKIAVTVAGDNSVDILTNDIGVVVVSDSAGEPVGFNLYVGGGMGRTHRIETTFPRLADPLGYVPKEDILYAIKAIVVTQRENGRRDDRRYSRMKYLLDSWGIDKFRAEVEKYYGKKFEDFHPLPEWQFNSYLGWQEQGDGKLFYGVHVDNGRLGGQAKKTLREIIEKYSLDVSITPNQNLILCGVDQAWREPITAALAQAGLLEPKDVDLLNITSMACPALPLCPLAQTEAERGILPILKRIRAVFNKVGIKDEESVVVRITGCPNGCARPYMAEVGFVGDGPNSYQIWLGGTPNQTTLAETFMNKVKLQDIEKVLEPLFSYWNSTRQEGESFGSFTNRMGFEQLKEVVNKWEGSASAA

SEQ ID NO: 3629 - protein, 161 aa, Nostoc punctiforme
MSNTISDIAVKTINGEDKQLKDYTGKVLLIVNVASYCGYTSQYEGLEKLNQKYREQGLRILGFPCNDFGAQEPGSNEEIVQFCTSKYSVTFELFDKIHAKGPQQHPLYERLTKAVEPTGTIAWNFEKFLVNKKGEVTARFNSSVQPNSPELIAIIEKELAK

SEQ ID NO: 3630 - protein, 285 aa, Nostoc sp. PCC 7120
MTVKHLAIAPEGKKSLRLSWTNVAFFTTIHALALLAPWFFSWSALGLLLFLHWLFGSIGICLGYHRLLSHKSFQVPKWLEYAIATIGALAMQGGPIFWIGGHRQHHAHTEDVYLDPYSSQRGFWWSHMLWILYPRSEFFDYEIYQKYAPDLARQPFYRWLDRYFLLLQIPFGLMLYAIGGWSFVIYGVVLRAVLLWHSTWFVNSATHMWGYRTFNADDNARNLWWVSIVTYGEGWHNNHHTYPNVAKAGFQWWEVDVTWWSIKLLQTLGLAKKVVLPPSQRMNQG

SEQ ID NO: 3631 - protein, 486 aa, Nostoc punctiforme
MNKHIRPWQRLLALAIGSMVFAVFAPTIVQATDPPTVQSLSETTTKLQISIDTIWVLITGFLVFFMQTGFAMLEAGLNRQRGVVNALLENFINAAVTILVWWGIGFGIAFGTSAGGLVGIDTFFLSQLPGADGSYILAAPGSTAAINTYTLFFFQFAFAATATTIATGSMAGRTDFIGDLIYSAIMGAIAYPIVVHWVWNSDGWLSKLSYHDFAGSSVVHTVGGWTALVGAYLLGSRPGRPAWGTLPPAHNLGLATLGTMILWFGWYGFNPGSTLSTGNTGLIGLVTVNTTLSAGAGALSAIIFQYTRKGKWDLVYSLNGSLAGLVAITAPCAYVAPWASVLIGLTSGILVTVGMDLIESVHIDDPVGAFAVHGINGMMGTLSVGFLGQAELTLNQKAGLFLGGGFELLGIQLLGVVAIAVFTVAFSFLMFGGLKAVGHLRVNSEADRIGIDAYEHGASVWSDVYAIEKKEINCAETTEIEALDSE

SEQ ID NO: 3632 - protein, 699 aa, Oryza sativa
MAAPPPALRRLLLLLLFSLLLLASVAAAAAAPAAEEEEFTEELLLRPLPDRKALAHFHFRSSASPSAAAAGRHHHLFPKAIAQLVQQFHISELELSFTQGQWNYEQWGGYDPMSTNYAKPPGVELWAAFDLPLDEIDATWKNLTHTLSGLFCASINFLESSTAFSAPRWGFKLNEGNLRYGALPREAVCTENLTPWLKLLPCRDKAGIASLLYRPSIYKGYYHSQKLKLTSSQSFGIIIDQTLTVVLQPDTFWGQQLHSTDGQLQPSWSMKDLFNRKLSGKCRVSKSSRVFLEIENDIVDKSGTEASWTNELFVLSTAPDRVLKELNNMDAQSSSLYEYDVSNYNNDKPLDVGITWKLPLIWSCTPAPYHANRFLMGSGNERGSIALSFRSTNLHKQLFGSSNDCSIKAVVFQVVPCKAISEVVEKIHVTPSEDKHLPGTLEMLLRLPCSMESATLSLDFDKGFLHIDEYPPDANQGFDIPSALVTFPEFNSSRSYPEGDTLFVSPLLQTFKEDGVVKSYTEVLLVPLTTPDFSMPYNVITFTCTVLALYFGSLLNALRRRIGEEERELKKAGLCRFTKVLGHLDTTSTSINLHPSTKLLLCSQEQAGLKFSLSRACPLYLYSYLSREAWADSSVDSQAKGEEGRPTTTRIFTYISVVNKAATQGCICGGSSCLTSLLVKQLRIDAIVYNFEQCPKPRL

SEQ ID NO: 3633 - protein, 485 aa, Desulfovibrio vulgaris subsp. vulgaris (strain Hildenborough)
MDKKRLTTNAGAPVADNQNVMTAGPRGPQLLQDVWFLEKLAHFDREVIPERRMHAKGSGAFGTFTVTHDITRYTRAAIFSEVGKKTDLFVRFSTVAGERGAADAERDIRGFAVKFYTEQGNWDMVGNNTPVFFLRDPLKFPDLNHAVKRDPRTNLRSARNNWDFWTSLPEALHQVTVVMSDRGIPATYRHMHGFGSHTFSFINAKGERFWCKFHFKTQQGIKNLTDAEAEAIVGKCRESHQRDLYDSIERGDFPRWTMYVQVMTEEKAAALPYHPFDLTKVWYHDDAPLIEVGVLELNRNPENYFAEVEQAAFNPANVVPGIGFSPDKMLQGRLFSYGDAQRYRLGVNHHLIPVNMPRCPFHSYHRDGMMRVDGNHGSTLAYEPNSYGEWQEQPGFAEPPLELSGAAAHWNAREDDADYFTQPGKLFRLMTPAQQEELFGNTARALGDAPDAIKLRHIGNCLKADPAYGNGVAKALGLDPAKALG

SEQ ID NO: 3634 - protein, 348 aa, Campylobacter jejuni subsp. jejuni NCTC 11168
MEKYRELRKTDRVLSYGARGTTTNFELEKLICTLEGGYRAQLFPTGLAALAMVLLNYASKDAHFLITDAIYGPVRTICELFLDKIGVEIDFLKADASDIEEKIKPNTKLILCESPGSILYEIIDLPKLCKIAHAYNIPVAIDNTYSSGYFLNPLELGVDISVIAATKYLSGHSDVTMGIVVINEKEWKNFDKLPEALGFTTSPDDAYLVLRGMRTLDVRMKAHEKSADEIVEFLQSRKEIKTIFYPKLKSHPNHEIFMRDHKGANGMITIEFAEGYNKDDAIKFVDKLEYFSIGASWGGYESLATVTTPPRTATDLSARGLFVRFHIGLEDTKDLIADLTQAFDSIKK

SEQ ID NO: 3635 - protein, 367 aa, Zea mays
MGSLASERKVVGWAARDATGHLSPYSYTLRNTGPEDVVVKVLYCGICHTDIHQAKNHLGASKYPMVPGHEVVGEVVEVGPEVAKYGVGDVVGVGVIVGCCRECSPCKANVEQYCNKKIWSYNDVYTDGRPTQGGFASTMVVDQKFVVKIPAGLAPEQAAPLLCAGVTVYSPLKHFGLTTPGLRGGILGLGGVGHMGVKVAKAMGHHVTVISSSSKKRAEAMDHLGADAYLVSSDAAAMAAAADSLDYIIDTVPVHHPLEPYLALLKLDGKLVLLGVIGEPLSFVSPMVMLGRKAITGSFIGSIDETAEVLQFCVDKGLTSQIEVVKMGYVNEALERLERNDVRYRFVVDVAGSNVEAEAAAADAASN

SEQ ID NO: 3636 - protein, 290 aa, Photorhabdus luminescens subsp. laumondii TTO1
MKGIILAGGSGTRLYPITIGVSKQLLPVYDKPMIYYPLSVLMLAGIKDILIITTPEDQINFKRLLNDGNSLGIKISYATQDKPEGLAQAFIIGEDFIGDDSVCLVLGDNIFWGQAFSPKLQKASSQKTGATIFGYQVKDPERFGIVEFDDQMKAISIEEKPKKPKSDYAVTGLYFYDNRVINFAKKVTPSDRGELEITSINQMYLNDNSLNVELLGRGFAWLDTGTHDSLLEAATFVETIEKRQGFKIACLEEIAWRNGWLNENDIAKAANSMSKNGYGKYLQSLIQRKI

SEQ ID NO: 3637 - protein, 354 aa, Streptomyces rochei
MKALILSGGTGSRLRPFTHSTAKQLLPVANKPVLVHCLENIRDAGVTEAALVVGAHAAEISGVVGDGSAFGLDLTYLHQDRPLGLAHCVQLAGDFLGDDDFVMYLADNVLADGIGKAARAFAAERADALLLVQPVADPRAYGVVEVGAGGHVRRLVEKPAEPAGDLAALGVYFFTSRIHEAVAGLRPSARGELEITDAIQRLVEDGAPVRAERYDGYWKDTGRAEDLLDCNRELLARLTGPAVHGEVDGTSTLSGPVVIEPGARVHGSHLKGPLVIAAGSTVTNCTVGPYVSVGRDCVLRDTVVADSILLEGAAVDGVPGLDHSIIGRWARIGRSAASGHQLLVGDHANAEVAA

SEQ ID NO: 3638 - protein, 116 aa, Triticum aestivum
PTVMASSATSVAPFQGLKSTAGLPVSRRSNGASLGSVSNGGRIRCMQVWPIEGIKKFETLSYLPPLSTEALLKQVDYLIRSKWVPCLEFSKVGFIFREHNASPGYYDGRYWTMWNC

SEQ ID NO: 3639 - protein, 231 aa, Escherichia coli
MFRKLAAECFGTFWLVFGGCGSAVLAAGFPELGIGFAGVALAFGLTVLTMAFAVGHISGGHFNPAVTIGLWAGGRFPAKEVVGYVIAQVVGGIVAAALVYLIASGKTGFDAAASGFASNGYGEHSPGGYSMLSALVVELVLSAGFLLVIHGATDKFAPAGFAPIAIGLALTLIHLISIPVTNTSVNPARSTAVAIFQGGWALEQLWFFWVVPIVGGIIGGLIYRTLLEKRD

SEQ ID NO: 3640 - protein, 481 aa, Rubrobacter xylanophilus DSM 9941
MAQLLVGGERVSARGGGEMPVVNPATEEVVDTVPKGTAEDVEAAVAAAKGALAEWSGKDPDERAAIMRAGIGAVKERGREIAELLVREQGKPLSEAMGELHHFIHGMDFYADLASKVRGAYAPLPSSLGKSYGMVIKRPVGVCAAIVPFNFPLTLMGTKVGPALAGGNTVVVKPAETTPLATLRVAELFAEAGLPAGVFNVVTGEGPEVGEALVAHPDVRRVAFTGSTEVGRRIMELAGPQFKRVSVELGGSDPVIVCPDADVDAAVKGVNIGRFFNAGQACLAAKRVYVFDEVYDEFMEGLIKRVSRYELGDGLTKAEKPKIRMGPMNSARYRDQVASQLEEALGRGARVVYQGEWGGEKGYFFPPAVIEGAPHDSRVVREETFGPLLPVFRVGDLDEALRLANDSRYGLGSSIWTRNIRWIHRAAQEIEAGMTWVNQLHYGYDELPFGGVKDSGVGREHGPEALEYYLESKSVVIGGLD

SEQ ID NO: 3641 - protein, 600 aa, Nitrosomonas europaea ATCC 19718
MAISENKTMTQFIKVTLPDIGDFQEVPVVEILVSPGDEVEQETPLLVLETDKASMEVPAPQAGIVREIHVKAGDRISQGSLIVTLETRETDTQVASPTPPRDTMAVPDSQPTITSAAEATAGKVALASVADRGDIHAEVVVLGAGPGGYTAAFRAADLGKQVVLIERYPALGGVCLNVGCIPSKALLHAAKTLTEAKEASLYGIRFGQPEIDVGKLRSWKESVVGKLTKGLSMLARQRKVTVIHGTGKFVNPHLIEVETSDGIKTISFDHCVIAAGSSAARIPGLPADERIIDSTGALALAEIPERMLILGGGIIGLEMATVYHALGTRISIVERMAQLIPGADTDLIKPLYKKLKTECEAIYLNTSVSRVEADKEGLQVFFEGEQAPEPQRYDRVLVAVGRRPNGKLIDAGAAGINVDERGFIPVDKQMRTSVPHIFAIGDIAGDPMLAHKASHEGKIAAEVIAGHKVTFDARTIPSVAYTDPEVAWMGLTETEAEKQGIAYEKAVFPWAASGRAITMTRDEGMTKLLFDKVSKRILGAGMVGPHAGELIAETVLALEMGADMQDIGLTIHPHPTLSETILFAAELAEGTITDLYVPKK

SEQ ID NO: 3642 - protein, 481 aa, Chromobacterium violaceum ATCC 12472
MRKHTLTTAAGAPVVDNQNVQTAGPRGPMLLQDVWYLEKLAHFDREVIPERRMHAKGSGAFGTFTVTHDITRYTRAALFSDIGKKTDLFLRFSTVAGERGAADAERDIRGFAVKFYTEEGNWDLVGNNTPVFFLRDPLKFPDLNRAVKRNPYTNMRDANANWDFWTLLPEALHQVTIVMSDRGIPASYRHMHGFGSHTFSLINAKGERHWVKFHFHTQQGIRNLSDAEAEKLVGQDRESAQRDLLECIDRGDFPRWTLYIQVMTEAQADACPFNPFDLTKVWSHKDYPLIEVGVLELNRNPQNYFADVEQAAFNPANVVPGISFSPDRMLQGRLFAYGDAERYRLGVNHHLIPVNAPRCPFHNSYHRDGAMRVDSNAGATIGYEPNSQGKWQQQPAYDEPPLALQGNAYHYDFRADDDDYYSQPGALFRLMTPAQQQALFDNTARAMGGVDEAIKRRHIANCAKADPAYGAGVAKALGLSV

SEQ ID NO: 3643 - protein, 510 aa, Eustoma grandiflorum
MAVGNGVLLHIAASLMLFFHVQKLVQYLWMNSRRHRLPPGPIGWPVLGALRLLGTMPHVALANMAKKYGPVMYLKVGSCGLAVASTPEAAKAFLKTLDMNFSNRPPNAGATHLAYNAQDMVFADYGPRWKLLRKLSNIHILGGKALQGWEEVRKKELGYMLYAMAESGRHGQPVVVSEMLTYAMANMLGQVMLSKRVFGSQGSESNEFKDMVVELMTVAGYFNIGDFIPSIAWMDLQGIQGGMKRLHKKFDALLTRLLEEHTASAHERKGSPDFLDFVVANGDNSEGERLQTVNIKALLLNMFTAGTDTSSSVIEWALAELLKNPIILRRAQEEMDGVIGRDRRFLEADISKLPYLQAICKEAFRKHPSTPLNLPRIASQACEVNGHYIPKGTRLSVNIWAIGRDPSVWENPNEFNPDRFLERKNAKIDPRGNDFELIPFGAGRRICAGTRLGILLVEYILGTLVHSFVWELPSSVIELNMDESFGLALQKAVPLAAMVTPRLPLHIYSP

SEQ ID NO: 3644 - protein, 465 aa, Chlamydia muridarum
MNEAFDCVVIGAGPGGYVAAITAAQAGLKTALIEEREAGGTCLNRGCIPSKALLASAEIVAQIRHADQFGIHINGFSIDYPAMVQRKDTVVRSIRDGLNGLIRSNKITVFSGRGSLISSTEVKILGETPSVIKAQSIILATGSEPRAFPGVPFSQQSPRILCSTGVLNLKEIPQKMAIIGGGVIGCEFASLFHTLGSEVSVIEASQQILALNNPDISKTMFDKFTRHGIRFMLGASVSSIEDMGDRVRLTINGNIEEYDYVLVSIGRRLNTENIGLDKAGVICDERGVIPTDSTMRTNVPNIYAIGDITGKWQLAHVASHQGIVAARNIAGHKDEIDYSAVPSVIFTFPEVASVGLSPTSAQQQGIPVKVTKFPFRAIGKAVAMGESDGFAAIISHETSQQILGAYVIGPHASSLISEITLAIRNELTLPCIYETIHAHPTLAEVWAESALLAVDTPLHMPPTRK

SEQ ID NO: 3645 - protein, 103 aa, Glycine max
MDPKLVEVTQLFDRFKAAFKASNFDVCSTLLSQLKVLLTKFPSLPPLFQQTPNAVEELKLAREIYEQAVILSVKMEDQDAFERDFCQLKPYYMDTCGIIPPSS

SEQ ID NO: 3646 - protein, 297 aa, Candidatus Carsonella ruddii
MKFFDFIKNKTKISIDSADINFIKNKLFNAATTNPSLILKSILSKVYNKLLYAFLLKNFKKKIIDSDYNISLYDKLLVNIIANIIPYIEEKISIEIPARISFNYNKIIFYSYKIIYLCEKIGINLKKILIKIPATNSGIKAAKQLKNNNINSNLTLIFNLTQAKKCFDSGIYIISPFVGRVSDSIYCKYDSGVNFVKNLVNLKNNNNYSTKIMAASFRNINQIINLTCCDFITISPIYYNKLKNINYKNSVLNYKSNIDFCNNENYNSIKLLNNGIKQFDIDHNRLIKLISNLINNL

SEQ ID NO: 3647 - protein, 405 aa, Zea mays
MVAEAEVMHQSPVPVLEVQYHRRATTKGVDDVVGMSAPAPAEVGVGVGVEVEVEVEVAVEVPRMGLEQPDVAPSLSTDMIQQFVPNIRSGSFADIGPRRYMEDEHIRIDDLSAHLGSMLVCPLPSAFYGVFDGHGGPDAAAYMKRHAMRFLFEESEFPQASQVDEVYLESVESCVRRAFLQADLALADDLDISRSSGTTALTALVFGRQLVVANTGDCRAVLCRKGVAMEMSRDHRANHVEERERVAASGGYIEDGYLNGVLSVTRALGDWDMKAPGASASAALIAEPEFRRATLGEDDEFLVMGCDGIWDVMTSQHAVSLVRRGLRQHDDPARCARELVMEAKRLETADNLTVVVVCFAPEMGSPFTPQQQQEEELPARPRSCKKGLSTEALCSLRSWLDTDHR

SEQ ID NO: 3648 - protein, 541 aa, Xylella fastidiosa Temecula1
MQWSLSTQGGLPASSTIDNHSLYVSSSNGTLNKIDAQTGSLLWSIPLSNYTGNPHSLSLKSTAIAPQSIVVGDQNSGTLLALNKTSGTLLWKTTIEPNLNAKITSPPTIYEDRVYVGVYSGKSQSNIAALDLKTGQPLWQSNSVPNGAVINGPLTINPSKKRLYALTSNSGQASPLHNHTDTLLVLDMKNGALLLKQSLKESTDPNTDNANKNGAILFTLNINGTTRDVVAIPEAQGHYQVLDANNGTILWSTDITPGSTNRIVASSFNPYKSQIYVISNANNAQIHNGYYLTALDAKTGTILWNTKVHGNKPINAKLNTGGGIASSPDIIYTTSPNGKITMLEANTGKILWSFDTHASIISAPVMTNDALYVGATFTHNTGKLYKFTTQEHLQINNLQHNQQHSLINHISEQKETNGNSDSHGDSHSGEGSWSESGSGSWSYSHPSGGGGGGGGGGGGGGGGGGGGGGGGGGSSYGSSYGSGYGSGYGSGYGSGYGSGYGSGYGSGQGSGGGYSSGNGQNSGGVNYGSGSDSRYGANTTR

SEQ ID NO: 3649 - protein, 153 aa, Nicotiana benthamiana
MKMIVLRSSDGETFEVEESVALESQTIKHMIEDDCADTSIPLPNVTSKILAKVIEYCKRHVDAASKTEDKAVEDDLKAFDADFVKVDQSTLFDLILAANYLNIKRLLDLTCQTVADMIKGKTPEEIRKTFNIKNDFTPEEEEEVRRENAWAFE

SEQ ID NO: 3650 - protein, 307 aa, Oryza sativa
MAVDLMGFSPRGGCRPSVETEQLAFQEAAAAGLRSLELLVSSLSAGGEHHHRRRPQEKQSSPPLGEIADQAVSRFRKVISILDRTGHARFRRGPVVGAAAAEAAAAAASASPSSSPVSPPLPPVTTQPAAAVKSLTLDFTNPAKVAAASVTSTSFFSSVTAGGDGSVSKGRSLVSSGKPPLAGGVKRKHPHPPCAAAGDGHGHGAGHAHAHGGCHCSKKRKQRVRRTVRVAAASARVADIPADEYSWRKYGQKPIKGSPYPRGYYRCSTVKGCPARKHVERAADDPATLVVTYEGDHRHSPPPPPLV

SEQ ID NO: 3651 - protein, 275 aa, Xylella fastidiosa Temecula1
MNRKMFGELISEAIAMFIIIALGESAAAMYILYDPSPYQNAYWGLCICWGLAVTIAIYVTASVSGTHANPAVTLALALYRGFPWKKVLPYWAAQVIGAFIGAMIVYQLYSPVIDYYNHIHQLTRDAGGAAGVFFTSTGMAITPIHALGDEIILTAFLVFGIFAITERFNEAAPTANSGALVIGLLVATIGACMGYLEGWAINPARDLGPRLFAFLAGWGESAFPGKDHYWWIPIIGPLIGGVMGATAFQCLIYPFLPARVQAKQQAAILLHRKHP

SEQ ID NO: 3652 - protein, 385 aa, Triticum aestivum
IDPDCSWVEQWVHRAGPRKDIYYEPNEVKAAIVTCGGLCPGLNDVIRQVVFTLETYGVKNIVGIPFGFRGFFEKGLKEMPLSRNLVENINLAGGSFLGVSRGGAKTSEIVDSIQARRIDMLFVLGGNGTHAGANAIHDECRKRKLKVSVVAVPKTIDNDIPLMDKTFGFDTAVEEAQRAINSAYIEARSAYHGIGLVKLMGRSSGFIAMHASLSSGQVDVCLIPEVSFALDGEYGVLQHLEQLIKNKGFCVVCVAEAAGQELLQNSGATDASGNAILSDIGVHMQQKIKTHFKGIGVHADIKYIDPTYMVRACRANASDAILCTVLGQNAVHGAFAGFSGITSCICNTHYVYLPVTQVITAPKRVNHKGRMWHRCLTSTGQPDFR

SEQ ID NO: 3653 - protein, 310 aa, Buchnera aphidicola str. Sg (Schizaphis graminum)
MNSFAMLFPGQGSQYKNMLSSFFQKKNNLFKKIFDEASEYVNYNLLNLIKNGAKKKRDDYKYIQSAILTSSIAIYQLWKEKNGRRPALMSGHSLGEYSALVCANAIKFSDALKIVKLRSKLMQKIIINKPSLVQAIIGLDKVIIKNICLQYLPKIVSIASINSDDQIIISGEKLAVREVGLKCKKKGAKYVIKLNINTPIHSQLMKPVSEQIKYLLKSIKIKSPQIPVINNVDVICEKNEKKIKKALVRQFYSTVRWKEIIDLIKSKKIFTMLEIGPNKILSNLIKKNDNITVLNTNNLKNFLIAFKTIH

SEQ ID NO: 3654 - protein, 450 aa, Nostoc sp. PCC 7120
MTINPPQGEIKQAIFNSSMSENNQEFNWRHCWYPITFLQDFPKELPYSFSLYDEPFVLFRNQDGKLGCLPDICPHRAAKLSDGQIIDGKIECLYHGWQFGTDGQCLHIPQLPKEATIPKNACVQSFAIVERQGIVWMWAGEADAADETLIPAIPELDKPEFVTTDFMCNIPYDQNTLIENAIDPAHVPISHNGTLGNRAEALPLEMEIIAKSVQGICGRYRNVSSSLSPWININFVAPNLVMLYIPINEERGWYRGAAAYSIPLGKNQCRVLFRAFQNFSQWRLKLTPRWLEHWYRQKVLQQDMQQAAGQQKHIERLIKSPRELYLPLKTSDLFPVEYRKWLDKYGSSLPFYQGYTTCKTNYEQKIVSLSTNDRFESHTQICSSCDRAYRVTKLVKHILVSVAITLAAFAILTDDSWISSVAVVTSLLAVILVFIAQKVKTKFERSDTRH

SEQ ID NO: 3655 - protein, 400 aa, Campylobacter jejuni subsp. jejuni NCTC 11168
MSDIISIKDIDLAKKKVFIRCDFNVPQDDFLNITDDRRIRSAIPTIRYCLDNGCSVILASHLGRPKEISSKYSLEPVAKRLARLLDKEIVMAKDVIGEDAKTKAMNLKAGEILLLENLRFEKGETKNDENLAKELASMVQVYINDAFGVCHRAHSSVEAITKFFDEKHKGAGFLLQKEIDFASNLIKHPARPFVAVVGGSKVSGKLQALTNLLPKVDKLIIGGGMAFTFLKALGYDIGNSLLEEELLEEANKILTKGKNLGVKIYLPVDVVAAPACSQDVPMKFVPAQEIPNGWMGLDIGPASVRLFKEVISDAQTIWWNGPMGVFEIDKFSKGSIKMSHYISEGHATSVVGGGDTADVVARAGDADEMTFISTGGGASLELIEGKELPGVKALRSKENE

SEQ ID NO: 3656 - protein, 487 aa, Acinetobacter sp. ADP1
MNARFQELLPELALYAGSKKLDVNQTFQDINPCDEILIAHIPKASVEDLNAIVAVAKQGLNSTAWHEVTPLQRENLIRCFADAIEKDSTRLAQLESIDAGKPISITQTVDIPAVVAWLKYYAGWASKIMGSAGELSNVAGSFHAYSRRQPVGVVAAITPWNFPSVLSMWKIAPALAAGCCIVLKPASDTPLTALRLAEIAREIGFPEGVFNVVTGNSDIGHALATHPDIAKVAFTGSTQTGRSILQASIADFKRVTLELGGKSPVILHKDADLDKAIPTIAMGCFFNTGQVCYAGTRLYVHHDIYDEVLARLAAFTKTLKIGSSDDPNTQLGPVVNARQQHSIQEFLNKAEQQGIESLDLSAMTLPEHGFYVRPAILKNVPAHAAIMKEEVFGPVLATAAYQSLDEAIQLSNDSIYGLAAHLWTQDLSIAHQVSAALDAGTVFVNCALLADPNFPFGGFKQSGIGRENGQEVLDAYLESKSVIMALS

SEQ ID NO: 3657 - protein, 889 aa, Desulfovibrio vulgaris subsp. vulgaris (strain Hildenborough)
MCGIAGIISRKDRNVSSQPLNRMLTSQEHRGPDAGYGVSFRRQSTGAFAAGRRHSADALAAGLEPAPVWLGHRRLSILDLSDKSAQPLRRGDLHIVFNGELFNYIELRSELTALGEHFETSGDTEVLLASYRHWGAGCLERFNGIFAFAIFDASRGSLFAARDPFGVKPFHYGVKPFHYAVTHDFLIFASEIKAISASGLVLRKWDPDVASAYLSYALTTAPQGRTFFENIRQIPPGHCLTLASPDDEPSVTRYYAPRITETPRSLHELVDEGAGLIRQSCRIRMRSDRDVGLCLSSGIDSANVAAALVAEGIAPECYSIDAASSSMLDEFPLITALADKLGLHVNPIRHPDAIPTADIVRYMLFNDEPSLFWGSYNQFHLYREMRKLGVIVSMSGHGGDELFCGYQRYYPAVVRDMLAQRRIMSLIWWCLRQSRHLMQDRRTIRSTWDSYSHPLGWANDYAHDIAALHLKHTIADPEEWISTFVGASSWGEQQQKSLFTYELQYLLRDADRNSMAHGIEERVPLLDTRLYEFCASVPLKDLCQDGYLKGLARQLFPAIPESLRFHQIKRGLYTDISSKLPQLQADLMPLVHRSPLLRELVDLQKLPQQLPGIVWWRLCSLAVLDVSGIEEWTAQTPLPRLVDDEMAERIGGVPSGTGRTAVIRHVLDEGLSYLEPGALHGLAETVGLIESAAIPGCIIEAGCALGGSTMVLATAKAKERPLHVFDVFGCIPPPGSNDGEEARARFAVIAAGESTGLNGKRYYGYEPDLLKNVQDNFVALGLPPAEHGITFVPGLYENTLYPSGPVALAHIDCDWYQSVKTCLERIAPHISPGGRMIIDDYDHYSGCRRAVDEFLEASNGQFIRERYARVHLVRTKADGQETDVHRPGD

SEQ ID NO: 3658 - protein, 394 aa, Neurospora crassa
MVVFVNPAILEGARAVARQVAETANPGCRIIVGVKYCFRYNARTRQMRLAEEGDQINLEAMPRPHRRRREKKLMTIDEVNEKFPMLKYKTWVASRARDGLPTSGGVSAPSRPNSIHDADAISRELPNKERMSTEGRPTTSQVERADRDPKTPQHEAKESTSSTVPLTHAVSEATTPPKEARVSHDEGEEEEDPIDAALPPECEGTSGDTCAICIDTLEDDDDVRGLTCGHAFHAACLDPWLTSRRACCPLCKADYYTPKPRAAGEPVDGQPGVIHVTLSNDPRSNRMNLPNRPRRALFGLGRPARTVYVVSSNDQRGSRRRHGERRRDNNGASSQPGSSPQASSDRAEGGSVFANLRAAFPHFRRSNGGQIADANSNPTMTPSNLEAGVRPGAS

SEQ ID NO: 3659 - protein, 346 aa, Rhizobium leguminosarum bv. viciae
MRALQLIDDRKLEITDLPEPDAPAAGEVTLRVKAVALNHIDVWGWRGMAFAKRKMPLVIGAEASGVVEAIGPGVANVLPGQLVAIYGARTCGLCRPCREGRDNLCEHVSGVHGFHLDGFAQEKVNLPARLLVPAPPGVDAIGAALAPVTFGTVEHMLFDNAKLEPGETILVHAGGSGIGTAAIQLAKKIGCTVITTVGSDDKIEKAKALGADHVINYRTDRFEGVVRKLTKKKGVDVVFEHVGKDTWAGSMLCMKRGGRLVTCGSTSGVSTEMNLMMLFQQQLKLFGSFGCRMENMADAMQKMGPRARPSRHRYRGQAFSDIDRALEPDGIAPDLRQDHPEDGLTA

SEQ ID NO: 3660 - protein, 453 aa, Campylobacter jejuni subsp. jejuni NCTC 11168
MSECPFFPKPYKNKASTLLTFLLKRRSWLDGLYERSYKMQTGYVKMPNFDLYVINDTKEVKRMMVDEVREFPKSAFLHELLSPLLGESIFTTNGEVWKKQRELLRPSFEMTRINKVFNLMSEAVADMMDRFSKYPNHAVIEVDEAMTFITADVIFRTIMSSKLDEEKGKKILNAFVTFQEQSVHTAMRRMFRFPKWLSYVLGDCKRAKAGDVIRQVLSDIIKPRYDMADNAEFEDILGSLLLVVDADTNKRFSFEEILDQVAMLFLAGHETTASSLTWTLYLLSLYPKEQEKAYEEITQVLQGGVIEISHLRQFKYLTNIFKESLRLYPPVGFFAREAKKDTQVRDKLIKKGSGVVIAPWLIHRHEEFWTNPHGFNPSRFEGEYKKDAYLPFGVGERICIGQGFAMQEAILILANILKTYKLELEEGFVPDVVGRLTVRSANGMRIKFSKRKL

SEQ ID NO: 3661 - protein, 538 aa, Schizosaccharomyces pombe
MADSLVDINERITSQGNLVRSLKSQGASKEDIDKEVAKLLQLKNLKLGGSEVSGKKKDTSFTLKTPKGTKDWCDKDVVLREHIFSTVTEIFKRHGGVTLDTPVFELKEILSGKYGEDSKLIYDLKDQGGELCSLRYDLTVPFARWLAMNPKVTSIKRFHIAKVYRRDQPAMTKGRMREFYQCDFDIAGNYDPMIPDSEALKVLVEALDALEVGNYTIKLNHRKILDGIFTVCGVPDDKIRTISSAVDKLDKLPWEDVRREMVVEKGLKEEVADKIKEYVLLKGDRSLLDKLEADSLLSSNSSAVAAFNDMRLLFDYLEAFGVLDRFSFDMSLARGLDYYTGIIYEAVTEASAPKIKSSAEKKKSADPEADRSNDDSIGVGSIAAGGRYDNLVGMFAAKKNAKIPCVGISLGLERIFSILRSKIPDEDIRANDVDVFVMAFGGGKEWTGFLKERMSVCKDLWANGIKAEFLYKVKPKPRQQFDAADKFDVPFAVILGQDEFAKGSVRIKQMGLKENSDEGQLVPREEMVSVLKKLLKYD

SEQ ID NO: 3662 - protein, 158 aa, Chromobacterium violaceum ATCC 12472
MSIYDFSFRRLDGSEQAMADYRGSVLLLVNTASRCGFTSQYAGLEALHRRFGPQGLAIIGFPCNQFGAQEPGDAGEIGAFCQKNYGVDFAMADKVDVNGANAHPLWQYLKRQKRGLLGQAIRWNFSKFLVDRQGRVVARFAPFTRPEKLAARIEALLK

SEQ ID NO: 3663 - protein, 473 aa, Zea mays
MCIGLFLSITIYLQACQLSPIFSACLAQLVPAHRCGAVVLAHLVRPRELRLPSLWTAPASSHLPPPVHSYKAWHFAVRTRMLFAPSRLPLPRLPTRRLRLAPGSPMASMLAILRPSAPAPLAGRRARAAAPATARVALSTRSRYSSARVSLGSEVAVGADALFADYKPTTAFLFPGQGAQTVGMGAEAQSVPAATKLFNQANEILGYDLLDLCTNGPKEKLDSTMISQPAIYVTSLAAVEVLRARDGGQDVINSVDVTCGLSLGEYTALAFAGAFSFEDGLKLVKLRGEAMQDASDAANSAMVSVIGLDSEKVQELCDAANDEVDENDRVQIANFLCPGNYAVSGGVKGIEVVEAKAKSFKARMTVRLAVAGAFHTSFMQPAVSRLESALAATEIRTPRIPVISNVDAQPHSDPNTIKQILAQQVTSPVQWETTVKNLMGKGLEKSYELGPGKVIAGILKRINKGTSIENIGA

SEQ ID NO: 3664 - protein, 424 aa, Chlamydophila caviae GPIC [sequence omitted]

SEQ ID NO: 3665 - protein, 268 aa, Oryza sativa (indica cultivar-group)
MHRSSSDGGSSSGWSEAAAASAAGDERAGWEVRPSGMVVQAREEGPGGGGGGGGGMGIPPRPPPPEIKVRVKYGAARHEVAVSSIASFGELKKLLAARTGLPAADQRLTYRGKERGNADYLDVCGVKNKSKLYLAEDPTSVERRYIERQKSAKIETANRAIGAIALEVDKLADQVRSIEKSITRGSKVAEVQITTLIELLMRLAVKLDSIHAEGDSSSQKNIQAKRVQKCVETLDVLKISNARLQNVIVTTKWETFDAPATTQWELFD

SEQ ID NO: 3666 - protein, 230 aa, Zea mays
  unsure (1)..(230): unsure at all Xaa locations
EQVLAKYEKKVHVQLELLITLIFHSVEVGSYVNANDAFKEPNDVFKEPGSSKRLRSGSSDMPTSKACRERMRRNKLNDRFLELGSALEPGKPVKADKAAILSDATRMVIQLRSESQQLKETNGSLEEKIKELKAEKDELRDEKQKLKLEKESLEHQMKLMASAPAYMPHPTLMPAPFXPAPLAPFHXRGQAAGQKLMMPFVGYPGYPMWQFMPPSEVDTSKDSEACPPVA

SEQ ID NO: 3667 - protein, 237 aa, Azotobacter vinelandii
MNRYGAEFLGTFWLVLGGCGSAVLAAAFPEVGIGLHGVSLAFGLTVLTMAFAIGHISGCHLNPAVSIGLWAGGRFPAKDLLPYIVAQVLGGIAAGAVLYVIASGTAGFDVTKGFASNGYGAHSPGGYSLLSALVTEVVMTLFFLLIILGATDKRAPAGFAPIAIGLALTLIHLISIPVTNTSVNPARSTGVAVFAGGWAIAQLWLFWIAPIVGALLGAAAYRLIAEQPGLASQPARG

SEQ ID NO: 3668 - protein, 482 aa, Triticum aestivum
MAATVAVDNLNPKVLKCEYAVRGEIVIHAQRLQQQLQTQPGSLPFDEILYCNIGNPQSLGQQPVTFFREVLALCDHPDLLKKEEIKTLFSADSISRAKQILALIPGRATGAYSHSQGIKGLRDAIASGIASRDGFPANADDIFLTDGASPGVHLMMQLLIRNEKDGILVPIPQYPLYSASIALHGGSLVPYYLNESTGWGLEISDVKKQLEDARSRGIDVRALVVINPGNPTGQVLAEENQYDIVKFCKNEGLVLLADEVYQENIYADNKKFHSFKKIVRSLGYGEEDLPLVSYQSVSKGYYGECGKRGGYMEITGFSAPVREQIYKIASVNLCSNITGQILASLVMNPPKASDESYASYKAEKDGILASLARRAKALEVAFSKLEGITCNKAEGAMYLFPQICLPQKAIEAAKAANKAPDAFYALRLLESTGIVVVPGSGFGQVPGTWHFRCTILPQEEKIPAIISRFTVFHETFMAEYRD

SEQ ID NO: 3669 - protein, 443 aa, Nostoc sp. PCC 7120
MQPEFNFFQHWYPVSPIEDLDPKRPTPVTLLGIRLVIWKPQSSEGFRIFIDQCPHRLAPLSEGRVDDKTGNLMCSYHGWQFDPEGVCTHIPQAENPEIVTKNQKDFCVISLPVRQQNDLLWVWPDVKSQELADQTPLPLSPQVDASKGFVWSSFVRDLEYDWQTLVENVADPSHVPFAHHGVQGNREQARATPISIMQSTPGLIEAVADGRFKAKITFEPPCRLEYAISIGNDGKKVGLVTYCLPVSPGKSRIVAQFPRNFAKILYHLTPRWWDHVKTRNLVLDGDMILLKQQEHFLQERQLSASWKTVYKMPTSADRLVIEFRKWFDKYCEGQLPWKEVGIAISEGSTINDSRDTLLDRYKQHTQHCSSCRDALKNIKRLQVILLGYFAIIISGVAVLPDSLRVQLGLPLIITAILGLGLYSWLKFWLVPKFYFVDYVHAEK

SEQ ID NO: 3670 - protein, 247 aa, Glycine max
MTATDIARTAVGIIGNIISGALFLSPAPTFVEICKKGSVEQYSAAPYLATLVNCMVWTLYGLPMVHPNSILVVTINGSGCIIELIFVTLFLIYSGGKKRLKVLLWLLLELIFISVLTFITLTKVHTFKKRSAIVGTTCILFNIMMYASPLAIMKLVIKTKSVEYMPFYISLASFGNGVAWTTYSLIRFDKFITIPNGLGTLFAVAQLILYATYYKSTQRQIAARNGNGGVNLSQVVVGRDDQSKPDN

SEQ ID NO: 3671 - protein, 453 aa, Prochlorococcus marinus str. MIT 9313
MEHPFDLIVLGAGSGGLAAAKRAASHGAKVAIVEGDRVGGTCVIRGCVPKKLLVYGSLYREQLEVAPSFGVELSDAQINAGVLLANVRQEVDRLNTLHIDLLAKNGVELVTGWGSFTSPNSVAVSRNGAIDASQELHGDHILIAVGGRPHRPDIPGAELGWVSDDMFMQSSFPDRVVVVGAGFIACEFACILHGLGVEVIQLVRGDHLLRGFDRELSTAVQDGMQEKGIDLRFGENPAALKGQPGDLVLSTQSGERFSCGGVLLATGRRPFLQGLNLDAAGVVLEGRRISVDANQSTNIPHIFAVGDVTDRINLTPVAIDEGRAFADSVFGQKPRQVNHDLVASAVFSQPELATVGLTEEQSIDRYGKDQVKVYRARFRSMAQALPKRGPRCLLKLIVARNTDRILGCHMVGEHAAEIIQMAAIALGMGATKADFDRTMALHPTVSEEFVTMT

SEQ ID NO: 3672 - protein, 341 aa, Streptomyces coelicolor A3(2)
MRIGVLTAGGDCPGLNAVIRSVVHRAVDNYGDEVIGFEDGYAGLLDGRYRALDLNAVSGILARGGTILGSSRLERDRLREACENAGDMIQNFGIDALIPIGGEGTLTAARMLSDAGLPVVGVPKTIDNDISSTDRTFGFDTAVGVATEAMDRLKTTAESHQRVMVVEVMGRHAGWIALESGMAAGAHGICLPERPFDPADLVKMVEERFSRGKKFAVVCVAEGAHPAEGSMDYGKGAIDKFGHERFQGIGTALAFELERRLGKEAKPVILGHVQRGGVPTAYDRVLATRFGWHAVEAAHRGDFGRMTALRGTDVVMVPLAEAVTELKTVPKDRMDEAESVF

SEQ ID NO: 3673 - protein, 984 aa, Staphylococcus aureus subsp. aureus MW2
MQEHLVVTLDGKDYLVEPGTNLLEFIKSQDTFVPSICYNESMGPIQTCDTCTVEIDGKIERSCSTVIDRPMTVNTVNNDVKDAQKEALDRILEKHMLYCTVCDYNNGDCEIHNTMDAWGLQHQTYEYKEKPYEKDYGPFYRYDPNQCILCGRCVEACQDIEVNETIRIDWDREHPRVIWDNDVPINESSCVSCGQCATVCPCNAMMEVNMEGNAGYMTDTEPGSLAAMIDLTKKAEPGYGPLFAISDSEAEMRKERIKKTKTVCTYCGVGCSFEVWTKDREILKVQPSHDSPANKIATCVKGKFSWGHINSDQRLTKPLVRKNGEFHEVEWDEALNVIADNFTSIKEKYGPDALSFISSSKATNEESYLMQKLARQVIGTNNVDNCSRYCQAPATKGLFRTVGHGGDSGSIEDLEKAAMSVLIGTNTAEAHPVIASRMKRAQKLFGQKIHVFDIRKHEMAERADRFYQPKPGTDLAWLSAVTKYIIDHDLHDKAFIDEWVDDFDEYYKSLETFTMAFAEEATGIPESELIKFAEECAKAESVVICWAMGITQQDIGSDSSTAISNLLLVTGNYRRPGTGAYPLRGHNNVQGCSDMGSMPDKITGYQSIEADDIRAKFEKEYGVKLNPKAGKDNHEMVEGIHDGEVHSLYLYGEDTGIVDSNINFVQAAFEKLDFMVVQDEFLTFTATYADVVLPASPSLEKDGTFTNTERRIQRLYQALEPLGDSKPDWKIFQAIANRLGFDWNYKHPSEIMDEVARLTPLYAGVSYDRLEGFNSLQWPVQPDGTDEPILYLEGFNFDNGKAKLFPLSFDNYFKQDEIYDIHVNNGRLLEHFHEGNMTYQTPMIKYKVPRAFVEISPELAEDRGIHEGAEVKLISETGEAVLQVHVTDRVKGKEIYIPLNNDAMENGDLGAINLLTNSDVDQYTDTPSYKRTSCRLEVITKRGKSPLNPNNFRVNKKRHPQYSVQVQKKWERSDYVFPGNQVDK

SEQ ID NO: 3674 - protein, 205 aa, Ralstonia eutropha JMP134
MQRLVLASNNAGKLREFGALLAPLGFDVVPQGELGVPEAEEPFATFVENALAKARHASLLAGMPALADDSGICVQALDGAPGVYSARYAQMAGKSKSDQANNLHLISQLAGKLNRRAHYYCVLVFVRHAADPCPIIAEGLWHGEVVDAPRGAGGFGYDPHFMLPDLGKTAAELPAEEKNAVSHRALALRSLVARLQAEGRGKATR

SEQ ID NO: 3675 - protein, 355 aa, Spirulina platensis
MTQNYRITLLSGDGIGPEIMAVAVDVLKAVGKQLDLNFEFKEALMGGVAIDATGEPLPEESLQACRDSDAVLLAAIGGYKWDNLPRPERPETGLLALRAGLGLFANRARLLFCPHVLDASSLKREVVEGVDIMVVRELTGGIYFGQPKGIFETETGKNEGSNTMAYGESEIDRIGRVGFETAKKRQGRLCSVDKANVLDVSQLWRDRIMALAADYPEVELSHLYVDNAAMQLVRWPKQFDTIVTGNLFGDILSDAAAMLTGSIGMLPSASLGASGPGVFEPVHGSAPDIAGQDKANPLAQVLSAAMMLRYGLDEPAASDPVEKAVLKVLDWGYPTGDIMSEGMKAVGCRKWGICY

SEQ ID NO: 3676 - protein, 498 aa, Mesorhizobium loti
MTLSFDPRAKATTLYHGEFRPMFIGGKWVAAQSGQEMQALNPATGEVLTTVPRGGAADVDAAVAAARAAFEGPWSKFSPYERQCVLLRIADLFETHWEELSVSDTLDMGLPITRTLANRRRVIGMLRFYGGMATALHGEAIDNSIPGEIVSFTRREPVGVVGAIIPWNAPTAASIWKIAPALATGCTIVLKPSEEASLTPLLIARLMQEAGVPDGVVNIVTGTGAEAGARLAEHPDVNKIVFTGSTLTGQAIARAGVTNLKRVSLELGGKSPIIVCRDADIDKAVPVAAMAVFVHSGQICIAGSRLFVAREIHDEFVRRVAEFAGRLRIGHGIEAETEIGPLINARQAGKVEGYIKAGSDEGAKLVAGGSRLTGALYDGGNFIAPTVFGSVSDKMTIAREEIFGPVISAMPFDTLDEVVARANATPYGLAAGIFTTHLGTAHKLARRIRAGSVWVNMYHAIDPAVPFGGMKMSGYGREGGIEHLHEYLETKSVWIQTD

SEQ ID NO: 3677 - protein, 431 aa, Oryza sativa (japonica cultivar-group)
MSPSPDLARILPRVLIVSRRTVRKNKFVDFVGEYHLDLIVGYGAVPVIVPRVAGVHTLLDSFEPIHGVLLCEGEDVDPSLYGGGGAGSGGLSAEQLDAVRSLHPSDAAIDHEKDSIELRLARRCLERNIPFLGICRGSQVLNVACGGTLYQDVDHELPAAAAAVRHINYDNYDGHRHPVRVLPGTPLHEWFAESLDGEDSRLTVNSYHHQGVRRLAERFVPMAFAPDGLVEGFYDPDAYNPGEGKFIMGLQFHPERMRKAGSDEFDYPGCPMAYQAFVRAVVAYQEKLAAAAAAMPASPKLNQEMEKQRKVLVRSFSLAKNLYVSGAEAGTPRPAEQRDLDAGAEFLEQSNTAALSVQQEKRLKQMGATVRNASGYINRLKLNEEREAAARALMAKMSIDQLSDLASFYHIMGTICSEVLDRKLHSAAPAP

SEQ ID NO: 3678 - protein, 187 aa, Neisseria meningitidis Z2491
MTDLETKRLETQAMLENADLLFDQGQCRAALQKVADEITRDLGGKYPLLLPVMGGAVVFTGQLLPLLRFPLDFDYVHVSRYGDKLEGGAFNWKRMPDAEQIRGRHVVVLDDILDEGHTMSAIQAKLLEMGAASCRAAVFANKLIDKPKPIRADYVGLDVPNRYVFGYGMDAAGCWRNLGEIYALDGK

SEQ ID NO: 3679 - protein, 452 aa, Brucella suis 1330
MNPADEKPYAVISAGSAADIDLAVAAARRAFPAWSETPAEERIAYIRRIAEIYESRLDEMAKTISMEMGAPIKLARESQAAAGLSHTKAFIAACENFEVEEVLSPKYPNQTAVHEPIGVCGLITPWNWPMNQITLKVIPAIAVGCTVVLKPSEIAPMSAMLFAEFVDQAGLPKGVFNLVNGEGPVVGEALSQHPEVDMMSFTGSTRAGTAVSRAAAATVKRVSLELGGKSPNIVFADSDLEKAISRSLAHCFENTSQSCNAPTRMLVERSVYDKAVELAKKAAESTKVGDPAQEGDHIGPLSSSIQFEKVQALIQKGIDEGARLVAGGTGRPEGFTEGDYVKPTVFADVNNNMTIAREEIFGPVLAMIPFDTEEEAIAIANDTPYGLAAYIQTGSPERAKRVARKLRAGMIQINGTSRAPGSPFGGYKQSGNGREGGKWGLEDFMEVKLISG

SEQ ID NO: 3680 - protein, 523 aa, Oryza sativa
MAGAEAANGRNKYAVLDPSDEPEGRRRPSAWERRSKERFVLACAIFASLNAILLGYDVGVMSGAIIYIQKDLHITEFQEEILVGCLSVVSLLGSLSGGRTSDAIGRKWTMALGAIVFQAGAAIMTFAPSFTVLMIGRLLAGVGIGFGAMVSAVYIAEISPAAARGTLTSLPEICINLGILLGYVSNYAFSGLSEHINWRIMLGVGILPSVFIGFALFVIPESPRWLMMEKRVPEARAVLLQISESEAEVEERIAEIEEAANLLKSTKSEDKAVWMELLNPSPAVRRLLSTHCGRQMFQQITGIDATVYYSPTIFRDAGIKSDQELLAATVAVGFTKTVFILVAIFLIDKVGRKPLLYVSTIGMTMCLFVLGIALTLQKHAMGLISPRIGIDLAVFAVCGNVAFFSIGMGPICWVLSSEIFPLRLRAQASALGQVGGRVSSGLVSMSFLSMARIISVAGMFFVFAVISTVSVAFVYFCVPETKGKTLEQIEMMFEGGKEWRGSEIELEDTQHLIQSSKKSVSLG

SEQ ID NO: 3681 - protein, 331 aa, Agrobacterium tumefaciens str. C58
MEVRKNKGKARQEGRHPMGIAFTFPGQGSQAVGMGKELADTYPEARAVFQEVDDALDQKLSDIMWNGPEETLTLTANAQPALMAVSMAVMRVLEARGLKLSDTVSYVAGHSLGEYSALCAAGTFSIADTARLLRIRGNAMQAAVPVGEGAMAAIIGLEHDAVSAICEEAGILGVCQIANDNGGGQLVISGSKTAVEKAAAIASEKGAKRAIMLPVSAPFHSALMAPAAEAMREALAKVEKHNPVVPVVANVRAAPVSDANEIAALLVEQVTGQVRWRETVEWFAANNVTQLYEIGSGKVLTGLARRIDKTVNGVAVNGAADIDQLLATLIG

SEQ ID NO: 3682 - protein, 278 aa, Zea mays
  unsure (1)..(278): unsure at all Xaa locations
MQLLIANFTEFQLATVITFLLHETVFFLSGLPSLLFERFGLFAKYKIQILLSFPLELELGYSLRKHNXTQKRSNTSAYQNRCVLRLILYHVSVNLPVMILSYPAFKFMGLRSSLPLPHWTVVVSQVLFYFVLEDFIFYWGHRALHTKWLYKHVHSVHHEYATXPFGLTSEYAHPAEILFLGFATDDGPALTGPHLFTLWLWNXLRVLETVEAHSGYHFPWSPSNFLPLYGGSDFHDYHHRXVLYTKSGNYASTFVYMDWLFRTDNGYRKAKRPLRSKK

SEQ ID NO: 3683 - protein, 464 aa, Glycine max
  unsure (1)..(464): unsure at all Xaa locations
KNSKLCKKVKTAANNGNDQGREQLARSFDSRGNPTVEVDVILSDRTFHRAAVPSGASTGDYEALELRDGGSDXLGKGVLKAVENVNSIIAPAXVARDPTKQTEIDNFMVQQLDGTVNEWGXWCKQKLGANAILAVSLSVCKADAAVKKIPLYQHIVNPAGNKNLILLVPSFNFINGGSHAGNKIAMHXFMIITEGXSSFQKAMIIVIEGLXNIILKGLLFRRSMNRMRVNVVHVMSIXTNEMENNVYLKLIXSELLKDXHENMKLVGMDHATRQCDEKMVRNYRXNIMEQNNDESLQIXGKHXKDINKVMFVEFSNGVXEKSLNHDDRLLCAKLXLKVRSKCRLLLIIYRRYQPXHVVKSIKEKAYNALLLKVNQIGSVTEXIEALRMSKQAGWGVMASHRSGETEDTFIADLSVGLATGQIKTGAPCRSERLAKYNQLLRIEEELGSAAVYAGAKFRAPVEPY

SEQ ID NO: 3684 - protein, 341 aa, Mycobacterium sp. S65
MEAIVLNGTNDVGLTSVPDPAPQDGEVIIEVAATGLCGTDLHEYVAGPTFSQPPVVLGHEVSGRIVEVGAGVDQSRIGEGAAVIPMDFCGSCHYCHRSLYHLCQRPGWIGFTRNGGLANYVAVPSRLAVRVPDVVDLEEAALTEPTAVAFHAVRRAELLLGETVMVLGAGALGLTVIQCARAAGAARIFVTEPSGVRASLARDLGATLVLDPHDPGTTACILEETRGVGVDVVFHVAGSAEAFTQGLDCLRKQGRFMEMSSWAGAASLDVNRHLLKEIQLRMVFGYDMFDDFPAVLALIADGKLALAPQITARVPLDRAVKEGLGGLLEGREGLVKVLVKP

SEQ ID NO: 3685 - protein, 496 aa, Zea mays
ITMDPTKFRPSSSHDTTVTTTNAGAPVWNDNEALTVGPRGPILLEDYHLIEKVAHFARERIPERVVHARGASAKGFFECTHDVTSLTCADFLRAPGVRTPVIVRFSTVIHERGSPETIRDPRGFAVKFYTREGNWDLLGNNFPVFFIRDGIKFPDVIHAFKPNPRSHVQEYWRVFDFLSHLPESLHTFFFLFDDVGVPSDYRHMEGFGVNTYTFVSAAGKAQYVKFHWKPTCGVRCILTDEEAALVGGRNHSHATQDLYDSIAAGSFPEWTLYVQVMEPDTEEQYDFDPLDDTKTWPEDLLPLRPVGRLVLDRNVDNFFNENEQLAFGPGLVVPGIYYSDDKMLQCRVFAYADTQRYRLGPNYLMLPVNAPRCAHHNNHYDGAMNFMHRDEEVDYYPSRHAPLRQAAPPTPLPPRPVAGRREKATIRKPNDFKQPGERYRSWDADRQDRFVKRFADSLGHPKVSQELRSIWIDLLAKCDASLGMKIATRLNMKPNM

SEQ ID NO: 3686 - protein, 143 aa, Oryza sativa
MADDDYNDMDMGYEDEPPEPEIEEGAEEEPENNNEDGPDEVVGAEAEDKEQEKTQRPRKTSKYMTKYERARILGTRALQISMNAPVMVELEGETDPLEIAMKELRARKIPFTIRRYLPDGSYEDWGVDELIVEDSWKRQVGGG

SEQ ID NO: 3687 - protein, 346 aa, Comamonas testosteroni
MLVKNTWYVAGMATDCSRKPLARTFLNEKVVLFRTHDGHAVALEDRCCHRLAPLSLGDVEDAGIRCRYHGMVFNASGACVEIPGQEQIPPGMCVRRFPLVERHGLLWIWMGDPARANPDDIVDELWNGAPEWRTDSGYIHYQANYQLIVDNLLDFTHLAWVHPTTLGTDSAASLKPVIERDTTGTGKLTITRWYLNDDMSNLHKGVAKFEGKADRWQIYQWSPPALLRMDTGSAPTGTGAPEGRRVPEAVQFRHTSIQTPETETTSHYWFCQARNFDLDDEALTEKIYQGVVVAFEEDRTMIEAQQKILSQVPDRPMVPIAADAGLNQGRWLLDRLLKAENGGTAP

SEQ ID NO: 3688 - protein, 337 aa, Triticum aestivum
  unsure (1)..(337): unsure at all Xaa locations
MNHQLPPPPPPLAIPSAQPSPCWCTPVPRAPSPPPSAPSWRSSSGSSPSREACTQKLDCEHGCTACNFNMAGSRGDAVSGTSVHLLDLCNVGICRNETEAKPGEGYEDLPIXHIRKVTANGPTXSQQLLPRYYLTVAXGLFSKLIKLRSELNPIHYASGGKKTSINDLVNRGYNMDTSXARDCNSSWMKGFIRRXHKENIKVAVETELGLSDPVVWDDCLRGLAKIADNLKQLAQRAKDNSLKPEDYXGGTFTVSNLGGPFGIKQFCAIVNPPQSAILAIGSAEKRVVPGAAEGQYEIGSFMSATLSCDHRVIDGAMGAEWLKAFKGYLEDPTTMLL

SEQ ID NO: 3689 - protein, 239 aa, Glycine max
  unsure (1)..(239): unsure at all Xaa locations
KSLGVKMVISGEGSDEIFGGYLYFHKAPNKEEFHQETCRKIKALHKYDCLRANKSTFAWGLEARVPFLDKEFIRVAMNIDPECKMIKKEEGRIEKWALRRAFDDEEHPYLPKHILYRQKEQFSDGVGYGWIDGLKAHAEKHVTDRMMLNAANIFPFNTPTTKEAYHYRMIFERFFPQNSARLTVPGGPSVACSTAKAVEWDAAWSNNLDPSGRAALXVHASAYGNQVKAVEPGEIIPKE

SEQ ID NO: 3690 - protein, 341 aa, Mycobacterium sp. S65
MDAIVLKGTNDVGLTSVPDPAPQPGEVIIEVAATGLCGTDLHEYVAGPTFSQPPVVLGHEVSGRIVEVGAGIDRCRIGEGAAVIPMDFCGSCHYCHRSLYHLCQRPGWIGLTRNGGLASHVAVPSRLAVRVPDAVDLQEAALTEPTAVAFHAVRRAELLLGETVLVLGAGALGLTVIQCARAAGAARIYVTEPSRVRGNLARDLGATLVLDPHEPGTTARILEETRGVGVDVVFHVAGSVEAFTQGLDCLRKQGRFMEMSSWAGPASLDVNRHLLKETQLRMVFGYDMFDDFPAVLALMADGKIALTPQITTRIPLDSAVEEGLNGLLEAREGLIKVLVRP

SEQ ID NO: 3691 - protein, 500 aa, Brassica oleracea
  unsure (1)..(500): unsure at all Xaa locations
MGRKMLADGELDKAVAAEEATETHYDFDLFVIGAGSGGVRAARFSANNGAKVGICELPFHPISSEEIGGVGGTCVIRGCVPKKILVYGATYGGELEDARNYGWEINENVDFTWKKLLQKKTDEILRLNNIYKRLLANAAVKLYEGEGRIVGPNEVEVRQIDGTKISYTAKHILIATGSRAQKPNIPGHELAITSDEALSLEEFPKRAVVLGGGYIAVEFASIWRGMGGTVDLFVRKELPVRGFDDEMRALVARNLEGRGVNXHPQTSLTQLIKTDDGIKVISSHGEEFMADVVHLLLARNPNTKRLNLEAVGVELDQAGAVKVDEYSRTNIPSIWAVGDATNRINLTPVALMEATCFANTVFGGKPTKADYSNVACAVFCIPPLAVVGLSEEEAVEKATGDILVFTSGFNPMKNTISGRQEKSLMKLIVDEQTDKVIGASMCGPDAAEIMQGIAIALKCEATKAQFDSTVGIHPSSAEEFVTMRTVTRRIAYKAKPKTSL

SEQ ID NO: 3692 - protein, 242 aa, Chlorobium tepidum TLS
MMSSSKETAKSLIQTKSRSSIRNMFDEVAPTYDFLNHLLSLGIDNYWRVVAAKKARKQLEGEREPKILDVATGTGDLAASMAKIPGAKVTGYDLSPEMLAIARKKYPNIEFLEGFAEKMPFDDRSFHVVSAGFGVRNFEDLAQGMKEFHRVLKPGGCAYIIEPMIPRNAVMKKLYLIYFKNVLPKIAGMFSKSTFAYDYLPNSVEQFPQAEAFTKILKNAGFKKAEYFPMTFETSILYVAMK

SEQ ID NO: 3693 - protein, 541 aa, Ralstonia metallidurans CH34
MPTDLQAWNALRQHHDVVRETPMQQWFAEAGAAQRVDAFSLEASGLYLDYSKNRITGETLALLMKLAEEAGVPARRDAMFAGEHINATEDRAALHVALRALPDAPFKVDGASVMPAIHDVLRRMREFAGRVRSGVWTGSTGQGITDIVNIGIGGSDLGPRMVCRALAHLADPRGPRVHFVSNVDGTELAETLQRLDPARTLAIVCSKTFTTLETMANACSMRDWFLRHGVAENQLARHFVAVSTNRDAVVDFGIDPNNMFEFWDWIGGRFSLWSSVGLSIALAVGFDAFEDLLLGARAMDDHFRTAPLAQNMPVVMAMLGIWYRNFHDMPTSCMAPYSTSLELFPAFLQQLEMESNGKSVQLDGRPVDADTAPVVWGTAGTNGQHAYFQMIHQGSQIVPVDFVAPLVPPRELPGHHVKLLANCFAQAEALMRGRSAEELQAAGVDAARIPHMVFEGNRPSNMLLMENLTPHVLGALIALYEHRTFVQGIVWNINSFDQWGVELGKILARPIEAELSGNATEAHDASTAALIARARRSLARS

SEQ ID NO: 3694 - protein, 184 aa, Glycine max
MAASDRTVLQFSSSSSSSQSLSAKVHPLVIFNICDCYVRRPDQADRVIGTLLGSVLPDGTVDIRNSYAVPHNESIEQVALDIEYHHNMLISHQKVNPKEIIVGWYSTGLGVTGGSALIHEFYSREVPNPIHLTVDTGFTNGAGTIKAYVSNNLSLGERQIAAQFQEIPLDLRMVEAERIGFDML

SEQ ID NO: 3695 - protein, 341 aa, Photorhabdus luminescens subsp. laumondii TTO1
MKALSKLKAEEGIWMIDVPEPELGHNDVMIKIRKTAICGTDVHIYNWDDWSQKTIPVPMVVGHEYVGEVVAIGQEVKGFKIGDRVSGEGHITCGYCRNCRGGRTHLCRNTIGVGVNRAGCFAQYLVIPAFNAFKIPDNISDELAAIFDPFGNAVHTALSFDLVGEDVLVSGAGPIGIMAAAVCKHVGARHVVITDVNEYRLELARKMGVTRAVNVSQENLTDVMAELGMTEGFDVGLEMSGAPAAFRTLLNTMNHGGRVALLGIPPSDMAIDWNQVIFKGLFIKGIYGREMFETWYKMATLIQSGLDLTPIITHRFSIDDFQKGFDIMRSGQSGKVILNWD

SEQ ID NO: 3696 - protein, 236 aa, Leuconostoc mesenteroides subsp. mesenteroides ATCC 8293
MTLSPKNTDVKSLFNTIAPEYDKMNNIISLGAHKKWRQKVMDKMVFPRKAQIIDLATGTADWAIALAENSDSDSEIIGLDFSESMLVVGQTKVDISDYSEKITLEQGDVMDLEFPDNSFDIVTIGFGLRNLPDPKQGIKEMYRILKPGGQLVILETSQPDSPLVKPFWQLYFGHVMPLFGRVFAKGKYQEYKYLDETTEHFMDYMTLGQLLLKSGFKKVRISRFNLGAAAAHYATK

SEQ ID NO: 3697 - protein, 245 aa, Anabaena variabilis ATCC 29413
MSLTSIPSLREQQHPLIRQLADCIEEVWHQHLDLSPYHLPAELGYVEGRLEGEKLTIENRCYQTPQFRKMHLELAKVGNMLDILHCVMFPRPEYDLPMFGCDLVGGRGQISAAIADLSPVHLDRTLPASYNSALTNLDTLNFSQPRELPEWGNIFSDFCIFVRPSSPEEEAMFLGRVREFLQVHCQGAIAASPVSAEQKQHILAGQHNYCSKQQQNDKTRRVLEKAFGTDWAENYMTTVLFDLPE

SEQ ID NO: 3698 - protein, 487 aa, Escherichia coli
MITEFVFIPIFAIAAGVAQSLQYLNRYHVIREPPEHILNRLPSSASALACSAHALNLIEKRTLDHEEMKALNREVIEYFKEHVNPGFLEYRKSVTAGGDYGAVEWQAGSLNTLVDTQGQEFIDCLGGFGIFNVGHRNPVVVSAVQNQLAKQPLHSQELLDPLRAMLAKTLAALTPGKLKYSFFCNSGTESVEAALKLAKAYQSPRGKFTFIATSGAFHGKSLGALSATAKSTFRKPFMPLLPGFRHVPFGNIEAMRTALNECKKTGDDVAAVILEPIQGEGGVILPPPGYLTAVRKLCDEFGALMILDEVQTGMGRTGKMFACEHENVQPDILCLAKALGGGVMPIGATIATEEVFSVLFDNPFLHTTTFGGNPLACAAALATINVLLEQNLPAQAEQKGDMLLDGFRQLAREYPDLVQEARGKGMLMAIEFVDNEIGYNFASEMFRQRVLVAGTLNNAKTIRIEPPLTLTIEQCELVIKAARKALA

SEQ ID NO: 3699 - protein, 469 aa, Glycine max
  unsure (1)..(469): unsure at all Xaa locations
MASEEAECISNLFKPIYLKEVAELRQYVPNLQSRPNPLDHNPYFDTRQLQQQQGFYLTESDVLLRQIGNDLSPYTLCFFXCHHSPRFAYHRAGPRKNIYFDPSIVRVAIVTCGGLCPGLNTVIRELVVGLWQLYGVRHIFGITAGYRGFYSSVPLPLNPKLVHHWHNVGGTLLQTSRGGFDLHNIVDAIQTHAFNQVYIIGGDGTMRGAVKIFDEIKHRKLEVAVVGIPKTVDNDVGIIDRSFGFQTAVEMAQEAISAAHVEAESAVNGIGLVKLMGRSTGHIALHATLSSRDVDCCLIPEIDFFLEGKGGLLEFLGQRLKENGHAVLVVAEGAGQDIIPRTDSQKDERDESGNPVFLDVGVWLKSELNKWWKREHPNELFTVKYIDPTYMIRAVHANATDNLYCTLLAHSAIHGVMAGYTGFVAGPINGNYAYIPLEDVARANNPVDTQDHKWSWVRSVTNQPDFVRR

SEQ ID NO: 3700 - protein, 424 aa, Chlamydia muridarum
MFDVVISDIEAREILDSRGYPTLYVKVITNTGIFGEACVPSGASTGIKEALELRDQDPKRYQGKGVLQAVANVEKVLLPALQGFSVFDQITADAIMIDADGTSNKEKLGANAILGVSLALAKAAAATLERPLYRYLGGAFSHVLPCPMMNLINGGMHATNGLQFQEFMIRPISAPSLTEAVRMGAEVFHTLKKILQNRQLSTGVGDEGGFAPQLASNSEALDLLLAAIEKAGFIPGEDISLALDCAASSFYNTQDKTYDGKSAADQVAVLTELCDRYPIDSIEDGLAEEDFEGWKLLSETLGDRIQLVGDDLFVTNSALIAEGIAQGLANAVLIKPNQIGTLTETAEAIRLATTQGYATILSHRSGETEDTTIADLAVAFNTGQIKTGSLSRSERIAKYNRLIAIEEEIGPEAVFQDSNPFSKA

SEQ ID NO: 3701 - protein, 220 aa, Brucella suis 1330
MRMLEKGKLIVASHNAGKLREFDGLIGPFGFEVSSVAALGLPEPDETGTTFEENAYIKALAAAKATGFPALSDDSGLMVDALDGEPGVYTANWAETEDGKRDFDMAMQKVENLLQEKGATTPDKRKARFVSVICLAWPDGEAEYFRGEVEGTLVWPPRGNIGFGYDPVFLPDGYGKTFGEMTAEEKHGWKPGDASALSHRARAFKLFAEKALNVVSAPAE

SEQ ID NO: 3702 - protein, 630 aa, Mesorhizobium loti
MCGIFGIVLKNEGTPVCAAAVERCADALAHRGPDASGLYINQSVAFAHRRLSIVDAHSRANQPYRDANTGVVVTYNGEIFNYREIKAELRDMGFSFSTVSDTEVLILSYIAWGKSFLNRLDGIFAFALFDPRKSLVLIARDRLGVKPLYYTICDVGLLFASQPNALIRWPGVMHGPDMIGALSFLSYRAVVGARTLFAGISKLEPGHLLEIRNGRHTSERWWNLSARISRSKPDYSDIRRLFGSAVERQLVADVPVAALLSGGLDSSILAYEASARSQIRPVCYTGKVETPDYDETAYAMEVAAEFGLTHRVVPIGEPSDINAVAELVRLRGHPLGMHNETAMFTLAKAISKEHKVVLTGEGADEIFAGYSRLFRTPYDYNRSKIITALPPALAQIARRRLGLGVHCSQLQFFLERYSYFPADEIRSLAIDGQMRTEHEMELFDHFSTQFAEAGGDFFSKISYVLVSTHLPALLEMVDNTTMAAGLEARVPYTDHQLVTAAMAMPGSQRLRWRSPIASAQALWHPVASFSERLDVSKYPLRREYRSVLPKSVLSRKKMGFPLPLGQWAVGEGATEYRRLLFDKDSPLGDLFDPAALRRWFKAGRRNPSDSFGRKFWLLANLGIFFKEVFS

SEQ ID NO: 3703 - protein, 151 aa, Nostoc sp. PCC 7120
MMVIFGIFVFPGTSGSVAQVGAKTVPIEVDLVVRGLNVRDPQQLAGNGLKTGGKTKVIIRNQPYGEIEIKSVEQLPRTVVATQPDGSVKELPDPKANNFSTDMLLTLNGKAQVTKDGPVLGNSKVKIGMPFELEGFNYNFNATVIDVRLQS

SEQ ID NO: 3704 - protein, 396 aa, Mesorhizobium loti
MLAHRTNLFGTSGTAAARAAAKAAADAGKEIIDLTAGEIWSELAPTIRDGAIDAINKGVNRYTDSVGMVELREALARKISLDTGQIWKAEEVAVTSGAKQALFNAAMVLLNPGDEVIIPAPYWTTFPAQVLIAGGTPVFVDTKSNGYVPRPEHIKEAVTERTRAIVVNTPSNPAGAVYDVETLMAIAELAVSRNLWIIFDECYGDFVHGGHTHHPIVSVAPEIRARALIVNSFSKSLALTGWRIGYLAGPKGVINAVKALQSHTTSNPNVIAQHAVLAHLQRGGSDYEGKLRSRLTSARRVGLDVLSSLTRVPVARAQGGFYFYLDLSHLLRPGAEDGASTTADDIVTGLLAEAGVAAVSGTAFGDPAGLRLSYGIPPEKLATGLARLVEFLNAWK

SEQ ID NO: 3705 - protein, 194 aa, Nostoc punctiforme PCC 73102
MTKLLVVATGNPGKLREMQAYLKNSGWELTLKPEELDIEETGETFAANACLKASQIAKATGNWAIADDSGLQVDALNGAPGVYSARYAKTDSERIARLLKELGNEVNRQAQFVCAVAIARPDGAIVLESEGICRGEILHAPRGDSGFGYDPIFYVQELQLTFAEMTRELKGSISHRGKAFTALLPQLERIKRRD

SEQ ID NO: 3706 - protein, 264 aa, Streptococcus equi subsp. zooepidemicus
MTKVRKAIIPAAGLGTRFLPATKALAKEMLPIVDKPTIQFIVEEALKAGIEEILVVTGKAKRSIEDHFDSNFELEYNLQAKGKTELLKLVDETTAINLHFIRQSHPRGLGDAVLQAKAFVGNEPFVVMLGDDLMDITNPSAKPLTKQLIEDYDCTHASTIAVMRVPHEEVSNYGVIAPQGKAVKGLYSVETFVEKPSPDEAPSDLAIIGRYLLTPEIFAILENQAPGAGNEVQLTDAIDKLNKTQRVFAREFKGERYDVGDKFG

SEQ ID NO: 3707 - protein, 247 aa, Triticum aestivum
MASPALISDTDQWKALQAHVGAIHKTHLRDLMTDADRCKAMTAEFEGVFLDYSRQQATTETVDKLFKLAEAAKLKEKIDKMFKGEKINTTENRSVLHVALRAPRDAVINSDGVNVVPEVWAVKDKIKQFSETFRSGSWVGATGKPLTNVVSVGIGGSFLGPLFVHTALQTDPEAAECAKGRQLRFLANVDPVDVARSIKDLDPATTLVVVVSKTFTTAETMLNARTIKEWIVSALGPQAVSKHMIAV

SEQ ID NO: 3708 - protein, 353 aa, Neurospora crassa
MPQFEIPEQQWAQVVEKKGGPVVFKQIPVQKPGPDEVLINVKYSGVCHTDLHAMKGDWPLATKMPLVGGHEGAGVVVAKGELVTEVEVGDHAGIKWLNGSCLACSFCMQADEPLCPHALLSGYTVDGSFQQYAIAKAAHVAKIPKGCDLETTAPVLCAGITVYKGLKESGVRPGQCVAIVGAGGGLGSMAIQYANAMGLHAIAIDGGEEKGKNCRELGAQAYVDFTTTKDLVADVKAATPDGLGPHAVILLAVSEKPFHQAVDYVRSRGTIICIGLPAGAKFQAPVFDTVIRMITIKGSYVGNRQDTQEALDFFARGLIKVPIKTVGLSKLQEVYDLMEEGKIVGRYVVDTSK

SEQ ID NO: 3709 - protein, 229 aa, Triticum aestivum
MLLRPPRLPRLSPRRLRSDSPMASTLALLRPSAPSPATTLRAPFRSRVSTRVSVGSAVAAGADTLFADYKPTTAFLFPGQGAQAVGMGKEALNVRAAAELFDKANDILGYDLLNLCIDGPKEKLNSTVISQPAIYVTSLAAVEVLRAREEGQSVINSVDVTCGLSLGEYTALAFAGAFSFEDGLKLVKLRGEAMQDASDAVNSAMVSVIGLDSEKVQQLCDAANEDVDE

SEQ ID NO: 3710 - protein, 311 aa, Erwinia carotovora subsp. atroseptica SCRI1043
MKVAVLGAAGGIGQALALLLKTQLPSGSELSLYDIAPVTPGVAVDLSHIPTAVKIKGYSGEDAKPALAGADIVLISAGVARKPGMDRSDLFNVNAGIVRNLVEQIAITCPKACIGIITNPVNTTVAIAAEVLKKAGVYDKNKLFGVTTLDIIRSNTFVAELKGKQPQDINVPVIGGHSGVTILPLLSQVSGISFSEQEVADLTKRIQNAGTEVVEAKAGGGSATLSMGQAAARFGLSLVRALQGENGVVECAYVESDGKHARFFAQPILLGKDGVAERKDIGTLSAFEQNALSSMLDTLKQDIELGETFIK

SEQ ID NO: 3711 - protein, 312 aa, Clostridium tetani E88
MSNKIAFLFPGQGSQYVGMGKELYDNFKECRDIFNRAEELLDFNVTDLCFKGPDEKLNKTEFTQPAILTVSIAISKLIKKRGIKAEIAAGLSLGEYSALIYSGMLSFEDGVKLVRKRGKFMEEAVPKGTGGMAAIIGLKEEEIYKVCHEVSHIGIVEPANFNCPGQIVISGEINALRIACEMCQEKGALKVAMLKVSGPFHSSLLKKAADNLEKELNNIQFQKGNIPVITNVTADFMELDKIKDTLKSQVMHSVKWEQSMREMIKDGVNTFIEIGPGKTLTTFLKKIDRKISAYNIEDIKSLDKTLNKLDMG

SEQ ID NO: 3712 - protein, 606 aa, Mycobacterium tuberculosis H37Rv
MSYVLATPEMVAAAANNLAQIGSTLSAANAAALAPTTGVLAAGADEVSAAVASLFSGHAQAYQTLGTQAAAFHERFIQALSTAAGAYGSAEAANASPLQQALNVINAPTQTLLGRPLIGNGTNGAPGTGQAGGPGGLLYGNGGNGGSGGVGQAGGAGGSAGLIGIGGTGGAGGAGAVGGVGGNGGWLYGNGGAGGLGGTGVAGVNGGMGAAGGAGGNAYLFGSGGAGGQGGMGAAGADGVNPTPTGTADAGSTGTDQTLGGNAIGGNGGPGDAGDAMTSGGAGGSGGNAVSTVNGDAVGGEGGKGGEGAYGGAGGAGGSAASIGNAAIGGNGGAGGNAQAPGGVGGAGGEGGDAQVGTNSPSNAEAGNGGSGGNGFDSFASGGTGGAGGTGGAGGRGGLLIGDGGAGGAGGVGGTGGSGAPGGGGGAGGDGGAANTDSAGSSRKAFGGDGGVGGDGASALGTGGEGGIGGQGGNGGAGGLLIGNGGAGGVGGTAGAGGTGGSGGAGGAGGAGGGGTNSGPGAAFGGNGNTGGNGGNGGAPGALGGKGGSGGLIGRAGSDGGVGAGGAGGAGGAGGTGGEGGTGGDGKTTDGNPGMGGSPGSAGQPG

SEQ ID NO: 3713 - protein, 436 aa, Photorhabdus temperata
MHLQNTWREEYIKCQTLYARHPLFTKIKVRLSMLAVKKSSKLDNVCYDIRGPVLKEAKRLEEEGNKVLKLNIGNPAPFGFEAPDEILVDVIRNLPTAQGYSDSKGLYSARKAIMQHYQARNMLDVSVEDIYIGNGVSELIVQAMQALLNTGDEMLVPAPDYPLWTAAVSLSSGKAVHYMCDEGSDWFPDLDDIRNKITPRTRGIVIINPNNPTGAVYSKALLLEIVEIARQHNLIIFADEIYDKILYDDAEHHSIAALAPDLLTVTFNGLSKTYRVAGFRQGWMVLNGPKKHAKSYIEGLEMLASMRLCANVPMQHAIQTALGGYQSISEFILPGGRLYEQRNRAWELINQIPGVSCVKPKGALYMFPKIDAKRFNVHDDQKMVLDLLLQEKVLLVQGTAFNWPEPDHFRIVTLPRLDELEMAIQKFARFIGKYHQ

SEQ ID NO: 3714 - protein, 369 aa, Oryza sativa
VADGVSSTALSRPCPRARSATAPPLLWNSGAAARKAAVATAAAASPPAEGGGKANGGAVAGGISRTVQLGAMILVWYLLNIYFNIFNKLVLKSVPFPYTITTFQFASGSFFITLMWLLNLHPKPRLSLGQYAKILPLALVHTMGNVFTNMSLGKVAVSFTHTIKAMEPFFSVLLSVLFLGETPSFLVLGSLVPIVGGVVLASMTEVSFNWIGFWSAMASNLTNQSRNVFSKKLLADKEETLDDINLFSIMTVMSFLLSAPLMLSVEGIKFSPSYLQSNGVNLQELCMKAALAGTCFHFYQQVSYSLLARVSPVTHSVANCVKRVVVIVSSVLFFRTPISPINALGTGVALAGVFLYSRFKKAKPKAKTA

SEQ ID NO: 3715 - protein, 411 aa, Xylella fastidiosa Temecula1
MSAVSESVLSLSRYYLPVYRPCQVVLVRGQGSRVWDEQGRDYLDLAAGIAVCCLGHCDPDLVAALVEQAGRLWHTSNVFYSEPSLRLAQELVDVSRFAERVFLCSSGTEANEAAIKLVRKWAAAQGRLPEHRTIVTFRGSFHGRTLGAVTATAQPKYQEGYEPLPGGFRYVDFNHIEALEAAMVGGDVAAVMLEPIQGEGGVMPIAPGYLAQVRALCDRYGALLVLDEIQCGMGRTGTLFAYWQEEVVPDIVTLAKGLGGGFPIGAMLAGPKVAEVMQFGAHGTTFGGNPMAAAVARVALRKLASVEIAANVQRQSVALRAGLEEISEAFGGVFTQVRGRGLMLGAVLAPLYAGQASAILEVAAEHGVLLLQAGPDVLRFVPALNVSDEELADGLVRLRAALGDYVSRCRG

SEQ ID NO: 3716 - protein, 525 aa, Zea mays
  unsure (1)..(525): unsure at all Xaa locations
MAVAPMDCAAGSISLGHKVLGRFGVPNSSRLRWVGYDRKPRTDQLIARAVSVDRTQLDFSNPDWKKQFQEDFDKRFSLPHLTDVIDVEPRPTTFSLKSRAPLENANGTMQGSWNGYVNDDDRALLKVIKFASPTSAGADCIDPDCSWVEQWVHRAGPRKQIYFEPQYVKAGIVSCGGLCPGLNDVIRQIVLTLEKYGVKNIVGIQHGFRGFFEDHLSEVPLSRHVVQNINLAGGSFLGVSRGGANISDIVDSIQARRLDMLFVLGGNGTHAGANAIHDECRKRKLQVSIVCVPKTIDNDILLMDKTFGFDTAVEAAQRAINSAYIEAHSAFHGIGLVKLMGRSSGFITMHASLSSGQVDICLIPEVPFTVDGPNGVLRHLEHLIETKGFALVCVAEGAGQEYFQKSNATDASGNMVLSDIGVHLQQKIKSHFKDIGVHSDVKYIDPTYMLRAVRANASDAILCTVLGQNAVHGAFAGFSGITTGXCNTHNVYLPIPEVIKSTRFIDPNSRMWHRCLTSTGQPDFH

SEQ ID NO: 3717 - protein, 554 aa, Oryza sativa
MESHRFQFACIATLFDFLVTLNYSVQSVLLSFTYHTVISAARISDLISTRVPSNLSRPSIRSDGLHYRDRALFLRPPPSIPAPAVPISAYRRVATKRGLGGSSTARSVSLSRSRYLSLSLSLSVLDSLAQEEDQPERGGEGRRRDGSELVVLPRRGRDNSSILWLEDEEGEVGERRSGGCRSMVGDLAAGGGGGSGGGGVEEEEDMFPRQSEECVASLVEREQAHMPRADYGERLRGGGGDVDLRVRSEAIGWIWEVYTYYNFSSVTAYLAVNYLDRFLSQYELPEGRDWMTQLLSVACLSIAAKMEETVVPQCLDLQIGEPRFLFEVETIHRMELLVLTNLNWRMQAVTPFSYIDYFLRKLNSGNAAPRSWLLRSSELILRIAAGTGFLEFRPSEIAAAVAATVAGEATGVVEEDIAEAFTHVDKGRVLQCQEAIQDHHYSMATINTVQPKPASTRRGSASASSSSVPESPVAVLDAGCLSYKSDDTDAATIASHGGGRRKSCFDSSPVTSKKRRKLSSLYTTHLDKGKVNWFRLQRLLERKNTGRGPKGREF

SEQ ID NO: 3718 - protein, 322 aa, Staphylococcus epidermidis
MKKIAVLTSGGDSPGMNAAVRAVTRTAIYNNIEVYGVYQGYQGLLDDDIHKLELGSVGDTIQRGGTFLFSARCPQFKEEDVRKKAIENLRKRGIEGLVVIGGDGSYRGAQRISEECKEIQTIGIPGTIDNDINGTDFTIGFDTALNTIIESVDKIRDTASSHARTFIVEVMGRDCGDLALWAGLSVGAETIVLPEVNTDIKDVAEKIEQGIKRGKKHSIVMVAEGCMSGQECADELTKYINIDTRVSVLGHIQRGGSPSGADRVLASRLGGYAVELLKQGETAKGVGIRNNQLTSTPFDEIFAESDRKFNSQMYELAKELSI

SEQ ID NO: 3719 - protein, 260 aa, Exiguobacterium sp. 255-15
MKQLEGKVALITGAASGIGLEIAEEFAQEGAKVVIVDLQENAAKQAAETLQSKGFEAFAVAGDVTSETAIQSSIEQTMNHYGRIDIVINNAGMQHVSPIEEFSTEKFDLLQSIMLRAPFLYTKYVFPIMKKQGFGRILNMSSINGLIGFAGKAAYNSAKHGVIGLTKVAALEGATSGITVNAICPGYVDTPLVQKQLSSLAETRNVPLDRVLEEVIYPLVPQHRLLQVKEIADYAIFLASDKAAGVTGQAVVLDGGYTAQ

SEQ ID NO: 3720 - protein, 525 aa, Treponema denticola ATCC 35405
MEWKNLDKCTSFTQLQKAHKEQAENLKLADIFDTENSVKRVKNYSVKMGGNLKYNYAAKPVNDEILKALQSLADEQKLIEKYELLLNGDFINTGENRMVLHQLTRGQLKNDVVYKGVNMRSFYLNELKKIKEFSEAVHSGKIKTSQGKVFTDVVQIGIGGSDLGPRAMYIALKNRAKKKMRAHFISNVDPDDAAEVLNSINLASTLFILVSKSGTTQETLANERFVKSVLEKNGLDCKKQMLAVTSETSPLANNPDYLTSFYMDDFIGGRYSSTSVCGAAVLALAFGMETVEAFLKGAAEGDKLSLNKNIKENASLLDALLGVYERNILGCSATAILPYSQALSRFPAHLQQLDMESNGKTVNRFGEKVSYKTGPVIFGEPGTNGQHSFYQLLHQGSDIIPLQFIGFKKSQIGLDIESEGSTNMQKLNANLAAQIMAFAAGKTDENKNKDFAGNRPASLIYGEELNPENLGALLAHYENKVMFQGFIWNLNSFDQEGVQLGKTLAKKVLSNDMPPALKAFSEFLL

SEQ ID NO: 3721 - protein, 434 aa, Bordetella pertussis Tohama I
MVGMTKMTQVFQKVSAIRGMNDVLPGPSARWEKFEEIVRGWLRSYGYRNVRTPVLEHTRLFARGIGEVTDIVEKEMYTFTDALNGDSLTMRPEMTAGIVRASIEHNMLYDRPHRVYAIGPVFRHERPQRGRYRQFHQIDVEALGFAGPDVDAEMIVMLARLWKLLGLQDVRLELNSLGQPAERAAHRAALIEHLERHQDVLDEDGRRRMYSNPLRVLDTKNPAMQEMADSAPRLFDFLGEASRSHFDGLCQRLADAGIEYRLNPRLVRGLDYYNLTVFEWVTDRLGAQGTVCGGGRYDGLVELLGGKPTPAVGFAIGMERLLDLWEQSVEIEQPAECEVYIVHQGEEGQRLAARVGEQLRDAGLDVIVHAGAAGFKAQFKRADASGARIAVILGGDEVASRTASIKHLRGPVGADAAQQQVPLAQLADVLKSKG

SEQ ID NO: 3722 - protein, 205 aa, Gossypioides kirkii
CKGYTPLFPRILGHEASGIVESVGEGVNDLKPGDHVLPIFTGECKECRYCLSEESNNMCELLRINCDRGVMLADGKTRFSINGKPIYHFVGTSTFSQYTVVHVGQVAKISPTAPLDKVCPISCGICTGFGATVNVAKPKKGQTVAIFGLGAVGLAAAEGARVCGASRIIAVDLNPRRFEEAKRFGITEFVNPKDYDKPVQEVIVE

SEQ ID NO: 3723 - protein, 238 aa, Pirellula sp. 1
MPRLSRLIPTLCLATFVMTSPGNAQDDSAAKVDDQLGYFLGFTVGNSFVQQGFEPTDFTVEGMNQGLKDALSEKDPALSDEQLQEIQGKIQAMMQKRQAERMAELKKQGVMNKEKSDLWLKQNAKAKGIKELEGGLQYKVVKEGEGASPTAEDTVAVHYTGKLTNGEVFDSSVERGQPAKFPVGRVIQGWQMALQKMKVGSKWMLYIPPELAYGENGSPPKIGPNEVLVFEVELLEIL

SEQ ID NO: 3724 - protein, 413 aa, Rhodospirillum rubrum
MDHDFYRIKRLPPYVFAEVNAMKARARAAGDDIIDLGMGNPDQPTPQHIVDKLCEAATNPRAHGYSMSRGIPGLRKALAGYYARRFNVELDPETEAIVTLGSKEGLANLAQAITSPGDIVLAPNPSYPIHAFGFIIAGGAVRHIPAKPGPEFLEAMERGVRHSVPKPVAVLINFPSNPTAYVADLDFYGQVVDFCRHHGIWILSDIAYSEIYFDHKPPPSVLQIPGAKEVAIEFTSLSKTYNMPGWRIGFAAGNRHLIGALTRIKSYLDYGAFTPVQVAATAALNGPQDCVEDIRTLYRERRDVLIDGLAQAGWDIPSPPASMFAWAPLPKGFEHLGSLEFSKLLMREAKVAVSPGVGFGEYGDSHVRIALVENKHRIRQAVRNIKAFLGGGQGGETGLGAKGEDKQKADEAV

SEQ ID NO: 3725 - protein, 473 aa, Moorella thermoacetica
MAKEYDVVILGGGTGGYVAAIRASQLGLKTAVVEKGKLGGTCLHAGCIPSKALLRSAEVYAQTKNSEAFGVIVGDVRLDFAKVQARKATIVDQLHKGVQHLMKKGKIDVYAGIGRLLGPSIFSPLPGTVSVEMNDGSENEMLVPKFVVIATGSRPRTLPGLEPDGEFVMTSDEALQMEVLPSSILIVGGGVIGMEWASMLNDFGVEVTVLEYADRILPTEDEDVSKEMEKLLLRRGVNIVTGARVLAETLEKGNGVTIQAEHQGERKTFAADKMLVSIGRQANIEGIGLENTEIVVENGYIQTNEFGQTKESHIYAIGDVIGGLQLAHVAAHEGIVAIEHLAGRNPAPIDYSMVPRCIYTRPEAAAVGLTEQEAKAKGYDVKIGKFLFKAIGKALVFGEAEGFVKLIADRNTDDLLGVHMVGPHVTDLISEAGLARVLDAAPWEVAHAIHPHPTLSEAMAEAALAVDGKAIHF

SEQ ID NO: 3726 - protein, 262 aa, Manihot esculenta
PISKMVTAHFVLIHTICHGAWIWHKLKPALERAGHKVTALDMAASGIDPRQIEQINSFDEYSEPLLTFLEKLPQGEKVIIVGESCAGLNIAIAADRYVDKIAAGVFHNSLLPDTVHSPSYTVEKLLESFPDARDTEYFTFTNITGETITTMKLGFVLLRENLFTKCTDGEYELAKMVMRKGSLFQNVLAQRPKFTEKGYGSIKKVYIWTDQDKIFLPDFQRWQIANYKPDKVYQVQGGDHKLQLTKTEEVAHILQEVADAYA

SEQ ID NO: 3727 - protein, 1115 aa, Ipomoea nil
MENYGKAVTFSSSATSNLNTGKAIAQYNADAKLMAEFEQSRESGKSFDYSRSVIHAPQNVTEEEMTAYLSRIQRGGLIQPFGCMLAIEEPSFKIVGFSENCFDLLGLKSGVEPPERMSLIGIDARTLFTLSSRASLAKAVASREISLLNPIWVHSKINQKPFYAVLHRIDVGIVIDLEPANSADPALLLAGAVQSQKLAVRAISRLQSLPGGDIGTLCDTVVEDVQKLTGYDRVMVYKFHDDSHGEVVSEIRRSDLEPYLGLHYPATDIPQAARFLFKQNRVRMICDCNAQPVKVLQCEELKQPLCLVNSTLRSPHGCHTKYMANMGSIASLVMAVVINSSESMKLWGLVVCHHTSPRYVPFPLRYACEFLMQAFSLQLYMELQLASQLAEKKILQTQTLLCDMLLRDAPFGIVTQTPSIMDLVRCDGAALYYNGKCWLLGVTPTETQVKDIAEWLLHNHGDSTGLSTDCLSDAGYPGAPLLGDAVSGMATARITSKDFLFWFRSHTAKEVKWGGAKHHPEDKDDGGRMHPRSSFIAFLEVVKSRSLPWEDSEINAIHSLQLIMRDSLQGIGENYMKSVSSPQQNDSDGVRFYELSSMALELVRLVETATVPIFGVDSSGLINGWNAKIAELTGLQANVAIGKYLIDDVTHEDSHETFKALMCRALQGEEDRNVEVKLLKFGNHPTKEVVYLVVNACTSRDYKNDIIGVCFVGQDITPEKAVMDKFVRLQGDYEAIIQSLNPLIPPIFASDENACCSEWNAAMERLTGLVKCEVIGKRLPGEIFGGLCRLKGQDALTKFMILLYQGISGHDTEKLSFGFFDRKGNFIDVFITANKRTDERGNIIGCFCFLQTMAVDHPQISARDIEDDRECLSTLKEFAYIQQQMKNPLNGIRFTHKLLEGTVTSDHQKQFLETSEACEKQILSIIENMDSGGIVDGNRVELKTEEFVIGNVIDAVVSQVMIPLKEKNLQLLHDIPDQIKSLPIYGDQIKLQLVLSDFLLSIVRHAPSPDGWVEIRVSPGLKLIQDGNVFIHIQFRMTHPGQGLPSALIEDMVRGGTRWTTQEGVVLHLSQKLVRMMNGHVHYVREQQKCYFLIDLDFKTQKPRSRESSMDTKAD

SEQ ID NO: 3728 - protein, 320 aa, Escherichia coli O6
MIKKIGVLTSGGDAPGMNAAIRGVVRSALTEGLEVMGIYDGYLGLYEDRMVQLDRYSVSDMINRGGTFLGSARFPEFRDENIRAVAIENLKKRGIDALVVIGGDGSYMGAMRLTEMGFPCIGLPGTIDNDIKGTDYTIGFFTALSTVVEAIDRLRDTSSSHQRISVVEVMGRYCGDLTLAAAIAGGCEFVVVPEVEFSREDLVNEIKAGIAKGKKHAIVAITEHMCDVDELAHFIEKETGRETRATVLGHIQRGGSPVPYDRILASRMGAYAIELLLAGYGGRCVGIQNEQLVHHDIIDAIENMKRPFKGDWLDCAKKLY

SEQ ID NO: 3729 - protein, 563 aa, Shigella flexneri 2a str. 301
MRRFAELSKTLQTKDKAMAIHNRAGQPAQQSDLINVAQLTAQYYVLKPEAGNAEHAVKFGTSGHRGSAARHSFNEPHILAIAQAIAEERAKNGITGPCYVGKDTHALSEPAFISVLEVLAANGVDVIVQENNGFTPTPAVSNAILVHNKKGGPLADGIVITPSHNPPEDGGIKYNPPNGGPADTNVTKVVEDKANALMADGLKGVKRISLDEAMASGYVKEQDLVQPFVEGLADIVDMAAIQKAGLTLGVDPLGGSGIEYWKRIGEYYNLNLTIVNDQVDQTFRFMHLDKDGAIRMDCSSECAMAGLLALRDKFDLAFANDPDYDRHGIVTPAGLMNPNHYLAVAINYLFQHRPQWGKDVAVGKTLVSSAMIDRVVNDLGRKLVEVPVGFKWFVDGLFDGSFGFGGEESAGASFLRFDGTPWSTDKDGIIMCLLAAEITAVTGKNPQEHYNELAKRFGAPSYNRLQAAATSAQKAALSKLSPEMVSASTLAGDPITARLTAAPGNGASIGGLKVMTDNGWFAARPSGTEDAYKIYCESFLGEEHRKQIEKEAVEIVSEVLKNA

SEQ ID NO: 3730 - protein, 388 aa, Oryza sativa
MRGPPHAAAVLLVAAAALCLGGRAEELEASSPEFNYPAVFNFGDSNSDTGGRVAAGFESIAPPYGSTFFGSPSGRFCDGRLIIDFLMDAMDMPFLNAYLDSVGAPNLRAGVNFAQAGCSITPATATSVSPFSFGLQIKQFFAFKDKVTKLLSKGDTYRRYIPQSDYFSRGLYTFDIGQNDLAGEFYWKTEDQVAASIPTILLEFETGLKKLYEQGARKFWIHNTGPLGCLPQNVAFFGKDRSQLDELRCVAKHNRVAKLFNLQLHALCTKLRGEFAGASITYVDIYTIKYSLIANYSRYGFENPIQACCGYGGPPLNYDSRVPCGQTASLNGNLVTAKGCKDSTEFVNWDGIHYTEAANFHIASQILTGRYSDPPFADKMPFLIKPKF

SEQ ID NO: 3731 - protein, 272 aa, Thermus aquaticus
MSPFLGELIGTALLIIFGAGVCAGVNLKKSYAANSGWIVITMGWGLAVAVAVYAVGQYSGAHLNPALTVALALAGDFPWKDVPGYIAAQVLGAVMGAVIVYLHYWPHWKETDDPGVKLGVFATGPAVPNAAANLLSEIIGTFVVGVAILAIGANQFADGLNPFVVGFLIVAIGLSLGGTTGYAINPARDFGPRLAHFLLPIPGKGSSNWAYAWVPIVGPLLGGALGSLVYKAVFLGKPTGALWGVLAATAVVLAAAKMAKGKTANAASRRSL

SEQ ID NO: 3732 - protein, 323 aa, Acinetobacter sp. ADP1
MPKFFLRWIDSWSNLNHTQVSTQVYSSQPQRIQWLRIIPFIVLHIACLAVFWIGFSWFAIFFMLGFYVIRMFAITAFFHRYLSHKTFQTSRPVQFLFILIGTMSAQRGPLWWAAHHRYHHRFTDTDQDPHSSTKGFWYSHVGWFLNEENFAIRKSIIKDWLKYPELIWLDRFSLPVVLATAFAIYALGEVLAIYAPQLKTNGLQLLVWGFVVSTVLLTHATLCINSLAHRYGSKDFETDDQSRNNFFLSIITLGEGWHNNHHFYAGSTRQGFFWWQIDVTYYLLKIMSWCGLVWAIKPVPERIYTSSKKSNSLKDKKINITNI

SEQ ID NO: 3733 - protein, 524 aa, Triticum aestivum
  unsure (1)..(524): unsure at all Xaa locations
MLLRTRRCLPAALSRAAVHPRVSPALPSPGAPRQHGPVAVANQRSALEPRSGPIDWVRSSTMARANPATLFPASTGGHYRVGMQARWFSSAGLPPHMVIGMPALSPTMNQGNITKWRKQEGDKIEVGDVICEIETDKATLEFETLEEGYLAKILVPEGXKDVQVGQPIYVTGEESDDIEKIPADTSFGGDVGEDESSGSAAQTVEVDAAEQSPVMSRISPAAKMLIKEHGLNASLLKASGPRGTLLKGDVLAALKSGTALSSAKEKTAPAAPSPQPARDSQVHSQTTSPKSDTFEDITNTQIRKVIAKRLLESKQTTPHLYLSKDVILDPLLAFRNELKEQHGVKVSVNDIVIKAVALALRNVPEANAYWDNSKEEAQKCDSVDISIAVATEKGLMTPIIRKRDQKTISAISSEVKQLAEKARAGKLAPNEFQGGTFSISNLGMYPVDHFCAIINPPQAGILAVGRGNKVVEPVMDNDGTEKAAVVTKMMLTLSADHRIFDGQVGGKFFTELALNFSDIRRLLL

SEQ ID NO: 3734 - protein, 450 aa, Eremothecium gossypii
MCCSFFRNCSIMLISQCYWCAVLCTSLVLGPCNPLRPCSRAGYQPARVAQKGGLRNVARAIRTAASPQLPEVPGALGRLRYSGWARAKGALRGYARTERGLRTTQWNCLARSIKLAARRKDAQQTHIYMGAGGSRQQAGRTSKMSELPQDVEPQVLHTQYVAPREAQTQYVAQEAHPHVQDSYYTNSVTTKTHSTRTHDTHDELDGSEDFGRNLLTAALGEFFGTIFFLWPAFVIAQIANHDETTAGPGSHPGQLIMISLGFGLSVMVAVFIFYRVCGGNLNPAVTLTLILAGAVPLVRGLVMMVAQVLGGMVAAGLVKAMTPGPVLFSNALGGGCSRSRGVFLEAFGTAILCTTVLFLAVEKHRATYMAPFGIGMALLVAHLVCVFYTGAGLNPARSFGPAIAHLSFPNYHWIYWIGPFLGSLIAWGVWKLFKVLHYETCNPGQDSDRE

SEQ ID NO: 3735 - protein, 1520 aa, Neurospora crassa
MASTTQIKTPQEAVARIAYLASDVVVSVQPSLAAESDFSATLKSLASSRTQSLVAKAADAVTEIIPVRHNNDPLLSVFTPIRSGRLVSVTTTSEVLLPSIAHLYKLAQLPVVLHVALGPKSLPDYTAITSIRNSGWTFLQSNSLQEAQDLALTAHALAVQSGKGVIHFFDPSSSASEQPIAAEDLSLVQEILNLDNVRRFQSASISGSSIYANDGRVAVVSEQSEPVASQTVLDARQVEAATATATDSLAPAQDGSDESAQTSQEQSEASEASATPSASVATTIDEQAPVVTSEHIYNAFEYSGPSNAENALFVFGSGSPLFAQAIAQAQSDDSFAKAGVLTARLYRPWLGAKLLEAIPKSVKRVAVLEQVSRKTTKWGPLLIDVLTSVKSGPGGVQTIVGHQLGYISQETVVQALRGIFQNLTSEKPVQNLEVGEREAPKEASEYGLEKPKLETAYTKILDQLFGERAYIANSIEKDNAGISNTISATPEYGFGALLARKERKQKFVSEVKEAASNGQFSSDAPKQALAKWVANAEDSKKVEEVASEAVSKLSEDGSDLSKSLLEYKQFFRKQSLWLVGSDAWSYDLGNSGVHHVLASGENVNLLIIDSTPYSERAAADANRRKKDIGLYAMNFGNAYVASTAVYSSYTQVLQAMDEADKFNGPSVVLAYLPYFGEHDSALTVLQETKKAVDIGYWPLYRWNPENEKKGEPSFSLDSERIKKELKEFLDRDNHLTQLMKKEPSFGAVLSEDFGTEIRAQQKRKAKDAYNQLLEGLFGAPLTILYASDNGNAISLSKRLGNRGRARGLKTTVMSMEDYPVEDLATEENIVFITSTAGQGEFPQNGLSFWHAVKDNTSLDLANVRYSVFGLGDSHYWPRKEDKIYYNKPAKDLDRVLANFGAKPLAPIGLGDDQDPDGFQTGYSEWEPKLWEALGVANVDGLPEEPAPRTNEDIKIESNYLRGTIVQGLNDTSTLAISPDDCQLTKFHGTYMQDDRDIRDERKAQGLEPAYSFMIRCRLPGGVSTAKQWVQMDDIANELGNETMKLTTRQTFQFHGVVKSKLKPAMQAINRALMTTIAACGDVNRNVMCSPLPAHSKYHRAVHACAKRISDHLLPNTTAYHEIWLTDDDGAKTQVGGNAVQDFEPLYGPTYLPRKFKVSIAIPPHNDVDVYAHDIGLIAIKNEDGSLAGFNLLAGGGMGATHNNKKTYPQTGRMLGFVTAADVHLACEKVMLVQRDNGDRKNRKHARLKYTIDDMGVDVFKAKVEEYWGQKFEEPRAFHFDSNVDTFGWTKDETGLNHFTMFIENGRIEDTAEFQMKTGLREIAKVHKGEFRLTPNQHLILSNVADEDKPELEKLLAQYKLDNLHHSGLRLSSSACVAFPTCGLAMAESERYLPVLITKLEGVLEEVGLKQDSIVMRMTGCPNGCARPWLAEVAFVGKAYGAYNMYLGGGYHGQRLNKLYRSSIKEEEILTIMKGLLRRYAKEREEGERFGDWTIRAGIIKATTDGRNFHEGVAEEEGDEE

SEQ ID NO: 3736 - protein, 293 aa, Schizosaccharomyces pombe
MVTTVEMLTTWNPVTVSLVSPVIIYWVASAFFGFLHYIELPVFEKYRIHPPEEIARRNRVPQMAVVKAVLFQQLCEVVVGIALAMFEGYPEPIDEAKQMLRYEAFFSKNLPALLQVAPFAPKLAYNFIVPAFQYFFAFFIIDSWQYFWHRYLHYNKKLYNMIHAHHHRLQVPYAMGALYNHPFEGLILDTFGAGVAYLAAGLSPQQAVIFFTLSTLKTVDDHCGYVFPYDPLQMFFANNARYHDLHHQPYGFQKNFSQPFFTFWDHVLGTYMPPKSETPYEKKQKAKNAKKVN

SEQ ID NO: 3737 - protein, 316 aa, Leuconostoc mesenteroides subsp. mesenteroides ATCC 8293
MGFNMKIGLLFSGQGAQQAGMGTDLYEALPEYKSTIDRASEVLGYDLSDVMKNADKIAQTQYAQPAILSMSNAIVNALGSALQQPVAALGLSLGEYSALTAAGAMNFEQAVAIIKDRGRYMQTVGDANPGKMAAIMGEDQKLIEAVLAQLQAKGKQVFPANYNTFAQLVIGGIAADVDEAKATLTAAGIKRTIDLPVSGAFHTPLLKDAAVQLSERLATEAFTDVNYPVYSNTTSEPFIIADLHETLTKQIVSPTYFAQAMKKMLDAGVDTFIEVGPSDTLIKFAKKIAPKDVKRYAIKDLKSFNEVKELLTAEEV

SEQ ID NO: 3738 - protein, 260 aa, Pyrobaculum aerophilum str. IM2
MLLKDRVSIVTAASRGIGAGVATVLAREGSNLVIAARNLERLEGLAKQLSSQYGVSVVPVQADLTRREDVRKIVDEALRHFGKVDILAYNTGPPKPGTFLELTEDDWDYGVRLLLMSAVWITKDVLPYMIERRWGRLIYITSSTLKQPIPTLTLSNVIRISLAGLVKTLAYQLGKYNILVNGIMQGYIDTERVREVAEARAKREGRSLDEILRELEREIPLGRIGKPEEIGELVAFLASEKASYITGSLILIDGGRTLCI

SEQ ID NO: 3739 - protein, 289 aa, Glycine max
MEAPSMAATERTVLQFSSSQSLSTKVHPLVVFNICDCYVRRLDQAERVIGTLLGSILPDGTVDVRNSYAVPHSESVDQVALDIEYHHSMLLSHQKVNPKEVIVGWYSTGLGVTGGSALIHEFYSREVPNPIHLTVDTGFTKGAGTIKAYVSHNLSLGDHQIAAQFQEIPLDLRMVEAERIGFDTLKATAVDKIPSDLEGMEALMGHLLALIDDIHKYVDDVVEGRIDPDNKIGRFISDAVGSIPKLPSSAFEKLVNDSLQDHLLLLYLSSITRTQLSLAEKLNTAAQIL

SEQ ID NO: 3740 - protein, 476 aa, Geobacillus thermocatenulatus
MAKEYDVVILGGGTGGYVAAIRASQLGLKTAVVEKGKLGGTCLHAGCIPSKALLRSAEVYAQTKNGEAFGVIADGVRLDFAKVQARKAAIVDQLHKGVQHLMKKGKIDVFAGIGRLLGPSIFSPLPGTVSVEMNDGSENEMLVPKFVVIATGSRPRTLPGLEPDGEFVMTSDEALQMETLPSSILIVGGGVIGMEWASMLNDFGVEVTVLEYADRILPTEDEDVSKEMEKLLRRRGVNIVTGARVLAETLEKGNGVTIQAEHQGERKTFAADKMLVSVGRQANIEGIGLENTEIVVEKGYIQTNEFGQTKESHIYAIGDVIGGHASLPHVAAHEGIVAIEHLAGRNPAPIDYTMVPRCIYTRPEAAAVGLTEQEAKAKGYDVKVGKFPFKAIGKALVFGEAEGFVKLIADRNTDDLLGVHMVGPHVTDLISEAGLARVLDAAPWEVAHAIHPHPTLSEAMAEAALAVDGKRFIFKF

SEQ ID NO: 3741 - protein, 160 aa, Pseudomonas aeruginosa PAO1
MSAFHDLTLQGLDGQDLPLSPFKGKVLLVVNVASKCGLTPQYAGLENLYQTYRERGFAVLGVPCNQFAGQEPGSEADIQSFCSLNYGVSFPMSAKVEVNGSARHPLYRLLAGEGAEFPGDITWNFEKFLLGPDGRVLARFSPRTAPDDPALVQAIEKALG

SEQ ID NO: 3742 - protein, 375 aa, Arabidopsis thaliana
MPLSLQSPPCATLSASIRKGRWKTLAAGFSVTPLPAVNFSLRRSIPRILASASSSSSPASSSLEAGENNELNAVSAFSEIVPDTVVFDDFERFPPTAATVSSALLLGICGLPDTIFRNAVDMALADSSCAGLETTESRLSCFFNKAIVNVGGDLVKLVPGRVSTEVDARLAYDTNGIIRKVHDLLRLYNEIDVPHDRLLFKIPATWQGIEAARLLESEGIQTHMTFVYSFAQAAAASQAGASVIQIFVGRLRDWARNHSGDTEIESAIKSGEDPGLALVKRSYNYIHKYGYKSKLMAAAVRNKQDLFSLLGVDYVIAPLKVLQSLKDSPAIPDDEKYSFVRKLTPETATHYHFTNKELVKWDQLSLSSSMGPASV

SEQ ID NO: 3743 - protein, 743 aa, Agrobacterium tumefaciens str. C58
MVRMNILDGRHFGLFAASLMQYTKDMNVATPISAEKAASKAEVRIGHTVCPHDCPSACALEVDINADGRIGRVRGANANTYTAGVICAKVARYSERIYHPGRLLTPKRRKGAKGAGDWQEISWEAALDEVADAFVKAEARHGAEAIWPYFYAGTMGQVQRDSIERLRHAKKYSGFFGSICTNMAWTGYVMGTGALRGPDPREIGKADVVVIWGTNAVATQVNVMTHAVKARKERGAKIVVVDIYDNPTMKQADMRIVVRPGTDAALACAVMHIAFRDGYADRNYMARFADDPAGLEAHLKSKTPQWASEITGLSVEEIEAFARLVGTTKKTFFRLGYGFARQRNGAVAMHAALSIATVLGSWQYEGGGAFHNNGDIFRLNKAELMGTAYADPDVRQLDQSQIGRVLTGDAEALRHGGPVTALLIQNTNPVNVAPEQRLVKQGFLRDDLFVAVHEQFMTETAEVADIVMPATMFLEHDDIYRAGGQNHILLGPKLVEPPETVRTNLFVIEELAKRLGVDHMPGFGLSAREHVDRMLKVSGWGDFESLAEEKWIDAQPPFEMAHYLEGFGYGDGKFRFSPDWATGPSPNKPPKNIGVMGPVSEFPKFPDQVDVIEVADADHPFRLATSPARNFLNSTFAETKTSVQKEGRPELMVCPEDAARNDIADGDIVRIGNTRGEVRLHAKIVEGARPGVLIAEGLWPNKAHLDGEGINVLTGADAVAPYGGAAFHDNKVWLRRGDEAGEA

SEQ ID NO: 3744 - protein, 369 aa, Anabaena variabilis ATCC 29413
MEVKAAIAYGAGKPLTIETVQLEGPKAGEVLVEVKASGVCHTDAYTLSGNDPEGLFPAILGHEGAGVVVDVGAGVTSVKPGDHVIPLYTPECRQCAYCLSFKTNLCQAIRGTQGRGVMPDGTSRFSLNGQMIHHYMGTSTFANYTVLPEIAVAKIREDAPFDKVCYIGCGVTTGIGAVIYTAKVEAGANVVVFGLGGIGLNVIQGARMVGANMIVGVDINPSKRALAEKFGMTHFVNPQEVEGDLVAYLVDLTKGGADYSFECIGNVKVMRQALECCHKGWGVSVIIGVAGAGQEISTRPFQLVTGRVWKGSAFGGARGRTDVPKIVDWYMDGKINIDDLITHVMPIEKINDAMDLMHRGESIRSVVTF

SEQ ID NO: 3745 - protein, 177 aa, Glycine max
  unsure (1)..(177): unsure at all Xaa locations
LPCHCSHSSTNKSAAEPVTVSLTIEGRRALLSCLLTTVDGVYACDVAGAVSTSRRALRGAKIPESDYTTLPNGLKYYDLKVGNGAEAKKGSRVAIHYVXAKWKSITFMTSRQGMGVGGGTPYGFDVSQSERGTVLKGLDLGVQGMRVGGQRLFSECYFDILRGESVLVPPTGPYFFP

SEQ ID NO: 3746 - protein, 434 aa, Buchnera aphidicola str. Sg (Schizaphis graminum)
MSKILKIIGREIIDSRGNPTIECEVLLEGGFVGLASVPSGASTGSFETWELRDQDKNRFMGKGVQKAVEIINNKIFYSLKNKNAIDQFDIDQTMINLDGTENKSNLGSNSILSVSLATAKAAASSKGMPLYQHIAEINNTPGVFSMPLPMINIINGGKHANNNIDIQEFMIQPISAKSITEAIRIGAEIFHSLGNLLKDKGMSTTVGDEGGYAPNFKSNEEALNVIQDAVHKTKYKLGKDITLAIDCAASELYNKTRKKYQFIGEGTEFSSQELTHYLKKLSNKYPIISIEDGQDESDWEGFLYQTKELGNSLQLVGDDLFVTNKNILKKGIKKGVANAILIKLNQIGTLTETIETIKIAKKFNYGVIISHRSGETEDTSIADLSVGTASGQIKTGSMSRSDRTSKYNQLIRIEEILNKKRAPFYGLKEVKSSF

SEQ ID NO: 3747 - protein, 159 aa, Exiguobacterium sp. 255-15
MNTSLYEIEVQDATGQTVSLNDYAGEVLVIVNTASKCGLVKQLGDLQQLHDKYADQGVKVLGFPCDQFNNQEFADQQETMQFCQRNYGVTFPMFQKIDVNGPAEHRLYTYLKQQQGGLLSSNIKWNFTKFLVDREGRVVKRFAPVDSIQTIEKTLARYV

SEQ ID NO: 3748 - protein, 498 aa, Chlamydomonas reinhardtii
MADEMDPMTACITALTDAAMTTAQATALCGQFAFAADNSDLSDRLDQTNQGLNTLYLVSCGALVFVMHAGFAMLCAGAIRSKNTMNILLQTVMDAAVSAVAFYILGYGFAYGIGNNPNGFIGDSLFGLSRWVSHSSSSDAGANWQAWFFQWAFAATATTIPAGAVAERLNFNAYLIYSFFISAFVYPVVVHWVWAAEGWLGYARFGGYSHLFRSGMIDFAGSGVVHMTGGLAGLAGCIMVGPRMGRFDSNGQPVEMPGHSATLVVLGTVLLWFGWYGFNPGSQLIINYTASAAVVGRAAVTTTLSGAAGCLSCLLTAFLRHKAWDLVSGCNGALVGFVSITASANVVEPWAALIAGLVGGWVFDAVCLLFLKLRIDDPLSAAPMHAFCGAWGVFFAGLLAKKEYICESYGRDCEGYVADGLFYVGDGRLLAQVIGIISIFAWVFGLMLLLFGGLKAVGLLRISAEEEQAGLDVSKHGGSAYNYDHGLGKPEKAQALGL

SEQ ID NO: 3749 - protein, 515 aa, Shigella flexneri 2a str. 301
MCSIFGVFDIKTDAVELRKKALELSRLMRHRGPDWSGIYASDNAILAHERLSIVDVNAGAQPLYNQQKNHVLAVNGEIYNHQALRAEYGDRYQFQTGSDCEVILALYQEKGPEFLDDLQGMFAFALYDSEKDAYLIGRDHLGIIPLYMGYDEHGQLYVASEMKSLVPVCRTIKEFPAGSYLWSQDGEIRSYYHRDWFDFDAVKDNVTDKNELRQALEDSVKSHLMSDVPYGVLLSGGLDSSIISAITKKYAARRVHHEIHFTVQEGLDAIRDVIYHIETYDVTTIRASTPMYLMSRKIKAMGIKMVLSGEGSDEVFGGYLYFHKAPNVKELHEETVRKLLALHMYDCARANKAMSAWGVEARVPFLDKKFLDVAMRINPQDKMCGNGKMEKHILRECFESYLPASVAWRQKEQFSDGVGYSWIDTLKEVAAQQVSDQQLETARFRFPYNTPTSKEAYLYREIFEELFPLPSAAECVPGGPSVACSSAKAIEWDEAFKKMDDPSGRAVGVHQSAYK

SEQ ID NO: 3750 - protein, 507 aa, Eremothecium gossypii
MAGNNDKTNSAEVREDRVVTNSVGNPINEPFATQRVGQHGPLLLQDYNLLDLLAHFNRERVPERNPHAHGSGAFGYFEVTDDITDVCGSAMFGEVGKRTRALVRFSTVGGEKGSADTVRDPRGFAVKFYTEEGNLDWVYNNTPVFFIRDPSKFPHFIHTQKRNPRTNLKDANMFWDFLTTPENQVAIHQVMILFSDRGIPASYRHMNGYSGHTYKWSNKQGDWRYVQVHIKTDQGIKNLTAEEGAKLAGEDPDFCQQDLVQALERGEYPSWTVYIQTMTEEQAQKLPFSVFDLTKVWPHKDFPLRRVGRLVLNEVPTNFFAQIEQAAFSPATTVPYQEPSADPVLQARLFSYADAHRYRIGPNYHQVPVNCPYASKFFNPAIRDGPMNVDGNLGSEPNYLATNNNYRFLGADRPIQQHQETWQGPAQPVHWATTGDIDFAQATALYHVLGRTPGQQRNLAHNVAIHVASADPPIQERVFQMFSRVDKGLGEAIRSEATALSQKKPKL

SEQ ID NO: 3751 - protein, 622 aa, Neurospora crassa
MRRAAVKALRASYQCTCRGLRVSSRGSPLPLLQSSKAASSGSPTAHYNPRLGTATARYLSSTGARDSSGTHHHSNARPEPLRSSMYVRGAFVTLLSGLVAYGAWYNSGDSNSESPIASTTSATTTATGAVPTRSVLVIGADELHTGTFVGDGPISKTTSDNERVVEMLSPEQATRKLRQYEQSVYVNRGQGVVRYDVAQLPSNDPIEDDHAEKIVEVPNKAPSSDPSDWMFWGVFDGHSGWTTSAKLRQALISFVARELNETYKSSPDLIPSAAAVESAIKTGFTRLDDEIVHQSVQRVLKSNNRLVAAEHLAPALSGSCALLSFYDSKSKLLRVACTGDSRAVLGRRSESGKWTATALSTDQTGSNPDEAARLRKLHPGEEHVVRHGRVLGGLEPTRAFGDASYKWSRELSEKLREKFFGRSVSPLLKTPPYVTAEPVVTTTKIEPEKGDFVVMATDGFWEMLTNEEVVGLVGKWIESQAGSSSKSSGYFSFLQKGSKTALPVESSESEKNSGNKTPIRQRQWGATGTDPMERFVVQDKNVATHLVRNALGGKNQEQVSALLTLPSPFSRRYRDDLTVQVIFFGYDGPKTGEIVVNKEATAAALAAAAADGNKTGPVKPKL

SEQ ID NO: 3752 - protein, 220 aa, Zea mays
  unsure (1)..(220): unsure at all Xaa locations
MGVVVTTRKKKKKKKKKKKKKKKKKKKKKKKKKNCSLASPARGSPVAPVPWEPGSLGSPDAAGPRLAWPPPPSPALLRRCSPVAPLPWLTPSFRSLSPFSRRNKGSEMAMQATRRLASLSLQRRLLLPSQTEAPRIPTGGGGAFLHSHATSFGYKQIREEDKSKLVGNVFRRVVSSYNLMNDLMSVGLHRLXKDRFISKLNPFPAMKHLNVAGETGDVAF

SEQ ID NO: 3753 - protein, 253 aa, Streptomyces avermitilis MA-4680
MTALPELSGKVALITGASRGIGYGVAEALVARGDRVCITGRNEDALKEAVEALGAERVIGVAGKAHDEAHQAAAVERTMEAFGRVDYLVNNAGTNPVFGPIADLDLNVARKVFETNVVSALGFAQQTWKAWQGENGGAIVNIASVAGVSASPFIGAYGISKAAMINLTLQLAHEFAPKVRVNAIAPAVVKTKFAQALYEGREAEAAASYPLGRLGVPSDIGGAAAFLTSAQSDWITGQTLVVDGGIFLNAGVG

SEQ ID NO: 3754 - protein, 594 aa, Neurospora crassa
MAIFAMGWQKPDNVAGSSAPAIMVGLFVATGGLLLGYDTGTINGILAMKSFKDHFSTGYIDGNGQPGIYPKESALIVAMLSAGTAIGALLAAPLGDHYGRRRSLIGAIGIFVIGAILQVCAYNIDLLVAGRTVAGVGIGIVSVLVPLYQSEMAPKWIRGTLVCTYQLSITMGLLAAAVVNILTYKLKTAAAYRVPIGLQLTWACVLALGLTVLPETPRYLIKRGDKNAAALSLSRLRRLDITHPALVEELAEIEANHQYEMALGPDSYKDILFGEPHLGRRTFTGCCLQMLQQLTGVNFIMYYGTTFFNNAGVGNPFKISLIMQVINTASTIPGLFVVESWGRRRLLMVGAIGMAICQLLIAAFATASGSNNLSAQNKVLITFVAIYIFFFAASWGPVVWVVTSEIYPLKVRAKSMSITTASNWFLNFGIAYGTPYMQTNSAASDESSIDLGSKVFFVWGAFCIVAVGFVWCMVYETSKISLEQIDEMYERVDHAWHSRRFEPSWSFQEMRDLGFSDGGIPPTQQLQQQPQQPQQQQQQHHQQQQHQLQVDLQQSQSRTSNSSTSQTDTGGSNNTGASQDDKLVASLGNIDLSY

SEQ ID NO: 3755 - protein, 235 aa, Clostridium perfringens str. 13
MVNQFLAELFGTALLILLGDGVVANIALKKTKGNGADLIVVTVGWAIAVAIPVYIFSRVSGAVFNPAVTIALGITGGLTWSQVIVFCIAQFIGAFIGAVLVYLTYYTHFESTEDHDAKLGTFCTIPAIRNFKWNFFTEFIGTFVLMFGILGLGDAKMADGIMPIAVGLLILVIGVSLGGPTGYAINPARDFSPRLAHFLLPMKNKGGSDWAYAWIPIVGPILGAIAGAMVYTNIF

SEQ ID NO: 3756 - protein, 451 aa, Zea mays
MASALLAGQGGARHHGWGETRAPLAPIPPNPNPSQPHPRADGSKSKPRAAASSPAAGYVTFRPASLGPREARALRDRLAGELTQVRALLSRIDTWQQQGPPPAGLRGEVRKRCGQILTRLRKDKRSVWFNAPVEVERLGLHDYHAVIKRPMDLGTVKEGLAAGRYASHDDFAADVRLTFTNALRYNPVGHEVHTFAGALLAYFERMYKEALACFEEDCKRPEPPRPVPPQLTPPPAAEPVEAKVKPRAGNVRMRKPKAREPNKREMSLEEKNMLRVGLESLPEEKMHNVLQIVRKRNNNPEMLGDEIELDIDEMDVETQWELDRFVTNFNKALKKSQRAVLMNGGAADVTSAAVAENDTAPVSNVLALVDNDDVEREKPVRSATMAEQVDEYVDIGDEMPTATYQSMEIEKDAEGATGSRGSGSGSSSSSGSESRSSGDSASGAGNAHSLA

SEQ ID NO: 3757 - protein, 217 aa, Zea mays
EQLLLSDEGLAVVVPILVYWAYCGLHVVLGQSMYMDRYRLHPSAHEDSKNYVSKRQVIGNVLKQQLVQVTIVAMVFKLTGGRSTSSTTTEASSYLKLACQILVAMVFFDVWQYACHRTMHASRFLYRNLHSWHHRLVVPYAFGALYGHPLEGFVADTVGGTAAFLVSGMSPRASVFFFSLCTVKVVDNHCGLSLLPCWDRLGLWNSAAYHDVHHQGD

SEQ ID NO: 3758 - protein, 309 aa, Photorhabdus luminescens subsp. laumondii TTO1
MSLQTQDIIRRSATNSFTPAPRVRDDQEGVAKLIDVTTCIGCKACQVACSEWNDIRDEIGHNVGVYDNPADLTAKSWTVMRFSEVEENGKLEWLIRKDGCMHCADPGCLKACPAEGAIIQYANGIVDFQSEHCIGCGYCIAGCPFNVPRINKEDNRVYKCTLCVDRVNVGQEPACVKTCPTGAIHFGSKKAMKDLAAERVSELKGRGYENAGLYDPDGVGGTHVMYVLHHANKPQLYHGLPDNPAISPTVTFWKGIWKPLAAVGFAATFAASLFHYVGIGPNRVTEEDEENARRDTESSQKSANGEEQR

SEQ ID NO: 3759 - protein, 468 aa, Zea mays
MESRRGGSSAAAAEDAGGAMPSFGPTQHAIRADVNSMQPSRVTDFGALAQSAGFRIEDLANLNANALFNLKPNSHTIDNSPLQFGNYGKSISSHINTTEATTAATRIDPQLSAQQTGAQPILVALPTGNMENWGESAMADSPMTDTSTDPDTDERNQMFEQGLVAVPTASDSSDKSRDKLDQKTLRRLAQNREAARKSRLRKKAYIQNLESSRLKLTQLEQELQRARQQGIFISTSGDQPQSTSGNGALAFDMEYARWLEEHNKHVNELRAAVNAHAGDNDLRCIVDSIMVHYDEIFKLKGVAAKADVFHVLSGMWKTPAERCFMWLGGFRSSELLKLLAGHLEPLTDQQLVGISNLQQSSQQAEDALSQGMEALQQSLAETLASGSLGPAGPSGNVANYMGQMAMAMGKLGTLENFLRQADNLRLQTLQQMQRILTTRQSARALLAISDYFSRLRALSSLWLARPRE

SEQ ID NO: 3760 - protein, 176 aa, Zea mays
  unsure (1)..(176): unsure at all Xaa locations
SRSVDSRFDPTDEMDVSLIVQSYTRTAVPRGASAEIYEDSHLMXGRSDYLVEIVLIAGIKVCNIIVPPIVXRSPVSIWTYDNFLXQQLDATSNVXCCRLQKIAANAILGGTLAVCMAGTMENKIPHYQLLPNLVENKTLLLPVPAYTVINGGSHAVNHLALQELMMLPTADSSLNE

SEQ ID NO: 3761 - protein, 419 aa, Pyrobaculum aerophilum str. IM2 [sequence omitted]

SEQ ID NO: 3762 - protein, 241 aa, Agrobacterium tumefaciens str. C58 (Cereon)
MSRKFISEFLGTFWLVFGGCGSAVFAAAFPELGIGFLGVAFAFGLTVLTMAYAVGGISGGHFNPAVSVGLTVAGKFPAANLVPYIVAQVLGAVVAAAALYVILTGKAGAEIGGFAANGYGEHSPGGYSLLSALLIEIILTAFFLVVILGSTHGRVPVGFAPVAIGLALTLIHLISIPVTNTSVNPARSTGQALFVGGWALQQLWLFWLAPILGGAIGAVVWKIFGEEEKAGHAGSVQPAKT

SEQ ID NO: 3763 - protein, 330 aa, Agrobacterium tumefaciens str. C58
MEASRLLLLEDSSVDAELIEDQLSRLSPPPAVTRAVGKASFIEALEKQQFDIILADFSLPDFDGMSALDLVMRTRPDTPFIFVSGILGEDAAIDAFRRGATDYVLKQRLVRLPSAVERALAEAREKQERKRAELHKELLVRELSHRVKNTMAMVVSIIRRTAKGSTSIKDYQERLVARVSALAESHALLFQSNWGETNLRDVVKRAIEPHNTFASRVELEGPDGVHVSPKSALALGMILHELATNAQKYGSLSGANGKVEVFWKKILNGDGNDCIDLRWQESGGPPVSVPQDTGFGTTLITRGVQYELQAESEIRYDPDGLQYRVIFPLD

SEQ ID NO: 3764 - protein, 736 aa, Agrobacterium tumefaciens str. C58 (U. Washington)
MSSHTPKLDSCGAEPIHIPGAIQEHGALLVLSAREFSVVQASDNLANYIGVDLPIGAVATEANLPFISVLSAWYSGEESNFRYAWAEKKLDVSAHRSGTLVILEVEKAGVGESAEKLMGELTSLAKYLNSAPSLEDALFRTAQLVSSISGHDRTLIYDFGLDWSGHVVAEAGSGALPSYLGLRFPAGDIPPQARQLYTINRLRMIPDVDYKPVPIRPEVNAETGAVLDMSFSQLRSVSPVHLEYMRNMGTAASMSVSIVVNGALWGLIACHHATPHSVSLAVREACDFAAQLLSMRIAMEQSSQDASRRVELGHIQARLLKGMAAAEKWVDGLLGGEGEREDLLKQVGADGAALVLGDDYELVGNTPSREQVEELILWLGEREIADVFATDNLAGNYPTAAAYASVASGIIAMRVSELHGSWLIWFRPEVIKTVRWGGDPHKTVQESGRIHPRKSFEIWKEQLRNTSFPWSEPELAAARELRGAIIGIVLRKTEEMADLTRELQRTNKELEAFSYSVSHDLRAPFRHIVGFAQLLRERSDALDEKSLHYLQMISEAALGAGRLVDDLLNFSQLGRTQLTLKPVDMQKVVSEVRRSLSHAVSDRQIEWRIGALPVIFGDPTLLRQVWYNLIENAIKYSSREPVSIITISAVETEDDVTYSVEDNGVGFDMAYYNKLFGVFQRLQRVEDFEGTGIGLALVRRIVERHHGLVGAEGTVGEGATFSFTLPVTKVEEEKIA

SEQ ID NO: 3765 - protein, 142 aa, Triticum aestivum
MSYLLPHLHSGWAVDQAILAEEERLVIIRFGHDWDETCMQMDEVLSGVAETIKNFAVIYLVDITEVPDFNTMYELYDPSTVMFFFRNKHIMIDLGTGNNNKINWAMKDKQEFVDIVETVYRGARKGRGLVIAPKDYSTKYRY

SEQ ID NO: 3766 - protein, 645 aa, Desulfovibrio desulfuricans G20
MTQLVTGCTLDCPDCCSMVAVPRQDGTLSIQGNPAHPFTQGLICGKGKNFVQRLQSSERITTPLVRRNGTLRKASWDEALSVCAAKIDALRATPEKMLHIRGAGTRGVLFDAAGELPARLRMAATHGSLCDETGIEACKADFGSLNMNHPHDLFNADRIVNWGRDISRSSVHLAKIVNEARKKGTQVLLISPCPSGAAGYADEVITVRPGTDRFLAAAAARRLLTRPGFRQRLLRCSANADAYLACLDAMDEHALLTACDVSTAALEKLTDWYADTDAAVSTLLGWGLQRYIRGAQNVRHINALAMISGHIGKNGAGVFYNISSSRNFNRQWMQDLPEPSRRLSLPRIGQELAGAAPPVELVLCRGINFVNQCPDSHTTAAALRHAFVIVLDAFMNDTAALADVLLPCSLMLEREEIVGSFMHNQINYCAPVFPPPGECRDDFDILDELGSRLSEPVRLPDRETCLRRALDSPLLQTTLSRLRQEGFATAEHPFIAYEGMRTDHQDGLFHCVAELSPDKEDSGDYPFFLLTLISRNTLHSQIPAGMQQGLPELAAAPCAAQAAGIADGEAALLCTPGGQMQVTVRFDPAIHPSAVRLRRGGWVSRGWGANGLTAPLVTDAGEGAAFYSQKAAIKKLQAEPPHPQA

SEQ ID NO: 3767 - protein, 346 aa, Burkholderia fungorum LB400
MKALVYHGPGKKSLDERPMPQLASATDAIVKVTRTTICGTDLHILKGDVPTCQPGRILGHEGVGIVQQVGAAVSSLKEGDHVLISCISACGKCDYCRRGMYSHCTTGGWILGNRIDGTQAEYVRIPHAETSLYPIPAGADEEALVMLSDILPTGFECGVLNGKVQPGSAVAIVGAGPIGLASLLTAQFYSPAQIIMIDRDERRLEVASRFGATACIDSRVAEPVVEVMKLTGHVGVDCAIEAVGVPDTFELCQALVAPGGVIANIGVHGVKADLHLESLWDRNISITTRLVDTVSTPMLLKTVQSGRIDPARLITHHFQLDDVLNAYDTFGRAADSHALKVIIEMS

SEQ ID NO: 3768 - protein, 450 aa, Phycomyces blakesleeanus
MSRYDHYPENVGILALEMYFPSRCVEQTAMEVYDGVSTGKYTIGLGQDKMAFIDDREDIQSICLTAVHNLMEKYNIAYTDIGRLEVGTETIIDKSKSVKTTLMTLFAEHGNYEIEGIDTTNACYGGFSAFSNAVNWIESSSWDGRYAIVIAGDLALYASGAARPTSGAGVVAMLVGKDAPIVLGRGLRYTYMDHAYDFYKPDMHSEYPIVDGKFSNVCYIRAFDACYNNYMKRLSKTIKKDVTSMEDVDYVVCHSPYAKLVTKSFARSAYNDFMADKKNPKYAALAPFEELAYEASLENRDLEKATATLTKAGYAQKVGPAAYAPKQIGNMYAGAVWAGLASLVSEVEVDTLKDKRVLLYSYGSGLAASMVSFRVVGSTADIKAKLNLRQRLDARTHSKPEAFAEAMQIRENTHNACNYNPIGSLEHIAPGAYYVDKIDDKWRRFYKRKD

SEQ ID NO: 3769 - protein, 179 aa, Triticum aestivum
  unsure (1)..(179): unsure at all Xaa locations
YSHAPTVMASGGPXVAPFQGLKFTAGLHISRRSNGASLSSVSNGGRIRCMQVWPIEGIKKFEDPVXYLPPLSTEALLKQVDYLIRSKWVPCLEFSKVGFIFREHNASPGYYDGRYWTMWKLPMFGCTXDATQVINEVEEVKKEYPDAYVRIIGFDNMRQVQCVSFIAFKPPGCEESGKA

SEQ ID NO: 3770 - protein, 134 aa, Zea mays
  unsure (1)..(134): unsure at all Xaa locations
YAQLTVEIGQNVPIVRDDLFVTNPTRVGKVIIDSTCHALLLTVNQLVFVTDSIVPVRMYKHPXMXVMPSHMSEDTXDTFIADLSVALYTDQIKTGAHCPFDRLAKYNHVLMIHEQHRDADVYVRAQCMAPGDPY

SEQ ID NO: 3771 - protein, 191 aa, Neurospora crassa
MSAPSQARHIVNFITGNANKLGEVKAILEPAIQVENQALDLLEIQGTLEEVTLDKCRRAADLVQGPVLVEDTCLCFNALKGLPGPYIKWFMNSLGHEGLNNLLAAYEDKSAKAVCTFGYSAGPGHEPILFQGITDGKIVPPRGPPNFGWDAIFEYEGQTYAEMDKAEKNKISHRAKALAKLQEWFAKEMTA

SEQ ID NO: 3772 - protein, 421 aa, Mesorhizobium loti
MSQSQVWHPFTQHALEPAIPEIVRTEGAYLYKADGTRILDAISSWWVVTHGHRHPRIIRAIETTASSLDQIIFAGFTHEPAERLARALVGLAPTGLDWVFYSDSGSTSVEVALKMALGYFRNIGAPRSRIVVMEHSYHGDTIGTMSVGARGVFNAAYEPLLFEVDTIPFPASGREQETLDRFEAVSRDRRAAALIVEPLVLGAGGMLMYPASVLTELKKIAETSGTLLIADEVMTGWGRTGTMFACEQASISLDILCTSKGLTGGAIPLAATLATDAIFQAHYSEDRTKTFFHSSSYTANPIACAAALANVEIWRDEPVAERIATLSAKQAAGLQRFRDNPYFTDCRATGTIAALDLRTGSAGYLAEIGPKLRAFFLERGLLVRPLGNVLYLLPPYCITGEELDGLHDAIEEAGERFGTKP

SEQ ID NO: 3773 - protein, 391 aa, Mesorhizobium sp. BNC1
MPSFADVFITDELNRRAPKKPDYLQEKLALQELVVRMVDAPEEVLPRFVDLALEITGGVSAGISLYEGDDTRVFRWRYLRGTLASFEGMPTPRDYSPCGVTLDENRPVLALHPERAYSWIADAGITVPEVLLVPIHVGGKKPFGTLWIVSREAGHFDGGDARTMTELATFVGGALSLHESQMRLSRALEEQERLAAEMDHRIKNLFAIAESMIRTTARSTSTKEEMALALSGRLHALSAAHSLVRRKVRHNEEGLRTTELGEIIDTIIRPHAPDLSARFQLEGPQVACGDKAADGIALAMHELATNASKYGALSTEEGRVDICWRSADDLLTIVWTESGGPSIESAPKSTGYGSRLVHATVTRQFGGKLEYDWQASGLVVTITLPLGNLLT

SEQ ID NO: 3774 - protein, 567 aa, Streptococcus pneumoniae TIGR4
MALEVIMPKAGVDMTEGQIVQWNKKVGEFVKEGEILLEIMTDKVSMELEAEEDGYLIAILKGDGETVPVTEVIGYLGEERENIPTAGAASPEASPVPVASTSNDDGKSDDAFDIVVIGGGPAGYVAAIKAAQFGGKVALVEKSELGGTCLNRGCIPTKTYLHNAEIIENIGHAANRGIVIENPNFTVDMEKLLETKSKVVNTLVGGVAGLLRSYGVTVHKGIGTITKDKNVLVNGSELLETKKIILAGGSKVNKINVPGMESPLVMTSDDILEMNEVPESLVIIGGGVVGIELGQAFMTFGSKVTVIEMMDRIVPAMDVEVSKNLRLILERKGMTILTGTKLQEIIEENGQLRIKVEGKDDIIASKALLSIGRMPDLEGIGEVEFELDRGCIKVNEYMETSVPGIYAPGDINGTKMLAHAAFRMGEVSAENALKGNHAVAKLNLTPAAIYTLPEVAAVGLTEEQAREKYDVAIGKFNFAANGRAIASDAAQGFVKVIADKKYGEILGVHIIGPAAAELINEASSIIEMEITVEEMLKTIHGHPTYSEVMYEAFADVLGMAIHSPKKK

SEQ ID NO: 3775 - protein, 327 aa, Rhodospirillum rubrum
MSETKLDALRRHTIIVADSGDIDAIRSFAPQDCTTNPSLILKAAKMPAYAGLIAQAIEAGSAEAGPSEGLIDRILDHLAVTFGSELARIVPGVVSTEVDARLSFDTQATVARAERLIGLYAARGVAAERILIKVAATWEGIRAVEILQSRGIACNVTLVFSLAQAVAAAEAGAFLISPFVGRILDWHVKASGKSFDIDEDPGVRSVTEIYTYFKHFGYKTIVMGASFRSSAEVEALCGCDRLTVSPALLDQLRSQTGDVPKRLDPAASKAATISRLAVDEASFRWQINEDALATEKLAEGIRLFNADTDALRRTIAETLAKRASTVA

SEQ ID NO: 3776 - protein, 347 aa, Streptococcus pneumoniae TIGR4
MADDKLRATPAARKLADDLGINLYDVSGSGANGRVHKEDVETYKDTNVVRISPLAKRIALEHNIAWQEIQGTGHRGKIMKKDVLALLPENIENDSIKSPAQIEKVEEVPDNVTPYGKIERIPMTPMRKVIAQRMVESYLTAPTFTLNYEVDMTEMLALRKKVLEPIMEATGKKTTVTDLLSLAVVKTLMKHPYINASLTEDGKTIITHNYVNLAMAVGMDNGLMTPVVYNAEKMSLSELVVAFKDVIGRTLDGKLAPSELQNSTFTISNLGMFGVQSFGPIINQPNSAILGVSSTIEKPVVVNGEIVIRPIMSLGLTIDHRVVDGMAGAKFMKDLKELIETPISMLI

SEQ ID NO: 3777 - protein, 704 aa, Rhodospirillum rubrum
MAKRSTDALTPAEIADAKILRGTGGETHQIAEGDTPVLTTQQGIPVADDQNSLRIGPRGPTLLEDFAFREKIFHFDHERIPERIVHARGFGAHGTFETYEDLSALTSADIFQRAGEKTPAFVRFSTVAGNLGSSDVARDVRGFAVKLYTKQGNWDIVGNNIPVFFIQDAIKFPDLIHAAKQEPDSGFPQAQTAHDNFWDFISLMPESLHMALWIMSDRTIPRSFRFMEGFGVHTFRLVTAEGKSSFVKFHWKPKLGLQSVVWNEAVKINGADPDFHRRDLWSAIKRGDYPEWDLGLQVFDDAFADSFPFDVLDATKLIPEELVPIRIVGRLVLDRTVDNFFAETEQVAFHTANIVPGIDFTNDPLLQGRNFSYLDTQIKRLGGPNFTHLPINAAKCPFHSFQQDGHMAFVNPKGRANYEPNSWGPGIGGPRESPESGFHSFPAEDGGEKRRVRGELFADHYSQARQFYRSQTPVEQTHIKDSFVFELSKVETPAIRARVVSHLLTIDQTLAQKVADGLGLAELPEAAKPARPLVEDLPASPALSILLNPPKDFSGRKVGVLVSDGVDGAFLDEIERLLTAEGAQMEVIAPRVGGFTAKDGTLRPAHQKVNGAPSVLYDAVAVLLSTEGAKLLLNEATAKDFVSDAFAHAKVIAFTQAAQPLLEKAGVIADEGCLLLDTPAKAETFLGLCRKGRRWEREAKVHAV

SEQ ID NO: 3778 - protein, 489 aa, Pirellula sp. 1
MSTTLPEIAPPKVRHTQLFIDGQWRDSASGKTFATINPATEEEIVQVAEGDKEDIDAAVKAARKAFESGPWRTMDARDRGRLMMKLADAIENEIDELAQLETLDNGKPLRESRHADLPLVIDALRYYAGYADKIQGETVPIRGNYLCYTRKEPVGVVGQIIPWNFPMLMVAWKWGPALATGCTIVMKPAEQTPLTCLRMAQLAKEVGFPDGVINVVPGFGPTAGGALVDHPGVDKIAFTGEHRTAQLIMKNSAQSLKRLTFELGGKSPNVIFSDADLDAAVQGSFVGLYLNQGQCCCAGSRVFVEESIHEAFVEKLTDLTNKRVVGNPFEHTTEQGPQIDQAQFDKIMSYIDKGNQQGASCVSGGKRSGDRGYFIEPTVFTDVQDDMAIARDEIFGPVMSVLSFKDSDDILKRANDTMFGLAAAVWTQDIKKAHHFAANVRAGTVWVNCYDVFDAAAPFGGFKMSGQGRELGTEGLKAYLESKTVTVAL

SEQ ID NO: 3779 - protein, 521 aa, Lycopersicon esculentum x Lycopersicon peruvianum
MVLNNINSILEALQANPILIFFFIIPLFFLYLFSTSRRKRYPPGPLGWPLIGNMMIMDQLTHRGLAKLAQKYGGVFHLKMGYVHKIVISGPEEARQVLQVQDNIYSNRPKTVAISYLTYDRADMAFADYGPFWRQMRKLCVMKLFSRKRAESWDSVRDEVDSMVKIVTTNAGTSINLGELVFCLTRNIIYRAAFGTSSDEGQDDFIKILQEFSKLFGAFNMADFIPWLGWIGKQGLNVRLAKARASLDGFIDTIIDDHIERKKAIHVINDDGYRESDMVDELLAFYSEETKVNESEDLQNAIRLTRDNIKAIIMDVMFGGTETVASAIEWAMAELMKSPEDLKKVQQELANVVGLNRKVDESDFENLTYLKCCLKETLRLHPPIPLLLHETAEESTVSGYYIPANSHVIINSFAIGRDKNSWEDPDSFKPSRFLKEGVADFKGGNFEFLPFGSGRRSCPGMQLGLYALEMAVAHLLHCFTWELPDGMKPSELNMDDMFGLTAPLANRLVAVPTPRLLCEIY

SEQ ID NO: 3780 - protein, 190 aa, Pseudomonas syringae pv. syringae B728a
MHSATKFIDGQGRCMGGVVAGRSEQMKEVVGFLRTAGPTLSPFNAWIFLKGLETLNLRMRAHCANAQALAEWLEQQDGIEKVHYAGLKSHPQHELAQRQQKGFGAVVSFEVKGGKDGAWRFIDATRLISITANLGDSKTTITHPSTTSHGRLAPQEREAAGIRDSLIRVAVGLEDLADLQADLARGLAAL

SEQ ID NO: 3781 - protein, 303 aa, Eremothecium gossypii
MTSTSHIRFKQLERLGNGTYATVYKGLNKTTGLYVALKEVKLDSEEGTPSTAIREISLMKELKHENIVRLYDVIHTENKLTLVFEFMDNDLKKFMDSRLDREMPRGLELSLVKYFQWQLLQGVAFCHENRILHRDLKPQNLLINNKGQLKLGDFGLARAFGIPVNTFSSEVVTLWYRAPDVLMGSRTYCTSIDIWSCGCILAEMIMGKALFPGTNDDEQLKLIFETMGTPTEQTWVGVSQLPKYNPQIPLYPNKDIKQLLQATTKEQISDVLVNLIQGLLQLNPSMRLSAQQALSHPLFEEYH

SEQ ID NO: 3782 - protein, 417 aa, Mesembryanthemum crystallinum
MQSTAISISPSLPLLKPRQNPNRRFPTLNLFDPIRLSSRRVTALSCSSDNSSFNLSRKSPSVSPFDGSISKPSLISRKRSDDGGVVVVKATSVPESAGADEAPKAGGIGKTLELGLLFGFWYLFNIYFNIYNKQVLKVFHYPVTVTVIQFAVGSVLVGLMWLFNLYKRPKISMGQLAAILPLAVVHTLGNLFTNMSLGKVAVSFTHTIKAMEPFFSVVLSAMFLGERPTPWVVLSLLPIVGGVALASITEASFNWSGFTSAMASNVTNQSRNVLSKKLMVKKDVDQESMDNITLFSIITVMSFILLAPAAYFMEGVKFTPTYLEAAGLNVQQVYMKSFLAALCFHAYQQVSYMILQRVSPVTHSVGNCVKRVVVIVSSVIVFRTAVNPINALGTAVALAGVFLYSRVKRIKAKAKEA

SEQ ID NO: 3783 - protein, 467 aa, Moorella thermoacetica ATCC 39073
MFLAAGTVLARPALAAAGDAVDTGDTAFILVASALVMLMTPGLAFFYGGMVRQKNVLGIIMQCLATLALISVQWVLWGYSLAFGPDHLHLLGGLDWAGFRGVGLEPNPLYAATIPHQVFAMFQLMFAIITPALITGAFAERMRFPAFLLFTLMWATLVYDPLAHWVWGAGGWLRELGALDFAGGTVVHISAGVAGLVCALVLGRRRDYGRIPLPPHNLPMTVLGAALLWFGWFGFNAGSALGANGLAGNAFVTTNTAAGAAILGWLAVEWLLHGKPTALGAASGAVAGLVAITPAAGFVTPPAALVIGGIGGALCCLSVAVAKVKLGYDDSLDAFGCHGVGGTWGAIATGIFATKAVNPAGADGLLYGNAHLLGVQVVGVAAAWIFTAAVTYGILKVVSLLTPLRVTAEEEEAGLDLSQHGESAYPDTGLAALEVAEGKRVTAPGELAVNWMVSQGNPAGTGLFRQE

SEQ ID NO: 3784 - protein, 159 aa, Burkholderia fungorum LB400
MTSIYSFSARTLGGEEVSLEQYSGKVLLIVNTASECGFTPQYAGLQKLYETYAARGLAVLGFPCNQFGKQEPGDAAQIGSFCEKNYGVTFPMFDKVDVNGANAHPLFRYLTGEAPGVLGLEAIKWNFTKFLIDREGNVVKRYAPLTKPEAITEDIEKLL

SEQ ID NO: 3785 - protein, 491 aa, Zea mays
MDPYKHRPSSAFNPPYWTTNSGAPVWNNDSSLTVGARGPILLEDYHCEKLANFDRERIPERVVHARGASAKGFFEVTHDITHLTCADFLRAPGVQTPVIVRFSTVIHERGSPETLRDPRGFAVNFYTREGNWDLVGNNFPVFFIRDGIKFPDMVHALKPNPRTHIQDNWRILDFFSHHPESLHMFSFLFDDVGIPADYRHMDGSGVHTYTLVSRAGTVTYVKFHWRPTCGVRSLMDDEAVRCGANHSHATKDLTDAIAAGNFPEWTLYIQTMDPEMEDRLDDLDPLDVTKTWPEDRFPLQPVGRLVLNRNIDNFFAENEQLAFCPGLIVPGIYYSDDKLLQTRIFSYSDTQRHRLGPNYLLLPANAPKCAHHNNHYDGSMNFMHRHEEVDYFPSRYDAVRNAPRYPIPTAHIAGRREKTVISKENNFKQPGERYRAMDPARQERFITRWVDALSDPRLTHEIRTIWLSNWSQADRSLGQKLASRLSAKPSM

SEQ ID NO: 3786 - protein, 391 aa, Methanocaldococcus jannaschii DSM 2661
MFEVKHMDGIDVFFFMWAASLIFFMKAGFIALEIGQFRAKNVSYHCVLKLLDLAAVFIAYLFIGYGISYGFENIMPLITGTFDADLGAWWMKMVMFAAAAVTIITGGVAERIKILPYFIGALIVGGILYPIVEHLVWGGGFANLGINFHDYAGSGAVHLFGGLVGLMAAYVLGPRIDKYINGKPQAIPGHNIPIAVLGAFILAFGWYGFNIGSASGIANGVELASVAMATTMALAGGIIGGALSSRNDPLYTANGMCAGLVAVCSGVDLFTPIGAFIVGLLAGIQQPFTYKFIEEKLKIDDVCAIGPVHAMSGLIGVICAGIPFLLKADAVSKVSITGQIIGAIVIALIAIVGGLIIYKGLDLTIGLRVSEEAEKVGLDTAILQTTAYSEE

SEQ ID NO: 3787 - protein, 257 aa, Zea mays
MSLPPDPADGGAGTGTGDDWFLDCGILDDLPAAACGAFPWDASPSSSNPSVEVGSYVNTNDVFKEPNDVFKEPGSNKRLRSGSNDVHVPTSKASREKMRRNKLNDRFLELGSTLEPGKPVKADKAAILSDATRMVIQLRSEAQQLKETNGSLEEKIKELKAEKDELRDEKQKLKLEKESLEHQMKLMTSTPTYMPHPTLMPAPFPQAPLAPFHAQGQAAGQKLMMPFVSYPGYPMWQFMPPSEVDTSKDSEACPPVA

SEQ ID NO: 3788 - protein, 411 aa, Xylella fastidiosa Dixon
MSAVSESVLSLSRYYLPVYRPCQVVLVRGQGSRVWDEQGRDYLDLAAGIAVCCLGHCDPDLVAALVEQAGRLWHTSNVFYSEPSLRLAQELVDVSRFAERVFLCSSGTEANEAAIKLVRKWSAAQGRLPEHRTIVTFRGSFHGRTLGAVTATAQPKYQEGYEPLPGGFRYVDFNHIEALEAAMVGGDVAAVMLEPIQGEGGVMPVVPGYLAQVRALCDRYGALLVLDEIQCGMGRTGTLFAYWQEEVVPDIVTLAKGLGGGFPIGAMLAGPKVAEVMQFGAHGTTFGGNPMAAAVARVALRKLVSVEIAANVQRQSVALRAGLEEISEAFGGVFTQVRGRGLMLGAVLAPLYAGQASAILEVAAEHGVLLLQAGPDVLRFVPALNVSDEELADGLVRLRAALGDYVSRFGG

SEQ ID NO: 3789 - protein, 453 aa, Streptococcus pneumoniae TIGR4
MYKTKCLREKLVLFLKIFFPILIYQFANYSASFVDTAMTGQYNTMDLAGVSMATSIWNPFFTFLTGIVSALVPIIGHHLGRGKKEEVASDFYQFIYLALGLSVVLLGMVLFLAPIILNHIGLEAAVAAVAVRYLWFLSIGIIPLLLFSVIRSLLDSLGLTKLSMYLMLLLLPLNSGFNYLLIYGAFGVPELGGAGAGLGTSLAYWVLLGISVLVLFKQEKLKALHLEKRIPLNMDKIKEGVRLGLPIGGTVFAEVAIFSVVGLIMAKFSPLIIASHQSAMNFSSLMYAFPMSISSAMAIVVSYEVGAKRFDDAKTYIGLGRWTALIFAAFTLTFLYIFRGNVASLYGNDPKFIDLTVRFLTYSLFFQLADTFAAPLQGILRGYKDTVIPFYLGLLGYWGVAIPVRTLFDSLTDFGAYSYWIGLIISLIVSGALYRWRLTVIMKRFESLAKSKC

SEQ ID NO: 3790 - protein, 193 aa, Zea mays
  unsure (1)..(193): unsure at all Xaa locations
MAATIQYNRSNPAVKRILQEVKEMQSNPSPDFMSLPLEEDIFEWXFAILGPRDSEFEGGIYHGRIQLPSDYPFKPPSFMLLTPSGRFEIQKKICLSISNYHPEHWQPSWSVRXTALVALIAFMPTNPGGAIGXSLDYKPEDRRALAIKSREVPPKFGSPQRQKLIDEIHEQMLSKAPPIPQTLPNVAKRGART

SEQ ID NO: 3791 - protein, 253 aa, Triticum aestivum
MDVKCRRLEGKVAVVTASTQGIGLAIAERLGREGAAVVISSRKQKNVDDAVEGLRAKGITVVGAVCHVSNAEQRKHLVDTAVKNFGHIDIVVSNAAANPSVDSILEMKESVLDKLWDINVKASILLLQDAAPHLRKGSSVILISSIAGYNPDAALTMYGVTKTALFGLTKALATEMGPNTRVNCIAPGFVPTRFAGFLPTNETIRNELIERSILKRLGSVEDMASAAAFLASDDSSFITAETIVVAGGTQSRL

SEQ ID NO: 3792 - protein, 496 aa, Arabidopsis thaliana
MERQKSMEKGLLRKSLSIRERKFPNEDAFLESGLSRKSPREVKKPQNDDGECRVTASVFLSTFVAVSGSFCTGCGVGFSSGAQAGITKDLSLSVAEYSMFGSILTLGGLIGAVFSGKVADVLGRKRTMLFCEFFCITGWLCVALAQNAMWLDCGRLLLGIGVGIFSYVIPVYIAEIAPKHVRGSFVFANQLMQNCGISLFFIIGNFIPWRLLTVVGLVPCVFHVFCLFFIPESPRWLAKLGRDKECRSSLQRLRGSDVDISREANTIRDTIDMTENGGETKMSELFQRRYAYPLIIGVGLMFLQQLCGSSGVTYYASSLFNKGGFPSAIGTSVIATIMVPKAMLATVLVDKMGRRTLLMASCSAMGLSALLLSVSYGFQSFGILPELTPIFTCIGVLGHIVSFAMGMGGLPWIIMAEIFPMNVKVSAGTLVTVTNWLFGWIITYTFNFMLEWNASGMFLIFSMVSASSIVFIYFLVPETKGRSLEEIQALLNNSVQ

SEQ ID NO: 3793 - protein, 955 aa, Oryza sativa
MTVVTVGMVGNTLQPSLGANPHRPEETLHPATMREVRPNLGPTQLAHGLAAFALSIRYPQPDRGWDNENEHKPEHTYLHGDACHWTNFCLPRGVLPRAYSLPILFSRPLPARDSRTRLDSTSQFPIHHHDPPPSSSVPRPRPRREEPQPVRETLVRLPRPIQRRHGDRGQGDPPPRRSAANDLRSRQTLATPIAFSRRHVRRASPPPLSQGSSLSLSLSFSLCLLSLWLPAHPSPIPTCRKSHRICSDLPSRCVEPACRMWLNFRSFLDFLVLPSLRSLHNALDCERSGLVRYFSTASGSFPTKGNGAEKRIGGARFPQRKQPGKELETSKLSLGLNGSYTCRRSPNNFIPNTITGLNGSLSCGQIASARSFSSSADLPPHQEIGMPSLSPTMTEGNIARWLKKEGDKVSPGEVLCEVETDKATVEMECMEEGYLAKIIHGDGSKEIKVGEIIAVTVEEEGDIKKFKDYKPSTLAAPVAPSELKAQSEPTEPKVEEREPSKASELKAPRTEEPSRSGDRIFSSPLARKLAEDNNVPLSSVKGTGPDGRILKADIEDYLAKGCRKEALAAPGLSYTDVPNAQIRKVTANRLLSSKQTIPHYYLTVDTRVDNLIKLRGELNPLQESSGGKKISINDLVIKAAALALRKVPQCNSSWMNDFIRQYHNVNINVAVQTEHGLFVPVIRDADKKGLGMIAEEVKQLAQRARDNSLKPDDYEGGTFTISNLGGPFGIKQFCAIINPPQSAILAIGSAERRVIPGSANGQYEFGSFMSATMSCDHRVIDERLDRVDKTPQPVKKDLDLMERISSAYGQGTTPPDLHAGSRRICRRRRSRRGKPPSPADRSANQIYTRIAAGSAAGSRRRHRIHRRKAPPPPDQAIGSDRCRRFRWIYPREATTLRPPSLLIRSVVPSSSSRRASVTGGRGGEGLATPLTLKMLPDDRSLELGPRDRFLFPFLA

SEQ ID NO: 3794 - protein, 184 aa, Amaranthus hypochondriacus
MASSMMSNAATAVAVAATSGGAQANMVAPFNGLKSIASFPVTRKSNDITSIASNGGRVQCMQVWPPVGKKKFETLSYLPPLSDAQLLAQVQYLLNKGWIPCIEFELEHPFVYRENHRSPGYQDGRYWTMWKLPMYGCTDPAQVLNEVEEAKKAYPTAFIRIIGFDNKRQVQCVSFIAYKPADSY

SEQ ID NO: 3795 - protein, 180 aa, Amaranthus hypochondriacus
MASSLMSNAITAVVGASGAQANMVAPFNGLKSIASFPVTRKSNDITSIASNGGRVQCMQVWPPVGKKKFETLSYLPPLSDAQLLAQVQYLLNNGWIPCIEFELEHPFVYRENHRSPGYQDGRYWTMWKLPMYGCTDPAQVLNEVEEAKKAYPSAFIRIIGFDNKRQVQCVSFIAFKPPGY

SEQ ID NO: 3796 - protein, 318 aa, Neisseria gonorrhoeae
MKHLHDLPAWSKLWNHFDDSKTLHMREMFEQDPQRAERYWLQVGGLTLDYSKNRINDETMSLLFELAREAGVPERMRQMFHGEKINTTENRAVLHVALRNRTNSPIMVDGEDVMPKVNRVLQRMGEFAHEVRSGSWLGYTNQVITDVVNIGIGGSDLGPLTMCTALKPFGHPRLNMHFVSNVDGSQLRDVLSKVHPETTLFIIASKTFTTQETLTNALTAREWFLNHAGDEEAVAKHFAAVSTNRKAVAEFGIDIANMFEFWDWVGGRYSLWSAIGLPIMLYLGEENFIEMLNGAHLMDQHFINTPLERNLPVILALI

SEQ ID NO: 3797 - protein, 501 aa, Clarkia modesta
MASPALISETEAWKDLKAHLEDIKMTHLRELMGDTERCQSMMVEFDNIFLDYSRQQASPDTISKLYKLADAAHLKQKIDRMYNGDHINTTENRSVLHVALRAPRNSAICSDGKNVVPDVWNVLDKIKDFSDRVRNGSWIGATGKKLKDVIAVGIGGSFLGPLFVHTALQTDPESSKNARGRELRFLANVDPIDVARNISGLNPETTLVVVVSKTFTTAETMLNARTLREWISSALGPSAVAKHMVAVSTNLPLVEKFGIDPNNAFAFWDWVGGRYSVCSAVGVLPLSLQYGFAVVEKFLQGAHSIDQHFSSAPFEKNVPVLLGLLSVWNVSFLGYPARAILPYSQALEKLAPHIQQVSMESNGKGVSIDGLPLPFESGEIDFGEPGTNGQHSFYQLIHQGRVIPCDFIGVVKSQQPVYLKGEVVNNHDELMSNFFAQPDALAYGKTPEQLKKENVSEHLIPHKTFTGNRPSISILLPTLDAYRIGQLLAIYEHRVAVQGFV

SEQ ID NO: 3798 - protein, 569 aa, Clarkia modesta
MATPSLISETEAWKDLKAHLEGIKRTHLRELMGDTERCQSMMVEFDNIFLDYSRQQASPDTINKLYKLADAAHLKQKIDRMYNGDNINSTENRSVLHVALRAPRNSAICSDGKNVVPDVWNVLDKIKDFAERVRNGSWVGATGKELKNVIAIGIGGSFLGPLFVHTALQTDPEASKNARGRELRFLANVDPIDAARNISGLNPETTLVVVVSKTFTTAETMLNARTLREWISSALGVSAVAKHMVAVSTNLPLVEKFGIDPNNAFAFWDWVGGRYSVCSAVGVLPLSLQYGFAVVEKFLQGANSIDQYFSSAPFEKNIPVLLGLLSVWNVSFLGYPARAILPYSQALEKLAPHIQQVSMESNGKGVSIDGLPLPFESGEIDFGEPGTNGQHSFYQLIHQGRVIPCDFIGVVKSQQPVYLKGEVVNNHDELMSNFFAQPDALAYGKTPEQLKKENVSEHLIPHKTFTGNRPSLSILLPTLDAYRIGQLLAIYEHRVAVQGFVWGINSFDQWGVELGKSLATQVRKQLHASRVKGEPVEEGFNFSTKTLLTRYLEATSDVPADPSTLLPKI

SEQ ID NO: 3799 - protein, 387 aa, Pseudomonas putida KT2440
MTVLKMTDLDLQGKRVLIREDLNVPVKDGVVASDARILAALPTIKLALEKGAAVMVCSHLGRPTEGEFSAENSLKPVADYLSKALGRDVPLVADYLDGVAVQAGELVLFENVRFNKGEKKNADELAQKYAALCDVFVMDAFGTAHRAEGSTHGVAKFAKVAAAGPLLAAELDALGKALKAPAKPMAAIVAGSKVSTKLDVLNSLSSVCDQLIVGGGIANTFLAAAGHPVGKSLYEPDLVDTAKAIAAKVSVPLPVDVVVAKEFAESAEATVKAIADVAADDMILDIGPQTAANFAELLKSSKTILWNGPVGVFEFDQFGNGTKVLAKAIADSAAFSIAGGGDTLAAIDKYGVSKEISYISTGGGAFLEFVEGKVLPAVAILEERAKA

SEQ ID NO: 3800 - protein, 337 aa, Burkholderia fungorum LB400
MKAAVVHEFGAPLRIEEVPVPQVGRGQILVNIKASGVCHTDLHAADGDWPVKPTLPFIPGHEGVGYVAAVGEGVKHVKEGDRVGVPWLYTACGHCEHCLGGWETLCQEQQNTGYSVNGAYAEYVVADPNFVGHLPAAVSFEDIAPILCAGVTVYKGIRMTDARPGQWITISGIGGLGHVAVQYAIAMGLRVVAVDISEDKLALARELGATLAFNASECDPAAAIQKEIGGTHGVLVTAVSRSAFAQALGMVRRGGTVALNGLPPGDFPLPIFSTVLNGITVRGSIVGTRQDLQESLEFAAQGRVRARIHLDRLDNINHVLAELKSGKVDGRIVLNLD

SEQ ID NO: 3801 - protein, 101 aa, Aspergillus fumigatus
LHPATGQVRAFHPADGSALQEGQCHAPELGVTVQLPILGVKKNPQNPLYTQLGVLTKGTIIEVNVSELGLVTTSGKVVWGKYAQITNTPENDGTVNAVLLV

SEQ ID NO: 3802 - protein, 468 aa, Geobacter sulfurreducens PCA
MSDKHDLIILGSGSTAFAAALRAHSRGARVLMVEKSVLGGTCINWGCVPSKTLIHGALFYQEGRLGARLGLGECGNAVDLAPLMTRKEEVVKHLRTTRYLDILRNTPGLELAKGTGRFLGSGRLEVVDQVYRCDRYLVAVGGTPRIPKIPGLESTPFLTSRGALLLKRFPASLIIIGGGVIAVELGQMFQRLGTRVTILEHGPRILAPIEPEPALAIRNVLRDEGMEIICHSPVCAVSGDGSAVSVEVEREDGRRTYTAEKLLLAVGTTPATRGIGLELAGVETDGRGFVTVDERMRTTAPGIWAAGDCTGGMMIATVGAREGIIAVDDMFATGCGCAMDHLSVPMAIFTDPEVGAVGYTEQGARDAGLDPIVSILPVSAIPKAHVTGHTAGVIKLVAERATGRLLGAHLACHRGAELINEAALAIRLKATFEDLANALHVYPSIGEGLRLCAQGFTRDVSKLSCCAE

SEQ ID NO: 3803 - protein, 88 aa, Zea mays
  unsure (1)..(88): unsure at all Xaa locations
MAPTVMASAGTSVAPFQGLKSTAGLPVSRRSNGASLCSVSNGGRIRCMQGWPFEGIKKCETLSYXPPVNTEALLEQEDYLVRCQGAPG

SEQ ID NO: 3804 - protein, 268 aa, Glycine max
MKDDKQAPVPASTTEGQPIRCKAAVSRRAGEPLVIEDIIVAPPKPREARIRIICSSLCHSDITLRNLQDPPAIFPRILGHEATGVVESVGKDVTEVTKGDVVIPVILPECGECIDCKSTKSNRCTNFPFKVSPWMPRDGTTRFTGQNGEIIYHFLFISSFSEYTVVDIANLIKIDPEIPPDRACLLGCGVSTGVGAAWRTAGVEPGSTVAIFGLGSIGLAVAEGARLCGATRIIGVDINPEKFEIGKKFGVTDFVNAGECGGKPVGQV

SEQ ID NO: 3805 - protein, 293 aa, Escherichia coli K12
MKMRKGIILAGGSGTRLYPVTMAVSKQLLPIYDKPMIYYPLSTLMLAGIRDILIISTPQDTPRFQQLLGDGSQWGLNLQYKVQPSPDGLAQAFIIGEEFIGGDDCALVLGDNIFYGHDLPKLMEAAVNKESGATVFAYHVNDPERYGVVEFDKNGTAISLEEKPLEPKSNYAVTGLYFYDNDVVQMAKNLKPSARGELEITDINRIYLEQGRLSVAMMGRGYAWLDTGTHQSLIEASNFIATIEERQGLKVSCPEEIAFRKGFIDVEQVRKLAVPLIKNNYGQYLYKMTKDSN

SEQ ID NO: 3806 - protein, 477 aa, Neurospora crassa
MASTSATDIPAEVQAVNVPDGTTDFIPLRGKKYDLKKPHITELPITWGNWYKHVNWLNTTFIIFVPLAGLISAYWIPAQTKTILFSIAYYYFAGLGITAGYHRLWAHTSYKATLPLKIWLAAGGAAAVEGSARWWSRDHRAHHRYTDTDKDPYSVRKGLLYSHIGWMVMKQNPKRIGRTDITDLNEDPVVVWQHKHYIKCVIVMALIVPTLICGLGWGDYAGGFIYGGILRIFFIQQATFCVNSLAHWLGDQPFDDRNSPRDHVITALVTLGEGYHNFHHEFPSDFRNAIEWWQYDPTKWCIWVWKQLGLAYDLKKFPHNEIEKGRLQQQQKKLDQKRATLDWGIPLENLPVVSWDDFVQESKNGKAWIAVAGVIHDVGKFIQDHPGGKALINSAIGKDATAIFNGGVYNHSNAAHNLLSTMRVGVIRGGCEVEIWKRAQAENKDIATVTDSSGKKIVRAGLQPTRVTPPVTTADAA

SEQ ID NO: 3807 - protein, 213 aa, Schizosaccharomyces pombe
MSKDSDYKRAEKHLSSIDNKWSSLVKKVGPCTLTPHPEHAPYEGIIRAITSQKLSDAATNSIINKFCTQCSDNDEFPTPKQIMETDVETLHECGFSKLKSQEIHIVAEAALNKQIPSKSEIEKMSEEELMESLSKIKGVKRWTIEMYSIFTLGRLDIMPADDSTLKNEAKEFFGLSSKPQTEEVEKLTKPCKPYRTIAAWYLWQIPKLHRKGQ

SEQ ID NO: 3808 - protein, 310 aa, Pseudomonas aeruginosa PAO1
MSVLFAYPGQGAQRPGMLAALPDEPPVRACLEQAADCLGQAPAELESAEALRGTRAVQLCLLIAGVAASRLLETRGHRPGLVAGLSIGAYPAAVVAGALDFDDALRLVALRGELMQAAWPEGYGMSAILGLEQAQLEALILAVRREHPPLYLANVNAERQLVVAGSEAALAALAERARAAGASAAKRLAVSVPSHCALLDEPAARLAEAFAGIRLHRPRVPYLSSSRARLVAEPAALADDLAGNMARRVEWLATLRSAYERGARLHLELPPGRVLSGLARPLFGCATPAFEGSRADTLDALLREEEKRTR

SEQ ID NO: 3809 - protein, 652 aa, Oryza sativa
MIHACSALLHTMKTGTDSGGTLHAQRSYRAFMSVVEATVTFRPRPPPRLAKRAGEAEYRRNPTTGVKCVGRPKGRKFDRAKNRKIGRGASMCPSKVLSFAGSFVEDHCPLATPPKLAGSGLRVGRGRDADKRDDFAIPHAYPGEVQKASELFVEWGNLRSPIPTRVETGTVQPSQVDHMIVHIYSTTPSVSRLCLILYICVRISDVTRQNFSLRYKHPYHSAFYHVMLRPEDWSHWRSTCYDVKVRIICESLVGPKLCRSQRYACNDATTNGPPHQRPGNCGVAVPAARANMLSAGRRCHFFGYRIHPIQAMAATIQSVKARQIFDSRGNPTVEVDICCSDGTFARAAVPSGASTGVYEALELRDGGSDYLGKGVLKAVDNVNSIIGPALIGKDPTEQTVIDNFMVQQLDGTKNEWGWCKQKSVIKKKYGQDATNVGDEGTSISDIWYGMLFVLICQVVIGMDVAASEFYTEDQTYDLNFKEENNDGSQKISGDSLKNVYKSFVSEYPIVSIEDPFDQDDWVHYAKMTEEIGDQVQIVGDDLLVTNPTFPCWLQYSNQFDLQRVAKAIKDKACNALLLKVNQIGSVTESIEAVKMSKRAGWGVMTSHRSGETEDTFIADLAVGLSTLLRIEEELGAAAVYAGAKFRAPVEPY

SEQ ID NO: 3810 - protein, 539 aa, Neisseria gonorrhoeae
MDAFTRAWYALERHYQDTCHILLRDRFAAEPDRFERMHERLDGMLFDYSKNRFGEDTLQLLCRLAETADLEGKMRALRTGAKVNGSEGRAALHTALRLPDGADAVYADGRDVLPEIRRELNRALKFAHSLDDGLYQGITGKRIADFVHIGIGGSDLGPAMCVQALEPFRRQISVHFVSNADPACLDEVLCRLNPETTMFCVASKSFKTPETLLNAEAVKAWYRGAGFSESETARHFCAVSADTEAAQSFGIAAERVFAMYDWVGGRYSVWSPVGLPVMVAVGGARFRELLAGAHAMDSHFFHTPPRRNIPVLMALIAVWYNNFQHADGQTAVPYSHNLRLLPAWLNQLDMESLGKSRASDGSPAACKTGGIVFGGEGVNCQHAYFQLLHQGTRLIPCDFIVPMTAQGAEDGRSRFTVANAFAQAEALMKGKTLDEARAELADLPEAERERLAPHKEFPGNRPSNSILLDRLTPYNLGMLMAAYEHKTFVQGAIWNVNPFDQWGVEYGKQLATTIIGELEGGTSVHDASTEGLMAFYREC

SEQ ID NO: 3811 - protein, 300 aa, Brucella melitensis 16M
MELPLEHALYPFSNNDGFQLQRSKGGTINMQDKVVLVGCGNMGFAMLRGWLDSGILKAGDVHVVEPAEALRERAALAHVHVYADAADLPADLQPRMVLVAVKPQMMANVLPAYKRFAPASTFVSVAAGIPVALFESHLGKDVAVIRCMPNTPAAIGKGMLVTFKNANVSDANEAFVTSLLKTSGKVASVDEEGLMDAVTAVSGSGPAYIFHFIEALTDAGVNLGLPRETAALLAMQTVMGAGALADASTDSPSKLREQVTSPNGTTAAALDVLMGGDRLKELVAEAVKAAHKRSVELGKS

SEQ ID NO: 3812 - protein, 191 aa, Araucaria araucana
DDHREVVAEIRRANLEPYLGLHYPATDIPQASRFLFMKNKVRMIYDCRADGVKVIQDKRLAKPLSLSSSALRALHGCHAQYMANMGSVASFVMAVTINENETDEETSGSGQKGGRRLWGLVVCHHTSPRFVPFPLRYACEFLMQVFGIQLNKEVELAAQLRVKHMLRTQTVLCDMLLRDAPVGIVTQTPNI

SEQ ID NO: 3813 - protein, 496 aa, Pseudomonas aeruginosa PAO1
MFELSDWQRRAATQRFIDQALIGGRQRPAASGATFDAIDPASNRLLARVAACDAADVDAAVAAARRAFDEGPWARLAPVERKRVLLRLAELMLAHREELALLDSLNMGKPVMDAWNIDVPGAAHVFAWYAESLDKLYDQVAPTAQQTLATITRVPLGVIGAVVPWNFPLDMAAWKLAPALAAGNSVVLKPAEQSPFSALRLAELALEAGVPEGVLNVVPGLGEQAGKALGLHPEVDALVFTGSTEVGKYFMQYSAQSNLKQVWLECGGKSPNLVFADCRDLDLAAEKAAFGIFFNQGEVCSANSRLLVERSIHDEFVERLLAKARDWQPGDPLDPASRAGAIVDRRQTAGILAAIERAQGEGATLLGGGRQLTINGSDNFIEPTLFGDVRPDMQLAREEIFGPVLAISAFDSEDEAIRLANDSRYGLAASLWSDDLHRAHRVARRLNAGTVSVNTVDALDVAVPFGGGKQSGFGRDLSLHSFDKYTQLKTTWFQLR

SEQ ID NO: 3814 - protein, 539 aa, Neisseria gonorrhoeae
MDAFTRAWYALERHYQDTCHILLRDRFAAEPDRFERMHERLDGMLFDYSKNRFGEDTLQLLCRLAETADLEGKMRALRTGAKVNGSEGRAALHTALRLPDGADADYADGRDVLPEIRRELNRALKFAHSLDDGLYQGITGKRIADFVHIGIGGSDLGPAMCVQALEPFRRQISVHFVSNADPACLDEVLCRLNPETTMFCVASKSFKTPETLLNAEAVKAWYRGAGFSESETARHFCAVSADTEAAQSFGIAAERVFAMYDWVGGRYSVWSPVGLPVMVAVGGARFRELLAGAHAMDSHFFHTPPRRNIPVLMALIAVWYNNFQHADGQTAVPYSHNLRLLPAWLNQLDMESLGKSRASDGSPAACKTGGIVFGGEGVNCQHAYFQLLHQGTRLIPCDFIVPMTAQGAEDGRSRFTVANAFAQAEALMKGKTLDEARAELADLPEAERERLAPHKEFPGNRPSNSILLDRLTPCNLGMLMAAYEHKTFVQGAIWNVNPFDQWGVEYGKQLAKTIIGELEGGTSVHDASTEGLMAFYREC

SEQ ID NO: 3815 - protein, 191 aa, Araucaria araucana
DDHGEVISEVRKSDLEPYLGLHYPATDIPQASRFLFMKNRARMICDCCASPVRVVEDKRLPRELNLCGSTLRAPHGCHAQYMSNMGSISPLVMAVIVHEKEEERSRCGPQQQKGRRLWGLVVCHHTSPRFVPFPLRYACEFLMRVFGIQLNREIELAAQSREKHILRTQTLLCDMLLRDAPMGIVTQKPNI

SEQ ID NO: 3816 - protein, 957 aa, Mycobacterium tuberculosis H37Rv
MSFVIAAPEVIAAAATDLASLGSSISAANAAAAANTTALMAAGADEVSTAIAALFGAHGQAYQALSAQAQAFHAQFVQALTSGGGAYAAAEAAAVSPLLDPINEFFLANTGRPLIGNGANGAPGTGANGGDGGWLIGNGGAGGSGAAGVNGGAGGNGGAGGNGGAGGLIGNGGAGGAGGVASSGIGGSGGAGGNAMLFGAGGAGGAGGGVVALTGGAGGAGGAGGNAGLLFGAAGVGGAGGFTNGSALGGAGGAGGAGGLFATGGVGGSGGAGSSGGAGGAGGAGGLFGAGGTGGHGGFADSSFGGVGGAGGAGGLFGAGGEGGSGGHSLVAGGDGGAGGNAGMLALGAAGGAGGIGGDGGTLTAGGIGGAGGAGGNAGLLFGSGGSGGAGGFGFADGGQGGPGGNAGTVFGSGGAGGNGGVGQGFAGGIGGAGGTPGLIGNGGNGGNGGASAVTGGNGGIGGTGVLIGNGGNGGSGGIGAGKAGVGGVSGLLLGLDGFNAPASTSPLHTLQQNVLNVVNEPFQTLTGRPLIGNGANGTPGTGADGGAGGWLFGNGANGTPGTGAAGGAGGWLFGNGGNGGHGATNTAATATGGAGGAGGILFGTGGNGGTGGIATGAGGIGGAGGAGGVSLLIGSGGTGGNGGNSIGVAGIGGAGGRGGDAGLLFGAAGTGGHGAAGGVPAGVGGAGGNGGLFANGGAGGAGGFNAAGGNGGNGGLFGTGGTGGAGTNFGAGGNGGNGGLFGAGGTGGAAGSGGSGITTGGGGHGGNAGLLSLGASGGAGGSGGASSLAGGAGGTGGNGALLFGFRGAGGAGGHGGAALTSIQQGGAGGAGGNGGLLFGSAGAGGAGGSGANALGAGTGGTGGDGGHAGVFGNGGDGGCRRVWRRYRRQRWCRRQRRADRQRRQRRQRRQSRGHARCRRHRRAAARRERTQRLAIAGRPATTRGVEGISCSPQMMP

SEQ ID NO: 3817 - protein, 1109 aa, Ipomoea nil
MKVAVNTFLLSLCSTSSIYAAFALNSDGAALLSLTRHWTPIPSDITQSWNASDSTPCSWLGVECDRRQFVDTLNLSSYGISGEFGPEISHLKHLKKVVLSGNGFFGSIPSQLGNCSLLEHIDLSSNSFTGNIPDTLGALQNLRNLSLFFNSLIGPFPESLLSIPHLETVYFTGNGLNGSIPSNIGNMSELTTLWLDDNQFSGPVPSSLGNITTLQELYLNDNNLVGTLPVTLNNLENLVYLDVRNNSLVGAIPLDFVSCKQIDTISLSNNQFTGGLPPGLGNCTSLREFGAFSCALSGPIPSCFGQLTKLDTLYLAGNHFSGRIPPELGKCKSMIDLQLQQNQLEGEIPGELGMLSQLQYLHLYTNNLSGEVPLSIWKIQSLQSLQLYQNNLSGELPVDMTELKQLVSLALYENHFTGVIPQDLGANSSLEVLDLTRNMFTGHIPPNLCSQKKLKRLLLGYNYLEGSVPSDLGGCSTLERLILEENNLRGGLPDFVEKQNLLFFDLSGNNFTGPIPPSLGNLKNVTAIYLSSNQLSGSIPPELGSLVKLEHLNLSHNILKGILPSELSNCHKLSELDASHNLLNGSIPSTLGSLTELTKLSLGENSFSGGIPTSLFQSNKLLNLQLGGNLLAGDIPPVGALQALRSLNLSSNKLNGQLPIDLGKLKMLEELDVSHNNLSGTLRVLSTIQSLTFINISHNLFSGPVPPSLTKFLNSSPTSFSGNSDLCINCPADGLACPESSILRPCNMQSNTGKGGLSTLGIAMIVLGALLFIICLFLFSAFLFLHCKKSVQEIAISAQEGDGSLLNKVLEATENLNDKYVIGKGAHGTIYKATLSPDKVYAVKKLVFTGIKNGSVSMVREIETIGKVRHRNLIKLEEFWLRKEYGLILYTYMENGSLHDILHETNPPKPLDWSTRHNIAVGTAHGLAYLHFDCDPAIVHRDIKPMNILLDSDLEPHISDFGIAKLLDQSATSIPSNTVQGTIGYMAPENAFTTVKSRESDVYSYGVVLLELITRKKALDPSFNGETDIVGWVRSVWTQTGEIQKIVDPSLLDELIDSSVMEQVTEALSLALRCAEKEVDKRPTMRDVVKQLTRWSIRSYSSSVRNKSK

SEQ ID NO: 3818 - protein, 423 aa, Trichoderma viride
MSLSNKLSITDVDVKGKRVLIRVSPDCPVDFNVPLDENKNITNPQRIAGAIPTIKHALDNGAKAVILMSHLGRPNGAVNAKYSLKPVVPKLEELLGKPVTFAPDCVGPEVEAIVNKADNGAVILLENLRFHIEEEGSSKDKEGNKTKADKAKVEEFRKGLTALGDVYVNDAFGTAHRAHSSMVGVDLPQKAAGFLMKKELDYFAKALESPQRPFLAILGGAKVSDKIQLIDNLLDKVNTLIICGGMAFTFKKVLDNLAIGDSLFDKAGAETVPKLVEKAKAKNVKIVLPTDFITADKFDKDANTGLATDKDGIPDGWMGLDCGDESIKLYKEAIDEAKTILWNGPAGVFEFEKFAGGTKATLDAVVEGCKNGKIVIIGGGDTATVAAKYGVEDKLSHVSTGGGASLELLEGKELPGVTALSSK

SEQ ID NO: 3819 - protein, 356 aa, Anabaena variabilis ATCC 29413
METNVKAQVFRGVNQLSYEEIPLPTLEPDEVLVQVQVVGLCQSDIKKIRYPLYEPPRIFGHETAGTIAAVGSQVKGWQVGQRVAVMHHIPCMRCAYCMNDNFSMCDVYKNISTTAGFNASGGGFAEYVKVPGHIVENGGLIPIPDEISFEEASFVEPTNCCLKAVKKAQIAPGQTVLVTGAGPIGLMFVMLVKYFGAKAIATDLLPSRIEKALNVGAEAAFDARDPDLPAKIHALTNGLGVDVTLLAVPSEKAFFQALDCTRKGGKILFFAEFPDELEIPINPNILYRREIDLMGSYSSSYRLQNLSADIVFNRRIDVQALISDRYPLKDLSAAVDQAIAPTPETYKILIYPKIGD

SEQ ID NO: 3820 - protein, 499 aa, Brucella melitensis biovar Abortus
MTDRPIMTTSAGAPIPDNQNSLTAGERGPILMQDYQLIEKLSHQNRERIPERAVHAKGWGAYGTLTITGDISRYTKAKVLQPGAQTPMLARFSTVAGELGAADAERDVRGFALKFYTQEGNWDLVGNNTPVFFVRDPLKFPDFIHTQKRHPRTHLRSATAMWDFWSLSPESLHQVTILMSDRGLPTDVRHINGYGSHTYSFWNDAGERYWVKFHFKTMQGHKHWTNAEAEQVIGRTRESTQEDLFSAIENGEFPKWKVQVQIMPELDADKTPYNPFDLTKVWPHADYPPIDIGVMELNRNPENYFTEVENAAFSPSNIVPGIGFSPDKMLQARIFSYADAHRHRLGTHYESIPVNQPKCPVHHYHRDGQMNVYGGIKTGNPDAYYEPNSFNGPVEQPSAKEPPLCISGNADRYNHRIGNDDYSQPRALFNLFDAAQKQRLFSNIAAAMKGVPGFIVERQLGHFKLIHPEYEAGVRKALKDAHGYDANTIALNEKITAAE

SEQ ID NO: 3821 - protein, 309 aa, Helicobacter pylori 26695
MQYALLFPGQGSQCVGMGKSFYESHTLAKELFERASNALKVDMKKTLFEENELLKESAYTQPAIYLVSYIAYQLLNKQVNGGLKPVFALGHSLGEVSAVSLSGALDFEKALKLTHQRGKMMQEACANKDASMMVVLGVSEESLLSLCQRTKNVWCANFNGGMQVVLAGIKDDLKALEPTLKEMGAKRVVFLEMSVASHCPFLEPMTFKFQELLEKSLKDKFHFEIISNATNEAYHNKAKAVELLSLQLTQPVRYQDCVKSNNDRVDVFFELGCGSVLKGLNKRLSNKPTISVGDNKGLDEAIEFLEEYV

SEQ ID NO: 3822 - protein, 415 aa, Clostridium perfringens str. 13
MAIQAQKGTKDMLPNDAYKWHYIEEKLRKISAEYGIREIRTPMFEATELFKRGVGETTDVVQKEMYTFEDKGGRSITLKPEGTAPAVRAFIENSLYADAQPTKMFYFTPCFRYEKMQKGRLREFHQYGIEVFGSQEASIDAEILSLVMRALTEDFGIKGLSLNINSLGCPKCRAKFNEALKQYLKENYDNLCETCKTRFEKNPMRIIDCKEKRCKEIVKEAPSILDYICEECSDHFSKLKAYLDVMGIEYNIDPQIVRGLDYYSKTVFEVIKDGLTVCGGGRYDYLVEEVDGPKTPAMGFGLGLERLLLILDEEGIEIPEPVRCEVYIGSMGDRARLEAMKLAFNLRKSGIKAEIDHLGKSVKAQMKYANKIGAKYTFVIGDSEIEENKIKIKRMSDGEQFEVSLDINEIVNIVK

SEQ ID NO: 3823 - protein, 488 aa, Geobacillus stearothermophilus
MKVQTEIKTYFNYINGNWVSSVSNNVEPSINPANRHDIVGYVQRSTLEDVNEAVTAANEAQTSWWKRSGVERGEYLYKAAHILEQCLQDIAETMTREMGKTLAEAKAETMRGVHILRYYAGEGARKIGDVIPSSDSEGLLFTTRVPLGVVGVISPWNFPVAIPIWKMAPALVYGNTVVLKPASETAVTAAKVIECFHEAGFPKGVVNMVCGSGSVVGQGIANHPDIDGVTFTGSNTVGKQVGRAAFERGAKYQLEMGGKNPVIVAKDADLDLAVEGTISGGLRSTGQKCTATSRVFIEREVYEPFKAKLLERVKQLKIGNGLDAETWMGPCASESQFHTVLSYIEKGKSEGAKLIYGGNRCLEGELANGFFVEPTIFEDVDLQMTIAREEIFGPVLALIQVDSIEEAIKLANDTEYGLSASIYTKNIGNALEFIKDIEAGLIKVNAETAGVEFQAPFGGMKQSSSHSREQGQAAIEFFTSIKTVFVKA

SEQ ID NO: 3824 - protein, 135 aa, Glycine max
MAMSFSGAVLSGINSSFPSGVAKKSGVAKQSGVGAVRFGRKTELVVVAQRKKSLIYAEKGDGNILDDINEATKRASDYVTDKTKEALKDGEKAKDYVDEKNVEAKDTALDEAQKVLDYVKEKGNEAGEDKDTTKA

SEQ ID NO: 3825 - protein, 837 aa, Mycobacterium tuberculosis H37Rv
MSFVIAAPEVIAAAATDLASLESSIAAANAAAAANTTALLAAGADEVSTAVAALFGAHGQAYQALSAQAQAFHAQFVQALTSGGGAYAAAEAAATSPLLAPINEFFLANTGRPLIGNGTNGAPGTGANGGDGGWLIGNGGAGGSGAAGVNGGAGGNGGAGGLIGNGGAGGAGGRASTGTGGAGGAGGAAGMLFGAAGVGGPGGFAAAFGATGGAGGAGGNGGLFADGGVGGAGGATDAGTGGAGGSGGNGGLFGAGGTGGPGGFGIFGGGAGGDGGSGGLFGAGGTGGSGGTSIINVGGNGGAGGDAGMLSLGAAGGAGGSGGSNPDGGGGAGGIGGDGGTLFGSGGAGGVCGLGFDAGGAGGAGGKAGLLIGAGGAGGAGGGSFAGAGGTGGAGGAPGLVGNAGNGGNGGASANGAGAAGGAGGSGVLIGNGGNGGSGGTGAPAGTAGAGGLGGQLLGRDGFNAPASTPLHTLQQQILNAINEPTQALTGRPLIGNGANGTPGTGADGGAGGWLFGNGGNGGHGATGADGGDGGSGGAGGILSGIGGTGGSGGIGTTGQGGTGGTGGAALLIGSGGTGGSGGFGLDTGGAGGRGGDAGLFLGAAGTGGQAALSQNFIGAGGTAGAGGTGGLFANGGAGGAGGFGANGGTGGNGLLFGAGGTGGAGTLGADGGAGGHGGLFGAGGTGGAGGSSGGTFGGNGGSGGNAGLLALGASGGAGGSGGSALNVGGTGGVGGNGGSGGSLFGFGGAGGTGGSSGIGSSGGTGGDGGTAGVFGNGGDGGAGGFGADTGGNSSSVPNAVLIGNGGNGGNGGKAGGTPGAGGTSGLIIGENGLNGL

SEQ ID NO: 3826 - protein, 192 aa, Araucaria araucana
DEHGEVVAEIRRSDLEPYLGLHYPATDIPQASRFLFMQNRVRMICDCRAVPVKVVQAGQLQQPLCLVGSTLRAPHGCHAQYMANMGSIASLVMAVVIIGNEDEEEGRWKRKRRGSMKLWGLVVCHHTSPRAVPFPLRYACEFLMQAFGLQLNMELQLAAQLTEKHILRTQTLLCDMLLRDAPIGIVLILPSI

SEQ ID NO: 3827 - protein, 429 aa, Bacillus cereus ATCC 14579
MAFEFKLPDIGEGIHESEIVKWFIKPGDEVNEDDVLLEVQNDKAVVEIPSPVKGKVLEVLVEEGTVAIVGDTLIKFDAPGYENLKFKGDDHDEAPKAEEAAVEAPAAEATPAATAEVVNERVIAMPSVRKYAREKGVDIHKVAGTGKNGRIVKADIDAFANGGQTVAATEAPAAVEATPAAAKEEAPKAQPIPAGEYPETREKMSGIRKAIAKAMVNSKHTAPHVTLMDEVDVTELVAHRKKFKAVAADKGIKLTYLPYVVKALTSALREYPMLNTSLDDASQEVVHKHYFNIGIAADTDKGLLVPVVKDTDRKSIFTISNEINDLAGKAREGRLAPAEMKGASCTITNIGSAGGQWFTPVINHPEVAILGIGRIAEKPVVKNGEIVAAPVLALSLSFDHRLIDGATAQKALNQIKRLLNDPQLLVMEA

SEQ ID NO: 3828 - protein, 539 aa, Neisseria gonorrhoeae
MDAFTRAWYALERHYQDTCHILLRDRFAAEPDRFERMHERLDGMLFDYSKNRFGEDTLQLLCRLAETADLEGKMRALRTGAKVNGSEGRAALHTALRLPDGADAVYADGRDVLPEIRRELNRALKFAHSLDDGLYQGITGKRIADFVHIGIGGSDLGPAMCVQALEPFRRQISVHFVSNADPACLDEVLCRLNPETTMFCVASKSFKTPETLLNAEAVKAWYRGAGFSESETARHFCAVSADTEAAQSFGIAAERVFAMYDWVGGRYSVWSPVGLPVMVAVGGARFRELLAGAHAMDSHFFHTPPRRNIPVLMALIAVWYNNFQHADGQTAVPYSHNLRLLPAWLNQLDMESLGKSRASDGSPAACKTGGIVFGGEGVNCQHAYFQLLHQGTRLIPCDFIVPMTAQGAEDGRSRFTVANAFAQAEALMKGKTLDEARAELADLPEAERERLAPHKEFPGNRPSNSILLDRLTPYNLGMLMAAYEHKTFVQGAIWNVNPFDQWGVEYGKQLAKTIIGELEGGTSVHDASTEGLMAFYREC

SEQ ID NO: 3829 - protein, 122 aa, Anabaena variabilis ATCC 29413
MLNPVVTIAIFQKQPNPQVFSAGQVIFEEGQAGDYMYGIVKGAVDLLINGKVIETIEAGEIFGTGILVGVNHRNYTAIAQTDCQLAYLDEKRFLFAVQETPMFALNVLRNYSERLSRLQRLV

SEQ ID NO: 3830 - protein, 471 aa, Moorella thermoacetica ATCC 39073
MAIKFGTDGWRAVIADEFTFANVRLVTQATANYLLREAGSGKIIIGYDNRFLAPEFARAVAEVLTASGFTVYLPSRAVPTPVTAWAIKHYQAMGALMLTASHNPPEYCGLKFIPEYAGPAVPAITSAIEKEIAAVINGGEVKTLNLDEARGRGLVRELEPEADYREYLHGLIDVEALRKAGLKVVVDPLYGAGIGYLEDFLRGAGCQVQAIHNYRDPLFGGDLPDPSARGLEELSRRVRETGAHLGLALDGDADRFGVVDGDGTYLTANQVLYLVLAHLIMDRHYRGPVARTVATTHNLDRLARAHDLEIIETPVGFKYIGEALREKGCILGGEESGGLSIRGHIPEKDGILATALVAELRAVRGRSLGEILADLHSSYGHLVNQRLDIKVDPATKERVLQELPDFAPAKVAGIPVTGRLTVDGVKLTLADGSWVLLRPSGTEPLLRLYAEAPDAGRLRLLQKEITTALRI

SEQ ID NO: 3831 - protein, 191 aa, Agathis dammara
DDHGEVVAEIRRADLEPYLGLHYPATDIPQASRFLFMKNKVRMICDCRADPVKVIQDKRLAHPLSLSGSTLRAPHSCHAQYMANMGSIASLVMAVTINENENEEEASGSGQKGGRRLWGLVVCHHTSPQFVTFPLRYACEFLMQVFGIQLNKEVELAAQLREKHMLRTQTVLCDMLLRDAPVGIVTQTPNI

SEQ ID NO: 3832 - protein, 539 aa, Neisseria gonorrhoeae
MDAFTRAWYALERHYQDTCHILLRDRFAAEPDRFERMHERLDGMLFDYSKNRFGEDTLQLLCRLAETADLEGKMRALRTGAKVNGSEGRAALHTALRLPDGADAVYADGRDVLPEIRRELNRALKFAHSLDDGLYQGITGKRIADFVHIGIGGSDLGPAMCVQALEPFRRQISVHFVSNADPACLDEVLCRLNPETTMFCVASKSFKTPETLLNAEAVKAWYRGAGFSESETARHFCAVSADTEAAQSFGIAAERVFAMYDWVGGRYSVWSPVGLPVMVAVGGARFRELLAGAHAMDSHFFHTPPRRNIPVLMALIAVWYNNFQHADGQTAVPYSHNLRLLPAWLNQLDMESLGKSRASDGSPAACKTGGIVFGGEGVNCQHAYFQLLHQGTRLIPCDFIVPMTAQGAEDGRSRFTVANAFAQAEALMKGKTLDEARAELADLPEAERERLAPHKEFPGNRPSNSILLDRLTPCNLGMLMAAYEHKTFVQGAIWNVNPFDQWGVEYGKQLAKTIIGELEGGTSVHDASTEGLMAFYREC

SEQ ID NO: 3833 - protein, 181 aa, Clostridium tetani E88
MNWCEGDIKEVLYNEEELRKKIKEMGKKITEDYKGKDLILIGVLKGSVIFMADLMKEINIPCNMDFMAVSSYGNSSETSGVVRILKDLDFEIENRDVLIVEDIVDSGVTLRYLVDYLKGRKPASIEIVCLLNKEERRQSNIDVKYIGFDVPDYFLVGYGLDFAERYRNLPYVAILKEEVYS

SEQ ID NO: 3834 - protein, 192 aa, Agathis dammara
DDHGEVISEVRKSDLGPYLGLHYPATDIPQASRFLFMKNRVRMICDCCAPPVRVIEDKRLPRELNLCGSTLRAPHGCHAQYMSNMGSISSLVVAVIVNEKEEEEGDSDAQQQQKGRRLWGLVVCHHTSPRFVPFPLRYACEFLMQVFGIQLNKEVELAAQLREKHILRTQTLLCDMLLRDAPMGIITQKPNI

SEQ ID NO: 3835 - protein, 291 aa, Leuconostoc mesenteroides subsp. mesenteroides ATCC 8293
MKGIILAGGSGTRLYPITKATSKQLVPIYDKPMVYYPLSVLMLAGIKKILLISTPEYVGQFEELFGDGHEIGLHIEYAIQEEPRGLADAFIVGADFIGDDAVALVLGDNIFYGAGLSQKLQQEALKTSGATVFGYQVKDPERFGVVEFDKDGKALSIVEKPEQPKSNYAVTGLYFYDNDVVEIAANVKPSERGEIEISDINQAYLDRGDLDVQVMGRGYAWLDTGTLDSLLEASSFIATIQKQQNLKVASLEEIAYRMGYIDIAQLEKLAQPLKKNDYGQYLLRIVDEEGN

SEQ ID NO: 3836 - protein, 492 aa, Hypericum perforatum
MDPYKYRPSSAFNSPFWTTNSGAPVYSNDHSLTVGSRGPILLEDYHLVEKLANFDRERIPERVVHARGASAKGFFEVTHDISHLSCADFLRAPGVQTPVIVRFSTVIHERGSPETLRDPRGFAVKFYTREGNFDLVGNNFPVFFIRDGMKFPDMVHALKPNPKSHIQEDWRILDFFSHHPESLHMFSFLFDDIGIPQDYRHMEGSGVNTYTLVNKAGKVHYVKFHWKPTCGVKSLLEDEAIKVGGSNHSHATKDLYDSIAAGNYPEWKLFIQTIDPDHEDRFDFDPLDVTKTWPEDILPLQPVGRLVLNKNIDNFFAENEQLAFCPAIVVPGIYYSDDKLLQTRIFSYSDTQRHRLGPNYLQLPVNAPKSAHHNNHHEGFMNFMHRDEEVNYFPSRYDPVRHAEKYPIPPVVLNGRREKCMIAKENNFKQPGERYRSFSPDRQERFLNRWISSLSDPRVTHEIRAIWVTYWYQADKSLGQKLASRLNVRPNM

SEQ ID NO: 3837 - protein, 315 aa, Burkholderia fungorum LB400
MVKKASSKAAGAAAGIAAGASKKTSVKRALNGASVHAPVAKRAKAPRAKSNGALPAELAGDVRELARVTGEGHEGEVVRKTRASAAAGGEGASASEVAVPVQIGGLTPEVTRPAYWDKACADLVKRDRILKKLIPKFGPVHLLSRGDPFVTLARSVVGQQISVASAQAAWAKVEAACPKLVPQQFIKLGLEKLTTCGLSKRKAEYVLDLAQHFVSGALHVGKWTSMEDEAVIAELTQIRGIGRWTAEMFLIFNLSRPDVLPLDDLGLIRAISVNYFSGEPVTRSEAREVAANWEPWRTVATWYMWRSLDPLPVDY

SEQ ID NO: 3838 - protein, 450 aa, Tropheryma whipplei str. Twist
MDYDLIVLGAGSAGYATAIRATQLGMKVALAEGDKVGGTCLHRGCIPTKSLVQCAKAAHIAKNASKFGVINSFSGVDINAVNVFKNGIVESKYRGLQSLLRSYGIHVYPNFATLSSQNSVRIGTEDITGKNIVIATGSRPKGIPGLSGGCIFDSDSILEIDHLPSSLAIIGGGVIGVEFASIFNYLGVDVSILEAQETLIPSEERGVSKQLERVFRRRGIKLYLGHKIMDVSQTDGVVVSLDSNEKVNADLLLVAIGRAPATDAIGKVGIEIDGGAISVDEKLRTSVPNVFAAGDVVGGLQLAHRGYQQGIYLAEQIAGLDPSAVADINIPRVIYTSPEVASVGYTEAGAAEIYGVNEIVTYEYNLAGNAKSSIMGAAGSIKVVQHKNKDVLGVHMVGDGVSELVSEAQLIVNWEANPSDVASLIHPHPTQAEAIGEAMLALAGKPLHGI

SEQ ID NO: 3839 - protein, 299 aa, Zea mays
QSVPGLVILYGSIVKKKWAVNSAFMALYAFAAVWLCWVMWGYQMSFGQKLLPFWGKAGHTLGQGFLLSQAGLPATGEITPLYPMASMVYFQCVFAAITLILLAGSLLGRMNFKAWMLFVPLWLTFSYTIGAFSIWGGGFLFHWGVIDYSGGYVIHLSSGVAGFTAAYWVGPRLTKDRERFPPNNVLLMLTGAGILWMGWAGFNGGDPYAANIDSSIAVVNTNICAATSLLVWTCLDVIFFKKPSVIGAVQGMITGLVCITPGAGLVQGWAAIVMGMLSGSIPWCTMMVVHKRSRLLQAC

SEQ ID NO: 3840 - protein, 193 aa, Streptococcus gordonii
INDYSYEEVERIVRKAFDIARGRRKRVTSIDKQNVLATSKLWRRVADEVAKDYPDVTLEHQLVDSAAMLMITNPAKFDVVVTENLFGDILSDESSVLSGTLGVMPSASHSADGPSLYEPIHGSAPDIAGQCIANPISMILSVAMMLRDSFAELEAAEAIEAAVEKTLAQGILTRDLGGQVGTAQMTESIINNL

SEQ ID NO: 3841 - protein, 461 aa, Tropheryma whipplei str. Twist
MSEDFILPALGESVSECVITRWLKEAGDRVEVDEPLVEVSTDKVDTELPSTLTGILEEILVQRDETAKPGQILARIAVDKDETKSNFDHGVKQSDVITGDSTGNLLGNTRPIEDTGWPVTLHTAESKPDLSAKADHIGDEGDKQGNLPTAHNAEIPYATPIVRQLARKLNIDLTNIVGSGVGNRILREDVLLASNRTTNTSTECAQNIPSSPEHDKSAASFDSEVSELRGTRIKMSRLRNIIAERAVHSMQNTAQLSTVIEVDLTRIVDYRNSIKEKFKEAEGVNLTVLPFIINATVQALRKYPVINSHIVDDQIVFPDYENISLAVDTERGLLTPVIKNAGDMTVAQFAKSVFDLARRARNNKLSPDELTGGTFTVTNTGSRGALFDTPVVFLPQLAILGIGAIARRPVIVLDAQGNECISIRSVAFFALSYDHRVIDGADAARFLGYIKSLLETGNCTV

SEQ ID NO: 3842 - protein, 573 aa, Glycine max
MGRSSGFIAMQASLSSGQVPFNLHGPQGVLSHLKYLLETKGSAVVCAAEGAGHNLLQKTNATDASGNVVFGDIGVYIQQETKKYFKEIGVHADVKYIDPTYMIRAIRANASDGILYTGLGQNHLTDIFPNAPPIPSTFCLKMRTPIDRDFPGHYSLDEEWHGYINNNDRVLLKTIYYSSPTSAGAECIDPDCTWVEQWVHRAGPREKIYYKPEEVKAAIVTCGGLCPGLNDVIRQQIVITLEIYGVKNIVGIPFGYRGFSDKELTEVPLSRKVVQNIHLSGGSLLGVSRGGPGVSDIVDSLEKRGINMLFVLGGNGTHAGANAIHHECRKRRLKVSVIGVPKTIDNDILLMDKTFGFDTAVEEAQRAINSAYIEAHSAYHGIGVVKLMGRSSGFIAMQASLFSGQVDICLIPEVPFNLHGPHGVLSHLKYLLETKGSAVVCVAEGAGQNLLQKTNATDASGNVVFGDIGVYIQQETKKYFKEIGVHADVKYIDPTYMIRAIRANASDGILCTVLGQNAVHGAFAGYSGITVGLCNTHYVYFPIPEVISHPRLVDPNSRMWHRCLTSTGQPDFI

SEQ ID NO: 3843 - protein, 523 aa, Neurospora crassa
MGLSLKKPEGVPGKSWPAIVIGLFVAFGGVLFGYDTGTIGGILAMPYWQDLFSTGYRNPEHHLDVTASQSATIVSILSAGTFFGALGAAPLADWAGRRLGLILSSFVFIFGVILQTAAVSIPLFLAGRFFAGLGVGLISATIPLYQSETAPKWIRGVIVGSYQLAITIGLLLASIVNNATHNMQNTGCYRIPIAVQFAWAIILIVGMIILPETPRFHIKRDNLPAATRSLAILRRLEQNHPAIIEELSEIQANHEFEKSLGKATYLDCLKGNLLKRLLTGCFLQSLQQLTGINFIFYYGTQFFKNSGFSDSFLISLITNLVNVVSTLPGLYAIDKWGRRPVLLWGAVGMCVCQFIVAILGTTTTSQDASGMIIVHNLAAQKAAIAFICFYIFFFAASWGPVAWVVTGEIFPLKVRAKSLSITTASNWLLNWAIAYSTPYLVNYGPGNANLQSKIFFVWGGCCFICIAFVYFMIYETKGLTLEQVDELYEEVSDARKSIGWVPTITFREIREEKKNICVAAALK

SEQ ID NO: 3844 - protein, 490 aa, Comamonas testosteroni
MKQYRNYINGEWVESARRFDDVNPVDGTVVAQVHEADREAVDSAIRAGHAAVRGAWGRTTVAERAAILCRIADEIDRRYDDFLAAEIADTGKPVAMASTIDIPRGAANFRVFADILKTAPLDTFQTDLPDGARALNYAVRKPLGVVGVISPWNLPLLLLTWKIAPALACGNAVVAKPSEETPGTATLLAEVMHTVGVPPGVFNLVHGFGPDSAGEFITTNDDIDAITFTGESRTGSAIMRAAATHVKPVSFELGGKNAAIIFADCDFEKMIDGMMRAVFLHSGQVCLCAERVYVERPIYNRFLDAFVERVKALKLGWPQDGTTGMGPLISAEHRDKVLSYFKLAREEGAQVLVGGGVPKFGDARDAGFWVEPTIITGLPQTARCIKEEVFGPICHVSPFDTEAEAIALANDTKYGLSATTWTGNLNRGHRVSEAMRVGLSWVNSWFLRDLRTPFGGVGLSGIGREGGMHSLNFYSELTNVCVRIDQEAVS

SEQ ID NO: 3845 - protein, 459 aa, Vibrio vulnificus CMCP6
MTQNIKPTHFRSEGDVNTTPARQAWNASMDDESTQALLKRDSEVFLHQAMSTPCLDTLEAAEGIYIQDATGKKYMDFHGNNVHQLGYGHPHVINRVQEQIAKLPFSPRRFTNETAIECAEKLTQICGGELNRVLFAPGGTSAVGMALKLARHITGNYKVVSLWDSFHGASLDAISVGGEACFRQGMGPLMAGVERIPPAVSYRGAFPVADGSDVHYADYLEYVIEKEGGVGAFIAEAVRNTDVQVPSKAYWKRIREICDKHNVMLIIDDIPNGMGRSGEWFTYQAYDIEPDMLCIGKGLGGGLVPIAAMVTKDKYNTAEQISMGHYTHEKSPIGCAAALATMEAIEQEGLLDKVKVDSQFMREKLLEMKAKYPVIGDVRGIGMLWGIELVTDHESKARAYDEAEAVLYQCLNNGVSFKVSQGNVIQLSPPLIITREQLTEALAIFEEAIAKVCKDFNYF

SEQ ID NO: 3846 - protein, 380 aa, Helicobacter pylori 26695
MRMQTKLIHGGISEDATTGAVSVPIYQTSTYRQDAIGRHKGYEYSRSGNPTRFALEELIADLEGGVKGFAFASGLAGIHAVFSLLQSGDHVLLGDDVYGGTFRLFNQVLVKNGLSCTIIDTSDISQIKKAIKPNTKALYLETPSNPLLKITDLAQCASVAKDHGLLTIVDNTFATPYYQNPLLLGADIVAHSGTKYLGGHSDVVAGLVTTNNEALAQEIAFFQNAIGGVLGPQDSWLLQRGIKTLGLRMEAHQKNALCVAEFLEKHPKVERVYYPGLPTHPNYELAKKQMRGFSGMLSFTLKNDSEAVAFVESLKLFILGESLGGVESLVGIPAFMTHACIPKTQREAAGIRDGLVRLSVGIEHEQDLLEDLEQAFAKIG

SEQ ID NO: 3847 - protein, 474 aa, Streptomyces lividans
MLQAHTGYDLAIIGSGAGAFAAAIAARNKGRSVVMVERGTTGGTCVNVGCVPSKALLAAAEARHGAQAASRFPGIQATEPALDFPALISGKDTLVGQLRAEKYTDLAAEYGWQIVHGTATFADGPMLEVALNDGGTATVEAAHYLIATGSAPTAPHIDGLDQVDYLTSTTAMELQQLPEHLLILGGGYVGLEQAQLFARLGSRVTLAVRSRLASREEPEISAGIENIFREEGITVHTRTQLRAVRRDGEGILATLTGPDGDQQVRASHLLIATGRRSVTNGLGLERVGVKTGERGEVVVDEYLRTDNPRIWAAGDVTCHPDFVYVAAAHGTLVADNALDGAERTLDYTALPKVTFTSPAIASVGLTEAQLTEAGIAHQTRTLSLENVPRALVNRDTRGLVKLIAERGTGKLLAAHVLAEGAGDVITAATYAITAGLTVDQLARTWHPYLTMAEALKLAAQTFTSDVAKLSCCAG

SEQ ID NO: 3848 - protein, 190 aa, Agathis dammara
DEHGEVVAEIRRSDLEPYLGLHYPATDIPQASRFLFMQNRVRMICDCRAAPVKVIQAEELKQPLCLVGSTLRAPHGCHAQYMANMGSIASLVMAVVINGNEDEGGGSGSGRGSMKLWGLVVCHHTSPRAVPFPLRYACEFLMQAFGLQLNMELQVAAQLTEKHILRTQTLLCDMLLRDAPIGIVTHSPSI

SEQ ID NO: 3849 - protein, 420 aa, Myxococcus xanthus
MGPVGIEAMNAYCGIARLDVLQLATHRGLDTSRFANLLMEEKTVPLPYEDPVTYGVNAARPILDQLTAAERDSIELLVACTESSFDFGKAMSTYLHQHLGLSRNCRLIELKSACYSGVAGLQMAVNFILSGVSPGAKALVVASDLSRFSIAEGGDASTEDWSFAEPSSGAGAVAMLVSDTPRVFRVDVGANGYYGYEVMDTCRPVADSEAGDADLSLLSYLDCCENAFREYTRRVPAANYAESFGYLAFHTPFGGMVKGAHRTMMRKFSGKNRGDIEADFQRRVAPGLTYCQRVGNIMGATMALSLLGTIDHGDFATAKRIGCFSYGSGCSSEFFSGVVTEEGQQRQRALGLGEALGRRQQLSMPDYDALLKGNGLVRFGTRNAELDFGVVGSIRPGGWGRPLLFLSAIRDFHRDYQWIS

SEQ ID NO: 3850 - protein, 436 aa, Eremothecium gossypii
MLRSTLRVTSRAARPLAASMGRSSAVHAGAAAQAKLYSQIQMGAMHGPALQHLCGLRYASTSVQVPPMAESLTEGSLKEFTKQVGEYIEQDELLATIETDKIDIEVNAPVSGTVTKLNFKPEDTVTVGEELAQIEEGAAPAGGQKPAAKEETSAPQEAAPASPAAKEEKPQAAKPAQAAPAKEQPKQAAAQSSTVSAGASVSGFARTERRVKMNRMRMRIAERLKEAQNTAASLTTFNEVDMSALLEMRKLYKDEILKTKGVKFGFMGLFAKAVALAQKEVPAVTGGIEGDQLVYRDYTDISIAVATPKGLVTPVVRNVESLSVLEIEQEISRLGQKAREGKITLEDMAGGNFTISNGGVFGSLYGTPIINTPQTAVLGLHGVKERPVTVNGQIVSRPMMYLALTYDHRMLDGREGVTFLKTIKELIEDPRKMLLV

SEQ ID NO: 3851 - protein, 190 aa, Angiopteris evecta
DEHGQVVAEIRRLDLQPYLGLHYPATDIPQASRFLFMKNRVRMICDCCAPPVKVIQDKELRLPLSLAGSTLRAPHGCHAQYMATMGSIASLVMAVVVNDNDENSTTRAHQPKNRKLWGLVVCHHTTPRAVPFPLRSACEFLMQVFGLQLNMEVELAAQMREKHILRTQTLLCDMLLRDAPIGIVTQSPNI

SEQ ID NO: 3852 - protein, 483 aa, Saccharomyces cerevisiae
MLSATKQTFRSLQIRTMSTNTKHYDYLVIGGGSGGVASARRAASYGAKTLLVEAKALGGTCVNVGCVPKKVMWYASDLATRVSHANEYGLYQNLPLDKEHLTFNWPEFKQKRDAYVHRLNGIYQKNLEKEKVDVVFGWARFNKDGNVEVQKRDNTTEVYSANHILVATGGKAIFPENIPGFELGTDSDGFFRLEEQPKKVVVVGAGYIGIELAGVFHGLGSETHLVIRGETVLRKFDECIQNTITDHYVKEGINVHKLSKIVKVEKNVETDKLKIHMNDSKSIDDVDELIWTIGRKSHLGMGSENVGIKLNSHDQIIADEYQNTNVPNIYSLGDVVGKVELTPVAIAAGRKLSNRLFGPEKFRNDKLDYENVPSVIFSHPEAGSIGISEKEAIEKYGKENIKVYNSKFTAMYYAMLSEKSPTRYKIVCAGPNEKVVGLHIVGDSSAEILQGFGVAIKMGATKADFDNCVAIHPTSAEELVTMR

SEQ ID NO: 3853 - protein, 513 aa, Camellia sinensis
MASTLGCSATDLVPHLTGVNNATAVADFICGRLDAVSTKLSDTTYAVDTTYLLFSAYLVFAMQLGFAMLCAGSVRAKNTMNIMLTNVLDAAAGGLSYYLFGFAFAFGSGSRSNAFIGHYSFALTGVPSATHDYSFFLYQWAFAIAAAGITSGSIAERTQFVAYLIYSSFLTAFVYPIVSHWVWSGDGWLSASRTSGALLFSSGAIDFAGSGVVHMVGGIAGLWGALIEGPRIGRFDRSGRSVALRGHSASLVVLGSFLLWFGWYGFNPGSFLTILKSYGTAGTYYGQWSAVGRTAVTTTLAGCTAALTTLFGKRLLDGHWNVVDVCNGLLGGFAAITSGCSVVEPWAAIVCGFVSAWVLIGCNKVAEKLKYDDPLEAAQLHGGCGSWGILFTGLFAKKKYVDEVYSAGRPYGLFMGGGGKLLAAQLIEILVIFGWVSVTMGPLFYGLKKLKLLRISREDEMAGMDLTRHGGFAYIYRDEDDLANRPGFMMRKVEPQNSSPTPDHNSSSPAEAV

SEQ ID NO: 3854 - protein, 190 aa, Angiopteris evecta
DEHGEVVAEIRRSDLEPYLGLHYPATDIPQASRFLFMKNRVRMICDCRTPPVRVLQDKELRQPLSLAGSTLRAPHGCHSQYMANMGSIASLVMAVVVNDNDEDSSNRASHQKSRKLWGVVVCHHTTPRAVPFPLRSACEFLTQVFGLQLNMEVELAAQMREKHILRTQTLLCDMLLRDAPIGIVTQSPNI

SEQ ID NO: 3855 - protein, 404 aa, Haemophilus influenzae R2846
MRLFPKSDKLEHVCYDIRGPVHKEALRLEEEGNKILKLNIGNPAPFGFEAPDEILVDVLRNLPSAQGYCDSKGLYSARKAIVQYYQSKGILGATVNDVYIGNGVSELITMAMQALLNDGDEVLVPMPDYPLWTAAVTLSGGKAVHYLCDEEANWFPAIDDIKAKVNAKTKAIVIINPNNPTGAVYSKELLQEIVEIARQNNLIIFADEIYDKILYDGAVHHHIAALAPDLLTVTLNGLSKAYRVAGFRQGWMILNGPKHNAKGYIEGLDMLASMRLCANVPMQHAIQTALGGYQSINEFILPGGRLLEQRNKAYDLITQIPGITCVKPMGAMYMFPKIDVKKFNIRSDEKMVLDLLRQEKVLLVHGKGFNWHSPDHFRVVTLPYVNQLEEAITKLARFLSDYRQ

SEQ ID NO: 3856 - protein, 591 aa, Mycobacterium tuberculosis H37Rv
MSFVIAQPEMIAAAAGELASIRSAINAANAAAAAQTTGVMSAAADEVSTAVAALFSSHAQAYQAASAQAAAFHAQVVRTLTVDAGAYASAEAANAGPNMLAAVNAPAQALLGRPLIGNGANGAPGTGQAGGDGGLLFGNGGNGGSGAPGQAGGAGGAAGFFGNGGNGGDGGAGANGGAGGTAGWFFGFGGNGGAGGIGVAGINGGLGGAGGDGGNAGFFGNGGNGGMGGAGAAGVNAVNPGLATPVTPAANGGNGLNLVGVPGTAGGGADGANGSAIGQAGGAGGDGGNASTSGGIGIAQTGGAGGAGGAGGDGAPGGNGGNGGSVEHTGATGSSASGGNGATGGNGGVGAPGGAGGNGGHVSGGSVNTAGAGGKGGNGGTGGAGGPGGHGGSVLSGPVGDSGNGGAGGDGGAGVSATDIAGTGGRGGNGGHGGLWIGNGGDGGAGGVGGVGGAGAAGAIGGHGGDGGSVNTPIGGSEAGDGGKGGLGGDGGGRGIFGQFGAGGAGGAGGVGGAGGAGGTGGGGGNGGAIFNAGTPGAAGTGGDGGVGGTGAAGGKGGAGGSGGVNGATGADGAKGLDGATGGKGNNGNPG

SEQ ID NO: 3857 - protein, 430 aa, Oryza sativa
MSPSPDLARILPRVLIVSRRTVRKNKFVDFVGEYHLDLIVGYGAVPVIVPRVAGVHTLLDSFEPIHGVLLCEGEDVDPSLYGGGGAGSGGLSAEQLDAVRSLHPSDAGIDHEKDFIELRLARRWLERNIPFLGICRGSQVLNVACGGTLYQDVDHELPAAAAAVRHINYDNYDGHRHPVRVLPGTPLHEWFAESLDGEDSRLTVNSYHHQGVRRLAERFVPMAFAPDGLVEGFYDPDAYNPGEGKFIMGLQFHPERMRKAGSDEFDYPGCPMAYQAFVRAVVAYQEKLAAAAAAMPASPKLNQEMEKQRKVLVRSFSLAKNLYVSGAEAGTPRPAEQRDLDAGAEFLESNTAALSVQQEKRLKQMGATVRNASGYINRLKLNEEREAAARALMAKMSIDQLSDLASFYHIMGTICSEVLDRKLHSAAPAP

SEQ ID NO: 3858 - protein, 78 aa, Glycine max
MAFWTLIKGLLLFANAFAILNEDRFLAPRGWTLEKLHQTGRRNSPKGQIIGLIYACQYMRLPLLLINLVVIAMKIIAG

SEQ ID NO: 3859 - protein, 378 aa, Medicago sativa
MAIHHHHQQHTCSLFDALYCDEEKWEDDEGEVVDEGEQSDVTTTNYDILDSTSLLPLLLLEQNLFNEDEELNTLFSKEKIQQETYYEDLKNVINFDSLSQPRREAVEWMLKVNAHYGFSALTATLAVNYLDRFLLSFHFQKEKPWMIQLVAVTCISLAAKVEETQVPLLLDLQVQDTKYVFEAKTIQRMELLILSTLKWKMHPVTTHSFLDHIIRRLGLKTNLHWEFLRRCENLLLSVLLDSRFVGCVPSVLATATMLHVIDQIEQSDDHGVDYKNQLLNVLKTSKEKVDECYNAILHLTNANNYGHKRKYEEIPGSPSGVIDAVFSSDGSNDSWTVGASSYSTSEPVFKKTKNQGQNMNLSPINRVIVGILATATSP

SEQ ID NO: 3860 - protein, 222 aa, Medicago sativa
MAIHHHHHNHQQLQQHTSSLFDALYCDEEEKWEDDEGEVVDEGEQSDVTTTNYDILDSTSLLPLLLLEQNLFNEDEELNTLFSKEITQQETYYEDLKNVINFDSLSQPRREAVEWMLKVNAHYGFSALTATLAVNYLDRFLLSFHFQKEKPWMIQLVAVTCISLAAKVEETQVPLLLDLQVQDTKYVFEAKTIQRMELLILSTLKWKMHPVTTHSFLDPGNS

SEQ ID NO: 3861 - protein, 325 aa, Arabidopsis thaliana
MATITVVKARQIFDSRGNPTVEVDIHTSNGIKVTAAVPSGASTGIYEALELRDGGSDYLGKGVSKAVGNVNNIIGPALIGKDPTQQTAIDNFMVHELDGTQNEWGWCKQKLGANAILAVSLAVCKAGAVVSGIPLYKHIANLAGNPKIVLPVPAFNVINGGSHAGNKLAMQEFMILPVGAASFKEAMKMGVEVYHHLKSVIKKKYGQDATNVGDEGGFAPNIQENKEGLELLKTAIEKAGYTGKVVIGMDVAASEFYSEDKTYDLNFKEENNNGSQKISGDALKDLYKSFVAEYPIVSIEDPFDQDDWEHYAKMTTECGTEVQIR

SEQ ID NO: 3862 - protein, 398 aa, Streptococcus pneumoniae TIGR4
MAKLTVKDVDLKGKKVLVRVDFNVPLKDGVITNDNRITAALPTIKYIIEQGGRAILFSHLGRVKEEADKAGKSLAPVAADLAAKLGQDVVFPGVTRGAELEAAINALEDGQVLLVENTRYEDVDGKKESKNDPELGKYWASLGDGIFVNDAFGTAHRAHASNVGISANVEKAVAGFLLENEIAYIQEAVETPERPFVAILGGSKVSDKIGVIENLLEKADNVLIGGGMTYTFYKAQGIEIGNSLVEEDKLDVAKALLEKANGKLILPVDSKEANAFAGYTEVRDTEGEAVSEGFLGLDIGPKSIAKFDEALTGAKTVVWNGPMGVFENPDFQAGTIGVMDAIVKQPGVKSIIGGGDSAAAAINLGRADKFSWISTGGGASMELLEGKVLPGLAALTEK

SEQ ID NO: 3863 - protein, 543 aa, Arabidopsis thaliana
MRRFVIGQAKNLIDQSRRRQLHHHKNLSFVSLIPPFSAPSDSSSRHLSSSSSSDMSASDSSSSLPVTLDTINPKVIKCEYAVRGEIVNIAQKLQEDLKTNKDAYPFDEIIYCNIGNPQSLGQQPITFFREVLALCSYTALLDESATHGLFSSDSIERAWKILDQIPGRATGAYSHSQGIKGLRDAIADGIEARDGFPADPNDIFMTDGASPGVHMMMQLLITSEKDGILCPIPQYPLYSASIALHGGTLVPYYLDEASGWGLEISELKKQLEDARSKGITVRALAVINPGNPTGQVLSEENQRDVVNFCKQEGLVLLADEVYQENVYVPDKKFHSFKKVARSMGYGEKDLALVSFQSVSKGYYGECGKRGGYMEVTGFTSDVREQIYKMASVNLCSNISGQILASLIMSPPKPGDDSYESYIAEKDGILSSLARRAKTLEEALNKLEGVTCNRAEGAMYLFPCLHLPQKAIAAAEAEKTAPDNFYCKRLLKATGIVVVPGSGFRQVPGTWHFRCTILPQEDKIPAIVDRLTAFHQSFMDEFRD

SEQ ID NO: 3864 - protein, 136 aa, Triticum aestivum
MCGGAIIYDYIPAHRRRVSTADFWPDADHSDAHSAAPDKAPRAKRGRTNQYRGIRQRPWGKWAAEIRDPVKGVRVWLGTYPTAEAAARAYDRAARRIRGAKAKVNFPNEILVGAPAHEAPCTMAAVLPSPKKEEEP

SEQ ID NO: 3865 - protein, 389 aa, Anabaena variabilis ATCC 29413
MKAVCWYGANEVRVENVPDPKILNPRDAIIKITSTAICGSDLHIYGGYIPTVQQGDIIGHEFMGEVVEVGSGVDNLKIGDRVVVPSTIGCGRCHYCEHDMWSLCDNSNTKGWLEEKLYGNITSAIYGYSHLLGGYAGAQAEYIRVPFADVGVVKVPPDLPDEMLLFISDAIPTGYMGAEMCDIQPGDTVAVWGCGAVGQFAMISAYMMGAEKVIAIDRFPERLEMARKYAKAEVINYEEVNAGEALKEMTGGRGPDACIDAVGLEAHGVGLEDFYDQTKQKLKLESDRPHVLREMMVACRKGGTLSIMGVYGGFVDKIPFGAAFNKGLTFRMGQMHGQKYMNLLLQLILDGKLDPSFVVSHQLPLEQAPFGYHIFQQKKDNCTKVVLKP

SEQ ID NO: 3866 - protein, 535 aa, Candida albicans SC5314
MSAEEVIQYISRRKLFTENNEYNESYLLLFTIASSMIWIMIPGLAFLYSGLARRKSALSMIWIVIMSSFVGIFQWYFWGYSLAFSDTSKNSFIGDLHFFGFKNLLGASDDKTTYPDIAYSLFQLQFLLVTLAIIAGGCIAERGRFLPALVFMFCWATVVYCPVVYWIWGGGWASSYRSGALDYAGGGPVEILSGMSAFVYSAFLGRRNETLMINYRPHNISTIFLGTSLLYVGWLFFNGFSCGNPSLKVAYSMMNTHLCGAFGAISWCLLDFRLENKWSMVAVCSGCISGLVAATPSSGMIPLWASVILGITAGIVCNLSTKIKYLLHVDDSLDVWAEHGMAGVVGLIFNALFGSATVIGYDGVTDHQGGWIDHNWKQLYIQIVYILATMAYSGVVTAILCFVINKIPGLHLRIDYNGEEAGVDEDQIGEFAYDYVEVRRDFLDWGIPTVNPTYQNSINDHQQQQQPEVPEITSQQKRVGGGLSGIEETEEKQVQGIPIKRQTQIIDGTTTQSNSDTTSNTSIQEKHDPVEYRPS

SEQ ID NO: 3867 - protein, 340 aa, Capsicum annuum
MGHHCCSKQKVKRGLWSPEEDEKLIKHITTHGHSCWSSVPKLAGLQRCGKSCRLRWINYLRPDLKRGCFSEQEERIIIDVHRILGNKWAQIAKHLPGRTDNEVKNFWNSCIKKKLISQGFDPNTHNLLSRAAAAATPPHRNNKKKTNNNHTTSSVFTIETSLSPSSTKELVSMDMIKASLAALSPFPHTNSSTTVLTMPQFQTSWSHLYESACNYYNHVPIKTNIVYQNHSTSTGTFGIINENCMWGVTGFEPHHEFGPSNNIGHEEMQQGAQVQLQEENCLEEVYKVNDLHEFNKHGRIAENVTFDDSSDFDFEFVDSELIPCGIYTNVNSIDQLAWDC

SEQ ID NO: 3868 - protein, 392 aa, Anabaena variabilis ATCC 29413
MKAVCWHGTNDVRVETVPDPKILNPRDAIIKITSTAICGSDLHIYNGYIPTMQSGDILGHEFMGEVVELGSAVKNVKVGDRVVVPFTISCGSCFFCQRDLWSLCDNSNPNAWMVELQMGHSPAGLFGYSHLFGGYAGGQAEYARVPFADVGLLKIPDNLPDEQVLFLTDIFPTGYMAAENCNIKPGDIVAVWGCGPVGQFAIKSAYMLGAERVIAFDRIPERLQMAKEQCNAEVLNYEEVNIGEALKEMTGGRGPDACIDAVGMEAHGTDLMAFYDQVKQAVRLETDRPTALRQVIVSAAKGGHVSLAGVYGGFLDKIPMGSAMNKGLTFKMGQTHVHKYLRPLLERIQNGEIDTSFVITHTLPLEQAPHGYEIFKHKKDNCIKVVLKPSGN

SEQ ID NO: 3869 - protein, 288 aa, Solanum demissum
MVGSVNIDQQGKGGYVSDEVLGTFLPIVVYWVYSGLYLMLGNMDNYRLHSKKDEDEKNLVSKKEVVKGVLLQQIVQAAVATVLFALGLLSLDSTNALLWFPFTLVTGDDGESGGDRHTSIFVLGRQLFIAMLMLDTWQYFMHRYMHQNKFLYKHIHAQHHRLIVPYAFGALYNHPLEGLILDTIGGALAFLVSGMSPRTSIFFFSFATIKTVDDHCGLWLPGNLFHIFFKNNSAYHDIHHQLYGTKYNYSQPFFVTWDMILGTYMPYELERRPEGGFEAKPVKDCKEH

(The sequence listing continues in the following parts.)

We claim:

1. A plant cell with stably integrated, recombinant DNA comprising a promoter that is functional in plant cells and that is operably linked to DNA from a plant, bacteria or yeast that encodes a protein having at least one domain of amino acids in a sequence that exceeds the Pfam gathering cutoff of 16.9 for amino acid sequence alignment with a protein domain family identified by Pfam name, RNA_pol_L; wherein said plant cell is selected from a population of plant cells with said recombinant DNA by screening plants that are regenerated from plant cells in said population and that express said protein for an enhanced trait as compared to control plants that do not have said recombinant DNA; and wherein said enhanced trait is selected from group of enhanced traits consisting of enhanced water use efficiency, enhanced cold tolerance, increased yield, enhanced nitrogen use efficiency, enhanced seed protein and enhanced seed oil.

2. A plant cell with stably integrated, recombinant DNA comprising a promoter that is functional in plant cells and that is operably linked to DNA from a plant, bacteria or yeast that encodes a protein having at least one domain of amino acids in a sequence that exceeds the Pfam gathering cutoff for amino acid sequence alignment with a protein domain family identified by a Pfam name in the group of Pfam names consisting of 2-oxoacid_dh, ADH_N, ADH_zinc_N, AP2, AUX_IAA, Aa_trans, Abhydrolase_{—}1, Acyl_transf_{—}1, Aldedh, Aldo_ket_red, Alpha-amylase, Aminotran_{—}1_{—}2, Aminotran_{—}3, Ammonium_transp, Arm, Asn_synthase, BAG, BSD, Beta_elim_lyase, Biotin_lipoyl, Brix, Bromodomain, C1_{—}4, CTP_transf_{—}2, Catalase, CcmH, Chal_sti_synt_C, Cyclin_C, Cyclin_N, Cys_Met_Meta_PP, DAO, DIM1, DPBB_{—}1, DRMBL, DUF167, DUF231, DUF250, DUF6, DUF783, DUF962, E2F_TDP, E3_binding, EBP, Enolase_C, Enolase_N, F420_oxidored, FAD_binding_{—}2, FA_desaturase, FKBP_C, FTCD_N, Fe_bilin_red, Fer4, GAF, GATase_{—}2, GIDA, GSHPx, Gpi16, HGTP_anticodon, HI0933_like, HLH, HMG_CoA_synt, HWE_HK, Hamlp_like, HhH-GPD, Homeobox, Hpt, Iso_dh, K-box, LEA_{—}4, LRRNT_{—}2, LRR_{—}1, Ldh_{—}1_C, Ldh_{—}1_N, Lectin_legA, Lectin_legB, Lipase_GDSL, MFS_{—}1, MIP, MatE, Metalloenzyme, Methyltransf_{—}1, Methyltransf_{—}12, Molybdop_Fe4S4, Molybdopterin, Molydop_binding, Mov34, MtN3_slv, Myb_DNA-binding, NAD_Gly3P_dh_N, NAD_binding_{—}2, NIR_SIR, NIR_SIR_ferr, NPH3, NTP_transferase, Nuc_sug_transp, PA, PAR1, PFK, PGI, PGK, PGM_PMM_I, PGM_PMM_II, PGM_PMM_III, PGM_PMM_IV, PP2C, PTR2, Peptidase_C26, Phi_{—}1, Phytochrome, Pkinase, Pkinase_Tyr, Pollen_allerg_{—}1, Pribosyltran, Proteasome, Pyr_redox, Pyr_redox_{—}2, Pyr_redox_dim, RNA_pol_L, RNA_pol_Rpb6, RRM_{—}1, RRN3, Radical_SAM, Ras, Response_reg, Rhodanese, Ribosomal_S8e, Rieske, SAC3_GANP, SBDS, SET, SRF-TF, SURF5, Skp1, Skp1_POZ, Ssl1, Sterol_desat, Sugar_tr, TCP, ThiF, Transaldolase, UQ_con, Ubie_methyltran, WD40, WRKY, adh_short, bZIP_{—}1, bZIP_{—}2, cNMP_binding, iPGM_N, p450, tRNA-synt_{—}2b, ubiquitin, zf-A20, zf-AN1, zf-B_box, zf-C₂H₂, zf-C3HC4, zf-CCCH wherein the Pfam gathering cuttoff for said protein domain families is stated in Table 16; wherein said plant cell is selected from a population of plant cells with said recombinant DNA by screening plants that are regenerated from plant cells in said population and that express said protein for an enhanced trait as compared to control plants that do not have said recombinant DNA; and wherein said enhanced trait is selected from group of enhanced traits consisting of enhanced water use efficiency, enhanced cold tolerance, enhanced heat tolerance, enhanced resistance to salt exposure, enhanced shade tolerance, increased yield, enhanced nitrogen use efficiency, enhanced seed protein and enhanced seed oil.

3. A plant cell of claim 2 wherein said protein has an amino acid sequence with at least 90% identity to a consensus amino acid sequence in the group of consensus amino acid sequences consisting of the consensus amino acid sequence constructed for SEQ ID NO: 205 and homologs thereof listed in Table 2 through the consensus amino acid sequence constructed for SEQ ID NO:408 and homologs thereof listed in Table 2.

4. A plant cell of claim 2 wherein said protein is selected from the group of proteins identified in Table 1.

5. A plant cell of claim 2 further comprising DNA expressing a protein that provides tolerance from exposure to an herbicide applied at levels that are lethal to a wild type of said plant cell.

6. A plant cell of claim 5 wherein the agent of said herbicide is a glyphosate, dicamba, or glufosinate compound.

7. A transgenic plant comprising a plurality of the plant cells of claim 2.

8. A transgenic plant of claim 7 which is homozygous for said recombinant DNA.

9. A transgenic seed comprising a plurality of the plant cell of claim 2.

10. A transgenic seed of claim 9 from a corn, soybean, cotton, canola, alfalfa, wheat or rice plant.

11. Non-natural, transgenic corn seed of claim 10 wherein said seed can produce corn plants that are resistant to disease from the Mal de Rio Cuarto virus or the Puccina sorghi fungus or both.

12. A transgenic pollen grain comprising a haploid derivative of a plant cell of claim 2.

13. A method for manufacturing non-natural, transgenic seed that can be used to produce a crop of transgenic plants with an enhanced trait resulting from expression of stably-integrated, recombinant DNA comprising a promoter that is (a) functional in plant cells and (b) is operably linked to DNA from a plant, bacteria or yeast that encodes a protein having at least one domain of amino acids in a sequence that exceeds the Pfam gathering cutoff for amino acid sequence alignment with a protein domain family identified by a Pfam name in the group of Pfam names consisting of 2-oxoacid_dh, ADH_N, ADH_zinc_N, AP2, AUX_IAA, Aa_trans, Abhydrolase_{—}1, Acyl_transf_{—}1, Aldedh, Aldo_ket_red, Alpha-amylase, Aminotran_{—}1_{—}2, Aminotran_{—}3, Ammonium_transp, Arm, Asn_synthase, BAG, BSD, Beta_elim_lyase, Biotin_lipoyl, Brix, Bromodomain, C1_{—}4, CTP_transf_{—}2, Catalase, CcmH, Chal_sti_synt_C, Cyclin_C, Cyclin_N, Cys_Met_Meta_PP, DAO, DIM1, DPBB_{—}1, DRMBL, DUF167, DUF231, DUF250, DUF6, DUF783, DUF962, E2F_TDP, E3_binding, EBP, Enolase_C, Enolase_N, F420_oxidored, FAD_binding_{—}2, FA_desaturase, FKBP_C, FTCD_N, Fe_bilin_red, Fer4, GAF, GATase_{—}2, GIDA, GSHPx, Gpi16, HGTP_anticodon, HI0933_like, HLH, HMG_CoA_synt, HWE_HK, Hamlp_like, HhH-GPD, Homeobox, Hpt, Iso_dh, K-box, LEA_{—}4, LRRNT_{—}2, LRR_{—}1, Ldh_{—}1_C, Ldh_{—}1_N. Lectin_legA, Lectin_legB, Lipase_GDSL, MFS_{—}1, MIP, MatE, Metalloenzyme, Methyltransf_{—}11, Methyltransf_{—}12, Molybdop_Fe4S4, Molybdopterin, Molydop_binding, Mov34, MtN3_slv, Myb_DNA-binding, NAD_Gly3P_dh_N, NAD_binding_{—}2, NIR_SIR, NIR_SIR_ferr, NPH3, NTP_transferase, Nuc_sug_transp, PA, PAR1, PFK, PGI, PGK, PGM_PMM_I, PGM_PMM_II, PGM_PMM_III, PGM_PMM_IV, PP2C, PTR2, Peptidase_C26, Phi_{—}1, Phytochrome, Pkinase, Pkinase_Tyr, Pollen_allerg_{—}1, Pribosyltran, Proteasome, Pyr_redox, Pyr_redox_{—}2, Pyr_redox_dim, RNA_pol_L, RNA_pol_Rpb6, RRM_{—}1, RRN3, Radical_SAM, Ras, Response_reg, Rhodanese, Ribosomal_S8e, Rieske, SAC3_GANP, SBDS, SET, SRF-TF, SURF5, Skp1, Skp1_POZ, Ssl1, Sterol_desat, Sugar_tr, TCP, ThiF, Transaldolase, UQ_con, Ubie_methyltran, WD40, WRKY, adh_short, bZIP_{—}1, bZIP_{—}2, cNMP_binding, iPGM_N, p450, tRNA-synt_{—}2b, ubiquitin, zf-A20, zf-AN1, zf-B_box, zf-C₂H₂, zf-C3HC4, zf-CCCH; wherein the gathering cutoff for said protein domain families is stated in Table 16; and wherein said enhanced trait is selected from the group of enhanced traits consisting of enhanced traits consisting of enhanced water use efficiency, enhanced cold tolerance, enhanced heat tolerance, enhanced resistance to salt exposure, enhanced shade tolerance, increased yield, enhanced nitrogen use efficiency, enhanced seed protein and enhanced seed oil, said method for manufacturing said seed comprising:
(a) screening a population of plants for said enhanced trait and said recombinant DNA, wherein individual plants in said population can exhibit said trait at a level less than, essentially the same as or greater than the level that said trait is exhibited in control plants which do not express the recombinant DNA,
(b) selecting from said population one or more plants that exhibit the trait at a level greater than the level that said trait is exhibited in control plants,
(c) verifying that said recombinant DNA is stably integrated in said selected plants,
(d) analyzing tissue of a selected plant to determine the production of a protein having the function of a protein encoded by nucleotides in a sequence of one of SEQ ID NO:205-408; and
(e) collecting seed from a selected plant.

14. A method of claim 13 wherein plants in said population further comprise DNA expressing a protein that provides tolerance to exposure to an herbicide applied at levels that are lethal to wild type plant cells, and wherein said selecting is effected by treating said population with said herbicide.

15. A method of claim 14 wherein said herbicide comprises a glyphosate, dicamba, or glufosinate compound.

16. A method of claim 13 wherein said selecting is effected by identifying plants with said enhanced trait.

17. A method of claim 14 wherein said seed is corn, soybean, cotton, alfalfa, wheat or rice seed.

18. A method of producing hybrid corn seed comprising:
(a) acquiring hybrid corn seed from a herbicide tolerant corn plant which also has stably-integrated, recombinant DNA comprising a promoter that is (a) functional in plant cells and (b) is operably linked to DNA that encodes a protein having at least one domain of amino acids in a sequence that exceeds the Pfam gathering cutoff for amino acid sequence alignment with a protein domain family identified by a Pfam name in the group of Pfam names consisting of 2-oxoacid_dh, ADH_N, ADH_zinc_N, AP2, AUX_IAA, Aa_trans, Abhydrolase_{—}1, Acyl_transf_{—}1, Aldedh, Aldo_ket_red, Alpha-amylase, Aminotran_{—}1_{—}2, Aminotran_{—}3, Ammonium_transp, Arm, Asn_synthase, BAG, BSD, Beta_elim_lyase, Biotin_lipoyl, Brix, Bromodomain, C1_{—}4, CTP_transf_{—}2, Catalase, CcmH, Chal_sti_synt_C, Cyclin_C, Cyclin_N, Cys_Met_Meta_PP, DAO, DIM1, DPBB_{—}1, DRMBL, DUF167, DUF231, DUF250, DUF6, DUF783, DUF962, E2F_TDP, E3_binding, EBP, Enolase_C, Enolase_N, F420_oxidored, FAD_binding_{—}2, FA_desaturase, FKBP_C, FTCD_N, Fe_bilin_red, Fer4, GAF, GATase_{—}2, GIDA, GSHPx, Gpi16, HGTP_anticodon, HI0933_like, HLH, HMG_CoA_synt, HWE_HK, Hamlp_like, HhH-GPD, Homeobox, Hpt, Iso_dh, K-box, LEA_{—}4, LRRNT_{—}2, LRR_{—}1, Ldh_{—}1_C, Ldh_{—}1_N, Lectin_legA, Lectin_legB, Lipase_GDSL, MFS_{—}1, MIP, MatE, Metalloenzyme, Methyltransf_{—}11, Methyltransf_{—}12, Molybdop_Fe4S4, Molybdopterin, Molydop_binding, Mov34, MtN3_slv, Myb_DNA-binding, NAD_Gly3P_dh_N, NAD_binding_{—}2, NIR_SIR, NIR_SIR_ferr, NPH3, NTP_transferase, Nuc_sug_transp, PA, PAR1, PFK, PGI, PGK, PGM_PMM_I, PGM_PMM_II, PGM_PMM_II, PGM_PMM_IV, PP2C, PTR2, Peptidase_C26, Phi_{—}1, Phytochrome, Pkinase, Pkinase_Tyr, Pollen_allerg_{—}1, Pribosyltran, Proteasome, Pyr_redox, Pyr_redox_{—}2, Pyr_redox_dim, RNA_pol_L, RNA_pol_Rpb6, RRM_{—}1, RRN3, Radical_SAM, Ras, Response_reg, Rhodanese, Ribosomal_S8e, Rieske, SAC3_GANP, SBDS, SET, SRF-TF, SURF5, Skp1, Skp1_POZ, Ssl1, Sterol_desat, Sugar_tr, TCP, ThiF, Transaldolase, UQ_con, Ubie_methyltran, WD40, WRKY, adh_short, bZIP_{—}1, bZIP_{—}2, cNMP_binding, iPGM_N, p450, tRNA-synt_{—}2b, ubiquitin, zf-A20, zf-AN1, zf-B_box, zf-C₂H₂, zf-C3HC4, zf-CCCH; wherein the gathering cuttoff for said protein domain families is stated in Table 16;
(b) producing corn plants from said hybrid corn seed, wherein a fraction of the plants produced from said hybrid corn seed is homozygous for said recombinant DNA, a fraction of the plants produced from said hybrid corn seed is hemizygous for said recombinant DNA, and a fraction of the plants produced from said hybrid corn seed has none of said recombinant DNA;
(c) selecting corn plants which are homozygous and hemizygous for said recombinant DNA by treating with an herbicide;
(d) collecting seed from herbicide-treated-surviving corn plants and planting said seed to produce further progeny corn plants;
(e) repeating steps (c) and (d) at least once to produce an inbred corn line;
(f) crossing said inbred corn line with a second corn line to produce hybrid seed.

19. The method of selecting a plant comprising cells of claim 1 or 2 wherein an immunoreactive antibody is used to detect the presence of said protein in seed or plant tissue.

20. Anti-counterfeit milled seed having, as an indication of origin, a plant cell of claim 1 or 2.

21. A method of growing a corn, cotton or soybean crop without irrigation water comprising planting seed having plant cells of claim 1 or 2 which are selected for enhanced water use efficiency.

22. A method of claim 21 comprising providing up to 300 millimeters of ground water during the production of said crop.

22. A method of growing a corn, cotton or soybean crop without added nitrogen fertilizer comprising planting seed having plant cells of claim 1 or 2 which are selected for enhanced nitrogen use efficiency.

23. A plant cell with stably integrated, recombinant DNA that is to suppress the level of an endogenous protein having at least one domain of amino acids in a sequence that exceeds that Pfam gathering cutoff for amino acid sequence alignment with a protein domain family identified by Pfam name in the group of Pfam names consisting of Catalase, Bromodomain, FTCD_N, MatE, DPBB_{—}1, Pollen_allerg_{—}1, tRNA-synt_{—}2b, HGTP_anticodon, Sugar_tr, MFS_{—}1, DUF6, DUF250, LEA_{—}4, MIP, and DUF231 wherein the Pfam gathering cutoff for said protein domain families is stated in Table 16; wherein said plant cells is selected from a population of plant cells with said recombinant DNA by screening plants that are regenerated from plant cells in said population and that the level of said protein is suppressed for an enhanced trait as compared to control plants that do not have said recombinant DNA; and wherein said enhanced trait is selected from the group of enhanced traits consisting of enhanced water use efficiency, enhanced cold tolerance, enhanced heat tolerance, enhanced resistance to salt exposure, enhanced shade tolerance, increased yield, enhanced nitrogen use efficiency, enhanced seed protein and enhanced seed oil.
